United States Patent Application Publication US 2018/0305689 A1 - sequence listing, part 91

SEQ ID NO: 1272663 - RNA, 19 nt, Artificial Sequence
  Description of Artificial Sequence: Synthetic oligonucleotide
  Antisense strand to SEQ ID NO: 1272662
uuugaucuggacaggagca

SEQ ID NO: 1272664 - RNA, 19 nt, Artificial Sequence
  Description of Artificial Sequence: Synthetic oligonucleotide
  Sense strand starting at position 383 of SEQ ID NO: 1241441
aaacguaacuguuacaaag

SEQ ID NO: 1272665 - RNA, 19 nt, Artificial Sequence
  Description of Artificial Sequence: Synthetic oligonucleotide
  Antisense strand to SEQ ID NO: 1272664
cuuuguaacaguuacguuu

SEQ ID NO: 1272666 - RNA, 19 nt, Artificial Sequence
  Description of Artificial Sequence: Synthetic oligonucleotide
  Sense strand starting at position 424 of SEQ ID NO: 1241441
uaaaguugguccuugcuaa

SEQ ID NO: 1272667 - RNA, 19 nt, Artificial Sequence
  Description of Artificial Sequence: Synthetic oligonucleotide
  Antisense strand to SEQ ID NO: 1272666
uuagcaaggaccaacuuua

SEQ ID NO: 1272668 - RNA, 19 nt, Artificial Sequence
  Description of Artificial Sequence: Synthetic oligonucleotide
  Sense strand starting at position 425 of SEQ ID NO: 1241441
aaaguugguccuugcuaau

SEQ ID NO: 1272669 - RNA, 19 nt, Artificial Sequence
  Description of Artificial Sequence: Synthetic oligonucleotide
  Antisense strand to SEQ ID NO: 1272668
auuagcaaggaccaacuuu

SEQ ID NO: 1272670 - RNA, 19 nt, Artificial Sequence
  Description of Artificial Sequence: Synthetic oligonucleotide
  Sense strand starting at position 531 of SEQ ID NO: 1241441
auaagagauuauggaaacu

SEQ ID NO: 1272671 - RNA, 19 nt, Artificial Sequence
  Description of Artificial Sequence: Synthetic oligonucleotide
  Antisense strand to SEQ ID NO: 1272670
aguuuccauaaucucuuau

SEQ ID NO: 1272672 - RNA, 19 nt, Artificial Sequence
  Description of Artificial Sequence: Synthetic oligonucleotide
  Sense strand starting at position 619 of SEQ ID NO: 1241441
ugauuaagggauugugaug

SEQ ID NO: 1272673 - RNA, 19 nt, Artificial Sequence
  Description of Artificial Sequence: Synthetic oligonucleotide
  Antisense strand to SEQ ID NO: 1272672
caucacaaucccuuaauca

SEQ ID NO: 1272674 - RNA, 19 nt, Artificial Sequence
  Description of Artificial Sequence: Synthetic oligonucleotide
  Sense strand starting at position 624 of SEQ ID NO: 1241441
aagggauugugauggcaau

SEQ ID NO: 1272675 - RNA, 19 nt, Artificial Sequence
  Description of Artificial Sequence: Synthetic oligonucleotide
  Antisense strand to SEQ ID NO: 1272674
auugccaucacaaucccuu

SEQ ID NO: 1272676 - RNA, 19 nt, Artificial Sequence
  Description of Artificial Sequence: Synthetic oligonucleotide
  Sense strand starting at position 625 of SEQ ID NO: 1241441
agggauugugauggcaauu

SEQ ID NO: 1272677 - RNA, 19 nt, Artificial Sequence
  Description of Artificial Sequence: Synthetic oligonucleotide
  Antisense strand to SEQ ID NO: 1272676
aauugccaucacaaucccu

SEQ ID NO: 1272678 - RNA, 19 nt, Artificial Sequence
  Description of Artificial Sequence: Synthetic oligonucleotide
  Sense strand starting at position 773 of SEQ ID NO: 1241441
uuugaccaguuccaaagau

SEQ ID NO: 1272679 - RNA, 19 nt, Artificial Sequence
  Description of Artificial Sequence: Synthetic oligonucleotide
  Antisense strand to SEQ ID NO: 1272678
aucuuuggaacuggucaaa

SEQ ID NO: 1272680 - RNA, 19 nt, Artificial Sequence
  Description of Artificial Sequence: Synthetic oligonucleotide
  Sense strand starting at position 799 of SEQ ID NO: 1241441
gaucuagaaugagaagaaa

SEQ ID NO: 1272681 - RNA, 19 nt, Artificial Sequence
  Description of Artificial Sequence: Synthetic oligonucleotide
  Antisense strand to SEQ ID NO: 1272680
uuucuucucauucuagauc

SEQ ID NO: 1272682 - RNA, 19 nt, Artificial Sequence
  Description of Artificial Sequence: Synthetic oligonucleotide
  Sense strand starting at position 847 of SEQ ID NO: 1241441
cugucaaaggacugggauu

SEQ ID NO: 1272683 - RNA, 19 nt, Artificial Sequence
  Description of Artificial Sequence: Synthetic oligonucleotide
  Antisense strand to SEQ ID NO: 1272682
aaucccaguccuuugacag

SEQ ID NO: 1272684 - RNA, 19 nt, Artificial Sequence
  Description of Artificial Sequence: Synthetic oligonucleotide
  Sense strand starting at position 973 of SEQ ID NO: 1241441
gcacauuaaucagugagac

SEQ ID NO: 1272685 - RNA, 19 nt, Artificial Sequence
  Description of Artificial Sequence: Synthetic oligonucleotide
  Antisense strand to SEQ ID NO: 1272684
gucucacugauuaaugugc

SEQ ID NO: 1272686 - RNA, 19 nt, Artificial Sequence
  Description of Artificial Sequence: Synthetic oligonucleotide
  Sense strand starting at position 983 of SEQ ID NO: 1241441
cagugagacuccuaaaggu

SEQ ID NO: 1272687 - RNA, 19 nt, Artificial Sequence
  Description of Artificial Sequence: Synthetic oligonucleotide
  Antisense strand to SEQ ID NO: 1272686
accuuuaggagucucacug

SEQ ID NO: 1272688 - RNA, 19 nt, Artificial Sequence
  Description of Artificial Sequence: Synthetic oligonucleotide
  Sense strand starting at position 998 of SEQ ID NO: 1241441
agguacaacuucugagaua

SEQ ID NO: 1272689 - RNA, 19 nt, Artificial Sequence
  Description of Artificial Sequence: Synthetic oligonucleotide
  Antisense strand to SEQ ID NO: 1272688
uaucucagaaguuguaccu

SEQ ID NO: 1272690 - RNA, 19 nt, Artificial Sequence
  Description of Artificial Sequence: Synthetic oligonucleotide
  Sense strand starting at position 1057 of SEQ ID NO: 1241441
gcaacugagccuugaguuc

SEQ ID NO: 1272691 - RNA, 19 nt, Artificial Sequence
  Description of Artificial Sequence: Synthetic oligonucleotide
  Antisense strand to SEQ ID NO: 1272690
gaacucaaggcucaguugc

SEQ ID NO: 1272692 - RNA, 19 nt, Artificial Sequence
  Description of Artificial Sequence: Synthetic oligonucleotide
  Sense strand starting at position 1089 of SEQ ID NO: 1241441
ggacuugugagccagcuca

SEQ ID NO: 1272693 - RNA, 19 nt, Artificial Sequence
  Description of Artificial Sequence: Synthetic oligonucleotide
  Antisense strand to SEQ ID NO: 1272692
ugagcuggcucacaagucc

SEQ ID NO: 1272694 - RNA, 19 nt, Artificial Sequence
  Description of Artificial Sequence: Synthetic oligonucleotide
  Sense strand starting at position 1181 of SEQ ID NO: 1241441
guggcaaggucccugauuu

SEQ ID NO: 1272695 - RNA, 19 nt, Artificial Sequence
  Description of Artificial Sequence: Synthetic oligonucleotide
  Antisense strand to SEQ ID NO: 1272694
aaaucagggaccuugccac

SEQ ID NO: 1272696 - RNA, 19 nt, Artificial Sequence
  Description of Artificial Sequence: Synthetic oligonucleotide
  Sense strand starting at position 2593 of SEQ ID NO: 1241441
cgggcucugucauucucaa

SEQ ID NO: 1272697 - RNA, 19 nt, Artificial Sequence
  Description of Artificial Sequence: Synthetic oligonucleotide
  Antisense strand to SEQ ID NO: 1272696
uugagaaugacagagcccg

SEQ ID NO: 1272698 - RNA, 19 nt, Artificial Sequence
  Description of Artificial Sequence: Synthetic oligonucleotide
  Sense strand starting at position 2679 of SEQ ID NO: 1241441
guccguuuccugggagagu

SEQ ID NO: 1272699 - RNA, 19 nt, Artificial Sequence
  Description of Artificial Sequence: Synthetic oligonucleotide
  Antisense strand to SEQ ID NO: 1272698
acucucccaggaaacggac

SEQ ID NO: 1272700 - RNA, 19 nt, Artificial Sequence
  Description of Artificial Sequence: Synthetic oligonucleotide
  Sense strand starting at position 2728 of SEQ ID NO: 1241441
ccucauugggugcgugaga

SEQ ID NO: 1272701 - RNA, 19 nt, Artificial Sequence
  Description of Artificial Sequence: Synthetic oligonucleotide
  Antisense strand to SEQ ID NO: 1272700
ucucacgcacccaaugagg

SEQ ID NO: 1272702 - RNA, 19 nt, Artificial Sequence
  Description of Artificial Sequence: Synthetic oligonucleotide
  Sense strand starting at position 2729 of SEQ ID NO: 1241441
cucauugggugcgugagaa

SEQ ID NO: 1272703 - RNA, 19 nt, Artificial Sequence
  Description of Artificial Sequence: Synthetic oligonucleotide
  Antisense strand to SEQ ID NO: 1272702
uucucacgcacccaaugag

SEQ ID NO: 1272704 - RNA, 19 nt, Artificial Sequence
  Description of Artificial Sequence: Synthetic oligonucleotide
  Sense strand starting at position 3032 of SEQ ID NO: 1241441
ggcccauugggauguucau

SEQ ID NO: 1272705 - RNA, 19 nt, Artificial Sequence
  Description of Artificial Sequence: Synthetic oligonucleotide
  Antisense strand to SEQ ID NO: 1272704
augaacaucccaaugggcc

SEQ ID NO: 1272706 - RNA, 19 nt, Artificial Sequence
  Description of Artificial Sequence: Synthetic oligonucleotide
  Sense strand starting at position 3201 of SEQ ID NO: 1241441
ugggaacgcugccaugaau

SEQ ID NO: 1272707 - RNA, 19 nt, Artificial Sequence
  Description of Artificial Sequence: Synthetic oligonucleotide
  Antisense strand to SEQ ID NO: 1272706
auucauggcagcguuccca

SEQ ID NO: 1272708 - RNA, 19 nt, Artificial Sequence
  Description of Artificial Sequence: Synthetic oligonucleotide
  Sense strand starting at position 3220 of SEQ ID NO: 1241441
ugggcuuggucugucugaa

SEQ ID NO: 1272709 - RNA, 19 nt, Artificial Sequence
  Description of Artificial Sequence: Synthetic oligonucleotide
  Antisense strand to SEQ ID NO: 1272708
uucagacagaccaagccca

SEQ ID NO: 1272710 - RNA, 19 nt, Artificial Sequence
  Description of Artificial Sequence: Synthetic oligonucleotide
  Sense strand starting at position 3250 of SEQ ID NO: 1241441
uuucgacaauccuuagacu

SEQ ID NO: 1272711 - RNA, 19 nt, Artificial Sequence
  Description of Artificial Sequence: Synthetic oligonucleotide
  Antisense strand to SEQ ID NO: 1272710
agucuaaggauugucgaaa

SEQ ID NO: 1272712 - RNA, 19 nt, Artificial Sequence
  Description of Artificial Sequence: Synthetic oligonucleotide
  Sense strand starting at position 3251 of SEQ ID NO: 1241441
uucgacaauccuuagacuu

SEQ ID NO: 1272713 - RNA, 19 nt, Artificial Sequence
  Description of Artificial Sequence: Synthetic oligonucleotide
  Antisense strand to SEQ ID NO: 1272712
aagucuaaggauugucgaa

SEQ ID NO: 1272714 - RNA, 19 nt, Artificial Sequence
  Description of Artificial Sequence: Synthetic oligonucleotide
  Sense strand starting at position 3253 of SEQ ID NO: 1241441
cgacaauccuuagacuucu

SEQ ID NO: 1272715 - RNA, 19 nt, Artificial Sequence
  Description of Artificial Sequence: Synthetic oligonucleotide
  Antisense strand to SEQ ID NO: 1272714
agaagucuaaggauugucg

SEQ ID NO: 1272716 - RNA, 19 nt, Artificial Sequence
  Description of Artificial Sequence: Synthetic oligonucleotide
  Sense strand starting at position 3283 of SEQ ID NO: 1241441
gaauuacaccuuggaucgu

SEQ ID NO: 1272717 - RNA, 19 nt, Artificial Sequence
  Description of Artificial Sequence: Synthetic oligonucleotide
  Antisense strand to SEQ ID NO: 1272716
acgauccaagguguaauuc

SEQ ID NO: 1272718 - RNA, 19 nt, Artificial Sequence
  Description of Artificial Sequence: Synthetic oligonucleotide
  Sense strand starting at position 3301 of SEQ ID NO: 1241441
uggcgaagucuauagaggu

SEQ ID NO: 1272719 - RNA, 19 nt, Artificial Sequence
  Description of Artificial Sequence: Synthetic oligonucleotide
  Antisense strand to SEQ ID NO: 1272718
accucuauagacuucgcca

SEQ ID NO: 1272720 - RNA, 19 nt, Artificial Sequence
  Description of Artificial Sequence: Synthetic oligonucleotide
  Sense strand starting at position 3302 of SEQ ID NO: 1241441
ggcgaagucuauagagguc

SEQ ID NO: 1272721 - RNA, 19 nt, Artificial Sequence
  Description of Artificial Sequence: Synthetic oligonucleotide
  Antisense strand to SEQ ID NO: 1272720
gaccucuauagacuucgcc

SEQ ID NO: 1272722 - RNA, 19 nt, Artificial Sequence
  Description of Artificial Sequence: Synthetic oligonucleotide
  Sense strand starting at position 3305 of SEQ ID NO: 1241441
gaagucuauagaggucaga

SEQ ID NO: 1272723 - RNA, 19 nt, Artificial Sequence
  Description of Artificial Sequence: Synthetic oligonucleotide
  Antisense strand to SEQ ID NO: 1272722
ucugaccucuauagacuuc

SEQ ID NO: 1272724 - RNA, 19 nt, Artificial Sequence
  Description of Artificial Sequence: Synthetic oligonucleotide
  Sense strand starting at position 3361 of SEQ ID NO: 1241441
ugcugaguucacgagugag

SEQ ID NO: 1272725 - RNA, 19 nt, Artificial Sequence
  Description of Artificial Sequence: Synthetic oligonucleotide
  Antisense strand to SEQ ID NO: 1272724
cucacucgugaacucagca

SEQ ID NO: 1272726 - RNA, 19 nt, Artificial Sequence
  Description of Artificial Sequence: Synthetic oligonucleotide
  Sense strand starting at position 3364 of SEQ ID NO: 1241441
ugaguucacgagugaggac

SEQ ID NO: 1272727 - RNA, 19 nt, Artificial Sequence
  Description of Artificial Sequence: Synthetic oligonucleotide
  Antisense strand to SEQ ID NO: 1272726
guccucacucgugaacuca

SEQ ID NO: 1272728 - RNA, 19 nt, Artificial Sequence
  Description of Artificial Sequence: Synthetic oligonucleotide
  Sense strand starting at position 3436 of SEQ ID NO: 1241441
auaggaggcccauaauguu

SEQ ID NO: 1272729 - RNA, 19 nt, Artificial Sequence
  Description of Artificial Sequence: Synthetic oligonucleotide
  Antisense strand to SEQ ID NO: 1272728
aacauuaugggccuccuau

SEQ ID NO: 1272730 - RNA, 19 nt, Artificial Sequence
  Description of Artificial Sequence: Synthetic oligonucleotide
  Sense strand starting at position 3481 of SEQ ID NO: 1241441
aacguugacuuccaguaag

SEQ ID NO: 1272731 - RNA, 19 nt, Artificial Sequence
  Description of Artificial Sequence: Synthetic oligonucleotide
  Antisense strand to SEQ ID NO: 1272730
cuuacuggaagucaacguu

SEQ ID NO: 1272732 - RNA, 19 nt, Artificial Sequence
  Description of Artificial Sequence: Synthetic oligonucleotide
  Sense strand starting at position 3496 of SEQ ID NO: 1241441
uaagaaagguucucugauc

SEQ ID NO: 1272733 - RNA, 19 nt, Artificial Sequence
  Description of Artificial Sequence: Synthetic oligonucleotide
  Antisense strand to SEQ ID NO: 1272732
gaucagagaaccuuucuua

SEQ ID NO: 1272734 - RNA, 19 nt, Artificial Sequence
  Description of Artificial Sequence: Synthetic oligonucleotide
  Sense strand starting at position 3497 of SEQ ID NO: 1241441
aagaaagguucucugaucu

SEQ ID NO: 1272735 - RNA, 19 nt, Artificial Sequence
  Description of Artificial Sequence: Synthetic oligonucleotide
  Antisense strand to SEQ ID NO: 1272734
agaucagagaaccuuucuu

SEQ ID NO: 1272736 - RNA, 19 nt, Artificial Sequence
  Description of Artificial Sequence: Synthetic oligonucleotide
  Sense strand starting at position 3583 of SEQ ID NO: 1241441
guuuguuguccaggccaga

SEQ ID NO: 1272737 - RNA, 19 nt, Artificial Sequence
  Description of Artificial Sequence: Synthetic oligonucleotide
  Antisense strand to SEQ ID NO: 1272736
ucuggccuggacaacaaac

SEQ ID NO: 1272738 - RNA, 19 nt, Artificial Sequence
  Description of Artificial Sequence: Synthetic oligonucleotide
  Sense strand starting at position 3687 of SEQ ID NO: 1241441
aguacaggcucgucuugaa

SEQ ID NO: 1272739 - RNA, 19 nt, Artificial Sequence
  Description of Artificial Sequence: Synthetic oligonucleotide
  Antisense strand to SEQ ID NO: 1272738
uucaagacgagccuguacu

SEQ ID NO: 1272740 - RNA, 19 nt, Artificial Sequence
  Description of Artificial Sequence: Synthetic oligonucleotide
  Sense strand starting at position 3801 of SEQ ID NO: 1241441
gccagugcugaaggaucua

SEQ ID NO: 1272741 - RNA, 19 nt, Artificial Sequence
  Description of Artificial Sequence: Synthetic oligonucleotide
  Antisense strand to SEQ ID NO: 1272740
uagauccuucagcacuggc

SEQ ID NO: 1272742 - RNA, 19 nt, Artificial Sequence
  Description of Artificial Sequence: Synthetic oligonucleotide
  Sense strand starting at position 3875 of SEQ ID NO: 1241441
ugauuuauuuagcaagggu

SEQ ID NO: 1272743 - RNA, 19 nt, Artificial Sequence
  Description of Artificial Sequence: Synthetic oligonucleotide
  Antisense strand to SEQ ID NO: 1272742
acccuugcuaaauaaauca

SEQ ID NO: 1272744 - RNA, 19 nt, Artificial Sequence
  Description of Artificial Sequence: Synthetic oligonucleotide
  Sense strand starting at position 26 of SEQ ID NO: 1241442
ccaagucuccaugagcuua

SEQ ID NO: 1272745 - RNA, 19 nt, Artificial Sequence
  Description of Artificial Sequence: Synthetic oligonucleotide
  Antisense strand to SEQ ID NO: 1272744
uaagcucauggagacuugg

SEQ ID NO: 1272746 - RNA, 19 nt, Artificial Sequence
  Description of Artificial Sequence: Synthetic oligonucleotide
  Sense strand starting at position 101 of SEQ ID NO: 1241442
ggugauacacugugagucu

SEQ ID NO: 1272747 - RNA, 19 nt, Artificial Sequence
  Description of Artificial Sequence: Synthetic oligonucleotide
  Antisense strand to SEQ ID NO: 1272746
agacucacaguguaucacc

SEQ ID NO: 1272748 - RNA, 19 nt, Artificial Sequence
  Description of Artificial Sequence: Synthetic oligonucleotide
  Sense strand starting at position 240 of SEQ ID NO: 1241442
auuauaaugccaugaguaa

SEQ ID NO: 1272749 - RNA, 19 nt, Artificial Sequence
  Description of Artificial Sequence: Synthetic oligonucleotide
  Antisense strand to SEQ ID NO: 1272748
uuacucauggcauuauaau

SEQ ID NO: 1272750 - RNA, 19 nt, Artificial Sequence
  Description of Artificial Sequence: Synthetic oligonucleotide
  Sense strand starting at position 241 of SEQ ID NO: 1241442
uuauaaugccaugaguaaa

SEQ ID NO: 1272751 - RNA, 19 nt, Artificial Sequence
  Description of Artificial Sequence: Synthetic oligonucleotide
  Antisense strand to SEQ ID NO: 1272750
uuuacucauggcauuauaa

SEQ ID NO: 1272752 - RNA, 19 nt, Artificial Sequence
  Description of Artificial Sequence: Synthetic oligonucleotide
  Sense strand starting at position 458 of SEQ ID NO: 1241442
acauuccaggucugggaau

SEQ ID NO: 1272753 - RNA, 19 nt, Artificial Sequence
  Description of Artificial Sequence: Synthetic oligonucleotide
  Antisense strand to SEQ ID NO: 1272752
auucccagaccuggaaugu

SEQ ID NO: 1272754 - RNA, 19 nt, Artificial Sequence
  Description of Artificial Sequence: Synthetic oligonucleotide
  Sense strand starting at position 611 of SEQ ID NO: 1241442
uucuuugaggccuaauugu

SEQ ID NO: 1272755 - RNA, 19 nt, Artificial Sequence
  Description of Artificial Sequence: Synthetic oligonucleotide
  Antisense strand to SEQ ID NO: 1272754
acaauuaggccucaaagaa

SEQ ID NO: 1272756 - RNA, 19 nt, Artificial Sequence
  Description of Artificial Sequence: Synthetic oligonucleotide
  Sense strand starting at position 618 of SEQ ID NO: 1241442
aggccuaauuguuccauca

SEQ ID NO: 1272757 - RNA, 19 nt, Artificial Sequence
  Description of Artificial Sequence: Synthetic oligonucleotide
  Antisense strand to SEQ ID NO: 1272756
ugauggaacaauuaggccu

SEQ ID NO: 1272758 - RNA, 19 nt, Artificial Sequence
  Description of Artificial Sequence: Synthetic oligonucleotide
  Sense strand starting at position 761 of SEQ ID NO: 1241442
gaaagaaugcaguggaagu

SEQ ID NO: 1272759 - RNA, 19 nt, Artificial Sequence
  Description of Artificial Sequence: Synthetic oligonucleotide
  Antisense strand to SEQ ID NO: 1272758
acuuccacugcauucuuuc

SEQ ID NO: 1272760 - RNA, 19 nt, Artificial Sequence
  Description of Artificial Sequence: Synthetic oligonucleotide
  Sense strand starting at position 774 of SEQ ID NO: 1241442
ggaagugaccucuauguua

SEQ ID NO: 1272761 - RNA, 19 nt, Artificial Sequence
  Description of Artificial Sequence: Synthetic oligonucleotide
  Antisense strand to SEQ ID NO: 1272760
uaacauagaggucacuucc

SEQ ID NO: 1272762 - RNA, 19 nt, Artificial Sequence
  Description of Artificial Sequence: Synthetic oligonucleotide
  Sense strand starting at position 776 of SEQ ID NO: 1241442
aagugaccucuauguuaug

SEQ ID NO: 1272763 - RNA, 19 nt, Artificial Sequence
  Description of Artificial Sequence: Synthetic oligonucleotide
  Antisense strand to SEQ ID NO: 1272762
cauaacauagaggucacuu

SEQ ID NO: 1272764 - RNA, 19 nt, Artificial Sequence
  Description of Artificial Sequence: Synthetic oligonucleotide
  Sense strand starting at position 782 of SEQ ID NO: 1241442
ccucuauguuauguauaua

SEQ ID NO: 1272765 - RNA, 19 nt, Artificial Sequence
  Description of Artificial Sequence: Synthetic oligonucleotide
  Antisense strand to SEQ ID NO: 1272764
uauauacauaacauagagg

SEQ ID NO: 1272766 - RNA, 19 nt, Artificial Sequence
  Description of Artificial Sequence: Synthetic oligonucleotide
  Sense strand starting at position 842 of SEQ ID NO: 1241442
gcacgucaauuucuuauga

SEQ ID NO: 1272767 - RNA, 19 nt, Artificial Sequence
  Description of Artificial Sequence: Synthetic oligonucleotide
  Antisense strand to SEQ ID NO: 1272766
ucauaagaaauugacgugc

SEQ ID NO: 1272768 - RNA, 19 nt, Artificial Sequence
  Description of Artificial Sequence: Synthetic oligonucleotide
  Sense strand starting at position 847 of SEQ ID NO: 1241442
ucaauuucuuaugaggaca

SEQ ID NO: 1272769 - RNA, 19 nt, Artificial Sequence
  Description of Artificial Sequence: Synthetic oligonucleotide
  Antisense strand to SEQ ID NO: 1272768
uguccucauaagaaauuga

SEQ ID NO: 1272770 - RNA, 19 nt, Artificial Sequence
  Description of Artificial Sequence: Synthetic oligonucleotide
  Sense strand starting at position 858 of SEQ ID NO: 1241442
ugaggacauuuggguaaua

SEQ ID NO: 1272771 - RNA, 19 nt, Artificial Sequence
  Description of Artificial Sequence: Synthetic oligonucleotide
  Antisense strand to SEQ ID NO: 1272770
uauuacccaaauguccuca

SEQ ID NO: 1272772 - RNA, 19 nt, Artificial Sequence
  Description of Artificial Sequence: Synthetic oligonucleotide
  Sense strand starting at position 882 of SEQ ID NO: 1241442
acccacaucgguugagaau

SEQ ID NO: 1272773 - RNA, 19 nt, Artificial Sequence
  Description of Artificial Sequence: Synthetic oligonucleotide
  Antisense strand to SEQ ID NO: 1272772
auucucaaccgaugugggu

SEQ ID NO: 1272774 - RNA, 19 nt, Artificial Sequence
  Description of Artificial Sequence: Synthetic oligonucleotide
  Sense strand starting at position 883 of SEQ ID NO: 1241442
cccacaucgguugagaauc

SEQ ID NO: 1272775 - RNA, 19 nt, Artificial Sequence
  Description of Artificial Sequence: Synthetic oligonucleotide
  Antisense strand to SEQ ID NO: 1272774
gauucucaaccgauguggg

SEQ ID NO: 1272776 - RNA, 19 nt, Artificial Sequence
  Description of Artificial Sequence: Synthetic oligonucleotide
  Sense strand starting at position 889 of SEQ ID NO: 1241442
ucgguugagaaucaugauc

SEQ ID NO: 1272777 - RNA, 19 nt, Artificial Sequence
  Description of Artificial Sequence: Synthetic oligonucleotide
  Antisense strand to SEQ ID NO: 1272776
gaucaugauucucaaccga

SEQ ID NO: 1272778 - RNA, 19 nt, Artificial Sequence
  Description of Artificial Sequence: Synthetic oligonucleotide
  Sense strand starting at position 955 of SEQ ID NO: 1241442
aggcauugcagaggagaaa

SEQ ID NO: 1272779 - RNA, 19 nt, Artificial Sequence
  Description of Artificial Sequence: Synthetic oligonucleotide
  Antisense strand to SEQ ID NO: 1272778
uuucuccucugcaaugccu

SEQ ID NO: 1272780 - RNA, 19 nt, Artificial Sequence
  Description of Artificial Sequence: Synthetic oligonucleotide
  Sense strand starting at position 1066 of SEQ ID NO: 1241442
gcucgaaacacugggaguu

SEQ ID NO: 1272781 - RNA, 19 nt, Artificial Sequence
  Description of Artificial Sequence: Synthetic oligonucleotide
  Antisense strand to SEQ ID NO: 1272780
aacucccaguguuucgagc

SEQ ID NO: 1272782 - RNA, 19 nt, Artificial Sequence
  Description of Artificial Sequence: Synthetic oligonucleotide
  Sense strand starting at position 1078 of SEQ ID NO: 1241442
gggaguugccauugugaac

SEQ ID NO: 1272783 - RNA, 19 nt, Artificial Sequence
  Description of Artificial Sequence: Synthetic oligonucleotide
  Antisense strand to SEQ ID NO: 1272782
guucacaauggcaacuccc

SEQ ID NO: 1272784 - RNA, 19 nt, Artificial Sequence
  Description of Artificial Sequence: Synthetic oligonucleotide
  Sense strand starting at position 1104 of SEQ ID NO: 1241442
ccuuaauagcccuggaaag

SEQ ID NO: 1272785 - RNA, 19 nt, Artificial Sequence
  Description of Artificial Sequence: Synthetic oligonucleotide
  Antisense strand to SEQ ID NO: 1272784
cuuuccagggcuauuaagg

SEQ ID NO: 1272786 - RNA, 19 nt, Artificial Sequence
  Description of Artificial Sequence: Synthetic oligonucleotide
  Sense strand starting at position 1114 of SEQ ID NO: 1241442
ccuggaaagcuaugaaaca

SEQ ID NO: 1272787 - RNA, 19 nt, Artificial Sequence
  Description of Artificial Sequence: Synthetic oligonucleotide
  Antisense strand to SEQ ID NO: 1272786
uguuucauagcuuuccagg

SEQ ID NO: 1272788 - RNA, 19 nt, Artificial Sequence
  Description of Artificial Sequence: Synthetic oligonucleotide
  Sense strand starting at position 1249 of SEQ ID NO: 1241442
gucuaugauauggaugcuu

SEQ ID NO: 1272789 - RNA, 19 nt, Artificial Sequence
  Description of Artificial Sequence: Synthetic oligonucleotide
  Antisense strand to SEQ ID NO: 1272788
aagcauccauaucauagac

SEQ ID NO: 1272790 - RNA, 19 nt, Artificial Sequence
  Description of Artificial Sequence: Synthetic oligonucleotide
  Sense strand starting at position 1310 of SEQ ID NO: 1241442
agaugagacuuccuagcau

SEQ ID NO: 1272791 - RNA, 19 nt, Artificial Sequence
  Description of Artificial Sequence: Synthetic oligonucleotide
  Antisense strand to SEQ ID NO: 1272790
augcuaggaagucucaucu

SEQ ID NO: 1272792 - RNA, 19 nt, Artificial Sequence
  Description of Artificial Sequence: Synthetic oligonucleotide
  Sense strand starting at position 1623 of SEQ ID NO: 1241442
uuuacucuuccuggaaggu

SEQ ID NO: 1272793 - RNA, 19 nt, Artificial Sequence
  Description of Artificial Sequence: Synthetic oligonucleotide
  Antisense strand to SEQ ID NO: 1272792
accuuccaggaagaguaaa

SEQ ID NO: 1272794 - RNA, 19 nt, Artificial Sequence
  Description of Artificial Sequence: Synthetic oligonucleotide
  Sense strand starting at position 1784 of SEQ ID NO: 1241442
aggacaguacuguguccaa

SEQ ID NO: 1272795 - RNA, 19 nt, Artificial Sequence
  Description of Artificial Sequence: Synthetic oligonucleotide
  Antisense strand to SEQ ID NO: 1272794
uuggacacaguacuguccu

SEQ ID NO: 1272796 - RNA, 19 nt, Artificial Sequence
  Description of Artificial Sequence: Synthetic oligonucleotide
  Sense strand starting at position 1787 of SEQ ID NO: 1241442
acaguacuguguccaaaca

SEQ ID NO: 1272797 - RNA, 19 nt, Artificial Sequence
  Description of Artificial Sequence: Synthetic oligonucleotide
  Antisense strand to SEQ ID NO: 1272796
uguuuggacacaguacugu

SEQ ID NO: 1272798 - RNA, 19 nt, Artificial Sequence
  Description of Artificial Sequence: Synthetic oligonucleotide
  Sense strand starting at position 2071 of SEQ ID NO: 1241442
uccaaauucucuuugugag

SEQ ID NO: 1272799 - RNA, 19 nt, Artificial Sequence
  Description of Artificial Sequence: Synthetic oligonucleotide
  Antisense strand to SEQ ID NO: 1272798
cucacaaagagaauuugga

SEQ ID NO: 1272800 - RNA, 19 nt, Artificial Sequence
  Description of Artificial Sequence: Synthetic oligonucleotide
  Sense strand starting at position 2072 of SEQ ID NO: 1241442
ccaaauucucuuugugagg

SEQ ID NO: 1272801 - RNA, 19 nt, Artificial Sequence
  Description of Artificial Sequence: Synthetic oligonucleotide
  Antisense strand to SEQ ID NO: 1272800
ccucacaaagagaauuugg

SEQ ID NO: 1272802 - RNA, 19 nt, Artificial Sequence
  Description of Artificial Sequence: Synthetic oligonucleotide
  Sense strand starting at position 2073 of SEQ ID NO: 1241442
caaauucucuuugugaggu

SEQ ID NO: 1272803 - RNA, 19 nt, Artificial Sequence
  Description of Artificial Sequence: Synthetic oligonucleotide
  Antisense strand to SEQ ID NO: 1272802
accucacaaagagaauuug

SEQ ID NO: 1272804 - RNA, 19 nt, Artificial Sequence
  Description of Artificial Sequence: Synthetic oligonucleotide
  Sense strand starting at position 2123 of SEQ ID NO: 1241442
auugauaguccagguguua

SEQ ID NO: 1272805 - RNA, 19 nt, Artificial Sequence
  Description of Artificial Sequence: Synthetic oligonucleotide
  Antisense strand to SEQ ID NO: 1272804
uaacaccuggacuaucaau

SEQ ID NO: 1272806 - RNA, 19 nt, Artificial Sequence
  Description of Artificial Sequence: Synthetic oligonucleotide
  Sense strand starting at position 2136 of SEQ ID NO: 1241442
guguuauuccaccagcaau

SEQ ID NO: 1272807 - RNA, 19 nt, Artificial Sequence
  Description of Artificial Sequence: Synthetic oligonucleotide
  Antisense strand to SEQ ID NO: 1272806
auugcugguggaauaacac

SEQ ID NO: 1272808 - RNA, 19 nt, Artificial Sequence
  Description of Artificial Sequence: Synthetic oligonucleotide
  Sense strand starting at position 2254 of SEQ ID NO: 1241442
gcgcuccuccaggaggaau

SEQ ID NO: 1272809 - RNA, 19 nt, Artificial Sequence
  Description of Artificial Sequence: Synthetic oligonucleotide
  Antisense strand to SEQ ID NO: 1272808
auuccuccuggaggagcgc

SEQ ID NO: 1272810 - RNA, 19 nt, Artificial Sequence
  Description of Artificial Sequence: Synthetic oligonucleotide
  Sense strand starting at position 2376 of SEQ ID NO: 1241442
agacguggcaucugaauaa

SEQ ID NO: 1272811 - RNA, 19 nt, Artificial Sequence
  Description of Artificial Sequence: Synthetic oligonucleotide
  Antisense strand to SEQ ID NO: 1272810
uuauucagaugccacgucu

SEQ ID NO: 1272812 - RNA, 19 nt, Artificial Sequence
  Description of Artificial Sequence: Synthetic oligonucleotide
  Sense strand starting at position 3490 of SEQ ID NO: 1241442
agguuuaauguccaggucu

SEQ ID NO: 1272813 - RNA, 19 nt, Artificial Sequence
  Description of Artificial Sequence: Synthetic oligonucleotide
  Antisense strand to SEQ ID NO: 1272812
agaccuggacauuaaaccu

SEQ ID NO: 1272814 - RNA, 19 nt, Artificial Sequence
  Description of Artificial Sequence: Synthetic oligonucleotide
  Sense strand starting at position 3630 of SEQ ID NO: 1241442
cacucaagagccugguauu

SEQ ID NO: 1272815 - RNA, 19 nt, Artificial Sequence
  Description of Artificial Sequence: Synthetic oligonucleotide
  Antisense strand to SEQ ID NO: 1272814
aauaccaggcucuugagug

SEQ ID NO: 1272816 - RNA, 19 nt, Artificial Sequence
  Description of Artificial Sequence: Synthetic oligonucleotide
  Sense strand starting at position 3650 of SEQ ID NO: 1241442
gaguccaggcccuaucauu

SEQ ID NO: 1272817 - RNA, 19 nt, Artificial Sequence
  Description of Artificial Sequence: Synthetic oligonucleotide
  Antisense strand to SEQ ID NO: 1272816
aaugauagggccuggacuc

SEQ ID NO: 1272818 - RNA, 19 nt, Artificial Sequence
  Description of Artificial Sequence: Synthetic oligonucleotide
  Sense strand starting at position 3686 of SEQ ID NO: 1241442
ugggcagggcauuguuaaa

SEQ ID NO: 1272819 - RNA, 19 nt, Artificial Sequence
  Description of Artificial Sequence: Synthetic oligonucleotide
  Antisense strand to SEQ ID NO: 1272818
uuuaacaaugcccugccca

SEQ ID NO: 1272820 - RNA, 19 nt, Artificial Sequence
  Description of Artificial Sequence: Synthetic oligonucleotide
  Sense strand starting at position 3826 of SEQ ID NO: 1241442
aggagucccuccuuaucuu

SEQ ID NO: 1272821 - RNA, 19 nt, Artificial Sequence
  Description of Artificial Sequence: Synthetic oligonucleotide
  Antisense strand to SEQ ID NO: 1272820
aagauaaggagggacuccu

SEQ ID NO: 1272822 - RNA, 19 nt, Artificial Sequence
  Description of Artificial Sequence: Synthetic oligonucleotide
  Sense strand starting at position 3887 of SEQ ID NO: 1241442
uggauagaacccuguauau

SEQ ID NO: 1272823 - RNA, 19 nt, Artificial Sequence
  Description of Artificial Sequence: Synthetic oligonucleotide
  Antisense strand to SEQ ID NO: 1272822
auauacaggguucuaucca

SEQ ID NO: 1272824 - RNA, 19 nt, Artificial Sequence
  Description of Artificial Sequence: Synthetic oligonucleotide
  Sense strand starting at position 35 of SEQ ID NO: 1241443
gccagaaccuugcucacaa

SEQ ID NO: 1272825 - RNA, 19 nt, Artificial Sequence
  Description of Artificial Sequence: Synthetic oligonucleotide
  Antisense strand to SEQ ID NO: 1272824
uugugagcaagguucuggc

SEQ ID NO: 1272826 - RNA, 19 nt, Artificial Sequence
  Description of Artificial Sequence: Synthetic oligonucleotide
  Sense strand starting at position 92 of SEQ ID NO: 1241443
agacucaaaugcuuguuua

SEQ ID NO: 1272827 - RNA, 19 nt, Artificial Sequence
  Description of Artificial Sequence: Synthetic oligonucleotide
  Antisense strand to SEQ ID NO: 1272826
uaaacaagcauuugagucu

SEQ ID NO: 1272828 - RNA, 19 nt, Artificial Sequence
  Description of Artificial Sequence: Synthetic oligonucleotide
  Sense strand starting at position 130 of SEQ ID NO: 1241443
auuacaguuuaucucagua

SEQ ID NO: 1272829 - RNA, 19 nt, Artificial Sequence
  Description of Artificial Sequence: Synthetic oligonucleotide
  Antisense strand to SEQ ID NO: 1272828
uacugagauaaacuguaau

SEQ ID NO: 1272830 - RNA, 19 nt, Artificial Sequence
  Description of Artificial Sequence: Synthetic oligonucleotide
  Sense strand starting at position 135 of SEQ ID NO: 1241443
aguuuaucucaguagaauc

SEQ ID NO: 1272831 - RNA, 19 nt, Artificial Sequence
  Description of Artificial Sequence: Synthetic oligonucleotide
  Antisense strand to SEQ ID NO: 1272830
gauucuacugagauaaacu

SEQ ID NO: 1272832 - RNA, 19 nt, Artificial Sequence
  Description of Artificial Sequence: Synthetic oligonucleotide
  Sense strand starting at position 275 of SEQ ID NO: 1241443
ggaaucuacugguuaauua

SEQ ID NO: 1272833 - RNA, 19 nt, Artificial Sequence
  Description of Artificial Sequence: Synthetic oligonucleotide
  Antisense strand to SEQ ID NO: 1272832
uaauuaaccaguagauucc

SEQ ID NO: 1272834 - RNA, 19 nt, Artificial Sequence
  Description of Artificial Sequence: Synthetic oligonucleotide
  Sense strand starting at position 558 of SEQ ID NO: 1241443
cuaaauuagguguaacuua

SEQ ID NO: 1272835 - RNA, 19 nt, Artificial Sequence
  Description of Artificial Sequence: Synthetic oligonucleotide
  Antisense strand to SEQ ID NO: 1272834
uaaguuacaccuaauuuag

SEQ ID NO: 1272836 - RNA, 19 nt, Artificial Sequence
  Description of Artificial Sequence: Synthetic oligonucleotide
  Sense strand starting at position 565 of SEQ ID NO: 1241443
agguguaacuuacucucau

SEQ ID NO: 1272837 - RNA, 19 nt, Artificial Sequence
  Description of Artificial Sequence: Synthetic oligonucleotide
  Antisense strand to SEQ ID NO: 1272836
augagaguaaguuacaccu

SEQ ID NO: 1272838 - RNA, 19 nt, Artificial Sequence
  Description of Artificial Sequence: Synthetic oligonucleotide
  Sense strand starting at position 566 of SEQ ID NO: 1241443
gguguaacuuacucucauc

SEQ ID NO: 1272839 - RNA, 19 nt, Artificial Sequence
  Description of Artificial Sequence: Synthetic oligonucleotide
  Antisense strand to SEQ ID NO: 1272838
gaugagaguaaguuacacc

SEQ ID NO: 1272840 - RNA, 19 nt, Artificial Sequence
  Description of Artificial Sequence: Synthetic oligonucleotide
  Sense strand starting at position 632 of SEQ ID NO: 1241443
auauccacucuugguuaua

SEQ ID NO: 1272841 - RNA, 19 nt, Artificial Sequence
  Description of Artificial Sequence: Synthetic oligonucleotide
  Antisense strand to SEQ ID NO: 1272840
uauaaccaagaguggauau

SEQ ID NO: 1272842 - RNA, 19 nt, Artificial Sequence
  Description of Artificial Sequence: Synthetic oligonucleotide
  Sense strand starting at position 635 of SEQ ID NO: 1241443
uccacucuugguuauagga

SEQ ID NO: 1272843 - RNA, 19 nt, Artificial Sequence
  Description of Artificial Sequence: Synthetic oligonucleotide
  Antisense strand to SEQ ID NO: 1272842
uccuauaaccaagagugga

SEQ ID NO: 1272844 - RNA, 19 nt, Artificial Sequence
  Description of Artificial Sequence: Synthetic oligonucleotide
  Sense strand starting at position 642 of SEQ ID NO: 1241443
uugguuauaggauguuaua

SEQ ID NO: 1272845 - RNA, 19 nt, Artificial Sequence
  Description of Artificial Sequence: Synthetic oligonucleotide
  Antisense strand to SEQ ID NO: 1272844
uauaacauccuauaaccaa

SEQ ID NO: 1272846 - RNA, 19 nt, Artificial Sequence
  Description of Artificial Sequence: Synthetic oligonucleotide
  Sense strand starting at position 654 of SEQ ID NO: 1241443
uguuauaaaucccugaaag

SEQ ID NO: 1272847 - RNA, 19 nt, Artificial Sequence
  Description of Artificial Sequence: Synthetic oligonucleotide
  Antisense strand to SEQ ID NO: 1272846
cuuucagggauuuauaaca

SEQ ID NO: 1272848 - RNA, 19 nt, Artificial Sequence
  Description of Artificial Sequence: Synthetic oligonucleotide
  Sense strand starting at position 655 of SEQ ID NO: 1241443
guuauaaaucccugaaagg

SEQ ID NO: 1272849 - RNA, 19 nt, Artificial Sequence
  Description of Artificial Sequence: Synthetic oligonucleotide
  Antisense strand to SEQ ID NO: 1272848
ccuuucagggauuuauaac

SEQ ID NO: 1272850 - RNA, 19 nt, Artificial Sequence
  Description of Artificial Sequence: Synthetic oligonucleotide
  Sense strand starting at position 774 of SEQ ID NO: 1241443
augggauaaugcuugcaua

SEQ ID NO: 1272851 - RNA, 19 nt, Artificial Sequence
  Description of Artificial Sequence: Synthetic oligonucleotide
  Antisense strand to SEQ ID NO: 1272850
uaugcaagcauuaucccau

SEQ ID NO: 1272852 - RNA, 19 nt, Artificial Sequence
  Description of Artificial Sequence: Synthetic oligonucleotide
  Sense strand starting at position 775 of SEQ ID NO: 1241443
ugggauaaugcuugcauaa

SEQ ID NO: 1272853 - RNA, 19 nt, Artificial Sequence
  Description of Artificial Sequence: Synthetic oligonucleotide
  Antisense strand to SEQ ID NO: 1272852
uuaugcaagcauuauccca

SEQ ID NO: 1272854 - RNA, 19 nt, Artificial Sequence
  Description of Artificial Sequence: Synthetic oligonucleotide
  Sense strand starting at position 894 of SEQ ID NO: 1241443
aaugcaaaugucugaaugu

SEQ ID NO: 1272855 - RNA, 19 nt, Artificial Sequence
  Description of Artificial Sequence: Synthetic oligonucleotide
  Antisense strand to SEQ ID NO: 1272854
acauucagacauuugcauu

SEQ ID NO: 1272856 - RNA, 19 nt, Artificial Sequence
  Description of Artificial Sequence: Synthetic oligonucleotide
  Sense strand starting at position 923 of SEQ ID NO: 1241443
uccugucuaucuuccauga

SEQ ID NO: 1272857 - RNA, 19 nt, Artificial Sequence
  Description of Artificial Sequence: Synthetic oligonucleotide
  Antisense strand to SEQ ID NO: 1272856
ucauggaagauagacagga

SEQ ID NO: 1272858 - RNA, 19 nt, Artificial Sequence
  Description of Artificial Sequence: Synthetic oligonucleotide
  Sense strand starting at position 976 of SEQ ID NO: 1241443
gguguaauuccacaagcag

SEQ ID NO: 1272859 - RNA, 19 nt, Artificial Sequence
  Description of Artificial Sequence: Synthetic oligonucleotide
  Antisense strand to SEQ ID NO: 1272858
cugcuuguggaauuacacc

SEQ ID NO: 1272860 - RNA, 19 nt, Artificial Sequence
  Description of Artificial Sequence: Synthetic oligonucleotide
  Sense strand starting at position 1096 of SEQ ID NO: 1241443
guugguagcgauuagaaca

SEQ ID NO: 1272861 - RNA, 19 nt, Artificial Sequence
  Description of Artificial Sequence: Synthetic oligonucleotide
  Antisense strand to SEQ ID NO: 1272860
uguucuaaucgcuaccaac

SEQ ID NO: 1272862 - RNA, 19 nt, Artificial Sequence
  Description of Artificial Sequence: Synthetic oligonucleotide
  Sense strand starting at position 1130 of SEQ ID NO: 1241443
gugcucagaaccgaguaaa

SEQ ID NO: 1272863 - RNA, 19 nt, Artificial Sequence
  Description of Artificial Sequence: Synthetic oligonucleotide
  Antisense strand to SEQ ID NO: 1272862
uuuacucgguucugagcac

SEQ ID NO: 1272864 - RNA, 19 nt, Artificial Sequence
  Description of Artificial Sequence: Synthetic oligonucleotide
  Sense strand starting at position 1207 of SEQ ID NO: 1241443
caauacuucgcaggaaagu

SEQ ID NO: 1272865 - RNA, 19 nt, Artificial Sequence
  Description of Artificial Sequence: Synthetic oligonucleotide
  Antisense strand to SEQ ID NO: 1272864
acuuuccugcgaaguauug

SEQ ID NO: 1272866 - RNA, 19 nt, Artificial Sequence
  Description of Artificial Sequence: Synthetic oligonucleotide
  Sense strand starting at position 1322 of SEQ ID NO: 1241443
ggacgaguucguaguccug

SEQ ID NO: 1272867 - RNA, 19 nt, Artificial Sequence
  Description of Artificial Sequence: Synthetic oligonucleotide
  Antisense strand to SEQ ID NO: 1272866
caggacuacgaacucgucc

SEQ ID NO: 1272868 - RNA, 19 nt, Artificial Sequence
  Description of Artificial Sequence: Synthetic oligonucleotide
  Sense strand starting at position 1343 of SEQ ID NO: 1241443
gcggguuccgccucaggau

SEQ ID NO: 1272869 - RNA, 19 nt, Artificial Sequence
  Description of Artificial Sequence: Synthetic oligonucleotide
  Antisense strand to SEQ ID NO: 1272868
auccugaggcggaacccgc

SEQ ID NO: 1272870 - RNA, 19 nt, Artificial Sequence
  Description of Artificial Sequence: Synthetic oligonucleotide
  Sense strand starting at position 1434 of SEQ ID NO: 1241443
ccggauucccgcuaacaag

SEQ ID NO: 1272871 - RNA, 19 nt, Artificial Sequence
  Description of Artificial Sequence: Synthetic oligonucleotide
  Antisense strand to SEQ ID NO: 1272870
cuuguuagcgggaauccgg

SEQ ID NO: 1272872 - RNA, 19 nt, Artificial Sequence
  Description of Artificial Sequence: Synthetic oligonucleotide
  Sense strand starting at position 2778 of SEQ ID NO: 1241443
ucgaauauaagaggucuua

SEQ ID NO: 1272873 - RNA, 19 nt, Artificial Sequence
  Description of Artificial Sequence: Synthetic oligonucleotide
  Antisense strand to SEQ ID NO: 1272872
uaagaccucuuauauucga

SEQ ID NO: 1272874 - RNA, 19 nt, Artificial Sequence
  Description of Artificial Sequence: Synthetic oligonucleotide
  Sense strand starting at position 2890 of SEQ ID NO: 1241443
ucuugcucugaagguagaa

SEQ ID NO: 1272875 - RNA, 19 nt, Artificial Sequence
  Description of Artificial Sequence: Synthetic oligonucleotide
  Antisense strand to SEQ ID NO: 1272874
uucuaccuucagagcaaga

SEQ ID NO: 1272876 - RNA, 19 nt, Artificial Sequence
  Description of Artificial Sequence: Synthetic oligonucleotide
  Sense strand starting at position 2892 of SEQ ID NO: 1241443
uugcucugaagguagaaau

SEQ ID NO: 1272877 - RNA, 19 nt, Artificial Sequence
  Description of Artificial Sequence: Synthetic oligonucleotide
  Antisense strand to SEQ ID NO: 1272876
auuucuaccuucagagcaa

SEQ ID NO: 1272878 - RNA, 19 nt, Artificial Sequence
  Description of Artificial Sequence: Synthetic oligonucleotide
  Sense strand starting at position 2902 of SEQ ID NO: 1241443
gguagaaauuaaguugcca

SEQ ID NO: 1272879 - RNA, 19 nt, Artificial Sequence
  Description of Artificial Sequence: Synthetic oligonucleotide
  Antisense strand to SEQ ID NO: 1272878
uggcaacuuaauuucuacc

SEQ ID NO: 1272880 - RNA, 19 nt, Artificial Sequence
  Description of Artificial Sequence: Synthetic oligonucleotide
  Sense strand starting at position 2926 of SEQ ID NO: 1241443
acauuauacuggcuaaguu

SEQ ID NO: 1272881 - RNA, 19 nt, Artificial Sequence
  Description of Artificial Sequence: Synthetic oligonucleotide
  Antisense strand to SEQ ID NO: 1272880
aacuuagccaguauaaugu

SEQ ID NO: 1272882 - RNA, 19 nt, Artificial Sequence
  Description of Artificial Sequence: Synthetic oligonucleotide
  Sense strand starting at position 3278 of SEQ ID NO: 1241443
uuacaugcuccauggacaa

SEQ ID NO: 1272883 - RNA, 19 nt, Artificial Sequence
  Description of Artificial Sequence: Synthetic oligonucleotide
  Antisense strand to SEQ ID NO: 1272882
uuguccauggagcauguaa

SEQ ID NO: 1272884 - RNA, 19 nt, Artificial Sequence
  Description of Artificial Sequence: Synthetic oligonucleotide
  Sense strand starting at position 3386 of SEQ ID NO: 1241443
uuuggcuucgaugacucaa

SEQ ID NO: 1272885 - RNA, 19 nt, Artificial Sequence
  Description of Artificial Sequence: Synthetic oligonucleotide
  Antisense strand to SEQ ID NO: 1272884
uugagucaucgaagccaaa

SEQ ID NO: 1272886 - RNA, 19 nt, Artificial Sequence
  Description of Artificial Sequence: Synthetic oligonucleotide
  Sense strand starting at position 3542 of SEQ ID NO: 1241443
gcguuacuccagggaauuu

SEQ ID NO: 1272887 - RNA, 19 nt, Artificial Sequence
  Description of Artificial Sequence: Synthetic oligonucleotide
  Antisense strand to SEQ ID NO: 1272886
aaauucccuggaguaacgc

SEQ ID NO: 1272888 - RNA, 19 nt, Artificial Sequence
  Description of Artificial Sequence: Synthetic oligonucleotide
  Sense strand starting at position 3616 of SEQ ID NO: 1241443
cuaguaugacguuaaagag

SEQ ID NO: 1272889 - RNA, 19 nt, Artificial Sequence
  Description of Artificial Sequence: Synthetic oligonucleotide
  Antisense strand to SEQ ID NO: 1272888
cucuuuaacgucauacuag

SEQ ID NO: 1272890 - RNA, 19 nt, Artificial Sequence
  Description of Artificial Sequence: Synthetic oligonucleotide
  Sense strand starting at position 3649 of SEQ ID NO: 1241443
accagaacagugugacaaa

SEQ ID NO: 1272891 - RNA, 19 nt, Artificial Sequence
  Description of Artificial Sequence: Synthetic oligonucleotide
  Antisense strand to SEQ ID NO: 1272890
uuugucacacuguucuggu

SEQ ID NO: 1272892 - RNA, 19 nt, Artificial Sequence
  Description of Artificial Sequence: Synthetic oligonucleotide
  Sense strand starting at position 3843 of SEQ ID NO: 1241443
uuaagcauguuauucuuga

SEQ ID NO: 1272893 - RNA, 19 nt, Artificial Sequence
  Description of Artificial Sequence: Synthetic oligonucleotide
  Antisense strand to SEQ ID NO: 1272892
ucaagaauaacaugcuuaa

SEQ ID NO: 1272894 - RNA, 19 nt, Artificial Sequence
  Description of Artificial Sequence: Synthetic oligonucleotide
  Sense strand starting at position 3878 of SEQ ID NO: 1241443
ugaauuaggcagugaaaug

SEQ ID NO: 1272895 - RNA, 19 nt, Artificial Sequence
  Description of Artificial Sequence: Synthetic oligonucleotide
  Antisense strand to SEQ ID NO: 1272894
cauuucacugccuaauuca

SEQ ID NO: 1272896 - RNA, 19 nt, Artificial Sequence
  Description of Artificial Sequence: Synthetic oligonucleotide
  Sense strand starting at position 3883 of SEQ ID NO: 1241443
uaggcagugaaauguuuga

SEQ ID NO: 1272897 - RNA, 19 nt, Artificial Sequence
  Description of Artificial Sequence: Synthetic oligonucleotide
  Antisense strand to SEQ ID NO: 1272896
ucaaacauuucacugccua

SEQ ID NO: 1272898 - RNA, 19 nt, Artificial Sequence
  Description of Artificial Sequence: Synthetic oligonucleotide
  Sense strand starting at position 3887 of SEQ ID NO: 1241443
cagugaaauguuugagguc

SEQ ID NO: 1272899 - RNA, 19 nt, Artificial Sequence
  Description of Artificial Sequence: Synthetic oligonucleotide
  Antisense strand to SEQ ID NO: 1272898
gaccucaaacauuucacug

SEQ ID NO: 1272900 - RNA, 19 nt, Artificial Sequence
  Description of Artificial Sequence: Synthetic oligonucleotide
  Sense strand starting at position 3948 of SEQ ID NO: 1241443
ccaguaauggcagauccau

SEQ ID NO: 1272901 - RNA, 19 nt, Artificial Sequence
  Description of Artificial Sequence: Synthetic oligonucleotide
  Antisense strand to SEQ ID NO: 1272900
auggaucugccauuacugg

SEQ ID NO: 1272902 - RNA, 19 nt, Artificial Sequence
  Description of Artificial Sequence: Synthetic oligonucleotide
  Sense strand starting at position 3954 of SEQ ID NO: 1241443
auggcagauccauaugcuu

SEQ ID NO: 1272903 - RNA, 19 nt, Artificial Sequence
  Description of Artificial Sequence: Synthetic oligonucleotide
  Antisense strand to SEQ ID NO: 1272902
aagcauauggaucugccau

SEQ ID NO: 1272904 - RNA, 19 nt, Artificial Sequence
  Description of Artificial Sequence: Synthetic oligonucleotide
  Sense strand starting at position 10 of SEQ ID NO: 1241444
auuaaagucuuagcagagu

SEQ ID NO: 1272905 - RNA, 19 nt, Artificial Sequence
  Description of Artificial Sequence: Synthetic oligonucleotide
  Antisense strand to SEQ ID NO: 1272904
acucugcuaagacuuuaau

SEQ ID NO: 1272906 - RNA, 19 nt, Artificial Sequence
  Description of Artificial Sequence: Synthetic oligonucleotide
  Sense strand starting at position 150 of SEQ ID NO: 1241444
aaaccaggccaguaauguu

SEQ ID NO: 1272907 - RNA, 19 nt, Artificial Sequence
  Description of Artificial Sequence: Synthetic oligonucleotide
  Antisense strand to SEQ ID NO: 1272906
aacauuacuggccugguuu

SEQ ID NO: 1272908 - RNA, 19 nt, Artificial Sequence
  Description of Artificial Sequence: Synthetic oligonucleotide
  Sense strand starting at position 162 of SEQ ID NO: 1241444
uaauguugcgaggaacuaa

SEQ ID NO: 1272909 - RNA, 19 nt, Artificial Sequence
  Description of Artificial Sequence: Synthetic oligonucleotide
  Antisense strand to SEQ ID NO: 1272908
uuaguuccucgcaacauua

SEQ ID NO: 1272910 - RNA, 19 nt, Artificial Sequence
  Description of Artificial Sequence: Synthetic oligonucleotide
  Sense strand starting at position 212 of SEQ ID NO: 1241444
aauagugcuuggguggaaa

SEQ ID NO: 1272911 - RNA, 19 nt, Artificial Sequence
  Description of Artificial Sequence: Synthetic oligonucleotide
  Antisense strand to SEQ ID NO: 1272910
uuuccacccaagcacuauu

SEQ ID NO: 1272912 - RNA, 19 nt, Artificial Sequence
  Description of Artificial Sequence: Synthetic oligonucleotide
  Sense strand starting at position 262 of SEQ ID NO: 1241444
ggacaucuagcuuauaggu

SEQ ID NO: 1272913 - RNA, 19 nt, Artificial Sequence
  Description of Artificial Sequence: Synthetic oligonucleotide
  Antisense strand to SEQ ID NO: 1272912
accuauaagcuagaugucc

SEQ ID NO: 1272914 - RNA, 19 nt, Artificial Sequence
  Description of Artificial Sequence: Synthetic oligonucleotide
  Sense strand starting at position 335 of SEQ ID NO: 1241444
guugguucggccagaguug

SEQ ID NO: 1272915 - RNA, 19 nt, Artificial Sequence
  Description of Artificial Sequence: Synthetic oligonucleotide
  Antisense strand to SEQ ID NO: 1272914
caacucuggccgaaccaac

SEQ ID NO: 1272916 - RNA, 19 nt, Artificial Sequence
  Description of Artificial Sequence: Synthetic oligonucleotide
  Sense strand starting at position 398 of SEQ ID NO: 1241444
guacccacaucauagauuu

SEQ ID NO: 1272917 - RNA, 19 nt, Artificial Sequence
  Description of Artificial Sequence: Synthetic oligonucleotide
  Antisense strand to SEQ ID NO: 1272916
aaaucuaugauguggguac

SEQ ID NO: 1272918 - RNA, 19 nt, Artificial Sequence
  Description of Artificial Sequence: Synthetic oligonucleotide
  Sense strand starting at position 677 of SEQ ID NO: 1241444
uuaucucucgucuaacaug

SEQ ID NO: 1272919 - RNA, 19 nt, Artificial Sequence
  Description of Artificial Sequence: Synthetic oligonucleotide
  Antisense strand to SEQ ID NO: 1272918
cauguuagacgagagauaa

SEQ ID NO: 1272920 - RNA, 19 nt, Artificial Sequence
  Description of Artificial Sequence: Synthetic oligonucleotide
  Sense strand starting at position 685 of SEQ ID NO: 1241444
cgucuaacaugacuuucua

SEQ ID NO: 1272921 - RNA, 19 nt, Artificial Sequence
  Description of Artificial Sequence: Synthetic oligonucleotide
  Antisense strand to SEQ ID NO: 1272920
uagaaagucauguuagacg

SEQ ID NO: 1272922 - RNA, 19 nt, Artificial Sequence
  Description of Artificial Sequence: Synthetic oligonucleotide
  Sense strand starting at position 962 of SEQ ID NO: 1241444
uaccuuugccuguaaugag

SEQ ID NO: 1272923 - RNA, 19 nt, Artificial Sequence
  Description of Artificial Sequence: Synthetic oligonucleotide
  Antisense strand to SEQ ID NO: 1272922
cucauuacaggcaaaggua

SEQ ID NO: 1272924 - RNA, 19 nt, Artificial Sequence
  Description of Artificial Sequence: Synthetic oligonucleotide
  Sense strand starting at position 1012 of SEQ ID NO: 1241444
ccagguguguauuucucua

SEQ ID NO: 1272925 - RNA, 19 nt, Artificial Sequence
  Description of Artificial Sequence: Synthetic oligonucleotide
  Antisense strand to SEQ ID NO: 1272924
uagagaaauacacaccugg

SEQ ID NO: 1272926 - RNA, 19 nt, Artificial Sequence
  Description of Artificial Sequence: Synthetic oligonucleotide
  Sense strand starting at position 1014 of SEQ ID NO: 1241444
agguguguauuucucuagu

SEQ ID NO: 1272927 - RNA, 19 nt, Artificial Sequence
  Description of Artificial Sequence: Synthetic oligonucleotide
  Antisense strand to SEQ ID NO: 1272926
acuagagaaauacacaccu

SEQ ID NO: 1272928 - RNA, 19 nt, Artificial Sequence
  Description of Artificial Sequence: Synthetic oligonucleotide
  Sense strand starting at position 1016 of SEQ ID NO: 1241444
guguguauuucucuaguag

SEQ ID NO: 1272929 - RNA, 19 nt, Artificial Sequence
  Description of Artificial Sequence: Synthetic oligonucleotide
  Antisense strand to SEQ ID NO: 1272928
cuacuagagaaauacacac

SEQ ID NO: 1272930 - RNA, 19 nt, Artificial Sequence
  Description of Artificial Sequence: Synthetic oligonucleotide
  Sense strand starting at position 1017 of SEQ ID NO: 1241444
uguguauuucucuaguagu

SEQ ID NO: 1272931 - RNA, 19 nt, Artificial Sequence
  Description of Artificial Sequence: Synthetic oligonucleotide
  Antisense strand to SEQ ID NO: 1272930
acuacuagagaaauacaca

SEQ ID NO: 1272932 - RNA, 19 nt, Artificial Sequence
  Description of Artificial Sequence: Synthetic oligonucleotide
  Sense strand starting at position 1077 of SEQ ID NO: 1241444
augcuuuaacacuggaauc

SEQ ID NO: 1272933 - RNA, 19 nt, Artificial Sequence
  Description of Artificial Sequence: Synthetic oligonucleotide
  Antisense strand to SEQ ID NO: 1272932
gauuccaguguuaaagcau

SEQ ID NO: 1272934 - RNA, 19 nt, Artificial Sequence
  Description of Artificial Sequence: Synthetic oligonucleotide
  Sense strand starting at position 1079 of SEQ ID NO: 1241444
gcuuuaacacuggaaucuu

SEQ ID NO: 1272935 - RNA, 19 nt, Artificial Sequence
  Description of Artificial Sequence: Synthetic oligonucleotide
  Antisense strand to SEQ ID NO: 1272934
aagauuccaguguuaaagc

SEQ ID NO: 1272936 - RNA, 19 nt, Artificial Sequence
  Description of Artificial Sequence: Synthetic oligonucleotide
  Sense strand starting at position 1246 of SEQ ID NO: 1241444
uaauguauccgugagcaau

SEQ ID NO: 1272937 - RNA, 19 nt, Artificial Sequence
  Description of Artificial Sequence: Synthetic oligonucleotide
  Antisense strand to SEQ ID NO: 1272936
auugcucacggauacauua

SEQ ID NO: 1272938 - RNA, 19 nt, Artificial Sequence
  Description of Artificial Sequence: Synthetic oligonucleotide
  Sense strand starting at position 1258 of SEQ ID NO: 1241444
gagcaauuccucuaguaag

SEQ ID NO: 1272939 - RNA, 19 nt, Artificial Sequence
  Description of Artificial Sequence: Synthetic oligonucleotide
  Antisense strand to SEQ ID NO: 1272938
cuuacuagaggaauugcuc

SEQ ID NO: 1272940 - RNA, 19 nt, Artificial Sequence
  Description of Artificial Sequence: Synthetic oligonucleotide
  Sense strand starting at position 1264 of SEQ ID NO: 1241444
uuccucuaguaagucauaa

SEQ ID NO: 1272941 - RNA, 19 nt, Artificial Sequence
  Description of Artificial Sequence: Synthetic oligonucleotide
  Antisense strand to SEQ ID NO: 1272940
uuaugacuuacuagaggaa

SEQ ID NO: 1272942 - RNA, 19 nt, Artificial Sequence
  Description of Artificial Sequence: Synthetic oligonucleotide
  Sense strand starting at position 1274 of SEQ ID NO: 1241444
aagucauaaccagaacguu

SEQ ID NO: 1272943 - RNA, 19 nt, Artificial Sequence
  Description of Artificial Sequence: Synthetic oligonucleotide
  Antisense strand to SEQ ID NO: 1272942
aacguucugguuaugacuu

SEQ ID NO: 1272944 - RNA, 19 nt, Artificial Sequence
  Description of Artificial Sequence: Synthetic oligonucleotide
  Sense strand starting at position 1280 of SEQ ID NO: 1241444
uaaccagaacguugucaca

SEQ ID NO: 1272945 - RNA, 19 nt, Artificial Sequence
  Description of Artificial Sequence: Synthetic oligonucleotide
  Antisense strand to SEQ ID NO: 1272944
ugugacaacguucugguua

SEQ ID NO: 1272946 - RNA, 19 nt, Artificial Sequence
  Description of Artificial Sequence: Synthetic oligonucleotide
  Sense strand starting at position 1282 of SEQ ID NO: 1241444
accagaacguugucacacu

SEQ ID NO: 1272947 - RNA, 19 nt, Artificial Sequence
  Description of Artificial Sequence: Synthetic oligonucleotide
  Antisense strand to SEQ ID NO: 1272946
agugugacaacguucuggu

SEQ ID NO: 1272948 - RNA, 19 nt, Artificial Sequence
  Description of Artificial Sequence: Synthetic oligonucleotide
  Sense strand starting at position 1313 of SEQ ID NO: 1241444
gcgcccgagacucuuguaa

SEQ ID NO: 1272949 - RNA, 19 nt, Artificial Sequence
  Description of Artificial Sequence: Synthetic oligonucleotide
  Antisense strand to SEQ ID NO: 1272948
uuacaagagucucgggcgc

SEQ ID NO: 1272950 - RNA, 19 nt, Artificial Sequence
  Description of Artificial Sequence: Synthetic oligonucleotide
  Sense strand starting at position 1669 of SEQ ID NO: 1241444
gauagaaacgcuuaguccu

SEQ ID NO: 1272951 - RNA, 19 nt, Artificial Sequence
  Description of Artificial Sequence: Synthetic oligonucleotide
  Antisense strand to SEQ ID NO: 1272950
aggacuaagcguuucuauc

SEQ ID NO: 1272952 - RNA, 19 nt, Artificial Sequence
  Description of Artificial Sequence: Synthetic oligonucleotide
  Sense strand starting at position 2231 of SEQ ID NO: 1241444
ggaaauugcuaacuugucu

SEQ ID NO: 1272953 - RNA, 19 nt, Artificial Sequence
  Description of Artificial Sequence: Synthetic oligonucleotide
  Antisense strand to SEQ ID NO: 1272952
agacaaguuagcaauuucc

SEQ ID NO: 1272954 - RNA, 19 nt, Artificial Sequence
  Description of Artificial Sequence: Synthetic oligonucleotide
  Sense strand starting at position 2409 of SEQ ID NO: 1241444
agggaagacguuugcaaau

SEQ ID NO: 1272955 - RNA, 19 nt, Artificial Sequence
  Description of Artificial Sequence: Synthetic oligonucleotide
  Antisense strand to SEQ ID NO: 1272954
auuugcaaacgucuucccu

SEQ ID NO: 1272956 - RNA, 19 nt, Artificial Sequence
  Description of Artificial Sequence: Synthetic oligonucleotide
  Sense strand starting at position 2420 of SEQ ID NO: 1241444
uugcaaauagcuugacaaa

SEQ ID NO: 1272957 - RNA, 19 nt, Artificial Sequence
  Description of Artificial Sequence: Synthetic oligonucleotide
  Antisense strand to SEQ ID NO: 1272956
uuugucaagcuauuugcaa

SEQ ID NO: 1272958 - RNA, 19 nt, Artificial Sequence
  Description of Artificial Sequence: Synthetic oligonucleotide
  Sense strand starting at position 2421 of SEQ ID NO: 1241444
ugcaaauagcuugacaaau

SEQ ID NO: 1272959 - RNA, 19 nt, Artificial Sequence
  Description of Artificial Sequence: Synthetic oligonucleotide
  Antisense strand to SEQ ID NO: 1272958
auuugucaagcuauuugca

SEQ ID NO: 1272960 - RNA, 19 nt, Artificial Sequence
  Description of Artificial Sequence: Synthetic oligonucleotide
  Sense strand starting at position 2793 of SEQ ID NO: 1241444
uccugugucaggcacagau

SEQ ID NO: 1272961 - RNA, 19 nt, Artificial Sequence
  Description of Artificial Sequence: Synthetic oligonucleotide
  Antisense strand to SEQ ID NO: 1272960
aucugugccugacacagga

SEQ ID NO: 1272962 - RNA, 19 nt, Artificial Sequence
  Description of Artificial Sequence: Synthetic oligonucleotide
  Sense strand starting at position 2848 of SEQ ID NO: 1241444
uaaagaugucgugauaauu

SEQ ID NO: 1272963 - RNA, 19 nt, Artificial Sequence
  Description of Artificial Sequence: Synthetic oligonucleotide
  Antisense strand to SEQ ID NO: 1272962
aauuaucacgacaucuuua

SEQ ID NO: 1272964 - RNA, 19 nt, Artificial Sequence
  Description of Artificial Sequence: Synthetic oligonucleotide
  Sense strand starting at position 2858 of SEQ ID NO: 1241444
gugauaauuauauggugug

SEQ ID NO: 1272965 - RNA, 19 nt, Artificial Sequence
  Description of Artificial Sequence: Synthetic oligonucleotide
  Antisense strand to SEQ ID NO: 1272964
cacaccauauaauuaucac

SEQ ID NO: 1272966 - RNA, 19 nt, Artificial Sequence
  Description of Artificial Sequence: Synthetic oligonucleotide
  Sense strand starting at position 3242 of SEQ ID NO: 1241444
uugcaucuugcuuugugua

SEQ ID NO: 1272967 - RNA, 19 nt, Artificial Sequence
  Description of Artificial Sequence: Synthetic oligonucleotide
  Antisense strand to SEQ ID NO: 1272966
uacacaaagcaagaugcaa

SEQ ID NO: 1272968 - RNA, 19 nt, Artificial Sequence
  Description of Artificial Sequence: Synthetic oligonucleotide
  Sense strand starting at position 3310 of SEQ ID NO: 1241444
ggaagacaucccuggaugu

SEQ ID NO: 1272969 - RNA, 19 nt, Artificial Sequence
  Description of Artificial Sequence: Synthetic oligonucleotide
  Antisense strand to SEQ ID NO: 1272968
acauccagggaugucuucc

SEQ ID NO: 1272970 - RNA, 19 nt, Artificial Sequence
  Description of Artificial Sequence: Synthetic oligonucleotide
  Sense strand starting at position 3311 of SEQ ID NO: 1241444
gaagacaucccuggauguu

SEQ ID NO: 1272971 - RNA, 19 nt, Artificial Sequence
  Description of Artificial Sequence: Synthetic oligonucleotide
  Antisense strand to SEQ ID NO: 1272970
aacauccagggaugucuuc

SEQ ID NO: 1272972 - RNA, 19 nt, Artificial Sequence
  Description of Artificial Sequence: Synthetic oligonucleotide
  Sense strand starting at position 3551 of SEQ ID NO: 1241444
uuugaaauuugguaucuug

SEQ ID NO: 1272973 - RNA, 19 nt, Artificial Sequence
  Description of Artificial Sequence: Synthetic oligonucleotide
  Antisense strand to SEQ ID NO: 1272972
caagauaccaaauuucaaa

SEQ ID NO: 1272974 - RNA, 19 nt, Artificial Sequence
  Description of Artificial Sequence: Synthetic oligonucleotide
  Sense strand starting at position 3560 of SEQ ID NO: 1241444
ugguaucuugcucaucaua

SEQ ID NO: 1272975 - RNA, 19 nt, Artificial Sequence
  Description of Artificial Sequence: Synthetic oligonucleotide
  Antisense strand to SEQ ID NO: 1272974
uaugaugagcaagauacca

SEQ ID NO: 1272976 - RNA, 19 nt, Artificial Sequence
  Description of Artificial Sequence: Synthetic oligonucleotide
  Sense strand starting at position 3703 of SEQ ID NO: 1241444
auggauagccuccaacuuu

SEQ ID NO: 1272977 - RNA, 19 nt, Artificial Sequence
  Description of Artificial Sequence: Synthetic oligonucleotide
  Antisense strand to SEQ ID NO: 1272976
aaaguuggaggcuauccau

SEQ ID NO: 1272978 - RNA, 19 nt, Artificial Sequence
  Description of Artificial Sequence: Synthetic oligonucleotide
  Sense strand starting at position 3762 of SEQ ID NO: 1241444
ggucuagaucuaggccauu

SEQ ID NO: 1272979 - RNA, 19 nt, Artificial Sequence
  Description of Artificial Sequence: Synthetic oligonucleotide
  Antisense strand to SEQ ID NO: 1272978
aauggccuagaucuagacc

SEQ ID NO: 1272980 - RNA, 19 nt, Artificial Sequence
  Description of Artificial Sequence: Synthetic oligonucleotide
  Sense strand starting at position 3820 of SEQ ID NO: 1241444
ggaaccaaguccucaucua

SEQ ID NO: 1272981 - RNA, 19 nt, Artificial Sequence
  Description of Artificial Sequence: Synthetic oligonucleotide
  Antisense strand to SEQ ID NO: 1272980
uagaugaggacuugguucc

SEQ ID NO: 1272982 - RNA, 19 nt, Artificial Sequence
  Description of Artificial Sequence: Synthetic oligonucleotide
  Sense strand starting at position 3904 of SEQ ID NO: 1241444
uucugugugguaugaagaa

SEQ ID NO: 1272983 - RNA, 19 nt, Artificial Sequence
  Description of Artificial Sequence: Synthetic oligonucleotide
  Antisense strand to SEQ ID NO: 1272982
uucuucauaccacacagaa

SEQ ID NO: 1272984 - RNA, 19 nt, Artificial Sequence
  Description of Artificial Sequence: Synthetic oligonucleotide
  Sense strand starting at position 7 of SEQ ID NO: 1241445
guacaucacuguucuacuu

SEQ ID NO: 1272985 - RNA, 19 nt, Artificial Sequence
  Description of Artificial Sequence: Synthetic oligonucleotide
  Antisense strand to SEQ ID NO: 1272984
aaguagaacagugauguac

SEQ ID NO: 1272986 - RNA, 19 nt, Artificial Sequence
  Description of Artificial Sequence: Synthetic oligonucleotide
  Sense strand starting at position 33 of SEQ ID NO: 1241445
gccacagagcauuaaauau

SEQ ID NO: 1272987 - RNA, 19 nt, Artificial Sequence
  Description of Artificial Sequence: Synthetic oligonucleotide
  Antisense strand to SEQ ID NO: 1272986
auauuuaaugcucuguggc

SEQ ID NO: 1272988 - RNA, 19 nt, Artificial Sequence
  Description of Artificial Sequence: Synthetic oligonucleotide
  Sense strand starting at position 93 of SEQ ID NO: 1241445
acguuuacggauuaaauua

SEQ ID NO: 1272989 - RNA, 19 nt, Artificial Sequence
  Description of Artificial Sequence: Synthetic oligonucleotide
  Antisense strand to SEQ ID NO: 1272988
uaauuuaauccguaaacgu

SEQ ID NO: 1272990 - RNA, 19 nt, Artificial Sequence
  Description of Artificial Sequence: Synthetic oligonucleotide
  Sense strand starting at position 101 of SEQ ID NO: 1241445
ggauuaaauuaucaaacag

SEQ ID NO: 1272991 - RNA, 19 nt, Artificial Sequence
  Description of Artificial Sequence: Synthetic oligonucleotide
  Antisense strand to SEQ ID NO: 1272990
cuguuugauaauuuaaucc

SEQ ID NO: 1272992 - RNA, 19 nt, Artificial Sequence
  Description of Artificial Sequence: Synthetic oligonucleotide
  Sense strand starting at position 230 of SEQ ID NO: 1241445
agcauucccuaagagaaga

SEQ ID NO: 1272993 - RNA, 19 nt, Artificial Sequence
  Description of Artificial Sequence: Synthetic oligonucleotide
  Antisense strand to SEQ ID NO: 1272992
ucuucucuuagggaaugcu

SEQ ID NO: 1272994 - RNA, 19 nt, Artificial Sequence
  Description of Artificial Sequence: Synthetic oligonucleotide
  Sense strand starting at position 284 of SEQ ID NO: 1241445
augaaaggccagugaaguu

SEQ ID NO: 1272995 - RNA, 19 nt, Artificial Sequence
  Description of Artificial Sequence: Synthetic oligonucleotide
  Antisense strand to SEQ ID NO: 1272994
aacuucacuggccuuucau

SEQ ID NO: 1272996 - RNA, 19 nt, Artificial Sequence
  Description of Artificial Sequence: Synthetic oligonucleotide
  Sense strand starting at position 294 of SEQ ID NO: 1241445
agugaaguuucuuuacaaa

SEQ ID NO: 1272997 - RNA, 19 nt, Artificial Sequence
  Description of Artificial Sequence: Synthetic oligonucleotide
  Antisense strand to SEQ ID NO: 1272996
uuuguaaagaaacuucacu

SEQ ID NO: 1272998 - RNA, 19 nt, Artificial Sequence
  Description of Artificial Sequence: Synthetic oligonucleotide
  Sense strand starting at position 426 of SEQ ID NO: 1241445
uggaauuucuacuacaagu

SEQ ID NO: 1272999 - RNA, 19 nt, Artificial Sequence
  Description of Artificial Sequence: Synthetic oligonucleotide
  Antisense strand to SEQ ID NO: 1272998
acuuguaguagaaauucca

SEQ ID NO: 1273000 - RNA, 19 nt, Artificial Sequence
  Description of Artificial Sequence: Synthetic oligonucleotide
  Sense strand starting at position 778 of SEQ ID NO: 1241445
gacacuuagugacugugau

SEQ ID NO: 1273001 - RNA, 19 nt, Artificial Sequence
  Description of Artificial Sequence: Synthetic oligonucleotide
  Antisense strand to SEQ ID NO: 1273000
aucacagucacuaaguguc

SEQ ID NO: 1273002 - RNA, 19 nt, Artificial Sequence
  Description of Artificial Sequence: Synthetic oligonucleotide
  Sense strand starting at position 779 of SEQ ID NO: 1241445
acacuuagugacugugauu

SEQ ID NO: 1273003 - RNA, 19 nt, Artificial Sequence
  Description of Artificial Sequence: Synthetic oligonucleotide
  Antisense strand to SEQ ID NO: 1273002
aaucacagucacuaagugu

SEQ ID NO: 1273004 - RNA, 19 nt, Artificial Sequence
  Description of Artificial Sequence: Synthetic oligonucleotide
  Sense strand starting at position 784 of SEQ ID NO: 1241445
uagugacugugauuaaauu

SEQ ID NO: 1273005 - RNA, 19 nt, Artificial Sequence
  Description of Artificial Sequence: Synthetic oligonucleotide
  Antisense strand to SEQ ID NO: 1273004
aauuuaaucacagucacua

SEQ ID NO: 1273006 - RNA, 19 nt, Artificial Sequence
  Description of Artificial Sequence: Synthetic oligonucleotide
  Sense strand starting at position 868 of SEQ ID NO: 1241445
ccgguaacauauguuauua

SEQ ID NO: 1273007 - RNA, 19 nt, Artificial Sequence
  Description of Artificial Sequence: Synthetic oligonucleotide
  Antisense strand to SEQ ID NO: 1273006
uaauaacauauguuaccgg

SEQ ID NO: 1273008 - RNA, 19 nt, Artificial Sequence
  Description of Artificial Sequence: Synthetic oligonucleotide
  Sense strand starting at position 878 of SEQ ID NO: 1241445
auguuauuaaugugacagu

SEQ ID NO: 1273009 - RNA, 19 nt, Artificial Sequence
  Description of Artificial Sequence: Synthetic oligonucleotide
  Antisense strand to SEQ ID NO: 1273008
acugucacauuaauaacau

SEQ ID NO: 1273010 - RNA, 19 nt, Artificial Sequence
  Description of Artificial Sequence: Synthetic oligonucleotide
  Sense strand starting at position 887 of SEQ ID NO: 1241445
augugacagucucucaaga

SEQ ID NO: 1273011 - RNA, 19 nt, Artificial Sequence
  Description of Artificial Sequence: Synthetic oligonucleotide
  Antisense strand to SEQ ID NO: 1273010
ucuugagagacugucacau

SEQ ID NO: 1273012 - RNA, 19 nt, Artificial Sequence
  Description of Artificial Sequence: Synthetic oligonucleotide
  Sense strand starting at position 1043 of SEQ ID NO: 1241445
gggcuuuauuaaccgacua

SEQ ID NO: 1273013 - RNA, 19 nt, Artificial Sequence
  Description of Artificial Sequence: Synthetic oligonucleotide
  Antisense strand to SEQ ID NO: 1273012
uagucgguuaauaaagccc

SEQ ID NO: 1273014 - RNA, 19 nt, Artificial Sequence
  Description of Artificial Sequence: Synthetic oligonucleotide
  Sense strand starting at position 1068 of SEQ ID NO: 1241445
cggcauaaucgauguacuu

SEQ ID NO: 1273015 - RNA, 19 nt, Artificial Sequence
  Description of Artificial Sequence: Synthetic oligonucleotide
  Antisense strand to SEQ ID NO: 1273014
aaguacaucgauuaugccg

SEQ ID NO: 1273016 - RNA, 19 nt, Artificial Sequence
  Description of Artificial Sequence: Synthetic oligonucleotide
  Sense strand starting at position 1174 of SEQ ID NO: 1241445
ccucuauuuccagagcguu

SEQ ID NO: 1273017 - RNA, 19 nt, Artificial Sequence
  Description of Artificial Sequence: Synthetic oligonucleotide
  Antisense strand to SEQ ID NO: 1273016
aacgcucuggaaauagagg

SEQ ID NO: 1273018 - RNA, 19 nt, Artificial Sequence
  Description of Artificial Sequence: Synthetic oligonucleotide
  Sense strand starting at position 2263 of SEQ ID NO: 1241445
cuggguuggcuggauuaca

SEQ ID NO: 1273019 - RNA, 19 nt, Artificial Sequence
  Description of Artificial Sequence: Synthetic oligonucleotide
  Antisense strand to SEQ ID NO: 1273018
uguaauccagccaacccag

SEQ ID NO: 1273020 - RNA, 19 nt, Artificial Sequence
  Description of Artificial Sequence: Synthetic oligonucleotide
  Sense strand starting at position 2421 of SEQ ID NO: 1241445
ggagucagguucucgccaa

SEQ ID NO: 1273021 - RNA, 19 nt, Artificial Sequence
  Description of Artificial Sequence: Synthetic oligonucleotide
  Antisense strand to SEQ ID NO: 1273020
uuggcgagaaccugacucc

SEQ ID NO: 1273022 - RNA, 19 nt, Artificial Sequence
  Description of Artificial Sequence: Synthetic oligonucleotide
  Sense strand starting at position 2425 of SEQ ID NO: 1241445
ucagguucucgccaacaaa

SEQ ID NO: 1273023 - RNA, 19 nt, Artificial Sequence
  Description of Artificial Sequence: Synthetic oligonucleotide
  Antisense strand to SEQ ID NO: 1273022
uuuguuggcgagaaccuga

SEQ ID NO: 1273024 - RNA, 19 nt, Artificial Sequence
  Description of Artificial Sequence: Synthetic oligonucleotide
  Sense strand starting at position 2561 of SEQ ID NO: 1241445
augccauccggauggaaga

SEQ ID NO: 1273025 - RNA, 19 nt, Artificial Sequence
  Description of Artificial Sequence: Synthetic oligonucleotide
  Antisense strand to SEQ ID NO: 1273024
ucuuccauccggauggcau

SEQ ID NO: 1273026 - RNA, 19 nt, Artificial Sequence
  Description of Artificial Sequence: Synthetic oligonucleotide
  Sense strand starting at position 2620 of SEQ ID NO: 1241445
gcgaaaugaaucuguagag

SEQ ID NO: 1273027 - RNA, 19 nt, Artificial Sequence
  Description of Artificial Sequence: Synthetic oligonucleotide
  Antisense strand to SEQ ID NO: 1273026
cucuacagauucauuucgc

SEQ ID NO: 1273028 - RNA, 19 nt, Artificial Sequence
  Description of Artificial Sequence: Synthetic oligonucleotide
  Sense strand starting at position 2929 of SEQ ID NO: 1241445
cgaacuguuaccgagaguc

SEQ ID NO: 1273029 - RNA, 19 nt, Artificial Sequence
  Description of Artificial Sequence: Synthetic oligonucleotide
  Antisense strand to SEQ ID NO: 1273028
gacucucgguaacaguucg

SEQ ID NO: 1273030 - RNA, 19 nt, Artificial Sequence
  Description of Artificial Sequence: Synthetic oligonucleotide
  Sense strand starting at position 2931 of SEQ ID NO: 1241445
aacuguuaccgagagucga

SEQ ID NO: 1273031 - RNA, 19 nt, Artificial Sequence
  Description of Artificial Sequence: Synthetic oligonucleotide
  Antisense strand to SEQ ID NO: 1273030
ucgacucucgguaacaguu

SEQ ID NO: 1273032 - RNA, 19 nt, Artificial Sequence
  Description of Artificial Sequence: Synthetic oligonucleotide
  Sense strand starting at position 3045 of SEQ ID NO: 1241445
gguacagugacuuggcuaa

SEQ ID NO: 1273033 - RNA, 19 nt, Artificial Sequence
  Description of Artificial Sequence: Synthetic oligonucleotide
  Antisense strand to SEQ ID NO: 1273032
uuagccaagucacuguacc

SEQ ID NO: 1273034 - RNA, 19 nt, Artificial Sequence
  Description of Artificial Sequence: Synthetic oligonucleotide
  Sense strand starting at position 3049 of SEQ ID NO: 1241445
cagugacuuggcuaaagua

SEQ ID NO: 1273035 - RNA, 19 nt, Artificial Sequence
  Description of Artificial Sequence: Synthetic oligonucleotide
  Antisense strand to SEQ ID NO: 1273034
uacuuuagccaagucacug

SEQ ID NO: 1273036 - RNA, 19 nt, Artificial Sequence
  Description of Artificial Sequence: Synthetic oligonucleotide
  Sense strand starting at position 3090 of SEQ ID NO: 1241445
cugggauucuaaccuagcu

SEQ ID NO: 1273037 - RNA, 19 nt, Artificial Sequence
  Description of Artificial Sequence: Synthetic oligonucleotide
  Antisense strand to SEQ ID NO: 1273036
agcuagguuagaaucccag

SEQ ID NO: 1273038 - RNA, 19 nt, Artificial Sequence
  Description of Artificial Sequence: Synthetic oligonucleotide
  Sense strand starting at position 3106 of SEQ ID NO: 1241445
gcucccaaagcuuggauaa

SEQ ID NO: 1273039 - RNA, 19 nt, Artificial Sequence
  Description of Artificial Sequence: Synthetic oligonucleotide
  Antisense strand to SEQ ID NO: 1273038
uuauccaagcuuugggagc

SEQ ID NO: 1273040 - RNA, 19 nt, Artificial Sequence
  Description of Artificial Sequence: Synthetic oligonucleotide
  Sense strand starting at position 3107 of SEQ ID NO: 1241445
cucccaaagcuuggauaau

SEQ ID NO: 1273041 - RNA, 19 nt, Artificial Sequence
  Description of Artificial Sequence: Synthetic oligonucleotide
  Antisense strand to SEQ ID NO: 1273040
auuauccaagcuuugggag

SEQ ID NO: 1273042 - RNA, 19 nt, Artificial Sequence
  Description of Artificial Sequence: Synthetic oligonucleotide
  Sense strand starting at position 3146 of SEQ ID NO: 1241445
gggcuaugucaugcuugcu

SEQ ID NO: 1273043 - RNA, 19 nt, Artificial Sequence
  Description of Artificial Sequence: Synthetic oligonucleotide
  Antisense strand to SEQ ID NO: 1273042
agcaagcaugacauagccc

SEQ ID NO: 1273044 - RNA, 19 nt, Artificial Sequence
  Description of Artificial Sequence: Synthetic oligonucleotide
  Sense strand starting at position 3147 of SEQ ID NO: 1241445
ggcuaugucaugcuugcuu

SEQ ID NO: 1273045 - RNA, 19 nt, Artificial Sequence
  Description of Artificial Sequence: Synthetic oligonucleotide
  Antisense strand to SEQ ID NO: 1273044
aagcaagcaugacauagcc

SEQ ID NO: 1273046 - RNA, 19 nt, Artificial Sequence
  Description of Artificial Sequence: Synthetic oligonucleotide
  Sense strand starting at position 3190 of SEQ ID NO: 1241445
acucucuugcuauguuuga

SEQ ID NO: 1273047 - RNA, 19 nt, Artificial Sequence
  Description of Artificial Sequence: Synthetic oligonucleotide
  Antisense strand to SEQ ID NO: 1273046
ucaaacauagcaagagagu

SEQ ID NO: 1273048 - RNA, 19 nt, Artificial Sequence
  Description of Artificial Sequence: Synthetic oligonucleotide
  Sense strand starting at position 3194 of SEQ ID NO: 1241445
ucuugcuauguuugagaca

SEQ ID NO: 1273049 - RNA, 19 nt, Artificial Sequence
  Description of Artificial Sequence: Synthetic oligonucleotide
  Antisense strand to SEQ ID NO: 1273048
ugucucaaacauagcaaga

SEQ ID NO: 1273050 - RNA, 19 nt, Artificial Sequence
  Description of Artificial Sequence: Synthetic oligonucleotide
  Sense strand starting at position 3197 of SEQ ID NO: 1241445
ugcuauguuugagacauuu

SEQ ID NO: 1273051 - RNA, 19 nt, Artificial Sequence
  Description of Artificial Sequence: Synthetic oligonucleotide
  Antisense strand to SEQ ID NO: 1273050
aaaugucucaaacauagca

SEQ ID NO: 1273052 - RNA, 19 nt, Artificial Sequence
  Description of Artificial Sequence: Synthetic oligonucleotide
  Sense strand starting at position 3213 of SEQ ID NO: 1241445
uuucuugcuccacgaaaua

SEQ ID NO: 1273053 - RNA, 19 nt, Artificial Sequence
  Description of Artificial Sequence: Synthetic oligonucleotide
  Antisense strand to SEQ ID NO: 1273052
uauuucguggagcaagaaa

SEQ ID NO: 1273054 - RNA, 19 nt, Artificial Sequence
  Description of Artificial Sequence: Synthetic oligonucleotide
  Sense strand starting at position 3223 of SEQ ID NO: 1241445
cacgaaauauauguuuguu

SEQ ID NO: 1273055 - RNA, 19 nt, Artificial Sequence
  Description of Artificial Sequence: Synthetic oligonucleotide
  Antisense strand to SEQ ID NO: 1273054
aacaaacauauauuucgug

SEQ ID NO: 1273056 - RNA, 19 nt, Artificial Sequence
  Description of Artificial Sequence: Synthetic oligonucleotide
  Sense strand starting at position 3225 of SEQ ID NO: 1241445
cgaaauauauguuuguugu

SEQ ID NO: 1273057 - RNA, 19 nt, Artificial Sequence
  Description of Artificial Sequence: Synthetic oligonucleotide
  Antisense strand to SEQ ID NO: 1273056
acaacaaacauauauuucg

SEQ ID NO: 1273058 - RNA, 19 nt, Artificial Sequence
  Description of Artificial Sequence: Synthetic oligonucleotide
  Sense strand starting at position 3547 of SEQ ID NO: 1241445
ggccaaauauauguaucuu

SEQ ID NO: 1273059 - RNA, 19 nt, Artificial Sequence
  Description of Artificial Sequence: Synthetic oligonucleotide
  Antisense strand to SEQ ID NO: 1273058
aagauacauauauuuggcc

SEQ ID NO: 1273060 - RNA, 19 nt, Artificial Sequence
  Description of Artificial Sequence: Synthetic oligonucleotide
  Sense strand starting at position 3595 of SEQ ID NO: 1241445
agaggcucccaauguuaaa

SEQ ID NO: 1273061 - RNA, 19 nt, Artificial Sequence
  Description of Artificial Sequence: Synthetic oligonucleotide
  Antisense strand to SEQ ID NO: 1273060
uuuaacauugggagccucu

SEQ ID NO: 1273062 - RNA, 19 nt, Artificial Sequence
  Description of Artificial Sequence: Synthetic oligonucleotide
  Sense strand starting at position 3677 of SEQ ID NO: 1241445
ggccaagagugguucuauu

SEQ ID NO: 1273063 - RNA, 19 nt, Artificial Sequence
  Description of Artificial Sequence: Synthetic oligonucleotide
  Antisense strand to SEQ ID NO: 1273062
aauagaaccacucuuggcc

SEQ ID NO: 1273064 - RNA, 19 nt, Artificial Sequence
  Description of Artificial Sequence: Synthetic oligonucleotide
  Sense strand starting at position 168 of SEQ ID NO: 1241446
cgcugauucugauuuauuc

SEQ ID NO: 1273065 - RNA, 19 nt, Artificial Sequence
  Description of Artificial Sequence: Synthetic oligonucleotide
  Antisense strand to SEQ ID NO: 1273064
gaauaaaucagaaucagcg

SEQ ID NO: 1273066 - RNA, 19 nt, Artificial Sequence
  Description of Artificial Sequence: Synthetic oligonucleotide
  Sense strand starting at position 176 of SEQ ID NO: 1241446
cugauuuauucugugugua

SEQ ID NO: 1273067 - RNA, 19 nt, Artificial Sequence
  Description of Artificial Sequence: Synthetic oligonucleotide
  Antisense strand to SEQ ID NO: 1273066
uacacacagaauaaaucag

SEQ ID NO: 1273068 - RNA, 19 nt, Artificial Sequence
  Description of Artificial Sequence: Synthetic oligonucleotide
  Sense strand starting at position 178 of SEQ ID NO: 1241446
gauuuauucuguguguauu

SEQ ID NO: 1273069 - RNA, 19 nt, Artificial Sequence
  Description of Artificial Sequence: Synthetic oligonucleotide
  Antisense strand to SEQ ID NO: 1273068
aauacacacagaauaaauc

SEQ ID NO: 1273070 - RNA, 19 nt, Artificial Sequence
  Description of Artificial Sequence: Synthetic oligonucleotide
  Sense strand starting at position 179 of SEQ ID NO: 1241446
auuuauucuguguguauuc

SEQ ID NO: 1273071 - RNA, 19 nt, Artificial Sequence
  Description of Artificial Sequence: Synthetic oligonucleotide
  Antisense strand to SEQ ID NO: 1273070
gaauacacacagaauaaau

SEQ ID NO: 1273072 - RNA, 19 nt, Artificial Sequence
  Description of Artificial Sequence: Synthetic oligonucleotide
  Sense strand starting at position 228 of SEQ ID NO: 1241446
ccauauuacugucucagac

SEQ ID NO: 1273073 - RNA, 19 nt, Artificial Sequence
  Description of Artificial Sequence: Synthetic oligonucleotide
  Antisense strand to SEQ ID NO: 1273072
gucugagacaguaauaugg

SEQ ID NO: 1273074 - RNA, 19 nt, Artificial Sequence
  Description of Artificial Sequence: Synthetic oligonucleotide
  Sense strand starting at position 257 of SEQ ID NO: 1241446
uggaauuagugcuuaucua

SEQ ID NO: 1273075 - RNA, 19 nt, Artificial Sequence
  Description of Artificial Sequence: Synthetic oligonucleotide
  Antisense strand to SEQ ID NO: 1273074
uagauaagcacuaauucca

SEQ ID NO: 1273076 - RNA, 19 nt, Artificial Sequence
  Description of Artificial Sequence: Synthetic oligonucleotide
  Sense strand starting at position 258 of SEQ ID NO: 1241446
ggaauuagugcuuaucuaa

SEQ ID NO: 1273077 - RNA, 19 nt, Artificial Sequence
  Description of Artificial Sequence: Synthetic oligonucleotide
  Antisense strand to SEQ ID NO: 1273076
uuagauaagcacuaauucc

SEQ ID NO: 1273078 - RNA, 19 nt, Artificial Sequence
  Description of Artificial Sequence: Synthetic oligonucleotide
  Sense strand starting at position 343 of SEQ ID NO: 1241446
ggucucauccaucaccuuu

SEQ ID NO: 1273079 - RNA, 19 nt, Artificial Sequence
  Description of Artificial Sequence: Synthetic oligonucleotide
  Antisense strand to SEQ ID NO: 1273078
aaaggugauggaugagacc

SEQ ID NO: 1273080 - RNA, 19 nt, Artificial Sequence
  Description of Artificial Sequence: Synthetic oligonucleotide
  Sense strand starting at position 519 of SEQ ID NO: 1241446
auaccauguugugcuagau

SEQ ID NO: 1273081 - RNA, 19 nt, Artificial Sequence
  Description of Artificial Sequence: Synthetic oligonucleotide
  Antisense strand to SEQ ID NO: 1273080
aucuagcacaacaugguau

SEQ ID NO: 1273082 - RNA, 19 nt, Artificial Sequence
  Description of Artificial Sequence: Synthetic oligonucleotide
  Sense strand starting at position 523 of SEQ ID NO: 1241446
cauguugugcuagauucua

SEQ ID NO: 1273083 - RNA, 19 nt, Artificial Sequence
  Description of Artificial Sequence: Synthetic oligonucleotide
  Antisense strand to SEQ ID NO: 1273082
uagaaucuagcacaacaug

SEQ ID NO: 1273084 - RNA, 19 nt, Artificial Sequence
  Description of Artificial Sequence: Synthetic oligonucleotide
  Sense strand starting at position 532 of SEQ ID NO: 1241446
cuagauucuacgggucuau

SEQ ID NO: 1273085 - RNA, 19 nt, Artificial Sequence
  Description of Artificial Sequence: Synthetic oligonucleotide
  Antisense strand to SEQ ID NO: 1273084
auagacccguagaaucuag

SEQ ID NO: 1273086 - RNA, 19 nt, Artificial Sequence
  Description of Artificial Sequence: Synthetic oligonucleotide
  Sense strand starting at position 555 of SEQ ID NO: 1241446
gucacaugacuugguuaaa

SEQ ID NO: 1273087 - RNA, 19 nt, Artificial Sequence
  Description of Artificial Sequence: Synthetic oligonucleotide
  Antisense strand to SEQ ID NO: 1273086
uuuaaccaagucaugugac

SEQ ID NO: 1273088 - RNA, 19 nt, Artificial Sequence
  Description of Artificial Sequence: Synthetic oligonucleotide
  Sense strand starting at position 654 of SEQ ID NO: 1241446
ugaccacuuugcccugaaa

SEQ ID NO: 1273089 - RNA, 19 nt, Artificial Sequence
  Description of Artificial Sequence: Synthetic oligonucleotide
  Antisense strand to SEQ ID NO: 1273088
uuucagggcaaagugguca

SEQ ID NO: 1273090 - RNA, 19 nt, Artificial Sequence
  Description of Artificial Sequence: Synthetic oligonucleotide
  Sense strand starting at position 872 of SEQ ID NO: 1241446
ucaccuuagugguuaacau

SEQ ID NO: 1273091 - RNA, 19 nt, Artificial Sequence
  Description of Artificial Sequence: Synthetic oligonucleotide
  Antisense strand to SEQ ID NO: 1273090
auguuaaccacuaagguga

SEQ ID NO: 1273092 - RNA, 19 nt, Artificial Sequence
  Description of Artificial Sequence: Synthetic oligonucleotide
  Sense strand starting at position 879 of SEQ ID NO: 1241446
agugguuaacauuagaguu

SEQ ID NO: 1273093 - RNA, 19 nt, Artificial Sequence
  Description of Artificial Sequence: Synthetic oligonucleotide
  Antisense strand to SEQ ID NO: 1273092
aacucuaauguuaaccacu

SEQ ID NO: 1273094 - RNA, 19 nt, Artificial Sequence
  Description of Artificial Sequence: Synthetic oligonucleotide
  Sense strand starting at position 994 of SEQ ID NO: 1241446
agacguaccgcagauugaa

SEQ ID NO: 1273095 - RNA, 19 nt, Artificial Sequence
  Description of Artificial Sequence: Synthetic oligonucleotide
  Antisense strand to SEQ ID NO: 1273094
uucaaucugcgguacgucu

SEQ ID NO: 1273096 - RNA, 19 nt, Artificial Sequence
  Description of Artificial Sequence: Synthetic oligonucleotide
  Sense strand starting at position 1019 of SEQ ID NO: 1241446
guugcucuuccuggaauaa

SEQ ID NO: 1273097 - RNA, 19 nt, Artificial Sequence
  Description of Artificial Sequence: Synthetic oligonucleotide
  Antisense strand to SEQ ID NO: 1273096
uuauuccaggaagagcaac

SEQ ID NO: 1273098 - RNA, 19 nt, Artificial Sequence
  Description of Artificial Sequence: Synthetic oligonucleotide
  Sense strand starting at position 1020 of SEQ ID NO: 1241446
uugcucuuccuggaauaag

SEQ ID NO: 1273099 - RNA, 19 nt, Artificial Sequence
  Description of Artificial Sequence: Synthetic oligonucleotide
  Antisense strand to SEQ ID NO: 1273098
cuuauuccaggaagagcaa

SEQ ID NO: 1273100 - RNA, 19 nt, Artificial Sequence
  Description of Artificial Sequence: Synthetic oligonucleotide
  Sense strand starting at position 1778 of SEQ ID NO: 1241446
gucaucguuaucgcucauu

SEQ ID NO: 1273101 - RNA, 19 nt, Artificial Sequence
  Description of Artificial Sequence: Synthetic oligonucleotide
  Antisense strand to SEQ ID NO: 1273100
aaugagcgauaacgaugac

SEQ ID NO: 1273102 - RNA, 19 nt, Artificial Sequence
  Description of Artificial Sequence: Synthetic oligonucleotide
  Sense strand starting at position 1783 of SEQ ID NO: 1241446
cguuaucgcucauuuccua

SEQ ID NO: 1273103 - RNA, 19 nt, Artificial Sequence
  Description of Artificial Sequence: Synthetic oligonucleotide
  Antisense strand to SEQ ID NO: 1273102
uaggaaaugagcgauaacg

SEQ ID NO: 1273104 - RNA, 19 nt, Artificial Sequence
  Description of Artificial Sequence: Synthetic oligonucleotide
  Sense strand starting at position 2256 of SEQ ID NO: 1241446
ccgcgaguugucaggagau

SEQ ID NO: 1273105 - RNA, 19 nt, Artificial Sequence
  Description of Artificial Sequence: Synthetic oligonucleotide
  Antisense strand to SEQ ID NO: 1273104
aucuccugacaacucgcgg

SEQ ID NO: 1273106 - RNA, 19 nt, Artificial Sequence
  Description of Artificial Sequence: Synthetic oligonucleotide
  Sense strand starting at position 2436 of SEQ ID NO: 1241446
uuuggugugacugguuaua

SEQ ID NO: 1273107 - RNA, 19 nt, Artificial Sequence
  Description of Artificial Sequence: Synthetic oligonucleotide
  Antisense strand to SEQ ID NO: 1273106
uauaaccagucacaccaaa

SEQ ID NO: 1273108 - RNA, 19 nt, Artificial Sequence
  Description of Artificial Sequence: Synthetic oligonucleotide
  Sense strand starting at position 2438 of SEQ ID NO: 1241446
uggugugacugguuauacu

SEQ ID NO: 1273109 - RNA, 19 nt, Artificial Sequence
  Description of Artificial Sequence: Synthetic oligonucleotide
  Antisense strand to SEQ ID NO: 1273108
aguauaaccagucacacca

SEQ ID NO: 1273110 - RNA, 19 nt, Artificial Sequence
  Description of Artificial Sequence: Synthetic oligonucleotide
  Sense strand starting at position 2666 of SEQ ID NO: 1241446
agaauccuguauucguuua

SEQ ID NO: 1273111 - RNA, 19 nt, Artificial Sequence
  Description of Artificial Sequence: Synthetic oligonucleotide
  Antisense strand to SEQ ID NO: 1273110
uaaacgaauacaggauucu

SEQ ID NO: 1273112 - RNA, 19 nt, Artificial Sequence
  Description of Artificial Sequence: Synthetic oligonucleotide
  Sense strand starting at position 2677 of SEQ ID NO: 1241446
uucguuuaucugggaguga

SEQ ID NO: 1273113 - RNA, 19 nt, Artificial Sequence
  Description of Artificial Sequence: Synthetic oligonucleotide
  Antisense strand to SEQ ID NO: 1273112
ucacucccagauaaacgaa

SEQ ID NO: 1273114 - RNA, 19 nt, Artificial Sequence
  Description of Artificial Sequence: Synthetic oligonucleotide
  Sense strand starting at position 2794 of SEQ ID NO: 1241446
uguuguagcccagacaguu

SEQ ID NO: 1273115 - RNA, 19 nt, Artificial Sequence
  Description of Artificial Sequence: Synthetic oligonucleotide
  Antisense strand to SEQ ID NO: 1273114
aacugucugggcuacaaca

SEQ ID NO: 1273116 - RNA, 19 nt, Artificial Sequence
  Description of Artificial Sequence: Synthetic oligonucleotide
  Sense strand starting at position 2804 of SEQ ID NO: 1241446
cagacaguuuaggcaauau

SEQ ID NO: 1273117 - RNA, 19 nt, Artificial Sequence
  Description of Artificial Sequence: Synthetic oligonucleotide
  Antisense strand to SEQ ID NO: 1273116
auauugccuaaacugucug

SEQ ID NO: 1273118 - RNA, 19 nt, Artificial Sequence
  Description of Artificial Sequence: Synthetic oligonucleotide
  Sense strand starting at position 2858 of SEQ ID NO: 1241446
ggaucaauaugggaaacuu

SEQ ID NO: 1273119 - RNA, 19 nt, Artificial Sequence
  Description of Artificial Sequence: Synthetic oligonucleotide
  Antisense strand to SEQ ID NO: 1273118
aaguuucccauauugaucc

SEQ ID NO: 1273120 - RNA, 19 nt, Artificial Sequence
  Description of Artificial Sequence: Synthetic oligonucleotide
  Sense strand starting at position 2920 of SEQ ID NO: 1241446
caugaaguguaaucacaug

SEQ ID NO: 1273121 - RNA, 19 nt, Artificial Sequence
  Description of Artificial Sequence: Synthetic oligonucleotide
  Antisense strand to SEQ ID NO: 1273120
caugugauuacacuucaug

SEQ ID NO: 1273122 - RNA, 19 nt, Artificial Sequence
  Description of Artificial Sequence: Synthetic oligonucleotide
  Sense strand starting at position 2945 of SEQ ID NO: 1241446
accgauauuuauugaacac

SEQ ID NO: 1273123 - RNA, 19 nt, Artificial Sequence
  Description of Artificial Sequence: Synthetic oligonucleotide
  Antisense strand to SEQ ID NO: 1273122
guguucaauaaauaucggu

SEQ ID NO: 1273124 - RNA, 19 nt, Artificial Sequence
  Description of Artificial Sequence: Synthetic oligonucleotide
  Sense strand starting at position 3064 of SEQ ID NO: 1241446
auuguaagagugugcaaca

SEQ ID NO: 1273125 - RNA, 19 nt, Artificial Sequence
  Description of Artificial Sequence: Synthetic oligonucleotide
  Antisense strand to SEQ ID NO: 1273124
uguugcacacucuuacaau

SEQ ID NO: 1273126 - RNA, 19 nt, Artificial Sequence
  Description of Artificial Sequence: Synthetic oligonucleotide
  Sense strand starting at position 3065 of SEQ ID NO: 1241446
uuguaagagugugcaacaa

SEQ ID NO: 1273127 - RNA, 19 nt, Artificial Sequence
  Description of Artificial Sequence: Synthetic oligonucleotide
  Antisense strand to SEQ ID NO: 1273126
uuguugcacacucuuacaa

SEQ ID NO: 1273128 - RNA, 19 nt, Artificial Sequence
  Description of Artificial Sequence: Synthetic oligonucleotide
  Sense strand starting at position 3204 of SEQ ID NO: 1241446
cugauucccggaugaauac

SEQ ID NO: 1273129 - RNA, 19 nt, Artificial Sequence
  Description of Artificial Sequence: Synthetic oligonucleotide
  Antisense strand to SEQ ID NO: 1273128
guauucauccgggaaucag

SEQ ID NO: 1273130 - RNA, 19 nt, Artificial Sequence
  Description of Artificial Sequence: Synthetic oligonucleotide
  Sense strand starting at position 3690 of SEQ ID NO: 1241446
caccgcucgcggucuaaua

SEQ ID NO: 1273131 - RNA, 19 nt, Artificial Sequence
  Description of Artificial Sequence: Synthetic oligonucleotide
  Antisense strand to SEQ ID NO: 1273130
uauuagaccgcgagcggug

SEQ ID NO: 1273132 - RNA, 19 nt, Artificial Sequence
  Description of Artificial Sequence: Synthetic oligonucleotide
  Sense strand starting at position 3691 of SEQ ID NO: 1241446
accgcucgcggucuaauau

SEQ ID NO: 1273133 - RNA, 19 nt, Artificial Sequence
  Description of Artificial Sequence: Synthetic oligonucleotide
  Antisense strand to SEQ ID NO: 1273132
auauuagaccgcgagcggu

SEQ ID NO: 1273134 - RNA, 19 nt, Artificial Sequence
  Description of Artificial Sequence: Synthetic oligonucleotide
  Sense strand starting at position 3834 of SEQ ID NO: 1241446
uaagcagaccauuauguga

SEQ ID NO: 1273135 - RNA, 19 nt, Artificial Sequence
  Description of Artificial Sequence: Synthetic oligonucleotide
  Antisense strand to SEQ ID NO: 1273134
ucacauaauggucugcuua

SEQ ID NO: 1273136 - RNA, 19 nt, Artificial Sequence
  Description of Artificial Sequence: Synthetic oligonucleotide
  Sense strand starting at position 3837 of SEQ ID NO: 1241446
gcagaccauuaugugauaa

SEQ ID NO: 1273137 - RNA, 19 nt, Artificial Sequence
  Description of Artificial Sequence: Synthetic oligonucleotide
  Antisense strand to SEQ ID NO: 1273136
uuaucacauaauggucugc

SEQ ID NO: 1273138 - RNA, 19 nt, Artificial Sequence
  Description of Artificial Sequence: Synthetic oligonucleotide
  Sense strand starting at position 3897 of SEQ ID NO: 1241446
ugaguuaauuaacuggaua

SEQ ID NO: 1273139 - RNA, 19 nt, Artificial Sequence
  Description of Artificial Sequence: Synthetic oligonucleotide
  Antisense strand to SEQ ID NO: 1273138
uauccaguuaauuaacuca

SEQ ID NO: 1273140 - RNA, 19 nt, Artificial Sequence
  Description of Artificial Sequence: Synthetic oligonucleotide
  Sense strand starting at position 3921 of SEQ ID NO: 1241446
aguuaaagcuaauugauga

SEQ ID NO: 1273141 - RNA, 19 nt, Artificial Sequence
  Description of Artificial Sequence: Synthetic oligonucleotide
  Antisense strand to SEQ ID NO: 1273140
ucaucaauuagcuuuaacu

SEQ ID NO: 1273142 - RNA, 19 nt, Artificial Sequence
  Description of Artificial Sequence: Synthetic oligonucleotide
  Sense strand starting at position 3928 of SEQ ID NO: 1241446
gcuaauugaugauuacaac

SEQ ID NO: 1273143 - RNA, 19 nt, Artificial Sequence
  Description of Artificial Sequence: Synthetic oligonucleotide
  Antisense strand to SEQ ID NO: 1273142
guuguaaucaucaauuagc

SEQ ID NO: 1273144 - RNA, 19 nt, Artificial Sequence
  Description of Artificial Sequence: Synthetic oligonucleotide
  Sense strand starting at position 98 of SEQ ID NO: 1241447
ggaugaaguuaggcauguu

SEQ ID NO: 1273145 - RNA, 19 nt, Artificial Sequence
  Description of Artificial Sequence: Synthetic oligonucleotide
  Antisense strand to SEQ ID NO: 1273144
aacaugccuaacuucaucc

SEQ ID NO: 1273146 - RNA, 19 nt, Artificial Sequence
  Description of Artificial Sequence: Synthetic oligonucleotide
  Sense strand starting at position 99 of SEQ ID NO: 1241447
gaugaaguuaggcauguua

SEQ ID NO: 1273147 - RNA, 19 nt, Artificial Sequence
  Description of Artificial Sequence: Synthetic oligonucleotide
  Antisense strand to SEQ ID NO: 1273146
uaacaugccuaacuucauc

SEQ ID NO: 1273148 - RNA, 19 nt, Artificial Sequence
  Description of Artificial Sequence: Synthetic oligonucleotide
  Sense strand starting at position 101 of SEQ ID NO: 1241447
ugaaguuaggcauguuaca

SEQ ID NO: 1273149 - RNA, 19 nt, Artificial Sequence
  Description of Artificial Sequence: Synthetic oligonucleotide
  Antisense strand to SEQ ID NO: 1273148
uguaacaugccuaacuuca

SEQ ID NO: 1273150 - RNA, 19 nt, Artificial Sequence
  Description of Artificial Sequence: Synthetic oligonucleotide
  Sense strand starting at position 366 of SEQ ID NO: 1241447
aguaaauuguaaucacuuc

SEQ ID NO: 1273151 - RNA, 19 nt, Artificial Sequence
  Description of Artificial Sequence: Synthetic oligonucleotide
  Antisense strand to SEQ ID NO: 1273150
gaagugauuacaauuuacu

SEQ ID NO: 1273152 - RNA, 19 nt, Artificial Sequence
  Description of Artificial Sequence: Synthetic oligonucleotide
  Sense strand starting at position 391 of SEQ ID NO: 1241447
uguacaguacuugaauguu

SEQ ID NO: 1273153 - RNA, 19 nt, Artificial Sequence
  Description of Artificial Sequence: Synthetic oligonucleotide
  Antisense strand to SEQ ID NO: 1273152
aacauucaaguacuguaca

SEQ ID NO: 1273154 - RNA, 19 nt, Artificial Sequence
  Description of Artificial Sequence: Synthetic oligonucleotide
  Sense strand starting at position 394 of SEQ ID NO: 1241447
acaguacuugaauguuuaa

SEQ ID NO: 1273155 - RNA, 19 nt, Artificial Sequence
  Description of Artificial Sequence: Synthetic oligonucleotide
  Antisense strand to SEQ ID NO: 1273154
uuaaacauucaaguacugu

SEQ ID NO: 1273156 - RNA, 19 nt, Artificial Sequence
  Description of Artificial Sequence: Synthetic oligonucleotide
  Sense strand starting at position 464 of SEQ ID NO: 1241447
uguuuaaaucauugcucag

SEQ ID NO: 1273157 - RNA, 19 nt, Artificial Sequence
  Description of Artificial Sequence: Synthetic oligonucleotide
  Antisense strand to SEQ ID NO: 1273156
cugagcaaugauuuaaaca

SEQ ID NO: 1273158 - RNA, 19 nt, Artificial Sequence
  Description of Artificial Sequence: Synthetic oligonucleotide
  Sense strand starting at position 506 of SEQ ID NO: 1241447
ucuguuaacaggugagaau

SEQ ID NO: 1273159 - RNA, 19 nt, Artificial Sequence
  Description of Artificial Sequence: Synthetic oligonucleotide
  Antisense strand to SEQ ID NO: 1273158
auucucaccuguuaacaga

SEQ ID NO: 1273160 - RNA, 19 nt, Artificial Sequence
  Description of Artificial Sequence: Synthetic oligonucleotide
  Sense strand starting at position 620 of SEQ ID NO: 1241447
ggucuuaagaauggaaugu

SEQ ID NO: 1273161 - RNA, 19 nt, Artificial Sequence
  Description of Artificial Sequence: Synthetic oligonucleotide
  Antisense strand to SEQ ID NO: 1273160
acauuccauucuuaagacc

SEQ ID NO: 1273162 - RNA, 19 nt, Artificial Sequence
  Description of Artificial Sequence: Synthetic oligonucleotide
  Sense strand starting at position 675 of SEQ ID NO: 1241447
uugguaaguacuuggcaaa

SEQ ID NO: 1273163 - RNA, 19 nt, Artificial Sequence
  Description of Artificial Sequence: Synthetic oligonucleotide
  Antisense strand to SEQ ID NO: 1273162
uuugccaaguacuuaccaa

SEQ ID NO: 1273164 - RNA, 19 nt, Artificial Sequence
  Description of Artificial Sequence: Synthetic oligonucleotide
  Sense strand starting at position 731 of SEQ ID NO: 1241447
auuaauaacugcgucauuu

SEQ ID NO: 1273165 - RNA, 19 nt, Artificial Sequence
  Description of Artificial Sequence: Synthetic oligonucleotide
  Antisense strand to SEQ ID NO: 1273164
aaaugacgcaguuauuaau

SEQ ID NO: 1273166 - RNA, 19 nt, Artificial Sequence
  Description of Artificial Sequence: Synthetic oligonucleotide
  Sense strand starting at position 769 of SEQ ID NO: 1241447
caguaauguucuuuguaag

SEQ ID NO: 1273167 - RNA, 19 nt, Artificial Sequence
  Description of Artificial Sequence: Synthetic oligonucleotide
  Antisense strand to SEQ ID NO: 1273166
cuuacaaagaacauuacug

SEQ ID NO: 1273168 - RNA, 19 nt, Artificial Sequence
  Description of Artificial Sequence: Synthetic oligonucleotide
  Sense strand starting at position 1092 of SEQ ID NO: 1241447
cagugacuugaucgaagaa

SEQ ID NO: 1273169 - RNA, 19 nt, Artificial Sequence
  Description of Artificial Sequence: Synthetic oligonucleotide
  Antisense strand to SEQ ID NO: 1273168
uucuucgaucaagucacug

SEQ ID NO: 1273170 - RNA, 19 nt, Artificial Sequence
  Description of Artificial Sequence: Synthetic oligonucleotide
  Sense strand starting at position 1156 of SEQ ID NO: 1241447
agcgauuuaucagccaguu

SEQ ID NO: 1273171 - RNA, 19 nt, Artificial Sequence
  Description of Artificial Sequence: Synthetic oligonucleotide
  Antisense strand to SEQ ID NO: 1273170
aacuggcugauaaaucgcu

SEQ ID NO: 1273172 - RNA, 19 nt, Artificial Sequence
  Description of Artificial Sequence: Synthetic oligonucleotide
  Sense strand starting at position 1188 of SEQ ID NO: 1241447
guuaaauaacgacaguucu

SEQ ID NO: 1273173 - RNA, 19 nt, Artificial Sequence
  Description of Artificial Sequence: Synthetic oligonucleotide
  Antisense strand to SEQ ID NO: 1273172
agaacugucguuauuuaac

SEQ ID NO: 1273174 - RNA, 19 nt, Artificial Sequence
  Description of Artificial Sequence: Synthetic oligonucleotide
  Sense strand starting at position 1740 of SEQ ID NO: 1241447
accggaugguuuccauauu

SEQ ID NO: 1273175 - RNA, 19 nt, Artificial Sequence
  Description of Artificial Sequence: Synthetic oligonucleotide
  Antisense strand to SEQ ID NO: 1273174
aauauggaaaccauccggu

SEQ ID NO: 1273176 - RNA, 19 nt, Artificial Sequence
  Description of Artificial Sequence: Synthetic oligonucleotide
  Sense strand starting at position 1798 of SEQ ID NO: 1241447
uguguagggagcgaaagau

SEQ ID NO: 1273177 - RNA, 19 nt, Artificial Sequence
  Description of Artificial Sequence: Synthetic oligonucleotide
  Antisense strand to SEQ ID NO: 1273176
aucuuucgcucccuacaca

SEQ ID NO: 1273178 - RNA, 19 nt, Artificial Sequence
  Description of Artificial Sequence: Synthetic oligonucleotide
  Sense strand starting at position 1982 of SEQ ID NO: 1241447
agcuuuagucgcuuggcga

SEQ ID NO: 1273179 - RNA, 19 nt, Artificial Sequence
  Description of Artificial Sequence: Synthetic oligonucleotide
  Antisense strand to SEQ ID NO: 1273178
ucgccaagcgacuaaagcu

SEQ ID NO: 1273180 - RNA, 19 nt, Artificial Sequence
  Description of Artificial Sequence: Synthetic oligonucleotide
  Sense strand starting at position 2011 of SEQ ID NO: 1241447
cacggagucugguuuagau

SEQ ID NO: 1273181 - RNA, 19 nt, Artificial Sequence
  Description of Artificial Sequence: Synthetic oligonucleotide
  Antisense strand to SEQ ID NO: 1273180
aucuaaaccagacuccgug

SEQ ID NO: 1273182 - RNA, 19 nt, Artificial Sequence
  Description of Artificial Sequence: Synthetic oligonucleotide
  Sense strand starting at position 2050 of SEQ ID NO: 1241447
ucucuaugugaaugacaag

SEQ ID NO: 1273183 - RNA, 19 nt, Artificial Sequence
  Description of Artificial Sequence: Synthetic oligonucleotide
  Antisense strand to SEQ ID NO: 1273182
cuugucauucacauagaga

SEQ ID NO: 1273184 - RNA, 19 nt, Artificial Sequence
  Description of Artificial Sequence: Synthetic oligonucleotide
  Sense strand starting at position 2057 of SEQ ID NO: 1241447
gugaaugacaagcacguua

SEQ ID NO: 1273185 - RNA, 19 nt, Artificial Sequence
  Description of Artificial Sequence: Synthetic oligonucleotide
  Antisense strand to SEQ ID NO: 1273184
uaacgugcuugucauucac

SEQ ID NO: 1273186 - RNA, 19 nt, Artificial Sequence
  Description of Artificial Sequence: Synthetic oligonucleotide
  Sense strand starting at position 2119 of SEQ ID NO: 1241447
uggguaauugcagaccaca

SEQ ID NO: 1273187 - RNA, 19 nt, Artificial Sequence
  Description of Artificial Sequence: Synthetic oligonucleotide
  Antisense strand to SEQ ID NO: 1273186
uguggucugcaauuaccca

SEQ ID NO: 1273188 - RNA, 19 nt, Artificial Sequence
  Description of Artificial Sequence: Synthetic oligonucleotide
  Sense strand starting at position 2182 of SEQ ID NO: 1241447
ucucuuuagcguuaugaag

SEQ ID NO: 1273189 - RNA, 19 nt, Artificial Sequence
  Description of Artificial Sequence: Synthetic oligonucleotide
  Antisense strand to SEQ ID NO: 1273188
cuucauaacgcuaaagaga

SEQ ID NO: 1273190 - RNA, 19 nt, Artificial Sequence
  Description of Artificial Sequence: Synthetic oligonucleotide
  Sense strand starting at position 2225 of SEQ ID NO: 1241447
uugugaaucuugguaagag

SEQ ID NO: 1273191 - RNA, 19 nt, Artificial Sequence
  Description of Artificial Sequence: Synthetic oligonucleotide
  Antisense strand to SEQ ID NO: 1273190
cucuuaccaagauucacaa

SEQ ID NO: 1273192 - RNA, 19 nt, Artificial Sequence
  Description of Artificial Sequence: Synthetic oligonucleotide
  Sense strand starting at position 2259 of SEQ ID NO: 1241447
uuuguaguuugaguccaaa

SEQ ID NO: 1273193 - RNA, 19 nt, Artificial Sequence
  Description of Artificial Sequence: Synthetic oligonucleotide
  Antisense strand to SEQ ID NO: 1273192
uuuggacucaaacuacaaa

SEQ ID NO: 1273194 - RNA, 19 nt, Artificial Sequence
  Description of Artificial Sequence: Synthetic oligonucleotide
  Sense strand starting at position 2321 of SEQ ID NO: 1241447
ggaggaagcuugcugguca

SEQ ID NO: 1273195 - RNA, 19 nt, Artificial Sequence
  Description of Artificial Sequence: Synthetic oligonucleotide
  Antisense strand to SEQ ID NO: 1273194
ugaccagcaagcuuccucc

SEQ ID NO: 1273196 - RNA, 19 nt, Artificial Sequence
  Description of Artificial Sequence: Synthetic oligonucleotide
  Sense strand starting at position 2325 of SEQ ID NO: 1241447
gaagcuugcuggucaggga

SEQ ID NO: 1273197 - RNA, 19 nt, Artificial Sequence
  Description of Artificial Sequence: Synthetic oligonucleotide
  Antisense strand to SEQ ID NO: 1273196
ucccugaccagcaagcuuc

SEQ ID NO: 1273198 - RNA, 19 nt, Artificial Sequence
  Description of Artificial Sequence: Synthetic oligonucleotide
  Sense strand starting at position 2360 of SEQ ID NO: 1241447
cguguuucuaaacauugga

SEQ ID NO: 1273199 - RNA, 19 nt, Artificial Sequence
  Description of Artificial Sequence: Synthetic oligonucleotide
  Antisense strand to SEQ ID NO: 1273198
uccaauguuuagaaacacg

SEQ ID NO: 1273200 - RNA, 19 nt, Artificial Sequence
  Description of Artificial Sequence: Synthetic oligonucleotide
  Sense strand starting at position 2562 of SEQ ID NO: 1241447
ugggacuacaguugauauu

SEQ ID NO: 1273201 - RNA, 19 nt, Artificial Sequence
  Description of Artificial Sequence: Synthetic oligonucleotide
  Antisense strand to SEQ ID NO: 1273200
aauaucaacuguaguccca

SEQ ID NO: 1273202 - RNA, 19 nt, Artificial Sequence
  Description of Artificial Sequence: Synthetic oligonucleotide
  Sense strand starting at position 2793 of SEQ ID NO: 1241447
uuagucagacuccgauauu

SEQ ID NO: 1273203 - RNA, 19 nt, Artificial Sequence
  Description of Artificial Sequence: Synthetic oligonucleotide
  Antisense strand to SEQ ID NO: 1273202
aauaucggagucugacuaa

SEQ ID NO: 1273204 - RNA, 19 nt, Artificial Sequence
  Description of Artificial Sequence: Synthetic oligonucleotide
  Sense strand starting at position 2933 of SEQ ID NO: 1241447
uucuguuaauagucuaaug

SEQ ID NO: 1273205 - RNA, 19 nt, Artificial Sequence
  Description of Artificial Sequence: Synthetic oligonucleotide
  Antisense strand to SEQ ID NO: 1273204
cauuagacuauuaacagaa

SEQ ID NO: 1273206 - RNA, 19 nt, Artificial Sequence
  Description of Artificial Sequence: Synthetic oligonucleotide
  Sense strand starting at position 3180 of SEQ ID NO: 1241447
ccuuguuggcagcaagaua

SEQ ID NO: 1273207 - RNA, 19 nt, Artificial Sequence
  Description of Artificial Sequence: Synthetic oligonucleotide
  Antisense strand to SEQ ID NO: 1273206
uaucuugcugccaacaagg

SEQ ID NO: 1273208 - RNA, 19 nt, Artificial Sequence
  Description of Artificial Sequence: Synthetic oligonucleotide
  Sense strand starting at position 3408 of SEQ ID NO: 1241447
uugggaauaugcuuuguau

SEQ ID NO: 1273209 - RNA, 19 nt, Artificial Sequence
  Description of Artificial Sequence: Synthetic oligonucleotide
  Antisense strand to SEQ ID NO: 1273208
auacaaagcauauucccaa

SEQ ID NO: 1273210 - RNA, 19 nt, Artificial Sequence
  Description of Artificial Sequence: Synthetic oligonucleotide
  Sense strand starting at position 3410 of SEQ ID NO: 1241447
gggaauaugcuuuguauau

SEQ ID NO: 1273211 - RNA, 19 nt, Artificial Sequence
  Description of Artificial Sequence: Synthetic oligonucleotide
  Antisense strand to SEQ ID NO: 1273210
auauacaaagcauauuccc

SEQ ID NO: 1273212 - RNA, 19 nt, Artificial Sequence
  Description of Artificial Sequence: Synthetic oligonucleotide
  Sense strand starting at position 3411 of SEQ ID NO: 1241447
ggaauaugcuuuguauauu

SEQ ID NO: 1273213 - RNA, 19 nt, Artificial Sequence
  Description of Artificial Sequence: Synthetic oligonucleotide
  Antisense strand to SEQ ID NO: 1273212
aauauacaaagcauauucc

SEQ ID NO: 1273214 - RNA, 19 nt, Artificial Sequence
  Description of Artificial Sequence: Synthetic oligonucleotide
  Sense strand starting at position 3541 of SEQ ID NO: 1241447
ggccauuugaucuguguau

SEQ ID NO: 1273215 - RNA, 19 nt, Artificial Sequence
  Description of Artificial Sequence: Synthetic oligonucleotide
  Antisense strand to SEQ ID NO: 1273214
auacacagaucaaauggcc

SEQ ID NO: 1273216 - RNA, 19 nt, Artificial Sequence
  Description of Artificial Sequence: Synthetic oligonucleotide
  Sense strand starting at position 3542 of SEQ ID NO: 1241447
gccauuugaucuguguauu

SEQ ID NO: 1273217 - RNA, 19 nt, Artificial Sequence
  Description of Artificial Sequence: Synthetic oligonucleotide
  Antisense strand to SEQ ID NO: 1273216
aauacacagaucaaauggc

SEQ ID NO: 1273218 - RNA, 19 nt, Artificial Sequence
  Description of Artificial Sequence: Synthetic oligonucleotide
  Sense strand starting at position 3609 of SEQ ID NO: 1241447
cuuaguauucuuuacuuag

SEQ ID NO: 1273219 - RNA, 19 nt, Artificial Sequence
  Description of Artificial Sequence: Synthetic oligonucleotide
  Antisense strand to SEQ ID NO: 1273218
cuaaguaaagaauacuaag

SEQ ID NO: 1273220 - RNA, 19 nt, Artificial Sequence
  Description of Artificial Sequence: Synthetic oligonucleotide
  Sense strand starting at position 3612 of SEQ ID NO: 1241447
aguauucuuuacuuaggua

SEQ ID NO: 1273221 - RNA, 19 nt, Artificial Sequence
  Description of Artificial Sequence: Synthetic oligonucleotide
  Antisense strand to SEQ ID NO: 1273220
uaccuaaguaaagaauacu

SEQ ID NO: 1273222 - RNA, 19 nt, Artificial Sequence
  Description of Artificial Sequence: Synthetic oligonucleotide
  Sense strand starting at position 3815 of SEQ ID NO: 1241447
ucaaguuauguguauaaag

SEQ ID NO: 1273223 - RNA, 19 nt, Artificial Sequence
  Description of Artificial Sequence: Synthetic oligonucleotide
  Antisense strand to SEQ ID NO: 1273222
cuuuauacacauaacuuga

SEQ ID NO: 1273224 - RNA, 19 nt, Artificial Sequence
  Description of Artificial Sequence: Synthetic oligonucleotide
  Sense strand starting at position 74 of SEQ ID NO: 1241448
gggacauucugauccuuag

SEQ ID NO: 1273225 - RNA, 19 nt, Artificial Sequence
  Description of Artificial Sequence: Synthetic oligonucleotide
  Antisense strand to SEQ ID NO: 1273224
cuaaggaucagaauguccc

SEQ ID NO: 1273226 - RNA, 19 nt, Artificial Sequence
  Description of Artificial Sequence: Synthetic oligonucleotide
  Sense strand starting at position 77 of SEQ ID NO: 1241448
acauucugauccuuagagu

SEQ ID NO: 1273227 - RNA, 19 nt, Artificial Sequence
  Description of Artificial Sequence: Synthetic oligonucleotide
  Antisense strand to SEQ ID NO: 1273226
acucuaaggaucagaaugu

SEQ ID NO: 1273228 - RNA, 19 nt, Artificial Sequence
  Description of Artificial Sequence: Synthetic oligonucleotide
  Sense strand starting at position 84 of SEQ ID NO: 1241448
gauccuuagagucgggaga

SEQ ID NO: 1273229 - RNA, 19 nt, Artificial Sequence
  Description of Artificial Sequence: Synthetic oligonucleotide
  Antisense strand to SEQ ID NO: 1273228
ucucccgacucuaaggauc

SEQ ID NO: 1273230 - RNA, 19 nt, Artificial Sequence
  Description of Artificial Sequence: Synthetic oligonucleotide
  Sense strand starting at position 85 of SEQ ID NO: 1241448
auccuuagagucgggagaa

SEQ ID NO: 1273231 - RNA, 19 nt, Artificial Sequence
  Description of Artificial Sequence: Synthetic oligonucleotide
  Antisense strand to SEQ ID NO: 1273230
uucucccgacucuaaggau

SEQ ID NO: 1273232 - RNA, 19 nt, Artificial Sequence
  Description of Artificial Sequence: Synthetic oligonucleotide
  Sense strand starting at position 103 of SEQ ID NO: 1241448
aagugaagguuucuuggga

SEQ ID NO: 1273233 - RNA, 19 nt, Artificial Sequence
  Description of Artificial Sequence: Synthetic oligonucleotide
  Antisense strand to SEQ ID NO: 1273232
ucccaagaaaccuucacuu

SEQ ID NO: 1273234 - RNA, 19 nt, Artificial Sequence
  Description of Artificial Sequence: Synthetic oligonucleotide
  Sense strand starting at position 357 of SEQ ID NO: 1241448
agggaaagcucugacacuu

SEQ ID NO: 1273235 - RNA, 19 nt, Artificial Sequence
  Description of Artificial Sequence: Synthetic oligonucleotide
  Antisense strand to SEQ ID NO: 1273234
aagugucagagcuuucccu

SEQ ID NO: 1273236 - RNA, 19 nt, Artificial Sequence
  Description of Artificial Sequence: Synthetic oligonucleotide
  Sense strand starting at position 402 of SEQ ID NO: 1241448
ugggucagccauugacuua

SEQ ID NO: 1273237 - RNA, 19 nt, Artificial Sequence
  Description of Artificial Sequence: Synthetic oligonucleotide
  Antisense strand to SEQ ID NO: 1273236
uaagucaauggcugaccca

SEQ ID NO: 1273238 - RNA, 19 nt, Artificial Sequence
  Description of Artificial Sequence: Synthetic oligonucleotide
  Sense strand starting at position 853 of SEQ ID NO: 1241448
gggagaugagauuguguuc

SEQ ID NO: 1273239 - RNA, 19 nt, Artificial Sequence
  Description of Artificial Sequence: Synthetic oligonucleotide
  Antisense strand to SEQ ID NO: 1273238
gaacacaaucucaucuccc

SEQ ID NO: 1273240 - RNA, 19 nt, Artificial Sequence
  Description of Artificial Sequence: Synthetic oligonucleotide
  Sense strand starting at position 977 of SEQ ID NO: 1241448
ugugucuggcaccgagaau

SEQ ID NO: 1273241 - RNA, 19 nt, Artificial Sequence
  Description of Artificial Sequence: Synthetic oligonucleotide
  Antisense strand to SEQ ID NO: 1273240
auucucggugccagacaca

SEQ ID NO: 1273242 - RNA, 19 nt, Artificial Sequence
  Description of Artificial Sequence: Synthetic oligonucleotide
  Sense strand starting at position 988 of SEQ ID NO: 1241448
ccgagaaucuugccugcua

SEQ ID NO: 1273243 - RNA, 19 nt, Artificial Sequence
  Description of Artificial Sequence: Synthetic oligonucleotide
  Antisense strand to SEQ ID NO: 1273242
uagcaggcaagauucucgg

SEQ ID NO: 1273244 - RNA, 19 nt, Artificial Sequence
  Description of Artificial Sequence: Synthetic oligonucleotide
  Sense strand starting at position 989 of SEQ ID NO: 1241448
cgagaaucuugccugcuau

SEQ ID NO: 1273245 - RNA, 19 nt, Artificial Sequence
  Description of Artificial Sequence: Synthetic oligonucleotide
  Antisense strand to SEQ ID NO: 1273244
auagcaggcaagauucucg

SEQ ID NO: 1273246 - RNA, 19 nt, Artificial Sequence
  Description of Artificial Sequence: Synthetic oligonucleotide
  Sense strand starting at position 1015 of SEQ ID NO: 1241448
ucccgaagucagugcucau

SEQ ID NO: 1273247 - RNA, 19 nt, Artificial Sequence
  Description of Artificial Sequence: Synthetic oligonucleotide
  Antisense strand to SEQ ID NO: 1273246
augagcacugacuucggga

SEQ ID NO: 1273248 - RNA, 19 nt, Artificial Sequence
  Description of Artificial Sequence: Synthetic oligonucleotide
  Sense strand starting at position 1291 of SEQ ID NO: 1241448
ggauaaaucaagugcaaag

SEQ ID NO: 1273249 - RNA, 19 nt, Artificial Sequence
  Description of Artificial Sequence: Synthetic oligonucleotide
  Antisense strand to SEQ ID NO: 1273248
cuuugcacuugauuuaucc

SEQ ID NO: 1273250 - RNA, 19 nt, Artificial Sequence
  Description of Artificial Sequence: Synthetic oligonucleotide
  Sense strand starting at position 1435 of SEQ ID NO: 1241448
cgugaugaaguguaaauca

SEQ ID NO: 1273251 - RNA, 19 nt, Artificial Sequence
  Description of Artificial Sequence: Synthetic oligonucleotide
  Antisense strand to SEQ ID NO: 1273250
ugauuuacacuucaucacg

SEQ ID NO: 1273252 - RNA, 19 nt, Artificial Sequence
  Description of Artificial Sequence: Synthetic oligonucleotide
  Sense strand starting at position 1509 of SEQ ID NO: 1241448
agccuaucuugccuaagaa

SEQ ID NO: 1273253 - RNA, 19 nt, Artificial Sequence
  Description of Artificial Sequence: Synthetic oligonucleotide
  Antisense strand to SEQ ID NO: 1273252
uucuuaggcaagauaggcu

SEQ ID NO: 1273254 - RNA, 19 nt, Artificial Sequence
  Description of Artificial Sequence: Synthetic oligonucleotide
  Sense strand starting at position 1510 of SEQ ID NO: 1241448
gccuaucuugccuaagaau

SEQ ID NO: 1273255 - RNA, 19 nt, Artificial Sequence
  Description of Artificial Sequence: Synthetic oligonucleotide
  Antisense strand to SEQ ID NO: 1273254
auucuuaggcaagauaggc

SEQ ID NO: 1273256 - RNA, 19 nt, Artificial Sequence
  Description of Artificial Sequence: Synthetic oligonucleotide
  Sense strand starting at position 1566 of SEQ ID NO: 1241448
acacuccuuggccagagau

SEQ ID NO: 1273257 - RNA, 19 nt, Artificial Sequence
  Description of Artificial Sequence: Synthetic oligonucleotide
  Antisense strand to SEQ ID NO: 1273256
aucucuggccaaggagugu

SEQ ID NO: 1273258 - RNA, 19 nt, Artificial Sequence
  Description of Artificial Sequence: Synthetic oligonucleotide
  Sense strand starting at position 1995 of SEQ ID NO: 1241448
cgaaguguucuucagggaa

SEQ ID NO: 1273259 - RNA, 19 nt, Artificial Sequence
  Description of Artificial Sequence: Synthetic oligonucleotide
  Antisense strand to SEQ ID NO: 1273258
uucccugaagaacacuucg

SEQ ID NO: 1273260 - RNA, 19 nt, Artificial Sequence
  Description of Artificial Sequence: Synthetic oligonucleotide
  Sense strand starting at position 2163 of SEQ ID NO: 1241448
gggcucucuugccuggauu

SEQ ID NO: 1273261 - RNA, 19 nt, Artificial Sequence
  Description of Artificial Sequence: Synthetic oligonucleotide
  Antisense strand to SEQ ID NO: 1273260
aauccaggcaagagagccc

SEQ ID NO: 1273262 - RNA, 19 nt, Artificial Sequence
  Description of Artificial Sequence: Synthetic oligonucleotide
  Sense strand starting at position 2176 of SEQ ID NO: 1241448
uggauucgccuuuacaaag

SEQ ID NO: 1273263 - RNA, 19 nt, Artificial Sequence
  Description of Artificial Sequence: Synthetic oligonucleotide
  Antisense strand to SEQ ID NO: 1273262
cuuuguaaaggcgaaucca

SEQ ID NO: 1273264 - RNA, 19 nt, Artificial Sequence
  Description of Artificial Sequence: Synthetic oligonucleotide
  Sense strand starting at position 2644 of SEQ ID NO: 1241448
gggagaaugccaggcaaau

SEQ ID NO: 1273265 - RNA, 19 nt, Artificial Sequence
  Description of Artificial Sequence: Synthetic oligonucleotide
  Antisense strand to SEQ ID NO: 1273264
auuugccuggcauucuccc

SEQ ID NO: 1273266 - RNA, 19 nt, Artificial Sequence
  Description of Artificial Sequence: Synthetic oligonucleotide
  Sense strand starting at position 2825 of SEQ ID NO: 1241448
guggcauccagaggugaac

SEQ ID NO: 1273267 - RNA, 19 nt, Artificial Sequence
  Description of Artificial Sequence: Synthetic oligonucleotide
  Antisense strand to SEQ ID NO: 1273266
guucaccucuggaugccac

SEQ ID NO: 1273268 - RNA, 19 nt, Artificial Sequence
  Description of Artificial Sequence: Synthetic oligonucleotide
  Sense strand starting at position 3279 of SEQ ID NO: 1241448
agcucaucaguauggacaa

SEQ ID NO: 1273269 - RNA, 19 nt, Artificial Sequence
  Description of Artificial Sequence: Synthetic oligonucleotide
  Antisense strand to SEQ ID NO: 1273268
uuguccauacugaugagcu

SEQ ID NO: 1273270 - RNA, 19 nt, Artificial Sequence
  Description of Artificial Sequence: Synthetic oligonucleotide
  Sense strand starting at position 3384 of SEQ ID NO: 1241448
uggcgaaugcccguuaugu

SEQ ID NO: 1273271 - RNA, 19 nt, Artificial Sequence
  Description of Artificial Sequence: Synthetic oligonucleotide
  Antisense strand to SEQ ID NO: 1273270
acauaacgggcauucgcca

SEQ ID NO: 1273272 - RNA, 19 nt, Artificial Sequence
  Description of Artificial Sequence: Synthetic oligonucleotide
  Sense strand starting at position 3385 of SEQ ID NO: 1241448
ggcgaaugcccguuaugua

SEQ ID NO: 1273273 - RNA, 19 nt, Artificial Sequence
  Description of Artificial Sequence: Synthetic oligonucleotide
  Antisense strand to SEQ ID NO: 1273272
uacauaacgggcauucgcc

SEQ ID NO: 1273274 - RNA, 19 nt, Artificial Sequence
  Description of Artificial Sequence: Synthetic oligonucleotide
  Sense strand starting at position 3393 of SEQ ID NO: 1241448
cccguuauguauuucugau

SEQ ID NO: 1273275 - RNA, 19 nt, Artificial Sequence
  Description of Artificial Sequence: Synthetic oligonucleotide
  Antisense strand to SEQ ID NO: 1273274
aucagaaauacauaacggg

SEQ ID NO: 1273276 - RNA, 19 nt, Artificial Sequence
  Description of Artificial Sequence: Synthetic oligonucleotide
  Sense strand starting at position 3450 of SEQ ID NO: 1241448
accuuagacccaggguaau

SEQ ID NO: 1273277 - RNA, 19 nt, Artificial Sequence
  Description of Artificial Sequence: Synthetic oligonucleotide
  Antisense strand to SEQ ID NO: 1273276
auuacccugggucuaaggu

SEQ ID NO: 1273278 - RNA, 19 nt, Artificial Sequence
  Description of Artificial Sequence: Synthetic oligonucleotide
  Sense strand starting at position 3515 of SEQ ID NO: 1241448
ccguuaugcuuggcuagag

SEQ ID NO: 1273279 - RNA, 19 nt, Artificial Sequence
  Description of Artificial Sequence: Synthetic oligonucleotide
  Antisense strand to SEQ ID NO: 1273278
cucuagccaagcauaacgg

SEQ ID NO: 1273280 - RNA, 19 nt, Artificial Sequence
  Description of Artificial Sequence: Synthetic oligonucleotide
  Sense strand starting at position 3562 of SEQ ID NO: 1241448
ggcaacguuucuucucuau

SEQ ID NO: 1273281 - RNA, 19 nt, Artificial Sequence
  Description of Artificial Sequence: Synthetic oligonucleotide
  Antisense strand to SEQ ID NO: 1273280
auagagaagaaacguugcc

SEQ ID NO: 1273282 - RNA, 19 nt, Artificial Sequence
  Description of Artificial Sequence: Synthetic oligonucleotide
  Sense strand starting at position 3581 of SEQ ID NO: 1241448
uucugucuucuuuaaagga

SEQ ID NO: 1273283 - RNA, 19 nt, Artificial Sequence
  Description of Artificial Sequence: Synthetic oligonucleotide
  Antisense strand to SEQ ID NO: 1273282
uccuuuaaagaagacagaa

SEQ ID NO: 1273284 - RNA, 19 nt, Artificial Sequence
  Description of Artificial Sequence: Synthetic oligonucleotide
  Sense strand starting at position 3830 of SEQ ID NO: 1241448
uugcaacaaguguggaaau

SEQ ID NO: 1273285 - RNA, 19 nt, Artificial Sequence
  Description of Artificial Sequence: Synthetic oligonucleotide
  Antisense strand to SEQ ID NO: 1273284
auuuccacacuuguugcaa

SEQ ID NO: 1273286 - RNA, 19 nt, Artificial Sequence
  Description of Artificial Sequence: Synthetic oligonucleotide
  Sense strand starting at position 3841 of SEQ ID NO: 1241448
guggaaauacuucgcuaaa

SEQ ID NO: 1273287 - RNA, 19 nt, Artificial Sequence
  Description of Artificial Sequence: Synthetic oligonucleotide
  Antisense strand to SEQ ID NO: 1273286
uuuagcgaaguauuuccac

SEQ ID NO: 1273288 - RNA, 19 nt, Artificial Sequence
  Description of Artificial Sequence: Synthetic oligonucleotide
  Sense strand starting at position 3866 of SEQ ID NO: 1241448
uagggaacaucugggaaua

SEQ ID NO: 1273289 - RNA, 19 nt, Artificial Sequence
  Description of Artificial Sequence: Synthetic oligonucleotide
  Antisense strand to SEQ ID NO: 1273288
uauucccagauguucccua

SEQ ID NO: 1273290 - RNA, 19 nt, Artificial Sequence
  Description of Artificial Sequence: Synthetic oligonucleotide
  Sense strand starting at position 3899 of SEQ ID NO: 1241448
uccuguaaccgagauaaua

SEQ ID NO: 1273291 - RNA, 19 nt, Artificial Sequence
  Description of Artificial Sequence: Synthetic oligonucleotide
  Antisense strand to SEQ ID NO: 1273290
uauuaucucgguuacagga

SEQ ID NO: 1273292 - RNA, 19 nt, Artificial Sequence
  Description of Artificial Sequence: Synthetic oligonucleotide
  Sense strand starting at position 3912 of SEQ ID NO: 1241448
auaauaauguuuccuguac

SEQ ID NO: 1273293 - RNA, 19 nt, Artificial Sequence
  Description of Artificial Sequence: Synthetic oligonucleotide
  Antisense strand to SEQ ID NO: 1273292
guacaggaaacauuauuau

SEQ ID NO: 1273294 - RNA, 19 nt, Artificial Sequence
  Description of Artificial Sequence: Synthetic oligonucleotide
  Sense strand starting at position 3916 of SEQ ID NO: 1241448
uaauguuuccuguacgcag

SEQ ID NO: 1273295 - RNA, 19 nt, Artificial Sequence
  Description of Artificial Sequence: Synthetic oligonucleotide
  Antisense strand to SEQ ID NO: 1273294
cugcguacaggaaacauua

SEQ ID NO: 1273296 - RNA, 19 nt, Artificial Sequence
  Description of Artificial Sequence: Synthetic oligonucleotide
  Sense strand starting at position 3930 of SEQ ID NO: 1241448
cgcaguccacuuuguugaa

SEQ ID NO: 1273297 - RNA, 19 nt, Artificial Sequence
  Description of Artificial Sequence: Synthetic oligonucleotide
  Antisense strand to SEQ ID NO: 1273296
uucaacaaaguggacugcg

SEQ ID NO: 1273298 - RNA, 19 nt, Artificial Sequence
  Description of Artificial Sequence: Synthetic oligonucleotide
  Sense strand starting at position 3931 of SEQ ID NO: 1241448
gcaguccacuuuguugaau

SEQ ID NO: 1273299 - RNA, 19 nt, Artificial Sequence
  Description of Artificial Sequence: Synthetic oligonucleotide
  Antisense strand to SEQ ID NO: 1273298
auucaacaaaguggacugc

SEQ ID NO: 1273300 - RNA, 19 nt, Artificial Sequence
  Description of Artificial Sequence: Synthetic oligonucleotide
  Sense strand starting at position 3934 of SEQ ID NO: 1241448
guccacuuuguugaauaua

SEQ ID NO: 1273301 - RNA, 19 nt, Artificial Sequence
  Description of Artificial Sequence: Synthetic oligonucleotide
  Antisense strand to SEQ ID NO: 1273300
uauauucaacaaaguggac

SEQ ID NO: 1273302 - RNA, 19 nt, Artificial Sequence
  Description of Artificial Sequence: Synthetic oligonucleotide
  Sense strand starting at position 3979 of SEQ ID NO: 1241448
guaggaagugauugguuua

SEQ ID NO: 1273303 - RNA, 19 nt, Artificial Sequence
  Description of Artificial Sequence: Synthetic oligonucleotide
  Antisense strand to SEQ ID NO: 1273302
uaaaccaaucacuuccuac

SEQ ID NO: 1273304 - RNA, 19 nt, Artificial Sequence
  Description of Artificial Sequence: Synthetic oligonucleotide
  Sense strand starting at position 75 of SEQ ID NO: 1241449
aaugguauguggccaaaua

SEQ ID NO: 1273305 - RNA, 19 nt, Artificial Sequence
  Description of Artificial Sequence: Synthetic oligonucleotide
  Antisense strand to SEQ ID NO: 1273304
uauuuggccacauaccauu

SEQ ID NO: 1273306 - RNA, 19 nt, Artificial Sequence
  Description of Artificial Sequence: Synthetic oligonucleotide
  Sense strand starting at position 76 of SEQ ID NO: 1241449
augguauguggccaaauaa

SEQ ID NO: 1273307 - RNA, 19 nt, Artificial Sequence
  Description of Artificial Sequence: Synthetic oligonucleotide
  Antisense strand to SEQ ID NO: 1273306
uuauuuggccacauaccau

SEQ ID NO: 1273308 - RNA, 19 nt, Artificial Sequence
  Description of Artificial Sequence: Synthetic oligonucleotide
  Sense strand starting at position 108 of SEQ ID NO: 1241449
augucauagagugaaguga

SEQ ID NO: 1273309 - RNA, 19 nt, Artificial Sequence
  Description of Artificial Sequence: Synthetic oligonucleotide
  Antisense strand to SEQ ID NO: 1273308
ucacuucacucuaugacau

SEQ ID NO: 1273310 - RNA, 19 nt, Artificial Sequence
  Description of Artificial Sequence: Synthetic oligonucleotide
  Sense strand starting at position 205 of SEQ ID NO: 1241449
gcucuuugguacguaauuu

SEQ ID NO: 1273311 - RNA, 19 nt, Artificial Sequence
  Description of Artificial Sequence: Synthetic oligonucleotide
  Antisense strand to SEQ ID NO: 1273310
aaauuacguaccaaagagc

SEQ ID NO: 1273312 - RNA, 19 nt, Artificial Sequence
  Description of Artificial Sequence: Synthetic oligonucleotide
  Sense strand starting at position 209 of SEQ ID NO: 1241449
uuugguacguaauuucuua

SEQ ID NO: 1273313 - RNA, 19 nt, Artificial Sequence
  Description of Artificial Sequence: Synthetic oligonucleotide
  Antisense strand to SEQ ID NO: 1273312
uaagaaauuacguaccaaa

SEQ ID NO: 1273314 - RNA, 19 nt, Artificial Sequence
  Description of Artificial Sequence: Synthetic oligonucleotide
  Sense strand starting at position 772 of SEQ ID NO: 1241449
uuaguagagacagguagua

SEQ ID NO: 1273315 - RNA, 19 nt, Artificial Sequence
  Description of Artificial Sequence: Synthetic oligonucleotide
  Antisense strand to SEQ ID NO: 1273314
uacuaccugucucuacuaa

SEQ ID NO: 1273316 - RNA, 19 nt, Artificial Sequence
  Description of Artificial Sequence: Synthetic oligonucleotide
  Sense strand starting at position 921 of SEQ ID NO: 1241449
auaagcuaggccuaugagu

SEQ ID NO: 1273317 - RNA, 19 nt, Artificial Sequence
  Description of Artificial Sequence: Synthetic oligonucleotide
  Antisense strand to SEQ ID NO: 1273316
acucauaggccuagcuuau

SEQ ID NO: 1273318 - RNA, 19 nt, Artificial Sequence
  Description of Artificial Sequence: Synthetic oligonucleotide
  Sense strand starting at position 936 of SEQ ID NO: 1241449
gaguuccuacaucgggauu

SEQ ID NO: 1273319 - RNA, 19 nt, Artificial Sequence
  Description of Artificial Sequence: Synthetic oligonucleotide
  Antisense strand to SEQ ID NO: 1273318
aaucccgauguaggaacuc

SEQ ID NO: 1273320 - RNA, 19 nt, Artificial Sequence
  Description of Artificial Sequence: Synthetic oligonucleotide
  Sense strand starting at position 1168 of SEQ ID NO: 1241449
agagguucauagcuaguga

SEQ ID NO: 1273321 - RNA, 19 nt, Artificial Sequence
  Description of Artificial Sequence: Synthetic oligonucleotide
  Antisense strand to SEQ ID NO: 1273320
ucacuagcuaugaaccucu

SEQ ID NO: 1273322 - RNA, 19 nt, Artificial Sequence
  Description of Artificial Sequence: Synthetic oligonucleotide
  Sense strand starting at position 1308 of SEQ ID NO: 1241449
uuucuuauaucuguggaag

SEQ ID NO: 1273323 - RNA, 19 nt, Artificial Sequence
  Description of Artificial Sequence: Synthetic oligonucleotide
  Antisense strand to SEQ ID NO: 1273322
cuuccacagauauaagaaa

SEQ ID NO: 1273324 - RNA, 19 nt, Artificial Sequence
  Description of Artificial Sequence: Synthetic oligonucleotide
  Sense strand starting at position 1383 of SEQ ID NO: 1241449
agaauuccagcacagcaua

SEQ ID NO: 1273325 - RNA, 19 nt, Artificial Sequence
  Description of Artificial Sequence: Synthetic oligonucleotide
  Antisense strand to SEQ ID NO: 1273324
uaugcugugcuggaauucu

SEQ ID NO: 1273326 - RNA, 19 nt, Artificial Sequence
  Description of Artificial Sequence: Synthetic oligonucleotide
  Sense strand starting at position 1401 of SEQ ID NO: 1241449
agaaauaaugcguagucuu

SEQ ID NO: 1273327 - RNA, 19 nt, Artificial Sequence
  Description of Artificial Sequence: Synthetic oligonucleotide
  Antisense strand to SEQ ID NO: 1273326
aagacuacgcauuauuucu

SEQ ID NO: 1273328 - RNA, 19 nt, Artificial Sequence
  Description of Artificial Sequence: Synthetic oligonucleotide
  Sense strand starting at position 1421 of SEQ ID NO: 1241449
ugaagauguugacccggaa

SEQ ID NO: 1273329 - RNA, 19 nt, Artificial Sequence
  Description of Artificial Sequence: Synthetic oligonucleotide
  Antisense strand to SEQ ID NO: 1273328
uuccgggucaacaucuuca

SEQ ID NO: 1273330 - RNA, 19 nt, Artificial Sequence
  Description of Artificial Sequence: Synthetic oligonucleotide
  Sense strand starting at position 1463 of SEQ ID NO: 1241449
aggccuacagucuggagaa

SEQ ID NO: 1273331 - RNA, 19 nt, Artificial Sequence
  Description of Artificial Sequence: Synthetic oligonucleotide
  Antisense strand to SEQ ID NO: 1273330
uucuccagacuguaggccu

SEQ ID NO: 1273332 - RNA, 19 nt, Artificial Sequence
  Description of Artificial Sequence: Synthetic oligonucleotide
  Sense strand starting at position 1477 of SEQ ID NO: 1241449
gagaaugggugcucaauug

SEQ ID NO: 1273333 - RNA, 19 nt, Artificial Sequence
  Description of Artificial Sequence: Synthetic oligonucleotide
  Antisense strand to SEQ ID NO: 1273332
caauugagcacccauucuc

SEQ ID NO: 1273334 - RNA, 19 nt, Artificial Sequence
  Description of Artificial Sequence: Synthetic oligonucleotide
  Sense strand starting at position 1483 of SEQ ID NO: 1241449
gggugcucaauugaggaua

SEQ ID NO: 1273335 - RNA, 19 nt, Artificial Sequence
  Description of Artificial Sequence: Synthetic oligonucleotide
  Antisense strand to SEQ ID NO: 1273334
uauccucaauugagcaccc

SEQ ID NO: 1273336 - RNA, 19 nt, Artificial Sequence
  Description of Artificial Sequence: Synthetic oligonucleotide
  Sense strand starting at position 1511 of SEQ ID NO: 1241449
gagauaaauuguccuagau

SEQ ID NO: 1273337 - RNA, 19 nt, Artificial Sequence
  Description of Artificial Sequence: Synthetic oligonucleotide
  Antisense strand to SEQ ID NO: 1273336
aucuaggacaauuuaucuc

SEQ ID NO: 1273338 - RNA, 19 nt, Artificial Sequence
  Description of Artificial Sequence: Synthetic oligonucleotide
  Sense strand starting at position 1989 of SEQ ID NO: 1241449
caggaacgauuaucgaauu

SEQ ID NO: 1273339 - RNA, 19 nt, Artificial Sequence
  Description of Artificial Sequence: Synthetic oligonucleotide
  Antisense strand to SEQ ID NO: 1273338
aauucgauaaucguuccug

SEQ ID NO: 1273340 - RNA, 19 nt, Artificial Sequence
  Description of Artificial Sequence: Synthetic oligonucleotide
  Sense strand starting at position 2031 of SEQ ID NO: 1241449
aggcaauguuaacuaaguu

SEQ ID NO: 1273341 - RNA, 19 nt, Artificial Sequence
  Description of Artificial Sequence: Synthetic oligonucleotide
  Antisense strand to SEQ ID NO: 1273340
aacuuaguuaacauugccu

SEQ ID NO: 1273342 - RNA, 19 nt, Artificial Sequence
  Description of Artificial Sequence: Synthetic oligonucleotide
  Sense strand starting at position 2472 of SEQ ID NO: 1241449
uugcucuguuaauugauuu

SEQ ID NO: 1273343 - RNA, 19 nt, Artificial Sequence
  Description of Artificial Sequence: Synthetic oligonucleotide
  Antisense strand to SEQ ID NO: 1273342
aaaucaauuaacagagcaa

SEQ ID NO: 1273344 - RNA, 19 nt, Artificial Sequence
  Description of Artificial Sequence: Synthetic oligonucleotide
  Sense strand starting at position 2830 of SEQ ID NO: 1241449
ucaguuguuucccucauuu

SEQ ID NO: 1273345 - RNA, 19 nt, Artificial Sequence
  Description of Artificial Sequence: Synthetic oligonucleotide
  Antisense strand to SEQ ID NO: 1273344
aaaugagggaaacaacuga

SEQ ID NO: 1273346 - RNA, 19 nt, Artificial Sequence
  Description of Artificial Sequence: Synthetic oligonucleotide
  Sense strand starting at position 2942 of SEQ ID NO: 1241449
aggaaagaaucuuuaguuu

SEQ ID NO: 1273347 - RNA, 19 nt, Artificial Sequence
  Description of Artificial Sequence: Synthetic oligonucleotide
  Antisense strand to SEQ ID NO: 1273346
aaacuaaagauucuuuccu

SEQ ID NO: 1273348 - RNA, 19 nt, Artificial Sequence
  Description of Artificial Sequence: Synthetic oligonucleotide
  Sense strand starting at position 2995 of SEQ ID NO: 1241449
cuguauugucaggacaaau

SEQ ID NO: 1273349 - RNA, 19 nt, Artificial Sequence
  Description of Artificial Sequence: Synthetic oligonucleotide
  Antisense strand to SEQ ID NO: 1273348
auuuguccugacaauacag

SEQ ID NO: 1273350 - RNA, 19 nt, Artificial Sequence
  Description of Artificial Sequence: Synthetic oligonucleotide
  Sense strand starting at position 3023 of SEQ ID NO: 1241449
cucauccuguuguuaaaga

SEQ ID NO: 1273351 - RNA, 19 nt, Artificial Sequence
  Description of Artificial Sequence: Synthetic oligonucleotide
  Antisense strand to SEQ ID NO: 1273350
ucuuuaacaacaggaugag

SEQ ID NO: 1273352 - RNA, 19 nt, Artificial Sequence
  Description of Artificial Sequence: Synthetic oligonucleotide
  Sense strand starting at position 3061 of SEQ ID NO: 1241449
cugacauuccuuuguauua

SEQ ID NO: 1273353 - RNA, 19 nt, Artificial Sequence
  Description of Artificial Sequence: Synthetic oligonucleotide
  Antisense strand to SEQ ID NO: 1273352
uaauacaaaggaaugucag

SEQ ID NO: 1273354 - RNA, 19 nt, Artificial Sequence
  Description of Artificial Sequence: Synthetic oligonucleotide
  Sense strand starting at position 3157 of SEQ ID NO: 1241449
auaguugauucuucccuua

SEQ ID NO: 1273355 - RNA, 19 nt, Artificial Sequence
  Description of Artificial Sequence: Synthetic oligonucleotide
  Antisense strand to SEQ ID NO: 1273354
uaagggaagaaucaacuau

SEQ ID NO: 1273356 - RNA, 19 nt, Artificial Sequence
  Description of Artificial Sequence: Synthetic oligonucleotide
  Sense strand starting at position 3184 of SEQ ID NO: 1241449
uuugcugucccagaaugau

SEQ ID NO: 1273357 - RNA, 19 nt, Artificial Sequence
  Description of Artificial Sequence: Synthetic oligonucleotide
  Antisense strand to SEQ ID NO: 1273356
aucauucugggacagcaaa

SEQ ID NO: 1273358 - RNA, 19 nt, Artificial Sequence
  Description of Artificial Sequence: Synthetic oligonucleotide
  Sense strand starting at position 3190 of SEQ ID NO: 1241449
gucccagaaugauuauuau

SEQ ID NO: 1273359 - RNA, 19 nt, Artificial Sequence
  Description of Artificial Sequence: Synthetic oligonucleotide
  Antisense strand to SEQ ID NO: 1273358
auaauaaucauucugggac

SEQ ID NO: 1273360 - RNA, 19 nt, Artificial Sequence
  Description of Artificial Sequence: Synthetic oligonucleotide
  Sense strand starting at position 3241 of SEQ ID NO: 1241449
gauguaugauggcuaauaa

SEQ ID NO: 1273361 - RNA, 19 nt, Artificial Sequence
  Description of Artificial Sequence: Synthetic oligonucleotide
  Antisense strand to SEQ ID NO: 1273360
uuauuagccaucauacauc

SEQ ID NO: 1273362 - RNA, 19 nt, Artificial Sequence
  Description of Artificial Sequence: Synthetic oligonucleotide
  Sense strand starting at position 3242 of SEQ ID NO: 1241449
auguaugauggcuaauaac

SEQ ID NO: 1273363 - RNA, 19 nt, Artificial Sequence
  Description of Artificial Sequence: Synthetic oligonucleotide
  Antisense strand to SEQ ID NO: 1273362
guuauuagccaucauacau

SEQ ID NO: 1273364 - RNA, 19 nt, Artificial Sequence
  Description of Artificial Sequence: Synthetic oligonucleotide
  Sense strand starting at position 3380 of SEQ ID NO: 1241449
gucccuuggcuccaugaga

SEQ ID NO: 1273365 - RNA, 19 nt, Artificial Sequence
  Description of Artificial Sequence: Synthetic oligonucleotide
  Antisense strand to SEQ ID NO: 1273364
ucucauggagccaagggac

SEQ ID NO: 1273366 - RNA, 19 nt, Artificial Sequence
  Description of Artificial Sequence: Synthetic oligonucleotide
  Sense strand starting at position 3412 of SEQ ID NO: 1241449
aauuaauaucuguggauag

SEQ ID NO: 1273367 - RNA, 19 nt, Artificial Sequence
  Description of Artificial Sequence: Synthetic oligonucleotide
  Antisense strand to SEQ ID NO: 1273366
cuauccacagauauuaauu

SEQ ID NO: 1273368 - RNA, 19 nt, Artificial Sequence
  Description of Artificial Sequence: Synthetic oligonucleotide
  Sense strand starting at position 3581 of SEQ ID NO: 1241449
gcaacuuaauaugugacua

SEQ ID NO: 1273369 - RNA, 19 nt, Artificial Sequence
  Description of Artificial Sequence: Synthetic oligonucleotide
  Antisense strand to SEQ ID NO: 1273368
uagucacauauuaaguugc

SEQ ID NO: 1273370 - RNA, 19 nt, Artificial Sequence
  Description of Artificial Sequence: Synthetic oligonucleotide
  Sense strand starting at position 3733 of SEQ ID NO: 1241449
aguagaaaugucugggcau

SEQ ID NO: 1273371 - RNA, 19 nt, Artificial Sequence
  Description of Artificial Sequence: Synthetic oligonucleotide
  Antisense strand to SEQ ID NO: 1273370
augcccagacauuucuacu

SEQ ID NO: 1273372 - RNA, 19 nt, Artificial Sequence
  Description of Artificial Sequence: Synthetic oligonucleotide
  Sense strand starting at position 3735 of SEQ ID NO: 1241449
uagaaaugucugggcauau

SEQ ID NO: 1273373 - RNA, 19 nt, Artificial Sequence
  Description of Artificial Sequence: Synthetic oligonucleotide
  Antisense strand to SEQ ID NO: 1273372
auaugcccagacauuucua

SEQ ID NO: 1273374 - RNA, 19 nt, Artificial Sequence
  Description of Artificial Sequence: Synthetic oligonucleotide
  Sense strand starting at position 3736 of SEQ ID NO: 1241449
agaaaugucugggcauauu

SEQ ID NO: 1273375 - RNA, 19 nt, Artificial Sequence
  Description of Artificial Sequence: Synthetic oligonucleotide
  Antisense strand to SEQ ID NO: 1273374
aauaugcccagacauuucu

SEQ ID NO: 1273376 - RNA, 19 nt, Artificial Sequence
  Description of Artificial Sequence: Synthetic oligonucleotide
  Sense strand starting at position 3848 of SEQ ID NO: 1241449
caaccucugccagaagagu

SEQ ID NO: 1273377 - RNA, 19 nt, Artificial Sequence
  Description of Artificial Sequence: Synthetic oligonucleotide
  Antisense strand to SEQ ID NO: 1273376
acucuucuggcagagguug

SEQ ID NO: 1273378 - RNA, 19 nt, Artificial Sequence
  Description of Artificial Sequence: Synthetic oligonucleotide
  Sense strand starting at position 3913 of SEQ ID NO: 1241449
uuagcuaggacuuggcaaa

SEQ ID NO: 1273379 - RNA, 19 nt, Artificial Sequence
  Description of Artificial Sequence: Synthetic oligonucleotide
  Antisense strand to SEQ ID NO: 1273378
uuugccaaguccuagcuaa

SEQ ID NO: 1273380 - RNA, 19 nt, Artificial Sequence
  Description of Artificial Sequence: Synthetic oligonucleotide
  Sense strand starting at position 3932 of SEQ ID NO: 1241449
cucagaugccaggaguagu

SEQ ID NO: 1273381 - RNA, 19 nt, Artificial Sequence
  Description of Artificial Sequence: Synthetic oligonucleotide
  Antisense strand to SEQ ID NO: 1273380
acuacuccuggcaucugag

SEQ ID NO: 1273382 - RNA, 19 nt, Artificial Sequence
  Description of Artificial Sequence: Synthetic oligonucleotide
  Sense strand starting at position 3943 of SEQ ID NO: 1241449
ggaguaguucuacaguucu

SEQ ID NO: 1273383 - RNA, 19 nt, Artificial Sequence
  Description of Artificial Sequence: Synthetic oligonucleotide
  Antisense strand to SEQ ID NO: 1273382
agaacuguagaacuacucc

SEQ ID NO: 1273384 - RNA, 19 nt, Artificial Sequence
  Description of Artificial Sequence: Synthetic oligonucleotide
  Sense strand starting at position 11 of SEQ ID NO: 1241450
cgcaaaugucucuaacccu

SEQ ID NO: 1273385 - RNA, 19 nt, Artificial Sequence
  Description of Artificial Sequence: Synthetic oligonucleotide
  Antisense strand to SEQ ID NO: 1273384
aggguuagagacauuugcg

SEQ ID NO: 1273386 - RNA, 19 nt, Artificial Sequence
  Description of Artificial Sequence: Synthetic oligonucleotide
  Sense strand starting at position 52 of SEQ ID NO: 1241450
uuccauucuggaugugaau

SEQ ID NO: 1273387 - RNA, 19 nt, Artificial Sequence
  Description of Artificial Sequence: Synthetic oligonucleotide
  Antisense strand to SEQ ID NO: 1273386
auucacauccagaauggaa

SEQ ID NO: 1273388 - RNA, 19 nt, Artificial Sequence
  Description of Artificial Sequence: Synthetic oligonucleotide
  Sense strand starting at position 118 of SEQ ID NO: 1241450
aggguucuccauuauuacu

SEQ ID NO: 1273389 - RNA, 19 nt, Artificial Sequence
  Description of Artificial Sequence: Synthetic oligonucleotide
  Antisense strand to SEQ ID NO: 1273388
aguaauaauggagaacccu

SEQ ID NO: 1273390 - RNA, 19 nt, Artificial Sequence
  Description of Artificial Sequence: Synthetic oligonucleotide
  Sense strand starting at position 169 of SEQ ID NO: 1241450
cuauccaaccuguauguau

SEQ ID NO: 1273391 - RNA, 19 nt, Artificial Sequence
  Description of Artificial Sequence: Synthetic oligonucleotide
  Antisense strand to SEQ ID NO: 1273390
auacauacagguuggauag

SEQ ID NO: 1273392 - RNA, 19 nt, Artificial Sequence
  Description of Artificial Sequence: Synthetic oligonucleotide
  Sense strand starting at position 176 of SEQ ID NO: 1241450
accuguauguaucuaccua

SEQ ID NO: 1273393 - RNA, 19 nt, Artificial Sequence
  Description of Artificial Sequence: Synthetic oligonucleotide
  Antisense strand to SEQ ID NO: 1273392
uagguagauacauacaggu

SEQ ID NO: 1273394 - RNA, 19 nt, Artificial Sequence
  Description of Artificial Sequence: Synthetic oligonucleotide
  Sense strand starting at position 244 of SEQ ID NO: 1241450
uuugcugacgucuacaaua

SEQ ID NO: 1273395 - RNA, 19 nt, Artificial Sequence
  Description of Artificial Sequence: Synthetic oligonucleotide
  Antisense strand to SEQ ID NO: 1273394
uauuguagacgucagcaaa

SEQ ID NO: 1273396 - RNA, 19 nt, Artificial Sequence
  Description of Artificial Sequence: Synthetic oligonucleotide
  Sense strand starting at position 246 of SEQ ID NO: 1241450
ugcugacgucuacaauauu

SEQ ID NO: 1273397 - RNA, 19 nt, Artificial Sequence
  Description of Artificial Sequence: Synthetic oligonucleotide
  Antisense strand to SEQ ID NO: 1273396
aauauuguagacgucagca

SEQ ID NO: 1273398 - RNA, 19 nt, Artificial Sequence
  Description of Artificial Sequence: Synthetic oligonucleotide
  Sense strand starting at position 266 of SEQ ID NO: 1241450
cgccucucaucaucaaaga

SEQ ID NO: 1273399 - RNA, 19 nt, Artificial Sequence
  Description of Artificial Sequence: Synthetic oligonucleotide
  Antisense strand to SEQ ID NO: 1273398
ucuuugaugaugagaggcg

SEQ ID NO: 1273400 - RNA, 19 nt, Artificial Sequence
  Description of Artificial Sequence: Synthetic oligonucleotide
  Sense strand starting at position 284 of SEQ ID NO: 1241450
aagaucaucugggagaaag

SEQ ID NO: 1273401 - RNA, 19 nt, Artificial Sequence
  Description of Artificial Sequence: Synthetic oligonucleotide
  Antisense strand to SEQ ID NO: 1273400
cuuucucccagaugaucuu

SEQ ID NO: 1273402 - RNA, 19 nt, Artificial Sequence
  Description of Artificial Sequence: Synthetic oligonucleotide
  Sense strand starting at position 438 of SEQ ID NO: 1241450
ucuugcugccuggauagau

SEQ ID NO: 1273403 - RNA, 19 nt, Artificial Sequence
  Description of Artificial Sequence: Synthetic oligonucleotide
  Antisense strand to SEQ ID NO: 1273402
aucuauccaggcagcaaga

SEQ ID NO: 1273404 - RNA, 19 nt, Artificial Sequence
  Description of Artificial Sequence: Synthetic oligonucleotide
  Sense strand starting at position 591 of SEQ ID NO: 1241450
uaagcaaaguuaguaagua

SEQ ID NO: 1273405 - RNA, 19 nt, Artificial Sequence
  Description of Artificial Sequence: Synthetic oligonucleotide
  Antisense strand to SEQ ID NO: 1273404
uacuuacuaacuuugcuua

SEQ ID NO: 1273406 - RNA, 19 nt, Artificial Sequence
  Description of Artificial Sequence: Synthetic oligonucleotide
  Sense strand starting at position 616 of SEQ ID NO: 1241450
gggaaaucaacuugcuguu

SEQ ID NO: 1273407 - RNA, 19 nt, Artificial Sequence
  Description of Artificial Sequence: Synthetic oligonucleotide
  Antisense strand to SEQ ID NO: 1273406
aacagcaaguugauuuccc

SEQ ID NO: 1273408 - RNA, 19 nt, Artificial Sequence
  Description of Artificial Sequence: Synthetic oligonucleotide
  Sense strand starting at position 1462 of SEQ ID NO: 1241450
uugucagucgcucuucuua

SEQ ID NO: 1273409 - RNA, 19 nt, Artificial Sequence
  Description of Artificial Sequence: Synthetic oligonucleotide
  Antisense strand to SEQ ID NO: 1273408
uaagaagagcgacugacaa

SEQ ID NO: 1273410 - RNA, 19 nt, Artificial Sequence
  Description of Artificial Sequence: Synthetic oligonucleotide
  Sense strand starting at position 1581 of SEQ ID NO: 1241450
acaguuccaucacuggaga

SEQ ID NO: 1273411 - RNA, 19 nt, Artificial Sequence
  Description of Artificial Sequence: Synthetic oligonucleotide
  Antisense strand to SEQ ID NO: 1273410
ucuccagugauggaacugu

SEQ ID NO: 1273412 - RNA, 19 nt, Artificial Sequence
  Description of Artificial Sequence: Synthetic oligonucleotide
  Sense strand starting at position 1717 of SEQ ID NO: 1241450
gagaguguaaucugcgaga

SEQ ID NO: 1273413 - RNA, 19 nt, Artificial Sequence
  Description of Artificial Sequence: Synthetic oligonucleotide
  Antisense strand to SEQ ID NO: 1273412
ucucgcagauuacacucuc

SEQ ID NO: 1273414 - RNA, 19 nt, Artificial Sequence
  Description of Artificial Sequence: Synthetic oligonucleotide
  Sense strand starting at position 1722 of SEQ ID NO: 1241450
uguaaucugcgagaggaag

SEQ ID NO: 1273415 - RNA, 19 nt, Artificial Sequence
  Description of Artificial Sequence: Synthetic oligonucleotide
  Antisense strand to SEQ ID NO: 1273414
cuuccucucgcagauuaca

SEQ ID NO: 1273416 - RNA, 19 nt, Artificial Sequence
  Description of Artificial Sequence: Synthetic oligonucleotide
  Sense strand starting at position 1788 of SEQ ID NO: 1241450
ugcuguuagggauguggaa

SEQ ID NO: 1273417 - RNA, 19 nt, Artificial Sequence
  Description of Artificial Sequence: Synthetic oligonucleotide
  Antisense strand to SEQ ID NO: 1273416
uuccacaucccuaacagca

SEQ ID NO: 1273418 - RNA, 19 nt, Artificial Sequence
  Description of Artificial Sequence: Synthetic oligonucleotide
  Sense strand starting at position 2071 of SEQ ID NO: 1241450
agaggauugcagcgaggua

SEQ ID NO: 1273419 - RNA, 19 nt, Artificial Sequence
  Description of Artificial Sequence: Synthetic oligonucleotide
  Antisense strand to SEQ ID NO: 1273418
uaccucgcugcaauccucu

SEQ ID NO: 1273420 - RNA, 19 nt, Artificial Sequence
  Description of Artificial Sequence: Synthetic oligonucleotide
  Sense strand starting at position 2302 of SEQ ID NO: 1241450
accuccugacaguguagaa

SEQ ID NO: 1273421 - RNA, 19 nt, Artificial Sequence
  Description of Artificial Sequence: Synthetic oligonucleotide
  Antisense strand to SEQ ID NO: 1273420
uucuacacugucaggaggu

SEQ ID NO: 1273422 - RNA, 19 nt, Artificial Sequence
  Description of Artificial Sequence: Synthetic oligonucleotide
  Sense strand starting at position 2320 of SEQ ID NO: 1241450
acccaaaguccucaguaau

SEQ ID NO: 1273423 - RNA, 19 nt, Artificial Sequence
  Description of Artificial Sequence: Synthetic oligonucleotide
  Antisense strand to SEQ ID NO: 1273422
auuacugaggacuuugggu

SEQ ID NO: 1273424 - RNA, 19 nt, Artificial Sequence
  Description of Artificial Sequence: Synthetic oligonucleotide
  Sense strand starting at position 2337 of SEQ ID NO: 1241450
auauuccagccauagagua

SEQ ID NO: 1273425 - RNA, 19 nt, Artificial Sequence
  Description of Artificial Sequence: Synthetic oligonucleotide
  Antisense strand to SEQ ID NO: 1273424
uacucuauggcuggaauau

SEQ ID NO: 1273426 - RNA, 19 nt, Artificial Sequence
  Description of Artificial Sequence: Synthetic oligonucleotide
  Sense strand starting at position 2393 of SEQ ID NO: 1241450
ggccuaaauguccaguaca

SEQ ID NO: 1273427 - RNA, 19 nt, Artificial Sequence
  Description of Artificial Sequence: Synthetic oligonucleotide
  Antisense strand to SEQ ID NO: 1273426
uguacuggacauuuaggcc

SEQ ID NO: 1273428 - RNA, 19 nt, Artificial Sequence
  Description of Artificial Sequence: Synthetic oligonucleotide
  Sense strand starting at position 2500 of SEQ ID NO: 1241450
gaggaacugaucuguagug

SEQ ID NO: 1273429 - RNA, 19 nt, Artificial Sequence
  Description of Artificial Sequence: Synthetic oligonucleotide
  Antisense strand to SEQ ID NO: 1273428
cacuacagaucaguuccuc

SEQ ID NO: 1273430 - RNA, 19 nt, Artificial Sequence
  Description of Artificial Sequence: Synthetic oligonucleotide
  Sense strand starting at position 2502 of SEQ ID NO: 1241450
ggaacugaucuguaguguu

SEQ ID NO: 1273431 - RNA, 19 nt, Artificial Sequence
  Description of Artificial Sequence: Synthetic oligonucleotide
  Antisense strand to SEQ ID NO: 1273430
aacacuacagaucaguucc

SEQ ID NO: 1273432 - RNA, 19 nt, Artificial Sequence
  Description of Artificial Sequence: Synthetic oligonucleotide
  Sense strand starting at position 2516 of SEQ ID NO: 1241450
guguuugcuaguuucugua

SEQ ID NO: 1273433 - RNA, 19 nt, Artificial Sequence
  Description of Artificial Sequence: Synthetic oligonucleotide
  Antisense strand to SEQ ID NO: 1273432
uacagaaacuagcaaacac

SEQ ID NO: 1273434 - RNA, 19 nt, Artificial Sequence
  Description of Artificial Sequence: Synthetic oligonucleotide
  Sense strand starting at position 2660 of SEQ ID NO: 1241450
uuuccuagagucugauaau

SEQ ID NO: 1273435 - RNA, 19 nt, Artificial Sequence
  Description of Artificial Sequence: Synthetic oligonucleotide
  Antisense strand to SEQ ID NO: 1273434
auuaucagacucuaggaaa

SEQ ID NO: 1273436 - RNA, 19 nt, Artificial Sequence
  Description of Artificial Sequence: Synthetic oligonucleotide
  Sense strand starting at position 2723 of SEQ ID NO: 1241450
ugcuauaacugagugagca

SEQ ID NO: 1273437 - RNA, 19 nt, Artificial Sequence
  Description of Artificial Sequence: Synthetic oligonucleotide
  Antisense strand to SEQ ID NO: 1273436
ugcucacucaguuauagca

SEQ ID NO: 1273438 - RNA, 19 nt, Artificial Sequence
  Description of Artificial Sequence: Synthetic oligonucleotide
  Sense strand starting at position 2761 of SEQ ID NO: 1241450
agucaacuugugcaacaga

SEQ ID NO: 1273439 - RNA, 19 nt, Artificial Sequence
  Description of Artificial Sequence: Synthetic oligonucleotide
  Antisense strand to SEQ ID NO: 1273438
ucuguugcacaaguugacu

SEQ ID NO: 1273440 - RNA, 19 nt, Artificial Sequence
  Description of Artificial Sequence: Synthetic oligonucleotide
  Sense strand starting at position 2979 of SEQ ID NO: 1241450
uauggugucccagagagug

SEQ ID NO: 1273441 - RNA, 19 nt, Artificial Sequence
  Description of Artificial Sequence: Synthetic oligonucleotide
  Antisense strand to SEQ ID NO: 1273440
cacucucugggacaccaua

SEQ ID NO: 1273442 - RNA, 19 nt, Artificial Sequence
  Description of Artificial Sequence: Synthetic oligonucleotide
  Sense strand starting at position 3006 of SEQ ID NO: 1241450
uaugaugccucauuaugag

SEQ ID NO: 1273443 - RNA, 19 nt, Artificial Sequence
  Description of Artificial Sequence: Synthetic oligonucleotide
  Antisense strand to SEQ ID NO: 1273442
cucauaaugaggcaucaua

SEQ ID NO: 1273444 - RNA, 19 nt, Artificial Sequence
  Description of Artificial Sequence: Synthetic oligonucleotide
  Sense strand starting at position 3016 of SEQ ID NO: 1241450
cauuaugagcgacagggua

SEQ ID NO: 1273445 - RNA, 19 nt, Artificial Sequence
  Description of Artificial Sequence: Synthetic oligonucleotide
  Antisense strand to SEQ ID NO: 1273444
uacccugucgcucauaaug

SEQ ID NO: 1273446 - RNA, 19 nt, Artificial Sequence
  Description of Artificial Sequence: Synthetic oligonucleotide
  Sense strand starting at position 3145 of SEQ ID NO: 1241450
ucaucauuccugcaggaaa

SEQ ID NO: 1273447 - RNA, 19 nt, Artificial Sequence
  Description of Artificial Sequence: Synthetic oligonucleotide
  Antisense strand to SEQ ID NO: 1273446
uuuccugcaggaaugauga

SEQ ID NO: 1273448 - RNA, 19 nt, Artificial Sequence
  Description of Artificial Sequence: Synthetic oligonucleotide
  Sense strand starting at position 3523 of SEQ ID NO: 1241450
acaggaguucuugaguuuc

SEQ ID NO: 1273449 - RNA, 19 nt, Artificial Sequence
  Description of Artificial Sequence: Synthetic oligonucleotide
  Antisense strand to SEQ ID NO: 1273448
gaaacucaagaacuccugu

SEQ ID NO: 1273450 - RNA, 19 nt, Artificial Sequence
  Description of Artificial Sequence: Synthetic oligonucleotide
  Sense strand starting at position 3525 of SEQ ID NO: 1241450
aggaguucuugaguuuccu

SEQ ID NO: 1273451 - RNA, 19 nt, Artificial Sequence
  Description of Artificial Sequence: Synthetic oligonucleotide
  Antisense strand to SEQ ID NO: 1273450
aggaaacucaagaacuccu

SEQ ID NO: 1273452 - RNA, 19 nt, Artificial Sequence
  Description of Artificial Sequence: Synthetic oligonucleotide
  Sense strand starting at position 3533 of SEQ ID NO: 1241450
uugaguuuccuggaucucu

SEQ ID NO: 1273453 - RNA, 19 nt, Artificial Sequence
  Description of Artificial Sequence: Synthetic oligonucleotide
  Antisense strand to SEQ ID NO: 1273452
agagauccaggaaacucaa

SEQ ID NO: 1273454 - RNA, 19 nt, Artificial Sequence
  Description of Artificial Sequence: Synthetic oligonucleotide
  Sense strand starting at position 3558 of SEQ ID NO: 1241450
gucugugaacuugaaugag

SEQ ID NO: 1273455 - RNA, 19 nt, Artificial Sequence
  Description of Artificial Sequence: Synthetic oligonucleotide
  Antisense strand to SEQ ID NO: 1273454
cucauucaaguucacagac

SEQ ID NO: 1273456 - RNA, 19 nt, Artificial Sequence
  Description of Artificial Sequence: Synthetic oligonucleotide
  Sense strand starting at position 3658 of SEQ ID NO: 1241450
acaguaguauuagcaauau

SEQ ID NO: 1273457 - RNA, 19 nt, Artificial Sequence
  Description of Artificial Sequence: Synthetic oligonucleotide
  Antisense strand to SEQ ID NO: 1273456
auauugcuaauacuacugu

SEQ ID NO: 1273458 - RNA, 19 nt, Artificial Sequence
  Description of Artificial Sequence: Synthetic oligonucleotide
  Sense strand starting at position 3662 of SEQ ID NO: 1241450
uaguauuagcaauauaggu

SEQ ID NO: 1273459 - RNA, 19 nt, Artificial Sequence
  Description of Artificial Sequence: Synthetic oligonucleotide
  Antisense strand to SEQ ID NO: 1273458
accuauauugcuaauacua

SEQ ID NO: 1273460 - RNA, 19 nt, Artificial Sequence
  Description of Artificial Sequence: Synthetic oligonucleotide
  Sense strand starting at position 3667 of SEQ ID NO: 1241450
uuagcaauauagguaacuu

SEQ ID NO: 1273461 - RNA, 19 nt, Artificial Sequence
  Description of Artificial Sequence: Synthetic oligonucleotide
  Antisense strand to SEQ ID NO: 1273460
aaguuaccuauauugcuaa

SEQ ID NO: 1273462 - RNA, 19 nt, Artificial Sequence
  Description of Artificial Sequence: Synthetic oligonucleotide
  Sense strand starting at position 3675 of SEQ ID NO: 1241450
auagguaacuuguuaacaa

SEQ ID NO: 1273463 - RNA, 19 nt, Artificial Sequence
  Description of Artificial Sequence: Synthetic oligonucleotide
  Antisense strand to SEQ ID NO: 1273462
uuguuaacaaguuaccuau

SEQ ID NO: 1273464 - RNA, 19 nt, Artificial Sequence
  Description of Artificial Sequence: Synthetic oligonucleotide
  Sense strand starting at position 54 of SEQ ID NO: 1241451
auuggaaauccuuaaugcu

SEQ ID NO: 1273465 - RNA, 19 nt, Artificial Sequence
  Description of Artificial Sequence: Synthetic oligonucleotide
  Antisense strand to SEQ ID NO: 1273464
agcauuaaggauuuccaau

SEQ ID NO: 1273466 - RNA, 19 nt, Artificial Sequence
  Description of Artificial Sequence: Synthetic oligonucleotide
  Sense strand starting at position 173 of SEQ ID NO: 1241451
gcuauuauuguagaugaga

SEQ ID NO: 1273467 - RNA, 19 nt, Artificial Sequence
  Description of Artificial Sequence: Synthetic oligonucleotide
  Antisense strand to SEQ ID NO: 1273466
ucucaucuacaauaauagc

SEQ ID NO: 1273468 - RNA, 19 nt, Artificial Sequence
  Description of Artificial Sequence: Synthetic oligonucleotide
  Sense strand starting at position 224 of SEQ ID NO: 1241451
gaaguagaguucccuuaac

SEQ ID NO: 1273469 - RNA, 19 nt, Artificial Sequence
  Description of Artificial Sequence: Synthetic oligonucleotide
  Antisense strand to SEQ ID NO: 1273468
guuaagggaacucuacuuc

SEQ ID NO: 1273470 - RNA, 19 nt, Artificial Sequence
  Description of Artificial Sequence: Synthetic oligonucleotide
  Sense strand starting at position 455 of SEQ ID NO: 1241451
cugucauuaccucaggcau

SEQ ID NO: 1273471 - RNA, 19 nt, Artificial Sequence
  Description of Artificial Sequence: Synthetic oligonucleotide
  Antisense strand to SEQ ID NO: 1273470
augccugagguaaugacag

SEQ ID NO: 1273472 - RNA, 19 nt, Artificial Sequence
  Description of Artificial Sequence: Synthetic oligonucleotide
  Sense strand starting at position 593 of SEQ ID NO: 1241451
gaugaagugcguuaauaac

SEQ ID NO: 1273473 - RNA, 19 nt, Artificial Sequence
  Description of Artificial Sequence: Synthetic oligonucleotide
  Antisense strand to SEQ ID NO: 1273472
guuauuaacgcacuucauc

SEQ ID NO: 1273474 - RNA, 19 nt, Artificial Sequence
  Description of Artificial Sequence: Synthetic oligonucleotide
  Sense strand starting at position 785 of SEQ ID NO: 1241451
gucagaucacaucauuccu

SEQ ID NO: 1273475 - RNA, 19 nt, Artificial Sequence
  Description of Artificial Sequence: Synthetic oligonucleotide
  Antisense strand to SEQ ID NO: 1273474
aggaaugaugugaucugac

SEQ ID NO: 1273476 - RNA, 19 nt, Artificial Sequence
  Description of Artificial Sequence: Synthetic oligonucleotide
  Sense strand starting at position 793 of SEQ ID NO: 1241451
acaucauuccucugaugga

SEQ ID NO: 1273477 - RNA, 19 nt, Artificial Sequence
  Description of Artificial Sequence: Synthetic oligonucleotide
  Antisense strand to SEQ ID NO: 1273476
uccaucagaggaaugaugu

SEQ ID NO: 1273478 - RNA, 19 nt, Artificial Sequence
  Description of Artificial Sequence: Synthetic oligonucleotide
  Sense strand starting at position 980 of SEQ ID NO: 1241451
agucuuugccaugauccua

SEQ ID NO: 1273479 - RNA, 19 nt, Artificial Sequence
  Description of Artificial Sequence: Synthetic oligonucleotide
  Antisense strand to SEQ ID NO: 1273478
uaggaucauggcaaagacu

SEQ ID NO: 1273480 - RNA, 19 nt, Artificial Sequence
  Description of Artificial Sequence: Synthetic oligonucleotide
  Sense strand starting at position 1174 of SEQ ID NO: 1241451
aucgccagauaaguauaaa

SEQ ID NO: 1273481 - RNA, 19 nt, Artificial Sequence
  Description of Artificial Sequence: Synthetic oligonucleotide
  Antisense strand to SEQ ID NO: 1273480
uuuauacuuaucuggcgau

SEQ ID NO: 1273482 - RNA, 19 nt, Artificial Sequence
  Description of Artificial Sequence: Synthetic oligonucleotide
  Sense strand starting at position 1203 of SEQ ID NO: 1241451
uguaauaaauguguuagac

SEQ ID NO: 1273483 - RNA, 19 nt, Artificial Sequence
  Description of Artificial Sequence: Synthetic oligonucleotide
  Antisense strand to SEQ ID NO: 1273482
gucuaacacauuuauuaca

SEQ ID NO: 1273484 - RNA, 19 nt, Artificial Sequence
  Description of Artificial Sequence: Synthetic oligonucleotide
  Sense strand starting at position 1432 of SEQ ID NO: 1241451
gcuggacguucgauguaaa

SEQ ID NO: 1273485 - RNA, 19 nt, Artificial Sequence
  Description of Artificial Sequence: Synthetic oligonucleotide
  Antisense strand to SEQ ID NO: 1273484
uuuacaucgaacguccagc

SEQ ID NO: 1273486 - RNA, 19 nt, Artificial Sequence
  Description of Artificial Sequence: Synthetic oligonucleotide
  Sense strand starting at position 1621 of SEQ ID NO: 1241451
auagaauagcccuaauguu

SEQ ID NO: 1273487 - RNA, 19 nt, Artificial Sequence
  Description of Artificial Sequence: Synthetic oligonucleotide
  Antisense strand to SEQ ID NO: 1273486
aacauuagggcuauucuau

SEQ ID NO: 1273488 - RNA, 19 nt, Artificial Sequence
  Description of Artificial Sequence: Synthetic oligonucleotide
  Sense strand starting at position 1634 of SEQ ID NO: 1241451
aauguuguugcagagauac

SEQ ID NO: 1273489 - RNA, 19 nt, Artificial Sequence
  Description of Artificial Sequence: Synthetic oligonucleotide
  Antisense strand to SEQ ID NO: 1273488
guaucucugcaacaacauu

SEQ ID NO: 1273490 - RNA, 19 nt, Artificial Sequence
  Description of Artificial Sequence: Synthetic oligonucleotide
  Sense strand starting at position 1645 of SEQ ID NO: 1241451
agagauacguguguagaac

SEQ ID NO: 1273491 - RNA, 19 nt, Artificial Sequence
  Description of Artificial Sequence: Synthetic oligonucleotide
  Antisense strand to SEQ ID NO: 1273490
guucuacacacguaucucu

SEQ ID NO: 1273492 - RNA, 19 nt, Artificial Sequence
  Description of Artificial Sequence: Synthetic oligonucleotide
  Sense strand starting at position 1646 of SEQ ID NO: 1241451
gagauacguguguagaaca

SEQ ID NO: 1273493 - RNA, 19 nt, Artificial Sequence
  Description of Artificial Sequence: Synthetic oligonucleotide
  Antisense strand to SEQ ID NO: 1273492
uguucuacacacguaucuc

SEQ ID NO: 1273494 - RNA, 19 nt, Artificial Sequence
  Description of Artificial Sequence: Synthetic oligonucleotide
  Sense strand starting at position 1916 of SEQ ID NO: 1241451
uacaguauaccucggauau

SEQ ID NO: 1273495 - RNA, 19 nt, Artificial Sequence
  Description of Artificial Sequence: Synthetic oligonucleotide
  Antisense strand to SEQ ID NO: 1273494
auauccgagguauacugua

SEQ ID NO: 1273496 - RNA, 19 nt, Artificial Sequence
  Description of Artificial Sequence: Synthetic oligonucleotide
  Sense strand starting at position 1917 of SEQ ID NO: 1241451
acaguauaccucggauauc

SEQ ID NO: 1273497 - RNA, 19 nt, Artificial Sequence
  Description of Artificial Sequence: Synthetic oligonucleotide
  Antisense strand to SEQ ID NO: 1273496
gauauccgagguauacugu

SEQ ID NO: 1273498 - RNA, 19 nt, Artificial Sequence
  Description of Artificial Sequence: Synthetic oligonucleotide
  Sense strand starting at position 1952 of SEQ ID NO: 1241451
ccgagagcguuuacagguu

SEQ ID NO: 1273499 - RNA, 19 nt, Artificial Sequence
  Description of Artificial Sequence: Synthetic oligonucleotide
  Antisense strand to SEQ ID NO: 1273498
aaccuguaaacgcucucgg

SEQ ID NO: 1273500 - RNA, 19 nt, Artificial Sequence
  Description of Artificial Sequence: Synthetic oligonucleotide
  Sense strand starting at position 1968 of SEQ ID NO: 1241451
guucucuuuccggcgcaaa

SEQ ID NO: 1273501 - RNA, 19 nt, Artificial Sequence
  Description of Artificial Sequence: Synthetic oligonucleotide
  Antisense strand to SEQ ID NO: 1273500
uuugcgccggaaagagaac

SEQ ID NO: 1273502 - RNA, 19 nt, Artificial Sequence
  Description of Artificial Sequence: Synthetic oligonucleotide
  Sense strand starting at position 2386 of SEQ ID NO: 1241451
gucugugaucgucaagaaa

SEQ ID NO: 1273503 - RNA, 19 nt, Artificial Sequence
  Description of Artificial Sequence: Synthetic oligonucleotide
  Antisense strand to SEQ ID NO: 1273502
uuucuugacgaucacagac

SEQ ID NO: 1273504 - RNA, 19 nt, Artificial Sequence
  Description of Artificial Sequence: Synthetic oligonucleotide
  Sense strand starting at position 2465 of SEQ ID NO: 1241451
gguguauccacugagcuau

SEQ ID NO: 1273505 - RNA, 19 nt, Artificial Sequence
  Description of Artificial Sequence: Synthetic oligonucleotide
  Antisense strand to SEQ ID NO: 1273504
auagcucaguggauacacc

SEQ ID NO: 1273506 - RNA, 19 nt, Artificial Sequence
  Description of Artificial Sequence: Synthetic oligonucleotide
  Sense strand starting at position 2549 of SEQ ID NO: 1241451
uuaagaauuugggagucau

SEQ ID NO: 1273507 - RNA, 19 nt, Artificial Sequence
  Description of Artificial Sequence: Synthetic oligonucleotide
  Antisense strand to SEQ ID NO: 1273506
augacucccaaauucuuaa

SEQ ID NO: 1273508 - RNA, 19 nt, Artificial Sequence
  Description of Artificial Sequence: Synthetic oligonucleotide
  Sense strand starting at position 2702 of SEQ ID NO: 1241451
cagaguaaugagcaaaugu

SEQ ID NO: 1273509 - RNA, 19 nt, Artificial Sequence
  Description of Artificial Sequence: Synthetic oligonucleotide
  Antisense strand to SEQ ID NO: 1273508
acauuugcucauuacucug

SEQ ID NO: 1273510 - RNA, 19 nt, Artificial Sequence
  Description of Artificial Sequence: Synthetic oligonucleotide
  Sense strand starting at position 3045 of SEQ ID NO: 1241451
uuguuaacuccguagaaua

SEQ ID NO: 1273511 - RNA, 19 nt, Artificial Sequence
  Description of Artificial Sequence: Synthetic oligonucleotide
  Antisense strand to SEQ ID NO: 1273510
uauucuacggaguuaacaa

SEQ ID NO: 1273512 - RNA, 19 nt, Artificial Sequence
  Description of Artificial Sequence: Synthetic oligonucleotide
  Sense strand starting at position 3047 of SEQ ID NO: 1241451
guuaacuccguagaauaaa

SEQ ID NO: 1273513 - RNA, 19 nt, Artificial Sequence
  Description of Artificial Sequence: Synthetic oligonucleotide
  Antisense strand to SEQ ID NO: 1273512
uuuauucuacggaguuaac

SEQ ID NO: 1273514 - RNA, 19 nt, Artificial Sequence
  Description of Artificial Sequence: Synthetic oligonucleotide
  Sense strand starting at position 3067 of SEQ ID NO: 1241451
guacguugccuguacauuu

SEQ ID NO: 1273515 - RNA, 19 nt, Artificial Sequence
  Description of Artificial Sequence: Synthetic oligonucleotide
  Antisense strand to SEQ ID NO: 1273514
aaauguacaggcaacguac

SEQ ID NO: 1273516 - RNA, 19 nt, Artificial Sequence
  Description of Artificial Sequence: Synthetic oligonucleotide
  Sense strand starting at position 3105 of SEQ ID NO: 1241451
cugagaugguauguauaaa

SEQ ID NO: 1273517 - RNA, 19 nt, Artificial Sequence
  Description of Artificial Sequence: Synthetic oligonucleotide
  Antisense strand to SEQ ID NO: 1273516
uuuauacauaccaucucag

SEQ ID NO: 1273518 - RNA, 19 nt, Artificial Sequence
  Description of Artificial Sequence: Synthetic oligonucleotide
  Sense strand starting at position 3145 of SEQ ID NO: 1241451
ugugcaugcacagaguaaa

SEQ ID NO: 1273519 - RNA, 19 nt, Artificial Sequence
  Description of Artificial Sequence: Synthetic oligonucleotide
  Antisense strand to SEQ ID NO: 1273518
uuuacucugugcaugcaca

SEQ ID NO: 1273520 - RNA, 19 nt, Artificial Sequence
  Description of Artificial Sequence: Synthetic oligonucleotide
  Sense strand starting at position 3148 of SEQ ID NO: 1241451
gcaugcacagaguaaaguu

SEQ ID NO: 1273521 - RNA, 19 nt, Artificial Sequence
  Description of Artificial Sequence: Synthetic oligonucleotide
  Antisense strand to SEQ ID NO: 1273520
aacuuuacucugugcaugc

SEQ ID NO: 1273522 - RNA, 19 nt, Artificial Sequence
  Description of Artificial Sequence: Synthetic oligonucleotide
  Sense strand starting at position 3231 of SEQ ID NO: 1241451
gaguaucguguccaauaaa

SEQ ID NO: 1273523 - RNA, 19 nt, Artificial Sequence
  Description of Artificial Sequence: Synthetic oligonucleotide
  Antisense strand to SEQ ID NO: 1273522
uuuauuggacacgauacuc

SEQ ID NO: 1273524 - RNA, 19 nt, Artificial Sequence
  Description of Artificial Sequence: Synthetic oligonucleotide
  Sense strand starting at position 3250 of SEQ ID NO: 1241451
aagugugauccauaaagcu

SEQ ID NO: 1273525 - RNA, 19 nt, Artificial Sequence
  Description of Artificial Sequence: Synthetic oligonucleotide
  Antisense strand to SEQ ID NO: 1273524
agcuuuauggaucacacuu

SEQ ID NO: 1273526 - RNA, 19 nt, Artificial Sequence
  Description of Artificial Sequence: Synthetic oligonucleotide
  Sense strand starting at position 3345 of SEQ ID NO: 1241451
gaaugcagaucuguagaua

SEQ ID NO: 1273527 - RNA, 19 nt, Artificial Sequence
  Description of Artificial Sequence: Synthetic oligonucleotide
  Antisense strand to SEQ ID NO: 1273526
uaucuacagaucugcauuc

SEQ ID NO: 1273528 - RNA, 19 nt, Artificial Sequence
  Description of Artificial Sequence: Synthetic oligonucleotide
  Sense strand starting at position 3348 of SEQ ID NO: 1241451
ugcagaucuguagauaaua

SEQ ID NO: 1273529 - RNA, 19 nt, Artificial Sequence
  Description of Artificial Sequence: Synthetic oligonucleotide
  Antisense strand to SEQ ID NO: 1273528
uauuaucuacagaucugca

SEQ ID NO: 1273530 - RNA, 19 nt, Artificial Sequence
  Description of Artificial Sequence: Synthetic oligonucleotide
  Sense strand starting at position 3428 of SEQ ID NO: 1241451
ggagaaaugugaucaagcu

SEQ ID NO: 1273531 - RNA, 19 nt, Artificial Sequence
  Description of Artificial Sequence: Synthetic oligonucleotide
  Antisense strand to SEQ ID NO: 1273530
agcuugaucacauuucucc

SEQ ID NO: 1273532 - RNA, 19 nt, Artificial Sequence
  Description of Artificial Sequence: Synthetic oligonucleotide
  Sense strand starting at position 3857 of SEQ ID NO: 1241451
aguguaagccggguuguau

SEQ ID NO: 1273533 - RNA, 19 nt, Artificial Sequence
  Description of Artificial Sequence: Synthetic oligonucleotide
  Antisense strand to SEQ ID NO: 1273532
auacaacccggcuuacacu

SEQ ID NO: 1273534 - RNA, 19 nt, Artificial Sequence
  Description of Artificial Sequence: Synthetic oligonucleotide
  Sense strand starting at position 3858 of SEQ ID NO: 1241451
guguaagccggguuguaug

SEQ ID NO: 1273535 - RNA, 19 nt, Artificial Sequence
  Description of Artificial Sequence: Synthetic oligonucleotide
  Antisense strand to SEQ ID NO: 1273534
cauacaacccggcuuacac

SEQ ID NO: 1273536 - RNA, 19 nt, Artificial Sequence
  Description of Artificial Sequence: Synthetic oligonucleotide
  Sense strand starting at position 3867 of SEQ ID NO: 1241451
ggguuguaugagugaagga

SEQ ID NO: 1273537 - RNA, 19 nt, Artificial Sequence
  Description of Artificial Sequence: Synthetic oligonucleotide
  Antisense strand to SEQ ID NO: 1273536
uccuucacucauacaaccc

SEQ ID NO: 1273538 - RNA, 19 nt, Artificial Sequence
  Description of Artificial Sequence: Synthetic oligonucleotide
  Sense strand starting at position 3868 of SEQ ID NO: 1241451
gguuguaugagugaaggau

SEQ ID NO: 1273539 - RNA, 19 nt, Artificial Sequence
  Description of Artificial Sequence: Synthetic oligonucleotide
  Antisense strand to SEQ ID NO: 1273538
auccuucacucauacaacc

SEQ ID NO: 1273540 - RNA, 19 nt, Artificial Sequence
  Description of Artificial Sequence: Synthetic oligonucleotide
  Sense strand starting at position 3930 of SEQ ID NO: 1241451
gauagagagccuggucaau

SEQ ID NO: 1273541 - RNA, 19 nt, Artificial Sequence
  Description of Artificial Sequence: Synthetic oligonucleotide
  Antisense strand to SEQ ID NO: 1273540
auugaccaggcucucuauc

SEQ ID NO: 1273542 - RNA, 19 nt, Artificial Sequence
  Description of Artificial Sequence: Synthetic oligonucleotide
  Sense strand starting at position 3932 of SEQ ID NO: 1241451
uagagagccuggucaauaa

SEQ ID NO: 1273543 - RNA, 19 nt, Artificial Sequence
  Description of Artificial Sequence: Synthetic oligonucleotide
  Antisense strand to SEQ ID NO: 1273542
uuauugaccaggcucucua

SEQ ID NO: 1273544 - RNA, 19 nt, Artificial Sequence
  Description of Artificial Sequence: Synthetic oligonucleotide
  Sense strand starting at position 348 of SEQ ID NO: 1241452
ccacuauuccuauggagag

SEQ ID NO: 1273545 - RNA, 19 nt, Artificial Sequence
  Description of Artificial Sequence: Synthetic oligonucleotide
  Antisense strand to SEQ ID NO: 1273544
cucuccauaggaauagugg

SEQ ID NO: 1273546 - RNA, 19 nt, Artificial Sequence
  Description of Artificial Sequence: Synthetic oligonucleotide
  Sense strand starting at position 620 of SEQ ID NO: 1241452
guccuaauccaguggacuu

SEQ ID NO: 1273547 - RNA, 19 nt, Artificial Sequence
  Description of Artificial Sequence: Synthetic oligonucleotide
  Antisense strand to SEQ ID NO: 1273546
aaguccacuggauuaggac

SEQ ID NO: 1273548 - RNA, 19 nt, Artificial Sequence
  Description of Artificial Sequence: Synthetic oligonucleotide
  Sense strand starting at position 908 of SEQ ID NO: 1241452
gagaucgagcauuacacuu

SEQ ID NO: 1273549 - RNA, 19 nt, Artificial Sequence
  Description of Artificial Sequence: Synthetic oligonucleotide
  Antisense strand to SEQ ID NO: 1273548
aaguguaaugcucgaucuc

SEQ ID NO: 1273550 - RNA, 19 nt, Artificial Sequence
  Description of Artificial Sequence: Synthetic oligonucleotide
  Sense strand starting at position 998 of SEQ ID NO: 1241452
aacaguauacugggacauu

SEQ ID NO: 1273551 - RNA, 19 nt, Artificial Sequence
  Description of Artificial Sequence: Synthetic oligonucleotide
  Antisense strand to SEQ ID NO: 1273550
aaugucccaguauacuguu

SEQ ID NO: 1273552 - RNA, 19 nt, Artificial Sequence
  Description of Artificial Sequence: Synthetic oligonucleotide
  Sense strand starting at position 1009 of SEQ ID NO: 1241452
gggacauucugaccuuuac

SEQ ID NO: 1273553 - RNA, 19 nt, Artificial Sequence
  Description of Artificial Sequence: Synthetic oligonucleotide
  Antisense strand to SEQ ID NO: 1273552
guaaaggucagaauguccc

SEQ ID NO: 1273554 - RNA, 19 nt, Artificial Sequence
  Description of Artificial Sequence: Synthetic oligonucleotide
  Sense strand starting at position 1059 of SEQ ID NO: 1241452
uuaguaaggcaucauugua

SEQ ID NO: 1273555 - RNA, 19 nt, Artificial Sequence
  Description of Artificial Sequence: Synthetic oligonucleotide
  Antisense strand to SEQ ID NO: 1273554
uacaaugaugccuuacuaa

SEQ ID NO: 1273556 - RNA, 19 nt, Artificial Sequence
  Description of Artificial Sequence: Synthetic oligonucleotide
  Sense strand starting at position 1585 of SEQ ID NO: 1241452
cagagaaagguagguugau

SEQ ID NO: 1273557 - RNA, 19 nt, Artificial Sequence
  Description of Artificial Sequence: Synthetic oligonucleotide
  Antisense strand to SEQ ID NO: 1273556
aucaaccuaccuuucucug

SEQ ID NO: 1273558 - RNA, 19 nt, Artificial Sequence
  Description of Artificial Sequence: Synthetic oligonucleotide
  Sense strand starting at position 1599 of SEQ ID NO: 1241452
uugauuuccuggcagaaag

SEQ ID NO: 1273559 - RNA, 19 nt, Artificial Sequence
  Description of Artificial Sequence: Synthetic oligonucleotide
  Antisense strand to SEQ ID NO: 1273558
cuuucugccaggaaaucaa

SEQ ID NO: 1273560 - RNA, 19 nt, Artificial Sequence
  Description of Artificial Sequence: Synthetic oligonucleotide
  Sense strand starting at position 1616 of SEQ ID NO: 1241452
aggaaaguugcuggcaauc

SEQ ID NO: 1273561 - RNA, 19 nt, Artificial Sequence
  Description of Artificial Sequence: Synthetic oligonucleotide
  Antisense strand to SEQ ID NO: 1273560
gauugccagcaacuuuccu

SEQ ID NO: 1273562 - RNA, 19 nt, Artificial Sequence
  Description of Artificial Sequence: Synthetic oligonucleotide
  Sense strand starting at position 1673 of SEQ ID NO: 1241452
cggagaugucucugcagau

SEQ ID NO: 1273563 - RNA, 19 nt, Artificial Sequence
  Description of Artificial Sequence: Synthetic oligonucleotide
  Antisense strand to SEQ ID NO: 1273562
aucugcagagacaucuccg

SEQ ID NO: 1273564 - RNA, 19 nt, Artificial Sequence
  Description of Artificial Sequence: Synthetic oligonucleotide
  Sense strand starting at position 1674 of SEQ ID NO: 1241452
ggagaugucucugcagauc

SEQ ID NO: 1273565 - RNA, 19 nt, Artificial Sequence
  Description of Artificial Sequence: Synthetic oligonucleotide
  Antisense strand to SEQ ID NO: 1273564
gaucugcagagacaucucc

SEQ ID NO: 1273566 - RNA, 19 nt, Artificial Sequence
  Description of Artificial Sequence: Synthetic oligonucleotide
  Sense strand starting at position 2354 of SEQ ID NO: 1241452
ugagaccagucuucuuagu

SEQ ID NO: 1273567 - RNA, 19 nt, Artificial Sequence
  Description of Artificial Sequence: Synthetic oligonucleotide
  Antisense strand to SEQ ID NO: 1273566
acuaagaagacuggucuca

SEQ ID NO: 1273568 - RNA, 19 nt, Artificial Sequence
  Description of Artificial Sequence: Synthetic oligonucleotide
  Sense strand starting at position 2356 of SEQ ID NO: 1241452
agaccagucuucuuaguaa

SEQ ID NO: 1273569 - RNA, 19 nt, Artificial Sequence
  Description of Artificial Sequence: Synthetic oligonucleotide
  Antisense strand to SEQ ID NO: 1273568
uuacuaagaagacuggucu

SEQ ID NO: 1273570 - RNA, 19 nt, Artificial Sequence
  Description of Artificial Sequence: Synthetic oligonucleotide
  Sense strand starting at position 2392 of SEQ ID NO: 1241452
ugagaacaccuaugugcua

SEQ ID NO: 1273571 - RNA, 19 nt, Artificial Sequence
  Description of Artificial Sequence: Synthetic oligonucleotide
  Antisense strand to SEQ ID NO: 1273570
uagcacauagguguucuca

SEQ ID NO: 1273572 - RNA, 19 nt, Artificial Sequence
  Description of Artificial Sequence: Synthetic oligonucleotide
  Sense strand starting at position 2572 of SEQ ID NO: 1241452
acuauugugacgugauaau

SEQ ID NO: 1273573 - RNA, 19 nt, Artificial Sequence
  Description of Artificial Sequence: Synthetic oligonucleotide
  Antisense strand to SEQ ID NO: 1273572
auuaucacgucacaauagu

SEQ ID NO: 1273574 - RNA, 19 nt, Artificial Sequence
  Description of Artificial Sequence: Synthetic oligonucleotide
  Sense strand starting at position 2600 of SEQ ID NO: 1241452
gggaauggucuccagaguc

SEQ ID NO: 1273575 - RNA, 19 nt, Artificial Sequence
  Description of Artificial Sequence: Synthetic oligonucleotide
  Antisense strand to SEQ ID NO: 1273574
gacucuggagaccauuccc

SEQ ID NO: 1273576 - RNA, 19 nt, Artificial Sequence
  Description of Artificial Sequence: Synthetic oligonucleotide
  Sense strand starting at position 2745 of SEQ ID NO: 1241452
cccagugugugauuucugu

SEQ ID NO: 1273577 - RNA, 19 nt, Artificial Sequence
  Description of Artificial Sequence: Synthetic oligonucleotide
  Antisense strand to SEQ ID NO: 1273576
acagaaaucacacacuggg

SEQ ID NO: 1273578 - RNA, 19 nt, Artificial Sequence
  Description of Artificial Sequence: Synthetic oligonucleotide
  Sense strand starting at position 2751 of SEQ ID NO: 1241452
gugugauuucugugggcuc

SEQ ID NO: 1273579 - RNA, 19 nt, Artificial Sequence
  Description of Artificial Sequence: Synthetic oligonucleotide
  Antisense strand to SEQ ID NO: 1273578
gagcccacagaaaucacac

SEQ ID NO: 1273580 - RNA, 19 nt, Artificial Sequence
  Description of Artificial Sequence: Synthetic oligonucleotide
  Sense strand starting at position 2860 of SEQ ID NO: 1241452
cuagacuccugagucauca

SEQ ID NO: 1273581 - RNA, 19 nt, Artificial Sequence
  Description of Artificial Sequence: Synthetic oligonucleotide
  Antisense strand to SEQ ID NO: 1273580
ugaugacucaggagucuag

SEQ ID NO: 1273582 - RNA, 19 nt, Artificial Sequence
  Description of Artificial Sequence: Synthetic oligonucleotide
  Sense strand starting at position 2933 of SEQ ID NO: 1241452
gguucucuaccuuauucga

SEQ ID NO: 1273583 - RNA, 19 nt, Artificial Sequence
  Description of Artificial Sequence: Synthetic oligonucleotide
  Antisense strand to SEQ ID NO: 1273582
ucgaauaagguagagaacc

SEQ ID NO: 1273584 - RNA, 19 nt, Artificial Sequence
  Description of Artificial Sequence: Synthetic oligonucleotide
  Sense strand starting at position 3121 of SEQ ID NO: 1241452
gacacauccuaggcugaca

SEQ ID NO: 1273585 - RNA, 19 nt, Artificial Sequence
  Description of Artificial Sequence: Synthetic oligonucleotide
  Antisense strand to SEQ ID NO: 1273584
ugucagccuaggauguguc

SEQ ID NO: 1273586 - RNA, 19 nt, Artificial Sequence
  Description of Artificial Sequence: Synthetic oligonucleotide
  Sense strand starting at position 3179 of SEQ ID NO: 1241452
cugggaaucuuuccugggu

SEQ ID NO: 1273587 - RNA, 19 nt, Artificial Sequence
  Description of Artificial Sequence: Synthetic oligonucleotide
  Antisense strand to SEQ ID NO: 1273586
acccaggaaagauucccag

SEQ ID NO: 1273588 - RNA, 19 nt, Artificial Sequence
  Description of Artificial Sequence: Synthetic oligonucleotide
  Sense strand starting at position 3286 of SEQ ID NO: 1241452
gacucugcccuagagauau

SEQ ID NO: 1273589 - RNA, 19 nt, Artificial Sequence
  Description of Artificial Sequence: Synthetic oligonucleotide
  Antisense strand to SEQ ID NO: 1273588
auaucucuagggcagaguc

SEQ ID NO: 1273590 - RNA, 19 nt, Artificial Sequence
  Description of Artificial Sequence: Synthetic oligonucleotide
  Sense strand starting at position 3326 of SEQ ID NO: 1241452
uuaaauugauaccuguuga

SEQ ID NO: 1273591 - RNA, 19 nt, Artificial Sequence
  Description of Artificial Sequence: Synthetic oligonucleotide
  Antisense strand to SEQ ID NO: 1273590
ucaacagguaucaauuuaa

SEQ ID NO: 1273592 - RNA, 19 nt, Artificial Sequence
  Description of Artificial Sequence: Synthetic oligonucleotide
  Sense strand starting at position 3340 of SEQ ID NO: 1241452
guugauaucucuccagacu

SEQ ID NO: 1273593 - RNA, 19 nt, Artificial Sequence
  Description of Artificial Sequence: Synthetic oligonucleotide
  Antisense strand to SEQ ID NO: 1273592
agucuggagagauaucaac

SEQ ID NO: 1273594 - RNA, 19 nt, Artificial Sequence
  Description of Artificial Sequence: Synthetic oligonucleotide
  Sense strand starting at position 3389 of SEQ ID NO: 1241452
guucuuacuccugaagcca

SEQ ID NO: 1273595 - RNA, 19 nt, Artificial Sequence
  Description of Artificial Sequence: Synthetic oligonucleotide
  Antisense strand to SEQ ID NO: 1273594
uggcuucaggaguaagaac

SEQ ID NO: 1273596 - RNA, 19 nt, Artificial Sequence
  Description of Artificial Sequence: Synthetic oligonucleotide
  Sense strand starting at position 3469 of SEQ ID NO: 1241452
ugcccaaaugcacagauaa

SEQ ID NO: 1273597 - RNA, 19 nt, Artificial Sequence
  Description of Artificial Sequence: Synthetic oligonucleotide
  Antisense strand to SEQ ID NO: 1273596
uuaucugugcauuugggca

SEQ ID NO: 1273598 - RNA, 19 nt, Artificial Sequence
  Description of Artificial Sequence: Synthetic oligonucleotide
  Sense strand starting at position 3480 of SEQ ID NO: 1241452
acagauaauucugaagauu

SEQ ID NO: 1273599 - RNA, 19 nt, Artificial Sequence
  Description of Artificial Sequence: Synthetic oligonucleotide
  Antisense strand to SEQ ID NO: 1273598
aaucuucagaauuaucugu

SEQ ID NO: 1273600 - RNA, 19 nt, Artificial Sequence
  Description of Artificial Sequence: Synthetic oligonucleotide
  Sense strand starting at position 3519 of SEQ ID NO: 1241452
guuggaagaucugccaaga

SEQ ID NO: 1273601 - RNA, 19 nt, Artificial Sequence
  Description of Artificial Sequence: Synthetic oligonucleotide
  Antisense strand to SEQ ID NO: 1273600
ucuuggcagaucuuccaac

SEQ ID NO: 1273602 - RNA, 19 nt, Artificial Sequence
  Description of Artificial Sequence: Synthetic oligonucleotide
  Sense strand starting at position 3553 of SEQ ID NO: 1241452
gucagagcucuugaguaaa

SEQ ID NO: 1273603 - RNA, 19 nt, Artificial Sequence
  Description of Artificial Sequence: Synthetic oligonucleotide
  Antisense strand to SEQ ID NO: 1273602
uuuacucaagagcucugac

SEQ ID NO: 1273604 - RNA, 19 nt, Artificial Sequence
  Description of Artificial Sequence: Synthetic oligonucleotide
  Sense strand starting at position 3555 of SEQ ID NO: 1241452
cagagcucuugaguaaauc

SEQ ID NO: 1273605 - RNA, 19 nt, Artificial Sequence
  Description of Artificial Sequence: Synthetic oligonucleotide
  Antisense strand to SEQ ID NO: 1273604
gauuuacucaagagcucug

SEQ ID NO: 1273606 - RNA, 19 nt, Artificial Sequence
  Description of Artificial Sequence: Synthetic oligonucleotide
  Sense strand starting at position 3563 of SEQ ID NO: 1241452
uugaguaaaucccucagca

SEQ ID NO: 1273607 - RNA, 19 nt, Artificial Sequence
  Description of Artificial Sequence: Synthetic oligonucleotide
  Antisense strand to SEQ ID NO: 1273606
ugcugagggauuuacucaa

SEQ ID NO: 1273608 - RNA, 19 nt, Artificial Sequence
  Description of Artificial Sequence: Synthetic oligonucleotide
  Sense strand starting at position 3677 of SEQ ID NO: 1241452
gugaaaugauuccuuguag

SEQ ID NO: 1273609 - RNA, 19 nt, Artificial Sequence
  Description of Artificial Sequence: Synthetic oligonucleotide
  Antisense strand to SEQ ID NO: 1273608
cuacaaggaaucauuucac

SEQ ID NO: 1273610 - RNA, 19 nt, Artificial Sequence
  Description of Artificial Sequence: Synthetic oligonucleotide
  Sense strand starting at position 3678 of SEQ ID NO: 1241452
ugaaaugauuccuuguagg

SEQ ID NO: 1273611 - RNA, 19 nt, Artificial Sequence
  Description of Artificial Sequence: Synthetic oligonucleotide
  Antisense strand to SEQ ID NO: 1273610
ccuacaaggaaucauuuca

SEQ ID NO: 1273612 - RNA, 19 nt, Artificial Sequence
  Description of Artificial Sequence: Synthetic oligonucleotide
  Sense strand starting at position 3683 of SEQ ID NO: 1241452
ugauuccuuguaggaaauu

SEQ ID NO: 1273613 - RNA, 19 nt, Artificial Sequence
  Description of Artificial Sequence: Synthetic oligonucleotide
  Antisense strand to SEQ ID NO: 1273612
aauuuccuacaaggaauca

SEQ ID NO: 1273614 - RNA, 19 nt, Artificial Sequence
  Description of Artificial Sequence: Synthetic oligonucleotide
  Sense strand starting at position 3684 of SEQ ID NO: 1241452
gauuccuuguaggaaauuu

SEQ ID NO: 1273615 - RNA, 19 nt, Artificial Sequence
  Description of Artificial Sequence: Synthetic oligonucleotide
  Antisense strand to SEQ ID NO: 1273614
aaauuuccuacaaggaauc

SEQ ID NO: 1273616 - RNA, 19 nt, Artificial Sequence
  Description of Artificial Sequence: Synthetic oligonucleotide
  Sense strand starting at position 3897 of SEQ ID NO: 1241452
acaugaccugucugggauu

SEQ ID NO: 1273617 - RNA, 19 nt, Artificial Sequence
  Description of Artificial Sequence: Synthetic oligonucleotide
  Antisense strand to SEQ ID NO: 1273616
aaucccagacaggucaugu

SEQ ID NO: 1273618 - RNA, 19 nt, Artificial Sequence
  Description of Artificial Sequence: Synthetic oligonucleotide
  Sense strand starting at position 3908 of SEQ ID NO: 1241452
cugggauucugagucauuc

SEQ ID NO: 1273619 - RNA, 19 nt, Artificial Sequence
  Description of Artificial Sequence: Synthetic oligonucleotide
  Antisense strand to SEQ ID NO: 1273618
gaaugacucagaaucccag

SEQ ID NO: 1273620 - RNA, 19 nt, Artificial Sequence
  Description of Artificial Sequence: Synthetic oligonucleotide
  Sense strand starting at position 3912 of SEQ ID NO: 1241452
gauucugagucauucuagu

SEQ ID NO: 1273621 - RNA, 19 nt, Artificial Sequence
  Description of Artificial Sequence: Synthetic oligonucleotide
  Antisense strand to SEQ ID NO: 1273620
acuagaaugacucagaauc

SEQ ID NO: 1273622 - RNA, 19 nt, Artificial Sequence
  Description of Artificial Sequence: Synthetic oligonucleotide
  Sense strand starting at position 3945 of SEQ ID NO: 1241452
aggagccaucuugacuuua

SEQ ID NO: 1273623 - RNA, 19 nt, Artificial Sequence
  Description of Artificial Sequence: Synthetic oligonucleotide
  Antisense strand to SEQ ID NO: 1273622
uaaagucaagauggcuccu

SEQ ID NO: 1273624 - RNA, 19 nt, Artificial Sequence
  Description of Artificial Sequence: Synthetic oligonucleotide
  Sense strand starting at position 47 of SEQ ID NO: 1241453
ugcagaucacuuuguugaa

SEQ ID NO: 1273625 - RNA, 19 nt, Artificial Sequence
  Description of Artificial Sequence: Synthetic oligonucleotide
  Antisense strand to SEQ ID NO: 1273624
uucaacaaagugaucugca

SEQ ID NO: 1273626 - RNA, 19 nt, Artificial Sequence
  Description of Artificial Sequence: Synthetic oligonucleotide
  Sense strand starting at position 48 of SEQ ID NO: 1241453
gcagaucacuuuguugaaa

SEQ ID NO: 1273627 - RNA, 19 nt, Artificial Sequence
  Description of Artificial Sequence: Synthetic oligonucleotide
  Antisense strand to SEQ ID NO: 1273626
uuucaacaaagugaucugc

SEQ ID NO: 1273628 - RNA, 19 nt, Artificial Sequence
  Description of Artificial Sequence: Synthetic oligonucleotide
  Sense strand starting at position 105 of SEQ ID NO: 1241453
gccauugcugaaugggaaa

SEQ ID NO: 1273629 - RNA, 19 nt, Artificial Sequence
  Description of Artificial Sequence: Synthetic oligonucleotide
  Antisense strand to SEQ ID NO: 1273628
uuucccauucagcaauggc

SEQ ID NO: 1273630 - RNA, 19 nt, Artificial Sequence
  Description of Artificial Sequence: Synthetic oligonucleotide
  Sense strand starting at position 139 of SEQ ID NO: 1241453
auuaaauaggcuggauaug

SEQ ID NO: 1273631 - RNA, 19 nt, Artificial Sequence
  Description of Artificial Sequence: Synthetic oligonucleotide
  Antisense strand to SEQ ID NO: 1273630
cauauccagccuauuuaau

SEQ ID NO: 1273632 - RNA, 19 nt, Artificial Sequence
  Description of Artificial Sequence: Synthetic oligonucleotide
  Sense strand starting at position 402 of SEQ ID NO: 1241453
agucguuggcaucauuuau

SEQ ID NO: 1273633 - RNA, 19 nt, Artificial Sequence
  Description of Artificial Sequence: Synthetic oligonucleotide
  Antisense strand to SEQ ID NO: 1273632
auaaaugaugccaacgacu

SEQ ID NO: 1273634 - RNA, 19 nt, Artificial Sequence
  Description of Artificial Sequence: Synthetic oligonucleotide
  Sense strand starting at position 655 of SEQ ID NO: 1241453
gguccuauauagccauaaa

SEQ ID NO: 1273635 - RNA, 19 nt, Artificial Sequence
  Description of Artificial Sequence: Synthetic oligonucleotide
  Antisense strand to SEQ ID NO: 1273634
uuuauggcuauauaggacc

SEQ ID NO: 1273636 - RNA, 19 nt, Artificial Sequence
  Description of Artificial Sequence: Synthetic oligonucleotide
  Sense strand starting at position 687 of SEQ ID NO: 1241453
ugccaauuccacuaugaug

SEQ ID NO: 1273637 - RNA, 19 nt, Artificial Sequence
  Description of Artificial Sequence: Synthetic oligonucleotide
  Antisense strand to SEQ ID NO: 1273636
caucauaguggaauuggca

SEQ ID NO: 1273638 - RNA, 19 nt, Artificial Sequence
  Description of Artificial Sequence: Synthetic oligonucleotide
  Sense strand starting at position 774 of SEQ ID NO: 1241453
ucauuugguuucguacaua

SEQ ID NO: 1273639 - RNA, 19 nt, Artificial Sequence
  Description of Artificial Sequence: Synthetic oligonucleotide
  Antisense strand to SEQ ID NO: 1273638
uauguacgaaaccaaauga

SEQ ID NO: 1273640 - RNA, 19 nt, Artificial Sequence
  Description of Artificial Sequence: Synthetic oligonucleotide
  Sense strand starting at position 777 of SEQ ID NO: 1241453
uuugguuucguacauauau

SEQ ID NO: 1273641 - RNA, 19 nt, Artificial Sequence
  Description of Artificial Sequence: Synthetic oligonucleotide
  Antisense strand to SEQ ID NO: 1273640
auauauguacgaaaccaaa

SEQ ID NO: 1273642 - RNA, 19 nt, Artificial Sequence
  Description of Artificial Sequence: Synthetic oligonucleotide
  Sense strand starting at position 899 of SEQ ID NO: 1241453
acccaugaacacuguagau

SEQ ID NO: 1273643 - RNA, 19 nt, Artificial Sequence
  Description of Artificial Sequence: Synthetic oligonucleotide
  Antisense strand to SEQ ID NO: 1273642
aucuacaguguucaugggu

SEQ ID NO: 1273644 - RNA, 19 nt, Artificial Sequence
  Description of Artificial Sequence: Synthetic oligonucleotide
  Sense strand starting at position 954 of SEQ ID NO: 1241453
gccagugcaucuucuauuu

SEQ ID NO: 1273645 - RNA, 19 nt, Artificial Sequence
  Description of Artificial Sequence: Synthetic oligonucleotide
  Antisense strand to SEQ ID NO: 1273644
aaauagaagaugcacuggc

SEQ ID NO: 1273646 - RNA, 19 nt, Artificial Sequence
  Description of Artificial Sequence: Synthetic oligonucleotide
  Sense strand starting at position 1044 of SEQ ID NO: 1241453
ugacaaauauuggaacaau

SEQ ID NO: 1273647 - RNA, 19 nt, Artificial Sequence
  Description of Artificial Sequence: Synthetic oligonucleotide
  Antisense strand to SEQ ID NO: 1273646
auuguuccaauauuuguca

SEQ ID NO: 1273648 - RNA, 19 nt, Artificial Sequence
  Description of Artificial Sequence: Synthetic oligonucleotide
  Sense strand starting at position 1055 of SEQ ID NO: 1241453
ggaacaaucuaccacaaag

SEQ ID NO: 1273649 - RNA, 19 nt, Artificial Sequence
  Description of Artificial Sequence: Synthetic oligonucleotide
  Antisense strand to SEQ ID NO: 1273648
cuuugugguagauuguucc

SEQ ID NO: 1273650 - RNA, 19 nt, Artificial Sequence
  Description of Artificial Sequence: Synthetic oligonucleotide
  Sense strand starting at position 1072 of SEQ ID NO: 1241453
aggugauacugagucacua

SEQ ID NO: 1273651 - RNA, 19 nt, Artificial Sequence
  Description of Artificial Sequence: Synthetic oligonucleotide
  Antisense strand to SEQ ID NO: 1273650
uagugacucaguaucaccu

SEQ ID NO: 1273652 - RNA, 19 nt, Artificial Sequence
  Description of Artificial Sequence: Synthetic oligonucleotide
  Sense strand starting at position 1131 of SEQ ID NO: 1241453
agaguuuguccugagggua

SEQ ID NO: 1273653 - RNA, 19 nt, Artificial Sequence
  Description of Artificial Sequence: Synthetic oligonucleotide
  Antisense strand to SEQ ID NO: 1273652
uacccucaggacaaacucu

SEQ ID NO: 1273654 - RNA, 19 nt, Artificial Sequence
  Description of Artificial Sequence: Synthetic oligonucleotide
  Sense strand starting at position 1276 of SEQ ID NO: 1241453
uauguaaauggcuaaguca

SEQ ID NO: 1273655 - RNA, 19 nt, Artificial Sequence
  Description of Artificial Sequence: Synthetic oligonucleotide
  Antisense strand to SEQ ID NO: 1273654
ugacuuagccauuuacaua

SEQ ID NO: 1273656 - RNA, 19 nt, Artificial Sequence
  Description of Artificial Sequence: Synthetic oligonucleotide
  Sense strand starting at position 1429 of SEQ ID NO: 1241453
gucguuauaacugagggaa

SEQ ID NO: 1273657 - RNA, 19 nt, Artificial Sequence
  Description of Artificial Sequence: Synthetic oligonucleotide
  Antisense strand to SEQ ID NO: 1273656
uucccucaguuauaacgac

SEQ ID NO: 1273658 - RNA, 19 nt, Artificial Sequence
  Description of Artificial Sequence: Synthetic oligonucleotide
  Sense strand starting at position 1685 of SEQ ID NO: 1241453
accaauguacgaggcuuua

SEQ ID NO: 1273659 - RNA, 19 nt, Artificial Sequence
  Description of Artificial Sequence: Synthetic oligonucleotide
  Antisense strand to SEQ ID NO: 1273658
uaaagccucguacauuggu

SEQ ID NO: 1273660 - RNA, 19 nt, Artificial Sequence
  Description of Artificial Sequence: Synthetic oligonucleotide
  Sense strand starting at position 1872 of SEQ ID NO: 1241453
ucuugugggccuggauaga

SEQ ID NO: 1273661 - RNA, 19 nt, Artificial Sequence
  Description of Artificial Sequence: Synthetic oligonucleotide
  Antisense strand to SEQ ID NO: 1273660
ucuauccaggcccacaaga

SEQ ID NO: 1273662 - RNA, 19 nt, Artificial Sequence
  Description of Artificial Sequence: Synthetic oligonucleotide
  Sense strand starting at position 1964 of SEQ ID NO: 1241453
cagcacucgcuccaggaua

SEQ ID NO: 1273663 - RNA, 19 nt, Artificial Sequence
  Description of Artificial Sequence: Synthetic oligonucleotide
  Antisense strand to SEQ ID NO: 1273662
uauccuggagcgagugcug

SEQ ID NO: 1273664 - RNA, 19 nt, Artificial Sequence
  Description of Artificial Sequence: Synthetic oligonucleotide
  Sense strand starting at position 2083 of SEQ ID NO: 1241453
gcuauaaagagccacguua

SEQ ID NO: 1273665 - RNA, 19 nt, Artificial Sequence
  Description of Artificial Sequence: Synthetic oligonucleotide
  Antisense strand to SEQ ID NO: 1273664
uaacguggcucuuuauagc

SEQ ID NO: 1273666 - RNA, 19 nt, Artificial Sequence
  Description of Artificial Sequence: Synthetic oligonucleotide
  Sense strand starting at position 2198 of SEQ ID NO: 1241453
ggccauguugcuuauagac

SEQ ID NO: 1273667 - RNA, 19 nt, Artificial Sequence
  Description of Artificial Sequence: Synthetic oligonucleotide
  Antisense strand to SEQ ID NO: 1273666
gucuauaagcaacauggcc

SEQ ID NO: 1273668 - RNA, 19 nt, Artificial Sequence
  Description of Artificial Sequence: Synthetic oligonucleotide
  Sense strand starting at position 2219 of SEQ ID NO: 1241453
gcaugcggccauguugaau

SEQ ID NO: 1273669 - RNA, 19 nt, Artificial Sequence
  Description of Artificial Sequence: Synthetic oligonucleotide
  Antisense strand to SEQ ID NO: 1273668
auucaacauggccgcaugc

SEQ ID NO: 1273670 - RNA, 19 nt, Artificial Sequence
  Description of Artificial Sequence: Synthetic oligonucleotide
  Sense strand starting at position 2228 of SEQ ID NO: 1241453
cauguugaauauucggaga

SEQ ID NO: 1273671 - RNA, 19 nt, Artificial Sequence
  Description of Artificial Sequence: Synthetic oligonucleotide
  Antisense strand to SEQ ID NO: 1273670
ucuccgaauauucaacaug

SEQ ID NO: 1273672 - RNA, 19 nt, Artificial Sequence
  Description of Artificial Sequence: Synthetic oligonucleotide
  Sense strand starting at position 2639 of SEQ ID NO: 1241453
gaugaaggaucacuaguuc

SEQ ID NO: 1273673 - RNA, 19 nt, Artificial Sequence
  Description of Artificial Sequence: Synthetic oligonucleotide
  Antisense strand to SEQ ID NO: 1273672
gaacuagugauccuucauc

SEQ ID NO: 1273674 - RNA, 19 nt, Artificial Sequence
  Description of Artificial Sequence: Synthetic oligonucleotide
  Sense strand starting at position 2660 of SEQ ID NO: 1241453
uuugacaguuugguacuaa

SEQ ID NO: 1273675 - RNA, 19 nt, Artificial Sequence
  Description of Artificial Sequence: Synthetic oligonucleotide
  Antisense strand to SEQ ID NO: 1273674
uuaguaccaaacugucaaa

SEQ ID NO: 1273676 - RNA, 19 nt, Artificial Sequence
  Description of Artificial Sequence: Synthetic oligonucleotide
  Sense strand starting at position 2707 of SEQ ID NO: 1241453
guuuguuuccaugcguuca

SEQ ID NO: 1273677 - RNA, 19 nt, Artificial Sequence
  Description of Artificial Sequence: Synthetic oligonucleotide
  Antisense strand to SEQ ID NO: 1273676
ugaacgcauggaaacaaac

SEQ ID NO: 1273678 - RNA, 19 nt, Artificial Sequence
  Description of Artificial Sequence: Synthetic oligonucleotide
  Sense strand starting at position 2866 of SEQ ID NO: 1241453
ucaaauacgugaucucucu

SEQ ID NO: 1273679 - RNA, 19 nt, Artificial Sequence
  Description of Artificial Sequence: Synthetic oligonucleotide
  Antisense strand to SEQ ID NO: 1273678
agagagaucacguauuuga

SEQ ID NO: 1273680 - RNA, 19 nt, Artificial Sequence
  Description of Artificial Sequence: Synthetic oligonucleotide
  Sense strand starting at position 2888 of SEQ ID NO: 1241453
aggcuaaauuuacaaagua

SEQ ID NO: 1273681 - RNA, 19 nt, Artificial Sequence
  Description of Artificial Sequence: Synthetic oligonucleotide
  Antisense strand to SEQ ID NO: 1273680
uacuuuguaaauuuagccu

SEQ ID NO: 1273682 - RNA, 19 nt, Artificial Sequence
  Description of Artificial Sequence: Synthetic oligonucleotide
  Sense strand starting at position 2896 of SEQ ID NO: 1241453
uuuacaaaguacguguaau

SEQ ID NO: 1273683 - RNA, 19 nt, Artificial Sequence
  Description of Artificial Sequence: Synthetic oligonucleotide
  Antisense strand to SEQ ID NO: 1273682
auuacacguacuuuguaaa

SEQ ID NO: 1273684 - RNA, 19 nt, Artificial Sequence
  Description of Artificial Sequence: Synthetic oligonucleotide
  Sense strand starting at position 2979 of SEQ ID NO: 1241453
augagagcuaccugcauga

SEQ ID NO: 1273685 - RNA, 19 nt, Artificial Sequence
  Description of Artificial Sequence: Synthetic oligonucleotide
  Antisense strand to SEQ ID NO: 1273684
ucaugcagguagcucucau

SEQ ID NO: 1273686 - RNA, 19 nt, Artificial Sequence
  Description of Artificial Sequence: Synthetic oligonucleotide
  Sense strand starting at position 2981 of SEQ ID NO: 1241453
gagagcuaccugcaugagu

SEQ ID NO: 1273687 - RNA, 19 nt, Artificial Sequence
  Description of Artificial Sequence: Synthetic oligonucleotide
  Antisense strand to SEQ ID NO: 1273686
acucaugcagguagcucuc

SEQ ID NO: 1273688 - RNA, 19 nt, Artificial Sequence
  Description of Artificial Sequence: Synthetic oligonucleotide
  Sense strand starting at position 3007 of SEQ ID NO: 1241453
guuugugaaauguaauuga

SEQ ID NO: 1273689 - RNA, 19 nt, Artificial Sequence
  Description of Artificial Sequence: Synthetic oligonucleotide
  Antisense strand to SEQ ID NO: 1273688
ucaauuacauuucacaaac

SEQ ID NO: 1273690 - RNA, 19 nt, Artificial Sequence
  Description of Artificial Sequence: Synthetic oligonucleotide
  Sense strand starting at position 3010 of SEQ ID NO: 1241453
ugugaaauguaauugagcu

SEQ ID NO: 1273691 - RNA, 19 nt, Artificial Sequence
  Description of Artificial Sequence: Synthetic oligonucleotide
  Antisense strand to SEQ ID NO: 1273690
agcucaauuacauuucaca

SEQ ID NO: 1273692 - RNA, 19 nt, Artificial Sequence
  Description of Artificial Sequence: Synthetic oligonucleotide
  Sense strand starting at position 3011 of SEQ ID NO: 1241453
gugaaauguaauugagcug

SEQ ID NO: 1273693 - RNA, 19 nt, Artificial Sequence
  Description of Artificial Sequence: Synthetic oligonucleotide
  Antisense strand to SEQ ID NO: 1273692
cagcucaauuacauuucac

SEQ ID NO: 1273694 - RNA, 19 nt, Artificial Sequence
  Description of Artificial Sequence: Synthetic oligonucleotide
  Sense strand starting at position 3017 of SEQ ID NO: 1241453
uguaauugagcugaacauu

SEQ ID NO: 1273695 - RNA, 19 nt, Artificial Sequence
  Description of Artificial Sequence: Synthetic oligonucleotide
  Antisense strand to SEQ ID NO: 1273694
aauguucagcucaauuaca

SEQ ID NO: 1273696 - RNA, 19 nt, Artificial Sequence
  Description of Artificial Sequence: Synthetic oligonucleotide
  Sense strand starting at position 3553 of SEQ ID NO: 1241453
uaccuaguagcagguauua

SEQ ID NO: 1273697 - RNA, 19 nt, Artificial Sequence
  Description of Artificial Sequence: Synthetic oligonucleotide
  Antisense strand to SEQ ID NO: 1273696
uaauaccugcuacuaggua

SEQ ID NO: 1273698 - RNA, 19 nt, Artificial Sequence
  Description of Artificial Sequence: Synthetic oligonucleotide
  Sense strand starting at position 3774 of SEQ ID NO: 1241453
auggaaacauuucgggaau

SEQ ID NO: 1273699 - RNA, 19 nt, Artificial Sequence
  Description of Artificial Sequence: Synthetic oligonucleotide
  Antisense strand to SEQ ID NO: 1273698
auucccgaaauguuuccau

SEQ ID NO: 1273700 - RNA, 19 nt, Artificial Sequence
  Description of Artificial Sequence: Synthetic oligonucleotide
  Sense strand starting at position 3775 of SEQ ID NO: 1241453
uggaaacauuucgggaauc

SEQ ID NO: 1273701 - RNA, 19 nt, Artificial Sequence
  Description of Artificial Sequence: Synthetic oligonucleotide
  Antisense strand to SEQ ID NO: 1273700
gauucccgaaauguuucca

SEQ ID NO: 1273702 - RNA, 19 nt, Artificial Sequence
  Description of Artificial Sequence: Synthetic oligonucleotide
  Sense strand starting at position 3776 of SEQ ID NO: 1241453
ggaaacauuucgggaauca

SEQ ID NO: 1273703 - RNA, 19 nt, Artificial Sequence
  Description of Artificial Sequence: Synthetic oligonucleotide
  Antisense strand to SEQ ID NO: 1273702
ugauucccgaaauguuucc

SEQ ID NO: 1273704 - RNA, 19 nt, Artificial Sequence
  Description of Artificial Sequence: Synthetic oligonucleotide
  Sense strand starting at position 2082 of SEQ ID NO: 1241454
ugccuauugguuugcagua

SEQ ID NO: 1273705 - RNA, 19 nt, Artificial Sequence
  Description of Artificial Sequence: Synthetic oligonucleotide
  Antisense strand to SEQ ID NO: 1273704
uacugcaaaccaauaggca

SEQ ID NO: 1273706 - RNA, 19 nt, Artificial Sequence
  Description of Artificial Sequence: Synthetic oligonucleotide
  Sense strand starting at position 2200 of SEQ ID NO: 1241454
gcuguuucucgguaagcua

SEQ ID NO: 1273707 - RNA, 19 nt, Artificial Sequence
  Description of Artificial Sequence: Synthetic oligonucleotide
  Antisense strand to SEQ ID NO: 1273706
uagcuuaccgagaaacagc

SEQ ID NO: 1273708 - RNA, 19 nt, Artificial Sequence
  Description of Artificial Sequence: Synthetic oligonucleotide
  Sense strand starting at position 2203 of SEQ ID NO: 1241454
guuucucgguaagcuaaga

SEQ ID NO: 1273709 - RNA, 19 nt, Artificial Sequence
  Description of Artificial Sequence: Synthetic oligonucleotide
  Antisense strand to SEQ ID NO: 1273708
ucuuagcuuaccgagaaac

SEQ ID NO: 1273710 - RNA, 19 nt, Artificial Sequence
  Description of Artificial Sequence: Synthetic oligonucleotide
  Sense strand starting at position 2226 of SEQ ID NO: 1241454
ggcuguagcggcuccaaua

SEQ ID NO: 1273711 - RNA, 19 nt, Artificial Sequence
  Description of Artificial Sequence: Synthetic oligonucleotide
  Antisense strand to SEQ ID NO: 1273710
uauuggagccgcuacagcc

SEQ ID NO: 1273712 - RNA, 19 nt, Artificial Sequence
  Description of Artificial Sequence: Synthetic oligonucleotide
  Sense strand starting at position 2258 of SEQ ID NO: 1241454
cucagaauccuggguagga

SEQ ID NO: 1273713 - RNA, 19 nt, Artificial Sequence
  Description of Artificial Sequence: Synthetic oligonucleotide
  Antisense strand to SEQ ID NO: 1273712
uccuacccaggauucugag

SEQ ID NO: 1273714 - RNA, 19 nt, Artificial Sequence
  Description of Artificial Sequence: Synthetic oligonucleotide
  Sense strand starting at position 2367 of SEQ ID NO: 1241454
aggcauggcggcuauagaa

SEQ ID NO: 1273715 - RNA, 19 nt, Artificial Sequence
  Description of Artificial Sequence: Synthetic oligonucleotide
  Antisense strand to SEQ ID NO: 1273714
uucuauagccgccaugccu

SEQ ID NO: 1273716 - RNA, 19 nt, Artificial Sequence
  Description of Artificial Sequence: Synthetic oligonucleotide
  Sense strand starting at position 2462 of SEQ ID NO: 1241454
aagugauacuacgcugaug

SEQ ID NO: 1273717 - RNA, 19 nt, Artificial Sequence
  Description of Artificial Sequence: Synthetic oligonucleotide
  Antisense strand to SEQ ID NO: 1273716
caucagcguaguaucacuu

SEQ ID NO: 1273718 - RNA, 19 nt, Artificial Sequence
  Description of Artificial Sequence: Synthetic oligonucleotide
  Sense strand starting at position 2473 of SEQ ID NO: 1241454
cgcugaugugguucucgua

SEQ ID NO: 1273719 - RNA, 19 nt, Artificial Sequence
  Description of Artificial Sequence: Synthetic oligonucleotide
  Antisense strand to SEQ ID NO: 1273718
uacgagaaccacaucagcg

SEQ ID NO: 1273720 - RNA, 19 nt, Artificial Sequence
  Description of Artificial Sequence: Synthetic oligonucleotide
  Sense strand starting at position 2480 of SEQ ID NO: 1241454
gugguucucguagaaggaa

SEQ ID NO: 1273721 - RNA, 19 nt, Artificial Sequence
  Description of Artificial Sequence: Synthetic oligonucleotide
  Antisense strand to SEQ ID NO: 1273720
uuccuucuacgagaaccac

SEQ ID NO: 1273722 - RNA, 19 nt, Artificial Sequence
  Description of Artificial Sequence: Synthetic oligonucleotide
  Sense strand starting at position 2676 of SEQ ID NO: 1241454
aaacucauuucguacggaa

SEQ ID NO: 1273723 - RNA, 19 nt, Artificial Sequence
  Description of Artificial Sequence: Synthetic oligonucleotide
  Antisense strand to SEQ ID NO: 1273722
uuccguacgaaaugaguuu

SEQ ID NO: 1273724 - RNA, 19 nt, Artificial Sequence
  Description of Artificial Sequence: Synthetic oligonucleotide
  Sense strand starting at position 2737 of SEQ ID NO: 1241454
ucgugagucuuguucuaua

SEQ ID NO: 1273725 - RNA, 19 nt, Artificial Sequence
  Description of Artificial Sequence: Synthetic oligonucleotide
  Antisense strand to SEQ ID NO: 1273724
uauagaacaagacucacga

SEQ ID NO: 1273726 - RNA, 19 nt, Artificial Sequence
  Description of Artificial Sequence: Synthetic oligonucleotide
  Sense strand starting at position 2763 of SEQ ID NO: 1241454
agaagaauggcucggagca

SEQ ID NO: 1273727 - RNA, 19 nt, Artificial Sequence
  Description of Artificial Sequence: Synthetic oligonucleotide
  Antisense strand to SEQ ID NO: 1273726
ugcuccgagccauucuucu

SEQ ID NO: 1273728 - RNA, 19 nt, Artificial Sequence
  Description of Artificial Sequence: Synthetic oligonucleotide
  Sense strand starting at position 2764 of SEQ ID NO: 1241454
gaagaauggcucggagcau

SEQ ID NO: 1273729 - RNA, 19 nt, Artificial Sequence
  Description of Artificial Sequence: Synthetic oligonucleotide
  Antisense strand to SEQ ID NO: 1273728
augcuccgagccauucuuc

SEQ ID NO: 1273730 - RNA, 19 nt, Artificial Sequence
  Description of Artificial Sequence: Synthetic oligonucleotide
  Sense strand starting at position 2773 of SEQ ID NO: 1241454
cucggagcauuguuaauua

SEQ ID NO: 1273731 - RNA, 19 nt, Artificial Sequence
  Description of Artificial Sequence: Synthetic oligonucleotide
  Antisense strand to SEQ ID NO: 1273730
uaauuaacaaugcuccgag

SEQ ID NO: 1273732 - RNA, 19 nt, Artificial Sequence
  Description of Artificial Sequence: Synthetic oligonucleotide
  Sense strand starting at position 2854 of SEQ ID NO: 1241454
ccacuuaaugccuggcauu

SEQ ID NO: 1273733 - RNA, 19 nt, Artificial Sequence
  Description of Artificial Sequence: Synthetic oligonucleotide
  Antisense strand to SEQ ID NO: 1273732
aaugccaggcauuaagugg

SEQ ID NO: 1273734 - RNA, 19 nt, Artificial Sequence
  Description of Artificial Sequence: Synthetic oligonucleotide
  Sense strand starting at position 2903 of SEQ ID NO: 1241454
guccgcguuccuggaauuu

SEQ ID NO: 1273735 - RNA, 19 nt, Artificial Sequence
  Description of Artificial Sequence: Synthetic oligonucleotide
  Antisense strand to SEQ ID NO: 1273734
aaauuccaggaacgcggac

SEQ ID NO: 1273736 - RNA, 19 nt, Artificial Sequence
  Description of Artificial Sequence: Synthetic oligonucleotide
  Sense strand starting at position 2912 of SEQ ID NO: 1241454
ccuggaauuugucaugaaa

SEQ ID NO: 1273737 - RNA, 19 nt, Artificial Sequence
  Description of Artificial Sequence: Synthetic oligonucleotide
  Antisense strand to SEQ ID NO: 1273736
uuucaugacaaauuccagg

SEQ ID NO: 1273738 - RNA, 19 nt, Artificial Sequence
  Description of Artificial Sequence: Synthetic oligonucleotide
  Sense strand starting at position 2946 of SEQ ID NO: 1241454
caaucaaucgcuuguguua

SEQ ID NO: 1273739 - RNA, 19 nt, Artificial Sequence
  Description of Artificial Sequence: Synthetic oligonucleotide
  Antisense strand to SEQ ID NO: 1273738
uaacacaagcgauugauug

SEQ ID NO: 1273740 - RNA, 19 nt, Artificial Sequence
  Description of Artificial Sequence: Synthetic oligonucleotide
  Sense strand starting at position 2949 of SEQ ID NO: 1241454
ucaaucgcuuguguuauuu

SEQ ID NO: 1273741 - RNA, 19 nt, Artificial Sequence
  Description of Artificial Sequence: Synthetic oligonucleotide
  Antisense strand to SEQ ID NO: 1273740
aaauaacacaagcgauuga

SEQ ID NO: 1273742 - RNA, 19 nt, Artificial Sequence
  Description of Artificial Sequence: Synthetic oligonucleotide
  Sense strand starting at position 2970 of SEQ ID NO: 1241454
auguaaauucuugguagac

SEQ ID NO: 1273743 - RNA, 19 nt, Artificial Sequence
  Description of Artificial Sequence: Synthetic oligonucleotide
  Antisense strand to SEQ ID NO: 1273742
gucuaccaagaauuuacau

SEQ ID NO: 1273744 - RNA, 19 nt, Artificial Sequence
  Description of Artificial Sequence: Synthetic oligonucleotide
  Sense strand starting at position 2971 of SEQ ID NO: 1241454
uguaaauucuugguagaca

SEQ ID NO: 1273745 - RNA, 19 nt, Artificial Sequence
  Description of Artificial Sequence: Synthetic oligonucleotide
  Antisense strand to SEQ ID NO: 1273744
ugucuaccaagaauuuaca

SEQ ID NO: 1273746 - RNA, 19 nt, Artificial Sequence
  Description of Artificial Sequence: Synthetic oligonucleotide
  Sense strand starting at position 2972 of SEQ ID NO: 1241454
guaaauucuugguagacaa

SEQ ID NO: 1273747 - RNA, 19 nt, Artificial Sequence
  Description of Artificial Sequence: Synthetic oligonucleotide
  Antisense strand to SEQ ID NO: 1273746
uugucuaccaagaauuuac

SEQ ID NO: 1273748 - RNA, 19 nt, Artificial Sequence
  Description of Artificial Sequence: Synthetic oligonucleotide
  Sense strand starting at position 3110 of SEQ ID NO: 1241454
uaugaauugugccucaguu

SEQ ID NO: 1273749 - RNA, 19 nt, Artificial Sequence
  Description of Artificial Sequence: Synthetic oligonucleotide
  Antisense strand to SEQ ID NO: 1273748
aacugaggcacaauucaua

SEQ ID NO: 1273750 - RNA, 19 nt, Artificial Sequence
  Description of Artificial Sequence: Synthetic oligonucleotide
  Sense strand starting at position 3112 of SEQ ID NO: 1241454
ugaauugugccucaguucu

SEQ ID NO: 1273751 - RNA, 19 nt, Artificial Sequence
  Description of Artificial Sequence: Synthetic oligonucleotide
  Antisense strand to SEQ ID NO: 1273750
agaacugaggcacaauuca

SEQ ID NO: 1273752 - RNA, 19 nt, Artificial Sequence
  Description of Artificial Sequence: Synthetic oligonucleotide
  Sense strand starting at position 3144 of SEQ ID NO: 1241454
gacguaauuccgcuguugu

SEQ ID NO: 1273753 - RNA, 19 nt, Artificial Sequence
  Description of Artificial Sequence: Synthetic oligonucleotide
  Antisense strand to SEQ ID NO: 1273752
acaacagcggaauuacguc

SEQ ID NO: 1273754 - RNA, 19 nt, Artificial Sequence
  Description of Artificial Sequence: Synthetic oligonucleotide
  Sense strand starting at position 3228 of SEQ ID NO: 1241454
ccaagcgauucuccuuaca

SEQ ID NO: 1273755 - RNA, 19 nt, Artificial Sequence
  Description of Artificial Sequence: Synthetic oligonucleotide
  Antisense strand to SEQ ID NO: 1273754
uguaaggagaaucgcuugg

SEQ ID NO: 1273756 - RNA, 19 nt, Artificial Sequence
  Description of Artificial Sequence: Synthetic oligonucleotide
  Sense strand starting at position 3230 of SEQ ID NO: 1241454
aagcgauucuccuuacagg

SEQ ID NO: 1273757 - RNA, 19 nt, Artificial Sequence
  Description of Artificial Sequence: Synthetic oligonucleotide
  Antisense strand to SEQ ID NO: 1273756
ccuguaaggagaaucgcuu

SEQ ID NO: 1273758 - RNA, 19 nt, Artificial Sequence
  Description of Artificial Sequence: Synthetic oligonucleotide
  Sense strand starting at position 3231 of SEQ ID NO: 1241454
agcgauucuccuuacaggu

SEQ ID NO: 1273759 - RNA, 19 nt, Artificial Sequence
  Description of Artificial Sequence: Synthetic oligonucleotide
  Antisense strand to SEQ ID NO: 1273758
accuguaaggagaaucgcu

SEQ ID NO: 1273760 - RNA, 19 nt, Artificial Sequence
  Description of Artificial Sequence: Synthetic oligonucleotide
  Sense strand starting at position 3412 of SEQ ID NO: 1241454
ucaguucuuuaggucgaca

SEQ ID NO: 1273761 - RNA, 19 nt, Artificial Sequence
  Description of Artificial Sequence: Synthetic oligonucleotide
  Antisense strand to SEQ ID NO: 1273760
ugucgaccuaaagaacuga

SEQ ID NO: 1273762 - RNA, 19 nt, Artificial Sequence
  Description of Artificial Sequence: Synthetic oligonucleotide
  Sense strand starting at position 3414 of SEQ ID NO: 1241454
aguucuuuaggucgacaaa

SEQ ID NO: 1273763 - RNA, 19 nt, Artificial Sequence
  Description of Artificial Sequence: Synthetic oligonucleotide
  Antisense strand to SEQ ID NO: 1273762
uuugucgaccuaaagaacu

SEQ ID NO: 1273764 - RNA, 19 nt, Artificial Sequence
  Description of Artificial Sequence: Synthetic oligonucleotide
  Sense strand starting at position 3415 of SEQ ID NO: 1241454
guucuuuaggucgacaaau

SEQ ID NO: 1273765 - RNA, 19 nt, Artificial Sequence
  Description of Artificial Sequence: Synthetic oligonucleotide
  Antisense strand to SEQ ID NO: 1273764
auuugucgaccuaaagaac

SEQ ID NO: 1273766 - RNA, 19 nt, Artificial Sequence
  Description of Artificial Sequence: Synthetic oligonucleotide
  Sense strand starting at position 3417 of SEQ ID NO: 1241454
ucuuuaggucgacaaauua

SEQ ID NO: 1273767 - RNA, 19 nt, Artificial Sequence
  Description of Artificial Sequence: Synthetic oligonucleotide
  Antisense strand to SEQ ID NO: 1273766
uaauuugucgaccuaaaga

SEQ ID NO: 1273768 - RNA, 19 nt, Artificial Sequence
  Description of Artificial Sequence: Synthetic oligonucleotide
  Sense strand starting at position 3428 of SEQ ID NO: 1241454
acaaauuaguccuccagua

SEQ ID NO: 1273769 - RNA, 19 nt, Artificial Sequence
  Description of Artificial Sequence: Synthetic oligonucleotide
  Antisense strand to SEQ ID NO: 1273768
uacuggaggacuaauuugu

SEQ ID NO: 1273770 - RNA, 19 nt, Artificial Sequence
  Description of Artificial Sequence: Synthetic oligonucleotide
  Sense strand starting at position 3478 of SEQ ID NO: 1241454
cuuguaugugcguuuauuc

SEQ ID NO: 1273771 - RNA, 19 nt, Artificial Sequence
  Description of Artificial Sequence: Synthetic oligonucleotide
  Antisense strand to SEQ ID NO: 1273770
gaauaaacgcacauacaag

SEQ ID NO: 1273772 - RNA, 19 nt, Artificial Sequence
  Description of Artificial Sequence: Synthetic oligonucleotide
  Sense strand starting at position 3479 of SEQ ID NO: 1241454
uuguaugugcguuuauuca

SEQ ID NO: 1273773 - RNA, 19 nt, Artificial Sequence
  Description of Artificial Sequence: Synthetic oligonucleotide
  Antisense strand to SEQ ID NO: 1273772
ugaauaaacgcacauacaa

SEQ ID NO: 1273774 - RNA, 19 nt, Artificial Sequence
  Description of Artificial Sequence: Synthetic oligonucleotide
  Sense strand starting at position 3506 of SEQ ID NO: 1241454
aagaguacgugguggauuu

SEQ ID NO: 1273775 - RNA, 19 nt, Artificial Sequence
  Description of Artificial Sequence: Synthetic oligonucleotide
  Antisense strand to SEQ ID NO: 1273774
aaauccaccacguacucuu

SEQ ID NO: 1273776 - RNA, 19 nt, Artificial Sequence
  Description of Artificial Sequence: Synthetic oligonucleotide
  Sense strand starting at position 3533 of SEQ ID NO: 1241454
cucauuuauguguacgguu

SEQ ID NO: 1273777 - RNA, 19 nt, Artificial Sequence
  Description of Artificial Sequence: Synthetic oligonucleotide
  Antisense strand to SEQ ID NO: 1273776
aaccguacacauaaaugag

SEQ ID NO: 1273778 - RNA, 19 nt, Artificial Sequence
  Description of Artificial Sequence: Synthetic oligonucleotide
  Sense strand starting at position 3553 of SEQ ID NO: 1241454
uccuguauauacuuguaua

SEQ ID NO: 1273779 - RNA, 19 nt, Artificial Sequence
  Description of Artificial Sequence: Synthetic oligonucleotide
  Antisense strand to SEQ ID NO: 1273778
uauacaaguauauacagga

SEQ ID NO: 1273780 - RNA, 19 nt, Artificial Sequence
  Description of Artificial Sequence: Synthetic oligonucleotide
  Sense strand starting at position 3590 of SEQ ID NO: 1241454
auguuuaacgucugcuauc

SEQ ID NO: 1273781 - RNA, 19 nt, Artificial Sequence
  Description of Artificial Sequence: Synthetic oligonucleotide
  Antisense strand to SEQ ID NO: 1273780
gauagcagacguuaaacau

SEQ ID NO: 1273782 - RNA, 19 nt, Artificial Sequence
  Description of Artificial Sequence: Synthetic oligonucleotide
  Sense strand starting at position 3751 of SEQ ID NO: 1241454
gggcaaggauucuuuguau

SEQ ID NO: 1273783 - RNA, 19 nt, Artificial Sequence
  Description of Artificial Sequence: Synthetic oligonucleotide
  Antisense strand to SEQ ID NO: 1273782
auacaaagaauccuugccc

SEQ ID NO: 1273784 - RNA, 19 nt, Artificial Sequence
  Description of Artificial Sequence: Synthetic oligonucleotide
  Sense strand starting at position 260 of SEQ ID NO: 1241455
gggacuauagcuugugcca

SEQ ID NO: 1273785 - RNA, 19 nt, Artificial Sequence
  Description of Artificial Sequence: Synthetic oligonucleotide
  Antisense strand to SEQ ID NO: 1273784
uggcacaagcuauaguccc

SEQ ID NO: 1273786 - RNA, 19 nt, Artificial Sequence
  Description of Artificial Sequence: Synthetic oligonucleotide
  Sense strand starting at position 1124 of SEQ ID NO: 1241455
uuuauauucuaguccugau

SEQ ID NO: 1273787 - RNA, 19 nt, Artificial Sequence
  Description of Artificial Sequence: Synthetic oligonucleotide
  Antisense strand to SEQ ID NO: 1273786
aucaggacuagaauauaaa

SEQ ID NO: 1273788 - RNA, 19 nt, Artificial Sequence
  Description of Artificial Sequence: Synthetic oligonucleotide
  Sense strand starting at position 1204 of SEQ ID NO: 1241455
auaaaucaugaugguuuga

SEQ ID NO: 1273789 - RNA, 19 nt, Artificial Sequence
  Description of Artificial Sequence: Synthetic oligonucleotide
  Antisense strand to SEQ ID NO: 1273788
ucaaaccaucaugauuuau

SEQ ID NO: 1273790 - RNA, 19 nt, Artificial Sequence
  Description of Artificial Sequence: Synthetic oligonucleotide
  Sense strand starting at position 1258 of SEQ ID NO: 1241455
gaaaguucugagugugaaa

SEQ ID NO: 1273791 - RNA, 19 nt, Artificial Sequence
  Description of Artificial Sequence: Synthetic oligonucleotide
  Antisense strand to SEQ ID NO: 1273790
uuucacacucagaacuuuc

SEQ ID NO: 1273792 - RNA, 19 nt, Artificial Sequence
  Description of Artificial Sequence: Synthetic oligonucleotide
  Sense strand starting at position 1260 of SEQ ID NO: 1241455
aaguucugagugugaaaca

SEQ ID NO: 1273793 - RNA, 19 nt, Artificial Sequence
  Description of Artificial Sequence: Synthetic oligonucleotide
  Antisense strand to SEQ ID NO: 1273792
uguuucacacucagaacuu

SEQ ID NO: 1273794 - RNA, 19 nt, Artificial Sequence
  Description of Artificial Sequence: Synthetic oligonucleotide
  Sense strand starting at position 1317 of SEQ ID NO: 1241455
aucaaauuagccugauguc

SEQ ID NO: 1273795 - RNA, 19 nt, Artificial Sequence
  Description of Artificial Sequence: Synthetic oligonucleotide
  Antisense strand to SEQ ID NO: 1273794
gacaucaggcuaauuugau

SEQ ID NO: 1273796 - RNA, 19 nt, Artificial Sequence
  Description of Artificial Sequence: Synthetic oligonucleotide
  Sense strand starting at position 1318 of SEQ ID NO: 1241455
ucaaauuagccugaugucu

SEQ ID NO: 1273797 - RNA, 19 nt, Artificial Sequence
  Description of Artificial Sequence: Synthetic oligonucleotide
  Antisense strand to SEQ ID NO: 1273796
agacaucaggcuaauuuga

SEQ ID NO: 1273798 - RNA, 19 nt, Artificial Sequence
  Description of Artificial Sequence: Synthetic oligonucleotide
  Sense strand starting at position 1403 of SEQ ID NO: 1241455
cucagagacuccuagauua

SEQ ID NO: 1273799 - RNA, 19 nt, Artificial Sequence
  Description of Artificial Sequence: Synthetic oligonucleotide
  Antisense strand to SEQ ID NO: 1273798
uaaucuaggagucucugag

SEQ ID NO: 1273800 - RNA, 19 nt, Artificial Sequence
  Description of Artificial Sequence: Synthetic oligonucleotide
  Sense strand starting at position 1611 of SEQ ID NO: 1241455
uaucaugcgugaccacaau

SEQ ID NO: 1273801 - RNA, 19 nt, Artificial Sequence
  Description of Artificial Sequence: Synthetic oligonucleotide
  Antisense strand to SEQ ID NO: 1273800
auuguggucacgcaugaua

SEQ ID NO: 1273802 - RNA, 19 nt, Artificial Sequence
  Description of Artificial Sequence: Synthetic oligonucleotide
  Sense strand starting at position 1617 of SEQ ID NO: 1241455
gcgugaccacaauaagauu

SEQ ID NO: 1273803 - RNA, 19 nt, Artificial Sequence
  Description of Artificial Sequence: Synthetic oligonucleotide
  Antisense strand to SEQ ID NO: 1273802
aaucuuauuguggucacgc

SEQ ID NO: 1273804 - RNA, 19 nt, Artificial Sequence
  Description of Artificial Sequence: Synthetic oligonucleotide
  Sense strand starting at position 1651 of SEQ ID NO: 1241455
gccucaauuuaggaggaga

SEQ ID NO: 1273805 - RNA, 19 nt, Artificial Sequence
  Description of Artificial Sequence: Synthetic oligonucleotide
  Antisense strand to SEQ ID NO: 1273804
ucuccuccuaaauugaggc

SEQ ID NO: 1273806 - RNA, 19 nt, Artificial Sequence
  Description of Artificial Sequence: Synthetic oligonucleotide
  Sense strand starting at position 2015 of SEQ ID NO: 1241455
agugucagguauuccugua

SEQ ID NO: 1273807 - RNA, 19 nt, Artificial Sequence
  Description of Artificial Sequence: Synthetic oligonucleotide
  Antisense strand to SEQ ID NO: 1273806
uacaggaauaccugacacu

SEQ ID NO: 1273808 - RNA, 19 nt, Artificial Sequence
  Description of Artificial Sequence: Synthetic oligonucleotide
  Sense strand starting at position 2069 of SEQ ID NO: 1241455
guuggacuaauguguuaua

SEQ ID NO: 1273809 - RNA, 19 nt, Artificial Sequence
  Description of Artificial Sequence: Synthetic oligonucleotide
  Antisense strand to SEQ ID NO: 1273808
uauaacacauuaguccaac

SEQ ID NO: 1273810 - RNA, 19 nt, Artificial Sequence
  Description of Artificial Sequence: Synthetic oligonucleotide
  Sense strand starting at position 2070 of SEQ ID NO: 1241455
uuggacuaauguguuauaa

SEQ ID NO: 1273811 - RNA, 19 nt, Artificial Sequence
  Description of Artificial Sequence: Synthetic oligonucleotide
  Antisense strand to SEQ ID NO: 1273810
uuauaacacauuaguccaa

SEQ ID NO: 1273812 - RNA, 19 nt, Artificial Sequence
  Description of Artificial Sequence: Synthetic oligonucleotide
  Sense strand starting at position 2165 of SEQ ID NO: 1241455
aaggguaguuaccugcaaa

SEQ ID NO: 1273813 - RNA, 19 nt, Artificial Sequence
  Description of Artificial Sequence: Synthetic oligonucleotide
  Antisense strand to SEQ ID NO: 1273812
uuugcagguaacuacccuu

SEQ ID NO: 1273814 - RNA, 19 nt, Artificial Sequence
  Description of Artificial Sequence: Synthetic oligonucleotide
  Sense strand starting at position 2166 of SEQ ID NO: 1241455
aggguaguuaccugcaaau

SEQ ID NO: 1273815 - RNA, 19 nt, Artificial Sequence
  Description of Artificial Sequence: Synthetic oligonucleotide
  Antisense strand to SEQ ID NO: 1273814
auuugcagguaacuacccu

SEQ ID NO: 1273816 - RNA, 19 nt, Artificial Sequence
  Description of Artificial Sequence: Synthetic oligonucleotide
  Sense strand starting at position 2168 of SEQ ID NO: 1241455
gguaguuaccugcaaauac

SEQ ID NO: 1273817 - RNA, 19 nt, Artificial Sequence
  Description of Artificial Sequence: Synthetic oligonucleotide
  Antisense strand to SEQ ID NO: 1273816
guauuugcagguaacuacc

SEQ ID NO: 1273818 - RNA, 19 nt, Artificial Sequence
  Description of Artificial Sequence: Synthetic oligonucleotide
  Sense strand starting at position 2250 of SEQ ID NO: 1241455
ggcuuugaaauauggugaa

SEQ ID NO: 1273819 - RNA, 19 nt, Artificial Sequence
  Description of Artificial Sequence: Synthetic oligonucleotide
  Antisense strand to SEQ ID NO: 1273818
uucaccauauuucaaagcc

SEQ ID NO: 1273820 - RNA, 19 nt, Artificial Sequence
  Description of Artificial Sequence: Synthetic oligonucleotide
  Sense strand starting at position 2362 of SEQ ID NO: 1241455
uguaguaaguacuuacuau

SEQ ID NO: 1273821 - RNA, 19 nt, Artificial Sequence
  Description of Artificial Sequence: Synthetic oligonucleotide
  Antisense strand to SEQ ID NO: 1273820
auaguaaguacuuacuaca

SEQ ID NO: 1273822 - RNA, 19 nt, Artificial Sequence
  Description of Artificial Sequence: Synthetic oligonucleotide
  Sense strand starting at position 2363 of SEQ ID NO: 1241455
guaguaaguacuuacuaug

SEQ ID NO: 1273823 - RNA, 19 nt, Artificial Sequence
  Description of Artificial Sequence: Synthetic oligonucleotide
  Antisense strand to SEQ ID NO: 1273822
cauaguaaguacuuacuac

SEQ ID NO: 1273824 - RNA, 19 nt, Artificial Sequence
  Description of Artificial Sequence: Synthetic oligonucleotide
  Sense strand starting at position 2392 of SEQ ID NO: 1241455
ugucuuaaguaaguacuua

SEQ ID NO: 1273825 - RNA, 19 nt, Artificial Sequence
  Description of Artificial Sequence: Synthetic oligonucleotide
  Antisense strand to SEQ ID NO: 1273824
uaaguacuuacuuaagaca

SEQ ID NO: 1273826 - RNA, 19 nt, Artificial Sequence
  Description of Artificial Sequence: Synthetic oligonucleotide
  Sense strand starting at position 2435 of SEQ ID NO: 1241455
acaccaacucucugaggua

SEQ ID NO: 1273827 - RNA, 19 nt, Artificial Sequence
  Description of Artificial Sequence: Synthetic oligonucleotide
  Antisense strand to SEQ ID NO: 1273826
uaccucagagaguuggugu

SEQ ID NO: 1273828 - RNA, 19 nt, Artificial Sequence
  Description of Artificial Sequence: Synthetic oligonucleotide
  Sense strand starting at position 2495 of SEQ ID NO: 1241455
ggcacagagagauggguua

SEQ ID NO: 1273829 - RNA, 19 nt, Artificial Sequence
  Description of Artificial Sequence: Synthetic oligonucleotide
  Antisense strand to SEQ ID NO: 1273828
uaacccaucucucugugcc

SEQ ID NO: 1273830 - RNA, 19 nt, Artificial Sequence
  Description of Artificial Sequence: Synthetic oligonucleotide
  Sense strand starting at position 2528 of SEQ ID NO: 1241455
uggcacauaugaguggaaa

SEQ ID NO: 1273831 - RNA, 19 nt, Artificial Sequence
  Description of Artificial Sequence: Synthetic oligonucleotide
  Antisense strand to SEQ ID NO: 1273830
uuuccacucauaugugcca

SEQ ID NO: 1273832 - RNA, 19 nt, Artificial Sequence
  Description of Artificial Sequence: Synthetic oligonucleotide
  Sense strand starting at position 2551 of SEQ ID NO: 1241455
auguuaaccuaggcacaau

SEQ ID NO: 1273833 - RNA, 19 nt, Artificial Sequence
  Description of Artificial Sequence: Synthetic oligonucleotide
  Antisense strand to SEQ ID NO: 1273832
auugugccuagguuaacau

SEQ ID NO: 1273834 - RNA, 19 nt, Artificial Sequence
  Description of Artificial Sequence: Synthetic oligonucleotide
  Sense strand starting at position 2610 of SEQ ID NO: 1241455
agaaucaagucaucugcca

SEQ ID NO: 1273835 - RNA, 19 nt, Artificial Sequence
  Description of Artificial Sequence: Synthetic oligonucleotide
  Antisense strand to SEQ ID NO: 1273834
uggcagaugacuugauucu

SEQ ID NO: 1273836 - RNA, 19 nt, Artificial Sequence
  Description of Artificial Sequence: Synthetic oligonucleotide
  Sense strand starting at position 2618 of SEQ ID NO: 1241455
gucaucugccauugaaaga

SEQ ID NO: 1273837 - RNA, 19 nt, Artificial Sequence
  Description of Artificial Sequence: Synthetic oligonucleotide
  Antisense strand to SEQ ID NO: 1273836
ucuuucaauggcagaugac

SEQ ID NO: 1273838 - RNA, 19 nt, Artificial Sequence
  Description of Artificial Sequence: Synthetic oligonucleotide
  Sense strand starting at position 2634 of SEQ ID NO: 1241455
agaggucacucugucuaca

SEQ ID NO: 1273839 - RNA, 19 nt, Artificial Sequence
  Description of Artificial Sequence: Synthetic oligonucleotide
  Antisense strand to SEQ ID NO: 1273838
uguagacagagugaccucu

SEQ ID NO: 1273840 - RNA, 19 nt, Artificial Sequence
  Description of Artificial Sequence: Synthetic oligonucleotide
  Sense strand starting at position 2637 of SEQ ID NO: 1241455
ggucacucugucuacaaca

SEQ ID NO: 1273841 - RNA, 19 nt, Artificial Sequence
  Description of Artificial Sequence: Synthetic oligonucleotide
  Antisense strand to SEQ ID NO: 1273840
uguuguagacagagugacc

SEQ ID NO: 1273842 - RNA, 19 nt, Artificial Sequence
  Description of Artificial Sequence: Synthetic oligonucleotide
  Sense strand starting at position 2676 of SEQ ID NO: 1241455
gguagaguauuacuccaug

SEQ ID NO: 1273843 - RNA, 19 nt, Artificial Sequence
  Description of Artificial Sequence: Synthetic oligonucleotide
  Antisense strand to SEQ ID NO: 1273842
cauggaguaauacucuacc

SEQ ID NO: 1273844 - RNA, 19 nt, Artificial Sequence
  Description of Artificial Sequence: Synthetic oligonucleotide
  Sense strand starting at position 2679 of SEQ ID NO: 1241455
agaguauuacuccaugcuu

SEQ ID NO: 1273845 - RNA, 19 nt, Artificial Sequence
  Description of Artificial Sequence: Synthetic oligonucleotide
  Antisense strand to SEQ ID NO: 1273844
aagcauggaguaauacucu

SEQ ID NO: 1273846 - RNA, 19 nt, Artificial Sequence
  Description of Artificial Sequence: Synthetic oligonucleotide
  Sense strand starting at position 2681 of SEQ ID NO: 1241455
aguauuacuccaugcuuua

SEQ ID NO: 1273847 - RNA, 19 nt, Artificial Sequence
  Description of Artificial Sequence: Synthetic oligonucleotide
  Antisense strand to SEQ ID NO: 1273846
uaaagcauggaguaauacu

SEQ ID NO: 1273848 - RNA, 19 nt, Artificial Sequence
  Description of Artificial Sequence: Synthetic oligonucleotide
  Sense strand starting at position 2775 of SEQ ID NO: 1241455
agaaguauacagugugauu

SEQ ID NO: 1273849 - RNA, 19 nt, Artificial Sequence
  Description of Artificial Sequence: Synthetic oligonucleotide
  Antisense strand to SEQ ID NO: 1273848
aaucacacuguauacuucu

SEQ ID NO: 1273850 - RNA, 19 nt, Artificial Sequence
  Description of Artificial Sequence: Synthetic oligonucleotide
  Sense strand starting at position 2787 of SEQ ID NO: 1241455
ugugauuuccguugguauu

SEQ ID NO: 1273851 - RNA, 19 nt, Artificial Sequence
  Description of Artificial Sequence: Synthetic oligonucleotide
  Antisense strand to SEQ ID NO: 1273850
aauaccaacggaaaucaca

SEQ ID NO: 1273852 - RNA, 19 nt, Artificial Sequence
  Description of Artificial Sequence: Synthetic oligonucleotide
  Sense strand starting at position 2790 of SEQ ID NO: 1241455
gauuuccguugguauuuau

SEQ ID NO: 1273853 - RNA, 19 nt, Artificial Sequence
  Description of Artificial Sequence: Synthetic oligonucleotide
  Antisense strand to SEQ ID NO: 1273852
auaaauaccaacggaaauc

SEQ ID NO: 1273854 - RNA, 19 nt, Artificial Sequence
  Description of Artificial Sequence: Synthetic oligonucleotide
  Sense strand starting at position 2815 of SEQ ID NO: 1241455
cuuuguaguuuccuauauu

SEQ ID NO: 1273855 - RNA, 19 nt, Artificial Sequence
  Description of Artificial Sequence: Synthetic oligonucleotide
  Antisense strand to SEQ ID NO: 1273854
aauauaggaaacuacaaag

SEQ ID NO: 1273856 - RNA, 19 nt, Artificial Sequence
  Description of Artificial Sequence: Synthetic oligonucleotide
  Sense strand starting at position 2818 of SEQ ID NO: 1241455
uguaguuuccuauauuguu

SEQ ID NO: 1273857 - RNA, 19 nt, Artificial Sequence
  Description of Artificial Sequence: Synthetic oligonucleotide
  Antisense strand to SEQ ID NO: 1273856
aacaauauaggaaacuaca

SEQ ID NO: 1273858 - RNA, 19 nt, Artificial Sequence
  Description of Artificial Sequence: Synthetic oligonucleotide
  Sense strand starting at position 2985 of SEQ ID NO: 1241455
ggacacagcuggcuaauau

SEQ ID NO: 1273859 - RNA, 19 nt, Artificial Sequence
  Description of Artificial Sequence: Synthetic oligonucleotide
  Antisense strand to SEQ ID NO: 1273858
auauuagccagcugugucc

SEQ ID NO: 1273860 - RNA, 19 nt, Artificial Sequence
  Description of Artificial Sequence: Synthetic oligonucleotide
  Sense strand starting at position 3123 of SEQ ID NO: 1241455
acaccuggcccguauauua

SEQ ID NO: 1273861 - RNA, 19 nt, Artificial Sequence
  Description of Artificial Sequence: Synthetic oligonucleotide
  Antisense strand to SEQ ID NO: 1273860
uaauauacgggccaggugu

SEQ ID NO: 1273862 - RNA, 19 nt, Artificial Sequence
  Description of Artificial Sequence: Synthetic oligonucleotide
  Sense strand starting at position 3837 of SEQ ID NO: 1241455
gaagguuaccgucacucaa

SEQ ID NO: 1273863 - RNA, 19 nt, Artificial Sequence
  Description of Artificial Sequence: Synthetic oligonucleotide
  Antisense strand to SEQ ID NO: 1273862
uugagugacgguaaccuuc

SEQ ID NO: 1273864 - RNA, 19 nt, Artificial Sequence
  Description of Artificial Sequence: Synthetic oligonucleotide
  Sense strand starting at position 662 of SEQ ID NO: 1241456
gcuuccgggaugcaauaau

SEQ ID NO: 1273865 - RNA, 19 nt, Artificial Sequence
  Description of Artificial Sequence: Synthetic oligonucleotide
  Antisense strand to SEQ ID NO: 1273864
auuauugcaucccggaagc

SEQ ID NO: 1273866 - RNA, 19 nt, Artificial Sequence
  Description of Artificial Sequence: Synthetic oligonucleotide
  Sense strand starting at position 768 of SEQ ID NO: 1241456
ucuguaugucuuuauacuu

SEQ ID NO: 1273867 - RNA, 19 nt, Artificial Sequence
  Description of Artificial Sequence: Synthetic oligonucleotide
  Antisense strand to SEQ ID NO: 1273866
aaguauaaagacauacaga

SEQ ID NO: 1273868 - RNA, 19 nt, Artificial Sequence
  Description of Artificial Sequence: Synthetic oligonucleotide
  Sense strand starting at position 819 of SEQ ID NO: 1241456
acucuacuccuuugaagga

SEQ ID NO: 1273869 - RNA, 19 nt, Artificial Sequence
  Description of Artificial Sequence: Synthetic oligonucleotide
  Antisense strand to SEQ ID NO: 1273868
uccuucaaaggaguagagu

SEQ ID NO: 1273870 - RNA, 19 nt, Artificial Sequence
  Description of Artificial Sequence: Synthetic oligonucleotide
  Sense strand starting at position 892 of SEQ ID NO: 1241456
augacaugucuugauuccu

SEQ ID NO: 1273871 - RNA, 19 nt, Artificial Sequence
  Description of Artificial Sequence: Synthetic oligonucleotide
  Antisense strand to SEQ ID NO: 1273870
aggaaucaagacaugucau

SEQ ID NO: 1273872 - RNA, 19 nt, Artificial Sequence
  Description of Artificial Sequence: Synthetic oligonucleotide
  Sense strand starting at position 963 of SEQ ID NO: 1241456
ugcauagaaugauuaugua

SEQ ID NO: 1273873 - RNA, 19 nt, Artificial Sequence
  Description of Artificial Sequence: Synthetic oligonucleotide
  Antisense strand to SEQ ID NO: 1273872
uacauaaucauucuaugca

SEQ ID NO: 1273874 - RNA, 19 nt, Artificial Sequence
  Description of Artificial Sequence: Synthetic oligonucleotide
  Sense strand starting at position 1132 of SEQ ID NO: 1241456
aucuacuaccacugugauu

SEQ ID NO: 1273875 - RNA, 19 nt, Artificial Sequence
  Description of Artificial Sequence: Synthetic oligonucleotide
  Antisense strand to SEQ ID NO: 1273874
aaucacagugguaguagau

SEQ ID NO: 1273876 - RNA, 19 nt, Artificial Sequence
  Description of Artificial Sequence: Synthetic oligonucleotide
  Sense strand starting at position 1192 of SEQ ID NO: 1241456
guguuuguggaaaguuguu

SEQ ID NO: 1273877 - RNA, 19 nt, Artificial Sequence
  Description of Artificial Sequence: Synthetic oligonucleotide
  Antisense strand to SEQ ID NO: 1273876
aacaacuuuccacaaacac

SEQ ID NO: 1273878 - RNA, 19 nt, Artificial Sequence
  Description of Artificial Sequence: Synthetic oligonucleotide
  Sense strand starting at position 1357 of SEQ ID NO: 1241456
auggcuuagcgcgcuuaaa

SEQ ID NO: 1273879 - RNA, 19 nt, Artificial Sequence
  Description of Artificial Sequence: Synthetic oligonucleotide
  Antisense strand to SEQ ID NO: 1273878
uuuaagcgcgcuaagccau

SEQ ID NO: 1273880 - RNA, 19 nt, Artificial Sequence
  Description of Artificial Sequence: Synthetic oligonucleotide
  Sense strand starting at position 1359 of SEQ ID NO: 1241456
ggcuuagcgcgcuuaaaga

SEQ ID NO: 1273881 - RNA, 19 nt, Artificial Sequence
  Description of Artificial Sequence: Synthetic oligonucleotide
  Antisense strand to SEQ ID NO: 1273880
ucuuuaagcgcgcuaagcc

SEQ ID NO: 1273882 - RNA, 19 nt, Artificial Sequence
  Description of Artificial Sequence: Synthetic oligonucleotide
  Sense strand starting at position 1405 of SEQ ID NO: 1241456
acgugugagaaaugaaaua

SEQ ID NO: 1273883 - RNA, 19 nt, Artificial Sequence
  Description of Artificial Sequence: Synthetic oligonucleotide
  Antisense strand to SEQ ID NO: 1273882
uauuucauuucucacacgu

SEQ ID NO: 1273884 - RNA, 19 nt, Artificial Sequence
  Description of Artificial Sequence: Synthetic oligonucleotide
  Sense strand starting at position 1483 of SEQ ID NO: 1241456
cugacuaaccgcgacuuaa

SEQ ID NO: 1273885 - RNA, 19 nt, Artificial Sequence
  Description of Artificial Sequence: Synthetic oligonucleotide
  Antisense strand to SEQ ID NO: 1273884
uuaagucgcgguuagucag

SEQ ID NO: 1273886 - RNA, 19 nt, Artificial Sequence
  Description of Artificial Sequence: Synthetic oligonucleotide
  Sense strand starting at position 1627 of SEQ ID NO: 1241456
gacacugaccuucgagaga

SEQ ID NO: 1273887 - RNA, 19 nt, Artificial Sequence
  Description of Artificial Sequence: Synthetic oligonucleotide
  Antisense strand to SEQ ID NO: 1273886
ucucucgaaggucaguguc

SEQ ID NO: 1273888 - RNA, 19 nt, Artificial Sequence
  Description of Artificial Sequence: Synthetic oligonucleotide
  Sense strand starting at position 1798 of SEQ ID NO: 1241456
ccaaccguuuaccugagau

SEQ ID NO: 1273889 - RNA, 19 nt, Artificial Sequence
  Description of Artificial Sequence: Synthetic oligonucleotide
  Antisense strand to SEQ ID NO: 1273888
aucucagguaaacgguugg

SEQ ID NO: 1273890 - RNA, 19 nt, Artificial Sequence
  Description of Artificial Sequence: Synthetic oligonucleotide
  Sense strand starting at position 2100 of SEQ ID NO: 1241456
ggaggaguuuggagagaaa

SEQ ID NO: 1273891 - RNA, 19 nt, Artificial Sequence
  Description of Artificial Sequence: Synthetic oligonucleotide
  Antisense strand to SEQ ID NO: 1273890
uuucucuccaaacuccucc

SEQ ID NO: 1273892 - RNA, 19 nt, Artificial Sequence
  Description of Artificial Sequence: Synthetic oligonucleotide
  Sense strand starting at position 2111 of SEQ ID NO: 1241456
gagagaaaguagucgaacu

SEQ ID NO: 1273893 - RNA, 19 nt, Artificial Sequence
  Description of Artificial Sequence: Synthetic oligonucleotide
  Antisense strand to SEQ ID NO: 1273892
aguucgacuacuuucucuc

SEQ ID NO: 1273894 - RNA, 19 nt, Artificial Sequence
  Description of Artificial Sequence: Synthetic oligonucleotide
  Sense strand starting at position 2112 of SEQ ID NO: 1241456
agagaaaguagucgaacuu

SEQ ID NO: 1273895 - RNA, 19 nt, Artificial Sequence
  Description of Artificial Sequence: Synthetic oligonucleotide
  Antisense strand to SEQ ID NO: 1273894
aaguucgacuacuuucucu

SEQ ID NO: 1273896 - RNA, 19 nt, Artificial Sequence
  Description of Artificial Sequence: Synthetic oligonucleotide
  Sense strand starting at position 2191 of SEQ ID NO: 1241456
cgcagaacgcucuuucucu

SEQ ID NO: 1273897 - RNA, 19 nt, Artificial Sequence
  Description of Artificial Sequence: Synthetic oligonucleotide
  Antisense strand to SEQ ID NO: 1273896
agagaaagagcguucugcg

SEQ ID NO: 1273898 - RNA, 19 nt, Artificial Sequence
  Description of Artificial Sequence: Synthetic oligonucleotide
  Sense strand starting at position 2320 of SEQ ID NO: 1241456
ccaagaccugucgaaauug

SEQ ID NO: 1273899 - RNA, 19 nt, Artificial Sequence
  Description of Artificial Sequence: Synthetic oligonucleotide
  Antisense strand to SEQ ID NO: 1273898
caauuucgacaggucuugg

SEQ ID NO: 1273900 - RNA, 19 nt, Artificial Sequence
  Description of Artificial Sequence: Synthetic oligonucleotide
  Sense strand starting at position 2454 of SEQ ID NO: 1241456
ucuagauccuggccaaaga

SEQ ID NO: 1273901 - RNA, 19 nt, Artificial Sequence
  Description of Artificial Sequence: Synthetic oligonucleotide
  Antisense strand to SEQ ID NO: 1273900
ucuuuggccaggaucuaga

SEQ ID NO: 1273902 - RNA, 19 nt, Artificial Sequence
  Description of Artificial Sequence: Synthetic oligonucleotide
  Sense strand starting at position 2530 of SEQ ID NO: 1241456
ugaagugcuggaugagauu

SEQ ID NO: 1273903 - RNA, 19 nt, Artificial Sequence
  Description of Artificial Sequence: Synthetic oligonucleotide
  Antisense strand to SEQ ID NO: 1273902
aaucucauccagcacuuca

SEQ ID NO: 1273904 - RNA, 19 nt, Artificial Sequence
  Description of Artificial Sequence: Synthetic oligonucleotide
  Sense strand starting at position 2544 of SEQ ID NO: 1241456
agauuacgauaugugaauc

SEQ ID NO: 1273905 - RNA, 19 nt, Artificial Sequence
  Description of Artificial Sequence: Synthetic oligonucleotide
  Antisense strand to SEQ ID NO: 1273904
gauucacauaucguaaucu

SEQ ID NO: 1273906 - RNA, 19 nt, Artificial Sequence
  Description of Artificial Sequence: Synthetic oligonucleotide
  Sense strand starting at position 2552 of SEQ ID NO: 1241456
auaugugaauccucuaaga

SEQ ID NO: 1273907 - RNA, 19 nt, Artificial Sequence
  Description of Artificial Sequence: Synthetic oligonucleotide
  Antisense strand to SEQ ID NO: 1273906
ucuuagaggauucacauau

SEQ ID NO: 1273908 - RNA, 19 nt, Artificial Sequence
  Description of Artificial Sequence: Synthetic oligonucleotide
  Sense strand starting at position 2630 of SEQ ID NO: 1241456
gugaacuaagaaugguaua

SEQ ID NO: 1273909 - RNA, 19 nt, Artificial Sequence
  Description of Artificial Sequence: Synthetic oligonucleotide
  Antisense strand to SEQ ID NO: 1273908
uauaccauucuuaguucac

SEQ ID NO: 1273910 - RNA, 19 nt, Artificial Sequence
  Description of Artificial Sequence: Synthetic oligonucleotide
  Sense strand starting at position 2791 of SEQ ID NO: 1241456
cugggugcugaguaauaag

SEQ ID NO: 1273911 - RNA, 19 nt, Artificial Sequence
  Description of Artificial Sequence: Synthetic oligonucleotide
  Antisense strand to SEQ ID NO: 1273910
cuuauuacucagcacccag

SEQ ID NO: 1273912 - RNA, 19 nt, Artificial Sequence
  Description of Artificial Sequence: Synthetic oligonucleotide
  Sense strand starting at position 2865 of SEQ ID NO: 1241456
guuccuaaauuugugguua

SEQ ID NO: 1273913 - RNA, 19 nt, Artificial Sequence
  Description of Artificial Sequence: Synthetic oligonucleotide
  Antisense strand to SEQ ID NO: 1273912
uaaccacaaauuuaggaac

SEQ ID NO: 1273914 - RNA, 19 nt, Artificial Sequence
  Description of Artificial Sequence: Synthetic oligonucleotide
  Sense strand starting at position 2876 of SEQ ID NO: 1241456
ugugguuaaaguuaaugaa

SEQ ID NO: 1273915 - RNA, 19 nt, Artificial Sequence
  Description of Artificial Sequence: Synthetic oligonucleotide
  Antisense strand to SEQ ID NO: 1273914
uucauuaacuuuaaccaca

SEQ ID NO: 1273916 - RNA, 19 nt, Artificial Sequence
  Description of Artificial Sequence: Synthetic oligonucleotide
  Sense strand starting at position 2895 of SEQ ID NO: 1241456
aggaacuuauccuuuagua

SEQ ID NO: 1273917 - RNA, 19 nt, Artificial Sequence
  Description of Artificial Sequence: Synthetic oligonucleotide
  Antisense strand to SEQ ID NO: 1273916
uacuaaaggauaaguuccu

SEQ ID NO: 1273918 - RNA, 19 nt, Artificial Sequence
  Description of Artificial Sequence: Synthetic oligonucleotide
  Sense strand starting at position 3046 of SEQ ID NO: 1241456
uggcgagaccuugacuuua

SEQ ID NO: 1273919 - RNA, 19 nt, Artificial Sequence
  Description of Artificial Sequence: Synthetic oligonucleotide
  Antisense strand to SEQ ID NO: 1273918
uaaagucaaggucucgcca

SEQ ID NO: 1273920 - RNA, 19 nt, Artificial Sequence
  Description of Artificial Sequence: Synthetic oligonucleotide
  Sense strand starting at position 3256 of SEQ ID NO: 1241456
gacguagauuaacuuggaa

SEQ ID NO: 1273921 - RNA, 19 nt, Artificial Sequence
  Description of Artificial Sequence: Synthetic oligonucleotide
  Antisense strand to SEQ ID NO: 1273920
uuccaaguuaaucuacguc

SEQ ID NO: 1273922 - RNA, 19 nt, Artificial Sequence
  Description of Artificial Sequence: Synthetic oligonucleotide
  Sense strand starting at position 3258 of SEQ ID NO: 1241456
cguagauuaacuuggaaca

SEQ ID NO: 1273923 - RNA, 19 nt, Artificial Sequence
  Description of Artificial Sequence: Synthetic oligonucleotide
  Antisense strand to SEQ ID NO: 1273922
uguuccaaguuaaucuacg

SEQ ID NO: 1273924 - RNA, 19 nt, Artificial Sequence
  Description of Artificial Sequence: Synthetic oligonucleotide
  Sense strand starting at position 3304 of SEQ ID NO: 1241456
ucguuauguaugcuguaau

SEQ ID NO: 1273925 - RNA, 19 nt, Artificial Sequence
  Description of Artificial Sequence: Synthetic oligonucleotide
  Antisense strand to SEQ ID NO: 1273924
auuacagcauacauaacga

SEQ ID NO: 1273926 - RNA, 19 nt, Artificial Sequence
  Description of Artificial Sequence: Synthetic oligonucleotide
  Sense strand starting at position 3307 of SEQ ID NO: 1241456
uuauguaugcuguaaugaa

SEQ ID NO: 1273927 - RNA, 19 nt, Artificial Sequence
  Description of Artificial Sequence: Synthetic oligonucleotide
  Antisense strand to SEQ ID NO: 1273926
uucauuacagcauacauaa

SEQ ID NO: 1273928 - RNA, 19 nt, Artificial Sequence
  Description of Artificial Sequence: Synthetic oligonucleotide
  Sense strand starting at position 3311 of SEQ ID NO: 1241456
guaugcuguaaugaacagu

SEQ ID NO: 1273929 - RNA, 19 nt, Artificial Sequence
  Description of Artificial Sequence: Synthetic oligonucleotide
  Antisense strand to SEQ ID NO: 1273928
acuguucauuacagcauac

SEQ ID NO: 1273930 - RNA, 19 nt, Artificial Sequence
  Description of Artificial Sequence: Synthetic oligonucleotide
  Sense strand starting at position 3326 of SEQ ID NO: 1241456
caguguucucaagaaguuu

SEQ ID NO: 1273931 - RNA, 19 nt, Artificial Sequence
  Description of Artificial Sequence: Synthetic oligonucleotide
  Antisense strand to SEQ ID NO: 1273930
aaacuucuugagaacacug

SEQ ID NO: 1273932 - RNA, 19 nt, Artificial Sequence
  Description of Artificial Sequence: Synthetic oligonucleotide
  Sense strand starting at position 3332 of SEQ ID NO: 1241456
ucucaagaaguuuguuaca

SEQ ID NO: 1273933 - RNA, 19 nt, Artificial Sequence
  Description of Artificial Sequence: Synthetic oligonucleotide
  Antisense strand to SEQ ID NO: 1273932
uguaacaaacuucuugaga

SEQ ID NO: 1273934 - RNA, 19 nt, Artificial Sequence
  Description of Artificial Sequence: Synthetic oligonucleotide
  Sense strand starting at position 3334 of SEQ ID NO: 1241456
ucaagaaguuuguuacaga

SEQ ID NO: 1273935 - RNA, 19 nt, Artificial Sequence
  Description of Artificial Sequence: Synthetic oligonucleotide
  Antisense strand to SEQ ID NO: 1273934
ucuguaacaaacuucuuga

SEQ ID NO: 1273936 - RNA, 19 nt, Artificial Sequence
  Description of Artificial Sequence: Synthetic oligonucleotide
  Sense strand starting at position 3391 of SEQ ID NO: 1241456
cagucaggauuugaaucau

SEQ ID NO: 1273937 - RNA, 19 nt, Artificial Sequence
  Description of Artificial Sequence: Synthetic oligonucleotide
  Antisense strand to SEQ ID NO: 1273936
augauucaaauccugacug

SEQ ID NO: 1273938 - RNA, 19 nt, Artificial Sequence
  Description of Artificial Sequence: Synthetic oligonucleotide
  Sense strand starting at position 3456 of SEQ ID NO: 1241456
gaguguacaguuuaucaga

SEQ ID NO: 1273939 - RNA, 19 nt, Artificial Sequence
  Description of Artificial Sequence: Synthetic oligonucleotide
  Antisense strand to SEQ ID NO: 1273938
ucugauaaacuguacacuc

SEQ ID NO: 1273940 - RNA, 19 nt, Artificial Sequence
  Description of Artificial Sequence: Synthetic oligonucleotide
  Sense strand starting at position 3464 of SEQ ID NO: 1241456
aguuuaucagagcaaauac

SEQ ID NO: 1273941 - RNA, 19 nt, Artificial Sequence
  Description of Artificial Sequence: Synthetic oligonucleotide
  Antisense strand to SEQ ID NO: 1273940
guauuugcucugauaaacu

SEQ ID NO: 1273942 - RNA, 19 nt, Artificial Sequence
  Description of Artificial Sequence: Synthetic oligonucleotide
  Sense strand starting at position 3869 of SEQ ID NO: 1241456
ugaaguaacucauuaaugu

SEQ ID NO: 1273943 - RNA, 19 nt, Artificial Sequence
  Description of Artificial Sequence: Synthetic oligonucleotide
  Antisense strand to SEQ ID NO: 1273942
acauuaaugaguuacuuca

SEQ ID NO: 1273944 - RNA, 19 nt, Artificial Sequence
  Description of Artificial Sequence: Synthetic oligonucleotide
  Sense strand starting at position 27 of SEQ ID NO: 1241457
uuauguauaugauccugaa

SEQ ID NO: 1273945 - RNA, 19 nt, Artificial Sequence
  Description of Artificial Sequence: Synthetic oligonucleotide
  Antisense strand to SEQ ID NO: 1273944
uucaggaucauauacauaa

SEQ ID NO: 1273946 - RNA, 19 nt, Artificial Sequence
  Description of Artificial Sequence: Synthetic oligonucleotide
  Sense strand starting at position 31 of SEQ ID NO: 1241457
guauaugauccugaaugua

SEQ ID NO: 1273947 - RNA, 19 nt, Artificial Sequence
  Description of Artificial Sequence: Synthetic oligonucleotide
  Antisense strand to SEQ ID NO: 1273946
uacauucaggaucauauac

SEQ ID NO: 1273948 - RNA, 19 nt, Artificial Sequence
  Description of Artificial Sequence: Synthetic oligonucleotide
  Sense strand starting at position 77 of SEQ ID NO: 1241457
cauggaaaguucuuguaag

SEQ ID NO: 1273949 - RNA, 19 nt, Artificial Sequence
  Description of Artificial Sequence: Synthetic oligonucleotide
  Antisense strand to SEQ ID NO: 1273948
cuuacaagaacuuuccaug

SEQ ID NO: 1273950 - RNA, 19 nt, Artificial Sequence
  Description of Artificial Sequence: Synthetic oligonucleotide
  Sense strand starting at position 523 of SEQ ID NO: 1241457
auagaaacaucugcguaag

SEQ ID NO: 1273951 - RNA, 19 nt, Artificial Sequence
  Description of Artificial Sequence: Synthetic oligonucleotide
  Antisense strand to SEQ ID NO: 1273950
cuuacgcagauguuucuau

SEQ ID NO: 1273952 - RNA, 19 nt, Artificial Sequence
  Description of Artificial Sequence: Synthetic oligonucleotide
  Sense strand starting at position 524 of SEQ ID NO: 1241457
uagaaacaucugcguaaga

SEQ ID NO: 1273953 - RNA, 19 nt, Artificial Sequence
  Description of Artificial Sequence: Synthetic oligonucleotide
  Antisense strand to SEQ ID NO: 1273952
ucuuacgcagauguuucua

SEQ ID NO: 1273954 - RNA, 19 nt, Artificial Sequence
  Description of Artificial Sequence: Synthetic oligonucleotide
  Sense strand starting at position 525 of SEQ ID NO: 1241457
agaaacaucugcguaagaa

SEQ ID NO: 1273955 - RNA, 19 nt, Artificial Sequence
  Description of Artificial Sequence: Synthetic oligonucleotide
  Antisense strand to SEQ ID NO: 1273954
uucuuacgcagauguuucu

SEQ ID NO: 1273956 - RNA, 19 nt, Artificial Sequence
  Description of Artificial Sequence: Synthetic oligonucleotide
  Sense strand starting at position 526 of SEQ ID NO: 1241457
gaaacaucugcguaagaau

SEQ ID NO: 1273957 - RNA, 19 nt, Artificial Sequence
  Description of Artificial Sequence: Synthetic oligonucleotide
  Antisense strand to SEQ ID NO: 1273956
auucuuacgcagauguuuc

SEQ ID NO: 1273958 - RNA, 19 nt, Artificial Sequence
  Description of Artificial Sequence: Synthetic oligonucleotide
  Sense strand starting at position 534 of SEQ ID NO: 1241457
ugcguaagaaugcaaauau

SEQ ID NO: 1273959 - RNA, 19 nt, Artificial Sequence
  Description of Artificial Sequence: Synthetic oligonucleotide
  Antisense strand to SEQ ID NO: 1273958
auauuugcauucuuacgca

SEQ ID NO: 1273960 - RNA, 19 nt, Artificial Sequence
  Description of Artificial Sequence: Synthetic oligonucleotide
  Sense strand starting at position 670 of SEQ ID NO: 1241457
uaagguauaaggugguuaa

SEQ ID NO: 1273961 - RNA, 19 nt, Artificial Sequence
  Description of Artificial Sequence: Synthetic oligonucleotide
  Antisense strand to SEQ ID NO: 1273960
uuaaccaccuuauaccuua

SEQ ID NO: 1273962 - RNA, 19 nt, Artificial Sequence
  Description of Artificial Sequence: Synthetic oligonucleotide
  Sense strand starting at position 674 of SEQ ID NO: 1241457
guauaaggugguuaaguaa

SEQ ID NO: 1273963 - RNA, 19 nt, Artificial Sequence
  Description of Artificial Sequence: Synthetic oligonucleotide
  Antisense strand to SEQ ID NO: 1273962
uuacuuaaccaccuuauac

SEQ ID NO: 1273964 - RNA, 19 nt, Artificial Sequence
  Description of Artificial Sequence: Synthetic oligonucleotide
  Sense strand starting at position 1066 of SEQ ID NO: 1241457
guaaacaguguuuaucuuu

SEQ ID NO: 1273965 - RNA, 19 nt, Artificial Sequence
  Description of Artificial Sequence: Synthetic oligonucleotide
  Antisense strand to SEQ ID NO: 1273964
aaagauaaacacuguuuac

SEQ ID NO: 1273966 - RNA, 19 nt, Artificial Sequence
  Description of Artificial Sequence: Synthetic oligonucleotide
  Sense strand starting at position 1071 of SEQ ID NO: 1241457
caguguuuaucuuugaagg

SEQ ID NO: 1273967 - RNA, 19 nt, Artificial Sequence
  Description of Artificial Sequence: Synthetic oligonucleotide
  Antisense strand to SEQ ID NO: 1273966
ccuucaaagauaaacacug

SEQ ID NO: 1273968 - RNA, 19 nt, Artificial Sequence
  Description of Artificial Sequence: Synthetic oligonucleotide
  Sense strand starting at position 1094 of SEQ ID NO: 1241457
gaugaaguggccuaccauu

SEQ ID NO: 1273969 - RNA, 19 nt, Artificial Sequence
  Description of Artificial Sequence: Synthetic oligonucleotide
  Antisense strand to SEQ ID NO: 1273968
aaugguaggccacuucauc

SEQ ID NO: 1273970 - RNA, 19 nt, Artificial Sequence
  Description of Artificial Sequence: Synthetic oligonucleotide
  Sense strand starting at position 1220 of SEQ ID NO: 1241457
aucuaaagauguuugcaac

SEQ ID NO: 1273971 - RNA, 19 nt, Artificial Sequence
  Description of Artificial Sequence: Synthetic oligonucleotide
  Antisense strand to SEQ ID NO: 1273970
guugcaaacaucuuuagau

SEQ ID NO: 1273972 - RNA, 19 nt, Artificial Sequence
  Description of Artificial Sequence: Synthetic oligonucleotide
  Sense strand starting at position 1221 of SEQ ID NO: 1241457
ucuaaagauguuugcaaca

SEQ ID NO: 1273973 - RNA, 19 nt, Artificial Sequence
  Description of Artificial Sequence: Synthetic oligonucleotide
  Antisense strand to SEQ ID NO: 1273972
uguugcaaacaucuuuaga

SEQ ID NO: 1273974 - RNA, 19 nt, Artificial Sequence
  Description of Artificial Sequence: Synthetic oligonucleotide
  Sense strand starting at position 1226 of SEQ ID NO: 1241457
agauguuugcaacaagcau

SEQ ID NO: 1273975 - RNA, 19 nt, Artificial Sequence
  Description of Artificial Sequence: Synthetic oligonucleotide
  Antisense strand to SEQ ID NO: 1273974
augcuuguugcaaacaucu

SEQ ID NO: 1273976 - RNA, 19 nt, Artificial Sequence
  Description of Artificial Sequence: Synthetic oligonucleotide
  Sense strand starting at position 1319 of SEQ ID NO: 1241457
gggaagaguuggguacuga

SEQ ID NO: 1273977 - RNA, 19 nt, Artificial Sequence
  Description of Artificial Sequence: Synthetic oligonucleotide
  Antisense strand to SEQ ID NO: 1273976
ucaguacccaacucuuccc

SEQ ID NO: 1273978 - RNA, 19 nt, Artificial Sequence
  Description of Artificial Sequence: Synthetic oligonucleotide
  Sense strand starting at position 1419 of SEQ ID NO: 1241457
cgaaauaaauuugagcaau

SEQ ID NO: 1273979 - RNA, 19 nt, Artificial Sequence
  Description of Artificial Sequence: Synthetic oligonucleotide
  Antisense strand to SEQ ID NO: 1273978
auugcucaaauuuauuucg

SEQ ID NO: 1273980 - RNA, 19 nt, Artificial Sequence
  Description of Artificial Sequence: Synthetic oligonucleotide
  Sense strand starting at position 2049 of SEQ ID NO: 1241457
ccgccuuuccucucgugaa

SEQ ID NO: 1273981 - RNA, 19 nt, Artificial Sequence
  Description of Artificial Sequence: Synthetic oligonucleotide
  Antisense strand to SEQ ID NO: 1273980
uucacgagaggaaaggcgg

SEQ ID NO: 1273982 - RNA, 19 nt, Artificial Sequence
  Description of Artificial Sequence: Synthetic oligonucleotide
  Sense strand starting at position 2131 of SEQ ID NO: 1241457
gcacuacugcggcuaaguu

SEQ ID NO: 1273983 - RNA, 19 nt, Artificial Sequence
  Description of Artificial Sequence: Synthetic oligonucleotide
  Antisense strand to SEQ ID NO: 1273982
aacuuagccgcaguagugc

SEQ ID NO: 1273984 - RNA, 19 nt, Artificial Sequence
  Description of Artificial Sequence: Synthetic oligonucleotide
  Sense strand starting at position 2240 of SEQ ID NO: 1241457
guggguuugagagaacuuc

SEQ ID NO: 1273985 - RNA, 19 nt, Artificial Sequence
  Description of Artificial Sequence: Synthetic oligonucleotide
  Antisense strand to SEQ ID NO: 1273984
gaaguucucucaaacccac

SEQ ID NO: 1273986 - RNA, 19 nt, Artificial Sequence
  Description of Artificial Sequence: Synthetic oligonucleotide
  Sense strand starting at position 2274 of SEQ ID NO: 1241457
cauguuugaggcggagaaa

SEQ ID NO: 1273987 - RNA, 19 nt, Artificial Sequence
  Description of Artificial Sequence: Synthetic oligonucleotide
  Antisense strand to SEQ ID NO: 1273986
uuucuccgccucaaacaug

SEQ ID NO: 1273988 - RNA, 19 nt, Artificial Sequence
  Description of Artificial Sequence: Synthetic oligonucleotide
  Sense strand starting at position 2345 of SEQ ID NO: 1241457
gugggauguuuaguuggaa

SEQ ID NO: 1273989 - RNA, 19 nt, Artificial Sequence
  Description of Artificial Sequence: Synthetic oligonucleotide
  Antisense strand to SEQ ID NO: 1273988
uuccaacuaaacaucccac

SEQ ID NO: 1273990 - RNA, 19 nt, Artificial Sequence
  Description of Artificial Sequence: Synthetic oligonucleotide
  Sense strand starting at position 2346 of SEQ ID NO: 1241457
ugggauguuuaguuggaac

SEQ ID NO: 1273991 - RNA, 19 nt, Artificial Sequence
  Description of Artificial Sequence: Synthetic oligonucleotide
  Antisense strand to SEQ ID NO: 1273990
guuccaacuaaacauccca

SEQ ID NO: 1273992 - RNA, 19 nt, Artificial Sequence
  Description of Artificial Sequence: Synthetic oligonucleotide
  Sense strand starting at position 2656 of SEQ ID NO: 1241457
cgagccaggaagugauuaa

SEQ ID NO: 1273993 - RNA, 19 nt, Artificial Sequence
  Description of Artificial Sequence: Synthetic oligonucleotide
  Antisense strand to SEQ ID NO: 1273992
uuaaucacuuccuggcucg

SEQ ID NO: 1273994 - RNA, 19 nt, Artificial Sequence
  Description of Artificial Sequence: Synthetic oligonucleotide
  Sense strand starting at position 2760 of SEQ ID NO: 1241457
gacugcgucccgcuuuaga

SEQ ID NO: 1273995 - RNA, 19 nt, Artificial Sequence
  Description of Artificial Sequence: Synthetic oligonucleotide
  Antisense strand to SEQ ID NO: 1273994
ucuaaagcgggacgcaguc

SEQ ID NO: 1273996 - RNA, 19 nt, Artificial Sequence
  Description of Artificial Sequence: Synthetic oligonucleotide
  Sense strand starting at position 2824 of SEQ ID NO: 1241457
uguauucuucgccuuguau

SEQ ID NO: 1273997 - RNA, 19 nt, Artificial Sequence
  Description of Artificial Sequence: Synthetic oligonucleotide
  Antisense strand to SEQ ID NO: 1273996
auacaaggcgaagaauaca

SEQ ID NO: 1273998 - RNA, 19 nt, Artificial Sequence
  Description of Artificial Sequence: Synthetic oligonucleotide
  Sense strand starting at position 3018 of SEQ ID NO: 1241457
gucaacuucuagucacaua

SEQ ID NO: 1273999 - RNA, 19 nt, Artificial Sequence
  Description of Artificial Sequence: Synthetic oligonucleotide
  Antisense strand to SEQ ID NO: 1273998
uaugugacuagaaguugac

SEQ ID NO: 1274000 - RNA, 19 nt, Artificial Sequence
  Description of Artificial Sequence: Synthetic oligonucleotide
  Sense strand starting at position 3227 of SEQ ID NO: 1241457
gcaaacuuaccuggauaaa

SEQ ID NO: 1274001 - RNA, 19 nt, Artificial Sequence
  Description of Artificial Sequence: Synthetic oligonucleotide
  Antisense strand to SEQ ID NO: 1274000
uuuauccagguaaguuugc

SEQ ID NO: 1274002 - RNA, 19 nt, Artificial Sequence
  Description of Artificial Sequence: Synthetic oligonucleotide
  Sense strand starting at position 3333 of SEQ ID NO: 1241457
gguuaaauggcauguauga

SEQ ID NO: 1274003 - RNA, 19 nt, Artificial Sequence
  Description of Artificial Sequence: Synthetic oligonucleotide
  Antisense strand to SEQ ID NO: 1274002
ucauacaugccauuuaacc

SEQ ID NO: 1274004 - RNA, 19 nt, Artificial Sequence
  Description of Artificial Sequence: Synthetic oligonucleotide
  Sense strand starting at position 3368 of SEQ ID NO: 1241457
ggaaguuugaagggauggu

SEQ ID NO: 1274005 - RNA, 19 nt, Artificial Sequence
  Description of Artificial Sequence: Synthetic oligonucleotide
  Antisense strand to SEQ ID NO: 1274004
accaucccuucaaacuucc

SEQ ID NO: 1274006 - RNA, 19 nt, Artificial Sequence
  Description of Artificial Sequence: Synthetic oligonucleotide
  Sense strand starting at position 3372 of SEQ ID NO: 1241457
guuugaagggauggucauu

SEQ ID NO: 1274007 - RNA, 19 nt, Artificial Sequence
  Description of Artificial Sequence: Synthetic oligonucleotide
  Antisense strand to SEQ ID NO: 1274006
aaugaccaucccuucaaac

SEQ ID NO: 1274008 - RNA, 19 nt, Artificial Sequence
  Description of Artificial Sequence: Synthetic oligonucleotide
  Sense strand starting at position 3402 of SEQ ID NO: 1241457
gcaccugaaauugagguau

SEQ ID NO: 1274009 - RNA, 19 nt, Artificial Sequence
  Description of Artificial Sequence: Synthetic oligonucleotide
  Antisense strand to SEQ ID NO: 1274008
auaccucaauuucaggugc

SEQ ID NO: 1274010 - RNA, 19 nt, Artificial Sequence
  Description of Artificial Sequence: Synthetic oligonucleotide
  Sense strand starting at position 3548 of SEQ ID NO: 1241457
aaggaaguaguauguagua

SEQ ID NO: 1274011 - RNA, 19 nt, Artificial Sequence
  Description of Artificial Sequence: Synthetic oligonucleotide
  Antisense strand to SEQ ID NO: 1274010
uacuacauacuacuuccuu

SEQ ID NO: 1274012 - RNA, 19 nt, Artificial Sequence
  Description of Artificial Sequence: Synthetic oligonucleotide
  Sense strand starting at position 3631 of SEQ ID NO: 1241457
gauuaaacaguuuguggau

SEQ ID NO: 1274013 - RNA, 19 nt, Artificial Sequence
  Description of Artificial Sequence: Synthetic oligonucleotide
  Antisense strand to SEQ ID NO: 1274012
auccacaaacuguuuaauc

SEQ ID NO: 1274014 - RNA, 19 nt, Artificial Sequence
  Description of Artificial Sequence: Synthetic oligonucleotide
  Sense strand starting at position 3632 of SEQ ID NO: 1241457
auuaaacaguuuguggaua

SEQ ID NO: 1274015 - RNA, 19 nt, Artificial Sequence
  Description of Artificial Sequence: Synthetic oligonucleotide
  Antisense strand to SEQ ID NO: 1274014
uauccacaaacuguuuaau

SEQ ID NO: 1274016 - RNA, 19 nt, Artificial Sequence
  Description of Artificial Sequence: Synthetic oligonucleotide
  Sense strand starting at position 3645 of SEQ ID NO: 1241457
uggauaagaaagugugaug

SEQ ID NO: 1274017 - RNA, 19 nt, Artificial Sequence
  Description of Artificial Sequence: Synthetic oligonucleotide
  Antisense strand to SEQ ID NO: 1274016
caucacacuuucuuaucca

SEQ ID NO: 1274018 - RNA, 19 nt, Artificial Sequence
  Description of Artificial Sequence: Synthetic oligonucleotide
  Sense strand starting at position 3757 of SEQ ID NO: 1241457
agagcugauugaucaauac

SEQ ID NO: 1274019 - RNA, 19 nt, Artificial Sequence
  Description of Artificial Sequence: Synthetic oligonucleotide
  Antisense strand to SEQ ID NO: 1274018
guauugaucaaucagcucu

SEQ ID NO: 1274020 - RNA, 19 nt, Artificial Sequence
  Description of Artificial Sequence: Synthetic oligonucleotide
  Sense strand starting at position 3777 of SEQ ID NO: 1241457
aguaaauugcaauggagaa

SEQ ID NO: 1274021 - RNA, 19 nt, Artificial Sequence
  Description of Artificial Sequence: Synthetic oligonucleotide
  Antisense strand to SEQ ID NO: 1274020
uucuccauugcaauuuacu

SEQ ID NO: 1274022 - RNA, 19 nt, Artificial Sequence
  Description of Artificial Sequence: Synthetic oligonucleotide
  Sense strand starting at position 3778 of SEQ ID NO: 1241457
guaaauugcaauggagaaa

SEQ ID NO: 1274023 - RNA, 19 nt, Artificial Sequence
  Description of Artificial Sequence: Synthetic oligonucleotide
  Antisense strand to SEQ ID NO: 1274022
uuucuccauugcaauuuac

SEQ ID NO: 1274024 - RNA, 19 nt, Artificial Sequence
  Description of Artificial Sequence: Synthetic oligonucleotide
  Sense strand starting at position 33 of SEQ ID NO: 1241458
gggcaaguuccucaacaca

SEQ ID NO: 1274025 - RNA, 19 nt, Artificial Sequence
  Description of Artificial Sequence: Synthetic oligonucleotide
  Antisense strand to SEQ ID NO: 1274024
uguguugaggaacuugccc

SEQ ID NO: 1274026 - RNA, 19 nt, Artificial Sequence
  Description of Artificial Sequence: Synthetic oligonucleotide
  Sense strand starting at position 61 of SEQ ID NO: 1241458
ggagcuuauggccaaacca

SEQ ID NO: 1274027 - RNA, 19 nt, Artificial Sequence
  Description of Artificial Sequence: Synthetic oligonucleotide
  Antisense strand to SEQ ID NO: 1274026
ugguuuggccauaagcucc

SEQ ID NO: 1274028 - RNA, 19 nt, Artificial Sequence
  Description of Artificial Sequence: Synthetic oligonucleotide
  Sense strand starting at position 80 of SEQ ID NO: 1241458
gaacgcaauuuggcuugua

SEQ ID NO: 1274029 - RNA, 19 nt, Artificial Sequence
  Description of Artificial Sequence: Synthetic oligonucleotide
  Antisense strand to SEQ ID NO: 1274028
uacaagccaaauugcguuc

SEQ ID NO: 1274030 - RNA, 19 nt, Artificial Sequence
  Description of Artificial Sequence: Synthetic oligonucleotide
  Sense strand starting at position 116 of SEQ ID NO: 1241458
uugaucaugguagguagaa

SEQ ID NO: 1274031 - RNA, 19 nt, Artificial Sequence
  Description of Artificial Sequence: Synthetic oligonucleotide
  Antisense strand to SEQ ID NO: 1274030
uucuaccuaccaugaucaa

SEQ ID NO: 1274032 - RNA, 19 nt, Artificial Sequence
  Description of Artificial Sequence: Synthetic oligonucleotide
  Sense strand starting at position 117 of SEQ ID NO: 1241458
ugaucaugguagguagaaa

SEQ ID NO: 1274033 - RNA, 19 nt, Artificial Sequence
  Description of Artificial Sequence: Synthetic oligonucleotide
  Antisense strand to SEQ ID NO: 1274032
uuucuaccuaccaugauca

SEQ ID NO: 1274034 - RNA, 19 nt, Artificial Sequence
  Description of Artificial Sequence: Synthetic oligonucleotide
  Sense strand starting at position 161 of SEQ ID NO: 1241458
uuccuucucugacuggaaa

SEQ ID NO: 1274035 - RNA, 19 nt, Artificial Sequence
  Description of Artificial Sequence: Synthetic oligonucleotide
  Antisense strand to SEQ ID NO: 1274034
uuuccagucagagaaggaa

SEQ ID NO: 1274036 - RNA, 19 nt, Artificial Sequence
  Description of Artificial Sequence: Synthetic oligonucleotide
  Sense strand starting at position 162 of SEQ ID NO: 1241458
uccuucucugacuggaaau

SEQ ID NO: 1274037 - RNA, 19 nt, Artificial Sequence
  Description of Artificial Sequence: Synthetic oligonucleotide
  Antisense strand to SEQ ID NO: 1274036
auuuccagucagagaagga

SEQ ID NO: 1274038 - RNA, 19 nt, Artificial Sequence
  Description of Artificial Sequence: Synthetic oligonucleotide
  Sense strand starting at position 249 of SEQ ID NO: 1241458
agaaauagcacuugaggua

SEQ ID NO: 1274039 - RNA, 19 nt, Artificial Sequence
  Description of Artificial Sequence: Synthetic oligonucleotide
  Antisense strand to SEQ ID NO: 1274038
uaccucaagugcuauuucu

SEQ ID NO: 1274040 - RNA, 19 nt, Artificial Sequence
  Description of Artificial Sequence: Synthetic oligonucleotide
  Sense strand starting at position 351 of SEQ ID NO: 1241458
ggugcaauggauuaacauc

SEQ ID NO: 1274041 - RNA, 19 nt, Artificial Sequence
  Description of Artificial Sequence: Synthetic oligonucleotide
  Antisense strand to SEQ ID NO: 1274040
gauguuaauccauugcacc

SEQ ID NO: 1274042 - RNA, 19 nt, Artificial Sequence
  Description of Artificial Sequence: Synthetic oligonucleotide
  Sense strand starting at position 447 of SEQ ID NO: 1241458
acuugaaguugaccaguaa

SEQ ID NO: 1274043 - RNA, 19 nt, Artificial Sequence
  Description of Artificial Sequence: Synthetic oligonucleotide
  Antisense strand to SEQ ID NO: 1274042
uuacuggucaacuucaagu

SEQ ID NO: 1274044 - RNA, 19 nt, Artificial Sequence
  Description of Artificial Sequence: Synthetic oligonucleotide
  Sense strand starting at position 460 of SEQ ID NO: 1241458
caguaaacacaguauucga

SEQ ID NO: 1274045 - RNA, 19 nt, Artificial Sequence
  Description of Artificial Sequence: Synthetic oligonucleotide
  Antisense strand to SEQ ID NO: 1274044
ucgaauacuguguuuacug

SEQ ID NO: 1274046 - RNA, 19 nt, Artificial Sequence
  Description of Artificial Sequence: Synthetic oligonucleotide
  Sense strand starting at position 633 of SEQ ID NO: 1241458
uugcuaagacauuguaaua

SEQ ID NO: 1274047 - RNA, 19 nt, Artificial Sequence
  Description of Artificial Sequence: Synthetic oligonucleotide
  Antisense strand to SEQ ID NO: 1274046
uauuacaaugucuuagcaa

SEQ ID NO: 1274048 - RNA, 19 nt, Artificial Sequence
  Description of Artificial Sequence: Synthetic oligonucleotide
  Sense strand starting at position 709 of SEQ ID NO: 1241458
gcauuaagagguuauuauu

SEQ ID NO: 1274049 - RNA, 19 nt, Artificial Sequence
  Description of Artificial Sequence: Synthetic oligonucleotide
  Antisense strand to SEQ ID NO: 1274048
aauaauaaccucuuaaugc

SEQ ID NO: 1274050 - RNA, 19 nt, Artificial Sequence
  Description of Artificial Sequence: Synthetic oligonucleotide
  Sense strand starting at position 815 of SEQ ID NO: 1241458
uuugccauuugauuguuaa

SEQ ID NO: 1274051 - RNA, 19 nt, Artificial Sequence
  Description of Artificial Sequence: Synthetic oligonucleotide
  Antisense strand to SEQ ID NO: 1274050
uuaacaaucaaauggcaaa

SEQ ID NO: 1274052 - RNA, 19 nt, Artificial Sequence
  Description of Artificial Sequence: Synthetic oligonucleotide
  Sense strand starting at position 1163 of SEQ ID NO: 1241458
cggccagaaggucauuauu

SEQ ID NO: 1274053 - RNA, 19 nt, Artificial Sequence
  Description of Artificial Sequence: Synthetic oligonucleotide
  Antisense strand to SEQ ID NO: 1274052
aauaaugaccuucuggccg

SEQ ID NO: 1274054 - RNA, 19 nt, Artificial Sequence
  Description of Artificial Sequence: Synthetic oligonucleotide
  Sense strand starting at position 1165 of SEQ ID NO: 1241458
gccagaaggucauuauuaa

SEQ ID NO: 1274055 - RNA, 19 nt, Artificial Sequence
  Description of Artificial Sequence: Synthetic oligonucleotide
  Antisense strand to SEQ ID NO: 1274054
uuaauaaugaccuucuggc

SEQ ID NO: 1274056 - RNA, 19 nt, Artificial Sequence
  Description of Artificial Sequence: Synthetic oligonucleotide
  Sense strand starting at position 1207 of SEQ ID NO: 1241458
ggcauaaacuaccuuggua

SEQ ID NO: 1274057 - RNA, 19 nt, Artificial Sequence
  Description of Artificial Sequence: Synthetic oligonucleotide
  Antisense strand to SEQ ID NO: 1274056
uaccaagguaguuuaugcc

SEQ ID NO: 1274058 - RNA, 19 nt, Artificial Sequence
  Description of Artificial Sequence: Synthetic oligonucleotide
  Sense strand starting at position 1419 of SEQ ID NO: 1241458
gggacaaaucagggcucuu

SEQ ID NO: 1274059 - RNA, 19 nt, Artificial Sequence
  Description of Artificial Sequence: Synthetic oligonucleotide
  Antisense strand to SEQ ID NO: 1274058
aagagcccugauuuguccc

SEQ ID NO: 1274060 - RNA, 19 nt, Artificial Sequence
  Description of Artificial Sequence: Synthetic oligonucleotide
  Sense strand starting at position 1431 of SEQ ID NO: 1241458
ggcucuuaacugcagaauu

SEQ ID NO: 1274061 - RNA, 19 nt, Artificial Sequence
  Description of Artificial Sequence: Synthetic oligonucleotide
  Antisense strand to SEQ ID NO: 1274060
aauucugcaguuaagagcc

SEQ ID NO: 1274062 - RNA, 19 nt, Artificial Sequence
  Description of Artificial Sequence: Synthetic oligonucleotide
  Sense strand starting at position 1496 of SEQ ID NO: 1241458
cggguaaacguuuaacaag

SEQ ID NO: 1274063 - RNA, 19 nt, Artificial Sequence
  Description of Artificial Sequence: Synthetic oligonucleotide
  Antisense strand to SEQ ID NO: 1274062
cuuguuaaacguuuacccg

SEQ ID NO: 1274064 - RNA, 19 nt, Artificial Sequence
  Description of Artificial Sequence: Synthetic oligonucleotide
  Sense strand starting at position 1512 of SEQ ID NO: 1241458
aaguauuccgauuaaugua

SEQ ID NO: 1274065 - RNA, 19 nt, Artificial Sequence
  Description of Artificial Sequence: Synthetic oligonucleotide
  Antisense strand to SEQ ID NO: 1274064
uacauuaaucggaauacuu

SEQ ID NO: 1274066 - RNA, 19 nt, Artificial Sequence
  Description of Artificial Sequence: Synthetic oligonucleotide
  Sense strand starting at position 1849 of SEQ ID NO: 1241458
uggagucccgcuuaacaaa

SEQ ID NO: 1274067 - RNA, 19 nt, Artificial Sequence
  Description of Artificial Sequence: Synthetic oligonucleotide
  Antisense strand to SEQ ID NO: 1274066
uuuguuaagcgggacucca

SEQ ID NO: 1274068 - RNA, 19 nt, Artificial Sequence
  Description of Artificial Sequence: Synthetic oligonucleotide
  Sense strand starting at position 1994 of SEQ ID NO: 1241458
aguuguuccagccaaggau

SEQ ID NO: 1274069 - RNA, 19 nt, Artificial Sequence
  Description of Artificial Sequence: Synthetic oligonucleotide
  Antisense strand to SEQ ID NO: 1274068
auccuuggcuggaacaacu

SEQ ID NO: 1274070 - RNA, 19 nt, Artificial Sequence
  Description of Artificial Sequence: Synthetic oligonucleotide
  Sense strand starting at position 2227 of SEQ ID NO: 1241458
gaauguaagcuaugugaag

SEQ ID NO: 1274071 - RNA, 19 nt, Artificial Sequence
  Description of Artificial Sequence: Synthetic oligonucleotide
  Antisense strand to SEQ ID NO: 1274070
cuucacauagcuuacauuc

SEQ ID NO: 1274072 - RNA, 19 nt, Artificial Sequence
  Description of Artificial Sequence: Synthetic oligonucleotide
  Sense strand starting at position 2280 of SEQ ID NO: 1241458
cccaguuaccaagaacagu

SEQ ID NO: 1274073 - RNA, 19 nt, Artificial Sequence
  Description of Artificial Sequence: Synthetic oligonucleotide
  Antisense strand to SEQ ID NO: 1274072
acuguucuugguaacuggg

SEQ ID NO: 1274074 - RNA, 19 nt, Artificial Sequence
  Description of Artificial Sequence: Synthetic oligonucleotide
  Sense strand starting at position 2382 of SEQ ID NO: 1241458
cugagaaacugucuaacuc

SEQ ID NO: 1274075 - RNA, 19 nt, Artificial Sequence
  Description of Artificial Sequence: Synthetic oligonucleotide
  Antisense strand to SEQ ID NO: 1274074
gaguuagacaguuucucag

SEQ ID NO: 1274076 - RNA, 19 nt, Artificial Sequence
  Description of Artificial Sequence: Synthetic oligonucleotide
  Sense strand starting at position 2826 of SEQ ID NO: 1241458
cugagaaugcugugagaau

SEQ ID NO: 1274077 - RNA, 19 nt, Artificial Sequence
  Description of Artificial Sequence: Synthetic oligonucleotide
  Antisense strand to SEQ ID NO: 1274076
auucucacagcauucucag

SEQ ID NO: 1274078 - RNA, 19 nt, Artificial Sequence
  Description of Artificial Sequence: Synthetic oligonucleotide
  Sense strand starting at position 2962 of SEQ ID NO: 1241458
cuaguuuagugacuaacca

SEQ ID NO: 1274079 - RNA, 19 nt, Artificial Sequence
  Description of Artificial Sequence: Synthetic oligonucleotide
  Antisense strand to SEQ ID NO: 1274078
ugguuagucacuaaacuag

SEQ ID NO: 1274080 - RNA, 19 nt, Artificial Sequence
  Description of Artificial Sequence: Synthetic oligonucleotide
  Sense strand starting at position 3021 of SEQ ID NO: 1241458
ccugauaacuguuuaugau

SEQ ID NO: 1274081 - RNA, 19 nt, Artificial Sequence
  Description of Artificial Sequence: Synthetic oligonucleotide
  Antisense strand to SEQ ID NO: 1274080
aucauaaacaguuaucagg

SEQ ID NO: 1274082 - RNA, 19 nt, Artificial Sequence
  Description of Artificial Sequence: Synthetic oligonucleotide
  Sense strand starting at position 3022 of SEQ ID NO: 1241458
cugauaacuguuuaugauu

SEQ ID NO: 1274083 - RNA, 19 nt, Artificial Sequence
  Description of Artificial Sequence: Synthetic oligonucleotide
  Antisense strand to SEQ ID NO: 1274082
aaucauaaacaguuaucag

SEQ ID NO: 1274084 - RNA, 19 nt, Artificial Sequence
  Description of Artificial Sequence: Synthetic oligonucleotide
  Sense strand starting at position 3096 of SEQ ID NO: 1241458
gcagaagucuauuuccucu

SEQ ID NO: 1274085 - RNA, 19 nt, Artificial Sequence
  Description of Artificial Sequence: Synthetic oligonucleotide
  Antisense strand to SEQ ID NO: 1274084
agaggaaauagacuucugc

SEQ ID NO: 1274086 - RNA, 19 nt, Artificial Sequence
  Description of Artificial Sequence: Synthetic oligonucleotide
  Sense strand starting at position 3426 of SEQ ID NO: 1241458
gugaauuccuuacccagag

SEQ ID NO: 1274087 - RNA, 19 nt, Artificial Sequence
  Description of Artificial Sequence: Synthetic oligonucleotide
  Antisense strand to SEQ ID NO: 1274086
cucuggguaaggaauucac

SEQ ID NO: 1274088 - RNA, 19 nt, Artificial Sequence
  Description of Artificial Sequence: Synthetic oligonucleotide
  Sense strand starting at position 3519 of SEQ ID NO: 1241458
guucuuauuaggcauggaa

SEQ ID NO: 1274089 - RNA, 19 nt, Artificial Sequence
  Description of Artificial Sequence: Synthetic oligonucleotide
  Antisense strand to SEQ ID NO: 1274088
uuccaugccuaauaagaac

SEQ ID NO: 1274090 - RNA, 19 nt, Artificial Sequence
  Description of Artificial Sequence: Synthetic oligonucleotide
  Sense strand starting at position 3521 of SEQ ID NO: 1241458
ucuuauuaggcauggaauu

SEQ ID NO: 1274091 - RNA, 19 nt, Artificial Sequence
  Description of Artificial Sequence: Synthetic oligonucleotide
  Antisense strand to SEQ ID NO: 1274090
aauuccaugccuaauaaga

SEQ ID NO: 1274092 - RNA, 19 nt, Artificial Sequence
  Description of Artificial Sequence: Synthetic oligonucleotide
  Sense strand starting at position 3699 of SEQ ID NO: 1241458
guacucuaagcagaagguu

SEQ ID NO: 1274093 - RNA, 19 nt, Artificial Sequence
  Description of Artificial Sequence: Synthetic oligonucleotide
  Antisense strand to SEQ ID NO: 1274092
aaccuucugcuuagaguac

SEQ ID NO: 1274094 - RNA, 19 nt, Artificial Sequence
  Description of Artificial Sequence: Synthetic oligonucleotide
  Sense strand starting at position 3738 of SEQ ID NO: 1241458
auuuguguacagugguaau

SEQ ID NO: 1274095 - RNA, 19 nt, Artificial Sequence
  Description of Artificial Sequence: Synthetic oligonucleotide
  Antisense strand to SEQ ID NO: 1274094
auuaccacuguacacaaau

SEQ ID NO: 1274096 - RNA, 19 nt, Artificial Sequence
  Description of Artificial Sequence: Synthetic oligonucleotide
  Sense strand starting at position 3975 of SEQ ID NO: 1241458
ugcuuugucgaugugugau

SEQ ID NO: 1274097 - RNA, 19 nt, Artificial Sequence
  Description of Artificial Sequence: Synthetic oligonucleotide
  Antisense strand to SEQ ID NO: 1274096
aucacacaucgacaaagca

SEQ ID NO: 1274098 - RNA, 19 nt, Artificial Sequence
  Description of Artificial Sequence: Synthetic oligonucleotide
  Sense strand starting at position 3977 of SEQ ID NO: 1241458
cuuugucgaugugugauuu

SEQ ID NO: 1274099 - RNA, 19 nt, Artificial Sequence
  Description of Artificial Sequence: Synthetic oligonucleotide
  Antisense strand to SEQ ID NO: 1274098
aaaucacacaucgacaaag

SEQ ID NO: 1274100 - RNA, 19 nt, Artificial Sequence
  Description of Artificial Sequence: Synthetic oligonucleotide
  Sense strand starting at position 3978 of SEQ ID NO: 1241458
uuugucgaugugugauuua

SEQ ID NO: 1274101 - RNA, 19 nt, Artificial Sequence
  Description of Artificial Sequence: Synthetic oligonucleotide
  Antisense strand to SEQ ID NO: 1274100
uaaaucacacaucgacaaa

SEQ ID NO: 1274102 - RNA, 19 nt, Artificial Sequence
  Description of Artificial Sequence: Synthetic oligonucleotide
  Sense strand starting at position 3981 of SEQ ID NO: 1241458
gucgaugugugauuuagga

SEQ ID NO: 1274103 - RNA, 19 nt, Artificial Sequence
  Description of Artificial Sequence: Synthetic oligonucleotide
  Antisense strand to SEQ ID NO: 1274102
uccuaaaucacacaucgac

SEQ ID NO: 1274104 - RNA, 19 nt, Artificial Sequence
  Description of Artificial Sequence: Synthetic oligonucleotide
  Sense strand starting at position 220 of SEQ ID NO: 1241459
aagguaaggcagugaaguu

SEQ ID NO: 1274105 - RNA, 19 nt, Artificial Sequence
  Description of Artificial Sequence: Synthetic oligonucleotide
  Antisense strand to SEQ ID NO: 1274104
aacuucacugccuuaccuu

SEQ ID NO: 1274106 - RNA, 19 nt, Artificial Sequence
  Description of Artificial Sequence: Synthetic oligonucleotide
  Sense strand starting at position 306 of SEQ ID NO: 1241459
gacucuaggccugggaaga

SEQ ID NO: 1274107 - RNA, 19 nt, Artificial Sequence
  Description of Artificial Sequence: Synthetic oligonucleotide
  Antisense strand to SEQ ID NO: 1274106
ucuucccaggccuagaguc

SEQ ID NO: 1274108 - RNA, 19 nt, Artificial Sequence
  Description of Artificial Sequence: Synthetic oligonucleotide
  Sense strand starting at position 604 of SEQ ID NO: 1241459
ggcugaguggguugagaug

SEQ ID NO: 1274109 - RNA, 19 nt, Artificial Sequence
  Description of Artificial Sequence: Synthetic oligonucleotide
  Antisense strand to SEQ ID NO: 1274108
caucucaacccacucagcc

SEQ ID NO: 1274110 - RNA, 19 nt, Artificial Sequence
  Description of Artificial Sequence: Synthetic oligonucleotide
  Sense strand starting at position 836 of SEQ ID NO: 1241459
ccaggcucccugcaauuaa

SEQ ID NO: 1274111 - RNA, 19 nt, Artificial Sequence
  Description of Artificial Sequence: Synthetic oligonucleotide
  Antisense strand to SEQ ID NO: 1274110
uuaauugcagggagccugg

SEQ ID NO: 1274112 - RNA, 19 nt, Artificial Sequence
  Description of Artificial Sequence: Synthetic oligonucleotide
  Sense strand starting at position 947 of SEQ ID NO: 1241459
caaggagagcuuugugugu

SEQ ID NO: 1274113 - RNA, 19 nt, Artificial Sequence
  Description of Artificial Sequence: Synthetic oligonucleotide
  Antisense strand to SEQ ID NO: 1274112
acacacaaagcucuccuug

SEQ ID NO: 1274114 - RNA, 19 nt, Artificial Sequence
  Description of Artificial Sequence: Synthetic oligonucleotide
  Sense strand starting at position 953 of SEQ ID NO: 1241459
gagcuuuguguguacggaa

SEQ ID NO: 1274115 - RNA, 19 nt, Artificial Sequence
  Description of Artificial Sequence: Synthetic oligonucleotide
  Antisense strand to SEQ ID NO: 1274114
uuccguacacacaaagcuc

SEQ ID NO: 1274116 - RNA, 19 nt, Artificial Sequence
  Description of Artificial Sequence: Synthetic oligonucleotide
  Sense strand starting at position 1333 of SEQ ID NO: 1241459
guuguaaaguucuuccaag

SEQ ID NO: 1274117 - RNA, 19 nt, Artificial Sequence
  Description of Artificial Sequence: Synthetic oligonucleotide
  Antisense strand to SEQ ID NO: 1274116
cuuggaagaacuuuacaac

SEQ ID NO: 1274118 - RNA, 19 nt, Artificial Sequence
  Description of Artificial Sequence: Synthetic oligonucleotide
  Sense strand starting at position 1429 of SEQ ID NO: 1241459
guuggaucgaucuggaagu

SEQ ID NO: 1274119 - RNA, 19 nt, Artificial Sequence
  Description of Artificial Sequence: Synthetic oligonucleotide
  Antisense strand to SEQ ID NO: 1274118
acuuccagaucgauccaac

SEQ ID NO: 1274120 - RNA, 19 nt, Artificial Sequence
  Description of Artificial Sequence: Synthetic oligonucleotide
  Sense strand starting at position 1431 of SEQ ID NO: 1241459
uggaucgaucuggaaguuu

SEQ ID NO: 1274121 - RNA, 19 nt, Artificial Sequence
  Description of Artificial Sequence: Synthetic oligonucleotide
  Antisense strand to SEQ ID NO: 1274120
aaacuuccagaucgaucca

SEQ ID NO: 1274122 - RNA, 19 nt, Artificial Sequence
  Description of Artificial Sequence: Synthetic oligonucleotide
  Sense strand starting at position 1592 of SEQ ID NO: 1241459
ccgggaagcucacuuacuu

SEQ ID NO: 1274123 - RNA, 19 nt, Artificial Sequence
  Description of Artificial Sequence: Synthetic oligonucleotide
  Antisense strand to SEQ ID NO: 1274122
aaguaagugagcuucccgg

SEQ ID NO: 1274124 - RNA, 19 nt, Artificial Sequence
  Description of Artificial Sequence: Synthetic oligonucleotide
  Sense strand starting at position 2200 of SEQ ID NO: 1241459
gugggagacuuugucccua

SEQ ID NO: 1274125 - RNA, 19 nt, Artificial Sequence
  Description of Artificial Sequence: Synthetic oligonucleotide
  Antisense strand to SEQ ID NO: 1274124
uagggacaaagucucccac

SEQ ID NO: 1274126 - RNA, 19 nt, Artificial Sequence
  Description of Artificial Sequence: Synthetic oligonucleotide
  Sense strand starting at position 2202 of SEQ ID NO: 1241459
gggagacuuugucccuaua

SEQ ID NO: 1274127 - RNA, 19 nt, Artificial Sequence
  Description of Artificial Sequence: Synthetic oligonucleotide
  Antisense strand to SEQ ID NO: 1274126
uauagggacaaagucuccc

SEQ ID NO: 1274128 - RNA, 19 nt, Artificial Sequence
  Description of Artificial Sequence: Synthetic oligonucleotide
  Sense strand starting at position 2204 of SEQ ID NO: 1241459
gagacuuugucccuauaag

SEQ ID NO: 1274129 - RNA, 19 nt, Artificial Sequence
  Description of Artificial Sequence: Synthetic oligonucleotide
  Antisense strand to SEQ ID NO: 1274128
cuuauagggacaaagucuc

SEQ ID NO: 1274130 - RNA, 19 nt, Artificial Sequence
  Description of Artificial Sequence: Synthetic oligonucleotide
  Sense strand starting at position 2205 of SEQ ID NO: 1241459
agacuuugucccuauaagc

SEQ ID NO: 1274131 - RNA, 19 nt, Artificial Sequence
  Description of Artificial Sequence: Synthetic oligonucleotide
  Antisense strand to SEQ ID NO: 1274130
gcuuauagggacaaagucu

SEQ ID NO: 1274132 - RNA, 19 nt, Artificial Sequence
  Description of Artificial Sequence: Synthetic oligonucleotide
  Sense strand starting at position 2216 of SEQ ID NO: 1241459
cuauaagcauauucugagu

SEQ ID NO: 1274133 - RNA, 19 nt, Artificial Sequence
  Description of Artificial Sequence: Synthetic oligonucleotide
  Antisense strand to SEQ ID NO: 1274132
acucagaauaugcuuauag

SEQ ID NO: 1274134 - RNA, 19 nt, Artificial Sequence
  Description of Artificial Sequence: Synthetic oligonucleotide
  Sense strand starting at position 2221 of SEQ ID NO: 1241459
agcauauucugaguggcuu

SEQ ID NO: 1274135 - RNA, 19 nt, Artificial Sequence
  Description of Artificial Sequence: Synthetic oligonucleotide
  Antisense strand to SEQ ID NO: 1274134
aagccacucagaauaugcu

SEQ ID NO: 1274136 - RNA, 19 nt, Artificial Sequence
  Description of Artificial Sequence: Synthetic oligonucleotide
  Sense strand starting at position 2225 of SEQ ID NO: 1241459
uauucugaguggcuugauu

SEQ ID NO: 1274137 - RNA, 19 nt, Artificial Sequence
  Description of Artificial Sequence: Synthetic oligonucleotide
  Antisense strand to SEQ ID NO: 1274136
aaucaagccacucagaaua

SEQ ID NO: 1274138 - RNA, 19 nt, Artificial Sequence
  Description of Artificial Sequence: Synthetic oligonucleotide
  Sense strand starting at position 2234 of SEQ ID NO: 1241459
uggcuugauuccucuggua

SEQ ID NO: 1274139 - RNA, 19 nt, Artificial Sequence
  Description of Artificial Sequence: Synthetic oligonucleotide
  Antisense strand to SEQ ID NO: 1274138
uaccagaggaaucaagcca

SEQ ID NO: 1274140 - RNA, 19 nt, Artificial Sequence
  Description of Artificial Sequence: Synthetic oligonucleotide
  Sense strand starting at position 2512 of SEQ ID NO: 1241459
ggcuccaaccuuuguagaa

SEQ ID NO: 1274141 - RNA, 19 nt, Artificial Sequence
  Description of Artificial Sequence: Synthetic oligonucleotide
  Antisense strand to SEQ ID NO: 1274140
uucuacaaagguuggagcc

SEQ ID NO: 1274142 - RNA, 19 nt, Artificial Sequence
  Description of Artificial Sequence: Synthetic oligonucleotide
  Sense strand starting at position 2513 of SEQ ID NO: 1241459
gcuccaaccuuuguagaaa

SEQ ID NO: 1274143 - RNA, 19 nt, Artificial Sequence
  Description of Artificial Sequence: Synthetic oligonucleotide
  Antisense strand to SEQ ID NO: 1274142
uuucuacaaagguuggagc

SEQ ID NO: 1274144 - RNA, 19 nt, Artificial Sequence
  Description of Artificial Sequence: Synthetic oligonucleotide
  Sense strand starting at position 2531 of SEQ ID NO: 1241459
agacaaaggugauuccuuu

SEQ ID NO: 1274145 - RNA, 19 nt, Artificial Sequence
  Description of Artificial Sequence: Synthetic oligonucleotide
  Antisense strand to SEQ ID NO: 1274144
aaaggaaucaccuuugucu

SEQ ID NO: 1274146 - RNA, 19 nt, Artificial Sequence
  Description of Artificial Sequence: Synthetic oligonucleotide
  Sense strand starting at position 2535 of SEQ ID NO: 1241459
aaaggugauuccuuuauug

SEQ ID NO: 1274147 - RNA, 19 nt, Artificial Sequence
  Description of Artificial Sequence: Synthetic oligonucleotide
  Antisense strand to SEQ ID NO: 1274146
caauaaaggaaucaccuuu

SEQ ID NO: 1274148 - RNA, 19 nt, Artificial Sequence
  Description of Artificial Sequence: Synthetic oligonucleotide
  Sense strand starting at position 2537 of SEQ ID NO: 1241459
aggugauuccuuuauuguc

SEQ ID NO: 1274149 - RNA, 19 nt, Artificial Sequence
  Description of Artificial Sequence: Synthetic oligonucleotide
  Antisense strand to SEQ ID NO: 1274148
gacaauaaaggaaucaccu

SEQ ID NO: 1274150 - RNA, 19 nt, Artificial Sequence
  Description of Artificial Sequence: Synthetic oligonucleotide
  Sense strand starting at position 2539 of SEQ ID NO: 1241459
gugauuccuuuauugucau

SEQ ID NO: 1274151 - RNA, 19 nt, Artificial Sequence
  Description of Artificial Sequence: Synthetic oligonucleotide
  Antisense strand to SEQ ID NO: 1274150
augacaauaaaggaaucac

SEQ ID NO: 1274152 - RNA, 19 nt, Artificial Sequence
  Description of Artificial Sequence: Synthetic oligonucleotide
  Sense strand starting at position 2634 of SEQ ID NO: 1241459
aaaucaaguugggugaaau

SEQ ID NO: 1274153 - RNA, 19 nt, Artificial Sequence
  Description of Artificial Sequence: Synthetic oligonucleotide
  Antisense strand to SEQ ID NO: 1274152
auuucacccaacuugauuu

SEQ ID NO: 1274154 - RNA, 19 nt, Artificial Sequence
  Description of Artificial Sequence: Synthetic oligonucleotide
  Sense strand starting at position 2635 of SEQ ID NO: 1241459
aaucaaguugggugaaauu

SEQ ID NO: 1274155 - RNA, 19 nt, Artificial Sequence
  Description of Artificial Sequence: Synthetic oligonucleotide
  Antisense strand to SEQ ID NO: 1274154
aauuucacccaacuugauu

SEQ ID NO: 1274156 - RNA, 19 nt, Artificial Sequence
  Description of Artificial Sequence: Synthetic oligonucleotide
  Sense strand starting at position 2807 of SEQ ID NO: 1241459
gauaaagcugaccgugaga

SEQ ID NO: 1274157 - RNA, 19 nt, Artificial Sequence
  Description of Artificial Sequence: Synthetic oligonucleotide
  Antisense strand to SEQ ID NO: 1274156
ucucacggucagcuuuauc

SEQ ID NO: 1274158 - RNA, 19 nt, Artificial Sequence
  Description of Artificial Sequence: Synthetic oligonucleotide
  Sense strand starting at position 2809 of SEQ ID NO: 1241459
uaaagcugaccgugagaaa

SEQ ID NO: 1274159 - RNA, 19 nt, Artificial Sequence
  Description of Artificial Sequence: Synthetic oligonucleotide
  Antisense strand to SEQ ID NO: 1274158
uuucucacggucagcuuua

SEQ ID NO: 1274160 - RNA, 19 nt, Artificial Sequence
  Description of Artificial Sequence: Synthetic oligonucleotide
  Sense strand starting at position 2906 of SEQ ID NO: 1241459
acuagacuaucagcgaaau

SEQ ID NO: 1274161 - RNA, 19 nt, Artificial Sequence
  Description of Artificial Sequence: Synthetic oligonucleotide
  Antisense strand to SEQ ID NO: 1274160
auuucgcugauagucuagu

SEQ ID NO: 1274162 - RNA, 19 nt, Artificial Sequence
  Description of Artificial Sequence: Synthetic oligonucleotide
  Sense strand starting at position 2907 of SEQ ID NO: 1241459
cuagacuaucagcgaaauc

SEQ ID NO: 1274163 - RNA, 19 nt, Artificial Sequence
  Description of Artificial Sequence: Synthetic oligonucleotide
  Antisense strand to SEQ ID NO: 1274162
gauuucgcugauagucuag

SEQ ID NO: 1274164 - RNA, 19 nt, Artificial Sequence
  Description of Artificial Sequence: Synthetic oligonucleotide
  Sense strand starting at position 3020 of SEQ ID NO: 1241459
gacagaaauuaggucaggu

SEQ ID NO: 1274165 - RNA, 19 nt, Artificial Sequence
  Description of Artificial Sequence: Synthetic oligonucleotide
  Antisense strand to SEQ ID NO: 1274164
accugaccuaauuucuguc

SEQ ID NO: 1274166 - RNA, 19 nt, Artificial Sequence
  Description of Artificial Sequence: Synthetic oligonucleotide
  Sense strand starting at position 3061 of SEQ ID NO: 1241459
gaugcacuucuguggcaga

SEQ ID NO: 1274167 - RNA, 19 nt, Artificial Sequence
  Description of Artificial Sequence: Synthetic oligonucleotide
  Antisense strand to SEQ ID NO: 1274166
ucugccacagaagugcauc

SEQ ID NO: 1274168 - RNA, 19 nt, Artificial Sequence
  Description of Artificial Sequence: Synthetic oligonucleotide
  Sense strand starting at position 3066 of SEQ ID NO: 1241459
acuucuguggcagaagaau

SEQ ID NO: 1274169 - RNA, 19 nt, Artificial Sequence
  Description of Artificial Sequence: Synthetic oligonucleotide
  Antisense strand to SEQ ID NO: 1274168
auucuucugccacagaagu

SEQ ID NO: 1274170 - RNA, 19 nt, Artificial Sequence
  Description of Artificial Sequence: Synthetic oligonucleotide
  Sense strand starting at position 3087 of SEQ ID NO: 1241459
aagucuagugcucaguauu

SEQ ID NO: 1274171 - RNA, 19 nt, Artificial Sequence
  Description of Artificial Sequence: Synthetic oligonucleotide
  Antisense strand to SEQ ID NO: 1274170
aauacugagcacuagacuu

SEQ ID NO: 1274172 - RNA, 19 nt, Artificial Sequence
  Description of Artificial Sequence: Synthetic oligonucleotide
  Sense strand starting at position 3090 of SEQ ID NO: 1241459
ucuagugcucaguauugua

SEQ ID NO: 1274173 - RNA, 19 nt, Artificial Sequence
  Description of Artificial Sequence: Synthetic oligonucleotide
  Antisense strand to SEQ ID NO: 1274172
uacaauacugagcacuaga

SEQ ID NO: 1274174 - RNA, 19 nt, Artificial Sequence
  Description of Artificial Sequence: Synthetic oligonucleotide
  Sense strand starting at position 3184 of SEQ ID NO: 1241459
agguuugugggagguauau

SEQ ID NO: 1274175 - RNA, 19 nt, Artificial Sequence
  Description of Artificial Sequence: Synthetic oligonucleotide
  Antisense strand to SEQ ID NO: 1274174
auauaccucccacaaaccu

SEQ ID NO: 1274176 - RNA, 19 nt, Artificial Sequence
  Description of Artificial Sequence: Synthetic oligonucleotide
  Sense strand starting at position 3380 of SEQ ID NO: 1241459
agguaugauucuucccaca

SEQ ID NO: 1274177 - RNA, 19 nt, Artificial Sequence
  Description of Artificial Sequence: Synthetic oligonucleotide
  Antisense strand to SEQ ID NO: 1274176
ugugggaagaaucauaccu

SEQ ID NO: 1274178 - RNA, 19 nt, Artificial Sequence
  Description of Artificial Sequence: Synthetic oligonucleotide
  Sense strand starting at position 3382 of SEQ ID NO: 1241459
guaugauucuucccacauc

SEQ ID NO: 1274179 - RNA, 19 nt, Artificial Sequence
  Description of Artificial Sequence: Synthetic oligonucleotide
  Antisense strand to SEQ ID NO: 1274178
gaugugggaagaaucauac

SEQ ID NO: 1274180 - RNA, 19 nt, Artificial Sequence
  Description of Artificial Sequence: Synthetic oligonucleotide
  Sense strand starting at position 3434 of SEQ ID NO: 1241459
auaucugaaucuuaggaag

SEQ ID NO: 1274181 - RNA, 19 nt, Artificial Sequence
  Description of Artificial Sequence: Synthetic oligonucleotide
  Antisense strand to SEQ ID NO: 1274180
cuuccuaagauucagauau

SEQ ID NO: 1274182 - RNA, 19 nt, Artificial Sequence
  Description of Artificial Sequence: Synthetic oligonucleotide
  Sense strand starting at position 3457 of SEQ ID NO: 1241459
acaccagaugcuugccaaa

SEQ ID NO: 1274183 - RNA, 19 nt, Artificial Sequence
  Description of Artificial Sequence: Synthetic oligonucleotide
  Antisense strand to SEQ ID NO: 1274182
uuuggcaagcaucuggugu

SEQ ID NO: 1274184 - RNA, 19 nt, Artificial Sequence
  Description of Artificial Sequence: Synthetic oligonucleotide
  Sense strand starting at position 336 of SEQ ID NO: 1241460
acugaaaucguauaaucuu

SEQ ID NO: 1274185 - RNA, 19 nt, Artificial Sequence
  Description of Artificial Sequence: Synthetic oligonucleotide
  Antisense strand to SEQ ID NO: 1274184
aagauuauacgauuucagu

SEQ ID NO: 1274186 - RNA, 19 nt, Artificial Sequence
  Description of Artificial Sequence: Synthetic oligonucleotide
  Sense strand starting at position 345 of SEQ ID NO: 1241460
guauaaucuucccugaaug

SEQ ID NO: 1274187 - RNA, 19 nt, Artificial Sequence
  Description of Artificial Sequence: Synthetic oligonucleotide
  Antisense strand to SEQ ID NO: 1274186
cauucagggaagauuauac

SEQ ID NO: 1274188 - RNA, 19 nt, Artificial Sequence
  Description of Artificial Sequence: Synthetic oligonucleotide
  Sense strand starting at position 798 of SEQ ID NO: 1241460
aggagaccuugucuacaca

SEQ ID NO: 1274189 - RNA, 19 nt, Artificial Sequence
  Description of Artificial Sequence: Synthetic oligonucleotide
  Antisense strand to SEQ ID NO: 1274188
uguguagacaaggucuccu

SEQ ID NO: 1274190 - RNA, 19 nt, Artificial Sequence
  Description of Artificial Sequence: Synthetic oligonucleotide
  Sense strand starting at position 808 of SEQ ID NO: 1241460
gucuacacacuguagauua

SEQ ID NO: 1274191 - RNA, 19 nt, Artificial Sequence
  Description of Artificial Sequence: Synthetic oligonucleotide
  Antisense strand to SEQ ID NO: 1274190
uaaucuacaguguguagac

SEQ ID NO: 1274192 - RNA, 19 nt, Artificial Sequence
  Description of Artificial Sequence: Synthetic oligonucleotide
  Sense strand starting at position 1109 of SEQ ID NO: 1241460
ucgauuuccuucccuguga

SEQ ID NO: 1274193 - RNA, 19 nt, Artificial Sequence
  Description of Artificial Sequence: Synthetic oligonucleotide
  Antisense strand to SEQ ID NO: 1274192
ucacagggaaggaaaucga

SEQ ID NO: 1274194 - RNA, 19 nt, Artificial Sequence
  Description of Artificial Sequence: Synthetic oligonucleotide
  Sense strand starting at position 1110 of SEQ ID NO: 1241460
cgauuuccuucccugugaa

SEQ ID NO: 1274195 - RNA, 19 nt, Artificial Sequence
  Description of Artificial Sequence: Synthetic oligonucleotide
  Antisense strand to SEQ ID NO: 1274194
uucacagggaaggaaaucg

SEQ ID NO: 1274196 - RNA, 19 nt, Artificial Sequence
  Description of Artificial Sequence: Synthetic oligonucleotide
  Sense strand starting at position 1113 of SEQ ID NO: 1241460
uuuccuucccugugaaaug

SEQ ID NO: 1274197 - RNA, 19 nt, Artificial Sequence
  Description of Artificial Sequence: Synthetic oligonucleotide
  Antisense strand to SEQ ID NO: 1274196
cauuucacagggaaggaaa

SEQ ID NO: 1274198 - RNA, 19 nt, Artificial Sequence
  Description of Artificial Sequence: Synthetic oligonucleotide
  Sense strand starting at position 1154 of SEQ ID NO: 1241460
gggacuguuguaggaauga

SEQ ID NO: 1274199 - RNA, 19 nt, Artificial Sequence
  Description of Artificial Sequence: Synthetic oligonucleotide
  Antisense strand to SEQ ID NO: 1274198
ucauuccuacaacaguccc

SEQ ID NO: 1274200 - RNA, 19 nt, Artificial Sequence
  Description of Artificial Sequence: Synthetic oligonucleotide
  Sense strand starting at position 1187 of SEQ ID NO: 1241460
ugguaaggcgcuuagaaca

SEQ ID NO: 1274201 - RNA, 19 nt, Artificial Sequence
  Description of Artificial Sequence: Synthetic oligonucleotide
  Antisense strand to SEQ ID NO: 1274200
uguucuaagcgccuuacca

SEQ ID NO: 1274202 - RNA, 19 nt, Artificial Sequence
  Description of Artificial Sequence: Synthetic oligonucleotide
  Sense strand starting at position 1374 of SEQ ID NO: 1241460
agcaguauauacucaagca

SEQ ID NO: 1274203 - RNA, 19 nt, Artificial Sequence
  Description of Artificial Sequence: Synthetic oligonucleotide
  Antisense strand to SEQ ID NO: 1274202
ugcuugaguauauacugcu

SEQ ID NO: 1274204 - RNA, 19 nt, Artificial Sequence
  Description of Artificial Sequence: Synthetic oligonucleotide
  Sense strand starting at position 1515 of SEQ ID NO: 1241460
uggaaauacagucgggaua

SEQ ID NO: 1274205 - RNA, 19 nt, Artificial Sequence
  Description of Artificial Sequence: Synthetic oligonucleotide
  Antisense strand to SEQ ID NO: 1274204
uaucccgacuguauuucca

SEQ ID NO: 1274206 - RNA, 19 nt, Artificial Sequence
  Description of Artificial Sequence: Synthetic oligonucleotide
  Sense strand starting at position 1526 of SEQ ID NO: 1241460
ucgggauacucauuggcua

SEQ ID NO: 1274207 - RNA, 19 nt, Artificial Sequence
  Description of Artificial Sequence: Synthetic oligonucleotide
  Antisense strand to SEQ ID NO: 1274206
uagccaaugaguaucccga

SEQ ID NO: 1274208 - RNA, 19 nt, Artificial Sequence
  Description of Artificial Sequence: Synthetic oligonucleotide
  Sense strand starting at position 1528 of SEQ ID NO: 1241460
gggauacucauuggcuaug

SEQ ID NO: 1274209 - RNA, 19 nt, Artificial Sequence
  Description of Artificial Sequence: Synthetic oligonucleotide
  Antisense strand to SEQ ID NO: 1274208
cauagccaaugaguauccc

SEQ ID NO: 1274210 - RNA, 19 nt, Artificial Sequence
  Description of Artificial Sequence: Synthetic oligonucleotide
  Sense strand starting at position 1530 of SEQ ID NO: 1241460
gauacucauuggcuaugga

SEQ ID NO: 1274211 - RNA, 19 nt, Artificial Sequence
  Description of Artificial Sequence: Synthetic oligonucleotide
  Antisense strand to SEQ ID NO: 1274210
uccauagccaaugaguauc

SEQ ID NO: 1274212 - RNA, 19 nt, Artificial Sequence
  Description of Artificial Sequence: Synthetic oligonucleotide
  Sense strand starting at position 1625 of SEQ ID NO: 1241460
gcggcuacagucuauuuaa

SEQ ID NO: 1274213 - RNA, 19 nt, Artificial Sequence
  Description of Artificial Sequence: Synthetic oligonucleotide
  Antisense strand to SEQ ID NO: 1274212
uuaaauagacuguagccgc

SEQ ID NO: 1274214 - RNA, 19 nt, Artificial Sequence
  Description of Artificial Sequence: Synthetic oligonucleotide
  Sense strand starting at position 2226 of SEQ ID NO: 1241460
uuguucugucuggaaacau

SEQ ID NO: 1274215 - RNA, 19 nt, Artificial Sequence
  Description of Artificial Sequence: Synthetic oligonucleotide
  Antisense strand to SEQ ID NO: 1274214
auguuuccagacagaacaa

SEQ ID NO: 1274216 - RNA, 19 nt, Artificial Sequence
  Description of Artificial Sequence: Synthetic oligonucleotide
  Sense strand starting at position 2258 of SEQ ID NO: 1241460
aagauuuaugagcggugua

SEQ ID NO: 1274217 - RNA, 19 nt, Artificial Sequence
  Description of Artificial Sequence: Synthetic oligonucleotide
  Antisense strand to SEQ ID NO: 1274216
uacaccgcucauaaaucuu

SEQ ID NO: 1274218 - RNA, 19 nt, Artificial Sequence
  Description of Artificial Sequence: Synthetic oligonucleotide
  Sense strand starting at position 2259 of SEQ ID NO: 1241460
agauuuaugagcgguguac

SEQ ID NO: 1274219 - RNA, 19 nt, Artificial Sequence
  Description of Artificial Sequence: Synthetic oligonucleotide
  Antisense strand to SEQ ID NO: 1274218
guacaccgcucauaaaucu

SEQ ID NO: 1274220 - RNA, 19 nt, Artificial Sequence
  Description of Artificial Sequence: Synthetic oligonucleotide
  Sense strand starting at position 2261 of SEQ ID NO: 1241460
auuuaugagcgguguacuu

SEQ ID NO: 1274221 - RNA, 19 nt, Artificial Sequence
  Description of Artificial Sequence: Synthetic oligonucleotide
  Antisense strand to SEQ ID NO: 1274220
aaguacaccgcucauaaau

SEQ ID NO: 1274222 - RNA, 19 nt, Artificial Sequence
  Description of Artificial Sequence: Synthetic oligonucleotide
  Sense strand starting at position 2340 of SEQ ID NO: 1241460
gucagcucagcugauaaua

SEQ ID NO: 1274223 - RNA, 19 nt, Artificial Sequence
  Description of Artificial Sequence: Synthetic oligonucleotide
  Antisense strand to SEQ ID NO: 1274222
uauuaucagcugagcugac

SEQ ID NO: 1274224 - RNA, 19 nt, Artificial Sequence
  Description of Artificial Sequence: Synthetic oligonucleotide
  Sense strand starting at position 2470 of SEQ ID NO: 1241460
cugcaauuccaagaucuga

SEQ ID NO: 1274225 - RNA, 19 nt, Artificial Sequence
  Description of Artificial Sequence: Synthetic oligonucleotide
  Antisense strand to SEQ ID NO: 1274224
ucagaucuuggaauugcag

SEQ ID NO: 1274226 - RNA, 19 nt, Artificial Sequence
  Description of Artificial Sequence: Synthetic oligonucleotide
  Sense strand starting at position 2483 of SEQ ID NO: 1241460
aucugauagccugaauauc

SEQ ID NO: 1274227 - RNA, 19 nt, Artificial Sequence
  Description of Artificial Sequence: Synthetic oligonucleotide
  Antisense strand to SEQ ID NO: 1274226
gauauucaggcuaucagau

SEQ ID NO: 1274228 - RNA, 19 nt, Artificial Sequence
  Description of Artificial Sequence: Synthetic oligonucleotide
  Sense strand starting at position 2491 of SEQ ID NO: 1241460
gccugaauaucuuuguaaa

SEQ ID NO: 1274229 - RNA, 19 nt, Artificial Sequence
  Description of Artificial Sequence: Synthetic oligonucleotide
  Antisense strand to SEQ ID NO: 1274228
uuuacaaagauauucaggc

SEQ ID NO: 1274230 - RNA, 19 nt, Artificial Sequence
  Description of Artificial Sequence: Synthetic oligonucleotide
  Sense strand starting at position 2634 of SEQ ID NO: 1241460
gauucuuaaugaguaagua

SEQ ID NO: 1274231 - RNA, 19 nt, Artificial Sequence
  Description of Artificial Sequence: Synthetic oligonucleotide
  Antisense strand to SEQ ID NO: 1274230
uacuuacucauuaagaauc

SEQ ID NO: 1274232 - RNA, 19 nt, Artificial Sequence
  Description of Artificial Sequence: Synthetic oligonucleotide
  Sense strand starting at position 3016 of SEQ ID NO: 1241460
gugacagagcuuuacauua

SEQ ID NO: 1274233 - RNA, 19 nt, Artificial Sequence
  Description of Artificial Sequence: Synthetic oligonucleotide
  Antisense strand to SEQ ID NO: 1274232
uaauguaaagcucugucac

SEQ ID NO: 1274234 - RNA, 19 nt, Artificial Sequence
  Description of Artificial Sequence: Synthetic oligonucleotide
  Sense strand starting at position 3021 of SEQ ID NO: 1241460
agagcuuuacauuaguaug

SEQ ID NO: 1274235 - RNA, 19 nt, Artificial Sequence
  Description of Artificial Sequence: Synthetic oligonucleotide
  Antisense strand to SEQ ID NO: 1274234
cauacuaauguaaagcucu

SEQ ID NO: 1274236 - RNA, 19 nt, Artificial Sequence
  Description of Artificial Sequence: Synthetic oligonucleotide
  Sense strand starting at position 3023 of SEQ ID NO: 1241460
agcuuuacauuaguaugaa

SEQ ID NO: 1274237 - RNA, 19 nt, Artificial Sequence
  Description of Artificial Sequence: Synthetic oligonucleotide
  Antisense strand to SEQ ID NO: 1274236
uucauacuaauguaaagcu

SEQ ID NO: 1274238 - RNA, 19 nt, Artificial Sequence
  Description of Artificial Sequence: Synthetic oligonucleotide
  Sense strand starting at position 3026 of SEQ ID NO: 1241460
uuuacauuaguaugaagac

SEQ ID NO: 1274239 - RNA, 19 nt, Artificial Sequence
  Description of Artificial Sequence: Synthetic oligonucleotide
  Antisense strand to SEQ ID NO: 1274238
gucuucauacuaauguaaa

SEQ ID NO: 1274240 - RNA, 19 nt, Artificial Sequence
  Description of Artificial Sequence: Synthetic oligonucleotide
  Sense strand starting at position 3097 of SEQ ID NO: 1241460
guuccucaacaggaguuaa

SEQ ID NO: 1274241 - RNA, 19 nt, Artificial Sequence
  Description of Artificial Sequence: Synthetic oligonucleotide
  Antisense strand to SEQ ID NO: 1274240
uuaacuccuguugaggaac

SEQ ID NO: 1274242 - RNA, 19 nt, Artificial Sequence
  Description of Artificial Sequence: Synthetic oligonucleotide
  Sense strand starting at position 3192 of SEQ ID NO: 1241460
gcuauugucuuauugaaag

SEQ ID NO: 1274243 - RNA, 19 nt, Artificial Sequence
  Description of Artificial Sequence: Synthetic oligonucleotide
  Antisense strand to SEQ ID NO: 1274242
cuuucaauaagacaauagc

SEQ ID NO: 1274244 - RNA, 19 nt, Artificial Sequence
  Description of Artificial Sequence: Synthetic oligonucleotide
  Sense strand starting at position 3336 of SEQ ID NO: 1241460
guaagcucagcugauaaca

SEQ ID NO: 1274245 - RNA, 19 nt, Artificial Sequence
  Description of Artificial Sequence: Synthetic oligonucleotide
  Antisense strand to SEQ ID NO: 1274244
uguuaucagcugagcuuac

SEQ ID NO: 1274246 - RNA, 19 nt, Artificial Sequence
  Description of Artificial Sequence: Synthetic oligonucleotide
  Sense strand starting at position 3384 of SEQ ID NO: 1241460
augucauaugugcaaauaa

SEQ ID NO: 1274247 - RNA, 19 nt, Artificial Sequence
  Description of Artificial Sequence: Synthetic oligonucleotide
  Antisense strand to SEQ ID NO: 1274246
uuauuugcacauaugacau

SEQ ID NO: 1274248 - RNA, 19 nt, Artificial Sequence
  Description of Artificial Sequence: Synthetic oligonucleotide
  Sense strand starting at position 3436 of SEQ ID NO: 1241460
cucagauggcauuauaguu

SEQ ID NO: 1274249 - RNA, 19 nt, Artificial Sequence
  Description of Artificial Sequence: Synthetic oligonucleotide
  Antisense strand to SEQ ID NO: 1274248
aacuauaaugccaucugag

SEQ ID NO: 1274250 - RNA, 19 nt, Artificial Sequence
  Description of Artificial Sequence: Synthetic oligonucleotide
  Sense strand starting at position 3452 of SEQ ID NO: 1241460
guuuauugccacuaggaca

SEQ ID NO: 1274251 - RNA, 19 nt, Artificial Sequence
  Description of Artificial Sequence: Synthetic oligonucleotide
  Antisense strand to SEQ ID NO: 1274250
uguccuaguggcaauaaac

SEQ ID NO: 1274252 - RNA, 19 nt, Artificial Sequence
  Description of Artificial Sequence: Synthetic oligonucleotide
  Sense strand starting at position 3771 of SEQ ID NO: 1241460
uguaaugaugcccagcuau

SEQ ID NO: 1274253 - RNA, 19 nt, Artificial Sequence
  Description of Artificial Sequence: Synthetic oligonucleotide
  Antisense strand to SEQ ID NO: 1274252
auagcugggcaucauuaca

SEQ ID NO: 1274254 - RNA, 19 nt, Artificial Sequence
  Description of Artificial Sequence: Synthetic oligonucleotide
  Sense strand starting at position 3781 of SEQ ID NO: 1241460
cccagcuauccaggacagu

SEQ ID NO: 1274255 - RNA, 19 nt, Artificial Sequence
  Description of Artificial Sequence: Synthetic oligonucleotide
  Antisense strand to SEQ ID NO: 1274254
acuguccuggauagcuggg

SEQ ID NO: 1274256 - RNA, 19 nt, Artificial Sequence
  Description of Artificial Sequence: Synthetic oligonucleotide
  Sense strand starting at position 3782 of SEQ ID NO: 1241460
ccagcuauccaggacaguu

SEQ ID NO: 1274257 - RNA, 19 nt, Artificial Sequence
  Description of Artificial Sequence: Synthetic oligonucleotide
  Antisense strand to SEQ ID NO: 1274256
aacuguccuggauagcugg

SEQ ID NO: 1274258 - RNA, 19 nt, Artificial Sequence
  Description of Artificial Sequence: Synthetic oligonucleotide
  Sense strand starting at position 3801 of SEQ ID NO: 1241460
uuaauuacgucuuugaaga

SEQ ID NO: 1274259 - RNA, 19 nt, Artificial Sequence
  Description of Artificial Sequence: Synthetic oligonucleotide
  Antisense strand to SEQ ID NO: 1274258
ucuucaaagacguaauuaa

SEQ ID NO: 1274260 - RNA, 19 nt, Artificial Sequence
  Description of Artificial Sequence: Synthetic oligonucleotide
  Sense strand starting at position 3802 of SEQ ID NO: 1241460
uaauuacgucuuugaagau

SEQ ID NO: 1274261 - RNA, 19 nt, Artificial Sequence
  Description of Artificial Sequence: Synthetic oligonucleotide
  Antisense strand to SEQ ID NO: 1274260
aucuucaaagacguaauua

SEQ ID NO: 1274262 - RNA, 19 nt, Artificial Sequence
  Description of Artificial Sequence: Synthetic oligonucleotide
  Sense strand starting at position 3890 of SEQ ID NO: 1241460
agcacuaaagauugugaga

SEQ ID NO: 1274263 - RNA, 19 nt, Artificial Sequence
  Description of Artificial Sequence: Synthetic oligonucleotide
  Antisense strand to SEQ ID NO: 1274262
ucucacaaucuuuagugcu

SEQ ID NO: 1274264 - RNA, 19 nt, Artificial Sequence
  Description of Artificial Sequence: Synthetic oligonucleotide
  Sense strand starting at position 67 of SEQ ID NO: 1241461
gguaaauggcaguguagaa

SEQ ID NO: 1274265 - RNA, 19 nt, Artificial Sequence
  Description of Artificial Sequence: Synthetic oligonucleotide
  Antisense strand to SEQ ID NO: 1274264
uucuacacugccauuuacc

SEQ ID NO: 1274266 - RNA, 19 nt, Artificial Sequence
  Description of Artificial Sequence: Synthetic oligonucleotide
  Sense strand starting at position 188 of SEQ ID NO: 1241461
gcacaagguagggauugua

SEQ ID NO: 1274267 - RNA, 19 nt, Artificial Sequence
  Description of Artificial Sequence: Synthetic oligonucleotide
  Antisense strand to SEQ ID NO: 1274266
uacaaucccuaccuugugc

SEQ ID NO: 1274268 - RNA, 19 nt, Artificial Sequence
  Description of Artificial Sequence: Synthetic oligonucleotide
  Sense strand starting at position 191 of SEQ ID NO: 1241461
caagguagggauuguaugu

SEQ ID NO: 1274269 - RNA, 19 nt, Artificial Sequence
  Description of Artificial Sequence: Synthetic oligonucleotide
  Antisense strand to SEQ ID NO: 1274268
acauacaaucccuaccuug

SEQ ID NO: 1274270 - RNA, 19 nt, Artificial Sequence
  Description of Artificial Sequence: Synthetic oligonucleotide
  Sense strand starting at position 197 of SEQ ID NO: 1241461
agggauuguaugugucaca

SEQ ID NO: 1274271 - RNA, 19 nt, Artificial Sequence
  Description of Artificial Sequence: Synthetic oligonucleotide
  Antisense strand to SEQ ID NO: 1274270
ugugacacauacaaucccu

SEQ ID NO: 1274272 - RNA, 19 nt, Artificial Sequence
  Description of Artificial Sequence: Synthetic oligonucleotide
  Sense strand starting at position 198 of SEQ ID NO: 1241461
gggauuguaugugucacaa

SEQ ID NO: 1274273 - RNA, 19 nt, Artificial Sequence
  Description of Artificial Sequence: Synthetic oligonucleotide
  Antisense strand to SEQ ID NO: 1274272
uugugacacauacaauccc

SEQ ID NO: 1274274 - RNA, 19 nt, Artificial Sequence
  Description of Artificial Sequence: Synthetic oligonucleotide
  Sense strand starting at position 217 of SEQ ID NO: 1241461
gaguauauagacuguucua

SEQ ID NO: 1274275 - RNA, 19 nt, Artificial Sequence
  Description of Artificial Sequence: Synthetic oligonucleotide
  Antisense strand to SEQ ID NO: 1274274
uagaacagucuauauacuc

SEQ ID NO: 1274276 - RNA, 19 nt, Artificial Sequence
  Description of Artificial Sequence: Synthetic oligonucleotide
  Sense strand starting at position 276 of SEQ ID NO: 1241461
cugagacucaggugaaauu

SEQ ID NO: 1274277 - RNA, 19 nt, Artificial Sequence
  Description of Artificial Sequence: Synthetic oligonucleotide
  Antisense strand to SEQ ID NO: 1274276
aauuucaccugagucucag

SEQ ID NO: 1274278 - RNA, 19 nt, Artificial Sequence
  Description of Artificial Sequence: Synthetic oligonucleotide
  Sense strand starting at position 285 of SEQ ID NO: 1241461
aggugaaauuaccuuccaa

SEQ ID NO: 1274279 - RNA, 19 nt, Artificial Sequence
  Description of Artificial Sequence: Synthetic oligonucleotide
  Antisense strand to SEQ ID NO: 1274278
uuggaagguaauuucaccu

SEQ ID NO: 1274280 - RNA, 19 nt, Artificial Sequence
  Description of Artificial Sequence: Synthetic oligonucleotide
  Sense strand starting at position 298 of SEQ ID NO: 1241461
uuccaauauugccuggaga

SEQ ID NO: 1274281 - RNA, 19 nt, Artificial Sequence
  Description of Artificial Sequence: Synthetic oligonucleotide
  Antisense strand to SEQ ID NO: 1274280
ucuccaggcaauauuggaa

SEQ ID NO: 1274282 - RNA, 19 nt, Artificial Sequence
  Description of Artificial Sequence: Synthetic oligonucleotide
  Sense strand starting at position 299 of SEQ ID NO: 1241461
uccaauauugccuggagaa

SEQ ID NO: 1274283 - RNA, 19 nt, Artificial Sequence
  Description of Artificial Sequence: Synthetic oligonucleotide
  Antisense strand to SEQ ID NO: 1274282
uucuccaggcaauauugga

SEQ ID NO: 1274284 - RNA, 19 nt, Artificial Sequence
  Description of Artificial Sequence: Synthetic oligonucleotide
  Sense strand starting at position 300 of SEQ ID NO: 1241461
ccaauauugccuggagaag

SEQ ID NO: 1274285 - RNA, 19 nt, Artificial Sequence
  Description of Artificial Sequence: Synthetic oligonucleotide
  Antisense strand to SEQ ID NO: 1274284
cuucuccaggcaauauugg

SEQ ID NO: 1274286 - RNA, 19 nt, Artificial Sequence
  Description of Artificial Sequence: Synthetic oligonucleotide
  Sense strand starting at position 561 of SEQ ID NO: 1241461
ucugguaagugguuagaua

SEQ ID NO: 1274287 - RNA, 19 nt, Artificial Sequence
  Description of Artificial Sequence: Synthetic oligonucleotide
  Antisense strand to SEQ ID NO: 1274286
uaucuaaccacuuaccaga

SEQ ID NO: 1274288 - RNA, 19 nt, Artificial Sequence
  Description of Artificial Sequence: Synthetic oligonucleotide
  Sense strand starting at position 562 of SEQ ID NO: 1241461
cugguaagugguuagauau

SEQ ID NO: 1274289 - RNA, 19 nt, Artificial Sequence
  Description of Artificial Sequence: Synthetic oligonucleotide
  Antisense strand to SEQ ID NO: 1274288
auaucuaaccacuuaccag

SEQ ID NO: 1274290 - RNA, 19 nt, Artificial Sequence
  Description of Artificial Sequence: Synthetic oligonucleotide
  Sense strand starting at position 585 of SEQ ID NO: 1241461
ccugcaacucccuaggauu

SEQ ID NO: 1274291 - RNA, 19 nt, Artificial Sequence
  Description of Artificial Sequence: Synthetic oligonucleotide
  Antisense strand to SEQ ID NO: 1274290
aauccuagggaguugcagg

SEQ ID NO: 1274292 - RNA, 19 nt, Artificial Sequence
  Description of Artificial Sequence: Synthetic oligonucleotide
  Sense strand starting at position 587 of SEQ ID NO: 1241461
ugcaacucccuaggauuau

SEQ ID NO: 1274293 - RNA, 19 nt, Artificial Sequence
  Description of Artificial Sequence: Synthetic oligonucleotide
  Antisense strand to SEQ ID NO: 1274292
auaauccuagggaguugca

SEQ ID NO: 1274294 - RNA, 19 nt, Artificial Sequence
  Description of Artificial Sequence: Synthetic oligonucleotide
  Sense strand starting at position 593 of SEQ ID NO: 1241461
ucccuaggauuaucuguaa

SEQ ID NO: 1274295 - RNA, 19 nt, Artificial Sequence
  Description of Artificial Sequence: Synthetic oligonucleotide
  Antisense strand to SEQ ID NO: 1274294
uuacagauaauccuaggga

SEQ ID NO: 1274296 - RNA, 19 nt, Artificial Sequence
  Description of Artificial Sequence: Synthetic oligonucleotide
  Sense strand starting at position 667 of SEQ ID NO: 1241461
guuuaucuugaggacacga

SEQ ID NO: 1274297 - RNA, 19 nt, Artificial Sequence
  Description of Artificial Sequence: Synthetic oligonucleotide
  Antisense strand to SEQ ID NO: 1274296
ucguguccucaagauaaac

SEQ ID NO: 1274298 - RNA, 19 nt, Artificial Sequence
  Description of Artificial Sequence: Synthetic oligonucleotide
  Sense strand starting at position 761 of SEQ ID NO: 1241461
uuuaucaucugaguaguau

SEQ ID NO: 1274299 - RNA, 19 nt, Artificial Sequence
  Description of Artificial Sequence: Synthetic oligonucleotide
  Antisense strand to SEQ ID NO: 1274298
auacuacucagaugauaaa

SEQ ID NO: 1274300 - RNA, 19 nt, Artificial Sequence
  Description of Artificial Sequence: Synthetic oligonucleotide
  Sense strand starting at position 762 of SEQ ID NO: 1241461
uuaucaucugaguaguaug

SEQ ID NO: 1274301 - RNA, 19 nt, Artificial Sequence
  Description of Artificial Sequence: Synthetic oligonucleotide
  Antisense strand to SEQ ID NO: 1274300
cauacuacucagaugauaa

SEQ ID NO: 1274302 - RNA, 19 nt, Artificial Sequence
  Description of Artificial Sequence: Synthetic oligonucleotide
  Sense strand starting at position 767 of SEQ ID NO: 1241461
aucugaguaguaugaaaca

SEQ ID NO: 1274303 - RNA, 19 nt, Artificial Sequence
  Description of Artificial Sequence: Synthetic oligonucleotide
  Antisense strand to SEQ ID NO: 1274302
uguuucauacuacucagau

SEQ ID NO: 1274304 - RNA, 19 nt, Artificial Sequence
  Description of Artificial Sequence: Synthetic oligonucleotide
  Sense strand starting at position 779 of SEQ ID NO: 1241461
ugaaacauccagcguccaa

SEQ ID NO: 1274305 - RNA, 19 nt, Artificial Sequence
  Description of Artificial Sequence: Synthetic oligonucleotide
  Antisense strand to SEQ ID NO: 1274304
uuggacgcuggauguuuca

SEQ ID NO: 1274306 - RNA, 19 nt, Artificial Sequence
  Description of Artificial Sequence: Synthetic oligonucleotide
  Sense strand starting at position 1088 of SEQ ID NO: 1241461
cccgguaucuccuuaggga

SEQ ID NO: 1274307 - RNA, 19 nt, Artificial Sequence
  Description of Artificial Sequence: Synthetic oligonucleotide
  Antisense strand to SEQ ID NO: 1274306
ucccuaaggagauaccggg

SEQ ID NO: 1274308 - RNA, 19 nt, Artificial Sequence
  Description of Artificial Sequence: Synthetic oligonucleotide
  Sense strand starting at position 1089 of SEQ ID NO: 1241461
ccgguaucuccuuagggac

SEQ ID NO: 1274309 - RNA, 19 nt, Artificial Sequence
  Description of Artificial Sequence: Synthetic oligonucleotide
  Antisense strand to SEQ ID NO: 1274308
gucccuaaggagauaccgg

SEQ ID NO: 1274310 - RNA, 19 nt, Artificial Sequence
  Description of Artificial Sequence: Synthetic oligonucleotide
  Sense strand starting at position 1220 of SEQ ID NO: 1241461
ugcagagccuccucgauuu

SEQ ID NO: 1274311 - RNA, 19 nt, Artificial Sequence
  Description of Artificial Sequence: Synthetic oligonucleotide
  Antisense strand to SEQ ID NO: 1274310
aaaucgaggaggcucugca

SEQ ID NO: 1274312 - RNA, 19 nt, Artificial Sequence
  Description of Artificial Sequence: Synthetic oligonucleotide
  Sense strand starting at position 1233 of SEQ ID NO: 1241461
cgauuucugccacacugca

SEQ ID NO: 1274313 - RNA, 19 nt, Artificial Sequence
  Description of Artificial Sequence: Synthetic oligonucleotide
  Antisense strand to SEQ ID NO: 1274312
ugcaguguggcagaaaucg

SEQ ID NO: 1274314 - RNA, 19 nt, Artificial Sequence
  Description of Artificial Sequence: Synthetic oligonucleotide
  Sense strand starting at position 1257 of SEQ ID NO: 1241461
gggagaugccggcaaucaa

SEQ ID NO: 1274315 - RNA, 19 nt, Artificial Sequence
  Description of Artificial Sequence: Synthetic oligonucleotide
  Antisense strand to SEQ ID NO: 1274314
uugauugccggcaucuccc

SEQ ID NO: 1274316 - RNA, 19 nt, Artificial Sequence
  Description of Artificial Sequence: Synthetic oligonucleotide
  Sense strand starting at position 2579 of SEQ ID NO: 1241461
auuguaagugcuuaggagu

SEQ ID NO: 1274317 - RNA, 19 nt, Artificial Sequence
  Description of Artificial Sequence: Synthetic oligonucleotide
  Antisense strand to SEQ ID NO: 1274316
acuccuaagcacuuacaau

SEQ ID NO: 1274318 - RNA, 19 nt, Artificial Sequence
  Description of Artificial Sequence: Synthetic oligonucleotide
  Sense strand starting at position 2592 of SEQ ID NO: 1241461
aggaguuacugucuuaacu

SEQ ID NO: 1274319 - RNA, 19 nt, Artificial Sequence
  Description of Artificial Sequence: Synthetic oligonucleotide
  Antisense strand to SEQ ID NO: 1274318
aguuaagacaguaacuccu

SEQ ID NO: 1274320 - RNA, 19 nt, Artificial Sequence
  Description of Artificial Sequence: Synthetic oligonucleotide
  Sense strand starting at position 2651 of SEQ ID NO: 1241461
caguacuguuaugccagaa

SEQ ID NO: 1274321 - RNA, 19 nt, Artificial Sequence
  Description of Artificial Sequence: Synthetic oligonucleotide
  Antisense strand to SEQ ID NO: 1274320
uucuggcauaacaguacug

SEQ ID NO: 1274322 - RNA, 19 nt, Artificial Sequence
  Description of Artificial Sequence: Synthetic oligonucleotide
  Sense strand starting at position 2655 of SEQ ID NO: 1241461
acuguuaugccagaaagug

SEQ ID NO: 1274323 - RNA, 19 nt, Artificial Sequence
  Description of Artificial Sequence: Synthetic oligonucleotide
  Antisense strand to SEQ ID NO: 1274322
cacuuucuggcauaacagu

SEQ ID NO: 1274324 - RNA, 19 nt, Artificial Sequence
  Description of Artificial Sequence: Synthetic oligonucleotide
  Sense strand starting at position 2689 of SEQ ID NO: 1241461
ugaaaugugcugugagaaa

SEQ ID NO: 1274325 - RNA, 19 nt, Artificial Sequence
  Description of Artificial Sequence: Synthetic oligonucleotide
  Antisense strand to SEQ ID NO: 1274324
uuucucacagcacauuuca

SEQ ID NO: 1274326 - RNA, 19 nt, Artificial Sequence
  Description of Artificial Sequence: Synthetic oligonucleotide
  Sense strand starting at position 2700 of SEQ ID NO: 1241461
gugagaaacuaguuuaauu

SEQ ID NO: 1274327 - RNA, 19 nt, Artificial Sequence
  Description of Artificial Sequence: Synthetic oligonucleotide
  Antisense strand to SEQ ID NO: 1274326
aauuaaacuaguuucucac

SEQ ID NO: 1274328 - RNA, 19 nt, Artificial Sequence
  Description of Artificial Sequence: Synthetic oligonucleotide
  Sense strand starting at position 2744 of SEQ ID NO: 1241461
ggaccuguuuaaguaggau

SEQ ID NO: 1274329 - RNA, 19 nt, Artificial Sequence
  Description of Artificial Sequence: Synthetic oligonucleotide
  Antisense strand to SEQ ID NO: 1274328
auccuacuuaaacaggucc

SEQ ID NO: 1274330 - RNA, 19 nt, Artificial Sequence
  Description of Artificial Sequence: Synthetic oligonucleotide
  Sense strand starting at position 2765 of SEQ ID NO: 1241461
agugauuuauucugaggga

SEQ ID NO: 1274331 - RNA, 19 nt, Artificial Sequence
  Description of Artificial Sequence: Synthetic oligonucleotide
  Antisense strand to SEQ ID NO: 1274330
ucccucagaauaaaucacu

SEQ ID NO: 1274332 - RNA, 19 nt, Artificial Sequence
  Description of Artificial Sequence: Synthetic oligonucleotide
  Sense strand starting at position 2766 of SEQ ID NO: 1241461
gugauuuauucugagggau

SEQ ID NO: 1274333 - RNA, 19 nt, Artificial Sequence
  Description of Artificial Sequence: Synthetic oligonucleotide
  Antisense strand to SEQ ID NO: 1274332
aucccucagaauaaaucac

SEQ ID NO: 1274334 - RNA, 19 nt, Artificial Sequence
  Description of Artificial Sequence: Synthetic oligonucleotide
  Sense strand starting at position 2768 of SEQ ID NO: 1241461
gauuuauucugagggauuc

SEQ ID NO: 1274335 - RNA, 19 nt, Artificial Sequence
  Description of Artificial Sequence: Synthetic oligonucleotide
  Antisense strand to SEQ ID NO: 1274334
gaaucccucagaauaaauc

SEQ ID NO: 1274336 - RNA, 19 nt, Artificial Sequence
  Description of Artificial Sequence: Synthetic oligonucleotide
  Sense strand starting at position 2796 of SEQ ID NO: 1241461
agcagaacucaguauauac

SEQ ID NO: 1274337 - RNA, 19 nt, Artificial Sequence
  Description of Artificial Sequence: Synthetic oligonucleotide
  Antisense strand to SEQ ID NO: 1274336
guauauacugaguucugcu

SEQ ID NO: 1274338 - RNA, 19 nt, Artificial Sequence
  Description of Artificial Sequence: Synthetic oligonucleotide
  Sense strand starting at position 2855 of SEQ ID NO: 1241461
acuugauuguaaguauuac

SEQ ID NO: 1274339 - RNA, 19 nt, Artificial Sequence
  Description of Artificial Sequence: Synthetic oligonucleotide
  Antisense strand to SEQ ID NO: 1274338
guaauacuuacaaucaagu

SEQ ID NO: 1274340 - RNA, 19 nt, Artificial Sequence
  Description of Artificial Sequence: Synthetic oligonucleotide
  Sense strand starting at position 3261 of SEQ ID NO: 1241461
ggccuagaauucuuggaga

SEQ ID NO: 1274341 - RNA, 19 nt, Artificial Sequence
  Description of Artificial Sequence: Synthetic oligonucleotide
  Antisense strand to SEQ ID NO: 1274340
ucuccaagaauucuaggcc

SEQ ID NO: 1274342 - RNA, 19 nt, Artificial Sequence
  Description of Artificial Sequence: Synthetic oligonucleotide
  Sense strand starting at position 3306 of SEQ ID NO: 1241461
ccgugacagcauuacuaga

SEQ ID NO: 1274343 - RNA, 19 nt, Artificial Sequence
  Description of Artificial Sequence: Synthetic oligonucleotide
  Antisense strand to SEQ ID NO: 1274342
ucuaguaaugcugucacgg

SEQ ID NO: 1274344 - RNA, 19 nt, Artificial Sequence
  Description of Artificial Sequence: Synthetic oligonucleotide
  Sense strand starting at position 156 of SEQ ID NO: 1241462
auccaaauugagcgauauu

SEQ ID NO: 1274345 - RNA, 19 nt, Artificial Sequence
  Description of Artificial Sequence: Synthetic oligonucleotide
  Antisense strand to SEQ ID NO: 1274344
aauaucgcucaauuuggau

SEQ ID NO: 1274346 - RNA, 19 nt, Artificial Sequence
  Description of Artificial Sequence: Synthetic oligonucleotide
  Sense strand starting at position 159 of SEQ ID NO: 1241462
caaauugagcgauauucug

SEQ ID NO: 1274347 - RNA, 19 nt, Artificial Sequence
  Description of Artificial Sequence: Synthetic oligonucleotide
  Antisense strand to SEQ ID NO: 1274346
cagaauaucgcucaauuug

SEQ ID NO: 1274348 - RNA, 19 nt, Artificial Sequence
  Description of Artificial Sequence: Synthetic oligonucleotide
  Sense strand starting at position 319 of SEQ ID NO: 1241462
uacaauuggugauucuuga

SEQ ID NO: 1274349 - RNA, 19 nt, Artificial Sequence
  Description of Artificial Sequence: Synthetic oligonucleotide
  Antisense strand to SEQ ID NO: 1274348
ucaagaaucaccaauugua

SEQ ID NO: 1274350 - RNA, 19 nt, Artificial Sequence
  Description of Artificial Sequence: Synthetic oligonucleotide
  Sense strand starting at position 326 of SEQ ID NO: 1241462
ggugauucuugauuggaua

SEQ ID NO: 1274351 - RNA, 19 nt, Artificial Sequence
  Description of Artificial Sequence: Synthetic oligonucleotide
  Antisense strand to SEQ ID NO: 1274350
uauccaaucaagaaucacc

SEQ ID NO: 1274352 - RNA, 19 nt, Artificial Sequence
  Description of Artificial Sequence: Synthetic oligonucleotide
  Sense strand starting at position 327 of SEQ ID NO: 1241462
gugauucuugauuggauag

SEQ ID NO: 1274353 - RNA, 19 nt, Artificial Sequence
  Description of Artificial Sequence: Synthetic oligonucleotide
  Antisense strand to SEQ ID NO: 1274352
cuauccaaucaagaaucac

SEQ ID NO: 1274354 - RNA, 19 nt, Artificial Sequence
  Description of Artificial Sequence: Synthetic oligonucleotide
  Sense strand starting at position 329 of SEQ ID NO: 1241462
gauucuugauuggauagaa

SEQ ID NO: 1274355 - RNA, 19 nt, Artificial Sequence
  Description of Artificial Sequence: Synthetic oligonucleotide
  Antisense strand to SEQ ID NO: 1274354
uucuauccaaucaagaauc

SEQ ID NO: 1274356 - RNA, 19 nt, Artificial Sequence
  Description of Artificial Sequence: Synthetic oligonucleotide
  Sense strand starting at position 364 of SEQ ID NO: 1241462
uaacacauguuauugggau

SEQ ID NO: 1274357 - RNA, 19 nt, Artificial Sequence
  Description of Artificial Sequence: Synthetic oligonucleotide
  Antisense strand to SEQ ID NO: 1274356
aucccaauaacauguguua

SEQ ID NO: 1274358 - RNA, 19 nt, Artificial Sequence
  Description of Artificial Sequence: Synthetic oligonucleotide
  Sense strand starting at position 395 of SEQ ID NO: 1241462
ugaaauauggacuguguau

SEQ ID NO: 1274359 - RNA, 19 nt, Artificial Sequence
  Description of Artificial Sequence: Synthetic oligonucleotide
  Antisense strand to SEQ ID NO: 1274358
auacacaguccauauuuca

SEQ ID NO: 1274360 - RNA, 19 nt, Artificial Sequence
  Description of Artificial Sequence: Synthetic oligonucleotide
  Sense strand starting at position 397 of SEQ ID NO: 1241462
aaauauggacuguguauca

SEQ ID NO: 1274361 - RNA, 19 nt, Artificial Sequence
  Description of Artificial Sequence: Synthetic oligonucleotide
  Antisense strand to SEQ ID NO: 1274360
ugauacacaguccauauuu

SEQ ID NO: 1274362 - RNA, 19 nt, Artificial Sequence
  Description of Artificial Sequence: Synthetic oligonucleotide
  Sense strand starting at position 407 of SEQ ID NO: 1241462
uguguaucagaguauugua

SEQ ID NO: 1274363 - RNA, 19 nt, Artificial Sequence
  Description of Artificial Sequence: Synthetic oligonucleotide
  Antisense strand to SEQ ID NO: 1274362
uacaauacucugauacaca

SEQ ID NO: 1274364 - RNA, 19 nt, Artificial Sequence
  Description of Artificial Sequence: Synthetic oligonucleotide
  Sense strand starting at position 441 of SEQ ID NO: 1241462
cuaaauguguuauuuguac

SEQ ID NO: 1274365 - RNA, 19 nt, Artificial Sequence
  Description of Artificial Sequence: Synthetic oligonucleotide
  Antisense strand to SEQ ID NO: 1274364
guacaaauaacacauuuag

SEQ ID NO: 1274366 - RNA, 19 nt, Artificial Sequence
  Description of Artificial Sequence: Synthetic oligonucleotide
  Sense strand starting at position 460 of SEQ ID NO: 1241462
ugugaugauguaggagaau

SEQ ID NO: 1274367 - RNA, 19 nt, Artificial Sequence
  Description of Artificial Sequence: Synthetic oligonucleotide
  Antisense strand to SEQ ID NO: 1274366
auucuccuacaucaucaca

SEQ ID NO: 1274368 - RNA, 19 nt, Artificial Sequence
  Description of Artificial Sequence: Synthetic oligonucleotide
  Sense strand starting at position 483 of SEQ ID NO: 1241462
uuguucuuggcagauaacu

SEQ ID NO: 1274369 - RNA, 19 nt, Artificial Sequence
  Description of Artificial Sequence: Synthetic oligonucleotide
  Antisense strand to SEQ ID NO: 1274368
aguuaucugccaagaacaa

SEQ ID NO: 1274370 - RNA, 19 nt, Artificial Sequence
  Description of Artificial Sequence: Synthetic oligonucleotide
  Sense strand starting at position 501 of SEQ ID NO: 1241462
ugcugaaagaaguggugaa

SEQ ID NO: 1274371 - RNA, 19 nt, Artificial Sequence
  Description of Artificial Sequence: Synthetic oligonucleotide
  Antisense strand to SEQ ID NO: 1274370
uucaccacuucuuucagca

SEQ ID NO: 1274372 - RNA, 19 nt, Artificial Sequence
  Description of Artificial Sequence: Synthetic oligonucleotide
  Sense strand starting at position 502 of SEQ ID NO: 1241462
gcugaaagaaguggugaau

SEQ ID NO: 1274373 - RNA, 19 nt, Artificial Sequence
  Description of Artificial Sequence: Synthetic oligonucleotide
  Antisense strand to SEQ ID NO: 1274372
auucaccacuucuuucagc

SEQ ID NO: 1274374 - RNA, 19 nt, Artificial Sequence
  Description of Artificial Sequence: Synthetic oligonucleotide
  Sense strand starting at position 514 of SEQ ID NO: 1241462
ggugaauuauuaguagucu

SEQ ID NO: 1274375 - RNA, 19 nt, Artificial Sequence
  Description of Artificial Sequence: Synthetic oligonucleotide
  Antisense strand to SEQ ID NO: 1274374
agacuacuaauaauucacc

SEQ ID NO: 1274376 - RNA, 19 nt, Artificial Sequence
  Description of Artificial Sequence: Synthetic oligonucleotide
  Sense strand starting at position 520 of SEQ ID NO: 1241462
uuauuaguagucuacaacu

SEQ ID NO: 1274377 - RNA, 19 nt, Artificial Sequence
  Description of Artificial Sequence: Synthetic oligonucleotide
  Antisense strand to SEQ ID NO: 1274376
aguuguagacuacuaauaa

SEQ ID NO: 1274378 - RNA, 19 nt, Artificial Sequence
  Description of Artificial Sequence: Synthetic oligonucleotide
  Sense strand starting at position 637 of SEQ ID NO: 1241462
aagugaaggacggguuuau

SEQ ID NO: 1274379 - RNA, 19 nt, Artificial Sequence
  Description of Artificial Sequence: Synthetic oligonucleotide
  Antisense strand to SEQ ID NO: 1274378
auaaacccguccuucacuu

SEQ ID NO: 1274380 - RNA, 19 nt, Artificial Sequence
  Description of Artificial Sequence: Synthetic oligonucleotide
  Sense strand starting at position 763 of SEQ ID NO: 1241462
uagucugcacuguaaguaa

SEQ ID NO: 1274381 - RNA, 19 nt, Artificial Sequence
  Description of Artificial Sequence: Synthetic oligonucleotide
  Antisense strand to SEQ ID NO: 1274380
uuacuuacagugcagacua

SEQ ID NO: 1274382 - RNA, 19 nt, Artificial Sequence
  Description of Artificial Sequence: Synthetic oligonucleotide
  Sense strand starting at position 820 of SEQ ID NO: 1241462
agcuuuguagugcauuaau

SEQ ID NO: 1274383 - RNA, 19 nt, Artificial Sequence
  Description of Artificial Sequence: Synthetic oligonucleotide
  Antisense strand to SEQ ID NO: 1274382
auuaaugcacuacaaagcu

SEQ ID NO: 1274384 - RNA, 19 nt, Artificial Sequence
  Description of Artificial Sequence: Synthetic oligonucleotide
  Sense strand starting at position 823 of SEQ ID NO: 1241462
uuuguagugcauuaaugaa

SEQ ID NO: 1274385 - RNA, 19 nt, Artificial Sequence
  Description of Artificial Sequence: Synthetic oligonucleotide
  Antisense strand to SEQ ID NO: 1274384
uucauuaaugcacuacaaa

SEQ ID NO: 1274386 - RNA, 19 nt, Artificial Sequence
  Description of Artificial Sequence: Synthetic oligonucleotide
  Sense strand starting at position 890 of SEQ ID NO: 1241462
ugccuuguaaagggugaau

SEQ ID NO: 1274387 - RNA, 19 nt, Artificial Sequence
  Description of Artificial Sequence: Synthetic oligonucleotide
  Antisense strand to SEQ ID NO: 1274386
auucacccuuuacaaggca

SEQ ID NO: 1274388 - RNA, 19 nt, Artificial Sequence
  Description of Artificial Sequence: Synthetic oligonucleotide
  Sense strand starting at position 892 of SEQ ID NO: 1241462
ccuuguaaagggugaauga

SEQ ID NO: 1274389 - RNA, 19 nt, Artificial Sequence
  Description of Artificial Sequence: Synthetic oligonucleotide
  Antisense strand to SEQ ID NO: 1274388
ucauucacccuuuacaagg

SEQ ID NO: 1274390 - RNA, 19 nt, Artificial Sequence
  Description of Artificial Sequence: Synthetic oligonucleotide
  Sense strand starting at position 899 of SEQ ID NO: 1241462
aagggugaaugagauuaau

SEQ ID NO: 1274391 - RNA, 19 nt, Artificial Sequence
  Description of Artificial Sequence: Synthetic oligonucleotide
  Antisense strand to SEQ ID NO: 1274390
auuaaucucauucacccuu

SEQ ID NO: 1274392 - RNA, 19 nt, Artificial Sequence
  Description of Artificial Sequence: Synthetic oligonucleotide
  Sense strand starting at position 1052 of SEQ ID NO: 1241462
acaauuauaucuguacagu

SEQ ID NO: 1274393 - RNA, 19 nt, Artificial Sequence
  Description of Artificial Sequence: Synthetic oligonucleotide
  Antisense strand to SEQ ID NO: 1274392
acuguacagauauaauugu

SEQ ID NO: 1274394 - RNA, 19 nt, Artificial Sequence
  Description of Artificial Sequence: Synthetic oligonucleotide
  Sense strand starting at position 1103 of SEQ ID NO: 1241462
uugcacuuggauugucaau

SEQ ID NO: 1274395 - RNA, 19 nt, Artificial Sequence
  Description of Artificial Sequence: Synthetic oligonucleotide
  Antisense strand to SEQ ID NO: 1274394
auugacaauccaagugcaa

SEQ ID NO: 1274396 - RNA, 19 nt, Artificial Sequence
  Description of Artificial Sequence: Synthetic oligonucleotide
  Sense strand starting at position 1105 of SEQ ID NO: 1241462
gcacuuggauugucaauaa

SEQ ID NO: 1274397 - RNA, 19 nt, Artificial Sequence
  Description of Artificial Sequence: Synthetic oligonucleotide
  Antisense strand to SEQ ID NO: 1274396
uuauugacaauccaagugc

SEQ ID NO: 1274398 - RNA, 19 nt, Artificial Sequence
  Description of Artificial Sequence: Synthetic oligonucleotide
  Sense strand starting at position 1888 of SEQ ID NO: 1241462
gguggucccucgaaggaga

SEQ ID NO: 1274399 - RNA, 19 nt, Artificial Sequence
  Description of Artificial Sequence: Synthetic oligonucleotide
  Antisense strand to SEQ ID NO: 1274398
ucuccuucgagggaccacc

SEQ ID NO: 1274400 - RNA, 19 nt, Artificial Sequence
  Description of Artificial Sequence: Synthetic oligonucleotide
  Sense strand starting at position 2076 of SEQ ID NO: 1241462
auguaaauacugugcaaau

SEQ ID NO: 1274401 - RNA, 19 nt, Artificial Sequence
  Description of Artificial Sequence: Synthetic oligonucleotide
  Antisense strand to SEQ ID NO: 1274400
auuugcacaguauuuacau

SEQ ID NO: 1274402 - RNA, 19 nt, Artificial Sequence
  Description of Artificial Sequence: Synthetic oligonucleotide
  Sense strand starting at position 2178 of SEQ ID NO: 1241462
gacgauagccuugagcuuu

SEQ ID NO: 1274403 - RNA, 19 nt, Artificial Sequence
  Description of Artificial Sequence: Synthetic oligonucleotide
  Antisense strand to SEQ ID NO: 1274402
aaagcucaaggcuaucguc

SEQ ID NO: 1274404 - RNA, 19 nt, Artificial Sequence
  Description of Artificial Sequence: Synthetic oligonucleotide
  Sense strand starting at position 2605 of SEQ ID NO: 1241462
gugacugaguucuugaaac

SEQ ID NO: 1274405 - RNA, 19 nt, Artificial Sequence
  Description of Artificial Sequence: Synthetic oligonucleotide
  Antisense strand to SEQ ID NO: 1274404
guuucaagaacucagucac

SEQ ID NO: 1274406 - RNA, 19 nt, Artificial Sequence
  Description of Artificial Sequence: Synthetic oligonucleotide
  Sense strand starting at position 2707 of SEQ ID NO: 1241462
uucucuggacccugacaaa

SEQ ID NO: 1274407 - RNA, 19 nt, Artificial Sequence
  Description of Artificial Sequence: Synthetic oligonucleotide
  Antisense strand to SEQ ID NO: 1274406
uuugucaggguccagagaa

SEQ ID NO: 1274408 - RNA, 19 nt, Artificial Sequence
  Description of Artificial Sequence: Synthetic oligonucleotide
  Sense strand starting at position 2741 of SEQ ID NO: 1241462
gcauacuauguauggguau

SEQ ID NO: 1274409 - RNA, 19 nt, Artificial Sequence
  Description of Artificial Sequence: Synthetic oligonucleotide
  Antisense strand to SEQ ID NO: 1274408
auacccauacauaguaugc

SEQ ID NO: 1274410 - RNA, 19 nt, Artificial Sequence
  Description of Artificial Sequence: Synthetic oligonucleotide
  Sense strand starting at position 2747 of SEQ ID NO: 1241462
uauguauggguauaguauu

SEQ ID NO: 1274411 - RNA, 19 nt, Artificial Sequence
  Description of Artificial Sequence: Synthetic oligonucleotide
  Antisense strand to SEQ ID NO: 1274410
aauacuauacccauacaua

SEQ ID NO: 1274412 - RNA, 19 nt, Artificial Sequence
  Description of Artificial Sequence: Synthetic oligonucleotide
  Sense strand starting at position 2766 of SEQ ID NO: 1241462
uuaugaagcucauuagauu

SEQ ID NO: 1274413 - RNA, 19 nt, Artificial Sequence
  Description of Artificial Sequence: Synthetic oligonucleotide
  Antisense strand to SEQ ID NO: 1274412
aaucuaaugagcuucauaa

SEQ ID NO: 1274414 - RNA, 19 nt, Artificial Sequence
  Description of Artificial Sequence: Synthetic oligonucleotide
  Sense strand starting at position 2908 of SEQ ID NO: 1241462
uugguuuaagacugaauug

SEQ ID NO: 1274415 - RNA, 19 nt, Artificial Sequence
  Description of Artificial Sequence: Synthetic oligonucleotide
  Antisense strand to SEQ ID NO: 1274414
caauucagucuuaaaccaa

SEQ ID NO: 1274416 - RNA, 19 nt, Artificial Sequence
  Description of Artificial Sequence: Synthetic oligonucleotide
  Sense strand starting at position 2917 of SEQ ID NO: 1241462
gacugaauuggccaggugu

SEQ ID NO: 1274417 - RNA, 19 nt, Artificial Sequence
  Description of Artificial Sequence: Synthetic oligonucleotide
  Antisense strand to SEQ ID NO: 1274416
acaccuggccaauucaguc

SEQ ID NO: 1274418 - RNA, 19 nt, Artificial Sequence
  Description of Artificial Sequence: Synthetic oligonucleotide
  Sense strand starting at position 3220 of SEQ ID NO: 1241462
ggcgcuauaguuccagcua

SEQ ID NO: 1274419 - RNA, 19 nt, Artificial Sequence
  Description of Artificial Sequence: Synthetic oligonucleotide
  Antisense strand to SEQ ID NO: 1274418
uagcuggaacuauagcgcc

SEQ ID NO: 1274420 - RNA, 19 nt, Artificial Sequence
  Description of Artificial Sequence: Synthetic oligonucleotide
  Sense strand starting at position 3428 of SEQ ID NO: 1241462
guaucuugagaccaggagu

SEQ ID NO: 1274421 - RNA, 19 nt, Artificial Sequence
  Description of Artificial Sequence: Synthetic oligonucleotide
  Antisense strand to SEQ ID NO: 1274420
acuccuggucucaagauac

SEQ ID NO: 1274422 - RNA, 19 nt, Artificial Sequence
  Description of Artificial Sequence: Synthetic oligonucleotide
  Sense strand starting at position 3451 of SEQ ID NO: 1241462
ggcucagugagcuaugaua

SEQ ID NO: 1274423 - RNA, 19 nt, Artificial Sequence
  Description of Artificial Sequence: Synthetic oligonucleotide
  Antisense strand to SEQ ID NO: 1274422
uaucauagcucacugagcc

SEQ ID NO: 1274424 - RNA, 19 nt, Artificial Sequence
  Description of Artificial Sequence: Synthetic oligonucleotide
  Sense strand starting at position 227 of SEQ ID NO: 1241463
uuucuuggaaugggugaua

SEQ ID NO: 1274425 - RNA, 19 nt, Artificial Sequence
  Description of Artificial Sequence: Synthetic oligonucleotide
  Antisense strand to SEQ ID NO: 1274424
uaucacccauuccaagaaa

SEQ ID NO: 1274426 - RNA, 19 nt, Artificial Sequence
  Description of Artificial Sequence: Synthetic oligonucleotide
  Sense strand starting at position 232 of SEQ ID NO: 1241463
uggaaugggugauaaauuu

SEQ ID NO: 1274427 - RNA, 19 nt, Artificial Sequence
  Description of Artificial Sequence: Synthetic oligonucleotide
  Antisense strand to SEQ ID NO: 1274426
aaauuuaucacccauucca

SEQ ID NO: 1274428 - RNA, 19 nt, Artificial Sequence
  Description of Artificial Sequence: Synthetic oligonucleotide
  Sense strand starting at position 633 of SEQ ID NO: 1241463
uagcuauguccacagggau

SEQ ID NO: 1274429 - RNA, 19 nt, Artificial Sequence
  Description of Artificial Sequence: Synthetic oligonucleotide
  Antisense strand to SEQ ID NO: 1274428
aucccuguggacauagcua

SEQ ID NO: 1274430 - RNA, 19 nt, Artificial Sequence
  Description of Artificial Sequence: Synthetic oligonucleotide
  Sense strand starting at position 636 of SEQ ID NO: 1241463
cuauguccacagggaucua

SEQ ID NO: 1274431 - RNA, 19 nt, Artificial Sequence
  Description of Artificial Sequence: Synthetic oligonucleotide
  Antisense strand to SEQ ID NO: 1274430
uagaucccuguggacauag

SEQ ID NO: 1274432 - RNA, 19 nt, Artificial Sequence
  Description of Artificial Sequence: Synthetic oligonucleotide
  Sense strand starting at position 743 of SEQ ID NO: 1241463
acacgucauuuguuccuau

SEQ ID NO: 1274433 - RNA, 19 nt, Artificial Sequence
  Description of Artificial Sequence: Synthetic oligonucleotide
  Antisense strand to SEQ ID NO: 1274432
auaggaacaaaugacgugu

SEQ ID NO: 1274434 - RNA, 19 nt, Artificial Sequence
  Description of Artificial Sequence: Synthetic oligonucleotide
  Sense strand starting at position 762 of SEQ ID NO: 1241463
ugcauaauuuaacagguua

SEQ ID NO: 1274435 - RNA, 19 nt, Artificial Sequence
  Description of Artificial Sequence: Synthetic oligonucleotide
  Antisense strand to SEQ ID NO: 1274434
uaaccuguuaaauuaugca

SEQ ID NO: 1274436 - RNA, 19 nt, Artificial Sequence
  Description of Artificial Sequence: Synthetic oligonucleotide
  Sense strand starting at position 1052 of SEQ ID NO: 1241463
accuacauuccguacacau

SEQ ID NO: 1274437 - RNA, 19 nt, Artificial Sequence
  Description of Artificial Sequence: Synthetic oligonucleotide
  Antisense strand to SEQ ID NO: 1274436
auguguacggaauguaggu

SEQ ID NO: 1274438 - RNA, 19 nt, Artificial Sequence
  Description of Artificial Sequence: Synthetic oligonucleotide
  Sense strand starting at position 1054 of SEQ ID NO: 1241463
cuacauuccguacacauua

SEQ ID NO: 1274439 - RNA, 19 nt, Artificial Sequence
  Description of Artificial Sequence: Synthetic oligonucleotide
  Antisense strand to SEQ ID NO: 1274438
uaauguguacggaauguag

SEQ ID NO: 1274440 - RNA, 19 nt, Artificial Sequence
  Description of Artificial Sequence: Synthetic oligonucleotide
  Sense strand starting at position 1128 of SEQ ID NO: 1241463
cuacaaagaucguuuaaag

SEQ ID NO: 1274441 - RNA, 19 nt, Artificial Sequence
  Description of Artificial Sequence: Synthetic oligonucleotide
  Antisense strand to SEQ ID NO: 1274440
cuuuaaacgaucuuuguag

SEQ ID NO: 1274442 - RNA, 19 nt, Artificial Sequence
  Description of Artificial Sequence: Synthetic oligonucleotide
  Sense strand starting at position 1153 of SEQ ID NO: 1241463
ucauuaaacguagguuaua

SEQ ID NO: 1274443 - RNA, 19 nt, Artificial Sequence
  Description of Artificial Sequence: Synthetic oligonucleotide
  Antisense strand to SEQ ID NO: 1274442
uauaaccuacguuuaauga

SEQ ID NO: 1274444 - RNA, 19 nt, Artificial Sequence
  Description of Artificial Sequence: Synthetic oligonucleotide
  Sense strand starting at position 1154 of SEQ ID NO: 1241463
cauuaaacguagguuauaa

SEQ ID NO: 1274445 - RNA, 19 nt, Artificial Sequence
  Description of Artificial Sequence: Synthetic oligonucleotide
  Antisense strand to SEQ ID NO: 1274444
uuauaaccuacguuuaaug

SEQ ID NO: 1274446 - RNA, 19 nt, Artificial Sequence
  Description of Artificial Sequence: Synthetic oligonucleotide
  Sense strand starting at position 1291 of SEQ ID NO: 1241463
cgcaaugagcagcagaaua

SEQ ID NO: 1274447 - RNA, 19 nt, Artificial Sequence
  Description of Artificial Sequence: Synthetic oligonucleotide
  Antisense strand to SEQ ID NO: 1274446
uauucugcugcucauugcg

SEQ ID NO: 1274448 - RNA, 19 nt, Artificial Sequence
  Description of Artificial Sequence: Synthetic oligonucleotide
  Sense strand starting at position 1329 of SEQ ID NO: 1241463
gaggaacgcugacuacauu

SEQ ID NO: 1274449 - RNA, 19 nt, Artificial Sequence
  Description of Artificial Sequence: Synthetic oligonucleotide
  Antisense strand to SEQ ID NO: 1274448
aauguagucagcguuccuc

SEQ ID NO: 1274450 - RNA, 19 nt, Artificial Sequence
  Description of Artificial Sequence: Synthetic oligonucleotide
  Sense strand starting at position 1363 of SEQ ID NO: 1241463
aagcguucccucgccgauu

SEQ ID NO: 1274451 - RNA, 19 nt, Artificial Sequence
  Description of Artificial Sequence: Synthetic oligonucleotide
  Antisense strand to SEQ ID NO: 1274450
aaucggcgagggaacgcuu

SEQ ID NO: 1274452 - RNA, 19 nt, Artificial Sequence
  Description of Artificial Sequence: Synthetic oligonucleotide
  Sense strand starting at position 1544 of SEQ ID NO: 1241463
agcguugcuccgagggaca

SEQ ID NO: 1274453 - RNA, 19 nt, Artificial Sequence
  Description of Artificial Sequence: Synthetic oligonucleotide
  Antisense strand to SEQ ID NO: 1274452
ugucccucggagcaacgcu

SEQ ID NO: 1274454 - RNA, 19 nt, Artificial Sequence
  Description of Artificial Sequence: Synthetic oligonucleotide
  Sense strand starting at position 1703 of SEQ ID NO: 1241463
cucccagggaccuguugau

SEQ ID NO: 1274455 - RNA, 19 nt, Artificial Sequence
  Description of Artificial Sequence: Synthetic oligonucleotide
  Antisense strand to SEQ ID NO: 1274454
aucaacaggucccugggag

SEQ ID NO: 1274456 - RNA, 19 nt, Artificial Sequence
  Description of Artificial Sequence: Synthetic oligonucleotide
  Sense strand starting at position 1709 of SEQ ID NO: 1241463
gggaccuguugauuaagau

SEQ ID NO: 1274457 - RNA, 19 nt, Artificial Sequence
  Description of Artificial Sequence: Synthetic oligonucleotide
  Antisense strand to SEQ ID NO: 1274456
aucuuaaucaacagguccc

SEQ ID NO: 1274458 - RNA, 19 nt, Artificial Sequence
  Description of Artificial Sequence: Synthetic oligonucleotide
  Sense strand starting at position 2112 of SEQ ID NO: 1241463
gagagagcgcccgcucauu

SEQ ID NO: 1274459 - RNA, 19 nt, Artificial Sequence
  Description of Artificial Sequence: Synthetic oligonucleotide
  Antisense strand to SEQ ID NO: 1274458
aaugagcgggcgcucucuc

SEQ ID NO: 1274460 - RNA, 19 nt, Artificial Sequence
  Description of Artificial Sequence: Synthetic oligonucleotide
  Sense strand starting at position 2287 of SEQ ID NO: 1241463
ggcucuugucucuggauga

SEQ ID NO: 1274461 - RNA, 19 nt, Artificial Sequence
  Description of Artificial Sequence: Synthetic oligonucleotide
  Antisense strand to SEQ ID NO: 1274460
ucauccagagacaagagcc

SEQ ID NO: 1274462 - RNA, 19 nt, Artificial Sequence
  Description of Artificial Sequence: Synthetic oligonucleotide
  Sense strand starting at position 2334 of SEQ ID NO: 1241463
ugaagagauuccucauguc

SEQ ID NO: 1274463 - RNA, 19 nt, Artificial Sequence
  Description of Artificial Sequence: Synthetic oligonucleotide
  Antisense strand to SEQ ID NO: 1274462
gacaugaggaaucucuuca

SEQ ID NO: 1274464 - RNA, 19 nt, Artificial Sequence
  Description of Artificial Sequence: Synthetic oligonucleotide
  Sense strand starting at position 2356 of SEQ ID NO: 1241463
ucaaguuagucacccaauc

SEQ ID NO: 1274465 - RNA, 19 nt, Artificial Sequence
  Description of Artificial Sequence: Synthetic oligonucleotide
  Antisense strand to SEQ ID NO: 1274464
gauugggugacuaacuuga

SEQ ID NO: 1274466 - RNA, 19 nt, Artificial Sequence
  Description of Artificial Sequence: Synthetic oligonucleotide
  Sense strand starting at position 2499 of SEQ ID NO: 1241463
agaacuauuucccagaagu

SEQ ID NO: 1274467 - RNA, 19 nt, Artificial Sequence
  Description of Artificial Sequence: Synthetic oligonucleotide
  Antisense strand to SEQ ID NO: 1274466
acuucugggaaauaguucu

SEQ ID NO: 1274468 - RNA, 19 nt, Artificial Sequence
  Description of Artificial Sequence: Synthetic oligonucleotide
  Sense strand starting at position 2647 of SEQ ID NO: 1241463
ggaggacguucuaaggaga

SEQ ID NO: 1274469 - RNA, 19 nt, Artificial Sequence
  Description of Artificial Sequence: Synthetic oligonucleotide
  Antisense strand to SEQ ID NO: 1274468
ucuccuuagaacguccucc

SEQ ID NO: 1274470 - RNA, 19 nt, Artificial Sequence
  Description of Artificial Sequence: Synthetic oligonucleotide
  Sense strand starting at position 2708 of SEQ ID NO: 1241463
gauggucucugucuugaca

SEQ ID NO: 1274471 - RNA, 19 nt, Artificial Sequence
  Description of Artificial Sequence: Synthetic oligonucleotide
  Antisense strand to SEQ ID NO: 1274470
ugucaagacagagaccauc

SEQ ID NO: 1274472 - RNA, 19 nt, Artificial Sequence
  Description of Artificial Sequence: Synthetic oligonucleotide
  Sense strand starting at position 2711 of SEQ ID NO: 1241463
ggucucugucuugacagua

SEQ ID NO: 1274473 - RNA, 19 nt, Artificial Sequence
  Description of Artificial Sequence: Synthetic oligonucleotide
  Antisense strand to SEQ ID NO: 1274472
uacugucaagacagagacc

SEQ ID NO: 1274474 - RNA, 19 nt, Artificial Sequence
  Description of Artificial Sequence: Synthetic oligonucleotide
  Sense strand starting at position 2761 of SEQ ID NO: 1241463
acuugcaagguuuguuaau

SEQ ID NO: 1274475 - RNA, 19 nt, Artificial Sequence
  Description of Artificial Sequence: Synthetic oligonucleotide
  Antisense strand to SEQ ID NO: 1274474
auuaacaaaccuugcaagu

SEQ ID NO: 1274476 - RNA, 19 nt, Artificial Sequence
  Description of Artificial Sequence: Synthetic oligonucleotide
  Sense strand starting at position 2789 of SEQ ID NO: 1241463
cuucuaugaggccaaacua

SEQ ID NO: 1274477 - RNA, 19 nt, Artificial Sequence
  Description of Artificial Sequence: Synthetic oligonucleotide
  Antisense strand to SEQ ID NO: 1274476
uaguuuggccucauagaag

SEQ ID NO: 1274478 - RNA, 19 nt, Artificial Sequence
  Description of Artificial Sequence: Synthetic oligonucleotide
  Sense strand starting at position 2800 of SEQ ID NO: 1241463
ccaaacuaugccugugacu

SEQ ID NO: 1274479 - RNA, 19 nt, Artificial Sequence
  Description of Artificial Sequence: Synthetic oligonucleotide
  Antisense strand to SEQ ID NO: 1274478
agucacaggcauaguuugg

SEQ ID NO: 1274480 - RNA, 19 nt, Artificial Sequence
  Description of Artificial Sequence: Synthetic oligonucleotide
  Sense strand starting at position 2860 of SEQ ID NO: 1241463
cucaaagccuucguauaug

SEQ ID NO: 1274481 - RNA, 19 nt, Artificial Sequence
  Description of Artificial Sequence: Synthetic oligonucleotide
  Antisense strand to SEQ ID NO: 1274480
cauauacgaaggcuuugag

SEQ ID NO: 1274482 - RNA, 19 nt, Artificial Sequence
  Description of Artificial Sequence: Synthetic oligonucleotide
  Sense strand starting at position 3009 of SEQ ID NO: 1241463
uguggugucccucacuaag

SEQ ID NO: 1274483 - RNA, 19 nt, Artificial Sequence
  Description of Artificial Sequence: Synthetic oligonucleotide
  Antisense strand to SEQ ID NO: 1274482
cuuagugagggacaccaca

SEQ ID NO: 1274484 - RNA, 19 nt, Artificial Sequence
  Description of Artificial Sequence: Synthetic oligonucleotide
  Sense strand starting at position 3011 of SEQ ID NO: 1241463
uggugucccucacuaagga

SEQ ID NO: 1274485 - RNA, 19 nt, Artificial Sequence
  Description of Artificial Sequence: Synthetic oligonucleotide
  Antisense strand to SEQ ID NO: 1274484
uccuuagugagggacacca

SEQ ID NO: 1274486 - RNA, 19 nt, Artificial Sequence
  Description of Artificial Sequence: Synthetic oligonucleotide
  Sense strand starting at position 3032 of SEQ ID NO: 1241463
cugugauggccugaacgaa

SEQ ID NO: 1274487 - RNA, 19 nt, Artificial Sequence
  Description of Artificial Sequence: Synthetic oligonucleotide
  Antisense strand to SEQ ID NO: 1274486
uucguucaggccaucacag

SEQ ID NO: 1274488 - RNA, 19 nt, Artificial Sequence
  Description of Artificial Sequence: Synthetic oligonucleotide
  Sense strand starting at position 3129 of SEQ ID NO: 1241463
cagcauucuguccaagugu

SEQ ID NO: 1274489 - RNA, 19 nt, Artificial Sequence
  Description of Artificial Sequence: Synthetic oligonucleotide
  Antisense strand to SEQ ID NO: 1274488
acacuuggacagaaugcug

SEQ ID NO: 1274490 - RNA, 19 nt, Artificial Sequence
  Description of Artificial Sequence: Synthetic oligonucleotide
  Sense strand starting at position 3136 of SEQ ID NO: 1241463
cuguccaaguguuuaauaa

SEQ ID NO: 1274491 - RNA, 19 nt, Artificial Sequence
  Description of Artificial Sequence: Synthetic oligonucleotide
  Antisense strand to SEQ ID NO: 1274490
uuauuaaacacuuggacag

SEQ ID NO: 1274492 - RNA, 19 nt, Artificial Sequence
  Description of Artificial Sequence: Synthetic oligonucleotide
  Sense strand starting at position 3294 of SEQ ID NO: 1241463
ugccaugagaacuggugaa

SEQ ID NO: 1274493 - RNA, 19 nt, Artificial Sequence
  Description of Artificial Sequence: Synthetic oligonucleotide
  Antisense strand to SEQ ID NO: 1274492
uucaccaguucucauggca

SEQ ID NO: 1274494 - RNA, 19 nt, Artificial Sequence
  Description of Artificial Sequence: Synthetic oligonucleotide
  Sense strand starting at position 3306 of SEQ ID NO: 1241463
uggugaaaugccuaacuga

SEQ ID NO: 1274495 - RNA, 19 nt, Artificial Sequence
  Description of Artificial Sequence: Synthetic oligonucleotide
  Antisense strand to SEQ ID NO: 1274494
ucaguuaggcauuucacca

SEQ ID NO: 1274496 - RNA, 19 nt, Artificial Sequence
  Description of Artificial Sequence: Synthetic oligonucleotide
  Sense strand starting at position 3309 of SEQ ID NO: 1241463
ugaaaugccuaacugaaau

SEQ ID NO: 1274497 - RNA, 19 nt, Artificial Sequence
  Description of Artificial Sequence: Synthetic oligonucleotide
  Antisense strand to SEQ ID NO: 1274496
auuucaguuaggcauuuca

SEQ ID NO: 1274498 - RNA, 19 nt, Artificial Sequence
  Description of Artificial Sequence: Synthetic oligonucleotide
  Sense strand starting at position 3329 of SEQ ID NO: 1241463
cagauaaagucuccaggau

SEQ ID NO: 1274499 - RNA, 19 nt, Artificial Sequence
  Description of Artificial Sequence: Synthetic oligonucleotide
  Antisense strand to SEQ ID NO: 1274498
auccuggagacuuuaucug

SEQ ID NO: 1274500 - RNA, 19 nt, Artificial Sequence
  Description of Artificial Sequence: Synthetic oligonucleotide
  Sense strand starting at position 3768 of SEQ ID NO: 1241463
ccuccagcucgucaaugaa

SEQ ID NO: 1274501 - RNA, 19 nt, Artificial Sequence
  Description of Artificial Sequence: Synthetic oligonucleotide
  Antisense strand to SEQ ID NO: 1274500
uucauugacgagcuggagg

SEQ ID NO: 1274502 - RNA, 19 nt, Artificial Sequence
  Description of Artificial Sequence: Synthetic oligonucleotide
  Sense strand starting at position 3858 of SEQ ID NO: 1241463
gacuguccugugcaucaua

SEQ ID NO: 1274503 - RNA, 19 nt, Artificial Sequence
  Description of Artificial Sequence: Synthetic oligonucleotide
  Antisense strand to SEQ ID NO: 1274502
uaugaugcacaggacaguc

SEQ ID NO: 1274504 - RNA, 19 nt, Artificial Sequence
  Description of Artificial Sequence: Synthetic oligonucleotide
  Sense strand starting at position 2 of SEQ ID NO: 1241464
gaugcauggcccugaauac

SEQ ID NO: 1274505 - RNA, 19 nt, Artificial Sequence
  Description of Artificial Sequence: Synthetic oligonucleotide
  Antisense strand to SEQ ID NO: 1274504
guauucagggccaugcauc

SEQ ID NO: 1274506 - RNA, 19 nt, Artificial Sequence
  Description of Artificial Sequence: Synthetic oligonucleotide
  Sense strand starting at position 3 of SEQ ID NO: 1241464
augcauggcccugaauacu

SEQ ID NO: 1274507 - RNA, 19 nt, Artificial Sequence
  Description of Artificial Sequence: Synthetic oligonucleotide
  Antisense strand to SEQ ID NO: 1274506
aguauucagggccaugcau

SEQ ID NO: 1274508 - RNA, 19 nt, Artificial Sequence
  Description of Artificial Sequence: Synthetic oligonucleotide
  Sense strand starting at position 55 of SEQ ID NO: 1241464
ccaguuagacuuuaaguuc

SEQ ID NO: 1274509 - RNA, 19 nt, Artificial Sequence
  Description of Artificial Sequence: Synthetic oligonucleotide
  Antisense strand to SEQ ID NO: 1274508
gaacuuaaagucuaacugg

SEQ ID NO: 1274510 - RNA, 19 nt, Artificial Sequence
  Description of Artificial Sequence: Synthetic oligonucleotide
  Sense strand starting at position 62 of SEQ ID NO: 1241464
gacuuuaaguucuuugggu

SEQ ID NO: 1274511 - RNA, 19 nt, Artificial Sequence
  Description of Artificial Sequence: Synthetic oligonucleotide
  Antisense strand to SEQ ID NO: 1274510
acccaaagaacuuaaaguc

SEQ ID NO: 1274512 - RNA, 19 nt, Artificial Sequence
  Description of Artificial Sequence: Synthetic oligonucleotide
  Sense strand starting at position 199 of SEQ ID NO: 1241464
guuuacuuuccgcaaagaa

SEQ ID NO: 1274513 - RNA, 19 nt, Artificial Sequence
  Description of Artificial Sequence: Synthetic oligonucleotide
  Antisense strand to SEQ ID NO: 1274512
uucuuugcggaaaguaaac

SEQ ID NO: 1274514 - RNA, 19 nt, Artificial Sequence
  Description of Artificial Sequence: Synthetic oligonucleotide
  Sense strand starting at position 269 of SEQ ID NO: 1241464
gguguuauuuaccaggaag

SEQ ID NO: 1274515 - RNA, 19 nt, Artificial Sequence
  Description of Artificial Sequence: Synthetic oligonucleotide
  Antisense strand to SEQ ID NO: 1274514
cuuccugguaaauaacacc

SEQ ID NO: 1274516 - RNA, 19 nt, Artificial Sequence
  Description of Artificial Sequence: Synthetic oligonucleotide
  Sense strand starting at position 292 of SEQ ID NO: 1241464
accaauauuguguaugcca

SEQ ID NO: 1274517 - RNA, 19 nt, Artificial Sequence
  Description of Artificial Sequence: Synthetic oligonucleotide
  Antisense strand to SEQ ID NO: 1274516
uggcauacacaauauuggu

SEQ ID NO: 1274518 - RNA, 19 nt, Artificial Sequence
  Description of Artificial Sequence: Synthetic oligonucleotide
  Sense strand starting at position 521 of SEQ ID NO: 1241464
aguggaucacuugagcuaa

SEQ ID NO: 1274519 - RNA, 19 nt, Artificial Sequence
  Description of Artificial Sequence: Synthetic oligonucleotide
  Antisense strand to SEQ ID NO: 1274518
uuagcucaagugauccacu

SEQ ID NO: 1274520 - RNA, 19 nt, Artificial Sequence
  Description of Artificial Sequence: Synthetic oligonucleotide
  Sense strand starting at position 780 of SEQ ID NO: 1241464
agucauauguaauuccaga

SEQ ID NO: 1274521 - RNA, 19 nt, Artificial Sequence
  Description of Artificial Sequence: Synthetic oligonucleotide
  Antisense strand to SEQ ID NO: 1274520
ucuggaauuacauaugacu

SEQ ID NO: 1274522 - RNA, 19 nt, Artificial Sequence
  Description of Artificial Sequence: Synthetic oligonucleotide
  Sense strand starting at position 793 of SEQ ID NO: 1241464
uccagagucuuuccaauag

SEQ ID NO: 1274523 - RNA, 19 nt, Artificial Sequence
  Description of Artificial Sequence: Synthetic oligonucleotide
  Antisense strand to SEQ ID NO: 1274522
cuauuggaaagacucugga

SEQ ID NO: 1274524 - RNA, 19 nt, Artificial Sequence
  Description of Artificial Sequence: Synthetic oligonucleotide
  Sense strand starting at position 837 of SEQ ID NO: 1241464
ggcuucuuacaguaaauaa

SEQ ID NO: 1274525 - RNA, 19 nt, Artificial Sequence
  Description of Artificial Sequence: Synthetic oligonucleotide
  Antisense strand to SEQ ID NO: 1274524
uuauuuacuguaagaagcc

SEQ ID NO: 1274526 - RNA, 19 nt, Artificial Sequence
  Description of Artificial Sequence: Synthetic oligonucleotide
  Sense strand starting at position 959 of SEQ ID NO: 1241464
uguguugucaaggaggacu

SEQ ID NO: 1274527 - RNA, 19 nt, Artificial Sequence
  Description of Artificial Sequence: Synthetic oligonucleotide
  Antisense strand to SEQ ID NO: 1274526
aguccuccuugacaacaca

SEQ ID NO: 1274528 - RNA, 19 nt, Artificial Sequence
  Description of Artificial Sequence: Synthetic oligonucleotide
  Sense strand starting at position 970 of SEQ ID NO: 1241464
ggaggacuggccuauguuc

SEQ ID NO: 1274529 - RNA, 19 nt, Artificial Sequence
  Description of Artificial Sequence: Synthetic oligonucleotide
  Antisense strand to SEQ ID NO: 1274528
gaacauaggccaguccucc

SEQ ID NO: 1274530 - RNA, 19 nt, Artificial Sequence
  Description of Artificial Sequence: Synthetic oligonucleotide
  Sense strand starting at position 972 of SEQ ID NO: 1241464
aggacuggccuauguucua

SEQ ID NO: 1274531 - RNA, 19 nt, Artificial Sequence
  Description of Artificial Sequence: Synthetic oligonucleotide
  Antisense strand to SEQ ID NO: 1274530
uagaacauaggccaguccu

SEQ ID NO: 1274532 - RNA, 19 nt, Artificial Sequence
  Description of Artificial Sequence: Synthetic oligonucleotide
  Sense strand starting at position 1119 of SEQ ID NO: 1241464
cccuucuagggcuaauauu

SEQ ID NO: 1274533 - RNA, 19 nt, Artificial Sequence
  Description of Artificial Sequence: Synthetic oligonucleotide
  Antisense strand to SEQ ID NO: 1274532
aauauuagcccuagaaggg

SEQ ID NO: 1274534 - RNA, 19 nt, Artificial Sequence
  Description of Artificial Sequence: Synthetic oligonucleotide
  Sense strand starting at position 1233 of SEQ ID NO: 1241464
cgcuuauuucugcagcuuu

SEQ ID NO: 1274535 - RNA, 19 nt, Artificial Sequence
  Description of Artificial Sequence: Synthetic oligonucleotide
  Antisense strand to SEQ ID NO: 1274534
aaagcugcagaaauaagcg

SEQ ID NO: 1274536 - RNA, 19 nt, Artificial Sequence
  Description of Artificial Sequence: Synthetic oligonucleotide
  Sense strand starting at position 1441 of SEQ ID NO: 1241464
uuaccuuccuuagucgaaa

SEQ ID NO: 1274537 - RNA, 19 nt, Artificial Sequence
  Description of Artificial Sequence: Synthetic oligonucleotide
  Antisense strand to SEQ ID NO: 1274536
uuucgacuaaggaagguaa

SEQ ID NO: 1274538 - RNA, 19 nt, Artificial Sequence
  Description of Artificial Sequence: Synthetic oligonucleotide
  Sense strand starting at position 2168 of SEQ ID NO: 1241464
caugcauucucaguggaag

SEQ ID NO: 1274539 - RNA, 19 nt, Artificial Sequence
  Description of Artificial Sequence: Synthetic oligonucleotide
  Antisense strand to SEQ ID NO: 1274538
cuuccacugagaaugcaug

SEQ ID NO: 1274540 - RNA, 19 nt, Artificial Sequence
  Description of Artificial Sequence: Synthetic oligonucleotide
  Sense strand starting at position 2188 of SEQ ID NO: 1241464
cguguccucccagauuaag

SEQ ID NO: 1274541 - RNA, 19 nt, Artificial Sequence
  Description of Artificial Sequence: Synthetic oligonucleotide
  Antisense strand to SEQ ID NO: 1274540
cuuaaucugggaggacacg

SEQ ID NO: 1274542 - RNA, 19 nt, Artificial Sequence
  Description of Artificial Sequence: Synthetic oligonucleotide
  Sense strand starting at position 2316 of SEQ ID NO: 1241464
cucgcaucacuguaacaca

SEQ ID NO: 1274543 - RNA, 19 nt, Artificial Sequence
  Description of Artificial Sequence: Synthetic oligonucleotide
  Antisense strand to SEQ ID NO: 1274542
uguguuacagugaugcgag

SEQ ID NO: 1274544 - RNA, 19 nt, Artificial Sequence
  Description of Artificial Sequence: Synthetic oligonucleotide
  Sense strand starting at position 2364 of SEQ ID NO: 1241464
ucuagaguuaaucggaaau

SEQ ID NO: 1274545 - RNA, 19 nt, Artificial Sequence
  Description of Artificial Sequence: Synthetic oligonucleotide
  Antisense strand to SEQ ID NO: 1274544
auuuccgauuaacucuaga

SEQ ID NO: 1274546 - RNA, 19 nt, Artificial Sequence
  Description of Artificial Sequence: Synthetic oligonucleotide
  Sense strand starting at position 2601 of SEQ ID NO: 1241464
ugauaagugcuguauuagg

SEQ ID NO: 1274547 - RNA, 19 nt, Artificial Sequence
  Description of Artificial Sequence: Synthetic oligonucleotide
  Antisense strand to SEQ ID NO: 1274546
ccuaauacagcacuuauca

SEQ ID NO: 1274548 - RNA, 19 nt, Artificial Sequence
  Description of Artificial Sequence: Synthetic oligonucleotide
  Sense strand starting at position 2610 of SEQ ID NO: 1241464
cuguauuaggcguagauuu

SEQ ID NO: 1274549 - RNA, 19 nt, Artificial Sequence
  Description of Artificial Sequence: Synthetic oligonucleotide
  Antisense strand to SEQ ID NO: 1274548
aaaucuacgccuaauacag

SEQ ID NO: 1274550 - RNA, 19 nt, Artificial Sequence
  Description of Artificial Sequence: Synthetic oligonucleotide
  Sense strand starting at position 2660 of SEQ ID NO: 1241464
gauagagcucucgguauaa

SEQ ID NO: 1274551 - RNA, 19 nt, Artificial Sequence
  Description of Artificial Sequence: Synthetic oligonucleotide
  Antisense strand to SEQ ID NO: 1274550
uuauaccgagagcucuauc

SEQ ID NO: 1274552 - RNA, 19 nt, Artificial Sequence
  Description of Artificial Sequence: Synthetic oligonucleotide
  Sense strand starting at position 3007 of SEQ ID NO: 1241464
acaugaauauugucauuga

SEQ ID NO: 1274553 - RNA, 19 nt, Artificial Sequence
  Description of Artificial Sequence: Synthetic oligonucleotide
  Antisense strand to SEQ ID NO: 1274552
ucaaugacaauauucaugu

SEQ ID NO: 1274554 - RNA, 19 nt, Artificial Sequence
  Description of Artificial Sequence: Synthetic oligonucleotide
  Sense strand starting at position 3010 of SEQ ID NO: 1241464
ugaauauugucauugagug

SEQ ID NO: 1274555 - RNA, 19 nt, Artificial Sequence
  Description of Artificial Sequence: Synthetic oligonucleotide
  Antisense strand to SEQ ID NO: 1274554
cacucaaugacaauauuca

SEQ ID NO: 1274556 - RNA, 19 nt, Artificial Sequence
  Description of Artificial Sequence: Synthetic oligonucleotide
  Sense strand starting at position 3039 of SEQ ID NO: 1241464
aaauacauguuguuuguga

SEQ ID NO: 1274557 - RNA, 19 nt, Artificial Sequence
  Description of Artificial Sequence: Synthetic oligonucleotide
  Antisense strand to SEQ ID NO: 1274556
ucacaaacaacauguauuu

SEQ ID NO: 1274558 - RNA, 19 nt, Artificial Sequence
  Description of Artificial Sequence: Synthetic oligonucleotide
  Sense strand starting at position 3056 of SEQ ID NO: 1241464
gaguuuauagugugaacuu

SEQ ID NO: 1274559 - RNA, 19 nt, Artificial Sequence
  Description of Artificial Sequence: Synthetic oligonucleotide
  Antisense strand to SEQ ID NO: 1274558
aaguucacacuauaaacuc

SEQ ID NO: 1274560 - RNA, 19 nt, Artificial Sequence
  Description of Artificial Sequence: Synthetic oligonucleotide
  Sense strand starting at position 3065 of SEQ ID NO: 1241464
gugugaacuugaucuacag

SEQ ID NO: 1274561 - RNA, 19 nt, Artificial Sequence
  Description of Artificial Sequence: Synthetic oligonucleotide
  Antisense strand to SEQ ID NO: 1274560
cuguagaucaaguucacac

SEQ ID NO: 1274562 - RNA, 19 nt, Artificial Sequence
  Description of Artificial Sequence: Synthetic oligonucleotide
  Sense strand starting at position 3120 of SEQ ID NO: 1241464
uuguauuggagcuaagaug

SEQ ID NO: 1274563 - RNA, 19 nt, Artificial Sequence
  Description of Artificial Sequence: Synthetic oligonucleotide
  Antisense strand to SEQ ID NO: 1274562
caucuuagcuccaauacaa

SEQ ID NO: 1274564 - RNA, 19 nt, Artificial Sequence
  Description of Artificial Sequence: Synthetic oligonucleotide
  Sense strand starting at position 3127 of SEQ ID NO: 1241464
ggagcuaagaugugacauu

SEQ ID NO: 1274565 - RNA, 19 nt, Artificial Sequence
  Description of Artificial Sequence: Synthetic oligonucleotide
  Antisense strand to SEQ ID NO: 1274564
aaugucacaucuuagcucc

SEQ ID NO: 1274566 - RNA, 19 nt, Artificial Sequence
  Description of Artificial Sequence: Synthetic oligonucleotide
  Sense strand starting at position 3201 of SEQ ID NO: 1241464
cugugagguagguacuaga

SEQ ID NO: 1274567 - RNA, 19 nt, Artificial Sequence
  Description of Artificial Sequence: Synthetic oligonucleotide
  Antisense strand to SEQ ID NO: 1274566
ucuaguaccuaccucacag

SEQ ID NO: 1274568 - RNA, 19 nt, Artificial Sequence
  Description of Artificial Sequence: Synthetic oligonucleotide
  Sense strand starting at position 3269 of SEQ ID NO: 1241464
caguacugucuuggagaag

SEQ ID NO: 1274569 - RNA, 19 nt, Artificial Sequence
  Description of Artificial Sequence: Synthetic oligonucleotide
  Antisense strand to SEQ ID NO: 1274568
cuucuccaagacaguacug

SEQ ID NO: 1274570 - RNA, 19 nt, Artificial Sequence
  Description of Artificial Sequence: Synthetic oligonucleotide
  Sense strand starting at position 3272 of SEQ ID NO: 1241464
uacugucuuggagaaguca

SEQ ID NO: 1274571 - RNA, 19 nt, Artificial Sequence
  Description of Artificial Sequence: Synthetic oligonucleotide
  Antisense strand to SEQ ID NO: 1274570
ugacuucuccaagacagua

SEQ ID NO: 1274572 - RNA, 19 nt, Artificial Sequence
  Description of Artificial Sequence: Synthetic oligonucleotide
  Sense strand starting at position 3365 of SEQ ID NO: 1241464
gagugaaagugcuuuauaa

SEQ ID NO: 1274573 - RNA, 19 nt, Artificial Sequence
  Description of Artificial Sequence: Synthetic oligonucleotide
  Antisense strand to SEQ ID NO: 1274572
uuauaaagcacuuucacuc

SEQ ID NO: 1274574 - RNA, 19 nt, Artificial Sequence
  Description of Artificial Sequence: Synthetic oligonucleotide
  Sense strand starting at position 3511 of SEQ ID NO: 1241464
ucaucugucuacucacaga

SEQ ID NO: 1274575 - RNA, 19 nt, Artificial Sequence
  Description of Artificial Sequence: Synthetic oligonucleotide
  Antisense strand to SEQ ID NO: 1274574
ucugugaguagacagauga

SEQ ID NO: 1274576 - RNA, 19 nt, Artificial Sequence
  Description of Artificial Sequence: Synthetic oligonucleotide
  Sense strand starting at position 3544 of SEQ ID NO: 1241464
cugacuaccucuucuggaa

SEQ ID NO: 1274577 - RNA, 19 nt, Artificial Sequence
  Description of Artificial Sequence: Synthetic oligonucleotide
  Antisense strand to SEQ ID NO: 1274576
uuccagaagagguagucag

SEQ ID NO: 1274578 - RNA, 19 nt, Artificial Sequence
  Description of Artificial Sequence: Synthetic oligonucleotide
  Sense strand starting at position 3556 of SEQ ID NO: 1241464
ucuggaaagacuugucaga

SEQ ID NO: 1274579 - RNA, 19 nt, Artificial Sequence
  Description of Artificial Sequence: Synthetic oligonucleotide
  Antisense strand to SEQ ID NO: 1274578
ucugacaagucuuuccaga

SEQ ID NO: 1274580 - RNA, 19 nt, Artificial Sequence
  Description of Artificial Sequence: Synthetic oligonucleotide
  Sense strand starting at position 3657 of SEQ ID NO: 1241464
ucugccuuucuggacagaa

SEQ ID NO: 1274581 - RNA, 19 nt, Artificial Sequence
  Description of Artificial Sequence: Synthetic oligonucleotide
  Antisense strand to SEQ ID NO: 1274580
uucuguccagaaaggcaga

SEQ ID NO: 1274582 - RNA, 19 nt, Artificial Sequence
  Description of Artificial Sequence: Synthetic oligonucleotide
  Sense strand starting at position 3884 of SEQ ID NO: 1241464
ggagaugcccuugaccuua

SEQ ID NO: 1274583 - RNA, 19 nt, Artificial Sequence
  Description of Artificial Sequence: Synthetic oligonucleotide
  Antisense strand to SEQ ID NO: 1274582
uaaggucaagggcaucucc

SEQ ID NO: 1274584 - RNA, 19 nt, Artificial Sequence
  Description of Artificial Sequence: Synthetic oligonucleotide
  Sense strand starting at position 359 of SEQ ID NO: 1241465
gagcucuucuugggaccaa

SEQ ID NO: 1274585 - RNA, 19 nt, Artificial Sequence
  Description of Artificial Sequence: Synthetic oligonucleotide
  Antisense strand to SEQ ID NO: 1274584
uuggucccaagaagagcuc

SEQ ID NO: 1274586 - RNA, 19 nt, Artificial Sequence
  Description of Artificial Sequence: Synthetic oligonucleotide
  Sense strand starting at position 360 of SEQ ID NO: 1241465
agcucuucuugggaccaau

SEQ ID NO: 1274587 - RNA, 19 nt, Artificial Sequence
  Description of Artificial Sequence: Synthetic oligonucleotide
  Antisense strand to SEQ ID NO: 1274586
auuggucccaagaagagcu

SEQ ID NO: 1274588 - RNA, 19 nt, Artificial Sequence
  Description of Artificial Sequence: Synthetic oligonucleotide
  Sense strand starting at position 1004 of SEQ ID NO: 1241465
cccaccuuccugugaaaga

SEQ ID NO: 1274589 - RNA, 19 nt, Artificial Sequence
  Description of Artificial Sequence: Synthetic oligonucleotide
  Antisense strand to SEQ ID NO: 1274588
ucuuucacaggaagguggg

SEQ ID NO: 1274590 - RNA, 19 nt, Artificial Sequence
  Description of Artificial Sequence: Synthetic oligonucleotide
  Sense strand starting at position 2249 of SEQ ID NO: 1241465
gggccauuucccuggugau

SEQ ID NO: 1274591 - RNA, 19 nt, Artificial Sequence
  Description of Artificial Sequence: Synthetic oligonucleotide
  Antisense strand to SEQ ID NO: 1274590
aucaccagggaaauggccc

SEQ ID NO: 1274592 - RNA, 19 nt, Artificial Sequence
  Description of Artificial Sequence: Synthetic oligonucleotide
  Sense strand starting at position 2250 of SEQ ID NO: 1241465
ggccauuucccuggugauc

SEQ ID NO: 1274593 - RNA, 19 nt, Artificial Sequence
  Description of Artificial Sequence: Synthetic oligonucleotide
  Antisense strand to SEQ ID NO: 1274592
gaucaccagggaaauggcc

SEQ ID NO: 1274594 - RNA, 19 nt, Artificial Sequence
  Description of Artificial Sequence: Synthetic oligonucleotide
  Sense strand starting at position 2283 of SEQ ID NO: 1241465
acaggugaguccugccgua

SEQ ID NO: 1274595 - RNA, 19 nt, Artificial Sequence
  Description of Artificial Sequence: Synthetic oligonucleotide
  Antisense strand to SEQ ID NO: 1274594
uacggcaggacucaccugu

SEQ ID NO: 1274596 - RNA, 19 nt, Artificial Sequence
  Description of Artificial Sequence: Synthetic oligonucleotide
  Sense strand starting at position 2690 of SEQ ID NO: 1241465
cgugcucuuuccgcaguga

SEQ ID NO: 1274597 - RNA, 19 nt, Artificial Sequence
  Description of Artificial Sequence: Synthetic oligonucleotide
  Antisense strand to SEQ ID NO: 1274596
ucacugcggaaagagcacg

SEQ ID NO: 1274598 - RNA, 19 nt, Artificial Sequence
  Description of Artificial Sequence: Synthetic oligonucleotide
  Sense strand starting at position 2750 of SEQ ID NO: 1241465
ccgugugugcuugugcaca

SEQ ID NO: 1274599 - RNA, 19 nt, Artificial Sequence
  Description of Artificial Sequence: Synthetic oligonucleotide
  Antisense strand to SEQ ID NO: 1274598
ugugcacaagcacacacgg

SEQ ID NO: 1274600 - RNA, 19 nt, Artificial Sequence
  Description of Artificial Sequence: Synthetic oligonucleotide
  Sense strand starting at position 2780 of SEQ ID NO: 1241465
aggagaguccagugaguga

SEQ ID NO: 1274601 - RNA, 19 nt, Artificial Sequence
  Description of Artificial Sequence: Synthetic oligonucleotide
  Antisense strand to SEQ ID NO: 1274600
ucacucacuggacucuccu

SEQ ID NO: 1274602 - RNA, 19 nt, Artificial Sequence
  Description of Artificial Sequence: Synthetic oligonucleotide
  Sense strand starting at position 3003 of SEQ ID NO: 1241465
ugacaucuacuugggacau

SEQ ID NO: 1274603 - RNA, 19 nt, Artificial Sequence
  Description of Artificial Sequence: Synthetic oligonucleotide
  Antisense strand to SEQ ID NO: 1274602
augucccaaguagauguca

SEQ ID NO: 1274604 - RNA, 19 nt, Artificial Sequence
  Description of Artificial Sequence: Synthetic oligonucleotide
  Sense strand starting at position 3463 of SEQ ID NO: 1241465
agcgucucuccagaaggaa

SEQ ID NO: 1274605 - RNA, 19 nt, Artificial Sequence
  Description of Artificial Sequence: Synthetic oligonucleotide
  Antisense strand to SEQ ID NO: 1274604
uuccuucuggagagacgcu

SEQ ID NO: 1274606 - RNA, 19 nt, Artificial Sequence
  Description of Artificial Sequence: Synthetic oligonucleotide
  Sense strand starting at position 3526 of SEQ ID NO: 1241465
cugucuccucagcaggaaa

SEQ ID NO: 1274607 - RNA, 19 nt, Artificial Sequence
  Description of Artificial Sequence: Synthetic oligonucleotide
  Antisense strand to SEQ ID NO: 1274606
uuuccugcugaggagacag

SEQ ID NO: 1274608 - RNA, 19 nt, Artificial Sequence
  Description of Artificial Sequence: Synthetic oligonucleotide
  Sense strand starting at position 3581 of SEQ ID NO: 1241465
cuggcauggccagaaaguu

SEQ ID NO: 1274609 - RNA, 19 nt, Artificial Sequence
  Description of Artificial Sequence: Synthetic oligonucleotide
  Antisense strand to SEQ ID NO: 1274608
aacuuucuggccaugccag

SEQ ID NO: 1274610 - RNA, 19 nt, Artificial Sequence
  Description of Artificial Sequence: Synthetic oligonucleotide
  Sense strand starting at position 3589 of SEQ ID NO: 1241465
gccagaaaguuagccagaa

SEQ ID NO: 1274611 - RNA, 19 nt, Artificial Sequence
  Description of Artificial Sequence: Synthetic oligonucleotide
  Antisense strand to SEQ ID NO: 1274610
uucuggcuaacuuucuggc

SEQ ID NO: 1274612 - RNA, 19 nt, Artificial Sequence
  Description of Artificial Sequence: Synthetic oligonucleotide
  Sense strand starting at position 3590 of SEQ ID NO: 1241465
ccagaaaguuagccagaaa

SEQ ID NO: 1274613 - RNA, 19 nt, Artificial Sequence
  Description of Artificial Sequence: Synthetic oligonucleotide
  Antisense strand to SEQ ID NO: 1274612
uuucuggcuaacuuucugg

SEQ ID NO: 1274614 - RNA, 19 nt, Artificial Sequence
  Description of Artificial Sequence: Synthetic oligonucleotide
  Sense strand starting at position 3689 of SEQ ID NO: 1241465
cccagaaauggacgagcuu

SEQ ID NO: 1274615 - RNA, 19 nt, Artificial Sequence
  Description of Artificial Sequence: Synthetic oligonucleotide
  Antisense strand to SEQ ID NO: 1274614
aagcucguccauuucuggg

SEQ ID NO: 1274616 - RNA, 19 nt, Artificial Sequence
  Description of Artificial Sequence: Synthetic oligonucleotide
  Sense strand starting at position 3733 of SEQ ID NO: 1241465
ugggacacauccugacagu

SEQ ID NO: 1274617 - RNA, 19 nt, Artificial Sequence
  Description of Artificial Sequence: Synthetic oligonucleotide
  Antisense strand to SEQ ID NO: 1274616
acugucaggauguguccca

SEQ ID NO: 1274618 - RNA, 19 nt, Artificial Sequence
  Description of Artificial Sequence: Synthetic oligonucleotide
  Sense strand starting at position 3835 of SEQ ID NO: 1241465
gagagaacugacugcugga

SEQ ID NO: 1274619 - RNA, 19 nt, Artificial Sequence
  Description of Artificial Sequence: Synthetic oligonucleotide
  Antisense strand to SEQ ID NO: 1274618
uccagcagucaguucucuc

SEQ ID NO: 1274620 - RNA, 19 nt, Artificial Sequence
  Description of Artificial Sequence: Synthetic oligonucleotide
  Sense strand starting at position 3972 of SEQ ID NO: 1241465
cagagugacguuuaguaaa

SEQ ID NO: 1274621 - RNA, 19 nt, Artificial Sequence
  Description of Artificial Sequence: Synthetic oligonucleotide
  Antisense strand to SEQ ID NO: 1274620
uuuacuaaacgucacucug

SEQ ID NO: 1274622 - RNA, 19 nt, Artificial Sequence
  Description of Artificial Sequence: Synthetic oligonucleotide
  Sense strand starting at position 3974 of SEQ ID NO: 1241465
gagugacguuuaguaaacu

SEQ ID NO: 1274623 - RNA, 19 nt, Artificial Sequence
  Description of Artificial Sequence: Synthetic oligonucleotide
  Antisense strand to SEQ ID NO: 1274622
aguuuacuaaacgucacuc

SEQ ID NO: 1274624 - RNA, 19 nt, Artificial Sequence
  Description of Artificial Sequence: Synthetic oligonucleotide
  Sense strand starting at position 71 of SEQ ID NO: 1241466
gugagcaccuauucucagu

SEQ ID NO: 1274625 - RNA, 19 nt, Artificial Sequence
  Description of Artificial Sequence: Synthetic oligonucleotide
  Antisense strand to SEQ ID NO: 1274624
acugagaauaggugcucac

SEQ ID NO: 1274626 - RNA, 19 nt, Artificial Sequence
  Description of Artificial Sequence: Synthetic oligonucleotide
  Sense strand starting at position 215 of SEQ ID NO: 1241466
ggaaguaaguuugaauaca

SEQ ID NO: 1274627 - RNA, 19 nt, Artificial Sequence
  Description of Artificial Sequence: Synthetic oligonucleotide
  Antisense strand to SEQ ID NO: 1274626
uguauucaaacuuacuucc

SEQ ID NO: 1274628 - RNA, 19 nt, Artificial Sequence
  Description of Artificial Sequence: Synthetic oligonucleotide
  Sense strand starting at position 291 of SEQ ID NO: 1241466
agcacuaagcaguaaguau

SEQ ID NO: 1274629 - RNA, 19 nt, Artificial Sequence
  Description of Artificial Sequence: Synthetic oligonucleotide
  Antisense strand to SEQ ID NO: 1274628
auacuuacugcuuagugcu

SEQ ID NO: 1274630 - RNA, 19 nt, Artificial Sequence
  Description of Artificial Sequence: Synthetic oligonucleotide
  Sense strand starting at position 624 of SEQ ID NO: 1241466
caccgaugacuuuguaauu

SEQ ID NO: 1274631 - RNA, 19 nt, Artificial Sequence
  Description of Artificial Sequence: Synthetic oligonucleotide
  Antisense strand to SEQ ID NO: 1274630
aauuacaaagucaucggug

SEQ ID NO: 1274632 - RNA, 19 nt, Artificial Sequence
  Description of Artificial Sequence: Synthetic oligonucleotide
  Sense strand starting at position 708 of SEQ ID NO: 1241466
ggcaacaguuacuuacaua

SEQ ID NO: 1274633 - RNA, 19 nt, Artificial Sequence
  Description of Artificial Sequence: Synthetic oligonucleotide
  Antisense strand to SEQ ID NO: 1274632
uauguaaguaacuguugcc

SEQ ID NO: 1274634 - RNA, 19 nt, Artificial Sequence
  Description of Artificial Sequence: Synthetic oligonucleotide
  Sense strand starting at position 749 of SEQ ID NO: 1241466
agagcaaacucaguaaggu

SEQ ID NO: 1274635 - RNA, 19 nt, Artificial Sequence
  Description of Artificial Sequence: Synthetic oligonucleotide
  Antisense strand to SEQ ID NO: 1274634
accuuacugaguuugcucu

SEQ ID NO: 1274636 - RNA, 19 nt, Artificial Sequence
  Description of Artificial Sequence: Synthetic oligonucleotide
  Sense strand starting at position 878 of SEQ ID NO: 1241466
guguuacuuccugggagua

SEQ ID NO: 1274637 - RNA, 19 nt, Artificial Sequence
  Description of Artificial Sequence: Synthetic oligonucleotide
  Antisense strand to SEQ ID NO: 1274636
uacucccaggaaguaacac

SEQ ID NO: 1274638 - RNA, 19 nt, Artificial Sequence
  Description of Artificial Sequence: Synthetic oligonucleotide
  Sense strand starting at position 879 of SEQ ID NO: 1241466
uguuacuuccugggaguaa

SEQ ID NO: 1274639 - RNA, 19 nt, Artificial Sequence
  Description of Artificial Sequence: Synthetic oligonucleotide
  Antisense strand to SEQ ID NO: 1274638
uuacucccaggaaguaaca

SEQ ID NO: 1274640 - RNA, 19 nt, Artificial Sequence
  Description of Artificial Sequence: Synthetic oligonucleotide
  Sense strand starting at position 971 of SEQ ID NO: 1241466
ugcagaauauucucaggac

SEQ ID NO: 1274641 - RNA, 19 nt, Artificial Sequence
  Description of Artificial Sequence: Synthetic oligonucleotide
  Antisense strand to SEQ ID NO: 1274640
guccugagaauauucugca

SEQ ID NO: 1274642 - RNA, 19 nt, Artificial Sequence
  Description of Artificial Sequence: Synthetic oligonucleotide
  Sense strand starting at position 1031 of SEQ ID NO: 1241466
cagagagauggcuguuaga

SEQ ID NO: 1274643 - RNA, 19 nt, Artificial Sequence
  Description of Artificial Sequence: Synthetic oligonucleotide
  Antisense strand to SEQ ID NO: 1274642
ucuaacagccaucucucug

SEQ ID NO: 1274644 - RNA, 19 nt, Artificial Sequence
  Description of Artificial Sequence: Synthetic oligonucleotide
  Sense strand starting at position 1046 of SEQ ID NO: 1241466
uagagagaagcacgagauu

SEQ ID NO: 1274645 - RNA, 19 nt, Artificial Sequence
  Description of Artificial Sequence: Synthetic oligonucleotide
  Antisense strand to SEQ ID NO: 1274644
aaucucgugcuucucucua

SEQ ID NO: 1274646 - RNA, 19 nt, Artificial Sequence
  Description of Artificial Sequence: Synthetic oligonucleotide
  Sense strand starting at position 1092 of SEQ ID NO: 1241466
ucacuuagcguaugauaag

SEQ ID NO: 1274647 - RNA, 19 nt, Artificial Sequence
  Description of Artificial Sequence: Synthetic oligonucleotide
  Antisense strand to SEQ ID NO: 1274646
cuuaucauacgcuaaguga

SEQ ID NO: 1274648 - RNA, 19 nt, Artificial Sequence
  Description of Artificial Sequence: Synthetic oligonucleotide
  Sense strand starting at position 1129 of SEQ ID NO: 1241466
aagcuaugagcuggaagga

SEQ ID NO: 1274649 - RNA, 19 nt, Artificial Sequence
  Description of Artificial Sequence: Synthetic oligonucleotide
  Antisense strand to SEQ ID NO: 1274648
uccuuccagcucauagcuu

SEQ ID NO: 1274650 - RNA, 19 nt, Artificial Sequence
  Description of Artificial Sequence: Synthetic oligonucleotide
  Sense strand starting at position 1142 of SEQ ID NO: 1241466
gaaggacccucugucauua

SEQ ID NO: 1274651 - RNA, 19 nt, Artificial Sequence
  Description of Artificial Sequence: Synthetic oligonucleotide
  Antisense strand to SEQ ID NO: 1274650
uaaugacagaggguccuuc

SEQ ID NO: 1274652 - RNA, 19 nt, Artificial Sequence
  Description of Artificial Sequence: Synthetic oligonucleotide
  Sense strand starting at position 1320 of SEQ ID NO: 1241466
gcgcguuugggagcauagu

SEQ ID NO: 1274653 - RNA, 19 nt, Artificial Sequence
  Description of Artificial Sequence: Synthetic oligonucleotide
  Antisense strand to SEQ ID NO: 1274652
acuaugcucccaaacgcgc

SEQ ID NO: 1274654 - RNA, 19 nt, Artificial Sequence
  Description of Artificial Sequence: Synthetic oligonucleotide
  Sense strand starting at position 1447 of SEQ ID NO: 1241466
ucagguguuaugggccuaa

SEQ ID NO: 1274655 - RNA, 19 nt, Artificial Sequence
  Description of Artificial Sequence: Synthetic oligonucleotide
  Antisense strand to SEQ ID NO: 1274654
uuaggcccauaacaccuga

SEQ ID NO: 1274656 - RNA, 19 nt, Artificial Sequence
  Description of Artificial Sequence: Synthetic oligonucleotide
  Sense strand starting at position 1451 of SEQ ID NO: 1241466
guguuaugggccuaacucu

SEQ ID NO: 1274657 - RNA, 19 nt, Artificial Sequence
  Description of Artificial Sequence: Synthetic oligonucleotide
  Antisense strand to SEQ ID NO: 1274656
agaguuaggcccauaacac

SEQ ID NO: 1274658 - RNA, 19 nt, Artificial Sequence
  Description of Artificial Sequence: Synthetic oligonucleotide
  Sense strand starting at position 1565 of SEQ ID NO: 1241466
ggugcuuacgcggagaucu

SEQ ID NO: 1274659 - RNA, 19 nt, Artificial Sequence
  Description of Artificial Sequence: Synthetic oligonucleotide
  Antisense strand to SEQ ID NO: 1274658
agaucuccgcguaagcacc

SEQ ID NO: 1274660 - RNA, 19 nt, Artificial Sequence
  Description of Artificial Sequence: Synthetic oligonucleotide
  Sense strand starting at position 2229 of SEQ ID NO: 1241466
gcccucauacuuugucaca

SEQ ID NO: 1274661 - RNA, 19 nt, Artificial Sequence
  Description of Artificial Sequence: Synthetic oligonucleotide
  Antisense strand to SEQ ID NO: 1274660
ugugacaaaguaugagggc

SEQ ID NO: 1274662 - RNA, 19 nt, Artificial Sequence
  Description of Artificial Sequence: Synthetic oligonucleotide
  Sense strand starting at position 2536 of SEQ ID NO: 1241466
ggagaacucacgcggucuu

SEQ ID NO: 1274663 - RNA, 19 nt, Artificial Sequence
  Description of Artificial Sequence: Synthetic oligonucleotide
  Antisense strand to SEQ ID NO: 1274662
aagaccgcgugaguucucc

SEQ ID NO: 1274664 - RNA, 19 nt, Artificial Sequence
  Description of Artificial Sequence: Synthetic oligonucleotide
  Sense strand starting at position 2694 of SEQ ID NO: 1241466
ccuuguguuacugagucca

SEQ ID NO: 1274665 - RNA, 19 nt, Artificial Sequence
  Description of Artificial Sequence: Synthetic oligonucleotide
  Antisense strand to SEQ ID NO: 1274664
uggacucaguaacacaagg

SEQ ID NO: 1274666 - RNA, 19 nt, Artificial Sequence
  Description of Artificial Sequence: Synthetic oligonucleotide
  Sense strand starting at position 2696 of SEQ ID NO: 1241466
uuguguuacugaguccaag

SEQ ID NO: 1274667 - RNA, 19 nt, Artificial Sequence
  Description of Artificial Sequence: Synthetic oligonucleotide
  Antisense strand to SEQ ID NO: 1274666
cuuggacucaguaacacaa

SEQ ID NO: 1274668 - RNA, 19 nt, Artificial Sequence
  Description of Artificial Sequence: Synthetic oligonucleotide
  Sense strand starting at position 2702 of SEQ ID NO: 1241466
uacugaguccaaggaauau

SEQ ID NO: 1274669 - RNA, 19 nt, Artificial Sequence
  Description of Artificial Sequence: Synthetic oligonucleotide
  Antisense strand to SEQ ID NO: 1274668
auauuccuuggacucagua

SEQ ID NO: 1274670 - RNA, 19 nt, Artificial Sequence
  Description of Artificial Sequence: Synthetic oligonucleotide
  Sense strand starting at position 2748 of SEQ ID NO: 1241466
agguuacagucaucccagu

SEQ ID NO: 1274671 - RNA, 19 nt, Artificial Sequence
  Description of Artificial Sequence: Synthetic oligonucleotide
  Antisense strand to SEQ ID NO: 1274670
acugggaugacuguaaccu

SEQ ID NO: 1274672 - RNA, 19 nt, Artificial Sequence
  Description of Artificial Sequence: Synthetic oligonucleotide
  Sense strand starting at position 2772 of SEQ ID NO: 1241466
ccugaagaugcgugguuca

SEQ ID NO: 1274673 - RNA, 19 nt, Artificial Sequence
  Description of Artificial Sequence: Synthetic oligonucleotide
  Antisense strand to SEQ ID NO: 1274672
ugaaccacgcaucuucagg

SEQ ID NO: 1274674 - RNA, 19 nt, Artificial Sequence
  Description of Artificial Sequence: Synthetic oligonucleotide
  Sense strand starting at position 2842 of SEQ ID NO: 1241466
acuggcagagcucaucuaa

SEQ ID NO: 1274675 - RNA, 19 nt, Artificial Sequence
  Description of Artificial Sequence: Synthetic oligonucleotide
  Antisense strand to SEQ ID NO: 1274674
uuagaugagcucugccagu

SEQ ID NO: 1274676 - RNA, 19 nt, Artificial Sequence
  Description of Artificial Sequence: Synthetic oligonucleotide
  Sense strand starting at position 3264 of SEQ ID NO: 1241466
auuagauaaucucuuguga

SEQ ID NO: 1274677 - RNA, 19 nt, Artificial Sequence
  Description of Artificial Sequence: Synthetic oligonucleotide
  Antisense strand to SEQ ID NO: 1274676
ucacaagagauuaucuaau

SEQ ID NO: 1274678 - RNA, 19 nt, Artificial Sequence
  Description of Artificial Sequence: Synthetic oligonucleotide
  Sense strand starting at position 3514 of SEQ ID NO: 1241466
ugaccagacuggucuagau

SEQ ID NO: 1274679 - RNA, 19 nt, Artificial Sequence
  Description of Artificial Sequence: Synthetic oligonucleotide
  Antisense strand to SEQ ID NO: 1274678
aucuagaccagucugguca

SEQ ID NO: 1274680 - RNA, 19 nt, Artificial Sequence
  Description of Artificial Sequence: Synthetic oligonucleotide
  Sense strand starting at position 3645 of SEQ ID NO: 1241466
ggcacagacuuaguaauau

SEQ ID NO: 1274681 - RNA, 19 nt, Artificial Sequence
  Description of Artificial Sequence: Synthetic oligonucleotide
  Antisense strand to SEQ ID NO: 1274680
auauuacuaagucugugcc

SEQ ID NO: 1274682 - RNA, 19 nt, Artificial Sequence
  Description of Artificial Sequence: Synthetic oligonucleotide
  Sense strand starting at position 3745 of SEQ ID NO: 1241466
aaggaaauguuucugguaa

SEQ ID NO: 1274683 - RNA, 19 nt, Artificial Sequence
  Description of Artificial Sequence: Synthetic oligonucleotide
  Antisense strand to SEQ ID NO: 1274682
uuaccagaaacauuuccuu

SEQ ID NO: 1274684 - RNA, 19 nt, Artificial Sequence
  Description of Artificial Sequence: Synthetic oligonucleotide
  Sense strand starting at position 3760 of SEQ ID NO: 1241466
guaaauugcagauagugaa

SEQ ID NO: 1274685 - RNA, 19 nt, Artificial Sequence
  Description of Artificial Sequence: Synthetic oligonucleotide
  Antisense strand to SEQ ID NO: 1274684
uucacuaucugcaauuuac

SEQ ID NO: 1274686 - RNA, 19 nt, Artificial Sequence
  Description of Artificial Sequence: Synthetic oligonucleotide
  Sense strand starting at position 3803 of SEQ ID NO: 1241466
gguauugacuauuccagcu

SEQ ID NO: 1274687 - RNA, 19 nt, Artificial Sequence
  Description of Artificial Sequence: Synthetic oligonucleotide
  Antisense strand to SEQ ID NO: 1274686
agcuggaauagucaauacc

SEQ ID NO: 1274688 - RNA, 19 nt, Artificial Sequence
  Description of Artificial Sequence: Synthetic oligonucleotide
  Sense strand starting at position 3821 of SEQ ID NO: 1241466
uuucuuauuuguugaggaa

SEQ ID NO: 1274689 - RNA, 19 nt, Artificial Sequence
  Description of Artificial Sequence: Synthetic oligonucleotide
  Antisense strand to SEQ ID NO: 1274688
uuccucaacaaauaagaaa

SEQ ID NO: 1274690 - RNA, 19 nt, Artificial Sequence
  Description of Artificial Sequence: Synthetic oligonucleotide
  Sense strand starting at position 3824 of SEQ ID NO: 1241466
cuuauuuguugaggaagau

SEQ ID NO: 1274691 - RNA, 19 nt, Artificial Sequence
  Description of Artificial Sequence: Synthetic oligonucleotide
  Antisense strand to SEQ ID NO: 1274690
aucuuccucaacaaauaag

SEQ ID NO: 1274692 - RNA, 19 nt, Artificial Sequence
  Description of Artificial Sequence: Synthetic oligonucleotide
  Sense strand starting at position 3833 of SEQ ID NO: 1241466
ugaggaagauggcagaaau

SEQ ID NO: 1274693 - RNA, 19 nt, Artificial Sequence
  Description of Artificial Sequence: Synthetic oligonucleotide
  Antisense strand to SEQ ID NO: 1274692
auuucugccaucuuccuca

SEQ ID NO: 1274694 - RNA, 19 nt, Artificial Sequence
  Description of Artificial Sequence: Synthetic oligonucleotide
  Sense strand starting at position 3865 of SEQ ID NO: 1241466
gggauagacuuugaaggau

SEQ ID NO: 1274695 - RNA, 19 nt, Artificial Sequence
  Description of Artificial Sequence: Synthetic oligonucleotide
  Antisense strand to SEQ ID NO: 1274694
auccuucaaagucuauccc

SEQ ID NO: 1274696 - RNA, 19 nt, Artificial Sequence
  Description of Artificial Sequence: Synthetic oligonucleotide
  Sense strand starting at position 3925 of SEQ ID NO: 1241466
accugauguuucuucucua

SEQ ID NO: 1274697 - RNA, 19 nt, Artificial Sequence
  Description of Artificial Sequence: Synthetic oligonucleotide
  Antisense strand to SEQ ID NO: 1274696
uagagaagaaacaucaggu

SEQ ID NO: 1274698 - RNA, 19 nt, Artificial Sequence
  Description of Artificial Sequence: Synthetic oligonucleotide
  Sense strand starting at position 3978 of SEQ ID NO: 1241466
uuugacaguuaucuaugua

SEQ ID NO: 1274699 - RNA, 19 nt, Artificial Sequence
  Description of Artificial Sequence: Synthetic oligonucleotide
  Antisense strand to SEQ ID NO: 1274698
uacauagauaacugucaaa

SEQ ID NO: 1274700 - RNA, 19 nt, Artificial Sequence
  Description of Artificial Sequence: Synthetic oligonucleotide
  Sense strand starting at position 3981 of SEQ ID NO: 1241466
gacaguuaucuauguauga

SEQ ID NO: 1274701 - RNA, 19 nt, Artificial Sequence
  Description of Artificial Sequence: Synthetic oligonucleotide
  Antisense strand to SEQ ID NO: 1274700
ucauacauagauaacuguc

SEQ ID NO: 1274702 - RNA, 19 nt, Artificial Sequence
  Description of Artificial Sequence: Synthetic oligonucleotide
  Sense strand starting at position 3982 of SEQ ID NO: 1241466
acaguuaucuauguaugag

SEQ ID NO: 1274703 - RNA, 19 nt, Artificial Sequence
  Description of Artificial Sequence: Synthetic oligonucleotide
  Antisense strand to SEQ ID NO: 1274702
cucauacauagauaacugu

SEQ ID NO: 1274704 - RNA, 19 nt, Artificial Sequence
  Description of Artificial Sequence: Synthetic oligonucleotide
  Sense strand starting at position 15 of SEQ ID NO: 1241467
agauccugccaguagguau

SEQ ID NO: 1274705 - RNA, 19 nt, Artificial Sequence
  Description of Artificial Sequence: Synthetic oligonucleotide
  Antisense strand to SEQ ID NO: 1274704
auaccuacuggcaggaucu

SEQ ID NO: 1274706 - RNA, 19 nt, Artificial Sequence
  Description of Artificial Sequence: Synthetic oligonucleotide
  Sense strand starting at position 51 of SEQ ID NO: 1241467
uggagaaauccguggcucu

SEQ ID NO: 1274707 - RNA, 19 nt, Artificial Sequence
  Description of Artificial Sequence: Synthetic oligonucleotide
  Antisense strand to SEQ ID NO: 1274706
agagccacggauuucucca

SEQ ID NO: 1274708 - RNA, 19 nt, Artificial Sequence
  Description of Artificial Sequence: Synthetic oligonucleotide
  Sense strand starting at position 52 of SEQ ID NO: 1241467
ggagaaauccguggcucua

SEQ ID NO: 1274709 - RNA, 19 nt, Artificial Sequence
  Description of Artificial Sequence: Synthetic oligonucleotide
  Antisense strand to SEQ ID NO: 1274708
uagagccacggauuucucc

SEQ ID NO: 1274710 - RNA, 19 nt, Artificial Sequence
  Description of Artificial Sequence: Synthetic oligonucleotide
  Sense strand starting at position 54 of SEQ ID NO: 1241467
agaaauccguggcucuaaa

SEQ ID NO: 1274711 - RNA, 19 nt, Artificial Sequence
  Description of Artificial Sequence: Synthetic oligonucleotide
  Antisense strand to SEQ ID NO: 1274710
uuuagagccacggauuucu

SEQ ID NO: 1274712 - RNA, 19 nt, Artificial Sequence
  Description of Artificial Sequence: Synthetic oligonucleotide
  Sense strand starting at position 61 of SEQ ID NO: 1241467
cguggcucuaaaugacuaa

SEQ ID NO: 1274713 - RNA, 19 nt, Artificial Sequence
  Description of Artificial Sequence: Synthetic oligonucleotide
  Antisense strand to SEQ ID NO: 1274712
uuagucauuuagagccacg

SEQ ID NO: 1274714 - RNA, 19 nt, Artificial Sequence
  Description of Artificial Sequence: Synthetic oligonucleotide
  Sense strand starting at position 141 of SEQ ID NO: 1241467
gggauuguggccuguuauu

SEQ ID NO: 1274715 - RNA, 19 nt, Artificial Sequence
  Description of Artificial Sequence: Synthetic oligonucleotide
  Antisense strand to SEQ ID NO: 1274714
aauaacaggccacaauccc

SEQ ID NO: 1274716 - RNA, 19 nt, Artificial Sequence
  Description of Artificial Sequence: Synthetic oligonucleotide
  Sense strand starting at position 341 of SEQ ID NO: 1241467
gucuaagaauuacucuuga

SEQ ID NO: 1274717 - RNA, 19 nt, Artificial Sequence
  Description of Artificial Sequence: Synthetic oligonucleotide
  Antisense strand to SEQ ID NO: 1274716
ucaagaguaauucuuagac

SEQ ID NO: 1274718 - RNA, 19 nt, Artificial Sequence
  Description of Artificial Sequence: Synthetic oligonucleotide
  Sense strand starting at position 351 of SEQ ID NO: 1241467
uacucuugauuugggugaa

SEQ ID NO: 1274719 - RNA, 19 nt, Artificial Sequence
  Description of Artificial Sequence: Synthetic oligonucleotide
  Antisense strand to SEQ ID NO: 1274718
uucacccaaaucaagagua

SEQ ID NO: 1274720 - RNA, 19 nt, Artificial Sequence
  Description of Artificial Sequence: Synthetic oligonucleotide
  Sense strand starting at position 352 of SEQ ID NO: 1241467
acucuugauuugggugaac

SEQ ID NO: 1274721 - RNA, 19 nt, Artificial Sequence
  Description of Artificial Sequence: Synthetic oligonucleotide
  Antisense strand to SEQ ID NO: 1274720
guucacccaaaucaagagu

SEQ ID NO: 1274722 - RNA, 19 nt, Artificial Sequence
  Description of Artificial Sequence: Synthetic oligonucleotide
  Sense strand starting at position 445 of SEQ ID NO: 1241467
cauuuaaugcugugucugu

SEQ ID NO: 1274723 - RNA, 19 nt, Artificial Sequence
  Description of Artificial Sequence: Synthetic oligonucleotide
  Antisense strand to SEQ ID NO: 1274722
acagacacagcauuaaaug

SEQ ID NO: 1274724 - RNA, 19 nt, Artificial Sequence
  Description of Artificial Sequence: Synthetic oligonucleotide
  Sense strand starting at position 456 of SEQ ID NO: 1241467
gugucugugcccucuuuau

SEQ ID NO: 1274725 - RNA, 19 nt, Artificial Sequence
  Description of Artificial Sequence: Synthetic oligonucleotide
  Antisense strand to SEQ ID NO: 1274724
auaaagagggcacagacac

SEQ ID NO: 1274726 - RNA, 19 nt, Artificial Sequence
  Description of Artificial Sequence: Synthetic oligonucleotide
  Sense strand starting at position 504 of SEQ ID NO: 1241467
gguucuucuuccucagcau

SEQ ID NO: 1274727 - RNA, 19 nt, Artificial Sequence
  Description of Artificial Sequence: Synthetic oligonucleotide
  Antisense strand to SEQ ID NO: 1274726
augcugaggaagaagaacc

SEQ ID NO: 1274728 - RNA, 19 nt, Artificial Sequence
  Description of Artificial Sequence: Synthetic oligonucleotide
  Sense strand starting at position 574 of SEQ ID NO: 1241467
aggucaauuugagagggau

SEQ ID NO: 1274729 - RNA, 19 nt, Artificial Sequence
  Description of Artificial Sequence: Synthetic oligonucleotide
  Antisense strand to SEQ ID NO: 1274728
aucccucucaaauugaccu

SEQ ID NO: 1274730 - RNA, 19 nt, Artificial Sequence
  Description of Artificial Sequence: Synthetic oligonucleotide
  Sense strand starting at position 971 of SEQ ID NO: 1241467
acaggagggcuauguuacu

SEQ ID NO: 1274731 - RNA, 19 nt, Artificial Sequence
  Description of Artificial Sequence: Synthetic oligonucleotide
  Antisense strand to SEQ ID NO: 1274730
aguaacauagcccuccugu

SEQ ID NO: 1274732 - RNA, 19 nt, Artificial Sequence
  Description of Artificial Sequence: Synthetic oligonucleotide
  Sense strand starting at position 977 of SEQ ID NO: 1241467
gggcuauguuacuccugag

SEQ ID NO: 1274733 - RNA, 19 nt, Artificial Sequence
  Description of Artificial Sequence: Synthetic oligonucleotide
  Antisense strand to SEQ ID NO: 1274732
cucaggaguaacauagccc

SEQ ID NO: 1274734 - RNA, 19 nt, Artificial Sequence
  Description of Artificial Sequence: Synthetic oligonucleotide
  Sense strand starting at position 1170 of SEQ ID NO: 1241467
gguggcauuggcuggagua

SEQ ID NO: 1274735 - RNA, 19 nt, Artificial Sequence
  Description of Artificial Sequence: Synthetic oligonucleotide
  Antisense strand to SEQ ID NO: 1274734
uacuccagccaaugccacc

SEQ ID NO: 1274736 - RNA, 19 nt, Artificial Sequence
  Description of Artificial Sequence: Synthetic oligonucleotide
  Sense strand starting at position 1616 of SEQ ID NO: 1241467
gacaaagaagcaugauugu

SEQ ID NO: 1274737 - RNA, 19 nt, Artificial Sequence
  Description of Artificial Sequence: Synthetic oligonucleotide
  Antisense strand to SEQ ID NO: 1274736
acaaucaugcuucuuuguc

SEQ ID NO: 1274738 - RNA, 19 nt, Artificial Sequence
  Description of Artificial Sequence: Synthetic oligonucleotide
  Sense strand starting at position 1629 of SEQ ID NO: 1241467
gauugugacaagugucgau

SEQ ID NO: 1274739 - RNA, 19 nt, Artificial Sequence
  Description of Artificial Sequence: Synthetic oligonucleotide
  Antisense strand to SEQ ID NO: 1274738
aucgacacuugucacaauc

SEQ ID NO: 1274740 - RNA, 19 nt, Artificial Sequence
  Description of Artificial Sequence: Synthetic oligonucleotide
  Sense strand starting at position 1633 of SEQ ID NO: 1241467
gugacaagugucgaugaag

SEQ ID NO: 1274741 - RNA, 19 nt, Artificial Sequence
  Description of Artificial Sequence: Synthetic oligonucleotide
  Antisense strand to SEQ ID NO: 1274740
cuucaucgacacuugucac

SEQ ID NO: 1274742 - RNA, 19 nt, Artificial Sequence
  Description of Artificial Sequence: Synthetic oligonucleotide
  Sense strand starting at position 1733 of SEQ ID NO: 1241467
guaggagacucagaaugau

SEQ ID NO: 1274743 - RNA, 19 nt, Artificial Sequence
  Description of Artificial Sequence: Synthetic oligonucleotide
  Antisense strand to SEQ ID NO: 1274742
aucauucugagucuccuac

SEQ ID NO: 1274744 - RNA, 19 nt, Artificial Sequence
  Description of Artificial Sequence: Synthetic oligonucleotide
  Sense strand starting at position 1806 of SEQ ID NO: 1241467
guggaaccuccuuguguca

SEQ ID NO: 1274745 - RNA, 19 nt, Artificial Sequence
  Description of Artificial Sequence: Synthetic oligonucleotide
  Antisense strand to SEQ ID NO: 1274744
ugacacaaggagguuccac

SEQ ID NO: 1274746 - RNA, 19 nt, Artificial Sequence
  Description of Artificial Sequence: Synthetic oligonucleotide
  Sense strand starting at position 1983 of SEQ ID NO: 1241467
gcaggagucucucuaucug

SEQ ID NO: 1274747 - RNA, 19 nt, Artificial Sequence
  Description of Artificial Sequence: Synthetic oligonucleotide
  Antisense strand to SEQ ID NO: 1274746
cagauagagagacuccugc

SEQ ID NO: 1274748 - RNA, 19 nt, Artificial Sequence
  Description of Artificial Sequence: Synthetic oligonucleotide
  Sense strand starting at position 2009 of SEQ ID NO: 1241467
agcuccaguuccuuuauau

SEQ ID NO: 1274749 - RNA, 19 nt, Artificial Sequence
  Description of Artificial Sequence: Synthetic oligonucleotide
  Antisense strand to SEQ ID NO: 1274748
auauaaaggaacuggagcu

SEQ ID NO: 1274750 - RNA, 19 nt, Artificial Sequence
  Description of Artificial Sequence: Synthetic oligonucleotide
  Sense strand starting at position 2307 of SEQ ID NO: 1241467
uggcccuuaccucaguuau

SEQ ID NO: 1274751 - RNA, 19 nt, Artificial Sequence
  Description of Artificial Sequence: Synthetic oligonucleotide
  Antisense strand to SEQ ID NO: 1274750
auaacugagguaagggcca

SEQ ID NO: 1274752 - RNA, 19 nt, Artificial Sequence
  Description of Artificial Sequence: Synthetic oligonucleotide
  Sense strand starting at position 2309 of SEQ ID NO: 1241467
gcccuuaccucaguuauuu

SEQ ID NO: 1274753 - RNA, 19 nt, Artificial Sequence
  Description of Artificial Sequence: Synthetic oligonucleotide
  Antisense strand to SEQ ID NO: 1274752
aaauaacugagguaagggc

SEQ ID NO: 1274754 - RNA, 19 nt, Artificial Sequence
  Description of Artificial Sequence: Synthetic oligonucleotide
  Sense strand starting at position 2509 of SEQ ID NO: 1241467
cccagugcuagggacuaaa

SEQ ID NO: 1274755 - RNA, 19 nt, Artificial Sequence
  Description of Artificial Sequence: Synthetic oligonucleotide
  Antisense strand to SEQ ID NO: 1274754
uuuagucccuagcacuggg

SEQ ID NO: 1274756 - RNA, 19 nt, Artificial Sequence
  Description of Artificial Sequence: Synthetic oligonucleotide
  Sense strand starting at position 2608 of SEQ ID NO: 1241467
ggccucagucugcauaagu

SEQ ID NO: 1274757 - RNA, 19 nt, Artificial Sequence
  Description of Artificial Sequence: Synthetic oligonucleotide
  Antisense strand to SEQ ID NO: 1274756
acuuaugcagacugaggcc

SEQ ID NO: 1274758 - RNA, 19 nt, Artificial Sequence
  Description of Artificial Sequence: Synthetic oligonucleotide
  Sense strand starting at position 2662 of SEQ ID NO: 1241467
agacaaguguucucccaag

SEQ ID NO: 1274759 - RNA, 19 nt, Artificial Sequence
  Description of Artificial Sequence: Synthetic oligonucleotide
  Antisense strand to SEQ ID NO: 1274758
cuugggagaacacuugucu

SEQ ID NO: 1274760 - RNA, 19 nt, Artificial Sequence
  Description of Artificial Sequence: Synthetic oligonucleotide
  Sense strand starting at position 2731 of SEQ ID NO: 1241467
ccuaaugcuccugauagag

SEQ ID NO: 1274761 - RNA, 19 nt, Artificial Sequence
  Description of Artificial Sequence: Synthetic oligonucleotide
  Antisense strand to SEQ ID NO: 1274760
cucuaucaggagcauuagg

SEQ ID NO: 1274762 - RNA, 19 nt, Artificial Sequence
  Description of Artificial Sequence: Synthetic oligonucleotide
  Sense strand starting at position 2741 of SEQ ID NO: 1241467
cugauagaguggccaacau

SEQ ID NO: 1274763 - RNA, 19 nt, Artificial Sequence
  Description of Artificial Sequence: Synthetic oligonucleotide
  Antisense strand to SEQ ID NO: 1274762
auguuggccacucuaucag

SEQ ID NO: 1274764 - RNA, 19 nt, Artificial Sequence
  Description of Artificial Sequence: Synthetic oligonucleotide
  Sense strand starting at position 3048 of SEQ ID NO: 1241467
aauccuagggccugagaga

SEQ ID NO: 1274765 - RNA, 19 nt, Artificial Sequence
  Description of Artificial Sequence: Synthetic oligonucleotide
  Antisense strand to SEQ ID NO: 1274764
ucucucaggcccuaggauu

SEQ ID NO: 1274766 - RNA, 19 nt, Artificial Sequence
  Description of Artificial Sequence: Synthetic oligonucleotide
  Sense strand starting at position 3345 of SEQ ID NO: 1241467
gcuguaggugucaggucuu

SEQ ID NO: 1274767 - RNA, 19 nt, Artificial Sequence
  Description of Artificial Sequence: Synthetic oligonucleotide
  Antisense strand to SEQ ID NO: 1274766
aagaccugacaccuacagc

SEQ ID NO: 1274768 - RNA, 19 nt, Artificial Sequence
  Description of Artificial Sequence: Synthetic oligonucleotide
  Sense strand starting at position 3378 of SEQ ID NO: 1241467
uguuaugacuaaguggaca

SEQ ID NO: 1274769 - RNA, 19 nt, Artificial Sequence
  Description of Artificial Sequence: Synthetic oligonucleotide
  Antisense strand to SEQ ID NO: 1274768
uguccacuuagucauaaca

SEQ ID NO: 1274770 - RNA, 19 nt, Artificial Sequence
  Description of Artificial Sequence: Synthetic oligonucleotide
  Sense strand starting at position 3391 of SEQ ID NO: 1241467
uggacauuguguucaggaa

SEQ ID NO: 1274771 - RNA, 19 nt, Artificial Sequence
  Description of Artificial Sequence: Synthetic oligonucleotide
  Antisense strand to SEQ ID NO: 1274770
uuccugaacacaaugucca

SEQ ID NO: 1274772 - RNA, 19 nt, Artificial Sequence
  Description of Artificial Sequence: Synthetic oligonucleotide
  Sense strand starting at position 3542 of SEQ ID NO: 1241467
gggucagcuucucugggua

SEQ ID NO: 1274773 - RNA, 19 nt, Artificial Sequence
  Description of Artificial Sequence: Synthetic oligonucleotide
  Antisense strand to SEQ ID NO: 1274772
uacccagagaagcugaccc

SEQ ID NO: 1274774 - RNA, 19 nt, Artificial Sequence
  Description of Artificial Sequence: Synthetic oligonucleotide
  Sense strand starting at position 3563 of SEQ ID NO: 1241467
agcacuuuccauuaagaug

SEQ ID NO: 1274775 - RNA, 19 nt, Artificial Sequence
  Description of Artificial Sequence: Synthetic oligonucleotide
  Antisense strand to SEQ ID NO: 1274774
caucuuaauggaaagugcu

SEQ ID NO: 1274776 - RNA, 19 nt, Artificial Sequence
  Description of Artificial Sequence: Synthetic oligonucleotide
  Sense strand starting at position 3669 of SEQ ID NO: 1241467
cucaauguccuuggaggga

SEQ ID NO: 1274777 - RNA, 19 nt, Artificial Sequence
  Description of Artificial Sequence: Synthetic oligonucleotide
  Antisense strand to SEQ ID NO: 1274776
ucccuccaaggacauugag

SEQ ID NO: 1274778 - RNA, 19 nt, Artificial Sequence
  Description of Artificial Sequence: Synthetic oligonucleotide
  Sense strand starting at position 3916 of SEQ ID NO: 1241467
caggcuuuguccucaggga

SEQ ID NO: 1274779 - RNA, 19 nt, Artificial Sequence
  Description of Artificial Sequence: Synthetic oligonucleotide
  Antisense strand to SEQ ID NO: 1274778
ucccugaggacaaagccug

SEQ ID NO: 1274780 - RNA, 19 nt, Artificial Sequence
  Description of Artificial Sequence: Synthetic oligonucleotide
  Sense strand starting at position 3917 of SEQ ID NO: 1241467
aggcuuuguccucagggaa

SEQ ID NO: 1274781 - RNA, 19 nt, Artificial Sequence
  Description of Artificial Sequence: Synthetic oligonucleotide
  Antisense strand to SEQ ID NO: 1274780
uucccugaggacaaagccu

SEQ ID NO: 1274782 - RNA, 19 nt, Artificial Sequence
  Description of Artificial Sequence: Synthetic oligonucleotide
  Sense strand starting at position 3949 of SEQ ID NO: 1241467
gcaggccucacuugguaua

SEQ ID NO: 1274783 - RNA, 19 nt, Artificial Sequence
  Description of Artificial Sequence: Synthetic oligonucleotide
  Antisense strand to SEQ ID NO: 1274782
uauaccaagugaggccugc

SEQ ID NO: 1274784 - RNA, 19 nt, Artificial Sequence
  Description of Artificial Sequence: Synthetic oligonucleotide
  Sense strand starting at position 299 of SEQ ID NO: 1241468
uucugagcucccuguagga

SEQ ID NO: 1274785 - RNA, 19 nt, Artificial Sequence
  Description of Artificial Sequence: Synthetic oligonucleotide
  Antisense strand to SEQ ID NO: 1274784
uccuacagggagcucagaa

SEQ ID NO: 1274786 - RNA, 19 nt, Artificial Sequence
  Description of Artificial Sequence: Synthetic oligonucleotide
  Sense strand starting at position 384 of SEQ ID NO: 1241468
agcucuugauagccaagau

SEQ ID NO: 1274787 - RNA, 19 nt, Artificial Sequence
  Description of Artificial Sequence: Synthetic oligonucleotide
  Antisense strand to SEQ ID NO: 1274786
aucuuggcuaucaagagcu

SEQ ID NO: 1274788 - RNA, 19 nt, Artificial Sequence
  Description of Artificial Sequence: Synthetic oligonucleotide
  Sense strand starting at position 460 of SEQ ID NO: 1241468
ugcccagucuuacuagauu

SEQ ID NO: 1274789 - RNA, 19 nt, Artificial Sequence
  Description of Artificial Sequence: Synthetic oligonucleotide
  Antisense strand to SEQ ID NO: 1274788
aaucuaguaagacugggca

SEQ ID NO: 1274790 - RNA, 19 nt, Artificial Sequence
  Description of Artificial Sequence: Synthetic oligonucleotide
  Sense strand starting at position 515 of SEQ ID NO: 1241468
acucaagugugucuacaga

SEQ ID NO: 1274791 - RNA, 19 nt, Artificial Sequence
  Description of Artificial Sequence: Synthetic oligonucleotide
  Antisense strand to SEQ ID NO: 1274790
ucuguagacacacuugagu

SEQ ID NO: 1274792 - RNA, 19 nt, Artificial Sequence
  Description of Artificial Sequence: Synthetic oligonucleotide
  Sense strand starting at position 843 of SEQ ID NO: 1241468
gguaccuuucuuugagcca

SEQ ID NO: 1274793 - RNA, 19 nt, Artificial Sequence
  Description of Artificial Sequence: Synthetic oligonucleotide
  Antisense strand to SEQ ID NO: 1274792
uggcucaaagaaagguacc

SEQ ID NO: 1274794 - RNA, 19 nt, Artificial Sequence
  Description of Artificial Sequence: Synthetic oligonucleotide
  Sense strand starting at position 855 of SEQ ID NO: 1241468
ugagccaucugagagacaa

SEQ ID NO: 1274795 - RNA, 19 nt, Artificial Sequence
  Description of Artificial Sequence: Synthetic oligonucleotide
  Antisense strand to SEQ ID NO: 1274794
uugucucucagauggcuca

SEQ ID NO: 1274796 - RNA, 19 nt, Artificial Sequence
  Description of Artificial Sequence: Synthetic oligonucleotide
  Sense strand starting at position 880 of SEQ ID NO: 1241468
gucacauuuguucggcacu

SEQ ID NO: 1274797 - RNA, 19 nt, Artificial Sequence
  Description of Artificial Sequence: Synthetic oligonucleotide
  Antisense strand to SEQ ID NO: 1274796
agugccgaacaaaugugac

SEQ ID NO: 1274798 - RNA, 19 nt, Artificial Sequence
  Description of Artificial Sequence: Synthetic oligonucleotide
  Sense strand starting at position 882 of SEQ ID NO: 1241468
cacauuuguucggcacuuu

SEQ ID NO: 1274799 - RNA, 19 nt, Artificial Sequence
  Description of Artificial Sequence: Synthetic oligonucleotide
  Antisense strand to SEQ ID NO: 1274798
aaagugccgaacaaaugug

SEQ ID NO: 1274800 - RNA, 19 nt, Artificial Sequence
  Description of Artificial Sequence: Synthetic oligonucleotide
  Sense strand starting at position 1020 of SEQ ID NO: 1241468
ccaagacuugaaugcaagu

SEQ ID NO: 1274801 - RNA, 19 nt, Artificial Sequence
  Description of Artificial Sequence: Synthetic oligonucleotide
  Antisense strand to SEQ ID NO: 1274800
acuugcauucaagucuugg

SEQ ID NO: 1274802 - RNA, 19 nt, Artificial Sequence
  Description of Artificial Sequence: Synthetic oligonucleotide
  Sense strand starting at position 1084 of SEQ ID NO: 1241468
uugucagacuuuguggaca

SEQ ID NO: 1274803 - RNA, 19 nt, Artificial Sequence
  Description of Artificial Sequence: Synthetic oligonucleotide
  Antisense strand to SEQ ID NO: 1274802
uguccacaaagucugacaa

SEQ ID NO: 1274804 - RNA, 19 nt, Artificial Sequence
  Description of Artificial Sequence: Synthetic oligonucleotide
  Sense strand starting at position 1097 of SEQ ID NO: 1241468
uggacauucucagagagaa

SEQ ID NO: 1274805 - RNA, 19 nt, Artificial Sequence
  Description of Artificial Sequence: Synthetic oligonucleotide
  Antisense strand to SEQ ID NO: 1274804
uucucucugagaaugucca

SEQ ID NO: 1274806 - RNA, 19 nt, Artificial Sequence
  Description of Artificial Sequence: Synthetic oligonucleotide
  Sense strand starting at position 1168 of SEQ ID NO: 1241468
ccacaagcccucugaugaa

SEQ ID NO: 1274807 - RNA, 19 nt, Artificial Sequence
  Description of Artificial Sequence: Synthetic oligonucleotide
  Antisense strand to SEQ ID NO: 1274806
uucaucagagggcuugugg

SEQ ID NO: 1274808 - RNA, 19 nt, Artificial Sequence
  Description of Artificial Sequence: Synthetic oligonucleotide
  Sense strand starting at position 1337 of SEQ ID NO: 1241468
cugcguguucuucaguaca

SEQ ID NO: 1274809 - RNA, 19 nt, Artificial Sequence
  Description of Artificial Sequence: Synthetic oligonucleotide
  Antisense strand to SEQ ID NO: 1274808
uguacugaagaacacgcag

SEQ ID NO: 1274810 - RNA, 19 nt, Artificial Sequence
  Description of Artificial Sequence: Synthetic oligonucleotide
  Sense strand starting at position 1393 of SEQ ID NO: 1241468
guuccuucugcagagggua

SEQ ID NO: 1274811 - RNA, 19 nt, Artificial Sequence
  Description of Artificial Sequence: Synthetic oligonucleotide
  Antisense strand to SEQ ID NO: 1274810
uacccucugcagaaggaac

SEQ ID NO: 1274812 - RNA, 19 nt, Artificial Sequence
  Description of Artificial Sequence: Synthetic oligonucleotide
  Sense strand starting at position 1407 of SEQ ID NO: 1241468
ggguacagauacuauaaca

SEQ ID NO: 1274813 - RNA, 19 nt, Artificial Sequence
  Description of Artificial Sequence: Synthetic oligonucleotide
  Antisense strand to SEQ ID NO: 1274812
uguuauaguaucuguaccc

SEQ ID NO: 1274814 - RNA, 19 nt, Artificial Sequence
  Description of Artificial Sequence: Synthetic oligonucleotide
  Sense strand starting at position 1427 of SEQ ID NO: 1241468
ucaugacucguggaggcau

SEQ ID NO: 1274815 - RNA, 19 nt, Artificial Sequence
  Description of Artificial Sequence: Synthetic oligonucleotide
  Antisense strand to SEQ ID NO: 1274814
augccuccacgagucauga

SEQ ID NO: 1274816 - RNA, 19 nt, Artificial Sequence
  Description of Artificial Sequence: Synthetic oligonucleotide
  Sense strand starting at position 1611 of SEQ ID NO: 1241468
acuugauauuucuguauca

SEQ ID NO: 1274817 - RNA, 19 nt, Artificial Sequence
  Description of Artificial Sequence: Synthetic oligonucleotide
  Antisense strand to SEQ ID NO: 1274816
ugauacagaaauaucaagu

SEQ ID NO: 1274818 - RNA, 19 nt, Artificial Sequence
  Description of Artificial Sequence: Synthetic oligonucleotide
  Sense strand starting at position 1623 of SEQ ID NO: 1241468
uguaucagucagugaggua

SEQ ID NO: 1274819 - RNA, 19 nt, Artificial Sequence
  Description of Artificial Sequence: Synthetic oligonucleotide
  Antisense strand to SEQ ID NO: 1274818
uaccucacugacugauaca

SEQ ID NO: 1274820 - RNA, 19 nt, Artificial Sequence
  Description of Artificial Sequence: Synthetic oligonucleotide
  Sense strand starting at position 1624 of SEQ ID NO: 1241468
guaucagucagugagguac

SEQ ID NO: 1274821 - RNA, 19 nt, Artificial Sequence
  Description of Artificial Sequence: Synthetic oligonucleotide
  Antisense strand to SEQ ID NO: 1274820
guaccucacugacugauac

SEQ ID NO: 1274822 - RNA, 19 nt, Artificial Sequence
  Description of Artificial Sequence: Synthetic oligonucleotide
  Sense strand starting at position 1713 of SEQ ID NO: 1241468
cccuguaaugcauauuggu

SEQ ID NO: 1274823 - RNA, 19 nt, Artificial Sequence
  Description of Artificial Sequence: Synthetic oligonucleotide
  Antisense strand to SEQ ID NO: 1274822
accaauaugcauuacaggg

SEQ ID NO: 1274824 - RNA, 19 nt, Artificial Sequence
  Description of Artificial Sequence: Synthetic oligonucleotide
  Sense strand starting at position 1836 of SEQ ID NO: 1241468
caugaaguccugcaugaag

SEQ ID NO: 1274825 - RNA, 19 nt, Artificial Sequence
  Description of Artificial Sequence: Synthetic oligonucleotide
  Antisense strand to SEQ ID NO: 1274824
cuucaugcaggacuucaug

SEQ ID NO: 1274826 - RNA, 19 nt, Artificial Sequence
  Description of Artificial Sequence: Synthetic oligonucleotide
  Sense strand starting at position 1845 of SEQ ID NO: 1241468
cugcaugaagcuugcuauu

SEQ ID NO: 1274827 - RNA, 19 nt, Artificial Sequence
  Description of Artificial Sequence: Synthetic oligonucleotide
  Antisense strand to SEQ ID NO: 1274826
aauagcaagcuucaugcag

SEQ ID NO: 1274828 - RNA, 19 nt, Artificial Sequence
  Description of Artificial Sequence: Synthetic oligonucleotide
  Sense strand starting at position 2066 of SEQ ID NO: 1241468
ggcuguugucacuagaagc

SEQ ID NO: 1274829 - RNA, 19 nt, Artificial Sequence
  Description of Artificial Sequence: Synthetic oligonucleotide
  Antisense strand to SEQ ID NO: 1274828
gcuucuagugacaacagcc

SEQ ID NO: 1274830 - RNA, 19 nt, Artificial Sequence
  Description of Artificial Sequence: Synthetic oligonucleotide
  Sense strand starting at position 2129 of SEQ ID NO: 1241468
cgccucuccagcuaggaaa

SEQ ID NO: 1274831 - RNA, 19 nt, Artificial Sequence
  Description of Artificial Sequence: Synthetic oligonucleotide
  Antisense strand to SEQ ID NO: 1274830
uuuccuagcuggagaggcg

SEQ ID NO: 1274832 - RNA, 19 nt, Artificial Sequence
  Description of Artificial Sequence: Synthetic oligonucleotide
  Sense strand starting at position 2150 of SEQ ID NO: 1241468
auuggaaguggucgucauu

SEQ ID NO: 1274833 - RNA, 19 nt, Artificial Sequence
  Description of Artificial Sequence: Synthetic oligonucleotide
  Antisense strand to SEQ ID NO: 1274832
aaugacgaccacuuccaau

SEQ ID NO: 1274834 - RNA, 19 nt, Artificial Sequence
  Description of Artificial Sequence: Synthetic oligonucleotide
  Sense strand starting at position 2153 of SEQ ID NO: 1241468
ggaaguggucgucauuguu

SEQ ID NO: 1274835 - RNA, 19 nt, Artificial Sequence
  Description of Artificial Sequence: Synthetic oligonucleotide
  Antisense strand to SEQ ID NO: 1274834
aacaaugacgaccacuucc

SEQ ID NO: 1274836 - RNA, 19 nt, Artificial Sequence
  Description of Artificial Sequence: Synthetic oligonucleotide
  Sense strand starting at position 2721 of SEQ ID NO: 1241468
cagugcauucuuuaagguu

SEQ ID NO: 1274837 - RNA, 19 nt, Artificial Sequence
  Description of Artificial Sequence: Synthetic oligonucleotide
  Antisense strand to SEQ ID NO: 1274836
aaccuuaaagaaugcacug

SEQ ID NO: 1274838 - RNA, 19 nt, Artificial Sequence
  Description of Artificial Sequence: Synthetic oligonucleotide
  Sense strand starting at position 2771 of SEQ ID NO: 1241468
ugggaaaccucagcagaug

SEQ ID NO: 1274839 - RNA, 19 nt, Artificial Sequence
  Description of Artificial Sequence: Synthetic oligonucleotide
  Antisense strand to SEQ ID NO: 1274838
caucugcugagguuuccca

SEQ ID NO: 1274840 - RNA, 19 nt, Artificial Sequence
  Description of Artificial Sequence: Synthetic oligonucleotide
  Sense strand starting at position 2882 of SEQ ID NO: 1241468
gcugcauugguccuaguuu

SEQ ID NO: 1274841 - RNA, 19 nt, Artificial Sequence
  Description of Artificial Sequence: Synthetic oligonucleotide
  Antisense strand to SEQ ID NO: 1274840
aaacuaggaccaaugcagc

SEQ ID NO: 1274842 - RNA, 19 nt, Artificial Sequence
  Description of Artificial Sequence: Synthetic oligonucleotide
  Sense strand starting at position 3273 of SEQ ID NO: 1241468
acgauuuggugugaaaucu

SEQ ID NO: 1274843 - RNA, 19 nt, Artificial Sequence
  Description of Artificial Sequence: Synthetic oligonucleotide
  Antisense strand to SEQ ID NO: 1274842
agauuucacaccaaaucgu

SEQ ID NO: 1274844 - RNA, 19 nt, Artificial Sequence
  Description of Artificial Sequence: Synthetic oligonucleotide
  Sense strand starting at position 3325 of SEQ ID NO: 1241468
ugcggauuaguccaucuga

SEQ ID NO: 1274845 - RNA, 19 nt, Artificial Sequence
  Description of Artificial Sequence: Synthetic oligonucleotide
  Antisense strand to SEQ ID NO: 1274844
ucagauggacuaauccgca

SEQ ID NO: 1274846 - RNA, 19 nt, Artificial Sequence
  Description of Artificial Sequence: Synthetic oligonucleotide
  Sense strand starting at position 3595 of SEQ ID NO: 1241468
uauacaguugcugagguua

SEQ ID NO: 1274847 - RNA, 19 nt, Artificial Sequence
  Description of Artificial Sequence: Synthetic oligonucleotide
  Antisense strand to SEQ ID NO: 1274846
uaaccucagcaacuguaua

SEQ ID NO: 1274848 - RNA, 19 nt, Artificial Sequence
  Description of Artificial Sequence: Synthetic oligonucleotide
  Sense strand starting at position 3603 of SEQ ID NO: 1241468
ugcugagguuaucccagua

SEQ ID NO: 1274849 - RNA, 19 nt, Artificial Sequence
  Description of Artificial Sequence: Synthetic oligonucleotide
  Antisense strand to SEQ ID NO: 1274848
uacugggauaaccucagca

SEQ ID NO: 1274850 - RNA, 19 nt, Artificial Sequence
  Description of Artificial Sequence: Synthetic oligonucleotide
  Sense strand starting at position 3608 of SEQ ID NO: 1241468
agguuaucccaguagucug

SEQ ID NO: 1274851 - RNA, 19 nt, Artificial Sequence
  Description of Artificial Sequence: Synthetic oligonucleotide
  Antisense strand to SEQ ID NO: 1274850
cagacuacugggauaaccu

SEQ ID NO: 1274852 - RNA, 19 nt, Artificial Sequence
  Description of Artificial Sequence: Synthetic oligonucleotide
  Sense strand starting at position 3613 of SEQ ID NO: 1241468
aucccaguagucugugcua

SEQ ID NO: 1274853 - RNA, 19 nt, Artificial Sequence
  Description of Artificial Sequence: Synthetic oligonucleotide
  Antisense strand to SEQ ID NO: 1274852
uagcacagacuacugggau

SEQ ID NO: 1274854 - RNA, 19 nt, Artificial Sequence
  Description of Artificial Sequence: Synthetic oligonucleotide
  Sense strand starting at position 3616 of SEQ ID NO: 1241468
ccaguagucugugcuacua

SEQ ID NO: 1274855 - RNA, 19 nt, Artificial Sequence
  Description of Artificial Sequence: Synthetic oligonucleotide
  Antisense strand to SEQ ID NO: 1274854
uaguagcacagacuacugg

SEQ ID NO: 1274856 - RNA, 19 nt, Artificial Sequence
  Description of Artificial Sequence: Synthetic oligonucleotide
  Sense strand starting at position 3676 of SEQ ID NO: 1241468
cugccaggugcugaggaau

SEQ ID NO: 1274857 - RNA, 19 nt, Artificial Sequence
  Description of Artificial Sequence: Synthetic oligonucleotide
  Antisense strand to SEQ ID NO: 1274856
auuccucagcaccuggcag

SEQ ID NO: 1274858 - RNA, 19 nt, Artificial Sequence
  Description of Artificial Sequence: Synthetic oligonucleotide
  Sense strand starting at position 3772 of SEQ ID NO: 1241468
acagcuguugucugagguu

SEQ ID NO: 1274859 - RNA, 19 nt, Artificial Sequence
  Description of Artificial Sequence: Synthetic oligonucleotide
  Antisense strand to SEQ ID NO: 1274858
aaccucagacaacagcugu

SEQ ID NO: 1274860 - RNA, 19 nt, Artificial Sequence
  Description of Artificial Sequence: Synthetic oligonucleotide
  Sense strand starting at position 3784 of SEQ ID NO: 1241468
ugagguucccuguaggaac

SEQ ID NO: 1274861 - RNA, 19 nt, Artificial Sequence
  Description of Artificial Sequence: Synthetic oligonucleotide
  Antisense strand to SEQ ID NO: 1274860
guuccuacagggaaccuca

SEQ ID NO: 1274862 - RNA, 19 nt, Artificial Sequence
  Description of Artificial Sequence: Synthetic oligonucleotide
  Sense strand starting at position 3923 of SEQ ID NO: 1241468
ggacguaguugagccauuu

SEQ ID NO: 1274863 - RNA, 19 nt, Artificial Sequence
  Description of Artificial Sequence: Synthetic oligonucleotide
  Antisense strand to SEQ ID NO: 1274862
aaauggcucaacuacgucc

SEQ ID NO: 1274864 - RNA, 19 nt, Artificial Sequence
  Description of Artificial Sequence: Synthetic oligonucleotide
  Sense strand starting at position 234 of SEQ ID NO: 1241469
guuaguagcgcuuucugga

SEQ ID NO: 1274865 - RNA, 19 nt, Artificial Sequence
  Description of Artificial Sequence: Synthetic oligonucleotide
  Antisense strand to SEQ ID NO: 1274864
uccagaaagcgcuacuaac

SEQ ID NO: 1274866 - RNA, 19 nt, Artificial Sequence
  Description of Artificial Sequence: Synthetic oligonucleotide
  Sense strand starting at position 239 of SEQ ID NO: 1241469
uagcgcuuucuggaaugga

SEQ ID NO: 1274867 - RNA, 19 nt, Artificial Sequence
  Description of Artificial Sequence: Synthetic oligonucleotide
  Antisense strand to SEQ ID NO: 1274866
uccauuccagaaagcgcua

SEQ ID NO: 1274868 - RNA, 19 nt, Artificial Sequence
  Description of Artificial Sequence: Synthetic oligonucleotide
  Sense strand starting at position 283 of SEQ ID NO: 1241469
cuguuaauuguccaguuga

SEQ ID NO: 1274869 - RNA, 19 nt, Artificial Sequence
  Description of Artificial Sequence: Synthetic oligonucleotide
  Antisense strand to SEQ ID NO: 1274868
ucaacuggacaauuaacag

SEQ ID NO: 1274870 - RNA, 19 nt, Artificial Sequence
  Description of Artificial Sequence: Synthetic oligonucleotide
  Sense strand starting at position 288 of SEQ ID NO: 1241469
aauuguccaguugaaguaa

SEQ ID NO: 1274871 - RNA, 19 nt, Artificial Sequence
  Description of Artificial Sequence: Synthetic oligonucleotide
  Antisense strand to SEQ ID NO: 1274870
uuacuucaacuggacaauu

SEQ ID NO: 1274872 - RNA, 19 nt, Artificial Sequence
  Description of Artificial Sequence: Synthetic oligonucleotide
  Sense strand starting at position 366 of SEQ ID NO: 1241469
acaccaaguuugcugacau

SEQ ID NO: 1274873 - RNA, 19 nt, Artificial Sequence
  Description of Artificial Sequence: Synthetic oligonucleotide
  Antisense strand to SEQ ID NO: 1274872
augucagcaaacuuggugu

SEQ ID NO: 1274874 - RNA, 19 nt, Artificial Sequence
  Description of Artificial Sequence: Synthetic oligonucleotide
  Sense strand starting at position 421 of SEQ ID NO: 1241469
cccugauuaugguuguaau

SEQ ID NO: 1274875 - RNA, 19 nt, Artificial Sequence
  Description of Artificial Sequence: Synthetic oligonucleotide
  Antisense strand to SEQ ID NO: 1274874
auuacaaccauaaucaggg

SEQ ID NO: 1274876 - RNA, 19 nt, Artificial Sequence
  Description of Artificial Sequence: Synthetic oligonucleotide
  Sense strand starting at position 422 of SEQ ID NO: 1241469
ccugauuaugguuguaauc

SEQ ID NO: 1274877 - RNA, 19 nt, Artificial Sequence
  Description of Artificial Sequence: Synthetic oligonucleotide
  Antisense strand to SEQ ID NO: 1274876
gauuacaaccauaaucagg

SEQ ID NO: 1274878 - RNA, 19 nt, Artificial Sequence
  Description of Artificial Sequence: Synthetic oligonucleotide
  Sense strand starting at position 428 of SEQ ID NO: 1241469
uaugguuguaaucgagaga

SEQ ID NO: 1274879 - RNA, 19 nt, Artificial Sequence
  Description of Artificial Sequence: Synthetic oligonucleotide
  Antisense strand to SEQ ID NO: 1274878
ucucucgauuacaaccaua

SEQ ID NO: 1274880 - RNA, 19 nt, Artificial Sequence
  Description of Artificial Sequence: Synthetic oligonucleotide
  Sense strand starting at position 431 of SEQ ID NO: 1241469
gguuguaaucgagagacua

SEQ ID NO: 1274881 - RNA, 19 nt, Artificial Sequence
  Description of Artificial Sequence: Synthetic oligonucleotide
  Antisense strand to SEQ ID NO: 1274880
uagucucucgauuacaacc

SEQ ID NO: 1274882 - RNA, 19 nt, Artificial Sequence
  Description of Artificial Sequence: Synthetic oligonucleotide
  Sense strand starting at position 446 of SEQ ID NO: 1241469
acuaauaaggccuguaucu

SEQ ID NO: 1274883 - RNA, 19 nt, Artificial Sequence
  Description of Artificial Sequence: Synthetic oligonucleotide
  Antisense strand to SEQ ID NO: 1274882
agauacaggccuuauuagu

SEQ ID NO: 1274884 - RNA, 19 nt, Artificial Sequence
  Description of Artificial Sequence: Synthetic oligonucleotide
  Sense strand starting at position 448 of SEQ ID NO: 1241469
uaauaaggccuguaucuga

SEQ ID NO: 1274885 - RNA, 19 nt, Artificial Sequence
  Description of Artificial Sequence: Synthetic oligonucleotide
  Antisense strand to SEQ ID NO: 1274884
ucagauacaggccuuauua

SEQ ID NO: 1274886 - RNA, 19 nt, Artificial Sequence
  Description of Artificial Sequence: Synthetic oligonucleotide
  Sense strand starting at position 488 of SEQ ID NO: 1241469
augacuguaaaguguuuga

SEQ ID NO: 1274887 - RNA, 19 nt, Artificial Sequence
  Description of Artificial Sequence: Synthetic oligonucleotide
  Antisense strand to SEQ ID NO: 1274886
ucaaacacuuuacagucau

SEQ ID NO: 1274888 - RNA, 19 nt, Artificial Sequence
  Description of Artificial Sequence: Synthetic oligonucleotide
  Sense strand starting at position 491 of SEQ ID NO: 1241469
acuguaaaguguuugagga

SEQ ID NO: 1274889 - RNA, 19 nt, Artificial Sequence
  Description of Artificial Sequence: Synthetic oligonucleotide
  Antisense strand to SEQ ID NO: 1274888
uccucaaacacuuuacagu

SEQ ID NO: 1274890 - RNA, 19 nt, Artificial Sequence
  Description of Artificial Sequence: Synthetic oligonucleotide
  Sense strand starting at position 492 of SEQ ID NO: 1241469
cuguaaaguguuugaggau

SEQ ID NO: 1274891 - RNA, 19 nt, Artificial Sequence
  Description of Artificial Sequence: Synthetic oligonucleotide
  Antisense strand to SEQ ID NO: 1274890
auccucaaacacuuuacag

SEQ ID NO: 1274892 - RNA, 19 nt, Artificial Sequence
  Description of Artificial Sequence: Synthetic oligonucleotide
  Sense strand starting at position 518 of SEQ ID NO: 1241469
gguaauuaaagacgguuaa

SEQ ID NO: 1274893 - RNA, 19 nt, Artificial Sequence
  Description of Artificial Sequence: Synthetic oligonucleotide
  Antisense strand to SEQ ID NO: 1274892
uuaaccgucuuuaauuacc

SEQ ID NO: 1274894 - RNA, 19 nt, Artificial Sequence
  Description of Artificial Sequence: Synthetic oligonucleotide
  Sense strand starting at position 519 of SEQ ID NO: 1241469
guaauuaaagacgguuaaa

SEQ ID NO: 1274895 - RNA, 19 nt, Artificial Sequence
  Description of Artificial Sequence: Synthetic oligonucleotide
  Antisense strand to SEQ ID NO: 1274894
uuuaaccgucuuuaauuac

SEQ ID NO: 1274896 - RNA, 19 nt, Artificial Sequence
  Description of Artificial Sequence: Synthetic oligonucleotide
  Sense strand starting at position 529 of SEQ ID NO: 1241469
acgguuaaacacgauuaua

SEQ ID NO: 1274897 - RNA, 19 nt, Artificial Sequence
  Description of Artificial Sequence: Synthetic oligonucleotide
  Antisense strand to SEQ ID NO: 1274896
uauaaucguguuuaaccgu

SEQ ID NO: 1274898 - RNA, 19 nt, Artificial Sequence
  Description of Artificial Sequence: Synthetic oligonucleotide
  Sense strand starting at position 537 of SEQ ID NO: 1241469
acacgauuauaaucuaaug

SEQ ID NO: 1274899 - RNA, 19 nt, Artificial Sequence
  Description of Artificial Sequence: Synthetic oligonucleotide
  Antisense strand to SEQ ID NO: 1274898
cauuagauuauaaucgugu

SEQ ID NO: 1274900 - RNA, 19 nt, Artificial Sequence
  Description of Artificial Sequence: Synthetic oligonucleotide
  Sense strand starting at position 626 of SEQ ID NO: 1241469
ucacguuaacccgaaucau

SEQ ID NO: 1274901 - RNA, 19 nt, Artificial Sequence
  Description of Artificial Sequence: Synthetic oligonucleotide
  Antisense strand to SEQ ID NO: 1274900
augauucggguuaacguga

SEQ ID NO: 1274902 - RNA, 19 nt, Artificial Sequence
  Description of Artificial Sequence: Synthetic oligonucleotide
  Sense strand starting at position 731 of SEQ ID NO: 1241469
ggagauauccacugccaca

SEQ ID NO: 1274903 - RNA, 19 nt, Artificial Sequence
  Description of Artificial Sequence: Synthetic oligonucleotide
  Antisense strand to SEQ ID NO: 1274902
uguggcaguggauaucucc

SEQ ID NO: 1274904 - RNA, 19 nt, Artificial Sequence
  Description of Artificial Sequence: Synthetic oligonucleotide
  Sense strand starting at position 2337 of SEQ ID NO: 1241469
gaacaagccguuuacaagu

SEQ ID NO: 1274905 - RNA, 19 nt, Artificial Sequence
  Description of Artificial Sequence: Synthetic oligonucleotide
  Antisense strand to SEQ ID NO: 1274904
acuuguaaacggcuuguuc

SEQ ID NO: 1274906 - RNA, 19 nt, Artificial Sequence
  Description of Artificial Sequence: Synthetic oligonucleotide
  Sense strand starting at position 2391 of SEQ ID NO: 1241469
uaauguuugcccugaccag

SEQ ID NO: 1274907 - RNA, 19 nt, Artificial Sequence
  Description of Artificial Sequence: Synthetic oligonucleotide
  Antisense strand to SEQ ID NO: 1274906
cuggucagggcaaacauua

SEQ ID NO: 1274908 - RNA, 19 nt, Artificial Sequence
  Description of Artificial Sequence: Synthetic oligonucleotide
  Sense strand starting at position 2510 of SEQ ID NO: 1241469
ugucgaaacguggugguuu

SEQ ID NO: 1274909 - RNA, 19 nt, Artificial Sequence
  Description of Artificial Sequence: Synthetic oligonucleotide
  Antisense strand to SEQ ID NO: 1274908
aaaccaccacguuucgaca

SEQ ID NO: 1274910 - RNA, 19 nt, Artificial Sequence
  Description of Artificial Sequence: Synthetic oligonucleotide
  Sense strand starting at position 2851 of SEQ ID NO: 1241469
ugcucuaguccacaauuga

SEQ ID NO: 1274911 - RNA, 19 nt, Artificial Sequence
  Description of Artificial Sequence: Synthetic oligonucleotide
  Antisense strand to SEQ ID NO: 1274910
ucaauuguggacuagagca

SEQ ID NO: 1274912 - RNA, 19 nt, Artificial Sequence
  Description of Artificial Sequence: Synthetic oligonucleotide
  Sense strand starting at position 2885 of SEQ ID NO: 1241469
agcugagacagguagugua

SEQ ID NO: 1274913 - RNA, 19 nt, Artificial Sequence
  Description of Artificial Sequence: Synthetic oligonucleotide
  Antisense strand to SEQ ID NO: 1274912
uacacuaccugucucagcu

SEQ ID NO: 1274914 - RNA, 19 nt, Artificial Sequence
  Description of Artificial Sequence: Synthetic oligonucleotide
  Sense strand starting at position 3054 of SEQ ID NO: 1241469
uauuuauuaugcucgcaga

SEQ ID NO: 1274915 - RNA, 19 nt, Artificial Sequence
  Description of Artificial Sequence: Synthetic oligonucleotide
  Antisense strand to SEQ ID NO: 1274914
ucugcgagcauaauaaaua

SEQ ID NO: 1274916 - RNA, 19 nt, Artificial Sequence
  Description of Artificial Sequence: Synthetic oligonucleotide
  Sense strand starting at position 3055 of SEQ ID NO: 1241469
auuuauuaugcucgcagau

SEQ ID NO: 1274917 - RNA, 19 nt, Artificial Sequence
  Description of Artificial Sequence: Synthetic oligonucleotide
  Antisense strand to SEQ ID NO: 1274916
aucugcgagcauaauaaau

SEQ ID NO: 1274918 - RNA, 19 nt, Artificial Sequence
  Description of Artificial Sequence: Synthetic oligonucleotide
  Sense strand starting at position 3069 of SEQ ID NO: 1241469
cagauucugugccucugaa

SEQ ID NO: 1274919 - RNA, 19 nt, Artificial Sequence
  Description of Artificial Sequence: Synthetic oligonucleotide
  Antisense strand to SEQ ID NO: 1274918
uucagaggcacagaaucug

SEQ ID NO: 1274920 - RNA, 19 nt, Artificial Sequence
  Description of Artificial Sequence: Synthetic oligonucleotide
  Sense strand starting at position 3146 of SEQ ID NO: 1241469
guuggaagacucuaaggcu

SEQ ID NO: 1274921 - RNA, 19 nt, Artificial Sequence
  Description of Artificial Sequence: Synthetic oligonucleotide
  Antisense strand to SEQ ID NO: 1274920
agccuuagagucuuccaac

SEQ ID NO: 1274922 - RNA, 19 nt, Artificial Sequence
  Description of Artificial Sequence: Synthetic oligonucleotide
  Sense strand starting at position 3204 of SEQ ID NO: 1241469
augguugaugcaggauaaa

SEQ ID NO: 1274923 - RNA, 19 nt, Artificial Sequence
  Description of Artificial Sequence: Synthetic oligonucleotide
  Antisense strand to SEQ ID NO: 1274922
uuuauccugcaucaaccau

SEQ ID NO: 1274924 - RNA, 19 nt, Artificial Sequence
  Description of Artificial Sequence: Synthetic oligonucleotide
  Sense strand starting at position 3236 of SEQ ID NO: 1241469
aguucuaguccauguagac

SEQ ID NO: 1274925 - RNA, 19 nt, Artificial Sequence
  Description of Artificial Sequence: Synthetic oligonucleotide
  Antisense strand to SEQ ID NO: 1274924
gucuacauggacuagaacu

SEQ ID NO: 1274926 - RNA, 19 nt, Artificial Sequence
  Description of Artificial Sequence: Synthetic oligonucleotide
  Sense strand starting at position 3366 of SEQ ID NO: 1241469
auaaccuagccuuagaagu

SEQ ID NO: 1274927 - RNA, 19 nt, Artificial Sequence
  Description of Artificial Sequence: Synthetic oligonucleotide
  Antisense strand to SEQ ID NO: 1274926
acuucuaaggcuagguuau

SEQ ID NO: 1274928 - RNA, 19 nt, Artificial Sequence
  Description of Artificial Sequence: Synthetic oligonucleotide
  Sense strand starting at position 3659 of SEQ ID NO: 1241469
cagggagacucccucucau

SEQ ID NO: 1274929 - RNA, 19 nt, Artificial Sequence
  Description of Artificial Sequence: Synthetic oligonucleotide
  Antisense strand to SEQ ID NO: 1274928
augagagggagucucccug

SEQ ID NO: 1274930 - RNA, 19 nt, Artificial Sequence
  Description of Artificial Sequence: Synthetic oligonucleotide
  Sense strand starting at position 3706 of SEQ ID NO: 1241469
gugucaguucugcugcauu

SEQ ID NO: 1274931 - RNA, 19 nt, Artificial Sequence
  Description of Artificial Sequence: Synthetic oligonucleotide
  Antisense strand to SEQ ID NO: 1274930
aaugcagcagaacugacac

SEQ ID NO: 1274932 - RNA, 19 nt, Artificial Sequence
  Description of Artificial Sequence: Synthetic oligonucleotide
  Sense strand starting at position 3708 of SEQ ID NO: 1241469
gucaguucugcugcauugu

SEQ ID NO: 1274933 - RNA, 19 nt, Artificial Sequence
  Description of Artificial Sequence: Synthetic oligonucleotide
  Antisense strand to SEQ ID NO: 1274932
acaaugcagcagaacugac

SEQ ID NO: 1274934 - RNA, 19 nt, Artificial Sequence
  Description of Artificial Sequence: Synthetic oligonucleotide
  Sense strand starting at position 3721 of SEQ ID NO: 1241469
cauuguaucuaggcagaca

SEQ ID NO: 1274935 - RNA, 19 nt, Artificial Sequence
  Description of Artificial Sequence: Synthetic oligonucleotide
  Antisense strand to SEQ ID NO: 1274934
ugucugccuagauacaaug

SEQ ID NO: 1274936 - RNA, 19 nt, Artificial Sequence
  Description of Artificial Sequence: Synthetic oligonucleotide
  Sense strand starting at position 3776 of SEQ ID NO: 1241469
acucuacucuugguggaga

SEQ ID NO: 1274937 - RNA, 19 nt, Artificial Sequence
  Description of Artificial Sequence: Synthetic oligonucleotide
  Antisense strand to SEQ ID NO: 1274936
ucuccaccaagaguagagu

SEQ ID NO: 1274938 - RNA, 19 nt, Artificial Sequence
  Description of Artificial Sequence: Synthetic oligonucleotide
  Sense strand starting at position 3778 of SEQ ID NO: 1241469
ucuacucuugguggagaga

SEQ ID NO: 1274939 - RNA, 19 nt, Artificial Sequence
  Description of Artificial Sequence: Synthetic oligonucleotide
  Antisense strand to SEQ ID NO: 1274938
ucucuccaccaagaguaga

SEQ ID NO: 1274940 - RNA, 19 nt, Artificial Sequence
  Description of Artificial Sequence: Synthetic oligonucleotide
  Sense strand starting at position 3795 of SEQ ID NO: 1241469
gaggcaagguucucaaaga

SEQ ID NO: 1274941 - RNA, 19 nt, Artificial Sequence
  Description of Artificial Sequence: Synthetic oligonucleotide
  Antisense strand to SEQ ID NO: 1274940
ucuuugagaaccuugccuc

SEQ ID NO: 1274942 - RNA, 19 nt, Artificial Sequence
  Description of Artificial Sequence: Synthetic oligonucleotide
  Sense strand starting at position 3853 of SEQ ID NO: 1241469
auguauaacuugcuacaga

SEQ ID NO: 1274943 - RNA, 19 nt, Artificial Sequence
  Description of Artificial Sequence: Synthetic oligonucleotide
  Antisense strand to SEQ ID NO: 1274942
ucuguagcaaguuauacau

SEQ ID NO: 1274944 - RNA, 19 nt, Artificial Sequence
  Description of Artificial Sequence: Synthetic oligonucleotide
  Sense strand starting at position 7 of SEQ ID NO: 1241470
gagguuagcguccagagga

SEQ ID NO: 1274945 - RNA, 19 nt, Artificial Sequence
  Description of Artificial Sequence: Synthetic oligonucleotide
  Antisense strand to SEQ ID NO: 1274944
uccucuggacgcuaaccuc

SEQ ID NO: 1274946 - RNA, 19 nt, Artificial Sequence
  Description of Artificial Sequence: Synthetic oligonucleotide
  Sense strand starting at position 225 of SEQ ID NO: 1241470
ccguccacccuuuagaaga

SEQ ID NO: 1274947 - RNA, 19 nt, Artificial Sequence
  Description of Artificial Sequence: Synthetic oligonucleotide
  Antisense strand to SEQ ID NO: 1274946
ucuucuaaaggguggacgg

SEQ ID NO: 1274948 - RNA, 19 nt, Artificial Sequence
  Description of Artificial Sequence: Synthetic oligonucleotide
  Sense strand starting at position 388 of SEQ ID NO: 1241470
ggguuugaugagggaguga

SEQ ID NO: 1274949 - RNA, 19 nt, Artificial Sequence
  Description of Artificial Sequence: Synthetic oligonucleotide
  Antisense strand to SEQ ID NO: 1274948
ucacucccucaucaaaccc

SEQ ID NO: 1274950 - RNA, 19 nt, Artificial Sequence
  Description of Artificial Sequence: Synthetic oligonucleotide
  Sense strand starting at position 408 of SEQ ID NO: 1241470
gcuagaacuuucguaacua

SEQ ID NO: 1274951 - RNA, 19 nt, Artificial Sequence
  Description of Artificial Sequence: Synthetic oligonucleotide
  Antisense strand to SEQ ID NO: 1274950
uaguuacgaaaguucuagc

SEQ ID NO: 1274952 - RNA, 19 nt, Artificial Sequence
  Description of Artificial Sequence: Synthetic oligonucleotide
  Sense strand starting at position 409 of SEQ ID NO: 1241470
cuagaacuuucguaacuag

SEQ ID NO: 1274953 - RNA, 19 nt, Artificial Sequence
  Description of Artificial Sequence: Synthetic oligonucleotide
  Antisense strand to SEQ ID NO: 1274952
cuaguuacgaaaguucuag

SEQ ID NO: 1274954 - RNA, 19 nt, Artificial Sequence
  Description of Artificial Sequence: Synthetic oligonucleotide
  Sense strand starting at position 439 of SEQ ID NO: 1241470
uugucuccugcgccagaua

SEQ ID NO: 1274955 - RNA, 19 nt, Artificial Sequence
  Description of Artificial Sequence: Synthetic oligonucleotide
  Antisense strand to SEQ ID NO: 1274954
uaucuggcgcaggagacaa

SEQ ID NO: 1274956 - RNA, 19 nt, Artificial Sequence
  Description of Artificial Sequence: Synthetic oligonucleotide
  Sense strand starting at position 574 of SEQ ID NO: 1241470
ucccucuucuagccgaaua

SEQ ID NO: 1274957 - RNA, 19 nt, Artificial Sequence
  Description of Artificial Sequence: Synthetic oligonucleotide
  Antisense strand to SEQ ID NO: 1274956
uauucggcuagaagaggga

SEQ ID NO: 1274958 - RNA, 19 nt, Artificial Sequence
  Description of Artificial Sequence: Synthetic oligonucleotide
  Sense strand starting at position 576 of SEQ ID NO: 1241470
ccucuucuagccgaauaga

SEQ ID NO: 1274959 - RNA, 19 nt, Artificial Sequence
  Description of Artificial Sequence: Synthetic oligonucleotide
  Antisense strand to SEQ ID NO: 1274958
ucuauucggcuagaagagg

SEQ ID NO: 1274960 - RNA, 19 nt, Artificial Sequence
  Description of Artificial Sequence: Synthetic oligonucleotide
  Sense strand starting at position 910 of SEQ ID NO: 1241470
gccugaaggucucauuuga

SEQ ID NO: 1274961 - RNA, 19 nt, Artificial Sequence
  Description of Artificial Sequence: Synthetic oligonucleotide
  Antisense strand to SEQ ID NO: 1274960
ucaaaugagaccuucaggc

SEQ ID NO: 1274962 - RNA, 19 nt, Artificial Sequence
  Description of Artificial Sequence: Synthetic oligonucleotide
  Sense strand starting at position 948 of SEQ ID NO: 1241470
ucuagaaaccguugagaga

SEQ ID NO: 1274963 - RNA, 19 nt, Artificial Sequence
  Description of Artificial Sequence: Synthetic oligonucleotide
  Antisense strand to SEQ ID NO: 1274962
ucucucaacgguuucuaga

SEQ ID NO: 1274964 - RNA, 19 nt, Artificial Sequence
  Description of Artificial Sequence: Synthetic oligonucleotide
  Sense strand starting at position 1256 of SEQ ID NO: 1241470
cagagaucucggcgcggga

SEQ ID NO: 1274965 - RNA, 19 nt, Artificial Sequence
  Description of Artificial Sequence: Synthetic oligonucleotide
  Antisense strand to SEQ ID NO: 1274964
ucccgcgccgagaucucug

SEQ ID NO: 1274966 - RNA, 19 nt, Artificial Sequence
  Description of Artificial Sequence: Synthetic oligonucleotide
  Sense strand starting at position 1682 of SEQ ID NO: 1241470
cugucugcccgacuguuua

SEQ ID NO: 1274967 - RNA, 19 nt, Artificial Sequence
  Description of Artificial Sequence: Synthetic oligonucleotide
  Antisense strand to SEQ ID NO: 1274966
uaaacagucgggcagacag

SEQ ID NO: 1274968 - RNA, 19 nt, Artificial Sequence
  Description of Artificial Sequence: Synthetic oligonucleotide
  Sense strand starting at position 2174 of SEQ ID NO: 1241470
agaguuugcggaggaggaa

SEQ ID NO: 1274969 - RNA, 19 nt, Artificial Sequence
  Description of Artificial Sequence: Synthetic oligonucleotide
  Antisense strand to SEQ ID NO: 1274968
uuccuccuccgcaaacucu

SEQ ID NO: 1274970 - RNA, 19 nt, Artificial Sequence
  Description of Artificial Sequence: Synthetic oligonucleotide
  Sense strand starting at position 2202 of SEQ ID NO: 1241470
gagcucuugcugcagggaa

SEQ ID NO: 1274971 - RNA, 19 nt, Artificial Sequence
  Description of Artificial Sequence: Synthetic oligonucleotide
  Antisense strand to SEQ ID NO: 1274970
uucccugcagcaagagcuc

SEQ ID NO: 1274972 - RNA, 19 nt, Artificial Sequence
  Description of Artificial Sequence: Synthetic oligonucleotide
  Sense strand starting at position 2393 of SEQ ID NO: 1241470
ugcagaguacucugaagca

SEQ ID NO: 1274973 - RNA, 19 nt, Artificial Sequence
  Description of Artificial Sequence: Synthetic oligonucleotide
  Antisense strand to SEQ ID NO: 1274972
ugcuucagaguacucugca

SEQ ID NO: 1274974 - RNA, 19 nt, Artificial Sequence
  Description of Artificial Sequence: Synthetic oligonucleotide
  Sense strand starting at position 2755 of SEQ ID NO: 1241470
ggccguuuccuguggcuga

SEQ ID NO: 1274975 - RNA, 19 nt, Artificial Sequence
  Description of Artificial Sequence: Synthetic oligonucleotide
  Antisense strand to SEQ ID NO: 1274974
ucagccacaggaaacggcc

SEQ ID NO: 1274976 - RNA, 19 nt, Artificial Sequence
  Description of Artificial Sequence: Synthetic oligonucleotide
  Sense strand starting at position 2759 of SEQ ID NO: 1241470
guuuccuguggcugagacu

SEQ ID NO: 1274977 - RNA, 19 nt, Artificial Sequence
  Description of Artificial Sequence: Synthetic oligonucleotide
  Antisense strand to SEQ ID NO: 1274976
agucucagccacaggaaac

SEQ ID NO: 1274978 - RNA, 19 nt, Artificial Sequence
  Description of Artificial Sequence: Synthetic oligonucleotide
  Sense strand starting at position 3019 of SEQ ID NO: 1241470
uggagugguugcccuaacu

SEQ ID NO: 1274979 - RNA, 19 nt, Artificial Sequence
  Description of Artificial Sequence: Synthetic oligonucleotide
  Antisense strand to SEQ ID NO: 1274978
aguuagggcaaccacucca

SEQ ID NO: 1274980 - RNA, 19 nt, Artificial Sequence
  Description of Artificial Sequence: Synthetic oligonucleotide
  Sense strand starting at position 3267 of SEQ ID NO: 1241470
gugguuguuuagguuagga

SEQ ID NO: 1274981 - RNA, 19 nt, Artificial Sequence
  Description of Artificial Sequence: Synthetic oligonucleotide
  Antisense strand to SEQ ID NO: 1274980
uccuaaccuaaacaaccac

SEQ ID NO: 1274982 - RNA, 19 nt, Artificial Sequence
  Description of Artificial Sequence: Synthetic oligonucleotide
  Sense strand starting at position 3269 of SEQ ID NO: 1241470
gguuguuuagguuaggagu

SEQ ID NO: 1274983 - RNA, 19 nt, Artificial Sequence
  Description of Artificial Sequence: Synthetic oligonucleotide
  Antisense strand to SEQ ID NO: 1274982
acuccuaaccuaaacaacc

SEQ ID NO: 1274984 - RNA, 19 nt, Artificial Sequence
  Description of Artificial Sequence: Synthetic oligonucleotide
  Sense strand starting at position 3270 of SEQ ID NO: 1241470
guuguuuagguuaggaguu

SEQ ID NO: 1274985 - RNA, 19 nt, Artificial Sequence
  Description of Artificial Sequence: Synthetic oligonucleotide
  Antisense strand to SEQ ID NO: 1274984
aacuccuaaccuaaacaac

SEQ ID NO: 1274986 - RNA, 19 nt, Artificial Sequence
  Description of Artificial Sequence: Synthetic oligonucleotide
  Sense strand starting at position 3276 of SEQ ID NO: 1241470
uagguuaggaguuggagaa

SEQ ID NO: 1274987 - RNA, 19 nt, Artificial Sequence
  Description of Artificial Sequence: Synthetic oligonucleotide
  Antisense strand to SEQ ID NO: 1274986
uucuccaacuccuaaccua

SEQ ID NO: 1274988 - RNA, 19 nt, Artificial Sequence
  Description of Artificial Sequence: Synthetic oligonucleotide
  Sense strand starting at position 3488 of SEQ ID NO: 1241470
ccacccgauucuuuguaau

SEQ ID NO: 1274989 - RNA, 19 nt, Artificial Sequence
  Description of Artificial Sequence: Synthetic oligonucleotide
  Antisense strand to SEQ ID NO: 1274988
auuacaaagaaucgggugg

SEQ ID NO: 1274990 - RNA, 19 nt, Artificial Sequence
  Description of Artificial Sequence: Synthetic oligonucleotide
  Sense strand starting at position 3491 of SEQ ID NO: 1241470
cccgauucuuuguaaucca

SEQ ID NO: 1274991 - RNA, 19 nt, Artificial Sequence
  Description of Artificial Sequence: Synthetic oligonucleotide
  Antisense strand to SEQ ID NO: 1274990
uggauuacaaagaaucggg

SEQ ID NO: 1274992 - RNA, 19 nt, Artificial Sequence
  Description of Artificial Sequence: Synthetic oligonucleotide
  Sense strand starting at position 3518 of SEQ ID NO: 1241470
ugcucuaagauugggugau

SEQ ID NO: 1274993 - RNA, 19 nt, Artificial Sequence
  Description of Artificial Sequence: Synthetic oligonucleotide
  Antisense strand to SEQ ID NO: 1274992
aucacccaaucuuagagca

SEQ ID NO: 1274994 - RNA, 19 nt, Artificial Sequence
  Description of Artificial Sequence: Synthetic oligonucleotide
  Sense strand starting at position 3519 of SEQ ID NO: 1241470
gcucuaagauugggugauu

SEQ ID NO: 1274995 - RNA, 19 nt, Artificial Sequence
  Description of Artificial Sequence: Synthetic oligonucleotide
  Antisense strand to SEQ ID NO: 1274994
aaucacccaaucuuagagc

SEQ ID NO: 1274996 - RNA, 19 nt, Artificial Sequence
  Description of Artificial Sequence: Synthetic oligonucleotide
  Sense strand starting at position 3522 of SEQ ID NO: 1241470
cuaagauugggugauugcu

SEQ ID NO: 1274997 - RNA, 19 nt, Artificial Sequence
  Description of Artificial Sequence: Synthetic oligonucleotide
  Antisense strand to SEQ ID NO: 1274996
agcaaucacccaaucuuag

SEQ ID NO: 1274998 - RNA, 19 nt, Artificial Sequence
  Description of Artificial Sequence: Synthetic oligonucleotide
  Sense strand starting at position 3528 of SEQ ID NO: 1241470
uugggugauugcuucagag

SEQ ID NO: 1274999 - RNA, 19 nt, Artificial Sequence
  Description of Artificial Sequence: Synthetic oligonucleotide
  Antisense strand to SEQ ID NO: 1274998
cucugaagcaaucacccaa

SEQ ID NO: 1275000 - RNA, 19 nt, Artificial Sequence
  Description of Artificial Sequence: Synthetic oligonucleotide
  Sense strand starting at position 3671 of SEQ ID NO: 1241470
augaucaucucugggacau

SEQ ID NO: 1275001 - RNA, 19 nt, Artificial Sequence
  Description of Artificial Sequence: Synthetic oligonucleotide
  Antisense strand to SEQ ID NO: 1275000
augucccagagaugaucau

SEQ ID NO: 1275002 - RNA, 19 nt, Artificial Sequence
  Description of Artificial Sequence: Synthetic oligonucleotide
  Sense strand starting at position 3672 of SEQ ID NO: 1241470
ugaucaucucugggacaua

SEQ ID NO: 1275003 - RNA, 19 nt, Artificial Sequence
  Description of Artificial Sequence: Synthetic oligonucleotide
  Antisense strand to SEQ ID NO: 1275002
uaugucccagagaugauca

SEQ ID NO: 1275004 - RNA, 19 nt, Artificial Sequence
  Description of Artificial Sequence: Synthetic oligonucleotide
  Sense strand starting at position 3683 of SEQ ID NO: 1241470
gggacauaauuguggguga

SEQ ID NO: 1275005 - RNA, 19 nt, Artificial Sequence
  Description of Artificial Sequence: Synthetic oligonucleotide
  Antisense strand to SEQ ID NO: 1275004
ucacccacaauuauguccc

SEQ ID NO: 1275006 - RNA, 19 nt, Artificial Sequence
  Description of Artificial Sequence: Synthetic oligonucleotide
  Sense strand starting at position 3684 of SEQ ID NO: 1241470
ggacauaauugugggugau

SEQ ID NO: 1275007 - RNA, 19 nt, Artificial Sequence
  Description of Artificial Sequence: Synthetic oligonucleotide
  Antisense strand to SEQ ID NO: 1275006
aucacccacaauuaugucc

SEQ ID NO: 1275008 - RNA, 19 nt, Artificial Sequence
  Description of Artificial Sequence: Synthetic oligonucleotide
  Sense strand starting at position 3685 of SEQ ID NO: 1241470
gacauaauugugggugaug

SEQ ID NO: 1275009 - RNA, 19 nt, Artificial Sequence
  Description of Artificial Sequence: Synthetic oligonucleotide
  Antisense strand to SEQ ID NO: 1275008
caucacccacaauuauguc

SEQ ID NO: 1275010 - RNA, 19 nt, Artificial Sequence
  Description of Artificial Sequence: Synthetic oligonucleotide
  Sense strand starting at position 3728 of SEQ ID NO: 1241470
ccuggauggugggucuuau

SEQ ID NO: 1275011 - RNA, 19 nt, Artificial Sequence
  Description of Artificial Sequence: Synthetic oligonucleotide
  Antisense strand to SEQ ID NO: 1275010
auaagacccaccauccagg

SEQ ID NO: 1275012 - RNA, 19 nt, Artificial Sequence
  Description of Artificial Sequence: Synthetic oligonucleotide
  Sense strand starting at position 3732 of SEQ ID NO: 1241470
gauggugggucuuauggga

SEQ ID NO: 1275013 - RNA, 19 nt, Artificial Sequence
  Description of Artificial Sequence: Synthetic oligonucleotide
  Antisense strand to SEQ ID NO: 1275012
ucccauaagacccaccauc

SEQ ID NO: 1275014 - RNA, 19 nt, Artificial Sequence
  Description of Artificial Sequence: Synthetic oligonucleotide
  Sense strand starting at position 3759 of SEQ ID NO: 1241470
gcaggauggcuguguggaa

SEQ ID NO: 1275015 - RNA, 19 nt, Artificial Sequence
  Description of Artificial Sequence: Synthetic oligonucleotide
  Antisense strand to SEQ ID NO: 1275014
uuccacacagccauccugc

SEQ ID NO: 1275016 - RNA, 19 nt, Artificial Sequence
  Description of Artificial Sequence: Synthetic oligonucleotide
  Sense strand starting at position 3760 of SEQ ID NO: 1241470
caggauggcuguguggaaa

SEQ ID NO: 1275017 - RNA, 19 nt, Artificial Sequence
  Description of Artificial Sequence: Synthetic oligonucleotide
  Antisense strand to SEQ ID NO: 1275016
uuuccacacagccauccug

SEQ ID NO: 1275018 - RNA, 19 nt, Artificial Sequence
  Description of Artificial Sequence: Synthetic oligonucleotide
  Sense strand starting at position 3794 of SEQ ID NO: 1241470
cgaguucucagccauaagc

SEQ ID NO: 1275019 - RNA, 19 nt, Artificial Sequence
  Description of Artificial Sequence: Synthetic oligonucleotide
  Antisense strand to SEQ ID NO: 1275018
gcuuauggcugagaacucg

SEQ ID NO: 1275020 - RNA, 19 nt, Artificial Sequence
  Description of Artificial Sequence: Synthetic oligonucleotide
  Sense strand starting at position 3843 of SEQ ID NO: 1241470
uuucucuccugggaaagau

SEQ ID NO: 1275021 - RNA, 19 nt, Artificial Sequence
  Description of Artificial Sequence: Synthetic oligonucleotide
  Antisense strand to SEQ ID NO: 1275020
aucuuucccaggagagaaa

SEQ ID NO: 1275022 - RNA, 19 nt, Artificial Sequence
  Description of Artificial Sequence: Synthetic oligonucleotide
  Sense strand starting at position 3853 of SEQ ID NO: 1241470
gggaaagaucuaugcaauc

SEQ ID NO: 1275023 - RNA, 19 nt, Artificial Sequence
  Description of Artificial Sequence: Synthetic oligonucleotide
  Antisense strand to SEQ ID NO: 1275022
gauugcauagaucuuuccc

SEQ ID NO: 1275024 - RNA, 19 nt, Artificial Sequence
  Description of Artificial Sequence: Synthetic oligonucleotide
  Sense strand starting at position 41 of SEQ ID NO: 1241471
gggagugaaacuuguagcu

SEQ ID NO: 1275025 - RNA, 19 nt, Artificial Sequence
  Description of Artificial Sequence: Synthetic oligonucleotide
  Antisense strand to SEQ ID NO: 1275024
agcuacaaguuucacuccc

SEQ ID NO: 1275026 - RNA, 19 nt, Artificial Sequence
  Description of Artificial Sequence: Synthetic oligonucleotide
  Sense strand starting at position 51 of SEQ ID NO: 1241471
cuuguagcucagugacuga

SEQ ID NO: 1275027 - RNA, 19 nt, Artificial Sequence
  Description of Artificial Sequence: Synthetic oligonucleotide
  Antisense strand to SEQ ID NO: 1275026
ucagucacugagcuacaag

SEQ ID NO: 1275028 - RNA, 19 nt, Artificial Sequence
  Description of Artificial Sequence: Synthetic oligonucleotide
  Sense strand starting at position 56 of SEQ ID NO: 1241471
agcucagugacugaguauu

SEQ ID NO: 1275029 - RNA, 19 nt, Artificial Sequence
  Description of Artificial Sequence: Synthetic oligonucleotide
  Antisense strand to SEQ ID NO: 1275028
aauacucagucacugagcu

SEQ ID NO: 1275030 - RNA, 19 nt, Artificial Sequence
  Description of Artificial Sequence: Synthetic oligonucleotide
  Sense strand starting at position 62 of SEQ ID NO: 1241471
gugacugaguauucuaaag

SEQ ID NO: 1275031 - RNA, 19 nt, Artificial Sequence
  Description of Artificial Sequence: Synthetic oligonucleotide
  Antisense strand to SEQ ID NO: 1275030
cuuuagaauacucagucac

SEQ ID NO: 1275032 - RNA, 19 nt, Artificial Sequence
  Description of Artificial Sequence: Synthetic oligonucleotide
  Sense strand starting at position 283 of SEQ ID NO: 1241471
cugaauaaacuccgcaagu

SEQ ID NO: 1275033 - RNA, 19 nt, Artificial Sequence
  Description of Artificial Sequence: Synthetic oligonucleotide
  Antisense strand to SEQ ID NO: 1275032
acuugcggaguuuauucag

SEQ ID NO: 1275034 - RNA, 19 nt, Artificial Sequence
  Description of Artificial Sequence: Synthetic oligonucleotide
  Sense strand starting at position 284 of SEQ ID NO: 1241471
ugaauaaacuccgcaaguu

SEQ ID NO: 1275035 - RNA, 19 nt, Artificial Sequence
  Description of Artificial Sequence: Synthetic oligonucleotide
  Antisense strand to SEQ ID NO: 1275034
aacuugcggaguuuauuca

SEQ ID NO: 1275036 - RNA, 19 nt, Artificial Sequence
  Description of Artificial Sequence: Synthetic oligonucleotide
  Sense strand starting at position 303 of SEQ ID NO: 1241471
caacauuagugggugagga

SEQ ID NO: 1275037 - RNA, 19 nt, Artificial Sequence
  Description of Artificial Sequence: Synthetic oligonucleotide
  Antisense strand to SEQ ID NO: 1275036
uccucacccacuaauguug

SEQ ID NO: 1275038 - RNA, 19 nt, Artificial Sequence
  Description of Artificial Sequence: Synthetic oligonucleotide
  Sense strand starting at position 398 of SEQ ID NO: 1241471
gcuggaugcagugggauua

SEQ ID NO: 1275039 - RNA, 19 nt, Artificial Sequence
  Description of Artificial Sequence: Synthetic oligonucleotide
  Antisense strand to SEQ ID NO: 1275038
uaaucccacugcauccagc

SEQ ID NO: 1275040 - RNA, 19 nt, Artificial Sequence
  Description of Artificial Sequence: Synthetic oligonucleotide
  Sense strand starting at position 687 of SEQ ID NO: 1241471
ugcugauguggagguaaga

SEQ ID NO: 1275041 - RNA, 19 nt, Artificial Sequence
  Description of Artificial Sequence: Synthetic oligonucleotide
  Antisense strand to SEQ ID NO: 1275040
ucuuaccuccacaucagca

SEQ ID NO: 1275042 - RNA, 19 nt, Artificial Sequence
  Description of Artificial Sequence: Synthetic oligonucleotide
  Sense strand starting at position 769 of SEQ ID NO: 1241471
cccaguuaguuacuacauu

SEQ ID NO: 1275043 - RNA, 19 nt, Artificial Sequence
  Description of Artificial Sequence: Synthetic oligonucleotide
  Antisense strand to SEQ ID NO: 1275042
aauguaguaacuaacuggg

SEQ ID NO: 1275044 - RNA, 19 nt, Artificial Sequence
  Description of Artificial Sequence: Synthetic oligonucleotide
  Sense strand starting at position 770 of SEQ ID NO: 1241471
ccaguuaguuacuacauuu

SEQ ID NO: 1275045 - RNA, 19 nt, Artificial Sequence
  Description of Artificial Sequence: Synthetic oligonucleotide
  Antisense strand to SEQ ID NO: 1275044
aaauguaguaacuaacugg

SEQ ID NO: 1275046 - RNA, 19 nt, Artificial Sequence
  Description of Artificial Sequence: Synthetic oligonucleotide
  Sense strand starting at position 849 of SEQ ID NO: 1241471
uuugacagcucuccaguaa

SEQ ID NO: 1275047 - RNA, 19 nt, Artificial Sequence
  Description of Artificial Sequence: Synthetic oligonucleotide
  Antisense strand to SEQ ID NO: 1275046
uuacuggagagcugucaaa

SEQ ID NO: 1275048 - RNA, 19 nt, Artificial Sequence
  Description of Artificial Sequence: Synthetic oligonucleotide
  Sense strand starting at position 2069 of SEQ ID NO: 1241471
ggcugcuccgggagaaguu

SEQ ID NO: 1275049 - RNA, 19 nt, Artificial Sequence
  Description of Artificial Sequence: Synthetic oligonucleotide
  Antisense strand to SEQ ID NO: 1275048
aacuucucccggagcagcc

SEQ ID NO: 1275050 - RNA, 19 nt, Artificial Sequence
  Description of Artificial Sequence: Synthetic oligonucleotide
  Sense strand starting at position 2131 of SEQ ID NO: 1241471
gcuauaaauagagggcgau

SEQ ID NO: 1275051 - RNA, 19 nt, Artificial Sequence
  Description of Artificial Sequence: Synthetic oligonucleotide
  Antisense strand to SEQ ID NO: 1275050
aucgcccucuauuuauagc

SEQ ID NO: 1275052 - RNA, 19 nt, Artificial Sequence
  Description of Artificial Sequence: Synthetic oligonucleotide
  Sense strand starting at position 2245 of SEQ ID NO: 1241471
cucugacuccuggguaaac

SEQ ID NO: 1275053 - RNA, 19 nt, Artificial Sequence
  Description of Artificial Sequence: Synthetic oligonucleotide
  Antisense strand to SEQ ID NO: 1275052
guuuacccaggagucagag

SEQ ID NO: 1275054 - RNA, 19 nt, Artificial Sequence
  Description of Artificial Sequence: Synthetic oligonucleotide
  Sense strand starting at position 2246 of SEQ ID NO: 1241471
ucugacuccuggguaaaca

SEQ ID NO: 1275055 - RNA, 19 nt, Artificial Sequence
  Description of Artificial Sequence: Synthetic oligonucleotide
  Antisense strand to SEQ ID NO: 1275054
uguuuacccaggagucaga

SEQ ID NO: 1275056 - RNA, 19 nt, Artificial Sequence
  Description of Artificial Sequence: Synthetic oligonucleotide
  Sense strand starting at position 2554 of SEQ ID NO: 1241471
gaggaaggcucccuggaau

SEQ ID NO: 1275057 - RNA, 19 nt, Artificial Sequence
  Description of Artificial Sequence: Synthetic oligonucleotide
  Antisense strand to SEQ ID NO: 1275056
auuccagggagccuuccuc

SEQ ID NO: 1275058 - RNA, 19 nt, Artificial Sequence
  Description of Artificial Sequence: Synthetic oligonucleotide
  Sense strand starting at position 2560 of SEQ ID NO: 1241471
ggcucccuggaaugaguua

SEQ ID NO: 1275059 - RNA, 19 nt, Artificial Sequence
  Description of Artificial Sequence: Synthetic oligonucleotide
  Antisense strand to SEQ ID NO: 1275058
uaacucauuccagggagcc

SEQ ID NO: 1275060 - RNA, 19 nt, Artificial Sequence
  Description of Artificial Sequence: Synthetic oligonucleotide
  Sense strand starting at position 2565 of SEQ ID NO: 1241471
ccuggaaugaguuaguuga

SEQ ID NO: 1275061 - RNA, 19 nt, Artificial Sequence
  Description of Artificial Sequence: Synthetic oligonucleotide
  Antisense strand to SEQ ID NO: 1275060
ucaacuaacucauuccagg

SEQ ID NO: 1275062 - RNA, 19 nt, Artificial Sequence
  Description of Artificial Sequence: Synthetic oligonucleotide
  Sense strand starting at position 2567 of SEQ ID NO: 1241471
uggaaugaguuaguugauu

SEQ ID NO: 1275063 - RNA, 19 nt, Artificial Sequence
  Description of Artificial Sequence: Synthetic oligonucleotide
  Antisense strand to SEQ ID NO: 1275062
aaucaacuaacucauucca

SEQ ID NO: 1275064 - RNA, 19 nt, Artificial Sequence
  Description of Artificial Sequence: Synthetic oligonucleotide
  Sense strand starting at position 2602 of SEQ ID NO: 1241471
ggaauucgaaguuguuuag

SEQ ID NO: 1275065 - RNA, 19 nt, Artificial Sequence
  Description of Artificial Sequence: Synthetic oligonucleotide
  Antisense strand to SEQ ID NO: 1275064
cuaaacaacuucgaauucc

SEQ ID NO: 1275066 - RNA, 19 nt, Artificial Sequence
  Description of Artificial Sequence: Synthetic oligonucleotide
  Sense strand starting at position 2605 of SEQ ID NO: 1241471
auucgaaguuguuuaggca

SEQ ID NO: 1275067 - RNA, 19 nt, Artificial Sequence
  Description of Artificial Sequence: Synthetic oligonucleotide
  Antisense strand to SEQ ID NO: 1275066
ugccuaaacaacuucgaau

SEQ ID NO: 1275068 - RNA, 19 nt, Artificial Sequence
  Description of Artificial Sequence: Synthetic oligonucleotide
  Sense strand starting at position 2606 of SEQ ID NO: 1241471
uucgaaguuguuuaggcaa

SEQ ID NO: 1275069 - RNA, 19 nt, Artificial Sequence
  Description of Artificial Sequence: Synthetic oligonucleotide
  Antisense strand to SEQ ID NO: 1275068
uugccuaaacaacuucgaa

SEQ ID NO: 1275070 - RNA, 19 nt, Artificial Sequence
  Description of Artificial Sequence: Synthetic oligonucleotide
  Sense strand starting at position 2706 of SEQ ID NO: 1241471
ucagacugguuccugaguu

SEQ ID NO: 1275071 - RNA, 19 nt, Artificial Sequence
  Description of Artificial Sequence: Synthetic oligonucleotide
  Antisense strand to SEQ ID NO: 1275070
aacucaggaaccagucuga

SEQ ID NO: 1275072 - RNA, 19 nt, Artificial Sequence
  Description of Artificial Sequence: Synthetic oligonucleotide
  Sense strand starting at position 3290 of SEQ ID NO: 1241471
gggagagccucgagugaga

SEQ ID NO: 1275073 - RNA, 19 nt, Artificial Sequence
  Description of Artificial Sequence: Synthetic oligonucleotide
  Antisense strand to SEQ ID NO: 1275072
ucucacucgaggcucuccc

SEQ ID NO: 1275074 - RNA, 19 nt, Artificial Sequence
  Description of Artificial Sequence: Synthetic oligonucleotide
  Sense strand starting at position 3389 of SEQ ID NO: 1241471
uaaauucgucucuggguca

SEQ ID NO: 1275075 - RNA, 19 nt, Artificial Sequence
  Description of Artificial Sequence: Synthetic oligonucleotide
  Antisense strand to SEQ ID NO: 1275074
ugacccagagacgaauuua

SEQ ID NO: 1275076 - RNA, 19 nt, Artificial Sequence
  Description of Artificial Sequence: Synthetic oligonucleotide
  Sense strand starting at position 3556 of SEQ ID NO: 1241471
aagauaugguucuuccaug

SEQ ID NO: 1275077 - RNA, 19 nt, Artificial Sequence
  Description of Artificial Sequence: Synthetic oligonucleotide
  Antisense strand to SEQ ID NO: 1275076
cauggaagaaccauaucuu

SEQ ID NO: 1275078 - RNA, 19 nt, Artificial Sequence
  Description of Artificial Sequence: Synthetic oligonucleotide
  Sense strand starting at position 3557 of SEQ ID NO: 1241471
agauaugguucuuccaugu

SEQ ID NO: 1275079 - RNA, 19 nt, Artificial Sequence
  Description of Artificial Sequence: Synthetic oligonucleotide
  Antisense strand to SEQ ID NO: 1275078
acauggaagaaccauaucu

SEQ ID NO: 1275080 - RNA, 19 nt, Artificial Sequence
  Description of Artificial Sequence: Synthetic oligonucleotide
  Sense strand starting at position 3615 of SEQ ID NO: 1241471
aggacaaucucugucuaaa

SEQ ID NO: 1275081 - RNA, 19 nt, Artificial Sequence
  Description of Artificial Sequence: Synthetic oligonucleotide
  Antisense strand to SEQ ID NO: 1275080
uuuagacagagauuguccu

SEQ ID NO: 1275082 - RNA, 19 nt, Artificial Sequence
  Description of Artificial Sequence: Synthetic oligonucleotide
  Sense strand starting at position 3695 of SEQ ID NO: 1241471
aucuguuaugugcaagcca

SEQ ID NO: 1275083 - RNA, 19 nt, Artificial Sequence
  Description of Artificial Sequence: Synthetic oligonucleotide
  Antisense strand to SEQ ID NO: 1275082
uggcuugcacauaacagau

SEQ ID NO: 1275084 - RNA, 19 nt, Artificial Sequence
  Description of Artificial Sequence: Synthetic oligonucleotide
  Sense strand starting at position 3709 of SEQ ID NO: 1241471
agccacuguguagaugaaa

SEQ ID NO: 1275085 - RNA, 19 nt, Artificial Sequence
  Description of Artificial Sequence: Synthetic oligonucleotide
  Antisense strand to SEQ ID NO: 1275084
uuucaucuacacaguggcu

SEQ ID NO: 1275086 - RNA, 19 nt, Artificial Sequence
  Description of Artificial Sequence: Synthetic oligonucleotide
  Sense strand starting at position 3756 of SEQ ID NO: 1241471
ucuagacauuugugaugag

SEQ ID NO: 1275087 - RNA, 19 nt, Artificial Sequence
  Description of Artificial Sequence: Synthetic oligonucleotide
  Antisense strand to SEQ ID NO: 1275086
cucaucacaaaugucuaga

SEQ ID NO: 1275088 - RNA, 19 nt, Artificial Sequence
  Description of Artificial Sequence: Synthetic oligonucleotide
  Sense strand starting at position 3757 of SEQ ID NO: 1241471
cuagacauuugugaugaga

SEQ ID NO: 1275089 - RNA, 19 nt, Artificial Sequence
  Description of Artificial Sequence: Synthetic oligonucleotide
  Antisense strand to SEQ ID NO: 1275088
ucucaucacaaaugucuag

SEQ ID NO: 1275090 - RNA, 19 nt, Artificial Sequence
  Description of Artificial Sequence: Synthetic oligonucleotide
  Sense strand starting at position 3784 of SEQ ID NO: 1241471
uuugacauuugucaagaga

SEQ ID NO: 1275091 - RNA, 19 nt, Artificial Sequence
  Description of Artificial Sequence: Synthetic oligonucleotide
  Antisense strand to SEQ ID NO: 1275090
ucucuugacaaaugucaaa

SEQ ID NO: 1275092 - RNA, 19 nt, Artificial Sequence
  Description of Artificial Sequence: Synthetic oligonucleotide
  Sense strand starting at position 3833 of SEQ ID NO: 1241471
gaucaaucauuuggacagu

SEQ ID NO: 1275093 - RNA, 19 nt, Artificial Sequence
  Description of Artificial Sequence: Synthetic oligonucleotide
  Antisense strand to SEQ ID NO: 1275092
acuguccaaaugauugauc

SEQ ID NO: 1275094 - RNA, 19 nt, Artificial Sequence
  Description of Artificial Sequence: Synthetic oligonucleotide
  Sense strand starting at position 3834 of SEQ ID NO: 1241471
aucaaucauuuggacagua

SEQ ID NO: 1275095 - RNA, 19 nt, Artificial Sequence
  Description of Artificial Sequence: Synthetic oligonucleotide
  Antisense strand to SEQ ID NO: 1275094
uacuguccaaaugauugau

SEQ ID NO: 1275096 - RNA, 19 nt, Artificial Sequence
  Description of Artificial Sequence: Synthetic oligonucleotide
  Sense strand starting at position 3848 of SEQ ID NO: 1241471
caguaaguccuauagcagu

SEQ ID NO: 1275097 - RNA, 19 nt, Artificial Sequence
  Description of Artificial Sequence: Synthetic oligonucleotide
  Antisense strand to SEQ ID NO: 1275096
acugcuauaggacuuacug

SEQ ID NO: 1275098 - RNA, 19 nt, Artificial Sequence
  Description of Artificial Sequence: Synthetic oligonucleotide
  Sense strand starting at position 3875 of SEQ ID NO: 1241471
acccuucucaagugggaga

SEQ ID NO: 1275099 - RNA, 19 nt, Artificial Sequence
  Description of Artificial Sequence: Synthetic oligonucleotide
  Antisense strand to SEQ ID NO: 1275098
ucucccacuugagaagggu

SEQ ID NO: 1275100 - RNA, 19 nt, Artificial Sequence
  Description of Artificial Sequence: Synthetic oligonucleotide
  Sense strand starting at position 3877 of SEQ ID NO: 1241471
ccuucucaagugggagauu

SEQ ID NO: 1275101 - RNA, 19 nt, Artificial Sequence
  Description of Artificial Sequence: Synthetic oligonucleotide
  Antisense strand to SEQ ID NO: 1275100
aaucucccacuugagaagg

SEQ ID NO: 1275102 - RNA, 19 nt, Artificial Sequence
  Description of Artificial Sequence: Synthetic oligonucleotide
  Sense strand starting at position 3909 of SEQ ID NO: 1241471
cccacauaauagguauagu

SEQ ID NO: 1275103 - RNA, 19 nt, Artificial Sequence
  Description of Artificial Sequence: Synthetic oligonucleotide
  Antisense strand to SEQ ID NO: 1275102
acuauaccuauuauguggg

SEQ ID NO: 1275104 - RNA, 19 nt, Artificial Sequence
  Description of Artificial Sequence: Synthetic oligonucleotide
  Sense strand starting at position 25 of SEQ ID NO: 1241472
gaagcaguggugugaguua

SEQ ID NO: 1275105 - RNA, 19 nt, Artificial Sequence
  Description of Artificial Sequence: Synthetic oligonucleotide
  Antisense strand to SEQ ID NO: 1275104
uaacucacaccacugcuuc

SEQ ID NO: 1275106 - RNA, 19 nt, Artificial Sequence
  Description of Artificial Sequence: Synthetic oligonucleotide
  Sense strand starting at position 27 of SEQ ID NO: 1241472
agcaguggugugaguuaga

SEQ ID NO: 1275107 - RNA, 19 nt, Artificial Sequence
  Description of Artificial Sequence: Synthetic oligonucleotide
  Antisense strand to SEQ ID NO: 1275106
ucuaacucacaccacugcu

SEQ ID NO: 1275108 - RNA, 19 nt, Artificial Sequence
  Description of Artificial Sequence: Synthetic oligonucleotide
  Sense strand starting at position 30 of SEQ ID NO: 1241472
aguggugugaguuagaaua

SEQ ID NO: 1275109 - RNA, 19 nt, Artificial Sequence
  Description of Artificial Sequence: Synthetic oligonucleotide
  Antisense strand to SEQ ID NO: 1275108
uauucuaacucacaccacu

SEQ ID NO: 1275110 - RNA, 19 nt, Artificial Sequence
  Description of Artificial Sequence: Synthetic oligonucleotide
  Sense strand starting at position 43 of SEQ ID NO: 1241472
agaauaagaucaguacgcu

SEQ ID NO: 1275111 - RNA, 19 nt, Artificial Sequence
  Description of Artificial Sequence: Synthetic oligonucleotide
  Antisense strand to SEQ ID NO: 1275110
agcguacugaucuuauucu

SEQ ID NO: 1275112 - RNA, 19 nt, Artificial Sequence
  Description of Artificial Sequence: Synthetic oligonucleotide
  Sense strand starting at position 44 of SEQ ID NO: 1241472
gaauaagaucaguacgcuu

SEQ ID NO: 1275113 - RNA, 19 nt, Artificial Sequence
  Description of Artificial Sequence: Synthetic oligonucleotide
  Antisense strand to SEQ ID NO: 1275112
aagcguacugaucuuauuc

SEQ ID NO: 1275114 - RNA, 19 nt, Artificial Sequence
  Description of Artificial Sequence: Synthetic oligonucleotide
  Sense strand starting at position 51 of SEQ ID NO: 1241472
aucaguacgcuugggaagu

SEQ ID NO: 1275115 - RNA, 19 nt, Artificial Sequence
  Description of Artificial Sequence: Synthetic oligonucleotide
  Antisense strand to SEQ ID NO: 1275114
acuucccaagcguacugau

SEQ ID NO: 1275116 - RNA, 19 nt, Artificial Sequence
  Description of Artificial Sequence: Synthetic oligonucleotide
  Sense strand starting at position 86 of SEQ ID NO: 1241472
ugcuuagaggucuggaauu

SEQ ID NO: 1275117 - RNA, 19 nt, Artificial Sequence
  Description of Artificial Sequence: Synthetic oligonucleotide
  Antisense strand to SEQ ID NO: 1275116
aauuccagaccucuaagca

SEQ ID NO: 1275118 - RNA, 19 nt, Artificial Sequence
  Description of Artificial Sequence: Synthetic oligonucleotide
  Sense strand starting at position 116 of SEQ ID NO: 1241472
gucaaacggucucuaauaa

SEQ ID NO: 1275119 - RNA, 19 nt, Artificial Sequence
  Description of Artificial Sequence: Synthetic oligonucleotide
  Antisense strand to SEQ ID NO: 1275118
uuauuagagaccguuugac

SEQ ID NO: 1275120 - RNA, 19 nt, Artificial Sequence
  Description of Artificial Sequence: Synthetic oligonucleotide
  Sense strand starting at position 239 of SEQ ID NO: 1241472
cugggaaguugucucuaca

SEQ ID NO: 1275121 - RNA, 19 nt, Artificial Sequence
  Description of Artificial Sequence: Synthetic oligonucleotide
  Antisense strand to SEQ ID NO: 1275120
uguagagacaacuucccag

SEQ ID NO: 1275122 - RNA, 19 nt, Artificial Sequence
  Description of Artificial Sequence: Synthetic oligonucleotide
  Sense strand starting at position 330 of SEQ ID NO: 1241472
guugaagacuacucuagaa

SEQ ID NO: 1275123 - RNA, 19 nt, Artificial Sequence
  Description of Artificial Sequence: Synthetic oligonucleotide
  Antisense strand to SEQ ID NO: 1275122
uucuagaguagucuucaac

SEQ ID NO: 1275124 - RNA, 19 nt, Artificial Sequence
  Description of Artificial Sequence: Synthetic oligonucleotide
  Sense strand starting at position 387 of SEQ ID NO: 1241472
ggcugaucgguggaagcuu

SEQ ID NO: 1275125 - RNA, 19 nt, Artificial Sequence
  Description of Artificial Sequence: Synthetic oligonucleotide
  Antisense strand to SEQ ID NO: 1275124
aagcuuccaccgaucagcc

SEQ ID NO: 1275126 - RNA, 19 nt, Artificial Sequence
  Description of Artificial Sequence: Synthetic oligonucleotide
  Sense strand starting at position 521 of SEQ ID NO: 1241472
gcagaaguguagcucagau

SEQ ID NO: 1275127 - RNA, 19 nt, Artificial Sequence
  Description of Artificial Sequence: Synthetic oligonucleotide
  Antisense strand to SEQ ID NO: 1275126
aucugagcuacacuucugc

SEQ ID NO: 1275128 - RNA, 19 nt, Artificial Sequence
  Description of Artificial Sequence: Synthetic oligonucleotide
  Sense strand starting at position 533 of SEQ ID NO: 1241472
cucagauuucucgggcuau

SEQ ID NO: 1275129 - RNA, 19 nt, Artificial Sequence
  Description of Artificial Sequence: Synthetic oligonucleotide
  Antisense strand to SEQ ID NO: 1275128
auagcccgagaaaucugag

SEQ ID NO: 1275130 - RNA, 19 nt, Artificial Sequence
  Description of Artificial Sequence: Synthetic oligonucleotide
  Sense strand starting at position 581 of SEQ ID NO: 1241472
gggagugaaacuuguagcu

SEQ ID NO: 1275131 - RNA, 19 nt, Artificial Sequence
  Description of Artificial Sequence: Synthetic oligonucleotide
  Antisense strand to SEQ ID NO: 1275130
agcuacaaguuucacuccc

SEQ ID NO: 1275132 - RNA, 19 nt, Artificial Sequence
  Description of Artificial Sequence: Synthetic oligonucleotide
  Sense strand starting at position 591 of SEQ ID NO: 1241472
cuuguagcucagugacuga

SEQ ID NO: 1275133 - RNA, 19 nt, Artificial Sequence
  Description of Artificial Sequence: Synthetic oligonucleotide
  Antisense strand to SEQ ID NO: 1275132
ucagucacugagcuacaag

SEQ ID NO: 1275134 - RNA, 19 nt, Artificial Sequence
  Description of Artificial Sequence: Synthetic oligonucleotide
  Sense strand starting at position 596 of SEQ ID NO: 1241472
agcucagugacugaguauu

SEQ ID NO: 1275135 - RNA, 19 nt, Artificial Sequence
  Description of Artificial Sequence: Synthetic oligonucleotide
  Antisense strand to SEQ ID NO: 1275134
aauacucagucacugagcu

SEQ ID NO: 1275136 - RNA, 19 nt, Artificial Sequence
  Description of Artificial Sequence: Synthetic oligonucleotide
  Sense strand starting at position 602 of SEQ ID NO: 1241472
gugacugaguauucuaaag

SEQ ID NO: 1275137 - RNA, 19 nt, Artificial Sequence
  Description of Artificial Sequence: Synthetic oligonucleotide
  Antisense strand to SEQ ID NO: 1275136
cuuuagaauacucagucac

SEQ ID NO: 1275138 - RNA, 19 nt, Artificial Sequence
  Description of Artificial Sequence: Synthetic oligonucleotide
  Sense strand starting at position 604 of SEQ ID NO: 1241472
gacugaguauucuaaagga

SEQ ID NO: 1275139 - RNA, 19 nt, Artificial Sequence
  Description of Artificial Sequence: Synthetic oligonucleotide
  Antisense strand to SEQ ID NO: 1275138
uccuuuagaauacucaguc

SEQ ID NO: 1275140 - RNA, 19 nt, Artificial Sequence
  Description of Artificial Sequence: Synthetic oligonucleotide
  Sense strand starting at position 823 of SEQ ID NO: 1241472
cugaauaaacuccgcaagu

SEQ ID NO: 1275141 - RNA, 19 nt, Artificial Sequence
  Description of Artificial Sequence: Synthetic oligonucleotide
  Antisense strand to SEQ ID NO: 1275140
acuugcggaguuuauucag

SEQ ID NO: 1275142 - RNA, 19 nt, Artificial Sequence
  Description of Artificial Sequence: Synthetic oligonucleotide
  Sense strand starting at position 824 of SEQ ID NO: 1241472
ugaauaaacuccgcaaguu

SEQ ID NO: 1275143 - RNA, 19 nt, Artificial Sequence
  Description of Artificial Sequence: Synthetic oligonucleotide
  Antisense strand to SEQ ID NO: 1275142
aacuugcggaguuuauuca

SEQ ID NO: 1275144 - RNA, 19 nt, Artificial Sequence
  Description of Artificial Sequence: Synthetic oligonucleotide
  Sense strand starting at position 843 of SEQ ID NO: 1241472
caacauuagugggugagga

SEQ ID NO: 1275145 - RNA, 19 nt, Artificial Sequence
  Description of Artificial Sequence: Synthetic oligonucleotide
  Antisense strand to SEQ ID NO: 1275144
uccucacccacuaauguug

SEQ ID NO: 1275146 - RNA, 19 nt, Artificial Sequence
  Description of Artificial Sequence: Synthetic oligonucleotide
  Sense strand starting at position 938 of SEQ ID NO: 1241472
gcuggaugcagugggauua

SEQ ID NO: 1275147 - RNA, 19 nt, Artificial Sequence
  Description of Artificial Sequence: Synthetic oligonucleotide
  Antisense strand to SEQ ID NO: 1275146
uaaucccacugcauccagc

SEQ ID NO: 1275148 - RNA, 19 nt, Artificial Sequence
  Description of Artificial Sequence: Synthetic oligonucleotide
  Sense strand starting at position 1227 of SEQ ID NO: 1241472
ugcugauguggagguaaga

SEQ ID NO: 1275149 - RNA, 19 nt, Artificial Sequence
  Description of Artificial Sequence: Synthetic oligonucleotide
  Antisense strand to SEQ ID NO: 1275148
ucuuaccuccacaucagca

SEQ ID NO: 1275150 - RNA, 19 nt, Artificial Sequence
  Description of Artificial Sequence: Synthetic oligonucleotide
  Sense strand starting at position 1309 of SEQ ID NO: 1241472
cccaguuaguuacuacauu

SEQ ID NO: 1275151 - RNA, 19 nt, Artificial Sequence
  Description of Artificial Sequence: Synthetic oligonucleotide
  Antisense strand to SEQ ID NO: 1275150
aauguaguaacuaacuggg

SEQ ID NO: 1275152 - RNA, 19 nt, Artificial Sequence
  Description of Artificial Sequence: Synthetic oligonucleotide
  Sense strand starting at position 1310 of SEQ ID NO: 1241472
ccaguuaguuacuacauuu

SEQ ID NO: 1275153 - RNA, 19 nt, Artificial Sequence
  Description of Artificial Sequence: Synthetic oligonucleotide
  Antisense strand to SEQ ID NO: 1275152
aaauguaguaacuaacugg

SEQ ID NO: 1275154 - RNA, 19 nt, Artificial Sequence
  Description of Artificial Sequence: Synthetic oligonucleotide
  Sense strand starting at position 1389 of SEQ ID NO: 1241472
uuugacagcucuccaguaa

SEQ ID NO: 1275155 - RNA, 19 nt, Artificial Sequence
  Description of Artificial Sequence: Synthetic oligonucleotide
  Antisense strand to SEQ ID NO: 1275154
uuacuggagagcugucaaa

SEQ ID NO: 1275156 - RNA, 19 nt, Artificial Sequence
  Description of Artificial Sequence: Synthetic oligonucleotide
  Sense strand starting at position 2609 of SEQ ID NO: 1241472
ggcugcuccgggagaaguu

SEQ ID NO: 1275157 - RNA, 19 nt, Artificial Sequence
  Description of Artificial Sequence: Synthetic oligonucleotide
  Antisense strand to SEQ ID NO: 1275156
aacuucucccggagcagcc

SEQ ID NO: 1275158 - RNA, 19 nt, Artificial Sequence
  Description of Artificial Sequence: Synthetic oligonucleotide
  Sense strand starting at position 2671 of SEQ ID NO: 1241472
gcuauaaauagagggcgau

SEQ ID NO: 1275159 - RNA, 19 nt, Artificial Sequence
  Description of Artificial Sequence: Synthetic oligonucleotide
  Antisense strand to SEQ ID NO: 1275158
aucgcccucuauuuauagc

SEQ ID NO: 1275160 - RNA, 19 nt, Artificial Sequence
  Description of Artificial Sequence: Synthetic oligonucleotide
  Sense strand starting at position 2785 of SEQ ID NO: 1241472
cucugacuccuggguaaac

SEQ ID NO: 1275161 - RNA, 19 nt, Artificial Sequence
  Description of Artificial Sequence: Synthetic oligonucleotide
  Antisense strand to SEQ ID NO: 1275160
guuuacccaggagucagag

SEQ ID NO: 1275162 - RNA, 19 nt, Artificial Sequence
  Description of Artificial Sequence: Synthetic oligonucleotide
  Sense strand starting at position 2786 of SEQ ID NO: 1241472
ucugacuccuggguaaaca

SEQ ID NO: 1275163 - RNA, 19 nt, Artificial Sequence
  Description of Artificial Sequence: Synthetic oligonucleotide
  Antisense strand to SEQ ID NO: 1275162
uguuuacccaggagucaga

SEQ ID NO: 1275164 - RNA, 19 nt, Artificial Sequence
  Description of Artificial Sequence: Synthetic oligonucleotide
  Sense strand starting at position 3094 of SEQ ID NO: 1241472
gaggaaggcucccuggaau

SEQ ID NO: 1275165 - RNA, 19 nt, Artificial Sequence
  Description of Artificial Sequence: Synthetic oligonucleotide
  Antisense strand to SEQ ID NO: 1275164
auuccagggagccuuccuc

SEQ ID NO: 1275166 - RNA, 19 nt, Artificial Sequence
  Description of Artificial Sequence: Synthetic oligonucleotide
  Sense strand starting at position 3100 of SEQ ID NO: 1241472
ggcucccuggaaugaguua

SEQ ID NO: 1275167 - RNA, 19 nt, Artificial Sequence
  Description of Artificial Sequence: Synthetic oligonucleotide
  Antisense strand to SEQ ID NO: 1275166
uaacucauuccagggagcc

SEQ ID NO: 1275168 - RNA, 19 nt, Artificial Sequence
  Description of Artificial Sequence: Synthetic oligonucleotide
  Sense strand starting at position 3105 of SEQ ID NO: 1241472
ccuggaaugaguuaguuga

SEQ ID NO: 1275169 - RNA, 19 nt, Artificial Sequence
  Description of Artificial Sequence: Synthetic oligonucleotide
  Antisense strand to SEQ ID NO: 1275168
ucaacuaacucauuccagg

SEQ ID NO: 1275170 - RNA, 19 nt, Artificial Sequence
  Description of Artificial Sequence: Synthetic oligonucleotide
  Sense strand starting at position 3107 of SEQ ID NO: 1241472
uggaaugaguuaguugauu

SEQ ID NO: 1275171 - RNA, 19 nt, Artificial Sequence
  Description of Artificial Sequence: Synthetic oligonucleotide
  Antisense strand to SEQ ID NO: 1275170
aaucaacuaacucauucca

SEQ ID NO: 1275172 - RNA, 19 nt, Artificial Sequence
  Description of Artificial Sequence: Synthetic oligonucleotide
  Sense strand starting at position 3142 of SEQ ID NO: 1241472
ggaauucgaaguuguuuag

SEQ ID NO: 1275173 - RNA, 19 nt, Artificial Sequence
  Description of Artificial Sequence: Synthetic oligonucleotide
  Antisense strand to SEQ ID NO: 1275172
cuaaacaacuucgaauucc

SEQ ID NO: 1275174 - RNA, 19 nt, Artificial Sequence
  Description of Artificial Sequence: Synthetic oligonucleotide
  Sense strand starting at position 3145 of SEQ ID NO: 1241472
auucgaaguuguuuaggca

SEQ ID NO: 1275175 - RNA, 19 nt, Artificial Sequence
  Description of Artificial Sequence: Synthetic oligonucleotide
  Antisense strand to SEQ ID NO: 1275174
ugccuaaacaacuucgaau

SEQ ID NO: 1275176 - RNA, 19 nt, Artificial Sequence
  Description of Artificial Sequence: Synthetic oligonucleotide
  Sense strand starting at position 3146 of SEQ ID NO: 1241472
uucgaaguuguuuaggcaa

SEQ ID NO: 1275177 - RNA, 19 nt, Artificial Sequence
  Description of Artificial Sequence: Synthetic oligonucleotide
  Antisense strand to SEQ ID NO: 1275176
uugccuaaacaacuucgaa

SEQ ID NO: 1275178 - RNA, 19 nt, Artificial Sequence
  Description of Artificial Sequence: Synthetic oligonucleotide
  Sense strand starting at position 3246 of SEQ ID NO: 1241472
ucagacugguuccugaguu

SEQ ID NO: 1275179 - RNA, 19 nt, Artificial Sequence
  Description of Artificial Sequence: Synthetic oligonucleotide
  Antisense strand to SEQ ID NO: 1275178
aacucaggaaccagucuga

SEQ ID NO: 1275180 - RNA, 19 nt, Artificial Sequence
  Description of Artificial Sequence: Synthetic oligonucleotide
  Sense strand starting at position 3830 of SEQ ID NO: 1241472
gggagagccucgagugaga

SEQ ID NO: 1275181 - RNA, 19 nt, Artificial Sequence
  Description of Artificial Sequence: Synthetic oligonucleotide
  Antisense strand to SEQ ID NO: 1275180
ucucacucgaggcucuccc

SEQ ID NO: 1275182 - RNA, 19 nt, Artificial Sequence
  Description of Artificial Sequence: Synthetic oligonucleotide
  Sense strand starting at position 3929 of SEQ ID NO: 1241472
uaaauucgucucuggguca

SEQ ID NO: 1275183 - RNA, 19 nt, Artificial Sequence
  Description of Artificial Sequence: Synthetic oligonucleotide
  Antisense strand to SEQ ID NO: 1275182
ugacccagagacgaauuua

SEQ ID NO: 1275184 - RNA, 19 nt, Artificial Sequence
  Description of Artificial Sequence: Synthetic oligonucleotide
  Sense strand starting at position 25 of SEQ ID NO: 1241473
ggaugaagguuaguguagu

SEQ ID NO: 1275185 - RNA, 19 nt, Artificial Sequence
  Description of Artificial Sequence: Synthetic oligonucleotide
  Antisense strand to SEQ ID NO: 1275184
acuacacuaaccuucaucc

SEQ ID NO: 1275186 - RNA, 19 nt, Artificial Sequence
  Description of Artificial Sequence: Synthetic oligonucleotide
  Sense strand starting at position 35 of SEQ ID NO: 1241473
uaguguagugacgagacaa

SEQ ID NO: 1275187 - RNA, 19 nt, Artificial Sequence
  Description of Artificial Sequence: Synthetic oligonucleotide
  Antisense strand to SEQ ID NO: 1275186
uugucucgucacuacacua

SEQ ID NO: 1275188 - RNA, 19 nt, Artificial Sequence
  Description of Artificial Sequence: Synthetic oligonucleotide
  Sense strand starting at position 104 of SEQ ID NO: 1241473
gaagcaguggugugaguua

SEQ ID NO: 1275189 - RNA, 19 nt, Artificial Sequence
  Description of Artificial Sequence: Synthetic oligonucleotide
  Antisense strand to SEQ ID NO: 1275188
uaacucacaccacugcuuc

SEQ ID NO: 1275190 - RNA, 19 nt, Artificial Sequence
  Description of Artificial Sequence: Synthetic oligonucleotide
  Sense strand starting at position 106 of SEQ ID NO: 1241473
agcaguggugugaguuaga

SEQ ID NO: 1275191 - RNA, 19 nt, Artificial Sequence
  Description of Artificial Sequence: Synthetic oligonucleotide
  Antisense strand to SEQ ID NO: 1275190
ucuaacucacaccacugcu

SEQ ID NO: 1275192 - RNA, 19 nt, Artificial Sequence
  Description of Artificial Sequence: Synthetic oligonucleotide
  Sense strand starting at position 109 of SEQ ID NO: 1241473
aguggugugaguuagaaua

SEQ ID NO: 1275193 - RNA, 19 nt, Artificial Sequence
  Description of Artificial Sequence: Synthetic oligonucleotide
  Antisense strand to SEQ ID NO: 1275192
uauucuaacucacaccacu

SEQ ID NO: 1275194 - RNA, 19 nt, Artificial Sequence
  Description of Artificial Sequence: Synthetic oligonucleotide
  Sense strand starting at position 122 of SEQ ID NO: 1241473
agaauaagaucaguacgcu

SEQ ID NO: 1275195 - RNA, 19 nt, Artificial Sequence
  Description of Artificial Sequence: Synthetic oligonucleotide
  Antisense strand to SEQ ID NO: 1275194
agcguacugaucuuauucu

SEQ ID NO: 1275196 - RNA, 19 nt, Artificial Sequence
  Description of Artificial Sequence: Synthetic oligonucleotide
  Sense strand starting at position 123 of SEQ ID NO: 1241473
gaauaagaucaguacgcuu

SEQ ID NO: 1275197 - RNA, 19 nt, Artificial Sequence
  Description of Artificial Sequence: Synthetic oligonucleotide
  Antisense strand to SEQ ID NO: 1275196
aagcguacugaucuuauuc

SEQ ID NO: 1275198 - RNA, 19 nt, Artificial Sequence
  Description of Artificial Sequence: Synthetic oligonucleotide
  Sense strand starting at position 130 of SEQ ID NO: 1241473
aucaguacgcuugggaagu

SEQ ID NO: 1275199 - RNA, 19 nt, Artificial Sequence
  Description of Artificial Sequence: Synthetic oligonucleotide
  Antisense strand to SEQ ID NO: 1275198
acuucccaagcguacugau

SEQ ID NO: 1275200 - RNA, 19 nt, Artificial Sequence
  Description of Artificial Sequence: Synthetic oligonucleotide
  Sense strand starting at position 165 of SEQ ID NO: 1241473
ugcuuagaggucuggaauu

SEQ ID NO: 1275201 - RNA, 19 nt, Artificial Sequence
  Description of Artificial Sequence: Synthetic oligonucleotide
  Antisense strand to SEQ ID NO: 1275200
aauuccagaccucuaagca

SEQ ID NO: 1275202 - RNA, 19 nt, Artificial Sequence
  Description of Artificial Sequence: Synthetic oligonucleotide
  Sense strand starting at position 195 of SEQ ID NO: 1241473
gucaaacggucucuaauaa

SEQ ID NO: 1275203 - RNA, 19 nt, Artificial Sequence
  Description of Artificial Sequence: Synthetic oligonucleotide
  Antisense strand to SEQ ID NO: 1275202
uuauuagagaccguuugac

SEQ ID NO: 1275204 - RNA, 19 nt, Artificial Sequence
  Description of Artificial Sequence: Synthetic oligonucleotide
  Sense strand starting at position 318 of SEQ ID NO: 1241473
cugggaaguugucucuaca

SEQ ID NO: 1275205 - RNA, 19 nt, Artificial Sequence
  Description of Artificial Sequence: Synthetic oligonucleotide
  Antisense strand to SEQ ID NO: 1275204
uguagagacaacuucccag

SEQ ID NO: 1275206 - RNA, 19 nt, Artificial Sequence
  Description of Artificial Sequence: Synthetic oligonucleotide
  Sense strand starting at position 409 of SEQ ID NO: 1241473
guugaagacuacucuagaa

SEQ ID NO: 1275207 - RNA, 19 nt, Artificial Sequence
  Description of Artificial Sequence: Synthetic oligonucleotide
  Antisense strand to SEQ ID NO: 1275206
uucuagaguagucuucaac

SEQ ID NO: 1275208 - RNA, 19 nt, Artificial Sequence
  Description of Artificial Sequence: Synthetic oligonucleotide
  Sense strand starting at position 466 of SEQ ID NO: 1241473
ggcugaucgguggaagcuu

SEQ ID NO: 1275209 - RNA, 19 nt, Artificial Sequence
  Description of Artificial Sequence: Synthetic oligonucleotide
  Antisense strand to SEQ ID NO: 1275208
aagcuuccaccgaucagcc

SEQ ID NO: 1275210 - RNA, 19 nt, Artificial Sequence
  Description of Artificial Sequence: Synthetic oligonucleotide
  Sense strand starting at position 600 of SEQ ID NO: 1241473
gcagaaguguagcucagau

SEQ ID NO: 1275211 - RNA, 19 nt, Artificial Sequence
  Description of Artificial Sequence: Synthetic oligonucleotide
  Antisense strand to SEQ ID NO: 1275210
aucugagcuacacuucugc

SEQ ID NO: 1275212 - RNA, 19 nt, Artificial Sequence
  Description of Artificial Sequence: Synthetic oligonucleotide
  Sense strand starting at position 612 of SEQ ID NO: 1241473
cucagauuucucgggcuau

SEQ ID NO: 1275213 - RNA, 19 nt, Artificial Sequence
  Description of Artificial Sequence: Synthetic oligonucleotide
  Antisense strand to SEQ ID NO: 1275212
auagcccgagaaaucugag

SEQ ID NO: 1275214 - RNA, 19 nt, Artificial Sequence
  Description of Artificial Sequence: Synthetic oligonucleotide
  Sense strand starting at position 660 of SEQ ID NO: 1241473
gggagugaaacuuguagcu

SEQ ID NO: 1275215 - RNA, 19 nt, Artificial Sequence
  Description of Artificial Sequence: Synthetic oligonucleotide
  Antisense strand to SEQ ID NO: 1275214
agcuacaaguuucacuccc

SEQ ID NO: 1275216 - RNA, 19 nt, Artificial Sequence
  Description of Artificial Sequence: Synthetic oligonucleotide
  Sense strand starting at position 670 of SEQ ID NO: 1241473
cuuguagcucagugacuga

SEQ ID NO: 1275217 - RNA, 19 nt, Artificial Sequence
  Description of Artificial Sequence: Synthetic oligonucleotide
  Antisense strand to SEQ ID NO: 1275216
ucagucacugagcuacaag

SEQ ID NO: 1275218 - RNA, 19 nt, Artificial Sequence
  Description of Artificial Sequence: Synthetic oligonucleotide
  Sense strand starting at position 675 of SEQ ID NO: 1241473
agcucagugacugaguauu

SEQ ID NO: 1275219 - RNA, 19 nt, Artificial Sequence
  Description of Artificial Sequence: Synthetic oligonucleotide
  Antisense strand to SEQ ID NO: 1275218
aauacucagucacugagcu

SEQ ID NO: 1275220 - RNA, 19 nt, Artificial Sequence
  Description of Artificial Sequence: Synthetic oligonucleotide
  Sense strand starting at position 681 of SEQ ID NO: 1241473
gugacugaguauucuaaag

SEQ ID NO: 1275221 - RNA, 19 nt, Artificial Sequence
  Description of Artificial Sequence: Synthetic oligonucleotide
  Antisense strand to SEQ ID NO: 1275220
cuuuagaauacucagucac

SEQ ID NO: 1275222 - RNA, 19 nt, Artificial Sequence
  Description of Artificial Sequence: Synthetic oligonucleotide
  Sense strand starting at position 902 of SEQ ID NO: 1241473
cugaauaaacuccgcaagu

SEQ ID NO: 1275223 - RNA, 19 nt, Artificial Sequence
  Description of Artificial Sequence: Synthetic oligonucleotide
  Antisense strand to SEQ ID NO: 1275222
acuugcggaguuuauucag

SEQ ID NO: 1275224 - RNA, 19 nt, Artificial Sequence
  Description of Artificial Sequence: Synthetic oligonucleotide
  Sense strand starting at position 903 of SEQ ID NO: 1241473
ugaauaaacuccgcaaguu

SEQ ID NO: 1275225 - RNA, 19 nt, Artificial Sequence
  Description of Artificial Sequence: Synthetic oligonucleotide
  Antisense strand to SEQ ID NO: 1275224
aacuugcggaguuuauuca

SEQ ID NO: 1275226 - RNA, 19 nt, Artificial Sequence
  Description of Artificial Sequence: Synthetic oligonucleotide
  Sense strand starting at position 922 of SEQ ID NO: 1241473
caacauuagugggugagga

SEQ ID NO: 1275227 - RNA, 19 nt, Artificial Sequence
  Description of Artificial Sequence: Synthetic oligonucleotide
  Antisense strand to SEQ ID NO: 1275226
uccucacccacuaauguug

SEQ ID NO: 1275228 - RNA, 19 nt, Artificial Sequence
  Description of Artificial Sequence: Synthetic oligonucleotide
  Sense strand starting at position 1017 of SEQ ID NO: 1241473
gcuggaugcagugggauua

SEQ ID NO: 1275229 - RNA, 19 nt, Artificial Sequence
  Description of Artificial Sequence: Synthetic oligonucleotide
  Antisense strand to SEQ ID NO: 1275228
uaaucccacugcauccagc

SEQ ID NO: 1275230 - RNA, 19 nt, Artificial Sequence
  Description of Artificial Sequence: Synthetic oligonucleotide
  Sense strand starting at position 1306 of SEQ ID NO: 1241473
ugcugauguggagguaaga

SEQ ID NO: 1275231 - RNA, 19 nt, Artificial Sequence
  Description of Artificial Sequence: Synthetic oligonucleotide
  Antisense strand to SEQ ID NO: 1275230
ucuuaccuccacaucagca

SEQ ID NO: 1275232 - RNA, 19 nt, Artificial Sequence
  Description of Artificial Sequence: Synthetic oligonucleotide
  Sense strand starting at position 1388 of SEQ ID NO: 1241473
cccaguuaguuacuacauu

SEQ ID NO: 1275233 - RNA, 19 nt, Artificial Sequence
  Description of Artificial Sequence: Synthetic oligonucleotide
  Antisense strand to SEQ ID NO: 1275232
aauguaguaacuaacuggg

SEQ ID NO: 1275234 - RNA, 19 nt, Artificial Sequence
  Description of Artificial Sequence: Synthetic oligonucleotide
  Sense strand starting at position 1389 of SEQ ID NO: 1241473
ccaguuaguuacuacauuu

SEQ ID NO: 1275235 - RNA, 19 nt, Artificial Sequence
  Description of Artificial Sequence: Synthetic oligonucleotide
  Antisense strand to SEQ ID NO: 1275234
aaauguaguaacuaacugg

SEQ ID NO: 1275236 - RNA, 19 nt, Artificial Sequence
  Description of Artificial Sequence: Synthetic oligonucleotide
  Sense strand starting at position 1468 of SEQ ID NO: 1241473
uuugacagcucuccaguaa

SEQ ID NO: 1275237 - RNA, 19 nt, Artificial Sequence
  Description of Artificial Sequence: Synthetic oligonucleotide
  Antisense strand to SEQ ID NO: 1275236
uuacuggagagcugucaaa

SEQ ID NO: 1275238 - RNA, 19 nt, Artificial Sequence
  Description of Artificial Sequence: Synthetic oligonucleotide
  Sense strand starting at position 2688 of SEQ ID NO: 1241473
ggcugcuccgggagaaguu

SEQ ID NO: 1275239 - RNA, 19 nt, Artificial Sequence
  Description of Artificial Sequence: Synthetic oligonucleotide
  Antisense strand to SEQ ID NO: 1275238
aacuucucccggagcagcc

SEQ ID NO: 1275240 - RNA, 19 nt, Artificial Sequence
  Description of Artificial Sequence: Synthetic oligonucleotide
  Sense strand starting at position 2750 of SEQ ID NO: 1241473
gcuauaaauagagggcgau

SEQ ID NO: 1275241 - RNA, 19 nt, Artificial Sequence
  Description of Artificial Sequence: Synthetic oligonucleotide
  Antisense strand to SEQ ID NO: 1275240
aucgcccucuauuuauagc

SEQ ID NO: 1275242 - RNA, 19 nt, Artificial Sequence
  Description of Artificial Sequence: Synthetic oligonucleotide
  Sense strand starting at position 2864 of SEQ ID NO: 1241473
cucugacuccuggguaaac

SEQ ID NO: 1275243 - RNA, 19 nt, Artificial Sequence
  Description of Artificial Sequence: Synthetic oligonucleotide
  Antisense strand to SEQ ID NO: 1275242
guuuacccaggagucagag

SEQ ID NO: 1275244 - RNA, 19 nt, Artificial Sequence
  Description of Artificial Sequence: Synthetic oligonucleotide
  Sense strand starting at position 2865 of SEQ ID NO: 1241473
ucugacuccuggguaaaca

SEQ ID NO: 1275245 - RNA, 19 nt, Artificial Sequence
  Description of Artificial Sequence: Synthetic oligonucleotide
  Antisense strand to SEQ ID NO: 1275244
uguuuacccaggagucaga

SEQ ID NO: 1275246 - RNA, 19 nt, Artificial Sequence
  Description of Artificial Sequence: Synthetic oligonucleotide
  Sense strand starting at position 3173 of SEQ ID NO: 1241473
gaggaaggcucccuggaau

SEQ ID NO: 1275247 - RNA, 19 nt, Artificial Sequence
  Description of Artificial Sequence: Synthetic oligonucleotide
  Antisense strand to SEQ ID NO: 1275246
auuccagggagccuuccuc

SEQ ID NO: 1275248 - RNA, 19 nt, Artificial Sequence
  Description of Artificial Sequence: Synthetic oligonucleotide
  Sense strand starting at position 3179 of SEQ ID NO: 1241473
ggcucccuggaaugaguua

SEQ ID NO: 1275249 - RNA, 19 nt, Artificial Sequence
  Description of Artificial Sequence: Synthetic oligonucleotide
  Antisense strand to SEQ ID NO: 1275248
uaacucauuccagggagcc

SEQ ID NO: 1275250 - RNA, 19 nt, Artificial Sequence
  Description of Artificial Sequence: Synthetic oligonucleotide
  Sense strand starting at position 3184 of SEQ ID NO: 1241473
ccuggaaugaguuaguuga

SEQ ID NO: 1275251 - RNA, 19 nt, Artificial Sequence
  Description of Artificial Sequence: Synthetic oligonucleotide
  Antisense strand to SEQ ID NO: 1275250
ucaacuaacucauuccagg

SEQ ID NO: 1275252 - RNA, 19 nt, Artificial Sequence
  Description of Artificial Sequence: Synthetic oligonucleotide
  Sense strand starting at position 3186 of SEQ ID NO: 1241473
uggaaugaguuaguugauu

SEQ ID NO: 1275253 - RNA, 19 nt, Artificial Sequence
  Description of Artificial Sequence: Synthetic oligonucleotide
  Antisense strand to SEQ ID NO: 1275252
aaucaacuaacucauucca

SEQ ID NO: 1275254 - RNA, 19 nt, Artificial Sequence
  Description of Artificial Sequence: Synthetic oligonucleotide
  Sense strand starting at position 3221 of SEQ ID NO: 1241473
ggaauucgaaguuguuuag

SEQ ID NO: 1275255 - RNA, 19 nt, Artificial Sequence
  Description of Artificial Sequence: Synthetic oligonucleotide
  Antisense strand to SEQ ID NO: 1275254
cuaaacaacuucgaauucc

SEQ ID NO: 1275256 - RNA, 19 nt, Artificial Sequence
  Description of Artificial Sequence: Synthetic oligonucleotide
  Sense strand starting at position 3224 of SEQ ID NO: 1241473
auucgaaguuguuuaggca

SEQ ID NO: 1275257 - RNA, 19 nt, Artificial Sequence
  Description of Artificial Sequence: Synthetic oligonucleotide
  Antisense strand to SEQ ID NO: 1275256
ugccuaaacaacuucgaau

SEQ ID NO: 1275258 - RNA, 19 nt, Artificial Sequence
  Description of Artificial Sequence: Synthetic oligonucleotide
  Sense strand starting at position 3225 of SEQ ID NO: 1241473
uucgaaguuguuuaggcaa

SEQ ID NO: 1275259 - RNA, 19 nt, Artificial Sequence
  Description of Artificial Sequence: Synthetic oligonucleotide
  Antisense strand to SEQ ID NO: 1275258
uugccuaaacaacuucgaa

SEQ ID NO: 1275260 - RNA, 19 nt, Artificial Sequence
  Description of Artificial Sequence: Synthetic oligonucleotide
  Sense strand starting at position 3325 of SEQ ID NO: 1241473
ucagacugguuccugaguu

SEQ ID NO: 1275261 - RNA, 19 nt, Artificial Sequence
  Description of Artificial Sequence: Synthetic oligonucleotide
  Antisense strand to SEQ ID NO: 1275260
aacucaggaaccagucuga

SEQ ID NO: 1275262 - RNA, 19 nt, Artificial Sequence
  Description of Artificial Sequence: Synthetic oligonucleotide
  Sense strand starting at position 3909 of SEQ ID NO: 1241473
gggagagccucgagugaga

SEQ ID NO: 1275263 - RNA, 19 nt, Artificial Sequence
  Description of Artificial Sequence: Synthetic oligonucleotide
  Antisense strand to SEQ ID NO: 1275262
ucucacucgaggcucuccc

SEQ ID NO: 1275264 - RNA, 19 nt, Artificial Sequence
  Description of Artificial Sequence: Synthetic oligonucleotide
  Sense strand starting at position 152 of SEQ ID NO: 1241474
cugaauaaacuccgcaagu

SEQ ID NO: 1275265 - RNA, 19 nt, Artificial Sequence
  Description of Artificial Sequence: Synthetic oligonucleotide
  Antisense strand to SEQ ID NO: 1275264
acuugcggaguuuauucag

SEQ ID NO: 1275266 - RNA, 19 nt, Artificial Sequence
  Description of Artificial Sequence: Synthetic oligonucleotide
  Sense strand starting at position 153 of SEQ ID NO: 1241474
ugaauaaacuccgcaaguu

SEQ ID NO: 1275267 - RNA, 19 nt, Artificial Sequence
  Description of Artificial Sequence: Synthetic oligonucleotide
  Antisense strand to SEQ ID NO: 1275266
aacuugcggaguuuauuca

SEQ ID NO: 1275268 - RNA, 19 nt, Artificial Sequence
  Description of Artificial Sequence: Synthetic oligonucleotide
  Sense strand starting at position 172 of SEQ ID NO: 1241474
caacauuagugggugagga

SEQ ID NO: 1275269 - RNA, 19 nt, Artificial Sequence
  Description of Artificial Sequence: Synthetic oligonucleotide
  Antisense strand to SEQ ID NO: 1275268
uccucacccacuaauguug

SEQ ID NO: 1275270 - RNA, 19 nt, Artificial Sequence
  Description of Artificial Sequence: Synthetic oligonucleotide
  Sense strand starting at position 267 of SEQ ID NO: 1241474
gcuggaugcagugggauua

SEQ ID NO: 1275271 - RNA, 19 nt, Artificial Sequence
  Description of Artificial Sequence: Synthetic oligonucleotide
  Antisense strand to SEQ ID NO: 1275270
uaaucccacugcauccagc

SEQ ID NO: 1275272 - RNA, 19 nt, Artificial Sequence
  Description of Artificial Sequence: Synthetic oligonucleotide
  Sense strand starting at position 556 of SEQ ID NO: 1241474
ugcugauguggagguaaga

SEQ ID NO: 1275273 - RNA, 19 nt, Artificial Sequence
  Description of Artificial Sequence: Synthetic oligonucleotide
  Antisense strand to SEQ ID NO: 1275272
ucuuaccuccacaucagca

SEQ ID NO: 1275274 - RNA, 19 nt, Artificial Sequence
  Description of Artificial Sequence: Synthetic oligonucleotide
  Sense strand starting at position 638 of SEQ ID NO: 1241474
cccaguuaguuacuacauu

SEQ ID NO: 1275275 - RNA, 19 nt, Artificial Sequence
  Description of Artificial Sequence: Synthetic oligonucleotide
  Antisense strand to SEQ ID NO: 1275274
aauguaguaacuaacuggg

SEQ ID NO: 1275276 - RNA, 19 nt, Artificial Sequence
  Description of Artificial Sequence: Synthetic oligonucleotide
  Sense strand starting at position 639 of SEQ ID NO: 1241474
ccaguuaguuacuacauuu

SEQ ID NO: 1275277 - RNA, 19 nt, Artificial Sequence
  Description of Artificial Sequence: Synthetic oligonucleotide
  Antisense strand to SEQ ID NO: 1275276
aaauguaguaacuaacugg

SEQ ID NO: 1275278 - RNA, 19 nt, Artificial Sequence
  Description of Artificial Sequence: Synthetic oligonucleotide
  Sense strand starting at position 718 of SEQ ID NO: 1241474
uuugacagcucuccaguaa

SEQ ID NO: 1275279 - RNA, 19 nt, Artificial Sequence
  Description of Artificial Sequence: Synthetic oligonucleotide
  Antisense strand to SEQ ID NO: 1275278
uuacuggagagcugucaaa

SEQ ID NO: 1275280 - RNA, 19 nt, Artificial Sequence
  Description of Artificial Sequence: Synthetic oligonucleotide
  Sense strand starting at position 1938 of SEQ ID NO: 1241474
ggcugcuccgggagaaguu

SEQ ID NO: 1275281 - RNA, 19 nt, Artificial Sequence
  Description of Artificial Sequence: Synthetic oligonucleotide
  Antisense strand to SEQ ID NO: 1275280
aacuucucccggagcagcc

SEQ ID NO: 1275282 - RNA, 19 nt, Artificial Sequence
  Description of Artificial Sequence: Synthetic oligonucleotide
  Sense strand starting at position 2000 of SEQ ID NO: 1241474
gcuauaaauagagggcgau

SEQ ID NO: 1275283 - RNA, 19 nt, Artificial Sequence
  Description of Artificial Sequence: Synthetic oligonucleotide
  Antisense strand to SEQ ID NO: 1275282
aucgcccucuauuuauagc

SEQ ID NO: 1275284 - RNA, 19 nt, Artificial Sequence
  Description of Artificial Sequence: Synthetic oligonucleotide
  Sense strand starting at position 2114 of SEQ ID NO: 1241474
cucugacuccuggguaaac

SEQ ID NO: 1275285 - RNA, 19 nt, Artificial Sequence
  Description of Artificial Sequence: Synthetic oligonucleotide
  Antisense strand to SEQ ID NO: 1275284
guuuacccaggagucagag

SEQ ID NO: 1275286 - RNA, 19 nt, Artificial Sequence
  Description of Artificial Sequence: Synthetic oligonucleotide
  Sense strand starting at position 2115 of SEQ ID NO: 1241474
ucugacuccuggguaaaca

SEQ ID NO: 1275287 - RNA, 19 nt, Artificial Sequence
  Description of Artificial Sequence: Synthetic oligonucleotide
  Antisense strand to SEQ ID NO: 1275286
uguuuacccaggagucaga

SEQ ID NO: 1275288 - RNA, 19 nt, Artificial Sequence
  Description of Artificial Sequence: Synthetic oligonucleotide
  Sense strand starting at position 2423 of SEQ ID NO: 1241474
gaggaaggcucccuggaau

SEQ ID NO: 1275289 - RNA, 19 nt, Artificial Sequence
  Description of Artificial Sequence: Synthetic oligonucleotide
  Antisense strand to SEQ ID NO: 1275288
auuccagggagccuuccuc

SEQ ID NO: 1275290 - RNA, 19 nt, Artificial Sequence
  Description of Artificial Sequence: Synthetic oligonucleotide
  Sense strand starting at position 2429 of SEQ ID NO: 1241474
ggcucccuggaaugaguua

SEQ ID NO: 1275291 - RNA, 19 nt, Artificial Sequence
  Description of Artificial Sequence: Synthetic oligonucleotide
  Antisense strand to SEQ ID NO: 1275290
uaacucauuccagggagcc

SEQ ID NO: 1275292 - RNA, 19 nt, Artificial Sequence
  Description of Artificial Sequence: Synthetic oligonucleotide
  Sense strand starting at position 2434 of SEQ ID NO: 1241474
ccuggaaugaguuaguuga

SEQ ID NO: 1275293 - RNA, 19 nt, Artificial Sequence
  Description of Artificial Sequence: Synthetic oligonucleotide
  Antisense strand to SEQ ID NO: 1275292
ucaacuaacucauuccagg

SEQ ID NO: 1275294 - RNA, 19 nt, Artificial Sequence
  Description of Artificial Sequence: Synthetic oligonucleotide
  Sense strand starting at position 2436 of SEQ ID NO: 1241474
uggaaugaguuaguugauu

SEQ ID NO: 1275295 - RNA, 19 nt, Artificial Sequence
  Description of Artificial Sequence: Synthetic oligonucleotide
  Antisense strand to SEQ ID NO: 1275294
aaucaacuaacucauucca

SEQ ID NO: 1275296 - RNA, 19 nt, Artificial Sequence
  Description of Artificial Sequence: Synthetic oligonucleotide
  Sense strand starting at position 2471 of SEQ ID NO: 1241474
ggaauucgaaguuguuuag

SEQ ID NO: 1275297 - RNA, 19 nt, Artificial Sequence
  Description of Artificial Sequence: Synthetic oligonucleotide
  Antisense strand to SEQ ID NO: 1275296
cuaaacaacuucgaauucc

SEQ ID NO: 1275298 - RNA, 19 nt, Artificial Sequence
  Description of Artificial Sequence: Synthetic oligonucleotide
  Sense strand starting at position 2474 of SEQ ID NO: 1241474
auucgaaguuguuuaggca

SEQ ID NO: 1275299 - RNA, 19 nt, Artificial Sequence
  Description of Artificial Sequence: Synthetic oligonucleotide
  Antisense strand to SEQ ID NO: 1275298
ugccuaaacaacuucgaau

SEQ ID NO: 1275300 - RNA, 19 nt, Artificial Sequence
  Description of Artificial Sequence: Synthetic oligonucleotide
  Sense strand starting at position 2475 of SEQ ID NO: 1241474
uucgaaguuguuuaggcaa

SEQ ID NO: 1275301 - RNA, 19 nt, Artificial Sequence
  Description of Artificial Sequence: Synthetic oligonucleotide
  Antisense strand to SEQ ID NO: 1275300
uugccuaaacaacuucgaa

SEQ ID NO: 1275302 - RNA, 19 nt, Artificial Sequence
  Description of Artificial Sequence: Synthetic oligonucleotide
  Sense strand starting at position 2575 of SEQ ID NO: 1241474
ucagacugguuccugaguu

SEQ ID NO: 1275303 - RNA, 19 nt, Artificial Sequence
  Description of Artificial Sequence: Synthetic oligonucleotide
  Antisense strand to SEQ ID NO: 1275302
aacucaggaaccagucuga

SEQ ID NO: 1275304 - RNA, 19 nt, Artificial Sequence
  Description of Artificial Sequence: Synthetic oligonucleotide
  Sense strand starting at position 3159 of SEQ ID NO: 1241474
gggagagccucgagugaga

SEQ ID NO: 1275305 - RNA, 19 nt, Artificial Sequence
  Description of Artificial Sequence: Synthetic oligonucleotide
  Antisense strand to SEQ ID NO: 1275304
ucucacucgaggcucuccc

SEQ ID NO: 1275306 - RNA, 19 nt, Artificial Sequence
  Description of Artificial Sequence: Synthetic oligonucleotide
  Sense strand starting at position 3258 of SEQ ID NO: 1241474
uaaauucgucucuggguca

SEQ ID NO: 1275307 - RNA, 19 nt, Artificial Sequence
  Description of Artificial Sequence: Synthetic oligonucleotide
  Antisense strand to SEQ ID NO: 1275306
ugacccagagacgaauuua

SEQ ID NO: 1275308 - RNA, 19 nt, Artificial Sequence
  Description of Artificial Sequence: Synthetic oligonucleotide
  Sense strand starting at position 3425 of SEQ ID NO: 1241474
aagauaugguucuuccaug

SEQ ID NO: 1275309 - RNA, 19 nt, Artificial Sequence
  Description of Artificial Sequence: Synthetic oligonucleotide
  Antisense strand to SEQ ID NO: 1275308
cauggaagaaccauaucuu

SEQ ID NO: 1275310 - RNA, 19 nt, Artificial Sequence
  Description of Artificial Sequence: Synthetic oligonucleotide
  Sense strand starting at position 3426 of SEQ ID NO: 1241474
agauaugguucuuccaugu

SEQ ID NO: 1275311 - RNA, 19 nt, Artificial Sequence
  Description of Artificial Sequence: Synthetic oligonucleotide
  Antisense strand to SEQ ID NO: 1275310
acauggaagaaccauaucu

SEQ ID NO: 1275312 - RNA, 19 nt, Artificial Sequence
  Description of Artificial Sequence: Synthetic oligonucleotide
  Sense strand starting at position 3484 of SEQ ID NO: 1241474
aggacaaucucugucuaaa

SEQ ID NO: 1275313 - RNA, 19 nt, Artificial Sequence
  Description of Artificial Sequence: Synthetic oligonucleotide
  Antisense strand to SEQ ID NO: 1275312
uuuagacagagauuguccu

SEQ ID NO: 1275314 - RNA, 19 nt, Artificial Sequence
  Description of Artificial Sequence: Synthetic oligonucleotide
  Sense strand starting at position 3564 of SEQ ID NO: 1241474
aucuguuaugugcaagcca

SEQ ID NO: 1275315 - RNA, 19 nt, Artificial Sequence
  Description of Artificial Sequence: Synthetic oligonucleotide
  Antisense strand to SEQ ID NO: 1275314
uggcuugcacauaacagau

SEQ ID NO: 1275316 - RNA, 19 nt, Artificial Sequence
  Description of Artificial Sequence: Synthetic oligonucleotide
  Sense strand starting at position 3578 of SEQ ID NO: 1241474
agccacuguguagaugaaa

SEQ ID NO: 1275317 - RNA, 19 nt, Artificial Sequence
  Description of Artificial Sequence: Synthetic oligonucleotide
  Antisense strand to SEQ ID NO: 1275316
uuucaucuacacaguggcu

SEQ ID NO: 1275318 - RNA, 19 nt, Artificial Sequence
  Description of Artificial Sequence: Synthetic oligonucleotide
  Sense strand starting at position 3625 of SEQ ID NO: 1241474
ucuagacauuugugaugag

SEQ ID NO: 1275319 - RNA, 19 nt, Artificial Sequence
  Description of Artificial Sequence: Synthetic oligonucleotide
  Antisense strand to SEQ ID NO: 1275318
cucaucacaaaugucuaga

SEQ ID NO: 1275320 - RNA, 19 nt, Artificial Sequence
  Description of Artificial Sequence: Synthetic oligonucleotide
  Sense strand starting at position 3626 of SEQ ID NO: 1241474
cuagacauuugugaugaga

SEQ ID NO: 1275321 - RNA, 19 nt, Artificial Sequence
  Description of Artificial Sequence: Synthetic oligonucleotide
  Antisense strand to SEQ ID NO: 1275320
ucucaucacaaaugucuag

SEQ ID NO: 1275322 - RNA, 19 nt, Artificial Sequence
  Description of Artificial Sequence: Synthetic oligonucleotide
  Sense strand starting at position 3653 of SEQ ID NO: 1241474
uuugacauuugucaagaga

SEQ ID NO: 1275323 - RNA, 19 nt, Artificial Sequence
  Description of Artificial Sequence: Synthetic oligonucleotide
  Antisense strand to SEQ ID NO: 1275322
ucucuugacaaaugucaaa

SEQ ID NO: 1275324 - RNA, 19 nt, Artificial Sequence
  Description of Artificial Sequence: Synthetic oligonucleotide
  Sense strand starting at position 3702 of SEQ ID NO: 1241474
gaucaaucauuuggacagu

SEQ ID NO: 1275325 - RNA, 19 nt, Artificial Sequence
  Description of Artificial Sequence: Synthetic oligonucleotide
  Antisense strand to SEQ ID NO: 1275324
acuguccaaaugauugauc

SEQ ID NO: 1275326 - RNA, 19 nt, Artificial Sequence
  Description of Artificial Sequence: Synthetic oligonucleotide
  Sense strand starting at position 3703 of SEQ ID NO: 1241474
aucaaucauuuggacagua

SEQ ID NO: 1275327 - RNA, 19 nt, Artificial Sequence
  Description of Artificial Sequence: Synthetic oligonucleotide
  Antisense strand to SEQ ID NO: 1275326
uacuguccaaaugauugau

SEQ ID NO: 1275328 - RNA, 19 nt, Artificial Sequence
  Description of Artificial Sequence: Synthetic oligonucleotide
  Sense strand starting at position 3715 of SEQ ID NO: 1241474
gacaguaaguccuauagca

SEQ ID NO: 1275329 - RNA, 19 nt, Artificial Sequence
  Description of Artificial Sequence: Synthetic oligonucleotide
  Antisense strand to SEQ ID NO: 1275328
ugcuauaggacuuacuguc

SEQ ID NO: 1275330 - RNA, 19 nt, Artificial Sequence
  Description of Artificial Sequence: Synthetic oligonucleotide
  Sense strand starting at position 3717 of SEQ ID NO: 1241474
caguaaguccuauagcagu

SEQ ID NO: 1275331 - RNA, 19 nt, Artificial Sequence
  Description of Artificial Sequence: Synthetic oligonucleotide
  Antisense strand to SEQ ID NO: 1275330
acugcuauaggacuuacug

SEQ ID NO: 1275332 - RNA, 19 nt, Artificial Sequence
  Description of Artificial Sequence: Synthetic oligonucleotide
  Sense strand starting at position 3744 of SEQ ID NO: 1241474
acccuucucaagugggaga

SEQ ID NO: 1275333 - RNA, 19 nt, Artificial Sequence
  Description of Artificial Sequence: Synthetic oligonucleotide
  Antisense strand to SEQ ID NO: 1275332
ucucccacuugagaagggu

SEQ ID NO: 1275334 - RNA, 19 nt, Artificial Sequence
  Description of Artificial Sequence: Synthetic oligonucleotide
  Sense strand starting at position 3746 of SEQ ID NO: 1241474
ccuucucaagugggagauu

SEQ ID NO: 1275335 - RNA, 19 nt, Artificial Sequence
  Description of Artificial Sequence: Synthetic oligonucleotide
  Antisense strand to SEQ ID NO: 1275334
aaucucccacuugagaagg

SEQ ID NO: 1275336 - RNA, 19 nt, Artificial Sequence
  Description of Artificial Sequence: Synthetic oligonucleotide
  Sense strand starting at position 3747 of SEQ ID NO: 1241474
cuucucaagugggagauua

SEQ ID NO: 1275337 - RNA, 19 nt, Artificial Sequence
  Description of Artificial Sequence: Synthetic oligonucleotide
  Antisense strand to SEQ ID NO: 1275336
uaaucucccacuugagaag

SEQ ID NO: 1275338 - RNA, 19 nt, Artificial Sequence
  Description of Artificial Sequence: Synthetic oligonucleotide
  Sense strand starting at position 3778 of SEQ ID NO: 1241474
cccacauaauagguauagu

SEQ ID NO: 1275339 - RNA, 19 nt, Artificial Sequence
  Description of Artificial Sequence: Synthetic oligonucleotide
  Antisense strand to SEQ ID NO: 1275338
acuauaccuauuauguggg

SEQ ID NO: 1275340 - RNA, 19 nt, Artificial Sequence
  Description of Artificial Sequence: Synthetic oligonucleotide
  Sense strand starting at position 3842 of SEQ ID NO: 1241474
gaaguaaguuucugucaca

SEQ ID NO: 1275341 - RNA, 19 nt, Artificial Sequence
  Description of Artificial Sequence: Synthetic oligonucleotide
  Antisense strand to SEQ ID NO: 1275340
ugugacagaaacuuacuuc

SEQ ID NO: 1275342 - RNA, 19 nt, Artificial Sequence
  Description of Artificial Sequence: Synthetic oligonucleotide
  Sense strand starting at position 3887 of SEQ ID NO: 1241474
acaugcaaggcauauuauu

SEQ ID NO: 1275343 - RNA, 19 nt, Artificial Sequence
  Description of Artificial Sequence: Synthetic oligonucleotide
  Antisense strand to SEQ ID NO: 1275342
aauaauaugccuugcaugu

SEQ ID NO: 1275344 - RNA, 19 nt, Artificial Sequence
  Description of Artificial Sequence: Synthetic oligonucleotide
  Sense strand starting at position 12 of SEQ ID NO: 1241475
gaguuauaauaguccacug

SEQ ID NO: 1275345 - RNA, 19 nt, Artificial Sequence
  Description of Artificial Sequence: Synthetic oligonucleotide
  Antisense strand to SEQ ID NO: 1275344
caguggacuauuauaacuc

SEQ ID NO: 1275346 - RNA, 19 nt, Artificial Sequence
  Description of Artificial Sequence: Synthetic oligonucleotide
  Sense strand starting at position 14 of SEQ ID NO: 1241475
guuauaauaguccacugca

SEQ ID NO: 1275347 - RNA, 19 nt, Artificial Sequence
  Description of Artificial Sequence: Synthetic oligonucleotide
  Antisense strand to SEQ ID NO: 1275346
ugcaguggacuauuauaac

SEQ ID NO: 1275348 - RNA, 19 nt, Artificial Sequence
  Description of Artificial Sequence: Synthetic oligonucleotide
  Sense strand starting at position 65 of SEQ ID NO: 1241475
accucaaucuucugagaag

SEQ ID NO: 1275349 - RNA, 19 nt, Artificial Sequence
  Description of Artificial Sequence: Synthetic oligonucleotide
  Antisense strand to SEQ ID NO: 1275348
cuucucagaagauugaggu

SEQ ID NO: 1275350 - RNA, 19 nt, Artificial Sequence
  Description of Artificial Sequence: Synthetic oligonucleotide
  Sense strand starting at position 66 of SEQ ID NO: 1241475
ccucaaucuucugagaagc

SEQ ID NO: 1275351 - RNA, 19 nt, Artificial Sequence
  Description of Artificial Sequence: Synthetic oligonucleotide
  Antisense strand to SEQ ID NO: 1275350
gcuucucagaagauugagg

SEQ ID NO: 1275352 - RNA, 19 nt, Artificial Sequence
  Description of Artificial Sequence: Synthetic oligonucleotide
  Sense strand starting at position 220 of SEQ ID NO: 1241475
cauucugaucagggauacu

SEQ ID NO: 1275353 - RNA, 19 nt, Artificial Sequence
  Description of Artificial Sequence: Synthetic oligonucleotide
  Antisense strand to SEQ ID NO: 1275352
aguaucccugaucagaaug

SEQ ID NO: 1275354 - RNA, 19 nt, Artificial Sequence
  Description of Artificial Sequence: Synthetic oligonucleotide
  Sense strand starting at position 322 of SEQ ID NO: 1241475
cgugcauacagaugaauuc

SEQ ID NO: 1275355 - RNA, 19 nt, Artificial Sequence
  Description of Artificial Sequence: Synthetic oligonucleotide
  Antisense strand to SEQ ID NO: 1275354
gaauucaucuguaugcacg

SEQ ID NO: 1275356 - RNA, 19 nt, Artificial Sequence
  Description of Artificial Sequence: Synthetic oligonucleotide
  Sense strand starting at position 350 of SEQ ID NO: 1241475
cugugugcguuuggacuaa

SEQ ID NO: 1275357 - RNA, 19 nt, Artificial Sequence
  Description of Artificial Sequence: Synthetic oligonucleotide
  Antisense strand to SEQ ID NO: 1275356
uuaguccaaacgcacacag

SEQ ID NO: 1275358 - RNA, 19 nt, Artificial Sequence
  Description of Artificial Sequence: Synthetic oligonucleotide
  Sense strand starting at position 354 of SEQ ID NO: 1241475
gugcguuuggacuaaacua

SEQ ID NO: 1275359 - RNA, 19 nt, Artificial Sequence
  Description of Artificial Sequence: Synthetic oligonucleotide
  Antisense strand to SEQ ID NO: 1275358
uaguuuaguccaaacgcac

SEQ ID NO: 1275360 - RNA, 19 nt, Artificial Sequence
  Description of Artificial Sequence: Synthetic oligonucleotide
  Sense strand starting at position 505 of SEQ ID NO: 1241475
cuggcaugcuuauacaauu

SEQ ID NO: 1275361 - RNA, 19 nt, Artificial Sequence
  Description of Artificial Sequence: Synthetic oligonucleotide
  Antisense strand to SEQ ID NO: 1275360
aauuguauaagcaugccag

SEQ ID NO: 1275362 - RNA, 19 nt, Artificial Sequence
  Description of Artificial Sequence: Synthetic oligonucleotide
  Sense strand starting at position 1403 of SEQ ID NO: 1241475
ggugucggcucaagaggau

SEQ ID NO: 1275363 - RNA, 19 nt, Artificial Sequence
  Description of Artificial Sequence: Synthetic oligonucleotide
  Antisense strand to SEQ ID NO: 1275362
auccucuugagccgacacc

SEQ ID NO: 1275364 - RNA, 19 nt, Artificial Sequence
  Description of Artificial Sequence: Synthetic oligonucleotide
  Sense strand starting at position 1440 of SEQ ID NO: 1241475
cgagguuagcgagaagaca

SEQ ID NO: 1275365 - RNA, 19 nt, Artificial Sequence
  Description of Artificial Sequence: Synthetic oligonucleotide
  Antisense strand to SEQ ID NO: 1275364
ugucuucucgcuaaccucg

SEQ ID NO: 1275366 - RNA, 19 nt, Artificial Sequence
  Description of Artificial Sequence: Synthetic oligonucleotide
  Sense strand starting at position 1986 of SEQ ID NO: 1241475
aggguugacuccucucauu

SEQ ID NO: 1275367 - RNA, 19 nt, Artificial Sequence
  Description of Artificial Sequence: Synthetic oligonucleotide
  Antisense strand to SEQ ID NO: 1275366
aaugagaggagucaacccu

SEQ ID NO: 1275368 - RNA, 19 nt, Artificial Sequence
  Description of Artificial Sequence: Synthetic oligonucleotide
  Sense strand starting at position 2457 of SEQ ID NO: 1241475
ggucguucccggcagaagu

SEQ ID NO: 1275369 - RNA, 19 nt, Artificial Sequence
  Description of Artificial Sequence: Synthetic oligonucleotide
  Antisense strand to SEQ ID NO: 1275368
acuucugccgggaacgacc

SEQ ID NO: 1275370 - RNA, 19 nt, Artificial Sequence
  Description of Artificial Sequence: Synthetic oligonucleotide
  Sense strand starting at position 2494 of SEQ ID NO: 1241475
aagugacuucuccaugggu

SEQ ID NO: 1275371 - RNA, 19 nt, Artificial Sequence
  Description of Artificial Sequence: Synthetic oligonucleotide
  Antisense strand to SEQ ID NO: 1275370
acccauggagaagucacuu

SEQ ID NO: 1275372 - RNA, 19 nt, Artificial Sequence
  Description of Artificial Sequence: Synthetic oligonucleotide
  Sense strand starting at position 2496 of SEQ ID NO: 1241475
gugacuucuccauggguuu

SEQ ID NO: 1275373 - RNA, 19 nt, Artificial Sequence
  Description of Artificial Sequence: Synthetic oligonucleotide
  Antisense strand to SEQ ID NO: 1275372
aaacccauggagaagucac

SEQ ID NO: 1275374 - RNA, 19 nt, Artificial Sequence
  Description of Artificial Sequence: Synthetic oligonucleotide
  Sense strand starting at position 2602 of SEQ ID NO: 1241475
aucucuuggcgcuggaaga

SEQ ID NO: 1275375 - RNA, 19 nt, Artificial Sequence
  Description of Artificial Sequence: Synthetic oligonucleotide
  Antisense strand to SEQ ID NO: 1275374
ucuuccagcgccaagagau

SEQ ID NO: 1275376 - RNA, 19 nt, Artificial Sequence
  Description of Artificial Sequence: Synthetic oligonucleotide
  Sense strand starting at position 2772 of SEQ ID NO: 1241475
cagagaccuuucgguuguu

SEQ ID NO: 1275377 - RNA, 19 nt, Artificial Sequence
  Description of Artificial Sequence: Synthetic oligonucleotide
  Antisense strand to SEQ ID NO: 1275376
aacaaccgaaaggucucug

SEQ ID NO: 1275378 - RNA, 19 nt, Artificial Sequence
  Description of Artificial Sequence: Synthetic oligonucleotide
  Sense strand starting at position 2856 of SEQ ID NO: 1241475
ccacuaucacugcgaaguu

SEQ ID NO: 1275379 - RNA, 19 nt, Artificial Sequence
  Description of Artificial Sequence: Synthetic oligonucleotide
  Antisense strand to SEQ ID NO: 1275378
aacuucgcagugauagugg

SEQ ID NO: 1275380 - RNA, 19 nt, Artificial Sequence
  Description of Artificial Sequence: Synthetic oligonucleotide
  Sense strand starting at position 2965 of SEQ ID NO: 1241475
aggcgaaccugagcuauca

SEQ ID NO: 1275381 - RNA, 19 nt, Artificial Sequence
  Description of Artificial Sequence: Synthetic oligonucleotide
  Antisense strand to SEQ ID NO: 1275380
ugauagcucagguucgccu

SEQ ID NO: 1275382 - RNA, 19 nt, Artificial Sequence
  Description of Artificial Sequence: Synthetic oligonucleotide
  Sense strand starting at position 2967 of SEQ ID NO: 1241475
gcgaaccugagcuaucauu

SEQ ID NO: 1275383 - RNA, 19 nt, Artificial Sequence
  Description of Artificial Sequence: Synthetic oligonucleotide
  Antisense strand to SEQ ID NO: 1275382
aaugauagcucagguucgc

SEQ ID NO: 1275384 - RNA, 19 nt, Artificial Sequence
  Description of Artificial Sequence: Synthetic oligonucleotide
  Sense strand starting at position 3235 of SEQ ID NO: 1241475
cagugagcuccagggcuaa

SEQ ID NO: 1275385 - RNA, 19 nt, Artificial Sequence
  Description of Artificial Sequence: Synthetic oligonucleotide
  Antisense strand to SEQ ID NO: 1275384
uuagcccuggagcucacug

SEQ ID NO: 1275386 - RNA, 19 nt, Artificial Sequence
  Description of Artificial Sequence: Synthetic oligonucleotide
  Sense strand starting at position 3291 of SEQ ID NO: 1241475
ucaccuuaguugucaucaa

SEQ ID NO: 1275387 - RNA, 19 nt, Artificial Sequence
  Description of Artificial Sequence: Synthetic oligonucleotide
  Antisense strand to SEQ ID NO: 1275386
uugaugacaacuaagguga

SEQ ID NO: 1275388 - RNA, 19 nt, Artificial Sequence
  Description of Artificial Sequence: Synthetic oligonucleotide
  Sense strand starting at position 3295 of SEQ ID NO: 1241475
cuuaguugucaucaacaug

SEQ ID NO: 1275389 - RNA, 19 nt, Artificial Sequence
  Description of Artificial Sequence: Synthetic oligonucleotide
  Antisense strand to SEQ ID NO: 1275388
cauguugaugacaacuaag

SEQ ID NO: 1275390 - RNA, 19 nt, Artificial Sequence
  Description of Artificial Sequence: Synthetic oligonucleotide
  Sense strand starting at position 3307 of SEQ ID NO: 1241475
caacaugcacgguaauuau

SEQ ID NO: 1275391 - RNA, 19 nt, Artificial Sequence
  Description of Artificial Sequence: Synthetic oligonucleotide
  Antisense strand to SEQ ID NO: 1275390
auaauuaccgugcauguug

SEQ ID NO: 1275392 - RNA, 19 nt, Artificial Sequence
  Description of Artificial Sequence: Synthetic oligonucleotide
  Sense strand starting at position 3378 of SEQ ID NO: 1241475
gcacgauucucggcucacu

SEQ ID NO: 1275393 - RNA, 19 nt, Artificial Sequence
  Description of Artificial Sequence: Synthetic oligonucleotide
  Antisense strand to SEQ ID NO: 1275392
agugagccgagaaucgugc

SEQ ID NO: 1275394 - RNA, 19 nt, Artificial Sequence
  Description of Artificial Sequence: Synthetic oligonucleotide
  Sense strand starting at position 3885 of SEQ ID NO: 1241475
cggcaacaugcacgauuau

SEQ ID NO: 1275395 - RNA, 19 nt, Artificial Sequence
  Description of Artificial Sequence: Synthetic oligonucleotide
  Antisense strand to SEQ ID NO: 1275394
auaaucgugcauguugccg

SEQ ID NO: 1275396 - RNA, 19 nt, Artificial Sequence
  Description of Artificial Sequence: Synthetic oligonucleotide
  Sense strand starting at position 3886 of SEQ ID NO: 1241475
ggcaacaugcacgauuauu

SEQ ID NO: 1275397 - RNA, 19 nt, Artificial Sequence
  Description of Artificial Sequence: Synthetic oligonucleotide
  Antisense strand to SEQ ID NO: 1275396
aauaaucgugcauguugcc

SEQ ID NO: 1275398 - RNA, 19 nt, Artificial Sequence
  Description of Artificial Sequence: Synthetic oligonucleotide
  Sense strand starting at position 3894 of SEQ ID NO: 1241475
gcacgauuauuauuaagag

SEQ ID NO: 1275399 - RNA, 19 nt, Artificial Sequence
  Description of Artificial Sequence: Synthetic oligonucleotide
  Antisense strand to SEQ ID NO: 1275398
cucuuaauaauaaucgugc

SEQ ID NO: 1275400 - RNA, 19 nt, Artificial Sequence
  Description of Artificial Sequence: Synthetic oligonucleotide
  Sense strand starting at position 3898 of SEQ ID NO: 1241475
gauuauuauuaagagggca

SEQ ID NO: 1275401 - RNA, 19 nt, Artificial Sequence
  Description of Artificial Sequence: Synthetic oligonucleotide
  Antisense strand to SEQ ID NO: 1275400
ugcccucuuaauaauaauc

SEQ ID NO: 1275402 - RNA, 19 nt, Artificial Sequence
  Description of Artificial Sequence: Synthetic oligonucleotide
  Sense strand starting at position 3901 of SEQ ID NO: 1241475
uauuauuaagagggcaagu

SEQ ID NO: 1275403 - RNA, 19 nt, Artificial Sequence
  Description of Artificial Sequence: Synthetic oligonucleotide
  Antisense strand to SEQ ID NO: 1275402
acuugcccucuuaauaaua

SEQ ID NO: 1275404 - RNA, 19 nt, Artificial Sequence
  Description of Artificial Sequence: Synthetic oligonucleotide
  Sense strand starting at position 3911 of SEQ ID NO: 1241475
agggcaaguaacugugaga

SEQ ID NO: 1275405 - RNA, 19 nt, Artificial Sequence
  Description of Artificial Sequence: Synthetic oligonucleotide
  Antisense strand to SEQ ID NO: 1275404
ucucacaguuacuugcccu

SEQ ID NO: 1275406 - RNA, 19 nt, Artificial Sequence
  Description of Artificial Sequence: Synthetic oligonucleotide
  Sense strand starting at position 3914 of SEQ ID NO: 1241475
gcaaguaacugugagauau

SEQ ID NO: 1275407 - RNA, 19 nt, Artificial Sequence
  Description of Artificial Sequence: Synthetic oligonucleotide
  Antisense strand to SEQ ID NO: 1275406
auaucucacaguuacuugc

SEQ ID NO: 1275408 - RNA, 19 nt, Artificial Sequence
  Description of Artificial Sequence: Synthetic oligonucleotide
  Sense strand starting at position 3916 of SEQ ID NO: 1241475
aaguaacugugagauauuu

SEQ ID NO: 1275409 - RNA, 19 nt, Artificial Sequence
  Description of Artificial Sequence: Synthetic oligonucleotide
  Antisense strand to SEQ ID NO: 1275408
aaauaucucacaguuacuu

SEQ ID NO: 1275410 - RNA, 19 nt, Artificial Sequence
  Description of Artificial Sequence: Synthetic oligonucleotide
  Sense strand starting at position 3922 of SEQ ID NO: 1241475
cugugagauauuugcgaug

SEQ ID NO: 1275411 - RNA, 19 nt, Artificial Sequence
  Description of Artificial Sequence: Synthetic oligonucleotide
  Antisense strand to SEQ ID NO: 1275410
caucgcaaauaucucacag

SEQ ID NO: 1275412 - RNA, 19 nt, Artificial Sequence
  Description of Artificial Sequence: Synthetic oligonucleotide
  Sense strand starting at position 3924 of SEQ ID NO: 1241475
gugagauauuugcgaugaa

SEQ ID NO: 1275413 - RNA, 19 nt, Artificial Sequence
  Description of Artificial Sequence: Synthetic oligonucleotide
  Antisense strand to SEQ ID NO: 1275412
uucaucgcaaauaucucac

SEQ ID NO: 1275414 - RNA, 19 nt, Artificial Sequence
  Description of Artificial Sequence: Synthetic oligonucleotide
  Sense strand starting at position 3925 of SEQ ID NO: 1241475
ugagauauuugcgaugaag

SEQ ID NO: 1275415 - RNA, 19 nt, Artificial Sequence
  Description of Artificial Sequence: Synthetic oligonucleotide
  Antisense strand to SEQ ID NO: 1275414
cuucaucgcaaauaucuca

SEQ ID NO: 1275416 - RNA, 19 nt, Artificial Sequence
  Description of Artificial Sequence: Synthetic oligonucleotide
  Sense strand starting at position 3956 of SEQ ID NO: 1241475
aaaccagugcucugaagga

SEQ ID NO: 1275417 - RNA, 19 nt, Artificial Sequence
  Description of Artificial Sequence: Synthetic oligonucleotide
  Antisense strand to SEQ ID NO: 1275416
uccuucagagcacugguuu

SEQ ID NO: 1275418 - RNA, 19 nt, Artificial Sequence
  Description of Artificial Sequence: Synthetic oligonucleotide
  Sense strand starting at position 670 of SEQ ID NO: 1241476
cccagacccuuggcuaauu

SEQ ID NO: 1275419 - RNA, 19 nt, Artificial Sequence
  Description of Artificial Sequence: Synthetic oligonucleotide
  Antisense strand to SEQ ID NO: 1275418
aauuagccaagggucuggg

SEQ ID NO: 1275420 - RNA, 19 nt, Artificial Sequence
  Description of Artificial Sequence: Synthetic oligonucleotide
  Sense strand starting at position 990 of SEQ ID NO: 1241476
gguuaagaaugacuauuau

SEQ ID NO: 1275421 - RNA, 19 nt, Artificial Sequence
  Description of Artificial Sequence: Synthetic oligonucleotide
  Antisense strand to SEQ ID NO: 1275420
auaauagucauucuuaacc

SEQ ID NO: 1275422 - RNA, 19 nt, Artificial Sequence
  Description of Artificial Sequence: Synthetic oligonucleotide
  Sense strand starting at position 998 of SEQ ID NO: 1241476
augacuauuauguacggua

SEQ ID NO: 1275423 - RNA, 19 nt, Artificial Sequence
  Description of Artificial Sequence: Synthetic oligonucleotide
  Antisense strand to SEQ ID NO: 1275422
uaccguacauaauagucau

SEQ ID NO: 1275424 - RNA, 19 nt, Artificial Sequence
  Description of Artificial Sequence: Synthetic oligonucleotide
  Sense strand starting at position 1000 of SEQ ID NO: 1241476
gacuauuauguacgguaaa

SEQ ID NO: 1275425 - RNA, 19 nt, Artificial Sequence
  Description of Artificial Sequence: Synthetic oligonucleotide
  Antisense strand to SEQ ID NO: 1275424
uuuaccguacauaauaguc

SEQ ID NO: 1275426 - RNA, 19 nt, Artificial Sequence
  Description of Artificial Sequence: Synthetic oligonucleotide
  Sense strand starting at position 1010 of SEQ ID NO: 1241476
uacgguaaauaugcuaaga

SEQ ID NO: 1275427 - RNA, 19 nt, Artificial Sequence
  Description of Artificial Sequence: Synthetic oligonucleotide
  Antisense strand to SEQ ID NO: 1275426
ucuuagcauauuuaccgua

SEQ ID NO: 1275428 - RNA, 19 nt, Artificial Sequence
  Description of Artificial Sequence: Synthetic oligonucleotide
  Sense strand starting at position 1133 of SEQ ID NO: 1241476
gggucucugucugucugaa

SEQ ID NO: 1275429 - RNA, 19 nt, Artificial Sequence
  Description of Artificial Sequence: Synthetic oligonucleotide
  Antisense strand to SEQ ID NO: 1275428
uucagacagacagagaccc

SEQ ID NO: 1275430 - RNA, 19 nt, Artificial Sequence
  Description of Artificial Sequence: Synthetic oligonucleotide
  Sense strand starting at position 1216 of SEQ ID NO: 1241476
ggaguugagagaugcagau

SEQ ID NO: 1275431 - RNA, 19 nt, Artificial Sequence
  Description of Artificial Sequence: Synthetic oligonucleotide
  Antisense strand to SEQ ID NO: 1275430
aucugcaucucucaacucc

SEQ ID NO: 1275432 - RNA, 19 nt, Artificial Sequence
  Description of Artificial Sequence: Synthetic oligonucleotide
  Sense strand starting at position 1235 of SEQ ID NO: 1241476
gaaggaaaccauggcuagu

SEQ ID NO: 1275433 - RNA, 19 nt, Artificial Sequence
  Description of Artificial Sequence: Synthetic oligonucleotide
  Antisense strand to SEQ ID NO: 1275432
acuagccaugguuuccuuc

SEQ ID NO: 1275434 - RNA, 19 nt, Artificial Sequence
  Description of Artificial Sequence: Synthetic oligonucleotide
  Sense strand starting at position 1368 of SEQ ID NO: 1241476
cuguaggacgggugagaua

SEQ ID NO: 1275435 - RNA, 19 nt, Artificial Sequence
  Description of Artificial Sequence: Synthetic oligonucleotide
  Antisense strand to SEQ ID NO: 1275434
uaucucacccguccuacag

SEQ ID NO: 1275436 - RNA, 19 nt, Artificial Sequence
  Description of Artificial Sequence: Synthetic oligonucleotide
  Sense strand starting at position 1489 of SEQ ID NO: 1241476
gcagguacccugggaauga

SEQ ID NO: 1275437 - RNA, 19 nt, Artificial Sequence
  Description of Artificial Sequence: Synthetic oligonucleotide
  Antisense strand to SEQ ID NO: 1275436
ucauucccaggguaccugc

SEQ ID NO: 1275438 - RNA, 19 nt, Artificial Sequence
  Description of Artificial Sequence: Synthetic oligonucleotide
  Sense strand starting at position 1490 of SEQ ID NO: 1241476
cagguacccugggaaugaa

SEQ ID NO: 1275439 - RNA, 19 nt, Artificial Sequence
  Description of Artificial Sequence: Synthetic oligonucleotide
  Antisense strand to SEQ ID NO: 1275438
uucauucccaggguaccug

SEQ ID NO: 1275440 - RNA, 19 nt, Artificial Sequence
  Description of Artificial Sequence: Synthetic oligonucleotide
  Sense strand starting at position 1522 of SEQ ID NO: 1241476
cgcuuacuccaagaaucug

SEQ ID NO: 1275441 - RNA, 19 nt, Artificial Sequence
  Description of Artificial Sequence: Synthetic oligonucleotide
  Antisense strand to SEQ ID NO: 1275440
cagauucuuggaguaagcg

SEQ ID NO: 1275442 - RNA, 19 nt, Artificial Sequence
  Description of Artificial Sequence: Synthetic oligonucleotide
  Sense strand starting at position 1891 of SEQ ID NO: 1241476
uuagcaucuucuuuccagu

SEQ ID NO: 1275443 - RNA, 19 nt, Artificial Sequence
  Description of Artificial Sequence: Synthetic oligonucleotide
  Antisense strand to SEQ ID NO: 1275442
acuggaaagaagaugcuaa

SEQ ID NO: 1275444 - RNA, 19 nt, Artificial Sequence
  Description of Artificial Sequence: Synthetic oligonucleotide
  Sense strand starting at position 2474 of SEQ ID NO: 1241476
ggaagugaguaccucuauu

SEQ ID NO: 1275445 - RNA, 19 nt, Artificial Sequence
  Description of Artificial Sequence: Synthetic oligonucleotide
  Antisense strand to SEQ ID NO: 1275444
aauagagguacucacuucc

SEQ ID NO: 1275446 - RNA, 19 nt, Artificial Sequence
  Description of Artificial Sequence: Synthetic oligonucleotide
  Sense strand starting at position 2480 of SEQ ID NO: 1241476
gaguaccucuauuccggaa

SEQ ID NO: 1275447 - RNA, 19 nt, Artificial Sequence
  Description of Artificial Sequence: Synthetic oligonucleotide
  Antisense strand to SEQ ID NO: 1275446
uuccggaauagagguacuc

SEQ ID NO: 1275448 - RNA, 19 nt, Artificial Sequence
  Description of Artificial Sequence: Synthetic oligonucleotide
  Sense strand starting at position 2492 of SEQ ID NO: 1241476
uccggaaacuaguuaugaa

SEQ ID NO: 1275449 - RNA, 19 nt, Artificial Sequence
  Description of Artificial Sequence: Synthetic oligonucleotide
  Antisense strand to SEQ ID NO: 1275448
uucauaacuaguuuccgga

SEQ ID NO: 1275450 - RNA, 19 nt, Artificial Sequence
  Description of Artificial Sequence: Synthetic oligonucleotide
  Sense strand starting at position 2972 of SEQ ID NO: 1241476
ugagcaagcuucucuacuu

SEQ ID NO: 1275451 - RNA, 19 nt, Artificial Sequence
  Description of Artificial Sequence: Synthetic oligonucleotide
  Antisense strand to SEQ ID NO: 1275450
aaguagagaagcuugcuca

SEQ ID NO: 1275452 - RNA, 19 nt, Artificial Sequence
  Description of Artificial Sequence: Synthetic oligonucleotide
  Sense strand starting at position 3029 of SEQ ID NO: 1241476
aagaaagaugccuguccuu

SEQ ID NO: 1275453 - RNA, 19 nt, Artificial Sequence
  Description of Artificial Sequence: Synthetic oligonucleotide
  Antisense strand to SEQ ID NO: 1275452
aaggacaggcaucuuucuu

SEQ ID NO: 1275454 - RNA, 19 nt, Artificial Sequence
  Description of Artificial Sequence: Synthetic oligonucleotide
  Sense strand starting at position 3038 of SEQ ID NO: 1241476
gccuguccuuguccuaaua

SEQ ID NO: 1275455 - RNA, 19 nt, Artificial Sequence
  Description of Artificial Sequence: Synthetic oligonucleotide
  Antisense strand to SEQ ID NO: 1275454
uauuaggacaaggacaggc

SEQ ID NO: 1275456 - RNA, 19 nt, Artificial Sequence
  Description of Artificial Sequence: Synthetic oligonucleotide
  Sense strand starting at position 3213 of SEQ ID NO: 1241476
caagguucucuguaaggua

SEQ ID NO: 1275457 - RNA, 19 nt, Artificial Sequence
  Description of Artificial Sequence: Synthetic oligonucleotide
  Antisense strand to SEQ ID NO: 1275456
uaccuuacagagaaccuug

SEQ ID NO: 1275458 - RNA, 19 nt, Artificial Sequence
  Description of Artificial Sequence: Synthetic oligonucleotide
  Sense strand starting at position 3252 of SEQ ID NO: 1241476
cccuauugguguccaguua

SEQ ID NO: 1275459 - RNA, 19 nt, Artificial Sequence
  Description of Artificial Sequence: Synthetic oligonucleotide
  Antisense strand to SEQ ID NO: 1275458
uaacuggacaccaauaggg

SEQ ID NO: 1275460 - RNA, 19 nt, Artificial Sequence
  Description of Artificial Sequence: Synthetic oligonucleotide
  Sense strand starting at position 3336 of SEQ ID NO: 1241476
cagucaggaugcucugauu

SEQ ID NO: 1275461 - RNA, 19 nt, Artificial Sequence
  Description of Artificial Sequence: Synthetic oligonucleotide
  Antisense strand to SEQ ID NO: 1275460
aaucagagcauccugacug

SEQ ID NO: 1275462 - RNA, 19 nt, Artificial Sequence
  Description of Artificial Sequence: Synthetic oligonucleotide
  Sense strand starting at position 3339 of SEQ ID NO: 1241476
ucaggaugcucugauuuac

SEQ ID NO: 1275463 - RNA, 19 nt, Artificial Sequence
  Description of Artificial Sequence: Synthetic oligonucleotide
  Antisense strand to SEQ ID NO: 1275462
guaaaucagagcauccuga

SEQ ID NO: 1275464 - RNA, 19 nt, Artificial Sequence
  Description of Artificial Sequence: Synthetic oligonucleotide
  Sense strand starting at position 3371 of SEQ ID NO: 1241476
acugaagcccuuuaucuga

SEQ ID NO: 1275465 - RNA, 19 nt, Artificial Sequence
  Description of Artificial Sequence: Synthetic oligonucleotide
  Antisense strand to SEQ ID NO: 1275464
ucagauaaagggcuucagu

SEQ ID NO: 1275466 - RNA, 19 nt, Artificial Sequence
  Description of Artificial Sequence: Synthetic oligonucleotide
  Sense strand starting at position 3373 of SEQ ID NO: 1241476
ugaagcccuuuaucugaua

SEQ ID NO: 1275467 - RNA, 19 nt, Artificial Sequence
  Description of Artificial Sequence: Synthetic oligonucleotide
  Antisense strand to SEQ ID NO: 1275466
uaucagauaaagggcuuca

SEQ ID NO: 1275468 - RNA, 19 nt, Artificial Sequence
  Description of Artificial Sequence: Synthetic oligonucleotide
  Sense strand starting at position 3403 of SEQ ID NO: 1241476
ccaucugaauuagugagau

SEQ ID NO: 1275469 - RNA, 19 nt, Artificial Sequence
  Description of Artificial Sequence: Synthetic oligonucleotide
  Antisense strand to SEQ ID NO: 1275468
aucucacuaauucagaugg

SEQ ID NO: 1275470 - RNA, 19 nt, Artificial Sequence
  Description of Artificial Sequence: Synthetic oligonucleotide
  Sense strand starting at position 3429 of SEQ ID NO: 1241476
uaaguucugcuccgauauu

SEQ ID NO: 1275471 - RNA, 19 nt, Artificial Sequence
  Description of Artificial Sequence: Synthetic oligonucleotide
  Antisense strand to SEQ ID NO: 1275470
aauaucggagcagaacuua

SEQ ID NO: 1275472 - RNA, 19 nt, Artificial Sequence
  Description of Artificial Sequence: Synthetic oligonucleotide
  Sense strand starting at position 3438 of SEQ ID NO: 1241476
cuccgauauuucugauaua

SEQ ID NO: 1275473 - RNA, 19 nt, Artificial Sequence
  Description of Artificial Sequence: Synthetic oligonucleotide
  Antisense strand to SEQ ID NO: 1275472
uauaucagaaauaucggag

SEQ ID NO: 1275474 - RNA, 19 nt, Artificial Sequence
  Description of Artificial Sequence: Synthetic oligonucleotide
  Sense strand starting at position 3439 of SEQ ID NO: 1241476
uccgauauuucugauauau

SEQ ID NO: 1275475 - RNA, 19 nt, Artificial Sequence
  Description of Artificial Sequence: Synthetic oligonucleotide
  Antisense strand to SEQ ID NO: 1275474
auauaucagaaauaucgga

SEQ ID NO: 1275476 - RNA, 19 nt, Artificial Sequence
  Description of Artificial Sequence: Synthetic oligonucleotide
  Sense strand starting at position 3441 of SEQ ID NO: 1241476
cgauauuucugauauauga

SEQ ID NO: 1275477 - RNA, 19 nt, Artificial Sequence
  Description of Artificial Sequence: Synthetic oligonucleotide
  Antisense strand to SEQ ID NO: 1275476
ucauauaucagaaauaucg

SEQ ID NO: 1275478 - RNA, 19 nt, Artificial Sequence
  Description of Artificial Sequence: Synthetic oligonucleotide
  Sense strand starting at position 3555 of SEQ ID NO: 1241476
caguuaugcgauuguccac

SEQ ID NO: 1275479 - RNA, 19 nt, Artificial Sequence
  Description of Artificial Sequence: Synthetic oligonucleotide
  Antisense strand to SEQ ID NO: 1275478
guggacaaucgcauaacug

SEQ ID NO: 1275480 - RNA, 19 nt, Artificial Sequence
  Description of Artificial Sequence: Synthetic oligonucleotide
  Sense strand starting at position 3558 of SEQ ID NO: 1241476
uuaugcgauuguccacauu

SEQ ID NO: 1275481 - RNA, 19 nt, Artificial Sequence
  Description of Artificial Sequence: Synthetic oligonucleotide
  Antisense strand to SEQ ID NO: 1275480
aauguggacaaucgcauaa

SEQ ID NO: 1275482 - RNA, 19 nt, Artificial Sequence
  Description of Artificial Sequence: Synthetic oligonucleotide
  Sense strand starting at position 3561 of SEQ ID NO: 1241476
ugcgauuguccacauuaag

SEQ ID NO: 1275483 - RNA, 19 nt, Artificial Sequence
  Description of Artificial Sequence: Synthetic oligonucleotide
  Antisense strand to SEQ ID NO: 1275482
cuuaauguggacaaucgca

SEQ ID NO: 1275484 - RNA, 19 nt, Artificial Sequence
  Description of Artificial Sequence: Synthetic oligonucleotide
  Sense strand starting at position 3630 of SEQ ID NO: 1241476
acuagaagauccuaggaga

SEQ ID NO: 1275485 - RNA, 19 nt, Artificial Sequence
  Description of Artificial Sequence: Synthetic oligonucleotide
  Antisense strand to SEQ ID NO: 1275484
ucuccuaggaucuucuagu

SEQ ID NO: 1275486 - RNA, 19 nt, Artificial Sequence
  Description of Artificial Sequence: Synthetic oligonucleotide
  Sense strand starting at position 3644 of SEQ ID NO: 1241476
ggagaagcagcuuauuaau

SEQ ID NO: 1275487 - RNA, 19 nt, Artificial Sequence
  Description of Artificial Sequence: Synthetic oligonucleotide
  Antisense strand to SEQ ID NO: 1275486
auuaauaagcugcuucucc

SEQ ID NO: 1275488 - RNA, 19 nt, Artificial Sequence
  Description of Artificial Sequence: Synthetic oligonucleotide
  Sense strand starting at position 3875 of SEQ ID NO: 1241476
gagaguuaucugggcacuu

SEQ ID NO: 1275489 - RNA, 19 nt, Artificial Sequence
  Description of Artificial Sequence: Synthetic oligonucleotide
  Antisense strand to SEQ ID NO: 1275488
aagugcccagauaacucuc

SEQ ID NO: 1275490 - RNA, 19 nt, Artificial Sequence
  Description of Artificial Sequence: Synthetic oligonucleotide
  Sense strand starting at position 3876 of SEQ ID NO: 1241476
agaguuaucugggcacuuu

SEQ ID NO: 1275491 - RNA, 19 nt, Artificial Sequence
  Description of Artificial Sequence: Synthetic oligonucleotide
  Antisense strand to SEQ ID NO: 1275490
aaagugcccagauaacucu

SEQ ID NO: 1275492 - RNA, 19 nt, Artificial Sequence
  Description of Artificial Sequence: Synthetic oligonucleotide
  Sense strand starting at position 3877 of SEQ ID NO: 1241476
gaguuaucugggcacuuug

SEQ ID NO: 1275493 - RNA, 19 nt, Artificial Sequence
  Description of Artificial Sequence: Synthetic oligonucleotide
  Antisense strand to SEQ ID NO: 1275492
caaagugcccagauaacuc

SEQ ID NO: 1275494 - RNA, 19 nt, Artificial Sequence
  Description of Artificial Sequence: Synthetic oligonucleotide
  Sense strand starting at position 3922 of SEQ ID NO: 1241476
ccauguagcccugguugau

SEQ ID NO: 1275495 - RNA, 19 nt, Artificial Sequence
  Description of Artificial Sequence: Synthetic oligonucleotide
  Antisense strand to SEQ ID NO: 1275494
aucaaccagggcuacaugg

SEQ ID NO: 1275496 - RNA, 19 nt, Artificial Sequence
  Description of Artificial Sequence: Synthetic oligonucleotide
  Sense strand starting at position 3950 of SEQ ID NO: 1241476
uauuguuuguggcuccauu

SEQ ID NO: 1275497 - RNA, 19 nt, Artificial Sequence
  Description of Artificial Sequence: Synthetic oligonucleotide
  Antisense strand to SEQ ID NO: 1275496
aauggagccacaaacaaua

SEQ ID NO: 1275498 - RNA, 19 nt, Artificial Sequence
  Description of Artificial Sequence: Synthetic oligonucleotide
  Sense strand starting at position 670 of SEQ ID NO: 1241477
cccagacccuuggcuaauu

SEQ ID NO: 1275499 - RNA, 19 nt, Artificial Sequence
  Description of Artificial Sequence: Synthetic oligonucleotide
  Antisense strand to SEQ ID NO: 1275498
aauuagccaagggucuggg

SEQ ID NO: 1275500 - RNA, 19 nt, Artificial Sequence
  Description of Artificial Sequence: Synthetic oligonucleotide
  Sense strand starting at position 990 of SEQ ID NO: 1241477
gguuaagaaugacuauuau

SEQ ID NO: 1275501 - RNA, 19 nt, Artificial Sequence
  Description of Artificial Sequence: Synthetic oligonucleotide
  Antisense strand to SEQ ID NO: 1275500
auaauagucauucuuaacc

SEQ ID NO: 1275502 - RNA, 19 nt, Artificial Sequence
  Description of Artificial Sequence: Synthetic oligonucleotide
  Sense strand starting at position 998 of SEQ ID NO: 1241477
augacuauuauguacggua

SEQ ID NO: 1275503 - RNA, 19 nt, Artificial Sequence
  Description of Artificial Sequence: Synthetic oligonucleotide
  Antisense strand to SEQ ID NO: 1275502
uaccguacauaauagucau

SEQ ID NO: 1275504 - RNA, 19 nt, Artificial Sequence
  Description of Artificial Sequence: Synthetic oligonucleotide
  Sense strand starting at position 1000 of SEQ ID NO: 1241477
gacuauuauguacgguaaa

SEQ ID NO: 1275505 - RNA, 19 nt, Artificial Sequence
  Description of Artificial Sequence: Synthetic oligonucleotide
  Antisense strand to SEQ ID NO: 1275504
uuuaccguacauaauaguc

SEQ ID NO: 1275506 - RNA, 19 nt, Artificial Sequence
  Description of Artificial Sequence: Synthetic oligonucleotide
  Sense strand starting at position 1010 of SEQ ID NO: 1241477
uacgguaaauaugcuaaga

SEQ ID NO: 1275507 - RNA, 19 nt, Artificial Sequence
  Description of Artificial Sequence: Synthetic oligonucleotide
  Antisense strand to SEQ ID NO: 1275506
ucuuagcauauuuaccgua

SEQ ID NO: 1275508 - RNA, 19 nt, Artificial Sequence
  Description of Artificial Sequence: Synthetic oligonucleotide
  Sense strand starting at position 1133 of SEQ ID NO: 1241477
gggucucugucugucugaa

SEQ ID NO: 1275509 - RNA, 19 nt, Artificial Sequence
  Description of Artificial Sequence: Synthetic oligonucleotide
  Antisense strand to SEQ ID NO: 1275508
uucagacagacagagaccc

SEQ ID NO: 1275510 - RNA, 19 nt, Artificial Sequence
  Description of Artificial Sequence: Synthetic oligonucleotide
  Sense strand starting at position 1216 of SEQ ID NO: 1241477
ggaguugagagaugcagau

SEQ ID NO: 1275511 - RNA, 19 nt, Artificial Sequence
  Description of Artificial Sequence: Synthetic oligonucleotide
  Antisense strand to SEQ ID NO: 1275510
aucugcaucucucaacucc

SEQ ID NO: 1275512 - RNA, 19 nt, Artificial Sequence
  Description of Artificial Sequence: Synthetic oligonucleotide
  Sense strand starting at position 1235 of SEQ ID NO: 1241477
gaaggaaaccauggcuagu

SEQ ID NO: 1275513 - RNA, 19 nt, Artificial Sequence
  Description of Artificial Sequence: Synthetic oligonucleotide
  Antisense strand to SEQ ID NO: 1275512
acuagccaugguuuccuuc

SEQ ID NO: 1275514 - RNA, 19 nt, Artificial Sequence
  Description of Artificial Sequence: Synthetic oligonucleotide
  Sense strand starting at position 1368 of SEQ ID NO: 1241477
cuguaggacgggugagaua

SEQ ID NO: 1275515 - RNA, 19 nt, Artificial Sequence
  Description of Artificial Sequence: Synthetic oligonucleotide
  Antisense strand to SEQ ID NO: 1275514
uaucucacccguccuacag

SEQ ID NO: 1275516 - RNA, 19 nt, Artificial Sequence
  Description of Artificial Sequence: Synthetic oligonucleotide
  Sense strand starting at position 1489 of SEQ ID NO: 1241477
gcagguacccugggaauga

SEQ ID NO: 1275517 - RNA, 19 nt, Artificial Sequence
  Description of Artificial Sequence: Synthetic oligonucleotide
  Antisense strand to SEQ ID NO: 1275516
ucauucccaggguaccugc

SEQ ID NO: 1275518 - RNA, 19 nt, Artificial Sequence
  Description of Artificial Sequence: Synthetic oligonucleotide
  Sense strand starting at position 1490 of SEQ ID NO: 1241477
cagguacccugggaaugaa

SEQ ID NO: 1275519 - RNA, 19 nt, Artificial Sequence
  Description of Artificial Sequence: Synthetic oligonucleotide
  Antisense strand to SEQ ID NO: 1275518
uucauucccaggguaccug

SEQ ID NO: 1275520 - RNA, 19 nt, Artificial Sequence
  Description of Artificial Sequence: Synthetic oligonucleotide
  Sense strand starting at position 1522 of SEQ ID NO: 1241477
cgcuuacuccaagaaucug

SEQ ID NO: 1275521 - RNA, 19 nt, Artificial Sequence
  Description of Artificial Sequence: Synthetic oligonucleotide
  Antisense strand to SEQ ID NO: 1275520
cagauucuuggaguaagcg

SEQ ID NO: 1275522 - RNA, 19 nt, Artificial Sequence
  Description of Artificial Sequence: Synthetic oligonucleotide
  Sense strand starting at position 1891 of SEQ ID NO: 1241477
uuagcaucuucuuuccagu

SEQ ID NO: 1275523 - RNA, 19 nt, Artificial Sequence
  Description of Artificial Sequence: Synthetic oligonucleotide
  Antisense strand to SEQ ID NO: 1275522
acuggaaagaagaugcuaa

SEQ ID NO: 1275524 - RNA, 19 nt, Artificial Sequence
  Description of Artificial Sequence: Synthetic oligonucleotide
  Sense strand starting at position 2474 of SEQ ID NO: 1241477
ggaagugaguaccucuauu

SEQ ID NO: 1275525 - RNA, 19 nt, Artificial Sequence
  Description of Artificial Sequence: Synthetic oligonucleotide
  Antisense strand to SEQ ID NO: 1275524
aauagagguacucacuucc

SEQ ID NO: 1275526 - RNA, 19 nt, Artificial Sequence
  Description of Artificial Sequence: Synthetic oligonucleotide
  Sense strand starting at position 2480 of SEQ ID NO: 1241477
gaguaccucuauuccggaa

SEQ ID NO: 1275527 - RNA, 19 nt, Artificial Sequence
  Description of Artificial Sequence: Synthetic oligonucleotide
  Antisense strand to SEQ ID NO: 1275526
uuccggaauagagguacuc

SEQ ID NO: 1275528 - RNA, 19 nt, Artificial Sequence
  Description of Artificial Sequence: Synthetic oligonucleotide
  Sense strand starting at position 2492 of SEQ ID NO: 1241477
uccggaaacuaguuaugaa

SEQ ID NO: 1275529 - RNA, 19 nt, Artificial Sequence
  Description of Artificial Sequence: Synthetic oligonucleotide
  Antisense strand to SEQ ID NO: 1275528
uucauaacuaguuuccgga

SEQ ID NO: 1275530 - RNA, 19 nt, Artificial Sequence
  Description of Artificial Sequence: Synthetic oligonucleotide
  Sense strand starting at position 2972 of SEQ ID NO: 1241477
ugagcaagcuucucuacuu

SEQ ID NO: 1275531 - RNA, 19 nt, Artificial Sequence
  Description of Artificial Sequence: Synthetic oligonucleotide
  Antisense strand to SEQ ID NO: 1275530
aaguagagaagcuugcuca

SEQ ID NO: 1275532 - RNA, 19 nt, Artificial Sequence
  Description of Artificial Sequence: Synthetic oligonucleotide
  Sense strand starting at position 3029 of SEQ ID NO: 1241477
aagaaagaugccuguccuu

SEQ ID NO: 1275533 - RNA, 19 nt, Artificial Sequence
  Description of Artificial Sequence: Synthetic oligonucleotide
  Antisense strand to SEQ ID NO: 1275532
aaggacaggcaucuuucuu

SEQ ID NO: 1275534 - RNA, 19 nt, Artificial Sequence
  Description of Artificial Sequence: Synthetic oligonucleotide
  Sense strand starting at position 3038 of SEQ ID NO: 1241477
gccuguccuuguccuaaua

SEQ ID NO: 1275535 - RNA, 19 nt, Artificial Sequence
  Description of Artificial Sequence: Synthetic oligonucleotide
  Antisense strand to SEQ ID NO: 1275534
uauuaggacaaggacaggc

SEQ ID NO: 1275536 - RNA, 19 nt, Artificial Sequence
  Description of Artificial Sequence: Synthetic oligonucleotide
  Sense strand starting at position 3213 of SEQ ID NO: 1241477
caagguucucuguaaggua

SEQ ID NO: 1275537 - RNA, 19 nt, Artificial Sequence
  Description of Artificial Sequence: Synthetic oligonucleotide
  Antisense strand to SEQ ID NO: 1275536
uaccuuacagagaaccuug

SEQ ID NO: 1275538 - RNA, 19 nt, Artificial Sequence
  Description of Artificial Sequence: Synthetic oligonucleotide
  Sense strand starting at position 3252 of SEQ ID NO: 1241477
cccuauugguguccaguua

SEQ ID NO: 1275539 - RNA, 19 nt, Artificial Sequence
  Description of Artificial Sequence: Synthetic oligonucleotide
  Antisense strand to SEQ ID NO: 1275538
uaacuggacaccaauaggg

SEQ ID NO: 1275540 - RNA, 19 nt, Artificial Sequence
  Description of Artificial Sequence: Synthetic oligonucleotide
  Sense strand starting at position 3336 of SEQ ID NO: 1241477
cagucaggaugcucugauu

SEQ ID NO: 1275541 - RNA, 19 nt, Artificial Sequence
  Description of Artificial Sequence: Synthetic oligonucleotide
  Antisense strand to SEQ ID NO: 1275540
aaucagagcauccugacug

SEQ ID NO: 1275542 - RNA, 19 nt, Artificial Sequence
  Description of Artificial Sequence: Synthetic oligonucleotide
  Sense strand starting at position 3339 of SEQ ID NO: 1241477
ucaggaugcucugauuuac

SEQ ID NO: 1275543 - RNA, 19 nt, Artificial Sequence
  Description of Artificial Sequence: Synthetic oligonucleotide
  Antisense strand to SEQ ID NO: 1275542
guaaaucagagcauccuga

SEQ ID NO: 1275544 - RNA, 19 nt, Artificial Sequence
  Description of Artificial Sequence: Synthetic oligonucleotide
  Sense strand starting at position 3371 of SEQ ID NO: 1241477
acugaagcccuuuaucuga

SEQ ID NO: 1275545 - RNA, 19 nt, Artificial Sequence
  Description of Artificial Sequence: Synthetic oligonucleotide
  Antisense strand to SEQ ID NO: 1275544
ucagauaaagggcuucagu

SEQ ID NO: 1275546 - RNA, 19 nt, Artificial Sequence
  Description of Artificial Sequence: Synthetic oligonucleotide
  Sense strand starting at position 3373 of SEQ ID NO: 1241477
ugaagcccuuuaucugaua

SEQ ID NO: 1275547 - RNA, 19 nt, Artificial Sequence
  Description of Artificial Sequence: Synthetic oligonucleotide
  Antisense strand to SEQ ID NO: 1275546
uaucagauaaagggcuuca

SEQ ID NO: 1275548 - RNA, 19 nt, Artificial Sequence
  Description of Artificial Sequence: Synthetic oligonucleotide
  Sense strand starting at position 3403 of SEQ ID NO: 1241477
ccaucugaauuagugagau

SEQ ID NO: 1275549 - RNA, 19 nt, Artificial Sequence
  Description of Artificial Sequence: Synthetic oligonucleotide
  Antisense strand to SEQ ID NO: 1275548
aucucacuaauucagaugg

SEQ ID NO: 1275550 - RNA, 19 nt, Artificial Sequence
  Description of Artificial Sequence: Synthetic oligonucleotide
  Sense strand starting at position 3429 of SEQ ID NO: 1241477
uaaguucugcuccgauauu

SEQ ID NO: 1275551 - RNA, 19 nt, Artificial Sequence
  Description of Artificial Sequence: Synthetic oligonucleotide
  Antisense strand to SEQ ID NO: 1275550
aauaucggagcagaacuua

SEQ ID NO: 1275552 - RNA, 19 nt, Artificial Sequence
  Description of Artificial Sequence: Synthetic oligonucleotide
  Sense strand starting at position 3438 of SEQ ID NO: 1241477
cuccgauauuucugauaua

SEQ ID NO: 1275553 - RNA, 19 nt, Artificial Sequence
  Description of Artificial Sequence: Synthetic oligonucleotide
  Antisense strand to SEQ ID NO: 1275552
uauaucagaaauaucggag

SEQ ID NO: 1275554 - RNA, 19 nt, Artificial Sequence
  Description of Artificial Sequence: Synthetic oligonucleotide
  Sense strand starting at position 3439 of SEQ ID NO: 1241477
uccgauauuucugauauau

SEQ ID NO: 1275555 - RNA, 19 nt, Artificial Sequence
  Description of Artificial Sequence: Synthetic oligonucleotide
  Antisense strand to SEQ ID NO: 1275554
auauaucagaaauaucgga

SEQ ID NO: 1275556 - RNA, 19 nt, Artificial Sequence
  Description of Artificial Sequence: Synthetic oligonucleotide
  Sense strand starting at position 3441 of SEQ ID NO: 1241477
cgauauuucugauauauga

SEQ ID NO: 1275557 - RNA, 19 nt, Artificial Sequence
  Description of Artificial Sequence: Synthetic oligonucleotide
  Antisense strand to SEQ ID NO: 1275556
ucauauaucagaaauaucg

SEQ ID NO: 1275558 - RNA, 19 nt, Artificial Sequence
  Description of Artificial Sequence: Synthetic oligonucleotide
  Sense strand starting at position 3555 of SEQ ID NO: 1241477
caguuaugcgauuguccac

SEQ ID NO: 1275559 - RNA, 19 nt, Artificial Sequence
  Description of Artificial Sequence: Synthetic oligonucleotide
  Antisense strand to SEQ ID NO: 1275558
guggacaaucgcauaacug

SEQ ID NO: 1275560 - RNA, 19 nt, Artificial Sequence
  Description of Artificial Sequence: Synthetic oligonucleotide
  Sense strand starting at position 3558 of SEQ ID NO: 1241477
uuaugcgauuguccacauu

SEQ ID NO: 1275561 - RNA, 19 nt, Artificial Sequence
  Description of Artificial Sequence: Synthetic oligonucleotide
  Antisense strand to SEQ ID NO: 1275560
aauguggacaaucgcauaa

SEQ ID NO: 1275562 - RNA, 19 nt, Artificial Sequence
  Description of Artificial Sequence: Synthetic oligonucleotide
  Sense strand starting at position 3561 of SEQ ID NO: 1241477
ugcgauuguccacauuaag

SEQ ID NO: 1275563 - RNA, 19 nt, Artificial Sequence
  Description of Artificial Sequence: Synthetic oligonucleotide
  Antisense strand to SEQ ID NO: 1275562
cuuaauguggacaaucgca

SEQ ID NO: 1275564 - RNA, 19 nt, Artificial Sequence
  Description of Artificial Sequence: Synthetic oligonucleotide
  Sense strand starting at position 3630 of SEQ ID NO: 1241477
acuagaagauccuaggaga

SEQ ID NO: 1275565 - RNA, 19 nt, Artificial Sequence
  Description of Artificial Sequence: Synthetic oligonucleotide
  Antisense strand to SEQ ID NO: 1275564
ucuccuaggaucuucuagu

SEQ ID NO: 1275566 - RNA, 19 nt, Artificial Sequence
  Description of Artificial Sequence: Synthetic oligonucleotide
  Sense strand starting at position 3644 of SEQ ID NO: 1241477
ggagaagcagcuuauuaau

SEQ ID NO: 1275567 - RNA, 19 nt, Artificial Sequence
  Description of Artificial Sequence: Synthetic oligonucleotide
  Antisense strand to SEQ ID NO: 1275566
auuaauaagcugcuucucc

SEQ ID NO: 1275568 - RNA, 19 nt, Artificial Sequence
  Description of Artificial Sequence: Synthetic oligonucleotide
  Sense strand starting at position 3875 of SEQ ID NO: 1241477
gagaguuaucugggcacuu

SEQ ID NO: 1275569 - RNA, 19 nt, Artificial Sequence
  Description of Artificial Sequence: Synthetic oligonucleotide
  Antisense strand to SEQ ID NO: 1275568
aagugcccagauaacucuc

SEQ ID NO: 1275570 - RNA, 19 nt, Artificial Sequence
  Description of Artificial Sequence: Synthetic oligonucleotide
  Sense strand starting at position 3876 of SEQ ID NO: 1241477
agaguuaucugggcacuuu

SEQ ID NO: 1275571 - RNA, 19 nt, Artificial Sequence
  Description of Artificial Sequence: Synthetic oligonucleotide
  Antisense strand to SEQ ID NO: 1275570
aaagugcccagauaacucu

SEQ ID NO: 1275572 - RNA, 19 nt, Artificial Sequence
  Description of Artificial Sequence: Synthetic oligonucleotide
  Sense strand starting at position 3877 of SEQ ID NO: 1241477
gaguuaucugggcacuuug

SEQ ID NO: 1275573 - RNA, 19 nt, Artificial Sequence
  Description of Artificial Sequence: Synthetic oligonucleotide
  Antisense strand to SEQ ID NO: 1275572
caaagugcccagauaacuc

SEQ ID NO: 1275574 - RNA, 19 nt, Artificial Sequence
  Description of Artificial Sequence: Synthetic oligonucleotide
  Sense strand starting at position 3922 of SEQ ID NO: 1241477
ccauguagcccugguugau

SEQ ID NO: 1275575 - RNA, 19 nt, Artificial Sequence
  Description of Artificial Sequence: Synthetic oligonucleotide
  Antisense strand to SEQ ID NO: 1275574
aucaaccagggcuacaugg

SEQ ID NO: 1275576 - RNA, 19 nt, Artificial Sequence
  Description of Artificial Sequence: Synthetic oligonucleotide
  Sense strand starting at position 3950 of SEQ ID NO: 1241477
uauuguuuguggcuccauu

SEQ ID NO: 1275577 - RNA, 19 nt, Artificial Sequence
  Description of Artificial Sequence: Synthetic oligonucleotide
  Antisense strand to SEQ ID NO: 1275576
aauggagccacaaacaaua

SEQ ID NO: 1275578 - RNA, 19 nt, Artificial Sequence
  Description of Artificial Sequence: Synthetic oligonucleotide
  Sense strand starting at position 216 of SEQ ID NO: 1241478
guuuacuaacaauggucaa

SEQ ID NO: 1275579 - RNA, 19 nt, Artificial Sequence
  Description of Artificial Sequence: Synthetic oligonucleotide
  Antisense strand to SEQ ID NO: 1275578
uugaccauuguuaguaaac

SEQ ID NO: 1275580 - RNA, 19 nt, Artificial Sequence
  Description of Artificial Sequence: Synthetic oligonucleotide
  Sense strand starting at position 311 of SEQ ID NO: 1241478
aauauuuggugauauggac

SEQ ID NO: 1275581 - RNA, 19 nt, Artificial Sequence
  Description of Artificial Sequence: Synthetic oligonucleotide
  Antisense strand to SEQ ID NO: 1275580
guccauaucaccaaauauu

SEQ ID NO: 1275582 - RNA, 19 nt, Artificial Sequence
  Description of Artificial Sequence: Synthetic oligonucleotide
  Sense strand starting at position 326 of SEQ ID NO: 1241478
ggacaacgcuaugcaauuu

SEQ ID NO: 1275583 - RNA, 19 nt, Artificial Sequence
  Description of Artificial Sequence: Synthetic oligonucleotide
  Antisense strand to SEQ ID NO: 1275582
aaauugcauagcguugucc

SEQ ID NO: 1275584 - RNA, 19 nt, Artificial Sequence
  Description of Artificial Sequence: Synthetic oligonucleotide
  Sense strand starting at position 346 of SEQ ID NO: 1241478
ugggaaguguaaucaaauu

SEQ ID NO: 1275585 - RNA, 19 nt, Artificial Sequence
  Description of Artificial Sequence: Synthetic oligonucleotide
  Antisense strand to SEQ ID NO: 1275584
aauuugauuacacuuccca

SEQ ID NO: 1275586 - RNA, 19 nt, Artificial Sequence
  Description of Artificial Sequence: Synthetic oligonucleotide
  Sense strand starting at position 437 of SEQ ID NO: 1241478
uuaguucuaguccaagauu

SEQ ID NO: 1275587 - RNA, 19 nt, Artificial Sequence
  Description of Artificial Sequence: Synthetic oligonucleotide
  Antisense strand to SEQ ID NO: 1275586
aaucuuggacuagaacuaa

SEQ ID NO: 1275588 - RNA, 19 nt, Artificial Sequence
  Description of Artificial Sequence: Synthetic oligonucleotide
  Sense strand starting at position 689 of SEQ ID NO: 1241478
aaaguaugcuggcuuggaa

SEQ ID NO: 1275589 - RNA, 19 nt, Artificial Sequence
  Description of Artificial Sequence: Synthetic oligonucleotide
  Antisense strand to SEQ ID NO: 1275588
uuccaagccagcauacuuu

SEQ ID NO: 1275590 - RNA, 19 nt, Artificial Sequence
  Description of Artificial Sequence: Synthetic oligonucleotide
  Sense strand starting at position 764 of SEQ ID NO: 1241478
gcaaguucucauuaaaugu

SEQ ID NO: 1275591 - RNA, 19 nt, Artificial Sequence
  Description of Artificial Sequence: Synthetic oligonucleotide
  Antisense strand to SEQ ID NO: 1275590
acauuuaaugagaacuugc

SEQ ID NO: 1275592 - RNA, 19 nt, Artificial Sequence
  Description of Artificial Sequence: Synthetic oligonucleotide
  Sense strand starting at position 840 of SEQ ID NO: 1241478
gaauaaucacugcaggguu

SEQ ID NO: 1275593 - RNA, 19 nt, Artificial Sequence
  Description of Artificial Sequence: Synthetic oligonucleotide
  Antisense strand to SEQ ID NO: 1275592
aacccugcagugauuauuc

SEQ ID NO: 1275594 - RNA, 19 nt, Artificial Sequence
  Description of Artificial Sequence: Synthetic oligonucleotide
  Sense strand starting at position 866 of SEQ ID NO: 1241478
aguauauauuaacuuggga

SEQ ID NO: 1275595 - RNA, 19 nt, Artificial Sequence
  Description of Artificial Sequence: Synthetic oligonucleotide
  Antisense strand to SEQ ID NO: 1275594
ucccaaguuaauauauacu

SEQ ID NO: 1275596 - RNA, 19 nt, Artificial Sequence
  Description of Artificial Sequence: Synthetic oligonucleotide
  Sense strand starting at position 879 of SEQ ID NO: 1241478
uugggauuccgugauccau

SEQ ID NO: 1275597 - RNA, 19 nt, Artificial Sequence
  Description of Artificial Sequence: Synthetic oligonucleotide
  Antisense strand to SEQ ID NO: 1275596
auggaucacggaaucccaa

SEQ ID NO: 1275598 - RNA, 19 nt, Artificial Sequence
  Description of Artificial Sequence: Synthetic oligonucleotide
  Sense strand starting at position 887 of SEQ ID NO: 1241478
ccgugauccauggaucucu

SEQ ID NO: 1275599 - RNA, 19 nt, Artificial Sequence
  Description of Artificial Sequence: Synthetic oligonucleotide
  Antisense strand to SEQ ID NO: 1275598
agagauccauggaucacgg

SEQ ID NO: 1275600 - RNA, 19 nt, Artificial Sequence
  Description of Artificial Sequence: Synthetic oligonucleotide
  Sense strand starting at position 948 of SEQ ID NO: 1241478
aagauuacuuugcuuaggu

SEQ ID NO: 1275601 - RNA, 19 nt, Artificial Sequence
  Description of Artificial Sequence: Synthetic oligonucleotide
  Antisense strand to SEQ ID NO: 1275600
accuaagcaaaguaaucuu

SEQ ID NO: 1275602 - RNA, 19 nt, Artificial Sequence
  Description of Artificial Sequence: Synthetic oligonucleotide
  Sense strand starting at position 950 of SEQ ID NO: 1241478
gauuacuuugcuuagguua

SEQ ID NO: 1275603 - RNA, 19 nt, Artificial Sequence
  Description of Artificial Sequence: Synthetic oligonucleotide
  Antisense strand to SEQ ID NO: 1275602
uaaccuaagcaaaguaauc

SEQ ID NO: 1275604 - RNA, 19 nt, Artificial Sequence
  Description of Artificial Sequence: Synthetic oligonucleotide
  Sense strand starting at position 955 of SEQ ID NO: 1241478
cuuugcuuagguuaucaaa

SEQ ID NO: 1275605 - RNA, 19 nt, Artificial Sequence
  Description of Artificial Sequence: Synthetic oligonucleotide
  Antisense strand to SEQ ID NO: 1275604
uuugauaaccuaagcaaag

SEQ ID NO: 1275606 - RNA, 19 nt, Artificial Sequence
  Description of Artificial Sequence: Synthetic oligonucleotide
  Sense strand starting at position 1037 of SEQ ID NO: 1241478
augcauaaacccugcaaga

SEQ ID NO: 1275607 - RNA, 19 nt, Artificial Sequence
  Description of Artificial Sequence: Synthetic oligonucleotide
  Antisense strand to SEQ ID NO: 1275606
ucuugcaggguuuaugcau

SEQ ID NO: 1275608 - RNA, 19 nt, Artificial Sequence
  Description of Artificial Sequence: Synthetic oligonucleotide
  Sense strand starting at position 1039 of SEQ ID NO: 1241478
gcauaaacccugcaagaua

SEQ ID NO: 1275609 - RNA, 19 nt, Artificial Sequence
  Description of Artificial Sequence: Synthetic oligonucleotide
  Antisense strand to SEQ ID NO: 1275608
uaucuugcaggguuuaugc

SEQ ID NO: 1275610 - RNA, 19 nt, Artificial Sequence
  Description of Artificial Sequence: Synthetic oligonucleotide
  Sense strand starting at position 1084 of SEQ ID NO: 1241478
agaucuucccaaugagcuu

SEQ ID NO: 1275611 - RNA, 19 nt, Artificial Sequence
  Description of Artificial Sequence: Synthetic oligonucleotide
  Antisense strand to SEQ ID NO: 1275610
aagcucauugggaagaucu

SEQ ID NO: 1275612 - RNA, 19 nt, Artificial Sequence
  Description of Artificial Sequence: Synthetic oligonucleotide
  Sense strand starting at position 1111 of SEQ ID NO: 1241478
gcuuccaacugagugauca

SEQ ID NO: 1275613 - RNA, 19 nt, Artificial Sequence
  Description of Artificial Sequence: Synthetic oligonucleotide
  Antisense strand to SEQ ID NO: 1275612
ugaucacucaguuggaagc

SEQ ID NO: 1275614 - RNA, 19 nt, Artificial Sequence
  Description of Artificial Sequence: Synthetic oligonucleotide
  Sense strand starting at position 1119 of SEQ ID NO: 1241478
cugagugaucacugcugaa

SEQ ID NO: 1275615 - RNA, 19 nt, Artificial Sequence
  Description of Artificial Sequence: Synthetic oligonucleotide
  Antisense strand to SEQ ID NO: 1275614
uucagcagugaucacucag

SEQ ID NO: 1275616 - RNA, 19 nt, Artificial Sequence
  Description of Artificial Sequence: Synthetic oligonucleotide
  Sense strand starting at position 1123 of SEQ ID NO: 1241478
gugaucacugcugaacuua

SEQ ID NO: 1275617 - RNA, 19 nt, Artificial Sequence
  Description of Artificial Sequence: Synthetic oligonucleotide
  Antisense strand to SEQ ID NO: 1275616
uaaguucagcagugaucac

SEQ ID NO: 1275618 - RNA, 19 nt, Artificial Sequence
  Description of Artificial Sequence: Synthetic oligonucleotide
  Sense strand starting at position 1266 of SEQ ID NO: 1241478
cucacauucguauaccacu

SEQ ID NO: 1275619 - RNA, 19 nt, Artificial Sequence
  Description of Artificial Sequence: Synthetic oligonucleotide
  Antisense strand to SEQ ID NO: 1275618
agugguauacgaaugugag

SEQ ID NO: 1275620 - RNA, 19 nt, Artificial Sequence
  Description of Artificial Sequence: Synthetic oligonucleotide
  Sense strand starting at position 1305 of SEQ ID NO: 1241478
uucguuugauucucaagau

SEQ ID NO: 1275621 - RNA, 19 nt, Artificial Sequence
  Description of Artificial Sequence: Synthetic oligonucleotide
  Antisense strand to SEQ ID NO: 1275620
aucuugagaaucaaacgaa

SEQ ID NO: 1275622 - RNA, 19 nt, Artificial Sequence
  Description of Artificial Sequence: Synthetic oligonucleotide
  Sense strand starting at position 1792 of SEQ ID NO: 1241478
caaaguccgaguugaugga

SEQ ID NO: 1275623 - RNA, 19 nt, Artificial Sequence
  Description of Artificial Sequence: Synthetic oligonucleotide
  Antisense strand to SEQ ID NO: 1275622
uccaucaacucggacuuug

SEQ ID NO: 1275624 - RNA, 19 nt, Artificial Sequence
  Description of Artificial Sequence: Synthetic oligonucleotide
  Sense strand starting at position 2947 of SEQ ID NO: 1241478
ggaaaucugcaauaauguu

SEQ ID NO: 1275625 - RNA, 19 nt, Artificial Sequence
  Description of Artificial Sequence: Synthetic oligonucleotide
  Antisense strand to SEQ ID NO: 1275624
aacauuauugcagauuucc

SEQ ID NO: 1275626 - RNA, 19 nt, Artificial Sequence
  Description of Artificial Sequence: Synthetic oligonucleotide
  Sense strand starting at position 2988 of SEQ ID NO: 1241478
acagcaauacggugaacaa

SEQ ID NO: 1275627 - RNA, 19 nt, Artificial Sequence
  Description of Artificial Sequence: Synthetic oligonucleotide
  Antisense strand to SEQ ID NO: 1275626
uuguucaccguauugcugu

SEQ ID NO: 1275628 - RNA, 19 nt, Artificial Sequence
  Description of Artificial Sequence: Synthetic oligonucleotide
  Sense strand starting at position 2989 of SEQ ID NO: 1241478
cagcaauacggugaacaau

SEQ ID NO: 1275629 - RNA, 19 nt, Artificial Sequence
  Description of Artificial Sequence: Synthetic oligonucleotide
  Antisense strand to SEQ ID NO: 1275628
auuguucaccguauugcug

SEQ ID NO: 1275630 - RNA, 19 nt, Artificial Sequence
  Description of Artificial Sequence: Synthetic oligonucleotide
  Sense strand starting at position 2999 of SEQ ID NO: 1241478
gugaacaauagguguucca

SEQ ID NO: 1275631 - RNA, 19 nt, Artificial Sequence
  Description of Artificial Sequence: Synthetic oligonucleotide
  Antisense strand to SEQ ID NO: 1275630
uggaacaccuauuguucac

SEQ ID NO: 1275632 - RNA, 19 nt, Artificial Sequence
  Description of Artificial Sequence: Synthetic oligonucleotide
  Sense strand starting at position 3011 of SEQ ID NO: 1241478
uguuccaucaguuauguga

SEQ ID NO: 1275633 - RNA, 19 nt, Artificial Sequence
  Description of Artificial Sequence: Synthetic oligonucleotide
  Antisense strand to SEQ ID NO: 1275632
ucacauaacugauggaaca

SEQ ID NO: 1275634 - RNA, 19 nt, Artificial Sequence
  Description of Artificial Sequence: Synthetic oligonucleotide
  Sense strand starting at position 3033 of SEQ ID NO: 1241478
ugggcaauuaugugaccuu

SEQ ID NO: 1275635 - RNA, 19 nt, Artificial Sequence
  Description of Artificial Sequence: Synthetic oligonucleotide
  Antisense strand to SEQ ID NO: 1275634
aaggucacauaauugccca

SEQ ID NO: 1275636 - RNA, 19 nt, Artificial Sequence
  Description of Artificial Sequence: Synthetic oligonucleotide
  Sense strand starting at position 3084 of SEQ ID NO: 1241478
gugagaauguggucuacau

SEQ ID NO: 1275637 - RNA, 19 nt, Artificial Sequence
  Description of Artificial Sequence: Synthetic oligonucleotide
  Antisense strand to SEQ ID NO: 1275636
auguagaccacauucucac

SEQ ID NO: 1275638 - RNA, 19 nt, Artificial Sequence
  Description of Artificial Sequence: Synthetic oligonucleotide
  Sense strand starting at position 3648 of SEQ ID NO: 1241478
uugugucauaucgauuugu

SEQ ID NO: 1275639 - RNA, 19 nt, Artificial Sequence
  Description of Artificial Sequence: Synthetic oligonucleotide
  Antisense strand to SEQ ID NO: 1275638
acaaaucgauaugacacaa

SEQ ID NO: 1275640 - RNA, 19 nt, Artificial Sequence
  Description of Artificial Sequence: Synthetic oligonucleotide
  Sense strand starting at position 3737 of SEQ ID NO: 1241478
gggcuauuaaagugcaaga

SEQ ID NO: 1275641 - RNA, 19 nt, Artificial Sequence
  Description of Artificial Sequence: Synthetic oligonucleotide
  Antisense strand to SEQ ID NO: 1275640
ucuugcacuuuaauagccc

SEQ ID NO: 1275642 - RNA, 19 nt, Artificial Sequence
  Description of Artificial Sequence: Synthetic oligonucleotide
  Sense strand starting at position 3739 of SEQ ID NO: 1241478
gcuauuaaagugcaagauu

SEQ ID NO: 1275643 - RNA, 19 nt, Artificial Sequence
  Description of Artificial Sequence: Synthetic oligonucleotide
  Antisense strand to SEQ ID NO: 1275642
aaucuugcacuuuaauagc

SEQ ID NO: 1275644 - RNA, 19 nt, Artificial Sequence
  Description of Artificial Sequence: Synthetic oligonucleotide
  Sense strand starting at position 3742 of SEQ ID NO: 1241478
auuaaagugcaagauucua

SEQ ID NO: 1275645 - RNA, 19 nt, Artificial Sequence
  Description of Artificial Sequence: Synthetic oligonucleotide
  Antisense strand to SEQ ID NO: 1275644
uagaaucuugcacuuuaau

SEQ ID NO: 1275646 - RNA, 19 nt, Artificial Sequence
  Description of Artificial Sequence: Synthetic oligonucleotide
  Sense strand starting at position 3772 of SEQ ID NO: 1241478
aggaguggcaucuguccaa

SEQ ID NO: 1275647 - RNA, 19 nt, Artificial Sequence
  Description of Artificial Sequence: Synthetic oligonucleotide
  Antisense strand to SEQ ID NO: 1275646
uuggacagaugccacuccu

SEQ ID NO: 1275648 - RNA, 19 nt, Artificial Sequence
  Description of Artificial Sequence: Synthetic oligonucleotide
  Sense strand starting at position 3803 of SEQ ID NO: 1241478
gugugagugcaggaauaua

SEQ ID NO: 1275649 - RNA, 19 nt, Artificial Sequence
  Description of Artificial Sequence: Synthetic oligonucleotide
  Antisense strand to SEQ ID NO: 1275648
uauauuccugcacucacac

SEQ ID NO: 1275650 - RNA, 19 nt, Artificial Sequence
  Description of Artificial Sequence: Synthetic oligonucleotide
  Sense strand starting at position 3902 of SEQ ID NO: 1241478
gcacuuugaggauagguau

SEQ ID NO: 1275651 - RNA, 19 nt, Artificial Sequence
  Description of Artificial Sequence: Synthetic oligonucleotide
  Antisense strand to SEQ ID NO: 1275650
auaccuauccucaaagugc

SEQ ID NO: 1275652 - RNA, 19 nt, Artificial Sequence
  Description of Artificial Sequence: Synthetic oligonucleotide
  Sense strand starting at position 3923 of SEQ ID NO: 1241478
ccucuuguuuaucuagaua

SEQ ID NO: 1275653 - RNA, 19 nt, Artificial Sequence
  Description of Artificial Sequence: Synthetic oligonucleotide
  Antisense strand to SEQ ID NO: 1275652
uaucuagauaaacaagagg

SEQ ID NO: 1275654 - RNA, 19 nt, Artificial Sequence
  Description of Artificial Sequence: Synthetic oligonucleotide
  Sense strand starting at position 3952 of SEQ ID NO: 1241478
uuuaguuuggcuuaaaucu

SEQ ID NO: 1275655 - RNA, 19 nt, Artificial Sequence
  Description of Artificial Sequence: Synthetic oligonucleotide
  Antisense strand to SEQ ID NO: 1275654
agauuuaagccaaacuaaa

SEQ ID NO: 1275656 - RNA, 19 nt, Artificial Sequence
  Description of Artificial Sequence: Synthetic oligonucleotide
  Sense strand starting at position 3959 of SEQ ID NO: 1241478
uggcuuaaaucuguuaauu

SEQ ID NO: 1275657 - RNA, 19 nt, Artificial Sequence
  Description of Artificial Sequence: Synthetic oligonucleotide
  Antisense strand to SEQ ID NO: 1275656
aauuaacagauuuaagcca

SEQ ID NO: 1275658 - RNA, 19 nt, Artificial Sequence
  Description of Artificial Sequence: Synthetic oligonucleotide
  Sense strand starting at position 167 of SEQ ID NO: 1241479
aaauuaacguuggucuaau

SEQ ID NO: 1275659 - RNA, 19 nt, Artificial Sequence
  Description of Artificial Sequence: Synthetic oligonucleotide
  Antisense strand to SEQ ID NO: 1275658
auuagaccaacguuaauuu

SEQ ID NO: 1275660 - RNA, 19 nt, Artificial Sequence
  Description of Artificial Sequence: Synthetic oligonucleotide
  Sense strand starting at position 168 of SEQ ID NO: 1241479
aauuaacguuggucuaauu

SEQ ID NO: 1275661 - RNA, 19 nt, Artificial Sequence
  Description of Artificial Sequence: Synthetic oligonucleotide
  Antisense strand to SEQ ID NO: 1275660
aauuagaccaacguuaauu

SEQ ID NO: 1275662 - RNA, 19 nt, Artificial Sequence
  Description of Artificial Sequence: Synthetic oligonucleotide
  Sense strand starting at position 260 of SEQ ID NO: 1241479
ucuaauagugacuguggaa

SEQ ID NO: 1275663 - RNA, 19 nt, Artificial Sequence
  Description of Artificial Sequence: Synthetic oligonucleotide
  Antisense strand to SEQ ID NO: 1275662
uuccacagucacuauuaga

SEQ ID NO: 1275664 - RNA, 19 nt, Artificial Sequence
  Description of Artificial Sequence: Synthetic oligonucleotide
  Sense strand starting at position 434 of SEQ ID NO: 1241479
acuuaauuguuagugagca

SEQ ID NO: 1275665 - RNA, 19 nt, Artificial Sequence
  Description of Artificial Sequence: Synthetic oligonucleotide
  Antisense strand to SEQ ID NO: 1275664
ugcucacuaacaauuaagu

SEQ ID NO: 1275666 - RNA, 19 nt, Artificial Sequence
  Description of Artificial Sequence: Synthetic oligonucleotide
  Sense strand starting at position 438 of SEQ ID NO: 1241479
aauuguuagugagcaaucu

SEQ ID NO: 1275667 - RNA, 19 nt, Artificial Sequence
  Description of Artificial Sequence: Synthetic oligonucleotide
  Antisense strand to SEQ ID NO: 1275666
agauugcucacuaacaauu

SEQ ID NO: 1275668 - RNA, 19 nt, Artificial Sequence
  Description of Artificial Sequence: Synthetic oligonucleotide
  Sense strand starting at position 544 of SEQ ID NO: 1241479
augaauucguaugccagau

SEQ ID NO: 1275669 - RNA, 19 nt, Artificial Sequence
  Description of Artificial Sequence: Synthetic oligonucleotide
  Antisense strand to SEQ ID NO: 1275668
aucuggcauacgaauucau

SEQ ID NO: 1275670 - RNA, 19 nt, Artificial Sequence
  Description of Artificial Sequence: Synthetic oligonucleotide
  Sense strand starting at position 740 of SEQ ID NO: 1241479
agacgaauaagguaugucu

SEQ ID NO: 1275671 - RNA, 19 nt, Artificial Sequence
  Description of Artificial Sequence: Synthetic oligonucleotide
  Antisense strand to SEQ ID NO: 1275670
agacauaccuuauucgucu

SEQ ID NO: 1275672 - RNA, 19 nt, Artificial Sequence
  Description of Artificial Sequence: Synthetic oligonucleotide
  Sense strand starting at position 742 of SEQ ID NO: 1241479
acgaauaagguaugucuua

SEQ ID NO: 1275673 - RNA, 19 nt, Artificial Sequence
  Description of Artificial Sequence: Synthetic oligonucleotide
  Antisense strand to SEQ ID NO: 1275672
uaagacauaccuuauucgu

SEQ ID NO: 1275674 - RNA, 19 nt, Artificial Sequence
  Description of Artificial Sequence: Synthetic oligonucleotide
  Sense strand starting at position 743 of SEQ ID NO: 1241479
cgaauaagguaugucuuau

SEQ ID NO: 1275675 - RNA, 19 nt, Artificial Sequence
  Description of Artificial Sequence: Synthetic oligonucleotide
  Antisense strand to SEQ ID NO: 1275674
auaagacauaccuuauucg

SEQ ID NO: 1275676 - RNA, 19 nt, Artificial Sequence
  Description of Artificial Sequence: Synthetic oligonucleotide
  Sense strand starting at position 749 of SEQ ID NO: 1241479
agguaugucuuauuaucca

SEQ ID NO: 1275677 - RNA, 19 nt, Artificial Sequence
  Description of Artificial Sequence: Synthetic oligonucleotide
  Antisense strand to SEQ ID NO: 1275676
uggauaauaagacauaccu

SEQ ID NO: 1275678 - RNA, 19 nt, Artificial Sequence
  Description of Artificial Sequence: Synthetic oligonucleotide
  Sense strand starting at position 831 of SEQ ID NO: 1241479
guuacacuauugucugaaa

SEQ ID NO: 1275679 - RNA, 19 nt, Artificial Sequence
  Description of Artificial Sequence: Synthetic oligonucleotide
  Antisense strand to SEQ ID NO: 1275678
uuucagacaauaguguaac

SEQ ID NO: 1275680 - RNA, 19 nt, Artificial Sequence
  Description of Artificial Sequence: Synthetic oligonucleotide
  Sense strand starting at position 890 of SEQ ID NO: 1241479
ggaucucagucucuaagga

SEQ ID NO: 1275681 - RNA, 19 nt, Artificial Sequence
  Description of Artificial Sequence: Synthetic oligonucleotide
  Antisense strand to SEQ ID NO: 1275680
uccuuagagacugagaucc

SEQ ID NO: 1275682 - RNA, 19 nt, Artificial Sequence
  Description of Artificial Sequence: Synthetic oligonucleotide
  Sense strand starting at position 994 of SEQ ID NO: 1241479
gucuaucagcucuaggaac

SEQ ID NO: 1275683 - RNA, 19 nt, Artificial Sequence
  Description of Artificial Sequence: Synthetic oligonucleotide
  Antisense strand to SEQ ID NO: 1275682
guuccuagagcugauagac

SEQ ID NO: 1275684 - RNA, 19 nt, Artificial Sequence
  Description of Artificial Sequence: Synthetic oligonucleotide
  Sense strand starting at position 996 of SEQ ID NO: 1241479
cuaucagcucuaggaacaa

SEQ ID NO: 1275685 - RNA, 19 nt, Artificial Sequence
  Description of Artificial Sequence: Synthetic oligonucleotide
  Antisense strand to SEQ ID NO: 1275684
uuguuccuagagcugauag

SEQ ID NO: 1275686 - RNA, 19 nt, Artificial Sequence
  Description of Artificial Sequence: Synthetic oligonucleotide
  Sense strand starting at position 1141 of SEQ ID NO: 1241479
gcucacagggcugaauaau

SEQ ID NO: 1275687 - RNA, 19 nt, Artificial Sequence
  Description of Artificial Sequence: Synthetic oligonucleotide
  Antisense strand to SEQ ID NO: 1275686
auuauucagcccugugagc

SEQ ID NO: 1275688 - RNA, 19 nt, Artificial Sequence
  Description of Artificial Sequence: Synthetic oligonucleotide
  Sense strand starting at position 1277 of SEQ ID NO: 1241479
ucuggaaaccucugaagca

SEQ ID NO: 1275689 - RNA, 19 nt, Artificial Sequence
  Description of Artificial Sequence: Synthetic oligonucleotide
  Antisense strand to SEQ ID NO: 1275688
ugcuucagagguuuccaga

SEQ ID NO: 1275690 - RNA, 19 nt, Artificial Sequence
  Description of Artificial Sequence: Synthetic oligonucleotide
  Sense strand starting at position 1611 of SEQ ID NO: 1241479
ggguacuguaccuagcauu

SEQ ID NO: 1275691 - RNA, 19 nt, Artificial Sequence
  Description of Artificial Sequence: Synthetic oligonucleotide
  Antisense strand to SEQ ID NO: 1275690
aaugcuagguacaguaccc

SEQ ID NO: 1275692 - RNA, 19 nt, Artificial Sequence
  Description of Artificial Sequence: Synthetic oligonucleotide
  Sense strand starting at position 1792 of SEQ ID NO: 1241479
ccaauauuccucgaggcga

SEQ ID NO: 1275693 - RNA, 19 nt, Artificial Sequence
  Description of Artificial Sequence: Synthetic oligonucleotide
  Antisense strand to SEQ ID NO: 1275692
ucgccucgaggaauauugg

SEQ ID NO: 1275694 - RNA, 19 nt, Artificial Sequence
  Description of Artificial Sequence: Synthetic oligonucleotide
  Sense strand starting at position 2065 of SEQ ID NO: 1241479
uagggcucaguguagaaga

SEQ ID NO: 1275695 - RNA, 19 nt, Artificial Sequence
  Description of Artificial Sequence: Synthetic oligonucleotide
  Antisense strand to SEQ ID NO: 1275694
ucuucuacacugagcccua

SEQ ID NO: 1275696 - RNA, 19 nt, Artificial Sequence
  Description of Artificial Sequence: Synthetic oligonucleotide
  Sense strand starting at position 2159 of SEQ ID NO: 1241479
cuaagauuauccucaacga

SEQ ID NO: 1275697 - RNA, 19 nt, Artificial Sequence
  Description of Artificial Sequence: Synthetic oligonucleotide
  Antisense strand to SEQ ID NO: 1275696
ucguugaggauaaucuuag

SEQ ID NO: 1275698 - RNA, 19 nt, Artificial Sequence
  Description of Artificial Sequence: Synthetic oligonucleotide
  Sense strand starting at position 2163 of SEQ ID NO: 1241479
gauuauccucaacgaucga

SEQ ID NO: 1275699 - RNA, 19 nt, Artificial Sequence
  Description of Artificial Sequence: Synthetic oligonucleotide
  Antisense strand to SEQ ID NO: 1275698
ucgaucguugaggauaauc

SEQ ID NO: 1275700 - RNA, 19 nt, Artificial Sequence
  Description of Artificial Sequence: Synthetic oligonucleotide
  Sense strand starting at position 2231 of SEQ ID NO: 1241479
aggagcauucugcaauuga

SEQ ID NO: 1275701 - RNA, 19 nt, Artificial Sequence
  Description of Artificial Sequence: Synthetic oligonucleotide
  Antisense strand to SEQ ID NO: 1275700
ucaauugcagaaugcuccu

SEQ ID NO: 1275702 - RNA, 19 nt, Artificial Sequence
  Description of Artificial Sequence: Synthetic oligonucleotide
  Sense strand starting at position 2252 of SEQ ID NO: 1241479
acaggauucucaucgaacc

SEQ ID NO: 1275703 - RNA, 19 nt, Artificial Sequence
  Description of Artificial Sequence: Synthetic oligonucleotide
  Antisense strand to SEQ ID NO: 1275702
gguucgaugagaauccugu

SEQ ID NO: 1275704 - RNA, 19 nt, Artificial Sequence
  Description of Artificial Sequence: Synthetic oligonucleotide
  Sense strand starting at position 2353 of SEQ ID NO: 1241479
aguguuuagcuagauaaug

SEQ ID NO: 1275705 - RNA, 19 nt, Artificial Sequence
  Description of Artificial Sequence: Synthetic oligonucleotide
  Antisense strand to SEQ ID NO: 1275704
cauuaucuagcuaaacacu

SEQ ID NO: 1275706 - RNA, 19 nt, Artificial Sequence
  Description of Artificial Sequence: Synthetic oligonucleotide
  Sense strand starting at position 2355 of SEQ ID NO: 1241479
uguuuagcuagauaauggu

SEQ ID NO: 1275707 - RNA, 19 nt, Artificial Sequence
  Description of Artificial Sequence: Synthetic oligonucleotide
  Antisense strand to SEQ ID NO: 1275706
accauuaucuagcuaaaca

SEQ ID NO: 1275708 - RNA, 19 nt, Artificial Sequence
  Description of Artificial Sequence: Synthetic oligonucleotide
  Sense strand starting at position 3008 of SEQ ID NO: 1241479
acugucauacgguacagua

SEQ ID NO: 1275709 - RNA, 19 nt, Artificial Sequence
  Description of Artificial Sequence: Synthetic oligonucleotide
  Antisense strand to SEQ ID NO: 1275708
uacuguaccguaugacagu

SEQ ID NO: 1275710 - RNA, 19 nt, Artificial Sequence
  Description of Artificial Sequence: Synthetic oligonucleotide
  Sense strand starting at position 3010 of SEQ ID NO: 1241479
ugucauacgguacaguaaa

SEQ ID NO: 1275711 - RNA, 19 nt, Artificial Sequence
  Description of Artificial Sequence: Synthetic oligonucleotide
  Antisense strand to SEQ ID NO: 1275710
uuuacuguaccguaugaca

SEQ ID NO: 1275712 - RNA, 19 nt, Artificial Sequence
  Description of Artificial Sequence: Synthetic oligonucleotide
  Sense strand starting at position 3285 of SEQ ID NO: 1241479
aacggauaaugagugcaaa

SEQ ID NO: 1275713 - RNA, 19 nt, Artificial Sequence
  Description of Artificial Sequence: Synthetic oligonucleotide
  Antisense strand to SEQ ID NO: 1275712
uuugcacucauuauccguu

SEQ ID NO: 1275714 - RNA, 19 nt, Artificial Sequence
  Description of Artificial Sequence: Synthetic oligonucleotide
  Sense strand starting at position 3286 of SEQ ID NO: 1241479
acggauaaugagugcaaau

SEQ ID NO: 1275715 - RNA, 19 nt, Artificial Sequence
  Description of Artificial Sequence: Synthetic oligonucleotide
  Antisense strand to SEQ ID NO: 1275714
auuugcacucauuauccgu

SEQ ID NO: 1275716 - RNA, 19 nt, Artificial Sequence
  Description of Artificial Sequence: Synthetic oligonucleotide
  Sense strand starting at position 3491 of SEQ ID NO: 1241479
auacguggaaucuagaagu

SEQ ID NO: 1275717 - RNA, 19 nt, Artificial Sequence
  Description of Artificial Sequence: Synthetic oligonucleotide
  Antisense strand to SEQ ID NO: 1275716
acuucuagauuccacguau

SEQ ID NO: 1275718 - RNA, 19 nt, Artificial Sequence
  Description of Artificial Sequence: Synthetic oligonucleotide
  Sense strand starting at position 3501 of SEQ ID NO: 1241479
ucuagaaguuucucauaga

SEQ ID NO: 1275719 - RNA, 19 nt, Artificial Sequence
  Description of Artificial Sequence: Synthetic oligonucleotide
  Antisense strand to SEQ ID NO: 1275718
ucuaugagaaacuucuaga

SEQ ID NO: 1275720 - RNA, 19 nt, Artificial Sequence
  Description of Artificial Sequence: Synthetic oligonucleotide
  Sense strand starting at position 3528 of SEQ ID NO: 1241479
gcagaaaugugguuuccag

SEQ ID NO: 1275721 - RNA, 19 nt, Artificial Sequence
  Description of Artificial Sequence: Synthetic oligonucleotide
  Antisense strand to SEQ ID NO: 1275720
cuggaaaccacauuucugc

SEQ ID NO: 1275722 - RNA, 19 nt, Artificial Sequence
  Description of Artificial Sequence: Synthetic oligonucleotide
  Sense strand starting at position 3589 of SEQ ID NO: 1241479
cacaaacuuucgguuguaa

SEQ ID NO: 1275723 - RNA, 19 nt, Artificial Sequence
  Description of Artificial Sequence: Synthetic oligonucleotide
  Antisense strand to SEQ ID NO: 1275722
uuacaaccgaaaguuugug

SEQ ID NO: 1275724 - RNA, 19 nt, Artificial Sequence
  Description of Artificial Sequence: Synthetic oligonucleotide
  Sense strand starting at position 3597 of SEQ ID NO: 1241479
uucgguuguaaguagagua

SEQ ID NO: 1275725 - RNA, 19 nt, Artificial Sequence
  Description of Artificial Sequence: Synthetic oligonucleotide
  Antisense strand to SEQ ID NO: 1275724
uacucuacuuacaaccgaa

SEQ ID NO: 1275726 - RNA, 19 nt, Artificial Sequence
  Description of Artificial Sequence: Synthetic oligonucleotide
  Sense strand starting at position 3602 of SEQ ID NO: 1241479
uuguaaguagaguaaguua

SEQ ID NO: 1275727 - RNA, 19 nt, Artificial Sequence
  Description of Artificial Sequence: Synthetic oligonucleotide
  Antisense strand to SEQ ID NO: 1275726
uaacuuacucuacuuacaa

SEQ ID NO: 1275728 - RNA, 19 nt, Artificial Sequence
  Description of Artificial Sequence: Synthetic oligonucleotide
  Sense strand starting at position 3633 of SEQ ID NO: 1241479
guacaacaugcugauuaua

SEQ ID NO: 1275729 - RNA, 19 nt, Artificial Sequence
  Description of Artificial Sequence: Synthetic oligonucleotide
  Antisense strand to SEQ ID NO: 1275728
uauaaucagcauguuguac

SEQ ID NO: 1275730 - RNA, 19 nt, Artificial Sequence
  Description of Artificial Sequence: Synthetic oligonucleotide
  Sense strand starting at position 3635 of SEQ ID NO: 1241479
acaacaugcugauuauagu

SEQ ID NO: 1275731 - RNA, 19 nt, Artificial Sequence
  Description of Artificial Sequence: Synthetic oligonucleotide
  Antisense strand to SEQ ID NO: 1275730
acuauaaucagcauguugu

SEQ ID NO: 1275732 - RNA, 19 nt, Artificial Sequence
  Description of Artificial Sequence: Synthetic oligonucleotide
  Sense strand starting at position 3678 of SEQ ID NO: 1241479
aaauuugcaugggaacaga

SEQ ID NO: 1275733 - RNA, 19 nt, Artificial Sequence
  Description of Artificial Sequence: Synthetic oligonucleotide
  Antisense strand to SEQ ID NO: 1275732
ucuguucccaugcaaauuu

SEQ ID NO: 1275734 - RNA, 19 nt, Artificial Sequence
  Description of Artificial Sequence: Synthetic oligonucleotide
  Sense strand starting at position 3775 of SEQ ID NO: 1241479
cacacuggcgcuuaucaga

SEQ ID NO: 1275735 - RNA, 19 nt, Artificial Sequence
  Description of Artificial Sequence: Synthetic oligonucleotide
  Antisense strand to SEQ ID NO: 1275734
ucugauaagcgccagugug

SEQ ID NO: 1275736 - RNA, 19 nt, Artificial Sequence
  Description of Artificial Sequence: Synthetic oligonucleotide
  Sense strand starting at position 3976 of SEQ ID NO: 1241479
uugcuaagaaaguggauau

SEQ ID NO: 1275737 - RNA, 19 nt, Artificial Sequence
  Description of Artificial Sequence: Synthetic oligonucleotide
  Antisense strand to SEQ ID NO: 1275736
auauccacuuucuuagcaa

SEQ ID NO: 1275738 - RNA, 19 nt, Artificial Sequence
  Description of Artificial Sequence: Synthetic oligonucleotide
  Sense strand starting at position 15 of SEQ ID NO: 1241480
ccgccaucugccucucauu

SEQ ID NO: 1275739 - RNA, 19 nt, Artificial Sequence
  Description of Artificial Sequence: Synthetic oligonucleotide
  Antisense strand to SEQ ID NO: 1275738
aaugagaggcagauggcgg

SEQ ID NO: 1275740 - RNA, 19 nt, Artificial Sequence
  Description of Artificial Sequence: Synthetic oligonucleotide
  Sense strand starting at position 385 of SEQ ID NO: 1241480
uaggcucgcugccuuaaau

SEQ ID NO: 1275741 - RNA, 19 nt, Artificial Sequence
  Description of Artificial Sequence: Synthetic oligonucleotide
  Antisense strand to SEQ ID NO: 1275740
auuuaaggcagcgagccua

SEQ ID NO: 1275742 - RNA, 19 nt, Artificial Sequence
  Description of Artificial Sequence: Synthetic oligonucleotide
  Sense strand starting at position 932 of SEQ ID NO: 1241480
acgguccuucaagagugau

SEQ ID NO: 1275743 - RNA, 19 nt, Artificial Sequence
  Description of Artificial Sequence: Synthetic oligonucleotide
  Antisense strand to SEQ ID NO: 1275742
aucacucuugaaggaccgu

SEQ ID NO: 1275744 - RNA, 19 nt, Artificial Sequence
  Description of Artificial Sequence: Synthetic oligonucleotide
  Sense strand starting at position 1113 of SEQ ID NO: 1241480
uucugaagacuguguagau

SEQ ID NO: 1275745 - RNA, 19 nt, Artificial Sequence
  Description of Artificial Sequence: Synthetic oligonucleotide
  Antisense strand to SEQ ID NO: 1275744
aucuacacagucuucagaa

SEQ ID NO: 1275746 - RNA, 19 nt, Artificial Sequence
  Description of Artificial Sequence: Synthetic oligonucleotide
  Sense strand starting at position 1114 of SEQ ID NO: 1241480
ucugaagacuguguagaua

SEQ ID NO: 1275747 - RNA, 19 nt, Artificial Sequence
  Description of Artificial Sequence: Synthetic oligonucleotide
  Antisense strand to SEQ ID NO: 1275746
uaucuacacagucuucaga

SEQ ID NO: 1275748 - RNA, 19 nt, Artificial Sequence
  Description of Artificial Sequence: Synthetic oligonucleotide
  Sense strand starting at position 1211 of SEQ ID NO: 1241480
caccgaguugcucggaaga

SEQ ID NO: 1275749 - RNA, 19 nt, Artificial Sequence
  Description of Artificial Sequence: Synthetic oligonucleotide
  Antisense strand to SEQ ID NO: 1275748
ucuuccgagcaacucggug

SEQ ID NO: 1275750 - RNA, 19 nt, Artificial Sequence
  Description of Artificial Sequence: Synthetic oligonucleotide
  Sense strand starting at position 1288 of SEQ ID NO: 1241480
agucuuugcgcugccgaau

SEQ ID NO: 1275751 - RNA, 19 nt, Artificial Sequence
  Description of Artificial Sequence: Synthetic oligonucleotide
  Antisense strand to SEQ ID NO: 1275750
auucggcagcgcaaagacu

SEQ ID NO: 1275752 - RNA, 19 nt, Artificial Sequence
  Description of Artificial Sequence: Synthetic oligonucleotide
  Sense strand starting at position 1392 of SEQ ID NO: 1241480
caaagaggcuuugagaacu

SEQ ID NO: 1275753 - RNA, 19 nt, Artificial Sequence
  Description of Artificial Sequence: Synthetic oligonucleotide
  Antisense strand to SEQ ID NO: 1275752
aguucucaaagccucuuug

SEQ ID NO: 1275754 - RNA, 19 nt, Artificial Sequence
  Description of Artificial Sequence: Synthetic oligonucleotide
  Sense strand starting at position 1398 of SEQ ID NO: 1241480
ggcuuugagaacugucccu

SEQ ID NO: 1275755 - RNA, 19 nt, Artificial Sequence
  Description of Artificial Sequence: Synthetic oligonucleotide
  Antisense strand to SEQ ID NO: 1275754
agggacaguucucaaagcc

SEQ ID NO: 1275756 - RNA, 19 nt, Artificial Sequence
  Description of Artificial Sequence: Synthetic oligonucleotide
  Sense strand starting at position 1426 of SEQ ID NO: 1241480
gcccuugaugggcguagau

SEQ ID NO: 1275757 - RNA, 19 nt, Artificial Sequence
  Description of Artificial Sequence: Synthetic oligonucleotide
  Antisense strand to SEQ ID NO: 1275756
aucuacgcccaucaagggc

SEQ ID NO: 1275758 - RNA, 19 nt, Artificial Sequence
  Description of Artificial Sequence: Synthetic oligonucleotide
  Sense strand starting at position 1530 of SEQ ID NO: 1241480
cuagaacuguagucuggaa

SEQ ID NO: 1275759 - RNA, 19 nt, Artificial Sequence
  Description of Artificial Sequence: Synthetic oligonucleotide
  Antisense strand to SEQ ID NO: 1275758
uuccagacuacaguucuag

SEQ ID NO: 1275760 - RNA, 19 nt, Artificial Sequence
  Description of Artificial Sequence: Synthetic oligonucleotide
  Sense strand starting at position 1537 of SEQ ID NO: 1241480
uguagucuggaaugaaucu

SEQ ID NO: 1275761 - RNA, 19 nt, Artificial Sequence
  Description of Artificial Sequence: Synthetic oligonucleotide
  Antisense strand to SEQ ID NO: 1275760
agauucauuccagacuaca

SEQ ID NO: 1275762 - RNA, 19 nt, Artificial Sequence
  Description of Artificial Sequence: Synthetic oligonucleotide
  Sense strand starting at position 1546 of SEQ ID NO: 1241480
gaaugaaucucugacccga

SEQ ID NO: 1275763 - RNA, 19 nt, Artificial Sequence
  Description of Artificial Sequence: Synthetic oligonucleotide
  Antisense strand to SEQ ID NO: 1275762
ucgggucagagauucauuc

SEQ ID NO: 1275764 - RNA, 19 nt, Artificial Sequence
  Description of Artificial Sequence: Synthetic oligonucleotide
  Sense strand starting at position 1548 of SEQ ID NO: 1241480
augaaucucugacccgaua

SEQ ID NO: 1275765 - RNA, 19 nt, Artificial Sequence
  Description of Artificial Sequence: Synthetic oligonucleotide
  Antisense strand to SEQ ID NO: 1275764
uaucgggucagagauucau

SEQ ID NO: 1275766 - RNA, 19 nt, Artificial Sequence
  Description of Artificial Sequence: Synthetic oligonucleotide
  Sense strand starting at position 1987 of SEQ ID NO: 1241480
aggucagacguuuacaaac

SEQ ID NO: 1275767 - RNA, 19 nt, Artificial Sequence
  Description of Artificial Sequence: Synthetic oligonucleotide
  Antisense strand to SEQ ID NO: 1275766
guuuguaaacgucugaccu

SEQ ID NO: 1275768 - RNA, 19 nt, Artificial Sequence
  Description of Artificial Sequence: Synthetic oligonucleotide
  Sense strand starting at position 2028 of SEQ ID NO: 1241480
gcgcccguuacucuaauga

SEQ ID NO: 1275769 - RNA, 19 nt, Artificial Sequence
  Description of Artificial Sequence: Synthetic oligonucleotide
  Antisense strand to SEQ ID NO: 1275768
ucauuagaguaacgggcgc

SEQ ID NO: 1275770 - RNA, 19 nt, Artificial Sequence
  Description of Artificial Sequence: Synthetic oligonucleotide
  Sense strand starting at position 2655 of SEQ ID NO: 1241480
agcguuucuccaugugucu

SEQ ID NO: 1275771 - RNA, 19 nt, Artificial Sequence
  Description of Artificial Sequence: Synthetic oligonucleotide
  Antisense strand to SEQ ID NO: 1275770
agacacauggagaaacgcu

SEQ ID NO: 1275772 - RNA, 19 nt, Artificial Sequence
  Description of Artificial Sequence: Synthetic oligonucleotide
  Sense strand starting at position 2871 of SEQ ID NO: 1241480
gagagugguugagauuguu

SEQ ID NO: 1275773 - RNA, 19 nt, Artificial Sequence
  Description of Artificial Sequence: Synthetic oligonucleotide
  Antisense strand to SEQ ID NO: 1275772
aacaaucucaaccacucuc

SEQ ID NO: 1275774 - RNA, 19 nt, Artificial Sequence
  Description of Artificial Sequence: Synthetic oligonucleotide
  Sense strand starting at position 2877 of SEQ ID NO: 1241480
gguugagauuguucagagu

SEQ ID NO: 1275775 - RNA, 19 nt, Artificial Sequence
  Description of Artificial Sequence: Synthetic oligonucleotide
  Antisense strand to SEQ ID NO: 1275774
acucugaacaaucucaacc

SEQ ID NO: 1275776 - RNA, 19 nt, Artificial Sequence
  Description of Artificial Sequence: Synthetic oligonucleotide
  Sense strand starting at position 2984 of SEQ ID NO: 1241480
acuuaugacuucugaaaug

SEQ ID NO: 1275777 - RNA, 19 nt, Artificial Sequence
  Description of Artificial Sequence: Synthetic oligonucleotide
  Antisense strand to SEQ ID NO: 1275776
cauuucagaagucauaagu

SEQ ID NO: 1275778 - RNA, 19 nt, Artificial Sequence
  Description of Artificial Sequence: Synthetic oligonucleotide
  Sense strand starting at position 3033 of SEQ ID NO: 1241480
cggguaguugcggauuuaa

SEQ ID NO: 1275779 - RNA, 19 nt, Artificial Sequence
  Description of Artificial Sequence: Synthetic oligonucleotide
  Antisense strand to SEQ ID NO: 1275778
uuaaauccgcaacuacccg

SEQ ID NO: 1275780 - RNA, 19 nt, Artificial Sequence
  Description of Artificial Sequence: Synthetic oligonucleotide
  Sense strand starting at position 3042 of SEQ ID NO: 1241480
gcggauuuaaguugcccua

SEQ ID NO: 1275781 - RNA, 19 nt, Artificial Sequence
  Description of Artificial Sequence: Synthetic oligonucleotide
  Antisense strand to SEQ ID NO: 1275780
uagggcaacuuaaauccgc

SEQ ID NO: 1275782 - RNA, 19 nt, Artificial Sequence
  Description of Artificial Sequence: Synthetic oligonucleotide
  Sense strand starting at position 3243 of SEQ ID NO: 1241480
cuuggagguggauguuauu

SEQ ID NO: 1275783 - RNA, 19 nt, Artificial Sequence
  Description of Artificial Sequence: Synthetic oligonucleotide
  Antisense strand to SEQ ID NO: 1275782
aauaacauccaccuccaag

SEQ ID NO: 1275784 - RNA, 19 nt, Artificial Sequence
  Description of Artificial Sequence: Synthetic oligonucleotide
  Sense strand starting at position 3246 of SEQ ID NO: 1241480
ggagguggauguuauuuau

SEQ ID NO: 1275785 - RNA, 19 nt, Artificial Sequence
  Description of Artificial Sequence: Synthetic oligonucleotide
  Antisense strand to SEQ ID NO: 1275784
auaaauaacauccaccucc

SEQ ID NO: 1275786 - RNA, 19 nt, Artificial Sequence
  Description of Artificial Sequence: Synthetic oligonucleotide
  Sense strand starting at position 3372 of SEQ ID NO: 1241480
uguaguaaaccuugauggu

SEQ ID NO: 1275787 - RNA, 19 nt, Artificial Sequence
  Description of Artificial Sequence: Synthetic oligonucleotide
  Antisense strand to SEQ ID NO: 1275786
accaucaagguuuacuaca

SEQ ID NO: 1275788 - RNA, 19 nt, Artificial Sequence
  Description of Artificial Sequence: Synthetic oligonucleotide
  Sense strand starting at position 3373 of SEQ ID NO: 1241480
guaguaaaccuugaugguc

SEQ ID NO: 1275789 - RNA, 19 nt, Artificial Sequence
  Description of Artificial Sequence: Synthetic oligonucleotide
  Antisense strand to SEQ ID NO: 1275788
gaccaucaagguuuacuac

SEQ ID NO: 1275790 - RNA, 19 nt, Artificial Sequence
  Description of Artificial Sequence: Synthetic oligonucleotide
  Sense strand starting at position 3496 of SEQ ID NO: 1241480
guuggaagaucuucuccca

SEQ ID NO: 1275791 - RNA, 19 nt, Artificial Sequence
  Description of Artificial Sequence: Synthetic oligonucleotide
  Antisense strand to SEQ ID NO: 1275790
ugggagaagaucuuccaac

SEQ ID NO: 1275792 - RNA, 19 nt, Artificial Sequence
  Description of Artificial Sequence: Synthetic oligonucleotide
  Sense strand starting at position 3499 of SEQ ID NO: 1241480
ggaagaucuucucccauag

SEQ ID NO: 1275793 - RNA, 19 nt, Artificial Sequence
  Description of Artificial Sequence: Synthetic oligonucleotide
  Antisense strand to SEQ ID NO: 1275792
cuaugggagaagaucuucc

SEQ ID NO: 1275794 - RNA, 19 nt, Artificial Sequence
  Description of Artificial Sequence: Synthetic oligonucleotide
  Sense strand starting at position 3577 of SEQ ID NO: 1241480
aaaucagguuagcaauaga

SEQ ID NO: 1275795 - RNA, 19 nt, Artificial Sequence
  Description of Artificial Sequence: Synthetic oligonucleotide
  Antisense strand to SEQ ID NO: 1275794
ucuauugcuaaccugauuu

SEQ ID NO: 1275796 - RNA, 19 nt, Artificial Sequence
  Description of Artificial Sequence: Synthetic oligonucleotide
  Sense strand starting at position 3580 of SEQ ID NO: 1241480
ucagguuagcaauagaguu

SEQ ID NO: 1275797 - RNA, 19 nt, Artificial Sequence
  Description of Artificial Sequence: Synthetic oligonucleotide
  Antisense strand to SEQ ID NO: 1275796
aacucuauugcuaaccuga

SEQ ID NO: 1275798 - RNA, 19 nt, Artificial Sequence
  Description of Artificial Sequence: Synthetic oligonucleotide
  Sense strand starting at position 3624 of SEQ ID NO: 1241480
ccuugucaaguuugcuaau

SEQ ID NO: 1275799 - RNA, 19 nt, Artificial Sequence
  Description of Artificial Sequence: Synthetic oligonucleotide
  Antisense strand to SEQ ID NO: 1275798
auuagcaaacuugacaagg

SEQ ID NO: 1275800 - RNA, 19 nt, Artificial Sequence
  Description of Artificial Sequence: Synthetic oligonucleotide
  Sense strand starting at position 3625 of SEQ ID NO: 1241480
cuugucaaguuugcuaauu

SEQ ID NO: 1275801 - RNA, 19 nt, Artificial Sequence
  Description of Artificial Sequence: Synthetic oligonucleotide
  Antisense strand to SEQ ID NO: 1275800
aauuagcaaacuugacaag

SEQ ID NO: 1275802 - RNA, 19 nt, Artificial Sequence
  Description of Artificial Sequence: Synthetic oligonucleotide
  Sense strand starting at position 3677 of SEQ ID NO: 1241480
aggcuuggcuccuccagua

SEQ ID NO: 1275803 - RNA, 19 nt, Artificial Sequence
  Description of Artificial Sequence: Synthetic oligonucleotide
  Antisense strand to SEQ ID NO: 1275802
uacuggaggagccaagccu

SEQ ID NO: 1275804 - RNA, 19 nt, Artificial Sequence
  Description of Artificial Sequence: Synthetic oligonucleotide
  Sense strand starting at position 3693 of SEQ ID NO: 1241480
guaaguagagccugagaca

SEQ ID NO: 1275805 - RNA, 19 nt, Artificial Sequence
  Description of Artificial Sequence: Synthetic oligonucleotide
  Antisense strand to SEQ ID NO: 1275804
ugucucaggcucuacuuac

SEQ ID NO: 1275806 - RNA, 19 nt, Artificial Sequence
  Description of Artificial Sequence: Synthetic oligonucleotide
  Sense strand starting at position 3715 of SEQ ID NO: 1241480
acaggauguagguaguuua

SEQ ID NO: 1275807 - RNA, 19 nt, Artificial Sequence
  Description of Artificial Sequence: Synthetic oligonucleotide
  Antisense strand to SEQ ID NO: 1275806
uaaacuaccuacauccugu

SEQ ID NO: 1275808 - RNA, 19 nt, Artificial Sequence
  Description of Artificial Sequence: Synthetic oligonucleotide
  Sense strand starting at position 3808 of SEQ ID NO: 1241480
aagggugugcuacagaaca

SEQ ID NO: 1275809 - RNA, 19 nt, Artificial Sequence
  Description of Artificial Sequence: Synthetic oligonucleotide
  Antisense strand to SEQ ID NO: 1275808
uguucuguagcacacccuu

SEQ ID NO: 1275810 - RNA, 19 nt, Artificial Sequence
  Description of Artificial Sequence: Synthetic oligonucleotide
  Sense strand starting at position 3837 of SEQ ID NO: 1241480
cugagcaacugggauauua

SEQ ID NO: 1275811 - RNA, 19 nt, Artificial Sequence
  Description of Artificial Sequence: Synthetic oligonucleotide
  Antisense strand to SEQ ID NO: 1275810
uaauaucccaguugcucag

SEQ ID NO: 1275812 - RNA, 19 nt, Artificial Sequence
  Description of Artificial Sequence: Synthetic oligonucleotide
  Sense strand starting at position 3847 of SEQ ID NO: 1241480
gggauauuauccuacugag

SEQ ID NO: 1275813 - RNA, 19 nt, Artificial Sequence
  Description of Artificial Sequence: Synthetic oligonucleotide
  Antisense strand to SEQ ID NO: 1275812
cucaguaggauaauauccc

SEQ ID NO: 1275814 - RNA, 19 nt, Artificial Sequence
  Description of Artificial Sequence: Synthetic oligonucleotide
  Sense strand starting at position 3870 of SEQ ID NO: 1241480
ucuguauagccacagagaa

SEQ ID NO: 1275815 - RNA, 19 nt, Artificial Sequence
  Description of Artificial Sequence: Synthetic oligonucleotide
  Antisense strand to SEQ ID NO: 1275814
uucucuguggcuauacaga

SEQ ID NO: 1275816 - RNA, 19 nt, Artificial Sequence
  Description of Artificial Sequence: Synthetic oligonucleotide
  Sense strand starting at position 3877 of SEQ ID NO: 1241480
agccacagagaauguaauu

SEQ ID NO: 1275817 - RNA, 19 nt, Artificial Sequence
  Description of Artificial Sequence: Synthetic oligonucleotide
  Antisense strand to SEQ ID NO: 1275816
aauuacauucucuguggcu

SEQ ID NO: 1275818 - RNA, 19 nt, Artificial Sequence
  Description of Artificial Sequence: Synthetic oligonucleotide
  Sense strand starting at position 512 of SEQ ID NO: 1241481
ugaguccaguucugucaaa

SEQ ID NO: 1275819 - RNA, 19 nt, Artificial Sequence
  Description of Artificial Sequence: Synthetic oligonucleotide
  Antisense strand to SEQ ID NO: 1275818
uuugacagaacuggacuca

SEQ ID NO: 1275820 - RNA, 19 nt, Artificial Sequence
  Description of Artificial Sequence: Synthetic oligonucleotide
  Sense strand starting at position 571 of SEQ ID NO: 1241481
aggugagauggcuauguuc

SEQ ID NO: 1275821 - RNA, 19 nt, Artificial Sequence
  Description of Artificial Sequence: Synthetic oligonucleotide
  Antisense strand to SEQ ID NO: 1275820
gaacauagccaucucaccu

SEQ ID NO: 1275822 - RNA, 19 nt, Artificial Sequence
  Description of Artificial Sequence: Synthetic oligonucleotide
  Sense strand starting at position 573 of SEQ ID NO: 1241481
gugagauggcuauguuccu

SEQ ID NO: 1275823 - RNA, 19 nt, Artificial Sequence
  Description of Artificial Sequence: Synthetic oligonucleotide
  Antisense strand to SEQ ID NO: 1275822
aggaacauagccaucucac

SEQ ID NO: 1275824 - RNA, 19 nt, Artificial Sequence
  Description of Artificial Sequence: Synthetic oligonucleotide
  Sense strand starting at position 578 of SEQ ID NO: 1241481
auggcuauguuccuugagu

SEQ ID NO: 1275825 - RNA, 19 nt, Artificial Sequence
  Description of Artificial Sequence: Synthetic oligonucleotide
  Antisense strand to SEQ ID NO: 1275824
acucaaggaacauagccau

SEQ ID NO: 1275826 - RNA, 19 nt, Artificial Sequence
  Description of Artificial Sequence: Synthetic oligonucleotide
  Sense strand starting at position 579 of SEQ ID NO: 1241481
uggcuauguuccuugagug

SEQ ID NO: 1275827 - RNA, 19 nt, Artificial Sequence
  Description of Artificial Sequence: Synthetic oligonucleotide
  Antisense strand to SEQ ID NO: 1275826
cacucaaggaacauagcca

SEQ ID NO: 1275828 - RNA, 19 nt, Artificial Sequence
  Description of Artificial Sequence: Synthetic oligonucleotide
  Sense strand starting at position 854 of SEQ ID NO: 1241481
gggcgacucacacaugaac

SEQ ID NO: 1275829 - RNA, 19 nt, Artificial Sequence
  Description of Artificial Sequence: Synthetic oligonucleotide
  Antisense strand to SEQ ID NO: 1275828
guucaugugugagucgccc

SEQ ID NO: 1275830 - RNA, 19 nt, Artificial Sequence
  Description of Artificial Sequence: Synthetic oligonucleotide
  Sense strand starting at position 1124 of SEQ ID NO: 1241481
ccgccaucugccucucauu

SEQ ID NO: 1275831 - RNA, 19 nt, Artificial Sequence
  Description of Artificial Sequence: Synthetic oligonucleotide
  Antisense strand to SEQ ID NO: 1275830
aaugagaggcagauggcgg

SEQ ID NO: 1275832 - RNA, 19 nt, Artificial Sequence
  Description of Artificial Sequence: Synthetic oligonucleotide
  Sense strand starting at position 1494 of SEQ ID NO: 1241481
uaggcucgcugccuuaaau

SEQ ID NO: 1275833 - RNA, 19 nt, Artificial Sequence
  Description of Artificial Sequence: Synthetic oligonucleotide
  Antisense strand to SEQ ID NO: 1275832
auuuaaggcagcgagccua

SEQ ID NO: 1275834 - RNA, 19 nt, Artificial Sequence
  Description of Artificial Sequence: Synthetic oligonucleotide
  Sense strand starting at position 2041 of SEQ ID NO: 1241481
acgguccuucaagagugau

SEQ ID NO: 1275835 - RNA, 19 nt, Artificial Sequence
  Description of Artificial Sequence: Synthetic oligonucleotide
  Antisense strand to SEQ ID NO: 1275834
aucacucuugaaggaccgu

SEQ ID NO: 1275836 - RNA, 19 nt, Artificial Sequence
  Description of Artificial Sequence: Synthetic oligonucleotide
  Sense strand starting at position 2222 of SEQ ID NO: 1241481
uucugaagacuguguagau

SEQ ID NO: 1275837 - RNA, 19 nt, Artificial Sequence
  Description of Artificial Sequence: Synthetic oligonucleotide
  Antisense strand to SEQ ID NO: 1275836
aucuacacagucuucagaa

SEQ ID NO: 1275838 - RNA, 19 nt, Artificial Sequence
  Description of Artificial Sequence: Synthetic oligonucleotide
  Sense strand starting at position 2223 of SEQ ID NO: 1241481
ucugaagacuguguagaua

SEQ ID NO: 1275839 - RNA, 19 nt, Artificial Sequence
  Description of Artificial Sequence: Synthetic oligonucleotide
  Antisense strand to SEQ ID NO: 1275838
uaucuacacagucuucaga

SEQ ID NO: 1275840 - RNA, 19 nt, Artificial Sequence
  Description of Artificial Sequence: Synthetic oligonucleotide
  Sense strand starting at position 2320 of SEQ ID NO: 1241481
caccgaguugcucggaaga

SEQ ID NO: 1275841 - RNA, 19 nt, Artificial Sequence
  Description of Artificial Sequence: Synthetic oligonucleotide
  Antisense strand to SEQ ID NO: 1275840
ucuuccgagcaacucggug

SEQ ID NO: 1275842 - RNA, 19 nt, Artificial Sequence
  Description of Artificial Sequence: Synthetic oligonucleotide
  Sense strand starting at position 2396 of SEQ ID NO: 1241481
aagucuuugcgcugccgaa

SEQ ID NO: 1275843 - RNA, 19 nt, Artificial Sequence
  Description of Artificial Sequence: Synthetic oligonucleotide
  Antisense strand to SEQ ID NO: 1275842
uucggcagcgcaaagacuu

SEQ ID NO: 1275844 - RNA, 19 nt, Artificial Sequence
  Description of Artificial Sequence: Synthetic oligonucleotide
  Sense strand starting at position 2397 of SEQ ID NO: 1241481
agucuuugcgcugccgaau

SEQ ID NO: 1275845 - RNA, 19 nt, Artificial Sequence
  Description of Artificial Sequence: Synthetic oligonucleotide
  Antisense strand to SEQ ID NO: 1275844
auucggcagcgcaaagacu

SEQ ID NO: 1275846 - RNA, 19 nt, Artificial Sequence
  Description of Artificial Sequence: Synthetic oligonucleotide
  Sense strand starting at position 2501 of SEQ ID NO: 1241481
caaagaggcuuugagaacu

SEQ ID NO: 1275847 - RNA, 19 nt, Artificial Sequence
  Description of Artificial Sequence: Synthetic oligonucleotide
  Antisense strand to SEQ ID NO: 1275846
aguucucaaagccucuuug

SEQ ID NO: 1275848 - RNA, 19 nt, Artificial Sequence
  Description of Artificial Sequence: Synthetic oligonucleotide
  Sense strand starting at position 2507 of SEQ ID NO: 1241481
ggcuuugagaacugucccu

SEQ ID NO: 1275849 - RNA, 19 nt, Artificial Sequence
  Description of Artificial Sequence: Synthetic oligonucleotide
  Antisense strand to SEQ ID NO: 1275848
agggacaguucucaaagcc

SEQ ID NO: 1275850 - RNA, 19 nt, Artificial Sequence
  Description of Artificial Sequence: Synthetic oligonucleotide
  Sense strand starting at position 2535 of SEQ ID NO: 1241481
gcccuugaugggcguagau

SEQ ID NO: 1275851 - RNA, 19 nt, Artificial Sequence
  Description of Artificial Sequence: Synthetic oligonucleotide
  Antisense strand to SEQ ID NO: 1275850
aucuacgcccaucaagggc

SEQ ID NO: 1275852 - RNA, 19 nt, Artificial Sequence
  Description of Artificial Sequence: Synthetic oligonucleotide
  Sense strand starting at position 2639 of SEQ ID NO: 1241481
cuagaacuguagucuggaa

SEQ ID NO: 1275853 - RNA, 19 nt, Artificial Sequence
  Description of Artificial Sequence: Synthetic oligonucleotide
  Antisense strand to SEQ ID NO: 1275852
uuccagacuacaguucuag

SEQ ID NO: 1275854 - RNA, 19 nt, Artificial Sequence
  Description of Artificial Sequence: Synthetic oligonucleotide
  Sense strand starting at position 2646 of SEQ ID NO: 1241481
uguagucuggaaugaaucu

SEQ ID NO: 1275855 - RNA, 19 nt, Artificial Sequence
  Description of Artificial Sequence: Synthetic oligonucleotide
  Antisense strand to SEQ ID NO: 1275854
agauucauuccagacuaca

SEQ ID NO: 1275856 - RNA, 19 nt, Artificial Sequence
  Description of Artificial Sequence: Synthetic oligonucleotide
  Sense strand starting at position 2655 of SEQ ID NO: 1241481
gaaugaaucucugacccga

SEQ ID NO: 1275857 - RNA, 19 nt, Artificial Sequence
  Description of Artificial Sequence: Synthetic oligonucleotide
  Antisense strand to SEQ ID NO: 1275856
ucgggucagagauucauuc

SEQ ID NO: 1275858 - RNA, 19 nt, Artificial Sequence
  Description of Artificial Sequence: Synthetic oligonucleotide
  Sense strand starting at position 2657 of SEQ ID NO: 1241481
augaaucucugacccgaua

SEQ ID NO: 1275859 - RNA, 19 nt, Artificial Sequence
  Description of Artificial Sequence: Synthetic oligonucleotide
  Antisense strand to SEQ ID NO: 1275858
uaucgggucagagauucau

SEQ ID NO: 1275860 - RNA, 19 nt, Artificial Sequence
  Description of Artificial Sequence: Synthetic oligonucleotide
  Sense strand starting at position 3096 of SEQ ID NO: 1241481
aggucagacguuuacaaac

SEQ ID NO: 1275861 - RNA, 19 nt, Artificial Sequence
  Description of Artificial Sequence: Synthetic oligonucleotide
  Antisense strand to SEQ ID NO: 1275860
guuuguaaacgucugaccu

SEQ ID NO: 1275862 - RNA, 19 nt, Artificial Sequence
  Description of Artificial Sequence: Synthetic oligonucleotide
  Sense strand starting at position 3137 of SEQ ID NO: 1241481
gcgcccguuacucuaauga

SEQ ID NO: 1275863 - RNA, 19 nt, Artificial Sequence
  Description of Artificial Sequence: Synthetic oligonucleotide
  Antisense strand to SEQ ID NO: 1275862
ucauuagaguaacgggcgc

SEQ ID NO: 1275864 - RNA, 19 nt, Artificial Sequence
  Description of Artificial Sequence: Synthetic oligonucleotide
  Sense strand starting at position 3141 of SEQ ID NO: 1241481
ccguuacucuaaugagaaa

SEQ ID NO: 1275865 - RNA, 19 nt, Artificial Sequence
  Description of Artificial Sequence: Synthetic oligonucleotide
  Antisense strand to SEQ ID NO: 1275864
uuucucauuagaguaacgg

SEQ ID NO: 1275866 - RNA, 19 nt, Artificial Sequence
  Description of Artificial Sequence: Synthetic oligonucleotide
  Sense strand starting at position 3481 of SEQ ID NO: 1241481
uuggucuccucagguuaca

SEQ ID NO: 1275867 - RNA, 19 nt, Artificial Sequence
  Description of Artificial Sequence: Synthetic oligonucleotide
  Antisense strand to SEQ ID NO: 1275866
uguaaccugaggagaccaa

SEQ ID NO: 1275868 - RNA, 19 nt, Artificial Sequence
  Description of Artificial Sequence: Synthetic oligonucleotide
  Sense strand starting at position 3764 of SEQ ID NO: 1241481
agcguuucuccaugugucu

SEQ ID NO: 1275869 - RNA, 19 nt, Artificial Sequence
  Description of Artificial Sequence: Synthetic oligonucleotide
  Antisense strand to SEQ ID NO: 1275868
agacacauggagaaacgcu

SEQ ID NO: 1275870 - RNA, 19 nt, Artificial Sequence
  Description of Artificial Sequence: Synthetic oligonucleotide
  Sense strand starting at position 3980 of SEQ ID NO: 1241481
gagagugguugagauuguu

SEQ ID NO: 1275871 - RNA, 19 nt, Artificial Sequence
  Description of Artificial Sequence: Synthetic oligonucleotide
  Antisense strand to SEQ ID NO: 1275870
aacaaucucaaccacucuc

SEQ ID NO: 1275872 - RNA, 19 nt, Artificial Sequence
  Description of Artificial Sequence: Synthetic oligonucleotide
  Sense strand starting at position 16 of SEQ ID NO: 1241482
uaggucaggcucuagaaau

SEQ ID NO: 1275873 - RNA, 19 nt, Artificial Sequence
  Description of Artificial Sequence: Synthetic oligonucleotide
  Antisense strand to SEQ ID NO: 1275872
auuucuagagccugaccua

SEQ ID NO: 1275874 - RNA, 19 nt, Artificial Sequence
  Description of Artificial Sequence: Synthetic oligonucleotide
  Sense strand starting at position 69 of SEQ ID NO: 1241482
guggaaaucugcuuagguc

SEQ ID NO: 1275875 - RNA, 19 nt, Artificial Sequence
  Description of Artificial Sequence: Synthetic oligonucleotide
  Antisense strand to SEQ ID NO: 1275874
gaccuaagcagauuuccac

SEQ ID NO: 1275876 - RNA, 19 nt, Artificial Sequence
  Description of Artificial Sequence: Synthetic oligonucleotide
  Sense strand starting at position 70 of SEQ ID NO: 1241482
uggaaaucugcuuaggucu

SEQ ID NO: 1275877 - RNA, 19 nt, Artificial Sequence
  Description of Artificial Sequence: Synthetic oligonucleotide
  Antisense strand to SEQ ID NO: 1275876
agaccuaagcagauuucca

SEQ ID NO: 1275878 - RNA, 19 nt, Artificial Sequence
  Description of Artificial Sequence: Synthetic oligonucleotide
  Sense strand starting at position 83 of SEQ ID NO: 1241482
aggucuggcaccuauugaa

SEQ ID NO: 1275879 - RNA, 19 nt, Artificial Sequence
  Description of Artificial Sequence: Synthetic oligonucleotide
  Antisense strand to SEQ ID NO: 1275878
uucaauaggugccagaccu

SEQ ID NO: 1275880 - RNA, 19 nt, Artificial Sequence
  Description of Artificial Sequence: Synthetic oligonucleotide
  Sense strand starting at position 175 of SEQ ID NO: 1241482
gggagcacucuauaggcua

SEQ ID NO: 1275881 - RNA, 19 nt, Artificial Sequence
  Description of Artificial Sequence: Synthetic oligonucleotide
  Antisense strand to SEQ ID NO: 1275880
uagccuauagagugcuccc

SEQ ID NO: 1275882 - RNA, 19 nt, Artificial Sequence
  Description of Artificial Sequence: Synthetic oligonucleotide
  Sense strand starting at position 211 of SEQ ID NO: 1241482
ccuaguugauccuccuaca

SEQ ID NO: 1275883 - RNA, 19 nt, Artificial Sequence
  Description of Artificial Sequence: Synthetic oligonucleotide
  Antisense strand to SEQ ID NO: 1275882
uguaggaggaucaacuagg

SEQ ID NO: 1275884 - RNA, 19 nt, Artificial Sequence
  Description of Artificial Sequence: Synthetic oligonucleotide
  Sense strand starting at position 284 of SEQ ID NO: 1241482
guugcccucuuguaaauca

SEQ ID NO: 1275885 - RNA, 19 nt, Artificial Sequence
  Description of Artificial Sequence: Synthetic oligonucleotide
  Antisense strand to SEQ ID NO: 1275884
ugauuuacaagagggcaac

SEQ ID NO: 1275886 - RNA, 19 nt, Artificial Sequence
  Description of Artificial Sequence: Synthetic oligonucleotide
  Sense strand starting at position 291 of SEQ ID NO: 1241482
ucuuguaaaucauccagag

SEQ ID NO: 1275887 - RNA, 19 nt, Artificial Sequence
  Description of Artificial Sequence: Synthetic oligonucleotide
  Antisense strand to SEQ ID NO: 1275886
cucuggaugauuuacaaga

SEQ ID NO: 1275888 - RNA, 19 nt, Artificial Sequence
  Description of Artificial Sequence: Synthetic oligonucleotide
  Sense strand starting at position 395 of SEQ ID NO: 1241482
gcaugaaacuagugucuuc

SEQ ID NO: 1275889 - RNA, 19 nt, Artificial Sequence
  Description of Artificial Sequence: Synthetic oligonucleotide
  Antisense strand to SEQ ID NO: 1275888
gaagacacuaguuucaugc

SEQ ID NO: 1275890 - RNA, 19 nt, Artificial Sequence
  Description of Artificial Sequence: Synthetic oligonucleotide
  Sense strand starting at position 1574 of SEQ ID NO: 1241482
ugaguccaguucugucaaa

SEQ ID NO: 1275891 - RNA, 19 nt, Artificial Sequence
  Description of Artificial Sequence: Synthetic oligonucleotide
  Antisense strand to SEQ ID NO: 1275890
uuugacagaacuggacuca

SEQ ID NO: 1275892 - RNA, 19 nt, Artificial Sequence
  Description of Artificial Sequence: Synthetic oligonucleotide
  Sense strand starting at position 1633 of SEQ ID NO: 1241482
aggugagauggcuauguuc

SEQ ID NO: 1275893 - RNA, 19 nt, Artificial Sequence
  Description of Artificial Sequence: Synthetic oligonucleotide
  Antisense strand to SEQ ID NO: 1275892
gaacauagccaucucaccu

SEQ ID NO: 1275894 - RNA, 19 nt, Artificial Sequence
  Description of Artificial Sequence: Synthetic oligonucleotide
  Sense strand starting at position 1635 of SEQ ID NO: 1241482
gugagauggcuauguuccu

SEQ ID NO: 1275895 - RNA, 19 nt, Artificial Sequence
  Description of Artificial Sequence: Synthetic oligonucleotide
  Antisense strand to SEQ ID NO: 1275894
aggaacauagccaucucac

SEQ ID NO: 1275896 - RNA, 19 nt, Artificial Sequence
  Description of Artificial Sequence: Synthetic oligonucleotide
  Sense strand starting at position 1640 of SEQ ID NO: 1241482
auggcuauguuccuugagu

SEQ ID NO: 1275897 - RNA, 19 nt, Artificial Sequence
  Description of Artificial Sequence: Synthetic oligonucleotide
  Antisense strand to SEQ ID NO: 1275896
acucaaggaacauagccau

SEQ ID NO: 1275898 - RNA, 19 nt, Artificial Sequence
  Description of Artificial Sequence: Synthetic oligonucleotide
  Sense strand starting at position 1641 of SEQ ID NO: 1241482
uggcuauguuccuugagug

SEQ ID NO: 1275899 - RNA, 19 nt, Artificial Sequence
  Description of Artificial Sequence: Synthetic oligonucleotide
  Antisense strand to SEQ ID NO: 1275898
cacucaaggaacauagcca

SEQ ID NO: 1275900 - RNA, 19 nt, Artificial Sequence
  Description of Artificial Sequence: Synthetic oligonucleotide
  Sense strand starting at position 1916 of SEQ ID NO: 1241482
gggcgacucacacaugaac

SEQ ID NO: 1275901 - RNA, 19 nt, Artificial Sequence
  Description of Artificial Sequence: Synthetic oligonucleotide
  Antisense strand to SEQ ID NO: 1275900
guucaugugugagucgccc

SEQ ID NO: 1275902 - RNA, 19 nt, Artificial Sequence
  Description of Artificial Sequence: Synthetic oligonucleotide
  Sense strand starting at position 2186 of SEQ ID NO: 1241482
ccgccaucugccucucauu

SEQ ID NO: 1275903 - RNA, 19 nt, Artificial Sequence
  Description of Artificial Sequence: Synthetic oligonucleotide
  Antisense strand to SEQ ID NO: 1275902
aaugagaggcagauggcgg

SEQ ID NO: 1275904 - RNA, 19 nt, Artificial Sequence
  Description of Artificial Sequence: Synthetic oligonucleotide
  Sense strand starting at position 2556 of SEQ ID NO: 1241482
uaggcucgcugccuuaaau

SEQ ID NO: 1275905 - RNA, 19 nt, Artificial Sequence
  Description of Artificial Sequence: Synthetic oligonucleotide
  Antisense strand to SEQ ID NO: 1275904
auuuaaggcagcgagccua

SEQ ID NO: 1275906 - RNA, 19 nt, Artificial Sequence
  Description of Artificial Sequence: Synthetic oligonucleotide
  Sense strand starting at position 3103 of SEQ ID NO: 1241482
acgguccuucaagagugau

SEQ ID NO: 1275907 - RNA, 19 nt, Artificial Sequence
  Description of Artificial Sequence: Synthetic oligonucleotide
  Antisense strand to SEQ ID NO: 1275906
aucacucuugaaggaccgu

SEQ ID NO: 1275908 - RNA, 19 nt, Artificial Sequence
  Description of Artificial Sequence: Synthetic oligonucleotide
  Sense strand starting at position 3284 of SEQ ID NO: 1241482
uucugaagacuguguagau

SEQ ID NO: 1275909 - RNA, 19 nt, Artificial Sequence
  Description of Artificial Sequence: Synthetic oligonucleotide
  Antisense strand to SEQ ID NO: 1275908
aucuacacagucuucagaa

SEQ ID NO: 1275910 - RNA, 19 nt, Artificial Sequence
  Description of Artificial Sequence: Synthetic oligonucleotide
  Sense strand starting at position 3285 of SEQ ID NO: 1241482
ucugaagacuguguagaua

SEQ ID NO: 1275911 - RNA, 19 nt, Artificial Sequence
  Description of Artificial Sequence: Synthetic oligonucleotide
  Antisense strand to SEQ ID NO: 1275910
uaucuacacagucuucaga

SEQ ID NO: 1275912 - RNA, 19 nt, Artificial Sequence
  Description of Artificial Sequence: Synthetic oligonucleotide
  Sense strand starting at position 3382 of SEQ ID NO: 1241482
caccgaguugcucggaaga

SEQ ID NO: 1275913 - RNA, 19 nt, Artificial Sequence
  Description of Artificial Sequence: Synthetic oligonucleotide
  Antisense strand to SEQ ID NO: 1275912
ucuuccgagcaacucggug

SEQ ID NO: 1275914 - RNA, 19 nt, Artificial Sequence
  Description of Artificial Sequence: Synthetic oligonucleotide
  Sense strand starting at position 3458 of SEQ ID NO: 1241482
aagucuuugcgcugccgaa

SEQ ID NO: 1275915 - RNA, 19 nt, Artificial Sequence
  Description of Artificial Sequence: Synthetic oligonucleotide
  Antisense strand to SEQ ID NO: 1275914
uucggcagcgcaaagacuu

SEQ ID NO: 1275916 - RNA, 19 nt, Artificial Sequence
  Description of Artificial Sequence: Synthetic oligonucleotide
  Sense strand starting at position 3459 of SEQ ID NO: 1241482
agucuuugcgcugccgaau

SEQ ID NO: 1275917 - RNA, 19 nt, Artificial Sequence
  Description of Artificial Sequence: Synthetic oligonucleotide
  Antisense strand to SEQ ID NO: 1275916
auucggcagcgcaaagacu

SEQ ID NO: 1275918 - RNA, 19 nt, Artificial Sequence
  Description of Artificial Sequence: Synthetic oligonucleotide
  Sense strand starting at position 3563 of SEQ ID NO: 1241482
caaagaggcuuugagaacu

SEQ ID NO: 1275919 - RNA, 19 nt, Artificial Sequence
  Description of Artificial Sequence: Synthetic oligonucleotide
  Antisense strand to SEQ ID NO: 1275918
aguucucaaagccucuuug

SEQ ID NO: 1275920 - RNA, 19 nt, Artificial Sequence
  Description of Artificial Sequence: Synthetic oligonucleotide
  Sense strand starting at position 3569 of SEQ ID NO: 1241482
ggcuuugagaacugucccu

SEQ ID NO: 1275921 - RNA, 19 nt, Artificial Sequence
  Description of Artificial Sequence: Synthetic oligonucleotide
  Antisense strand to SEQ ID NO: 1275920
agggacaguucucaaagcc

SEQ ID NO: 1275922 - RNA, 19 nt, Artificial Sequence
  Description of Artificial Sequence: Synthetic oligonucleotide
  Sense strand starting at position 3597 of SEQ ID NO: 1241482
gcccuugaugggcguagau

SEQ ID NO: 1275923 - RNA, 19 nt, Artificial Sequence
  Description of Artificial Sequence: Synthetic oligonucleotide
  Antisense strand to SEQ ID NO: 1275922
aucuacgcccaucaagggc

SEQ ID NO: 1275924 - RNA, 19 nt, Artificial Sequence
  Description of Artificial Sequence: Synthetic oligonucleotide
  Sense strand starting at position 3701 of SEQ ID NO: 1241482
cuagaacuguagucuggaa

SEQ ID NO: 1275925 - RNA, 19 nt, Artificial Sequence
  Description of Artificial Sequence: Synthetic oligonucleotide
  Antisense strand to SEQ ID NO: 1275924
uuccagacuacaguucuag

SEQ ID NO: 1275926 - RNA, 19 nt, Artificial Sequence
  Description of Artificial Sequence: Synthetic oligonucleotide
  Sense strand starting at position 3708 of SEQ ID NO: 1241482
uguagucuggaaugaaucu

SEQ ID NO: 1275927 - RNA, 19 nt, Artificial Sequence
  Description of Artificial Sequence: Synthetic oligonucleotide
  Antisense strand to SEQ ID NO: 1275926
agauucauuccagacuaca

SEQ ID NO: 1275928 - RNA, 19 nt, Artificial Sequence
  Description of Artificial Sequence: Synthetic oligonucleotide
  Sense strand starting at position 3717 of SEQ ID NO: 1241482
gaaugaaucucugacccga

SEQ ID NO: 1275929 - RNA, 19 nt, Artificial Sequence
  Description of Artificial Sequence: Synthetic oligonucleotide
  Antisense strand to SEQ ID NO: 1275928
ucgggucagagauucauuc

SEQ ID NO: 1275930 - RNA, 19 nt, Artificial Sequence
  Description of Artificial Sequence: Synthetic oligonucleotide
  Sense strand starting at position 3719 of SEQ ID NO: 1241482
augaaucucugacccgaua

SEQ ID NO: 1275931 - RNA, 19 nt, Artificial Sequence
  Description of Artificial Sequence: Synthetic oligonucleotide
  Antisense strand to SEQ ID NO: 1275930
uaucgggucagagauucau

SEQ ID NO: 1275932 - RNA, 19 nt, Artificial Sequence
  Description of Artificial Sequence: Synthetic oligonucleotide
  Sense strand starting at position 87 of SEQ ID NO: 1241483
uaggucaggcucuagaaau

SEQ ID NO: 1275933 - RNA, 19 nt, Artificial Sequence
  Description of Artificial Sequence: Synthetic oligonucleotide
  Antisense strand to SEQ ID NO: 1275932
auuucuagagccugaccua

SEQ ID NO: 1275934 - RNA, 19 nt, Artificial Sequence
  Description of Artificial Sequence: Synthetic oligonucleotide
  Sense strand starting at position 140 of SEQ ID NO: 1241483
guggaaaucugcuuagguc

SEQ ID NO: 1275935 - RNA, 19 nt, Artificial Sequence
  Description of Artificial Sequence: Synthetic oligonucleotide
  Antisense strand to SEQ ID NO: 1275934
gaccuaagcagauuuccac

SEQ ID NO: 1275936 - RNA, 19 nt, Artificial Sequence
  Description of Artificial Sequence: Synthetic oligonucleotide
  Sense strand starting at position 141 of SEQ ID NO: 1241483
uggaaaucugcuuaggucu

SEQ ID NO: 1275937 - RNA, 19 nt, Artificial Sequence
  Description of Artificial Sequence: Synthetic oligonucleotide
  Antisense strand to SEQ ID NO: 1275936
agaccuaagcagauuucca

SEQ ID NO: 1275938 - RNA, 19 nt, Artificial Sequence
  Description of Artificial Sequence: Synthetic oligonucleotide
  Sense strand starting at position 154 of SEQ ID NO: 1241483
aggucuggcaccuauugaa

SEQ ID NO: 1275939 - RNA, 19 nt, Artificial Sequence
  Description of Artificial Sequence: Synthetic oligonucleotide
  Antisense strand to SEQ ID NO: 1275938
uucaauaggugccagaccu

SEQ ID NO: 1275940 - RNA, 19 nt, Artificial Sequence
  Description of Artificial Sequence: Synthetic oligonucleotide
  Sense strand starting at position 246 of SEQ ID NO: 1241483
gggagcacucuauaggcua

SEQ ID NO: 1275941 - RNA, 19 nt, Artificial Sequence
  Description of Artificial Sequence: Synthetic oligonucleotide
  Antisense strand to SEQ ID NO: 1275940
uagccuauagagugcuccc

SEQ ID NO: 1275942 - RNA, 19 nt, Artificial Sequence
  Description of Artificial Sequence: Synthetic oligonucleotide
  Sense strand starting at position 282 of SEQ ID NO: 1241483
ccuaguugauccuccuaca

SEQ ID NO: 1275943 - RNA, 19 nt, Artificial Sequence
  Description of Artificial Sequence: Synthetic oligonucleotide
  Antisense strand to SEQ ID NO: 1275942
uguaggaggaucaacuagg

SEQ ID NO: 1275944 - RNA, 19 nt, Artificial Sequence
  Description of Artificial Sequence: Synthetic oligonucleotide
  Sense strand starting at position 355 of SEQ ID NO: 1241483
guugcccucuuguaaauca

SEQ ID NO: 1275945 - RNA, 19 nt, Artificial Sequence
  Description of Artificial Sequence: Synthetic oligonucleotide
  Antisense strand to SEQ ID NO: 1275944
ugauuuacaagagggcaac

SEQ ID NO: 1275946 - RNA, 19 nt, Artificial Sequence
  Description of Artificial Sequence: Synthetic oligonucleotide
  Sense strand starting at position 362 of SEQ ID NO: 1241483
ucuuguaaaucauccagag

SEQ ID NO: 1275947 - RNA, 19 nt, Artificial Sequence
  Description of Artificial Sequence: Synthetic oligonucleotide
  Antisense strand to SEQ ID NO: 1275946
cucuggaugauuuacaaga

SEQ ID NO: 1275948 - RNA, 19 nt, Artificial Sequence
  Description of Artificial Sequence: Synthetic oligonucleotide
  Sense strand starting at position 466 of SEQ ID NO: 1241483
gcaugaaacuagugucuuc

SEQ ID NO: 1275949 - RNA, 19 nt, Artificial Sequence
  Description of Artificial Sequence: Synthetic oligonucleotide
  Antisense strand to SEQ ID NO: 1275948
gaagacacuaguuucaugc

SEQ ID NO: 1275950 - RNA, 19 nt, Artificial Sequence
  Description of Artificial Sequence: Synthetic oligonucleotide
  Sense strand starting at position 1645 of SEQ ID NO: 1241483
ugaguccaguucugucaaa

SEQ ID NO: 1275951 - RNA, 19 nt, Artificial Sequence
  Description of Artificial Sequence: Synthetic oligonucleotide
  Antisense strand to SEQ ID NO: 1275950
uuugacagaacuggacuca

SEQ ID NO: 1275952 - RNA, 19 nt, Artificial Sequence
  Description of Artificial Sequence: Synthetic oligonucleotide
  Sense strand starting at position 1704 of SEQ ID NO: 1241483
aggugagauggcuauguuc

SEQ ID NO: 1275953 - RNA, 19 nt, Artificial Sequence
  Description of Artificial Sequence: Synthetic oligonucleotide
  Antisense strand to SEQ ID NO: 1275952
gaacauagccaucucaccu

SEQ ID NO: 1275954 - RNA, 19 nt, Artificial Sequence
  Description of Artificial Sequence: Synthetic oligonucleotide
  Sense strand starting at position 1706 of SEQ ID NO: 1241483
gugagauggcuauguuccu

SEQ ID NO: 1275955 - RNA, 19 nt, Artificial Sequence
  Description of Artificial Sequence: Synthetic oligonucleotide
  Antisense strand to SEQ ID NO: 1275954
aggaacauagccaucucac

SEQ ID NO: 1275956 - RNA, 19 nt, Artificial Sequence
  Description of Artificial Sequence: Synthetic oligonucleotide
  Sense strand starting at position 1711 of SEQ ID NO: 1241483
auggcuauguuccuugagu

SEQ ID NO: 1275957 - RNA, 19 nt, Artificial Sequence
  Description of Artificial Sequence: Synthetic oligonucleotide
  Antisense strand to SEQ ID NO: 1275956
acucaaggaacauagccau

SEQ ID NO: 1275958 - RNA, 19 nt, Artificial Sequence
  Description of Artificial Sequence: Synthetic oligonucleotide
  Sense strand starting at position 1712 of SEQ ID NO: 1241483
uggcuauguuccuugagug

SEQ ID NO: 1275959 - RNA, 19 nt, Artificial Sequence
  Description of Artificial Sequence: Synthetic oligonucleotide
  Antisense strand to SEQ ID NO: 1275958
cacucaaggaacauagcca

SEQ ID NO: 1275960 - RNA, 19 nt, Artificial Sequence
  Description of Artificial Sequence: Synthetic oligonucleotide
  Sense strand starting at position 1987 of SEQ ID NO: 1241483
gggcgacucacacaugaac

SEQ ID NO: 1275961 - RNA, 19 nt, Artificial Sequence
  Description of Artificial Sequence: Synthetic oligonucleotide
  Antisense strand to SEQ ID NO: 1275960
guucaugugugagucgccc

SEQ ID NO: 1275962 - RNA, 19 nt, Artificial Sequence
  Description of Artificial Sequence: Synthetic oligonucleotide
  Sense strand starting at position 2257 of SEQ ID NO: 1241483
ccgccaucugccucucauu

SEQ ID NO: 1275963 - RNA, 19 nt, Artificial Sequence
  Description of Artificial Sequence: Synthetic oligonucleotide
  Antisense strand to SEQ ID NO: 1275962
aaugagaggcagauggcgg

SEQ ID NO: 1275964 - RNA, 19 nt, Artificial Sequence
  Description of Artificial Sequence: Synthetic oligonucleotide
  Sense strand starting at position 2627 of SEQ ID NO: 1241483
uaggcucgcugccuuaaau

SEQ ID NO: 1275965 - RNA, 19 nt, Artificial Sequence
  Description of Artificial Sequence: Synthetic oligonucleotide
  Antisense strand to SEQ ID NO: 1275964
auuuaaggcagcgagccua

SEQ ID NO: 1275966 - RNA, 19 nt, Artificial Sequence
  Description of Artificial Sequence: Synthetic oligonucleotide
  Sense strand starting at position 3174 of SEQ ID NO: 1241483
acgguccuucaagagugau

SEQ ID NO: 1275967 - RNA, 19 nt, Artificial Sequence
  Description of Artificial Sequence: Synthetic oligonucleotide
  Antisense strand to SEQ ID NO: 1275966
aucacucuugaaggaccgu

SEQ ID NO: 1275968 - RNA, 19 nt, Artificial Sequence
  Description of Artificial Sequence: Synthetic oligonucleotide
  Sense strand starting at position 3355 of SEQ ID NO: 1241483
uucugaagacuguguagau

SEQ ID NO: 1275969 - RNA, 19 nt, Artificial Sequence
  Description of Artificial Sequence: Synthetic oligonucleotide
  Antisense strand to SEQ ID NO: 1275968
aucuacacagucuucagaa

SEQ ID NO: 1275970 - RNA, 19 nt, Artificial Sequence
  Description of Artificial Sequence: Synthetic oligonucleotide
  Sense strand starting at position 3356 of SEQ ID NO: 1241483
ucugaagacuguguagaua

SEQ ID NO: 1275971 - RNA, 19 nt, Artificial Sequence
  Description of Artificial Sequence: Synthetic oligonucleotide
  Antisense strand to SEQ ID NO: 1275970
uaucuacacagucuucaga

SEQ ID NO: 1275972 - RNA, 19 nt, Artificial Sequence
  Description of Artificial Sequence: Synthetic oligonucleotide
  Sense strand starting at position 3453 of SEQ ID NO: 1241483
caccgaguugcucggaaga

SEQ ID NO: 1275973 - RNA, 19 nt, Artificial Sequence
  Description of Artificial Sequence: Synthetic oligonucleotide
  Antisense strand to SEQ ID NO: 1275972
ucuuccgagcaacucggug

SEQ ID NO: 1275974 - RNA, 19 nt, Artificial Sequence
  Description of Artificial Sequence: Synthetic oligonucleotide
  Sense strand starting at position 3529 of SEQ ID NO: 1241483
aagucuuugcgcugccgaa

SEQ ID NO: 1275975 - RNA, 19 nt, Artificial Sequence
  Description of Artificial Sequence: Synthetic oligonucleotide
  Antisense strand to SEQ ID NO: 1275974
uucggcagcgcaaagacuu

SEQ ID NO: 1275976 - RNA, 19 nt, Artificial Sequence
  Description of Artificial Sequence: Synthetic oligonucleotide
  Sense strand starting at position 3530 of SEQ ID NO: 1241483
agucuuugcgcugccgaau

SEQ ID NO: 1275977 - RNA, 19 nt, Artificial Sequence
  Description of Artificial Sequence: Synthetic oligonucleotide
  Antisense strand to SEQ ID NO: 1275976
auucggcagcgcaaagacu

SEQ ID NO: 1275978 - RNA, 19 nt, Artificial Sequence
  Description of Artificial Sequence: Synthetic oligonucleotide
  Sense strand starting at position 3634 of SEQ ID NO: 1241483
caaagaggcuuugagaacu

SEQ ID NO: 1275979 - RNA, 19 nt, Artificial Sequence
  Description of Artificial Sequence: Synthetic oligonucleotide
  Antisense strand to SEQ ID NO: 1275978
aguucucaaagccucuuug

SEQ ID NO: 1275980 - RNA, 19 nt, Artificial Sequence
  Description of Artificial Sequence: Synthetic oligonucleotide
  Sense strand starting at position 3640 of SEQ ID NO: 1241483
ggcuuugagaacugucccu

SEQ ID NO: 1275981 - RNA, 19 nt, Artificial Sequence
  Description of Artificial Sequence: Synthetic oligonucleotide
  Antisense strand to SEQ ID NO: 1275980
agggacaguucucaaagcc

SEQ ID NO: 1275982 - RNA, 19 nt, Artificial Sequence
  Description of Artificial Sequence: Synthetic oligonucleotide
  Sense strand starting at position 3668 of SEQ ID NO: 1241483
gcccuugaugggcguagau

SEQ ID NO: 1275983 - RNA, 19 nt, Artificial Sequence
  Description of Artificial Sequence: Synthetic oligonucleotide
  Antisense strand to SEQ ID NO: 1275982
aucuacgcccaucaagggc

SEQ ID NO: 1275984 - RNA, 19 nt, Artificial Sequence
  Description of Artificial Sequence: Synthetic oligonucleotide
  Sense strand starting at position 3772 of SEQ ID NO: 1241483
cuagaacuguagucuggaa

SEQ ID NO: 1275985 - RNA, 19 nt, Artificial Sequence
  Description of Artificial Sequence: Synthetic oligonucleotide
  Antisense strand to SEQ ID NO: 1275984
uuccagacuacaguucuag

SEQ ID NO: 1275986 - RNA, 19 nt, Artificial Sequence
  Description of Artificial Sequence: Synthetic oligonucleotide
  Sense strand starting at position 3779 of SEQ ID NO: 1241483
uguagucuggaaugaaucu

SEQ ID NO: 1275987 - RNA, 19 nt, Artificial Sequence
  Description of Artificial Sequence: Synthetic oligonucleotide
  Antisense strand to SEQ ID NO: 1275986
agauucauuccagacuaca

SEQ ID NO: 1275988 - RNA, 19 nt, Artificial Sequence
  Description of Artificial Sequence: Synthetic oligonucleotide
  Sense strand starting at position 3788 of SEQ ID NO: 1241483
gaaugaaucucugacccga

SEQ ID NO: 1275989 - RNA, 19 nt, Artificial Sequence
  Description of Artificial Sequence: Synthetic oligonucleotide
  Antisense strand to SEQ ID NO: 1275988
ucgggucagagauucauuc

SEQ ID NO: 1275990 - RNA, 19 nt, Artificial Sequence
  Description of Artificial Sequence: Synthetic oligonucleotide
  Sense strand starting at position 3790 of SEQ ID NO: 1241483
augaaucucugacccgaua

SEQ ID NO: 1275991 - RNA, 19 nt, Artificial Sequence
  Description of Artificial Sequence: Synthetic oligonucleotide
  Antisense strand to SEQ ID NO: 1275990
uaucgggucagagauucau

SEQ ID NO: 1275992 - RNA, 19 nt, Artificial Sequence
  Description of Artificial Sequence: Synthetic oligonucleotide
  Sense strand starting at position 64 of SEQ ID NO: 1241484
ccagguagccauggauaga

SEQ ID NO: 1275993 - RNA, 19 nt, Artificial Sequence
  Description of Artificial Sequence: Synthetic oligonucleotide
  Antisense strand to SEQ ID NO: 1275992
ucuauccauggcuaccugg

SEQ ID NO: 1275994 - RNA, 19 nt, Artificial Sequence
  Description of Artificial Sequence: Synthetic oligonucleotide
  Sense strand starting at position 95 of SEQ ID NO: 1241484
acacguguggccuggaaga

SEQ ID NO: 1275995 - RNA, 19 nt, Artificial Sequence
  Description of Artificial Sequence: Synthetic oligonucleotide
  Antisense strand to SEQ ID NO: 1275994
ucuuccaggccacacgugu

SEQ ID NO: 1275996 - RNA, 19 nt, Artificial Sequence
  Description of Artificial Sequence: Synthetic oligonucleotide
  Sense strand starting at position 182 of SEQ ID NO: 1241484
guagucuuaucuucugaau

SEQ ID NO: 1275997 - RNA, 19 nt, Artificial Sequence
  Description of Artificial Sequence: Synthetic oligonucleotide
  Antisense strand to SEQ ID NO: 1275996
auucagaagauaagacuac

SEQ ID NO: 1275998 - RNA, 19 nt, Artificial Sequence
  Description of Artificial Sequence: Synthetic oligonucleotide
  Sense strand starting at position 549 of SEQ ID NO: 1241484
ccagaagugccucagcaau

SEQ ID NO: 1275999 - RNA, 19 nt, Artificial Sequence
  Description of Artificial Sequence: Synthetic oligonucleotide
  Antisense strand to SEQ ID NO: 1275998
auugcugaggcacuucugg

SEQ ID NO: 1276000 - RNA, 19 nt, Artificial Sequence
  Description of Artificial Sequence: Synthetic oligonucleotide
  Sense strand starting at position 551 of SEQ ID NO: 1241484
agaagugccucagcaauuu

SEQ ID NO: 1276001 - RNA, 19 nt, Artificial Sequence
  Description of Artificial Sequence: Synthetic oligonucleotide
  Antisense strand to SEQ ID NO: 1276000
aaauugcugaggcacuucu

SEQ ID NO: 1276002 - RNA, 19 nt, Artificial Sequence
  Description of Artificial Sequence: Synthetic oligonucleotide
  Sense strand starting at position 596 of SEQ ID NO: 1241484
uggaguggagucuacgaau

SEQ ID NO: 1276003 - RNA, 19 nt, Artificial Sequence
  Description of Artificial Sequence: Synthetic oligonucleotide
  Antisense strand to SEQ ID NO: 1276002
auucguagacuccacucca

SEQ ID NO: 1276004 - RNA, 19 nt, Artificial Sequence
  Description of Artificial Sequence: Synthetic oligonucleotide
  Sense strand starting at position 602 of SEQ ID NO: 1241484
ggagucuacgaaugcaaga

SEQ ID NO: 1276005 - RNA, 19 nt, Artificial Sequence
  Description of Artificial Sequence: Synthetic oligonucleotide
  Antisense strand to SEQ ID NO: 1276004
ucuugcauucguagacucc

SEQ ID NO: 1276006 - RNA, 19 nt, Artificial Sequence
  Description of Artificial Sequence: Synthetic oligonucleotide
  Sense strand starting at position 630 of SEQ ID NO: 1241484
gaaaguaagccauggacca

SEQ ID NO: 1276007 - RNA, 19 nt, Artificial Sequence
  Description of Artificial Sequence: Synthetic oligonucleotide
  Antisense strand to SEQ ID NO: 1276006
ugguccauggcuuacuuuc

SEQ ID NO: 1276008 - RNA, 19 nt, Artificial Sequence
  Description of Artificial Sequence: Synthetic oligonucleotide
  Sense strand starting at position 765 of SEQ ID NO: 1241484
ucaccaaaucaguggaauu

SEQ ID NO: 1276009 - RNA, 19 nt, Artificial Sequence
  Description of Artificial Sequence: Synthetic oligonucleotide
  Antisense strand to SEQ ID NO: 1276008
aauuccacugauuugguga

SEQ ID NO: 1276010 - RNA, 19 nt, Artificial Sequence
  Description of Artificial Sequence: Synthetic oligonucleotide
  Sense strand starting at position 990 of SEQ ID NO: 1241484
gaucacuuccauggucagu

SEQ ID NO: 1276011 - RNA, 19 nt, Artificial Sequence
  Description of Artificial Sequence: Synthetic oligonucleotide
  Antisense strand to SEQ ID NO: 1276010
acugaccauggaagugauc

SEQ ID NO: 1276012 - RNA, 19 nt, Artificial Sequence
  Description of Artificial Sequence: Synthetic oligonucleotide
  Sense strand starting at position 1172 of SEQ ID NO: 1241484
agguuauuaugagcugagu

SEQ ID NO: 1276013 - RNA, 19 nt, Artificial Sequence
  Description of Artificial Sequence: Synthetic oligonucleotide
  Antisense strand to SEQ ID NO: 1276012
acucagcucauaauaaccu

SEQ ID NO: 1276014 - RNA, 19 nt, Artificial Sequence
  Description of Artificial Sequence: Synthetic oligonucleotide
  Sense strand starting at position 1175 of SEQ ID NO: 1241484
uuauuaugagcugaguguu

SEQ ID NO: 1276015 - RNA, 19 nt, Artificial Sequence
  Description of Artificial Sequence: Synthetic oligonucleotide
  Antisense strand to SEQ ID NO: 1276014
aacacucagcucauaauaa

SEQ ID NO: 1276016 - RNA, 19 nt, Artificial Sequence
  Description of Artificial Sequence: Synthetic oligonucleotide
  Sense strand starting at position 2152 of SEQ ID NO: 1241484
ggguucaucggagaaacuc

SEQ ID NO: 1276017 - RNA, 19 nt, Artificial Sequence
  Description of Artificial Sequence: Synthetic oligonucleotide
  Antisense strand to SEQ ID NO: 1276016
gaguuucuccgaugaaccc

SEQ ID NO: 1276018 - RNA, 19 nt, Artificial Sequence
  Description of Artificial Sequence: Synthetic oligonucleotide
  Sense strand starting at position 2160 of SEQ ID NO: 1241484
cggagaaacucccugcgau

SEQ ID NO: 1276019 - RNA, 19 nt, Artificial Sequence
  Description of Artificial Sequence: Synthetic oligonucleotide
  Antisense strand to SEQ ID NO: 1276018
aucgcagggaguuucuccg

SEQ ID NO: 1276020 - RNA, 19 nt, Artificial Sequence
  Description of Artificial Sequence: Synthetic oligonucleotide
  Sense strand starting at position 2161 of SEQ ID NO: 1241484
ggagaaacucccugcgaug

SEQ ID NO: 1276021 - RNA, 19 nt, Artificial Sequence
  Description of Artificial Sequence: Synthetic oligonucleotide
  Antisense strand to SEQ ID NO: 1276020
caucgcagggaguuucucc

SEQ ID NO: 1276022 - RNA, 19 nt, Artificial Sequence
  Description of Artificial Sequence: Synthetic oligonucleotide
  Sense strand starting at position 2549 of SEQ ID NO: 1241484
gguguuucugccuauacca

SEQ ID NO: 1276023 - RNA, 19 nt, Artificial Sequence
  Description of Artificial Sequence: Synthetic oligonucleotide
  Antisense strand to SEQ ID NO: 1276022
ugguauaggcagaaacacc

SEQ ID NO: 1276024 - RNA, 19 nt, Artificial Sequence
  Description of Artificial Sequence: Synthetic oligonucleotide
  Sense strand starting at position 2568 of SEQ ID NO: 1241484
ggcucuuugcagcaaagga

SEQ ID NO: 1276025 - RNA, 19 nt, Artificial Sequence
  Description of Artificial Sequence: Synthetic oligonucleotide
  Antisense strand to SEQ ID NO: 1276024
uccuuugcugcaaagagcc

SEQ ID NO: 1276026 - RNA, 19 nt, Artificial Sequence
  Description of Artificial Sequence: Synthetic oligonucleotide
  Sense strand starting at position 2624 of SEQ ID NO: 1241484
ccagguagaaguugugaaa

SEQ ID NO: 1276027 - RNA, 19 nt, Artificial Sequence
  Description of Artificial Sequence: Synthetic oligonucleotide
  Antisense strand to SEQ ID NO: 1276026
uuucacaacuucuaccugg

SEQ ID NO: 1276028 - RNA, 19 nt, Artificial Sequence
  Description of Artificial Sequence: Synthetic oligonucleotide
  Sense strand starting at position 2639 of SEQ ID NO: 1241484
gaaagcuuuggaggaguga

SEQ ID NO: 1276029 - RNA, 19 nt, Artificial Sequence
  Description of Artificial Sequence: Synthetic oligonucleotide
  Antisense strand to SEQ ID NO: 1276028
ucacuccuccaaagcuuuc

SEQ ID NO: 1276030 - RNA, 19 nt, Artificial Sequence
  Description of Artificial Sequence: Synthetic oligonucleotide
  Sense strand starting at position 2660 of SEQ ID NO: 1241484
agccuaaauccuuggagaa

SEQ ID NO: 1276031 - RNA, 19 nt, Artificial Sequence
  Description of Artificial Sequence: Synthetic oligonucleotide
  Antisense strand to SEQ ID NO: 1276030
uucuccaaggauuuaggcu

SEQ ID NO: 1276032 - RNA, 19 nt, Artificial Sequence
  Description of Artificial Sequence: Synthetic oligonucleotide
  Sense strand starting at position 2661 of SEQ ID NO: 1241484
gccuaaauccuuggagaac

SEQ ID NO: 1276033 - RNA, 19 nt, Artificial Sequence
  Description of Artificial Sequence: Synthetic oligonucleotide
  Antisense strand to SEQ ID NO: 1276032
guucuccaaggauuuaggc

SEQ ID NO: 1276034 - RNA, 19 nt, Artificial Sequence
  Description of Artificial Sequence: Synthetic oligonucleotide
  Sense strand starting at position 2785 of SEQ ID NO: 1241484
caaguaaagcaagguguua

SEQ ID NO: 1276035 - RNA, 19 nt, Artificial Sequence
  Description of Artificial Sequence: Synthetic oligonucleotide
  Antisense strand to SEQ ID NO: 1276034
uaacaccuugcuuuacuug

SEQ ID NO: 1276036 - RNA, 19 nt, Artificial Sequence
  Description of Artificial Sequence: Synthetic oligonucleotide
  Sense strand starting at position 2787 of SEQ ID NO: 1241484
aguaaagcaagguguuaau

SEQ ID NO: 1276037 - RNA, 19 nt, Artificial Sequence
  Description of Artificial Sequence: Synthetic oligonucleotide
  Antisense strand to SEQ ID NO: 1276036
auuaacaccuugcuuuacu

SEQ ID NO: 1276038 - RNA, 19 nt, Artificial Sequence
  Description of Artificial Sequence: Synthetic oligonucleotide
  Sense strand starting at position 2833 of SEQ ID NO: 1241484
gcaauagcagaguagcuau

SEQ ID NO: 1276039 - RNA, 19 nt, Artificial Sequence
  Description of Artificial Sequence: Synthetic oligonucleotide
  Antisense strand to SEQ ID NO: 1276038
auagcuacucugcuauugc

SEQ ID NO: 1276040 - RNA, 19 nt, Artificial Sequence
  Description of Artificial Sequence: Synthetic oligonucleotide
  Sense strand starting at position 2863 of SEQ ID NO: 1241484
guagcuauucguuuaugcu

SEQ ID NO: 1276041 - RNA, 19 nt, Artificial Sequence
  Description of Artificial Sequence: Synthetic oligonucleotide
  Antisense strand to SEQ ID NO: 1276040
agcauaaacgaauagcuac

SEQ ID NO: 1276042 - RNA, 19 nt, Artificial Sequence
  Description of Artificial Sequence: Synthetic oligonucleotide
  Sense strand starting at position 2910 of SEQ ID NO: 1241484
aaaggaucgugagccuacu

SEQ ID NO: 1276043 - RNA, 19 nt, Artificial Sequence
  Description of Artificial Sequence: Synthetic oligonucleotide
  Antisense strand to SEQ ID NO: 1276042
aguaggcucacgauccuuu

SEQ ID NO: 1276044 - RNA, 19 nt, Artificial Sequence
  Description of Artificial Sequence: Synthetic oligonucleotide
  Sense strand starting at position 2964 of SEQ ID NO: 1241484
gaggcugaagaaugaguuu

SEQ ID NO: 1276045 - RNA, 19 nt, Artificial Sequence
  Description of Artificial Sequence: Synthetic oligonucleotide
  Antisense strand to SEQ ID NO: 1276044
aaacucauucuucagccuc

SEQ ID NO: 1276046 - RNA, 19 nt, Artificial Sequence
  Description of Artificial Sequence: Synthetic oligonucleotide
  Sense strand starting at position 2967 of SEQ ID NO: 1241484
gcugaagaaugaguuuagu

SEQ ID NO: 1276047 - RNA, 19 nt, Artificial Sequence
  Description of Artificial Sequence: Synthetic oligonucleotide
  Antisense strand to SEQ ID NO: 1276046
acuaaacucauucuucagc

SEQ ID NO: 1276048 - RNA, 19 nt, Artificial Sequence
  Description of Artificial Sequence: Synthetic oligonucleotide
  Sense strand starting at position 3254 of SEQ ID NO: 1241484
guagaauugguacaggcaa

SEQ ID NO: 1276049 - RNA, 19 nt, Artificial Sequence
  Description of Artificial Sequence: Synthetic oligonucleotide
  Antisense strand to SEQ ID NO: 1276048
uugccuguaccaauucuac

SEQ ID NO: 1276050 - RNA, 19 nt, Artificial Sequence
  Description of Artificial Sequence: Synthetic oligonucleotide
  Sense strand starting at position 3322 of SEQ ID NO: 1241484
ucuguaguucugcagagau

SEQ ID NO: 1276051 - RNA, 19 nt, Artificial Sequence
  Description of Artificial Sequence: Synthetic oligonucleotide
  Antisense strand to SEQ ID NO: 1276050
aucucugcagaacuacaga

SEQ ID NO: 1276052 - RNA, 19 nt, Artificial Sequence
  Description of Artificial Sequence: Synthetic oligonucleotide
  Sense strand starting at position 3335 of SEQ ID NO: 1241484
agagauuucuggugauuau

SEQ ID NO: 1276053 - RNA, 19 nt, Artificial Sequence
  Description of Artificial Sequence: Synthetic oligonucleotide
  Antisense strand to SEQ ID NO: 1276052
auaaucaccagaaaucucu

SEQ ID NO: 1276054 - RNA, 19 nt, Artificial Sequence
  Description of Artificial Sequence: Synthetic oligonucleotide
  Sense strand starting at position 3499 of SEQ ID NO: 1241484
uagacccuccaggguaaua

SEQ ID NO: 1276055 - RNA, 19 nt, Artificial Sequence
  Description of Artificial Sequence: Synthetic oligonucleotide
  Antisense strand to SEQ ID NO: 1276054
uauuacccuggagggucua

SEQ ID NO: 1276056 - RNA, 19 nt, Artificial Sequence
  Description of Artificial Sequence: Synthetic oligonucleotide
  Sense strand starting at position 3572 of SEQ ID NO: 1241484
gguuuaugauaugcaaauc

SEQ ID NO: 1276057 - RNA, 19 nt, Artificial Sequence
  Description of Artificial Sequence: Synthetic oligonucleotide
  Antisense strand to SEQ ID NO: 1276056
gauuugcauaucauaaacc

SEQ ID NO: 1276058 - RNA, 19 nt, Artificial Sequence
  Description of Artificial Sequence: Synthetic oligonucleotide
  Sense strand starting at position 3584 of SEQ ID NO: 1241484
gcaaaucuacaaugauuga

SEQ ID NO: 1276059 - RNA, 19 nt, Artificial Sequence
  Description of Artificial Sequence: Synthetic oligonucleotide
  Antisense strand to SEQ ID NO: 1276058
ucaaucauuguagauuugc

SEQ ID NO: 1276060 - RNA, 19 nt, Artificial Sequence
  Description of Artificial Sequence: Synthetic oligonucleotide
  Sense strand starting at position 3609 of SEQ ID NO: 1241484
gugaaacagugacugcaau

SEQ ID NO: 1276061 - RNA, 19 nt, Artificial Sequence
  Description of Artificial Sequence: Synthetic oligonucleotide
  Antisense strand to SEQ ID NO: 1276060
auugcagucacuguuucac

SEQ ID NO: 1276062 - RNA, 19 nt, Artificial Sequence
  Description of Artificial Sequence: Synthetic oligonucleotide
  Sense strand starting at position 3644 of SEQ ID NO: 1241484
agguucuaucuuuacuuga

SEQ ID NO: 1276063 - RNA, 19 nt, Artificial Sequence
  Description of Artificial Sequence: Synthetic oligonucleotide
  Antisense strand to SEQ ID NO: 1276062
ucaaguaaagauagaaccu

SEQ ID NO: 1276064 - RNA, 19 nt, Artificial Sequence
  Description of Artificial Sequence: Synthetic oligonucleotide
  Sense strand starting at position 3646 of SEQ ID NO: 1241484
guucuaucuuuacuugacu

SEQ ID NO: 1276065 - RNA, 19 nt, Artificial Sequence
  Description of Artificial Sequence: Synthetic oligonucleotide
  Antisense strand to SEQ ID NO: 1276064
agucaaguaaagauagaac

SEQ ID NO: 1276066 - RNA, 19 nt, Artificial Sequence
  Description of Artificial Sequence: Synthetic oligonucleotide
  Sense strand starting at position 3669 of SEQ ID NO: 1241484
auuaguuggagaggucagu

SEQ ID NO: 1276067 - RNA, 19 nt, Artificial Sequence
  Description of Artificial Sequence: Synthetic oligonucleotide
  Antisense strand to SEQ ID NO: 1276066
acugaccucuccaacuaau

SEQ ID NO: 1276068 - RNA, 19 nt, Artificial Sequence
  Description of Artificial Sequence: Synthetic oligonucleotide
  Sense strand starting at position 3729 of SEQ ID NO: 1241484
auugaauguuacuuaaggu

SEQ ID NO: 1276069 - RNA, 19 nt, Artificial Sequence
  Description of Artificial Sequence: Synthetic oligonucleotide
  Antisense strand to SEQ ID NO: 1276068
accuuaaguaacauucaau

SEQ ID NO: 1276070 - RNA, 19 nt, Artificial Sequence
  Description of Artificial Sequence: Synthetic oligonucleotide
  Sense strand starting at position 3825 of SEQ ID NO: 1241484
uggaaaugucaggguauaa

SEQ ID NO: 1276071 - RNA, 19 nt, Artificial Sequence
  Description of Artificial Sequence: Synthetic oligonucleotide
  Antisense strand to SEQ ID NO: 1276070
uuauacccugacauuucca

SEQ ID NO: 1276072 - RNA, 19 nt, Artificial Sequence
  Description of Artificial Sequence: Synthetic oligonucleotide
  Sense strand starting at position 21 of SEQ ID NO: 1241485
gagugaggcccagguguua

SEQ ID NO: 1276073 - RNA, 19 nt, Artificial Sequence
  Description of Artificial Sequence: Synthetic oligonucleotide
  Antisense strand to SEQ ID NO: 1276072
uaacaccugggccucacuc

SEQ ID NO: 1276074 - RNA, 19 nt, Artificial Sequence
  Description of Artificial Sequence: Synthetic oligonucleotide
  Sense strand starting at position 284 of SEQ ID NO: 1241485
ggugugauuugggacagga

SEQ ID NO: 1276075 - RNA, 19 nt, Artificial Sequence
  Description of Artificial Sequence: Synthetic oligonucleotide
  Antisense strand to SEQ ID NO: 1276074
uccugucccaaaucacacc

SEQ ID NO: 1276076 - RNA, 19 nt, Artificial Sequence
  Description of Artificial Sequence: Synthetic oligonucleotide
  Sense strand starting at position 332 of SEQ ID NO: 1241485
acguuguguggagaggaaa

SEQ ID NO: 1276077 - RNA, 19 nt, Artificial Sequence
  Description of Artificial Sequence: Synthetic oligonucleotide
  Antisense strand to SEQ ID NO: 1276076
uuuccucuccacacaacgu

SEQ ID NO: 1276078 - RNA, 19 nt, Artificial Sequence
  Description of Artificial Sequence: Synthetic oligonucleotide
  Sense strand starting at position 547 of SEQ ID NO: 1241485
uguauuccucacuguccua

SEQ ID NO: 1276079 - RNA, 19 nt, Artificial Sequence
  Description of Artificial Sequence: Synthetic oligonucleotide
  Antisense strand to SEQ ID NO: 1276078
uaggacagugaggaauaca

SEQ ID NO: 1276080 - RNA, 19 nt, Artificial Sequence
  Description of Artificial Sequence: Synthetic oligonucleotide
  Sense strand starting at position 574 of SEQ ID NO: 1241485
guacaacuguuaucccagu

SEQ ID NO: 1276081 - RNA, 19 nt, Artificial Sequence
  Description of Artificial Sequence: Synthetic oligonucleotide
  Antisense strand to SEQ ID NO: 1276080
acugggauaacaguuguac

SEQ ID NO: 1276082 - RNA, 19 nt, Artificial Sequence
  Description of Artificial Sequence: Synthetic oligonucleotide
  Sense strand starting at position 732 of SEQ ID NO: 1241485
cggcauuugggaggucuca

SEQ ID NO: 1276083 - RNA, 19 nt, Artificial Sequence
  Description of Artificial Sequence: Synthetic oligonucleotide
  Antisense strand to SEQ ID NO: 1276082
ugagaccucccaaaugccg

SEQ ID NO: 1276084 - RNA, 19 nt, Artificial Sequence
  Description of Artificial Sequence: Synthetic oligonucleotide
  Sense strand starting at position 740 of SEQ ID NO: 1241485
gggaggucucaccggguaa

SEQ ID NO: 1276085 - RNA, 19 nt, Artificial Sequence
  Description of Artificial Sequence: Synthetic oligonucleotide
  Antisense strand to SEQ ID NO: 1276084
uuacccggugagaccuccc

SEQ ID NO: 1276086 - RNA, 19 nt, Artificial Sequence
  Description of Artificial Sequence: Synthetic oligonucleotide
  Sense strand starting at position 741 of SEQ ID NO: 1241485
ggaggucucaccggguaac

SEQ ID NO: 1276087 - RNA, 19 nt, Artificial Sequence
  Description of Artificial Sequence: Synthetic oligonucleotide
  Antisense strand to SEQ ID NO: 1276086
guuacccggugagaccucc

SEQ ID NO: 1276088 - RNA, 19 nt, Artificial Sequence
  Description of Artificial Sequence: Synthetic oligonucleotide
  Sense strand starting at position 742 of SEQ ID NO: 1241485
gaggucucaccggguaacu

SEQ ID NO: 1276089 - RNA, 19 nt, Artificial Sequence
  Description of Artificial Sequence: Synthetic oligonucleotide
  Antisense strand to SEQ ID NO: 1276088
aguuacccggugagaccuc

SEQ ID NO: 1276090 - RNA, 19 nt, Artificial Sequence
  Description of Artificial Sequence: Synthetic oligonucleotide
  Sense strand starting at position 810 of SEQ ID NO: 1241485
gaaguucuggacuguccaa

SEQ ID NO: 1276091 - RNA, 19 nt, Artificial Sequence
  Description of Artificial Sequence: Synthetic oligonucleotide
  Antisense strand to SEQ ID NO: 1276090
uuggacaguccagaacuuc

SEQ ID NO: 1276092 - RNA, 19 nt, Artificial Sequence
  Description of Artificial Sequence: Synthetic oligonucleotide
  Sense strand starting at position 1014 of SEQ ID NO: 1241485
cuggcucuuuccucggaaa

SEQ ID NO: 1276093 - RNA, 19 nt, Artificial Sequence
  Description of Artificial Sequence: Synthetic oligonucleotide
  Antisense strand to SEQ ID NO: 1276092
uuuccgaggaaagagccag

SEQ ID NO: 1276094 - RNA, 19 nt, Artificial Sequence
  Description of Artificial Sequence: Synthetic oligonucleotide
  Sense strand starting at position 1015 of SEQ ID NO: 1241485
uggcucuuuccucggaaag

SEQ ID NO: 1276095 - RNA, 19 nt, Artificial Sequence
  Description of Artificial Sequence: Synthetic oligonucleotide
  Antisense strand to SEQ ID NO: 1276094
cuuuccgaggaaagagcca

SEQ ID NO: 1276096 - RNA, 19 nt, Artificial Sequence
  Description of Artificial Sequence: Synthetic oligonucleotide
  Sense strand starting at position 1039 of SEQ ID NO: 1241485
ucuuguugguugucaggga

SEQ ID NO: 1276097 - RNA, 19 nt, Artificial Sequence
  Description of Artificial Sequence: Synthetic oligonucleotide
  Antisense strand to SEQ ID NO: 1276096
ucccugacaaccaacaaga

SEQ ID NO: 1276098 - RNA, 19 nt, Artificial Sequence
  Description of Artificial Sequence: Synthetic oligonucleotide
  Sense strand starting at position 1043 of SEQ ID NO: 1241485
guugguugucagggaucca

SEQ ID NO: 1276099 - RNA, 19 nt, Artificial Sequence
  Description of Artificial Sequence: Synthetic oligonucleotide
  Antisense strand to SEQ ID NO: 1276098
uggaucccugacaaccaac

SEQ ID NO: 1276100 - RNA, 19 nt, Artificial Sequence
  Description of Artificial Sequence: Synthetic oligonucleotide
  Sense strand starting at position 2082 of SEQ ID NO: 1241485
guugaauuuggucgccuca

SEQ ID NO: 1276101 - RNA, 19 nt, Artificial Sequence
  Description of Artificial Sequence: Synthetic oligonucleotide
  Antisense strand to SEQ ID NO: 1276100
ugaggcgaccaaauucaac

SEQ ID NO: 1276102 - RNA, 19 nt, Artificial Sequence
  Description of Artificial Sequence: Synthetic oligonucleotide
  Sense strand starting at position 2143 of SEQ ID NO: 1241485
cacgcauugccagaggcau

SEQ ID NO: 1276103 - RNA, 19 nt, Artificial Sequence
  Description of Artificial Sequence: Synthetic oligonucleotide
  Antisense strand to SEQ ID NO: 1276102
augccucuggcaaugcgug

SEQ ID NO: 1276104 - RNA, 19 nt, Artificial Sequence
  Description of Artificial Sequence: Synthetic oligonucleotide
  Sense strand starting at position 2145 of SEQ ID NO: 1241485
cgcauugccagaggcauuu

SEQ ID NO: 1276105 - RNA, 19 nt, Artificial Sequence
  Description of Artificial Sequence: Synthetic oligonucleotide
  Antisense strand to SEQ ID NO: 1276104
aaaugccucuggcaaugcg

SEQ ID NO: 1276106 - RNA, 19 nt, Artificial Sequence
  Description of Artificial Sequence: Synthetic oligonucleotide
  Sense strand starting at position 2151 of SEQ ID NO: 1241485
gccagaggcauuugaguuu

SEQ ID NO: 1276107 - RNA, 19 nt, Artificial Sequence
  Description of Artificial Sequence: Synthetic oligonucleotide
  Antisense strand to SEQ ID NO: 1276106
aaacucaaaugccucuggc

SEQ ID NO: 1276108 - RNA, 19 nt, Artificial Sequence
  Description of Artificial Sequence: Synthetic oligonucleotide
  Sense strand starting at position 2338 of SEQ ID NO: 1241485
ucuuuagaaagccgugaga

SEQ ID NO: 1276109 - RNA, 19 nt, Artificial Sequence
  Description of Artificial Sequence: Synthetic oligonucleotide
  Antisense strand to SEQ ID NO: 1276108
ucucacggcuuucuaaaga

SEQ ID NO: 1276110 - RNA, 19 nt, Artificial Sequence
  Description of Artificial Sequence: Synthetic oligonucleotide
  Sense strand starting at position 2340 of SEQ ID NO: 1241485
uuuagaaagccgugagauc

SEQ ID NO: 1276111 - RNA, 19 nt, Artificial Sequence
  Description of Artificial Sequence: Synthetic oligonucleotide
  Antisense strand to SEQ ID NO: 1276110
gaucucacggcuuucuaaa

SEQ ID NO: 1276112 - RNA, 19 nt, Artificial Sequence
  Description of Artificial Sequence: Synthetic oligonucleotide
  Sense strand starting at position 2388 of SEQ ID NO: 1241485
gguggaaucuugagggagu

SEQ ID NO: 1276113 - RNA, 19 nt, Artificial Sequence
  Description of Artificial Sequence: Synthetic oligonucleotide
  Antisense strand to SEQ ID NO: 1276112
acucccucaagauuccacc

SEQ ID NO: 1276114 - RNA, 19 nt, Artificial Sequence
  Description of Artificial Sequence: Synthetic oligonucleotide
  Sense strand starting at position 2420 of SEQ ID NO: 1241485
ucuaccguuccaugauuua

SEQ ID NO: 1276115 - RNA, 19 nt, Artificial Sequence
  Description of Artificial Sequence: Synthetic oligonucleotide
  Antisense strand to SEQ ID NO: 1276114
uaaaucauggaacgguaga

SEQ ID NO: 1276116 - RNA, 19 nt, Artificial Sequence
  Description of Artificial Sequence: Synthetic oligonucleotide
  Sense strand starting at position 3084 of SEQ ID NO: 1241485
uccucaguugugcagcaaa

SEQ ID NO: 1276117 - RNA, 19 nt, Artificial Sequence
  Description of Artificial Sequence: Synthetic oligonucleotide
  Antisense strand to SEQ ID NO: 1276116
uuugcugcacaacugagga

SEQ ID NO: 1276118 - RNA, 19 nt, Artificial Sequence
  Description of Artificial Sequence: Synthetic oligonucleotide
  Sense strand starting at position 3144 of SEQ ID NO: 1241485
ccuuuaguuccauggguag

SEQ ID NO: 1276119 - RNA, 19 nt, Artificial Sequence
  Description of Artificial Sequence: Synthetic oligonucleotide
  Antisense strand to SEQ ID NO: 1276118
cuacccauggaacuaaagg

SEQ ID NO: 1276120 - RNA, 19 nt, Artificial Sequence
  Description of Artificial Sequence: Synthetic oligonucleotide
  Sense strand starting at position 3146 of SEQ ID NO: 1241485
uuuaguuccauggguagaa

SEQ ID NO: 1276121 - RNA, 19 nt, Artificial Sequence
  Description of Artificial Sequence: Synthetic oligonucleotide
  Antisense strand to SEQ ID NO: 1276120
uucuacccauggaacuaaa

SEQ ID NO: 1276122 - RNA, 19 nt, Artificial Sequence
  Description of Artificial Sequence: Synthetic oligonucleotide
  Sense strand starting at position 3159 of SEQ ID NO: 1241485
guagaagguggguguucuu

SEQ ID NO: 1276123 - RNA, 19 nt, Artificial Sequence
  Description of Artificial Sequence: Synthetic oligonucleotide
  Antisense strand to SEQ ID NO: 1276122
aagaacacccaccuucuac

SEQ ID NO: 1276124 - RNA, 19 nt, Artificial Sequence
  Description of Artificial Sequence: Synthetic oligonucleotide
  Sense strand starting at position 3261 of SEQ ID NO: 1241485
uccuucuggcccugaauca

SEQ ID NO: 1276125 - RNA, 19 nt, Artificial Sequence
  Description of Artificial Sequence: Synthetic oligonucleotide
  Antisense strand to SEQ ID NO: 1276124
ugauucagggccagaagga

SEQ ID NO: 1276126 - RNA, 19 nt, Artificial Sequence
  Description of Artificial Sequence: Synthetic oligonucleotide
  Sense strand starting at position 3281 of SEQ ID NO: 1241485
aacugagugccucagcaga

SEQ ID NO: 1276127 - RNA, 19 nt, Artificial Sequence
  Description of Artificial Sequence: Synthetic oligonucleotide
  Antisense strand to SEQ ID NO: 1276126
ucugcugaggcacucaguu

SEQ ID NO: 1276128 - RNA, 19 nt, Artificial Sequence
  Description of Artificial Sequence: Synthetic oligonucleotide
  Sense strand starting at position 3363 of SEQ ID NO: 1241485
gacucaggaguuuguggua

SEQ ID NO: 1276129 - RNA, 19 nt, Artificial Sequence
  Description of Artificial Sequence: Synthetic oligonucleotide
  Antisense strand to SEQ ID NO: 1276128
uaccacaaacuccugaguc

SEQ ID NO: 1276130 - RNA, 19 nt, Artificial Sequence
  Description of Artificial Sequence: Synthetic oligonucleotide
  Sense strand starting at position 3476 of SEQ ID NO: 1241485
ccaagaggucuccaagcaa

SEQ ID NO: 1276131 - RNA, 19 nt, Artificial Sequence
  Description of Artificial Sequence: Synthetic oligonucleotide
  Antisense strand to SEQ ID NO: 1276130
uugcuuggagaccucuugg

SEQ ID NO: 1276132 - RNA, 19 nt, Artificial Sequence
  Description of Artificial Sequence: Synthetic oligonucleotide
  Sense strand starting at position 3593 of SEQ ID NO: 1241485
ggacacgugucauugguga

SEQ ID NO: 1276133 - RNA, 19 nt, Artificial Sequence
  Description of Artificial Sequence: Synthetic oligonucleotide
  Antisense strand to SEQ ID NO: 1276132
ucaccaaugacacgugucc

SEQ ID NO: 1276134 - RNA, 19 nt, Artificial Sequence
  Description of Artificial Sequence: Synthetic oligonucleotide
  Sense strand starting at position 3695 of SEQ ID NO: 1241485
gcuucuugccagcaaucua

SEQ ID NO: 1276135 - RNA, 19 nt, Artificial Sequence
  Description of Artificial Sequence: Synthetic oligonucleotide
  Antisense strand to SEQ ID NO: 1276134
uagauugcuggcaagaagc

SEQ ID NO: 1276136 - RNA, 19 nt, Artificial Sequence
  Description of Artificial Sequence: Synthetic oligonucleotide
  Sense strand starting at position 3798 of SEQ ID NO: 1241485
uaaguagagucaguacuca

SEQ ID NO: 1276137 - RNA, 19 nt, Artificial Sequence
  Description of Artificial Sequence: Synthetic oligonucleotide
  Antisense strand to SEQ ID NO: 1276136
ugaguacugacucuacuua

SEQ ID NO: 1276138 - RNA, 19 nt, Artificial Sequence
  Description of Artificial Sequence: Synthetic oligonucleotide
  Sense strand starting at position 3839 of SEQ ID NO: 1241485
uuccuagagccaggagaua

SEQ ID NO: 1276139 - RNA, 19 nt, Artificial Sequence
  Description of Artificial Sequence: Synthetic oligonucleotide
  Antisense strand to SEQ ID NO: 1276138
uaucuccuggcucuaggaa

SEQ ID NO: 1276140 - RNA, 19 nt, Artificial Sequence
  Description of Artificial Sequence: Synthetic oligonucleotide
  Sense strand starting at position 3848 of SEQ ID NO: 1241485
ccaggagauaugugcuaag

SEQ ID NO: 1276141 - RNA, 19 nt, Artificial Sequence
  Description of Artificial Sequence: Synthetic oligonucleotide
  Antisense strand to SEQ ID NO: 1276140
cuuagcacauaucuccugg

SEQ ID NO: 1276142 - RNA, 19 nt, Artificial Sequence
  Description of Artificial Sequence: Synthetic oligonucleotide
  Sense strand starting at position 3864 of SEQ ID NO: 1241485
aagauaagccaagguaagu

SEQ ID NO: 1276143 - RNA, 19 nt, Artificial Sequence
  Description of Artificial Sequence: Synthetic oligonucleotide
  Antisense strand to SEQ ID NO: 1276142
acuuaccuuggcuuaucuu

SEQ ID NO: 1276144 - RNA, 19 nt, Artificial Sequence
  Description of Artificial Sequence: Synthetic oligonucleotide
  Sense strand starting at position 3928 of SEQ ID NO: 1241485
gggccuaagcgaugagagu

SEQ ID NO: 1276145 - RNA, 19 nt, Artificial Sequence
  Description of Artificial Sequence: Synthetic oligonucleotide
  Antisense strand to SEQ ID NO: 1276144
acucucaucgcuuaggccc

SEQ ID NO: 1276146 - RNA, 19 nt, Artificial Sequence
  Description of Artificial Sequence: Synthetic oligonucleotide
  Sense strand starting at position 3934 of SEQ ID NO: 1241485
aagcgaugagagugaugua

SEQ ID NO: 1276147 - RNA, 19 nt, Artificial Sequence
  Description of Artificial Sequence: Synthetic oligonucleotide
  Antisense strand to SEQ ID NO: 1276146
uacaucacucucaucgcuu

SEQ ID NO: 1276148 - RNA, 19 nt, Artificial Sequence
  Description of Artificial Sequence: Synthetic oligonucleotide
  Sense strand starting at position 3935 of SEQ ID NO: 1241485
agcgaugagagugauguau

SEQ ID NO: 1276149 - RNA, 19 nt, Artificial Sequence
  Description of Artificial Sequence: Synthetic oligonucleotide
  Antisense strand to SEQ ID NO: 1276148
auacaucacucucaucgcu

SEQ ID NO: 1276150 - RNA, 19 nt, Artificial Sequence
  Description of Artificial Sequence: Synthetic oligonucleotide
  Sense strand starting at position 3948 of SEQ ID NO: 1241485
auguauucccaucaguaga

SEQ ID NO: 1276151 - RNA, 19 nt, Artificial Sequence
  Description of Artificial Sequence: Synthetic oligonucleotide
  Antisense strand to SEQ ID NO: 1276150
ucuacugaugggaauacau

SEQ ID NO: 1276152 - RNA, 19 nt, Artificial Sequence
  Description of Artificial Sequence: Synthetic oligonucleotide
  Sense strand starting at position 240 of SEQ ID NO: 1241486
ucaguuggccuacaguaau

SEQ ID NO: 1276153 - RNA, 19 nt, Artificial Sequence
  Description of Artificial Sequence: Synthetic oligonucleotide
  Antisense strand to SEQ ID NO: 1276152
auuacuguaggccaacuga

SEQ ID NO: 1276154 - RNA, 19 nt, Artificial Sequence
  Description of Artificial Sequence: Synthetic oligonucleotide
  Sense strand starting at position 369 of SEQ ID NO: 1241486
gccuuugugccuuugcaca

SEQ ID NO: 1276155 - RNA, 19 nt, Artificial Sequence
  Description of Artificial Sequence: Synthetic oligonucleotide
  Antisense strand to SEQ ID NO: 1276154
ugugcaaaggcacaaaggc

SEQ ID NO: 1276156 - RNA, 19 nt, Artificial Sequence
  Description of Artificial Sequence: Synthetic oligonucleotide
  Sense strand starting at position 441 of SEQ ID NO: 1241486
ugggaagccuguccugaau

SEQ ID NO: 1276157 - RNA, 19 nt, Artificial Sequence
  Description of Artificial Sequence: Synthetic oligonucleotide
  Antisense strand to SEQ ID NO: 1276156
auucaggacaggcuuccca

SEQ ID NO: 1276158 - RNA, 19 nt, Artificial Sequence
  Description of Artificial Sequence: Synthetic oligonucleotide
  Sense strand starting at position 502 of SEQ ID NO: 1241486
ggagacucauaacucugua

SEQ ID NO: 1276159 - RNA, 19 nt, Artificial Sequence
  Description of Artificial Sequence: Synthetic oligonucleotide
  Antisense strand to SEQ ID NO: 1276158
uacagaguuaugagucucc

SEQ ID NO: 1276160 - RNA, 19 nt, Artificial Sequence
  Description of Artificial Sequence: Synthetic oligonucleotide
  Sense strand starting at position 506 of SEQ ID NO: 1241486
acucauaacucuguaaugu

SEQ ID NO: 1276161 - RNA, 19 nt, Artificial Sequence
  Description of Artificial Sequence: Synthetic oligonucleotide
  Antisense strand to SEQ ID NO: 1276160
acauuacagaguuaugagu

SEQ ID NO: 1276162 - RNA, 19 nt, Artificial Sequence
  Description of Artificial Sequence: Synthetic oligonucleotide
  Sense strand starting at position 507 of SEQ ID NO: 1241486
cucauaacucuguaaugug

SEQ ID NO: 1276163 - RNA, 19 nt, Artificial Sequence
  Description of Artificial Sequence: Synthetic oligonucleotide
  Antisense strand to SEQ ID NO: 1276162
cacauuacagaguuaugag

SEQ ID NO: 1276164 - RNA, 19 nt, Artificial Sequence
  Description of Artificial Sequence: Synthetic oligonucleotide
  Sense strand starting at position 562 of SEQ ID NO: 1241486
uugucuucccucuagacuu

SEQ ID NO: 1276165 - RNA, 19 nt, Artificial Sequence
  Description of Artificial Sequence: Synthetic oligonucleotide
  Antisense strand to SEQ ID NO: 1276164
aagucuagagggaagacaa

SEQ ID NO: 1276166 - RNA, 19 nt, Artificial Sequence
  Description of Artificial Sequence: Synthetic oligonucleotide
  Sense strand starting at position 693 of SEQ ID NO: 1241486
acuguuugaguacaucuua

SEQ ID NO: 1276167 - RNA, 19 nt, Artificial Sequence
  Description of Artificial Sequence: Synthetic oligonucleotide
  Antisense strand to SEQ ID NO: 1276166
uaagauguacucaaacagu

SEQ ID NO: 1276168 - RNA, 19 nt, Artificial Sequence
  Description of Artificial Sequence: Synthetic oligonucleotide
  Sense strand starting at position 882 of SEQ ID NO: 1241486
cugaaacacugucuaaagu

SEQ ID NO: 1276169 - RNA, 19 nt, Artificial Sequence
  Description of Artificial Sequence: Synthetic oligonucleotide
  Antisense strand to SEQ ID NO: 1276168
acuuuagacaguguuucag

SEQ ID NO: 1276170 - RNA, 19 nt, Artificial Sequence
  Description of Artificial Sequence: Synthetic oligonucleotide
  Sense strand starting at position 910 of SEQ ID NO: 1241486
ucuucucacuucucggaaa

SEQ ID NO: 1276171 - RNA, 19 nt, Artificial Sequence
  Description of Artificial Sequence: Synthetic oligonucleotide
  Antisense strand to SEQ ID NO: 1276170
uuuccgagaagugagaaga

SEQ ID NO: 1276172 - RNA, 19 nt, Artificial Sequence
  Description of Artificial Sequence: Synthetic oligonucleotide
  Sense strand starting at position 1034 of SEQ ID NO: 1241486
gagaguagugacugaagca

SEQ ID NO: 1276173 - RNA, 19 nt, Artificial Sequence
  Description of Artificial Sequence: Synthetic oligonucleotide
  Antisense strand to SEQ ID NO: 1276172
ugcuucagucacuacucuc

SEQ ID NO: 1276174 - RNA, 19 nt, Artificial Sequence
  Description of Artificial Sequence: Synthetic oligonucleotide
  Sense strand starting at position 1064 of SEQ ID NO: 1241486
uuuguacuaguugaacuua

SEQ ID NO: 1276175 - RNA, 19 nt, Artificial Sequence
  Description of Artificial Sequence: Synthetic oligonucleotide
  Antisense strand to SEQ ID NO: 1276174
uaaguucaacuaguacaaa

SEQ ID NO: 1276176 - RNA, 19 nt, Artificial Sequence
  Description of Artificial Sequence: Synthetic oligonucleotide
  Sense strand starting at position 1106 of SEQ ID NO: 1241486
cccgacuuaugacuuaauu

SEQ ID NO: 1276177 - RNA, 19 nt, Artificial Sequence
  Description of Artificial Sequence: Synthetic oligonucleotide
  Antisense strand to SEQ ID NO: 1276176
aauuaagucauaagucggg

SEQ ID NO: 1276178 - RNA, 19 nt, Artificial Sequence
  Description of Artificial Sequence: Synthetic oligonucleotide
  Sense strand starting at position 1150 of SEQ ID NO: 1241486
auaugcauucgguagaaac

SEQ ID NO: 1276179 - RNA, 19 nt, Artificial Sequence
  Description of Artificial Sequence: Synthetic oligonucleotide
  Antisense strand to SEQ ID NO: 1276178
guuucuaccgaaugcauau

SEQ ID NO: 1276180 - RNA, 19 nt, Artificial Sequence
  Description of Artificial Sequence: Synthetic oligonucleotide
  Sense strand starting at position 1228 of SEQ ID NO: 1241486
uucgaauuacaauggguuu

SEQ ID NO: 1276181 - RNA, 19 nt, Artificial Sequence
  Description of Artificial Sequence: Synthetic oligonucleotide
  Antisense strand to SEQ ID NO: 1276180
aaacccauuguaauucgaa

SEQ ID NO: 1276182 - RNA, 19 nt, Artificial Sequence
  Description of Artificial Sequence: Synthetic oligonucleotide
  Sense strand starting at position 1229 of SEQ ID NO: 1241486
ucgaauuacaauggguuua

SEQ ID NO: 1276183 - RNA, 19 nt, Artificial Sequence
  Description of Artificial Sequence: Synthetic oligonucleotide
  Antisense strand to SEQ ID NO: 1276182
uaaacccauuguaauucga

SEQ ID NO: 1276184 - RNA, 19 nt, Artificial Sequence
  Description of Artificial Sequence: Synthetic oligonucleotide
  Sense strand starting at position 1230 of SEQ ID NO: 1241486
cgaauuacaauggguuuau

SEQ ID NO: 1276185 - RNA, 19 nt, Artificial Sequence
  Description of Artificial Sequence: Synthetic oligonucleotide
  Antisense strand to SEQ ID NO: 1276184
auaaacccauuguaauucg

SEQ ID NO: 1276186 - RNA, 19 nt, Artificial Sequence
  Description of Artificial Sequence: Synthetic oligonucleotide
  Sense strand starting at position 1231 of SEQ ID NO: 1241486
gaauuacaauggguuuauc

SEQ ID NO: 1276187 - RNA, 19 nt, Artificial Sequence
  Description of Artificial Sequence: Synthetic oligonucleotide
  Antisense strand to SEQ ID NO: 1276186
gauaaacccauuguaauuc

SEQ ID NO: 1276188 - RNA, 19 nt, Artificial Sequence
  Description of Artificial Sequence: Synthetic oligonucleotide
  Sense strand starting at position 1274 of SEQ ID NO: 1241486
cgagaagcaucuguauaua

SEQ ID NO: 1276189 - RNA, 19 nt, Artificial Sequence
  Description of Artificial Sequence: Synthetic oligonucleotide
  Antisense strand to SEQ ID NO: 1276188
uauauacagaugcuucucg

SEQ ID NO: 1276190 - RNA, 19 nt, Artificial Sequence
  Description of Artificial Sequence: Synthetic oligonucleotide
  Sense strand starting at position 1277 of SEQ ID NO: 1241486
gaagcaucuguauauaagu

SEQ ID NO: 1276191 - RNA, 19 nt, Artificial Sequence
  Description of Artificial Sequence: Synthetic oligonucleotide
  Antisense strand to SEQ ID NO: 1276190
acuuauauacagaugcuuc

SEQ ID NO: 1276192 - RNA, 19 nt, Artificial Sequence
  Description of Artificial Sequence: Synthetic oligonucleotide
  Sense strand starting at position 1502 of SEQ ID NO: 1241486
guaucucaaucaccaaagu

SEQ ID NO: 1276193 - RNA, 19 nt, Artificial Sequence
  Description of Artificial Sequence: Synthetic oligonucleotide
  Antisense strand to SEQ ID NO: 1276192
acuuuggugauugagauac

SEQ ID NO: 1276194 - RNA, 19 nt, Artificial Sequence
  Description of Artificial Sequence: Synthetic oligonucleotide
  Sense strand starting at position 1547 of SEQ ID NO: 1241486
gccaauccgugacuaauuu

SEQ ID NO: 1276195 - RNA, 19 nt, Artificial Sequence
  Description of Artificial Sequence: Synthetic oligonucleotide
  Antisense strand to SEQ ID NO: 1276194
aaauuagucacggauuggc

SEQ ID NO: 1276196 - RNA, 19 nt, Artificial Sequence
  Description of Artificial Sequence: Synthetic oligonucleotide
  Sense strand starting at position 1678 of SEQ ID NO: 1241486
agucauucuuuccucagga

SEQ ID NO: 1276197 - RNA, 19 nt, Artificial Sequence
  Description of Artificial Sequence: Synthetic oligonucleotide
  Antisense strand to SEQ ID NO: 1276196
uccugaggaaagaaugacu

SEQ ID NO: 1276198 - RNA, 19 nt, Artificial Sequence
  Description of Artificial Sequence: Synthetic oligonucleotide
  Sense strand starting at position 1679 of SEQ ID NO: 1241486
gucauucuuuccucaggau

SEQ ID NO: 1276199 - RNA, 19 nt, Artificial Sequence
  Description of Artificial Sequence: Synthetic oligonucleotide
  Antisense strand to SEQ ID NO: 1276198
auccugaggaaagaaugac

SEQ ID NO: 1276200 - RNA, 19 nt, Artificial Sequence
  Description of Artificial Sequence: Synthetic oligonucleotide
  Sense strand starting at position 1710 of SEQ ID NO: 1241486
gaacgucuagggugggaaa

SEQ ID NO: 1276201 - RNA, 19 nt, Artificial Sequence
  Description of Artificial Sequence: Synthetic oligonucleotide
  Antisense strand to SEQ ID NO: 1276200
uuucccacccuagacguuc

SEQ ID NO: 1276202 - RNA, 19 nt, Artificial Sequence
  Description of Artificial Sequence: Synthetic oligonucleotide
  Sense strand starting at position 2121 of SEQ ID NO: 1241486
aggagucugaucuggccaa

SEQ ID NO: 1276203 - RNA, 19 nt, Artificial Sequence
  Description of Artificial Sequence: Synthetic oligonucleotide
  Antisense strand to SEQ ID NO: 1276202
uuggccagaucagacuccu

SEQ ID NO: 1276204 - RNA, 19 nt, Artificial Sequence
  Description of Artificial Sequence: Synthetic oligonucleotide
  Sense strand starting at position 2125 of SEQ ID NO: 1241486
gucugaucuggccaaugga

SEQ ID NO: 1276205 - RNA, 19 nt, Artificial Sequence
  Description of Artificial Sequence: Synthetic oligonucleotide
  Antisense strand to SEQ ID NO: 1276204
uccauuggccagaucagac

SEQ ID NO: 1276206 - RNA, 19 nt, Artificial Sequence
  Description of Artificial Sequence: Synthetic oligonucleotide
  Sense strand starting at position 2128 of SEQ ID NO: 1241486
ugaucuggccaauggaaua

SEQ ID NO: 1276207 - RNA, 19 nt, Artificial Sequence
  Description of Artificial Sequence: Synthetic oligonucleotide
  Antisense strand to SEQ ID NO: 1276206
uauuccauuggccagauca

SEQ ID NO: 1276208 - RNA, 19 nt, Artificial Sequence
  Description of Artificial Sequence: Synthetic oligonucleotide
  Sense strand starting at position 2155 of SEQ ID NO: 1241486
ggcuaaauucgucagacuc

SEQ ID NO: 1276209 - RNA, 19 nt, Artificial Sequence
  Description of Artificial Sequence: Synthetic oligonucleotide
  Antisense strand to SEQ ID NO: 1276208
gagucugacgaauuuagcc

SEQ ID NO: 1276210 - RNA, 19 nt, Artificial Sequence
  Description of Artificial Sequence: Synthetic oligonucleotide
  Sense strand starting at position 2173 of SEQ ID NO: 1241486
cagaaagagucgucaggac

SEQ ID NO: 1276211 - RNA, 19 nt, Artificial Sequence
  Description of Artificial Sequence: Synthetic oligonucleotide
  Antisense strand to SEQ ID NO: 1276210
guccugacgacucuuucug

SEQ ID NO: 1276212 - RNA, 19 nt, Artificial Sequence
  Description of Artificial Sequence: Synthetic oligonucleotide
  Sense strand starting at position 2177 of SEQ ID NO: 1241486
aagagucgucaggacgaaa

SEQ ID NO: 1276213 - RNA, 19 nt, Artificial Sequence
  Description of Artificial Sequence: Synthetic oligonucleotide
  Antisense strand to SEQ ID NO: 1276212
uuucguccugacgacucuu

SEQ ID NO: 1276214 - RNA, 19 nt, Artificial Sequence
  Description of Artificial Sequence: Synthetic oligonucleotide
  Sense strand starting at position 2216 of SEQ ID NO: 1241486
gugugauugguagacugag

SEQ ID NO: 1276215 - RNA, 19 nt, Artificial Sequence
  Description of Artificial Sequence: Synthetic oligonucleotide
  Antisense strand to SEQ ID NO: 1276214
cucagucuaccaaucacac

SEQ ID NO: 1276216 - RNA, 19 nt, Artificial Sequence
  Description of Artificial Sequence: Synthetic oligonucleotide
  Sense strand starting at position 2429 of SEQ ID NO: 1241486
ggcuuugcggugucgacau

SEQ ID NO: 1276217 - RNA, 19 nt, Artificial Sequence
  Description of Artificial Sequence: Synthetic oligonucleotide
  Antisense strand to SEQ ID NO: 1276216
augucgacaccgcaaagcc

SEQ ID NO: 1276218 - RNA, 19 nt, Artificial Sequence
  Description of Artificial Sequence: Synthetic oligonucleotide
  Sense strand starting at position 2519 of SEQ ID NO: 1241486
ggaaucgauucuguaacac

SEQ ID NO: 1276219 - RNA, 19 nt, Artificial Sequence
  Description of Artificial Sequence: Synthetic oligonucleotide
  Antisense strand to SEQ ID NO: 1276218
guguuacagaaucgauucc

SEQ ID NO: 1276220 - RNA, 19 nt, Artificial Sequence
  Description of Artificial Sequence: Synthetic oligonucleotide
  Sense strand starting at position 2934 of SEQ ID NO: 1241486
ggauacucauuguucccau

SEQ ID NO: 1276221 - RNA, 19 nt, Artificial Sequence
  Description of Artificial Sequence: Synthetic oligonucleotide
  Antisense strand to SEQ ID NO: 1276220
augggaacaaugaguaucc

SEQ ID NO: 1276222 - RNA, 19 nt, Artificial Sequence
  Description of Artificial Sequence: Synthetic oligonucleotide
  Sense strand starting at position 3010 of SEQ ID NO: 1241486
ucacaacucguccaacaga

SEQ ID NO: 1276223 - RNA, 19 nt, Artificial Sequence
  Description of Artificial Sequence: Synthetic oligonucleotide
  Antisense strand to SEQ ID NO: 1276222
ucuguuggacgaguuguga

SEQ ID NO: 1276224 - RNA, 19 nt, Artificial Sequence
  Description of Artificial Sequence: Synthetic oligonucleotide
  Sense strand starting at position 3110 of SEQ ID NO: 1241486
uaaggaaauccugguaucu

SEQ ID NO: 1276225 - RNA, 19 nt, Artificial Sequence
  Description of Artificial Sequence: Synthetic oligonucleotide
  Antisense strand to SEQ ID NO: 1276224
agauaccaggauuuccuua

SEQ ID NO: 1276226 - RNA, 19 nt, Artificial Sequence
  Description of Artificial Sequence: Synthetic oligonucleotide
  Sense strand starting at position 3238 of SEQ ID NO: 1241486
cuuagucaauuauccagua

SEQ ID NO: 1276227 - RNA, 19 nt, Artificial Sequence
  Description of Artificial Sequence: Synthetic oligonucleotide
  Antisense strand to SEQ ID NO: 1276226
uacuggauaauugacuaag

SEQ ID NO: 1276228 - RNA, 19 nt, Artificial Sequence
  Description of Artificial Sequence: Synthetic oligonucleotide
  Sense strand starting at position 3319 of SEQ ID NO: 1241486
ggaccugucuaauuagauc

SEQ ID NO: 1276229 - RNA, 19 nt, Artificial Sequence
  Description of Artificial Sequence: Synthetic oligonucleotide
  Antisense strand to SEQ ID NO: 1276228
gaucuaauuagacaggucc

SEQ ID NO: 1276230 - RNA, 19 nt, Artificial Sequence
  Description of Artificial Sequence: Synthetic oligonucleotide
  Sense strand starting at position 3325 of SEQ ID NO: 1241486
gucuaauuagaucagcaau

SEQ ID NO: 1276231 - RNA, 19 nt, Artificial Sequence
  Description of Artificial Sequence: Synthetic oligonucleotide
  Antisense strand to SEQ ID NO: 1276230
auugcugaucuaauuagac

SEQ ID NO: 1276232 - RNA, 19 nt, Artificial Sequence
  Description of Artificial Sequence: Synthetic oligonucleotide
  Sense strand starting at position 2 of SEQ ID NO: 1241487
acaggauaauagcaggaua

SEQ ID NO: 1276233 - RNA, 19 nt, Artificial Sequence
  Description of Artificial Sequence: Synthetic oligonucleotide
  Antisense strand to SEQ ID NO: 1276232
uauccugcuauuauccugu

SEQ ID NO: 1276234 - RNA, 19 nt, Artificial Sequence
  Description of Artificial Sequence: Synthetic oligonucleotide
  Sense strand starting at position 22 of SEQ ID NO: 1241487
aguaguaugcaucauuaua

SEQ ID NO: 1276235 - RNA, 19 nt, Artificial Sequence
  Description of Artificial Sequence: Synthetic oligonucleotide
  Antisense strand to SEQ ID NO: 1276234
uauaaugaugcauacuacu

SEQ ID NO: 1276236 - RNA, 19 nt, Artificial Sequence
  Description of Artificial Sequence: Synthetic oligonucleotide
  Sense strand starting at position 128 of SEQ ID NO: 1241487
aguguaaacucaucauugu

SEQ ID NO: 1276237 - RNA, 19 nt, Artificial Sequence
  Description of Artificial Sequence: Synthetic oligonucleotide
  Antisense strand to SEQ ID NO: 1276236
acaaugaugaguuuacacu

SEQ ID NO: 1276238 - RNA, 19 nt, Artificial Sequence
  Description of Artificial Sequence: Synthetic oligonucleotide
  Sense strand starting at position 129 of SEQ ID NO: 1241487
guguaaacucaucauuguu

SEQ ID NO: 1276239 - RNA, 19 nt, Artificial Sequence
  Description of Artificial Sequence: Synthetic oligonucleotide
  Antisense strand to SEQ ID NO: 1276238
aacaaugaugaguuuacac

SEQ ID NO: 1276240 - RNA, 19 nt, Artificial Sequence
  Description of Artificial Sequence: Synthetic oligonucleotide
  Sense strand starting at position 131 of SEQ ID NO: 1241487
guaaacucaucauuguuaa

SEQ ID NO: 1276241 - RNA, 19 nt, Artificial Sequence
  Description of Artificial Sequence: Synthetic oligonucleotide
  Antisense strand to SEQ ID NO: 1276240
uuaacaaugaugaguuuac

SEQ ID NO: 1276242 - RNA, 19 nt, Artificial Sequence
  Description of Artificial Sequence: Synthetic oligonucleotide
  Sense strand starting at position 204 of SEQ ID NO: 1241487
auguuuaucagugguggga

SEQ ID NO: 1276243 - RNA, 19 nt, Artificial Sequence
  Description of Artificial Sequence: Synthetic oligonucleotide
  Antisense strand to SEQ ID NO: 1276242
ucccaccacugauaaacau

SEQ ID NO: 1276244 - RNA, 19 nt, Artificial Sequence
  Description of Artificial Sequence: Synthetic oligonucleotide
  Sense strand starting at position 300 of SEQ ID NO: 1241487
auacuuguauacuuagaga

SEQ ID NO: 1276245 - RNA, 19 nt, Artificial Sequence
  Description of Artificial Sequence: Synthetic oligonucleotide
  Antisense strand to SEQ ID NO: 1276244
ucucuaaguauacaaguau

SEQ ID NO: 1276246 - RNA, 19 nt, Artificial Sequence
  Description of Artificial Sequence: Synthetic oligonucleotide
  Sense strand starting at position 308 of SEQ ID NO: 1241487
auacuuagagaugguucua

SEQ ID NO: 1276247 - RNA, 19 nt, Artificial Sequence
  Description of Artificial Sequence: Synthetic oligonucleotide
  Antisense strand to SEQ ID NO: 1276246
uagaaccaucucuaaguau

SEQ ID NO: 1276248 - RNA, 19 nt, Artificial Sequence
  Description of Artificial Sequence: Synthetic oligonucleotide
  Sense strand starting at position 342 of SEQ ID NO: 1241487
acaguaaauugccuuaugu

SEQ ID NO: 1276249 - RNA, 19 nt, Artificial Sequence
  Description of Artificial Sequence: Synthetic oligonucleotide
  Antisense strand to SEQ ID NO: 1276248
acauaaggcaauuuacugu

SEQ ID NO: 1276250 - RNA, 19 nt, Artificial Sequence
  Description of Artificial Sequence: Synthetic oligonucleotide
  Sense strand starting at position 344 of SEQ ID NO: 1241487
aguaaauugccuuauguuc

SEQ ID NO: 1276251 - RNA, 19 nt, Artificial Sequence
  Description of Artificial Sequence: Synthetic oligonucleotide
  Antisense strand to SEQ ID NO: 1276250
gaacauaaggcaauuuacu

SEQ ID NO: 1276252 - RNA, 19 nt, Artificial Sequence
  Description of Artificial Sequence: Synthetic oligonucleotide
  Sense strand starting at position 391 of SEQ ID NO: 1241487
ucucauauccgcuaagcau

SEQ ID NO: 1276253 - RNA, 19 nt, Artificial Sequence
  Description of Artificial Sequence: Synthetic oligonucleotide
  Antisense strand to SEQ ID NO: 1276252
augcuuagcggauaugaga

SEQ ID NO: 1276254 - RNA, 19 nt, Artificial Sequence
  Description of Artificial Sequence: Synthetic oligonucleotide
  Sense strand starting at position 444 of SEQ ID NO: 1241487
cucagaagaugccuagaga

SEQ ID NO: 1276255 - RNA, 19 nt, Artificial Sequence
  Description of Artificial Sequence: Synthetic oligonucleotide
  Antisense strand to SEQ ID NO: 1276254
ucucuaggcaucuucugag

SEQ ID NO: 1276256 - RNA, 19 nt, Artificial Sequence
  Description of Artificial Sequence: Synthetic oligonucleotide
  Sense strand starting at position 459 of SEQ ID NO: 1241487
gagacaacgucuuuccuca

SEQ ID NO: 1276257 - RNA, 19 nt, Artificial Sequence
  Description of Artificial Sequence: Synthetic oligonucleotide
  Antisense strand to SEQ ID NO: 1276256
ugaggaaagacguugucuc

SEQ ID NO: 1276258 - RNA, 19 nt, Artificial Sequence
  Description of Artificial Sequence: Synthetic oligonucleotide
  Sense strand starting at position 606 of SEQ ID NO: 1241487
agucaaauaucccugguca

SEQ ID NO: 1276259 - RNA, 19 nt, Artificial Sequence
  Description of Artificial Sequence: Synthetic oligonucleotide
  Antisense strand to SEQ ID NO: 1276258
ugaccagggauauuugacu

SEQ ID NO: 1276260 - RNA, 19 nt, Artificial Sequence
  Description of Artificial Sequence: Synthetic oligonucleotide
  Sense strand starting at position 607 of SEQ ID NO: 1241487
gucaaauaucccuggucac

SEQ ID NO: 1276261 - RNA, 19 nt, Artificial Sequence
  Description of Artificial Sequence: Synthetic oligonucleotide
  Antisense strand to SEQ ID NO: 1276260
gugaccagggauauuugac

SEQ ID NO: 1276262 - RNA, 19 nt, Artificial Sequence
  Description of Artificial Sequence: Synthetic oligonucleotide
  Sense strand starting at position 651 of SEQ ID NO: 1241487
gcgcuugaccuccucguaa

SEQ ID NO: 1276263 - RNA, 19 nt, Artificial Sequence
  Description of Artificial Sequence: Synthetic oligonucleotide
  Antisense strand to SEQ ID NO: 1276262
uuacgaggaggucaagcgc

SEQ ID NO: 1276264 - RNA, 19 nt, Artificial Sequence
  Description of Artificial Sequence: Synthetic oligonucleotide
  Sense strand starting at position 865 of SEQ ID NO: 1241487
gggaaaucauaguccacau

SEQ ID NO: 1276265 - RNA, 19 nt, Artificial Sequence
  Description of Artificial Sequence: Synthetic oligonucleotide
  Antisense strand to SEQ ID NO: 1276264
auguggacuaugauuuccc

SEQ ID NO: 1276266 - RNA, 19 nt, Artificial Sequence
  Description of Artificial Sequence: Synthetic oligonucleotide
  Sense strand starting at position 898 of SEQ ID NO: 1241487
gggaaguccugaguggaga

SEQ ID NO: 1276267 - RNA, 19 nt, Artificial Sequence
  Description of Artificial Sequence: Synthetic oligonucleotide
  Antisense strand to SEQ ID NO: 1276266
ucuccacucaggacuuccc

SEQ ID NO: 1276268 - RNA, 19 nt, Artificial Sequence
  Description of Artificial Sequence: Synthetic oligonucleotide
  Sense strand starting at position 899 of SEQ ID NO: 1241487
ggaaguccugaguggagau

SEQ ID NO: 1276269 - RNA, 19 nt, Artificial Sequence
  Description of Artificial Sequence: Synthetic oligonucleotide
  Antisense strand to SEQ ID NO: 1276268
aucuccacucaggacuucc

SEQ ID NO: 1276270 - RNA, 19 nt, Artificial Sequence
  Description of Artificial Sequence: Synthetic oligonucleotide
  Sense strand starting at position 1245 of SEQ ID NO: 1241487
agccuucucgcgguccuaa

SEQ ID NO: 1276271 - RNA, 19 nt, Artificial Sequence
  Description of Artificial Sequence: Synthetic oligonucleotide
  Antisense strand to SEQ ID NO: 1276270
uuaggaccgcgagaaggcu

SEQ ID NO: 1276272 - RNA, 19 nt, Artificial Sequence
  Description of Artificial Sequence: Synthetic oligonucleotide
  Sense strand starting at position 1547 of SEQ ID NO: 1241487
ugcugaaucgggcuucgua

SEQ ID NO: 1276273 - RNA, 19 nt, Artificial Sequence
  Description of Artificial Sequence: Synthetic oligonucleotide
  Antisense strand to SEQ ID NO: 1276272
uacgaagcccgauucagca

SEQ ID NO: 1276274 - RNA, 19 nt, Artificial Sequence
  Description of Artificial Sequence: Synthetic oligonucleotide
  Sense strand starting at position 1935 of SEQ ID NO: 1241487
aaucaccggcucugagaaa

SEQ ID NO: 1276275 - RNA, 19 nt, Artificial Sequence
  Description of Artificial Sequence: Synthetic oligonucleotide
  Antisense strand to SEQ ID NO: 1276274
uuucucagagccggugauu

SEQ ID NO: 1276276 - RNA, 19 nt, Artificial Sequence
  Description of Artificial Sequence: Synthetic oligonucleotide
  Sense strand starting at position 1974 of SEQ ID NO: 1241487
ucugguucucguuaacuuu

SEQ ID NO: 1276277 - RNA, 19 nt, Artificial Sequence
  Description of Artificial Sequence: Synthetic oligonucleotide
  Antisense strand to SEQ ID NO: 1276276
aaaguuaacgagaaccaga

SEQ ID NO: 1276278 - RNA, 19 nt, Artificial Sequence
  Description of Artificial Sequence: Synthetic oligonucleotide
  Sense strand starting at position 2573 of SEQ ID NO: 1241487
gugugugauccgcuccguu

SEQ ID NO: 1276279 - RNA, 19 nt, Artificial Sequence
  Description of Artificial Sequence: Synthetic oligonucleotide
  Antisense strand to SEQ ID NO: 1276278
aacggagcggaucacacac

SEQ ID NO: 1276280 - RNA, 19 nt, Artificial Sequence
  Description of Artificial Sequence: Synthetic oligonucleotide
  Sense strand starting at position 2654 of SEQ ID NO: 1241487
ggaagacccugaucucuug

SEQ ID NO: 1276281 - RNA, 19 nt, Artificial Sequence
  Description of Artificial Sequence: Synthetic oligonucleotide
  Antisense strand to SEQ ID NO: 1276280
caagagaucagggucuucc

SEQ ID NO: 1276282 - RNA, 19 nt, Artificial Sequence
  Description of Artificial Sequence: Synthetic oligonucleotide
  Sense strand starting at position 3073 of SEQ ID NO: 1241487
gacaucagacugugagacu

SEQ ID NO: 1276283 - RNA, 19 nt, Artificial Sequence
  Description of Artificial Sequence: Synthetic oligonucleotide
  Antisense strand to SEQ ID NO: 1276282
agucucacagucugauguc

SEQ ID NO: 1276284 - RNA, 19 nt, Artificial Sequence
  Description of Artificial Sequence: Synthetic oligonucleotide
  Sense strand starting at position 3144 of SEQ ID NO: 1241487
aguggagaguuguauauuu

SEQ ID NO: 1276285 - RNA, 19 nt, Artificial Sequence
  Description of Artificial Sequence: Synthetic oligonucleotide
  Antisense strand to SEQ ID NO: 1276284
aaauauacaacucuccacu

SEQ ID NO: 1276286 - RNA, 19 nt, Artificial Sequence
  Description of Artificial Sequence: Synthetic oligonucleotide
  Sense strand starting at position 3290 of SEQ ID NO: 1241487
ugaaguuacucccugauau

SEQ ID NO: 1276287 - RNA, 19 nt, Artificial Sequence
  Description of Artificial Sequence: Synthetic oligonucleotide
  Antisense strand to SEQ ID NO: 1276286
auaucagggaguaacuuca

SEQ ID NO: 1276288 - RNA, 19 nt, Artificial Sequence
  Description of Artificial Sequence: Synthetic oligonucleotide
  Sense strand starting at position 3370 of SEQ ID NO: 1241487
acauuuauuuagugguacu

SEQ ID NO: 1276289 - RNA, 19 nt, Artificial Sequence
  Description of Artificial Sequence: Synthetic oligonucleotide
  Antisense strand to SEQ ID NO: 1276288
aguaccacuaaauaaaugu

SEQ ID NO: 1276290 - RNA, 19 nt, Artificial Sequence
  Description of Artificial Sequence: Synthetic oligonucleotide
  Sense strand starting at position 3373 of SEQ ID NO: 1241487
uuuauuuagugguacuaag

SEQ ID NO: 1276291 - RNA, 19 nt, Artificial Sequence
  Description of Artificial Sequence: Synthetic oligonucleotide
  Antisense strand to SEQ ID NO: 1276290
cuuaguaccacuaaauaaa

SEQ ID NO: 1276292 - RNA, 19 nt, Artificial Sequence
  Description of Artificial Sequence: Synthetic oligonucleotide
  Sense strand starting at position 3383 of SEQ ID NO: 1241487
gguacuaagcuaugagcuu

SEQ ID NO: 1276293 - RNA, 19 nt, Artificial Sequence
  Description of Artificial Sequence: Synthetic oligonucleotide
  Antisense strand to SEQ ID NO: 1276292
aagcucauagcuuaguacc

SEQ ID NO: 1276294 - RNA, 19 nt, Artificial Sequence
  Description of Artificial Sequence: Synthetic oligonucleotide
  Sense strand starting at position 3417 of SEQ ID NO: 1241487
cugagauggucuccaauga

SEQ ID NO: 1276295 - RNA, 19 nt, Artificial Sequence
  Description of Artificial Sequence: Synthetic oligonucleotide
  Antisense strand to SEQ ID NO: 1276294
ucauuggagaccaucucag

SEQ ID NO: 1276296 - RNA, 19 nt, Artificial Sequence
  Description of Artificial Sequence: Synthetic oligonucleotide
  Sense strand starting at position 3466 of SEQ ID NO: 1241487
uaaucucugcccugggagu

SEQ ID NO: 1276297 - RNA, 19 nt, Artificial Sequence
  Description of Artificial Sequence: Synthetic oligonucleotide
  Antisense strand to SEQ ID NO: 1276296
acucccagggcagagauua

SEQ ID NO: 1276298 - RNA, 19 nt, Artificial Sequence
  Description of Artificial Sequence: Synthetic oligonucleotide
  Sense strand starting at position 3490 of SEQ ID NO: 1241487
cuggccuugugauuucuaa

SEQ ID NO: 1276299 - RNA, 19 nt, Artificial Sequence
  Description of Artificial Sequence: Synthetic oligonucleotide
  Antisense strand to SEQ ID NO: 1276298
uuagaaaucacaaggccag

SEQ ID NO: 1276300 - RNA, 19 nt, Artificial Sequence
  Description of Artificial Sequence: Synthetic oligonucleotide
  Sense strand starting at position 3542 of SEQ ID NO: 1241487
gcuaaauaagauuguggcu

SEQ ID NO: 1276301 - RNA, 19 nt, Artificial Sequence
  Description of Artificial Sequence: Synthetic oligonucleotide
  Antisense strand to SEQ ID NO: 1276300
agccacaaucuuauuuagc

SEQ ID NO: 1276302 - RNA, 19 nt, Artificial Sequence
  Description of Artificial Sequence: Synthetic oligonucleotide
  Sense strand starting at position 3547 of SEQ ID NO: 1241487
auaagauuguggcuucuuc

SEQ ID NO: 1276303 - RNA, 19 nt, Artificial Sequence
  Description of Artificial Sequence: Synthetic oligonucleotide
  Antisense strand to SEQ ID NO: 1276302
gaagaagccacaaucuuau

SEQ ID NO: 1276304 - RNA, 19 nt, Artificial Sequence
  Description of Artificial Sequence: Synthetic oligonucleotide
  Sense strand starting at position 3572 of SEQ ID NO: 1241487
aguugacuuucccucucau

SEQ ID NO: 1276305 - RNA, 19 nt, Artificial Sequence
  Description of Artificial Sequence: Synthetic oligonucleotide
  Antisense strand to SEQ ID NO: 1276304
augagagggaaagucaacu

SEQ ID NO: 1276306 - RNA, 19 nt, Artificial Sequence
  Description of Artificial Sequence: Synthetic oligonucleotide
  Sense strand starting at position 3694 of SEQ ID NO: 1241487
caaccaugucagugagcuu

SEQ ID NO: 1276307 - RNA, 19 nt, Artificial Sequence
  Description of Artificial Sequence: Synthetic oligonucleotide
  Antisense strand to SEQ ID NO: 1276306
aagcucacugacaugguug

SEQ ID NO: 1276308 - RNA, 19 nt, Artificial Sequence
  Description of Artificial Sequence: Synthetic oligonucleotide
  Sense strand starting at position 3735 of SEQ ID NO: 1241487
gggucuugagaugguaucu

SEQ ID NO: 1276309 - RNA, 19 nt, Artificial Sequence
  Description of Artificial Sequence: Synthetic oligonucleotide
  Antisense strand to SEQ ID NO: 1276308
agauaccaucucaagaccc

SEQ ID NO: 1276310 - RNA, 19 nt, Artificial Sequence
  Description of Artificial Sequence: Synthetic oligonucleotide
  Sense strand starting at position 3946 of SEQ ID NO: 1241487
cuguguguugcuuuaagcu

SEQ ID NO: 1276311 - RNA, 19 nt, Artificial Sequence
  Description of Artificial Sequence: Synthetic oligonucleotide
  Antisense strand to SEQ ID NO: 1276310
agcuuaaagcaacacacag

SEQ ID NO: 1276312 - RNA, 19 nt, Artificial Sequence
  Description of Artificial Sequence: Synthetic oligonucleotide
  Sense strand starting at position 202 of SEQ ID NO: 1241488
auaugcucaccacgagaga

SEQ ID NO: 1276313 - RNA, 19 nt, Artificial Sequence
  Description of Artificial Sequence: Synthetic oligonucleotide
  Antisense strand to SEQ ID NO: 1276312
ucucucguggugagcauau

SEQ ID NO: 1276314 - RNA, 19 nt, Artificial Sequence
  Description of Artificial Sequence: Synthetic oligonucleotide
  Sense strand starting at position 264 of SEQ ID NO: 1241488
uuguuagaucaucaagccu

SEQ ID NO: 1276315 - RNA, 19 nt, Artificial Sequence
  Description of Artificial Sequence: Synthetic oligonucleotide
  Antisense strand to SEQ ID NO: 1276314
aggcuugaugaucuaacaa

SEQ ID NO: 1276316 - RNA, 19 nt, Artificial Sequence
  Description of Artificial Sequence: Synthetic oligonucleotide
  Sense strand starting at position 294 of SEQ ID NO: 1241488
caaacauguguguauguua

SEQ ID NO: 1276317 - RNA, 19 nt, Artificial Sequence
  Description of Artificial Sequence: Synthetic oligonucleotide
  Antisense strand to SEQ ID NO: 1276316
uaacauacacacauguuug

SEQ ID NO: 1276318 - RNA, 19 nt, Artificial Sequence
  Description of Artificial Sequence: Synthetic oligonucleotide
  Sense strand starting at position 435 of SEQ ID NO: 1241488
acgcaaucuguuucgaugu

SEQ ID NO: 1276319 - RNA, 19 nt, Artificial Sequence
  Description of Artificial Sequence: Synthetic oligonucleotide
  Antisense strand to SEQ ID NO: 1276318
acaucgaaacagauugcgu

SEQ ID NO: 1276320 - RNA, 19 nt, Artificial Sequence
  Description of Artificial Sequence: Synthetic oligonucleotide
  Sense strand starting at position 464 of SEQ ID NO: 1241488
ggaguugagcuguauggca

SEQ ID NO: 1276321 - RNA, 19 nt, Artificial Sequence
  Description of Artificial Sequence: Synthetic oligonucleotide
  Antisense strand to SEQ ID NO: 1276320
ugccauacagcucaacucc

SEQ ID NO: 1276322 - RNA, 19 nt, Artificial Sequence
  Description of Artificial Sequence: Synthetic oligonucleotide
  Sense strand starting at position 554 of SEQ ID NO: 1241488
uauccaaguugucuggaaa

SEQ ID NO: 1276323 - RNA, 19 nt, Artificial Sequence
  Description of Artificial Sequence: Synthetic oligonucleotide
  Antisense strand to SEQ ID NO: 1276322
uuuccagacaacuuggaua

SEQ ID NO: 1276324 - RNA, 19 nt, Artificial Sequence
  Description of Artificial Sequence: Synthetic oligonucleotide
  Sense strand starting at position 555 of SEQ ID NO: 1241488
auccaaguugucuggaaac

SEQ ID NO: 1276325 - RNA, 19 nt, Artificial Sequence
  Description of Artificial Sequence: Synthetic oligonucleotide
  Antisense strand to SEQ ID NO: 1276324
guuuccagacaacuuggau

SEQ ID NO: 1276326 - RNA, 19 nt, Artificial Sequence
  Description of Artificial Sequence: Synthetic oligonucleotide
  Sense strand starting at position 557 of SEQ ID NO: 1241488
ccaaguugucuggaaacau

SEQ ID NO: 1276327 - RNA, 19 nt, Artificial Sequence
  Description of Artificial Sequence: Synthetic oligonucleotide
  Antisense strand to SEQ ID NO: 1276326
auguuuccagacaacuugg

SEQ ID NO: 1276328 - RNA, 19 nt, Artificial Sequence
  Description of Artificial Sequence: Synthetic oligonucleotide
  Sense strand starting at position 575 of SEQ ID NO: 1241488
ugauauaugguagggcagu

SEQ ID NO: 1276329 - RNA, 19 nt, Artificial Sequence
  Description of Artificial Sequence: Synthetic oligonucleotide
  Antisense strand to SEQ ID NO: 1276328
acugcccuaccauauauca

SEQ ID NO: 1276330 - RNA, 19 nt, Artificial Sequence
  Description of Artificial Sequence: Synthetic oligonucleotide
  Sense strand starting at position 855 of SEQ ID NO: 1241488
ccuucuccugggcauuaua

SEQ ID NO: 1276331 - RNA, 19 nt, Artificial Sequence
  Description of Artificial Sequence: Synthetic oligonucleotide
  Antisense strand to SEQ ID NO: 1276330
uauaaugcccaggagaagg

SEQ ID NO: 1276332 - RNA, 19 nt, Artificial Sequence
  Description of Artificial Sequence: Synthetic oligonucleotide
  Sense strand starting at position 864 of SEQ ID NO: 1241488
gggcauuauacugggaaac

SEQ ID NO: 1276333 - RNA, 19 nt, Artificial Sequence
  Description of Artificial Sequence: Synthetic oligonucleotide
  Antisense strand to SEQ ID NO: 1276332
guuucccaguauaaugccc

SEQ ID NO: 1276334 - RNA, 19 nt, Artificial Sequence
  Description of Artificial Sequence: Synthetic oligonucleotide
  Sense strand starting at position 865 of SEQ ID NO: 1241488
ggcauuauacugggaaacu

SEQ ID NO: 1276335 - RNA, 19 nt, Artificial Sequence
  Description of Artificial Sequence: Synthetic oligonucleotide
  Antisense strand to SEQ ID NO: 1276334
aguuucccaguauaaugcc

SEQ ID NO: 1276336 - RNA, 19 nt, Artificial Sequence
  Description of Artificial Sequence: Synthetic oligonucleotide
  Sense strand starting at position 1236 of SEQ ID NO: 1241488
cugcgaugcguccucaacu

SEQ ID NO: 1276337 - RNA, 19 nt, Artificial Sequence
  Description of Artificial Sequence: Synthetic oligonucleotide
  Antisense strand to SEQ ID NO: 1276336
aguugaggacgcaucgcag

SEQ ID NO: 1276338 - RNA, 19 nt, Artificial Sequence
  Description of Artificial Sequence: Synthetic oligonucleotide
  Sense strand starting at position 1417 of SEQ ID NO: 1241488
cuuuguuagggcuggagaa

SEQ ID NO: 1276339 - RNA, 19 nt, Artificial Sequence
  Description of Artificial Sequence: Synthetic oligonucleotide
  Antisense strand to SEQ ID NO: 1276338
uucuccagcccuaacaaag

SEQ ID NO: 1276340 - RNA, 19 nt, Artificial Sequence
  Description of Artificial Sequence: Synthetic oligonucleotide
  Sense strand starting at position 1418 of SEQ ID NO: 1241488
uuuguuagggcuggagaaa

SEQ ID NO: 1276341 - RNA, 19 nt, Artificial Sequence
  Description of Artificial Sequence: Synthetic oligonucleotide
  Antisense strand to SEQ ID NO: 1276340
uuucuccagcccuaacaaa

SEQ ID NO: 1276342 - RNA, 19 nt, Artificial Sequence
  Description of Artificial Sequence: Synthetic oligonucleotide
  Sense strand starting at position 1514 of SEQ ID NO: 1241488
gcgucauuuccauauguaa

SEQ ID NO: 1276343 - RNA, 19 nt, Artificial Sequence
  Description of Artificial Sequence: Synthetic oligonucleotide
  Antisense strand to SEQ ID NO: 1276342
uuacauauggaaaugacgc

SEQ ID NO: 1276344 - RNA, 19 nt, Artificial Sequence
  Description of Artificial Sequence: Synthetic oligonucleotide
  Sense strand starting at position 2438 of SEQ ID NO: 1241488
ucgauuggccaucaacauu

SEQ ID NO: 1276345 - RNA, 19 nt, Artificial Sequence
  Description of Artificial Sequence: Synthetic oligonucleotide
  Antisense strand to SEQ ID NO: 1276344
aauguugauggccaaucga

SEQ ID NO: 1276346 - RNA, 19 nt, Artificial Sequence
  Description of Artificial Sequence: Synthetic oligonucleotide
  Sense strand starting at position 2475 of SEQ ID NO: 1241488
gcagaagggcuguagaagu

SEQ ID NO: 1276347 - RNA, 19 nt, Artificial Sequence
  Description of Artificial Sequence: Synthetic oligonucleotide
  Antisense strand to SEQ ID NO: 1276346
acuucuacagcccuucugc

SEQ ID NO: 1276348 - RNA, 19 nt, Artificial Sequence
  Description of Artificial Sequence: Synthetic oligonucleotide
  Sense strand starting at position 2671 of SEQ ID NO: 1241488
acaguugcucgauauuaau

SEQ ID NO: 1276349 - RNA, 19 nt, Artificial Sequence
  Description of Artificial Sequence: Synthetic oligonucleotide
  Antisense strand to SEQ ID NO: 1276348
auuaauaucgagcaacugu

SEQ ID NO: 1276350 - RNA, 19 nt, Artificial Sequence
  Description of Artificial Sequence: Synthetic oligonucleotide
  Sense strand starting at position 2813 of SEQ ID NO: 1241488
uguguugcccuugaaggau

SEQ ID NO: 1276351 - RNA, 19 nt, Artificial Sequence
  Description of Artificial Sequence: Synthetic oligonucleotide
  Antisense strand to SEQ ID NO: 1276350
auccuucaagggcaacaca

SEQ ID NO: 1276352 - RNA, 19 nt, Artificial Sequence
  Description of Artificial Sequence: Synthetic oligonucleotide
  Sense strand starting at position 2822 of SEQ ID NO: 1241488
cuugaaggauccgccugau

SEQ ID NO: 1276353 - RNA, 19 nt, Artificial Sequence
  Description of Artificial Sequence: Synthetic oligonucleotide
  Antisense strand to SEQ ID NO: 1276352
aucaggcggauccuucaag

SEQ ID NO: 1276354 - RNA, 19 nt, Artificial Sequence
  Description of Artificial Sequence: Synthetic oligonucleotide
  Sense strand starting at position 2825 of SEQ ID NO: 1241488
gaaggauccgccugaugga

SEQ ID NO: 1276355 - RNA, 19 nt, Artificial Sequence
  Description of Artificial Sequence: Synthetic oligonucleotide
  Antisense strand to SEQ ID NO: 1276354
uccaucaggcggauccuuc

SEQ ID NO: 1276356 - RNA, 19 nt, Artificial Sequence
  Description of Artificial Sequence: Synthetic oligonucleotide
  Sense strand starting at position 2826 of SEQ ID NO: 1241488
aaggauccgccugauggau

SEQ ID NO: 1276357 - RNA, 19 nt, Artificial Sequence
  Description of Artificial Sequence: Synthetic oligonucleotide
  Antisense strand to SEQ ID NO: 1276356
auccaucaggcggauccuu

SEQ ID NO: 1276358 - RNA, 19 nt, Artificial Sequence
  Description of Artificial Sequence: Synthetic oligonucleotide
  Sense strand starting at position 2874 of SEQ ID NO: 1241488
ggaaacuggugauuccuuu

SEQ ID NO: 1276359 - RNA, 19 nt, Artificial Sequence
  Description of Artificial Sequence: Synthetic oligonucleotide
  Antisense strand to SEQ ID NO: 1276358
aaaggaaucaccaguuucc

SEQ ID NO: 1276360 - RNA, 19 nt, Artificial Sequence
  Description of Artificial Sequence: Synthetic oligonucleotide
  Sense strand starting at position 2926 of SEQ ID NO: 1241488
accagcauuccuugagaau

SEQ ID NO: 1276361 - RNA, 19 nt, Artificial Sequence
  Description of Artificial Sequence: Synthetic oligonucleotide
  Antisense strand to SEQ ID NO: 1276360
auucucaaggaaugcuggu

SEQ ID NO: 1276362 - RNA, 19 nt, Artificial Sequence
  Description of Artificial Sequence: Synthetic oligonucleotide
  Sense strand starting at position 2927 of SEQ ID NO: 1241488
ccagcauuccuugagaauc

SEQ ID NO: 1276363 - RNA, 19 nt, Artificial Sequence
  Description of Artificial Sequence: Synthetic oligonucleotide
  Antisense strand to SEQ ID NO: 1276362
gauucucaaggaaugcugg

SEQ ID NO: 1276364 - RNA, 19 nt, Artificial Sequence
  Description of Artificial Sequence: Synthetic oligonucleotide
  Sense strand starting at position 3053 of SEQ ID NO: 1241488
gagcuuccucaggaucaca

SEQ ID NO: 1276365 - RNA, 19 nt, Artificial Sequence
  Description of Artificial Sequence: Synthetic oligonucleotide
  Antisense strand to SEQ ID NO: 1276364
ugugauccugaggaagcuc

SEQ ID NO: 1276366 - RNA, 19 nt, Artificial Sequence
  Description of Artificial Sequence: Synthetic oligonucleotide
  Sense strand starting at position 3160 of SEQ ID NO: 1241488
gcacgugaaacucaugaaa

SEQ ID NO: 1276367 - RNA, 19 nt, Artificial Sequence
  Description of Artificial Sequence: Synthetic oligonucleotide
  Antisense strand to SEQ ID NO: 1276366
uuucaugaguuucacgugc

SEQ ID NO: 1276368 - RNA, 19 nt, Artificial Sequence
  Description of Artificial Sequence: Synthetic oligonucleotide
  Sense strand starting at position 3184 of SEQ ID NO: 1241488
auaagacauuuggacuaca

SEQ ID NO: 1276369 - RNA, 19 nt, Artificial Sequence
  Description of Artificial Sequence: Synthetic oligonucleotide
  Antisense strand to SEQ ID NO: 1276368
uguaguccaaaugucuuau

SEQ ID NO: 1276370 - RNA, 19 nt, Artificial Sequence
  Description of Artificial Sequence: Synthetic oligonucleotide
  Sense strand starting at position 3221 of SEQ ID NO: 1241488
uuguaauauuguucuacag

SEQ ID NO: 1276371 - RNA, 19 nt, Artificial Sequence
  Description of Artificial Sequence: Synthetic oligonucleotide
  Antisense strand to SEQ ID NO: 1276370
cuguagaacaauauuacaa

SEQ ID NO: 1276372 - RNA, 19 nt, Artificial Sequence
  Description of Artificial Sequence: Synthetic oligonucleotide
  Sense strand starting at position 3525 of SEQ ID NO: 1241488
ucagucauccaguaauaug

SEQ ID NO: 1276373 - RNA, 19 nt, Artificial Sequence
  Description of Artificial Sequence: Synthetic oligonucleotide
  Antisense strand to SEQ ID NO: 1276372
cauauuacuggaugacuga

SEQ ID NO: 1276374 - RNA, 19 nt, Artificial Sequence
  Description of Artificial Sequence: Synthetic oligonucleotide
  Sense strand starting at position 3579 of SEQ ID NO: 1241488
gaggauagcuaaccuguua

SEQ ID NO: 1276375 - RNA, 19 nt, Artificial Sequence
  Description of Artificial Sequence: Synthetic oligonucleotide
  Antisense strand to SEQ ID NO: 1276374
uaacagguuagcuauccuc

SEQ ID NO: 1276376 - RNA, 19 nt, Artificial Sequence
  Description of Artificial Sequence: Synthetic oligonucleotide
  Sense strand starting at position 3586 of SEQ ID NO: 1241488
gcuaaccuguuaccagaau

SEQ ID NO: 1276377 - RNA, 19 nt, Artificial Sequence
  Description of Artificial Sequence: Synthetic oligonucleotide
  Antisense strand to SEQ ID NO: 1276376
auucugguaacagguuagc

SEQ ID NO: 1276378 - RNA, 19 nt, Artificial Sequence
  Description of Artificial Sequence: Synthetic oligonucleotide
  Sense strand starting at position 3666 of SEQ ID NO: 1241488
acagucuuggaagguaaga

SEQ ID NO: 1276379 - RNA, 19 nt, Artificial Sequence
  Description of Artificial Sequence: Synthetic oligonucleotide
  Antisense strand to SEQ ID NO: 1276378
ucuuaccuuccaagacugu

SEQ ID NO: 1276380 - RNA, 19 nt, Artificial Sequence
  Description of Artificial Sequence: Synthetic oligonucleotide
  Sense strand starting at position 3741 of SEQ ID NO: 1241488
ugguuaccucuccaagcau

SEQ ID NO: 1276381 - RNA, 19 nt, Artificial Sequence
  Description of Artificial Sequence: Synthetic oligonucleotide
  Antisense strand to SEQ ID NO: 1276380
augcuuggagagguaacca

SEQ ID NO: 1276382 - RNA, 19 nt, Artificial Sequence
  Description of Artificial Sequence: Synthetic oligonucleotide
  Sense strand starting at position 3771 of SEQ ID NO: 1241488
cugcaagaauccuuaagga

SEQ ID NO: 1276383 - RNA, 19 nt, Artificial Sequence
  Description of Artificial Sequence: Synthetic oligonucleotide
  Antisense strand to SEQ ID NO: 1276382
uccuuaaggauucuugcag

SEQ ID NO: 1276384 - RNA, 19 nt, Artificial Sequence
  Description of Artificial Sequence: Synthetic oligonucleotide
  Sense strand starting at position 3834 of SEQ ID NO: 1241488
ggauauuggaaguggcauu

SEQ ID NO: 1276385 - RNA, 19 nt, Artificial Sequence
  Description of Artificial Sequence: Synthetic oligonucleotide
  Antisense strand to SEQ ID NO: 1276384
aaugccacuuccaauaucc

SEQ ID NO: 1276386 - RNA, 19 nt, Artificial Sequence
  Description of Artificial Sequence: Synthetic oligonucleotide
  Sense strand starting at position 3911 of SEQ ID NO: 1241488
augcgcuuucuugagagga

SEQ ID NO: 1276387 - RNA, 19 nt, Artificial Sequence
  Description of Artificial Sequence: Synthetic oligonucleotide
  Antisense strand to SEQ ID NO: 1276386
uccucucaagaaagcgcau

SEQ ID NO: 1276388 - RNA, 19 nt, Artificial Sequence
  Description of Artificial Sequence: Synthetic oligonucleotide
  Sense strand starting at position 3915 of SEQ ID NO: 1241488
gcuuucuugagaggaguaa

SEQ ID NO: 1276389 - RNA, 19 nt, Artificial Sequence
  Description of Artificial Sequence: Synthetic oligonucleotide
  Antisense strand to SEQ ID NO: 1276388
uuacuccucucaagaaagc

SEQ ID NO: 1276390 - RNA, 19 nt, Artificial Sequence
  Description of Artificial Sequence: Synthetic oligonucleotide
  Sense strand starting at position 3940 of SEQ ID NO: 1241488
uggaguuagcccugggacu

SEQ ID NO: 1276391 - RNA, 19 nt, Artificial Sequence
  Description of Artificial Sequence: Synthetic oligonucleotide
  Antisense strand to SEQ ID NO: 1276390
agucccagggcuaacucca

SEQ ID NO: 1276392 - RNA, 19 nt, Artificial Sequence
  Description of Artificial Sequence: Synthetic oligonucleotide
  Sense strand starting at position 107 of SEQ ID NO: 1241489
gggucagagcauuaggauu

SEQ ID NO: 1276393 - RNA, 19 nt, Artificial Sequence
  Description of Artificial Sequence: Synthetic oligonucleotide
  Antisense strand to SEQ ID NO: 1276392
aauccuaaugcucugaccc

SEQ ID NO: 1276394 - RNA, 19 nt, Artificial Sequence
  Description of Artificial Sequence: Synthetic oligonucleotide
  Sense strand starting at position 118 of SEQ ID NO: 1241489
uuaggauuagcuggccaca

SEQ ID NO: 1276395 - RNA, 19 nt, Artificial Sequence
  Description of Artificial Sequence: Synthetic oligonucleotide
  Antisense strand to SEQ ID NO: 1276394
uguggccagcuaauccuaa

SEQ ID NO: 1276396 - RNA, 19 nt, Artificial Sequence
  Description of Artificial Sequence: Synthetic oligonucleotide
  Sense strand starting at position 1454 of SEQ ID NO: 1241489
gguaaacaccuuuaaguuu

SEQ ID NO: 1276397 - RNA, 19 nt, Artificial Sequence
  Description of Artificial Sequence: Synthetic oligonucleotide
  Antisense strand to SEQ ID NO: 1276396
aaacuuaaagguguuuacc

SEQ ID NO: 1276398 - RNA, 19 nt, Artificial Sequence
  Description of Artificial Sequence: Synthetic oligonucleotide
  Sense strand starting at position 1700 of SEQ ID NO: 1241489
ggugaaugcugcuuugcaa

SEQ ID NO: 1276399 - RNA, 19 nt, Artificial Sequence
  Description of Artificial Sequence: Synthetic oligonucleotide
  Antisense strand to SEQ ID NO: 1276398
uugcaaagcagcauucacc

SEQ ID NO: 1276400 - RNA, 19 nt, Artificial Sequence
  Description of Artificial Sequence: Synthetic oligonucleotide
  Sense strand starting at position 1983 of SEQ ID NO: 1241489
ggucuacgugucugucagu

SEQ ID NO: 1276401 - RNA, 19 nt, Artificial Sequence
  Description of Artificial Sequence: Synthetic oligonucleotide
  Antisense strand to SEQ ID NO: 1276400
acugacagacacguagacc

SEQ ID NO: 1276402 - RNA, 19 nt, Artificial Sequence
  Description of Artificial Sequence: Synthetic oligonucleotide
  Sense strand starting at position 2385 of SEQ ID NO: 1241489
agcugacuuuccgaggaca

SEQ ID NO: 1276403 - RNA, 19 nt, Artificial Sequence
  Description of Artificial Sequence: Synthetic oligonucleotide
  Antisense strand to SEQ ID NO: 1276402
uguccucggaaagucagcu

SEQ ID NO: 1276404 - RNA, 19 nt, Artificial Sequence
  Description of Artificial Sequence: Synthetic oligonucleotide
  Sense strand starting at position 2387 of SEQ ID NO: 1241489
cugacuuuccgaggacauc

SEQ ID NO: 1276405 - RNA, 19 nt, Artificial Sequence
  Description of Artificial Sequence: Synthetic oligonucleotide
  Antisense strand to SEQ ID NO: 1276404
gauguccucggaaagucag

SEQ ID NO: 1276406 - RNA, 19 nt, Artificial Sequence
  Description of Artificial Sequence: Synthetic oligonucleotide
  Sense strand starting at position 2640 of SEQ ID NO: 1241489
gcucuugcuucccgggaau

SEQ ID NO: 1276407 - RNA, 19 nt, Artificial Sequence
  Description of Artificial Sequence: Synthetic oligonucleotide
  Antisense strand to SEQ ID NO: 1276406
auucccgggaagcaagagc

SEQ ID NO: 1276408 - RNA, 19 nt, Artificial Sequence
  Description of Artificial Sequence: Synthetic oligonucleotide
  Sense strand starting at position 2642 of SEQ ID NO: 1241489
ucuugcuucccgggaauaa

SEQ ID NO: 1276409 - RNA, 19 nt, Artificial Sequence
  Description of Artificial Sequence: Synthetic oligonucleotide
  Antisense strand to SEQ ID NO: 1276408
uuauucccgggaagcaaga

SEQ ID NO: 1276410 - RNA, 19 nt, Artificial Sequence
  Description of Artificial Sequence: Synthetic oligonucleotide
  Sense strand starting at position 2643 of SEQ ID NO: 1241489
cuugcuucccgggaauaac

SEQ ID NO: 1276411 - RNA, 19 nt, Artificial Sequence
  Description of Artificial Sequence: Synthetic oligonucleotide
  Antisense strand to SEQ ID NO: 1276410
guuauucccgggaagcaag

SEQ ID NO: 1276412 - RNA, 19 nt, Artificial Sequence
  Description of Artificial Sequence: Synthetic oligonucleotide
  Sense strand starting at position 2672 of SEQ ID NO: 1241489
uguuuaaagugguggcgua

SEQ ID NO: 1276413 - RNA, 19 nt, Artificial Sequence
  Description of Artificial Sequence: Synthetic oligonucleotide
  Antisense strand to SEQ ID NO: 1276412
uacgccaccacuuuaaaca

SEQ ID NO: 1276414 - RNA, 19 nt, Artificial Sequence
  Description of Artificial Sequence: Synthetic oligonucleotide
  Sense strand starting at position 2673 of SEQ ID NO: 1241489
guuuaaagugguggcguaa

SEQ ID NO: 1276415 - RNA, 19 nt, Artificial Sequence
  Description of Artificial Sequence: Synthetic oligonucleotide
  Antisense strand to SEQ ID NO: 1276414
uuacgccaccacuuuaaac

SEQ ID NO: 1276416 - RNA, 19 nt, Artificial Sequence
  Description of Artificial Sequence: Synthetic oligonucleotide
  Sense strand starting at position 2715 of SEQ ID NO: 1241489
gcuggauauuaguagauga

SEQ ID NO: 1276417 - RNA, 19 nt, Artificial Sequence
  Description of Artificial Sequence: Synthetic oligonucleotide
  Antisense strand to SEQ ID NO: 1276416
ucaucuacuaauauccagc

SEQ ID NO: 1276418 - RNA, 19 nt, Artificial Sequence
  Description of Artificial Sequence: Synthetic oligonucleotide
  Sense strand starting at position 2773 of SEQ ID NO: 1241489
gcaagaaacugcuuaggag

SEQ ID NO: 1276419 - RNA, 19 nt, Artificial Sequence
  Description of Artificial Sequence: Synthetic oligonucleotide
  Antisense strand to SEQ ID NO: 1276418
cuccuaagcaguuucuugc

SEQ ID NO: 1276420 - RNA, 19 nt, Artificial Sequence
  Description of Artificial Sequence: Synthetic oligonucleotide
  Sense strand starting at position 2810 of SEQ ID NO: 1241489
gcgcguucccaggcuucaa

SEQ ID NO: 1276421 - RNA, 19 nt, Artificial Sequence
  Description of Artificial Sequence: Synthetic oligonucleotide
  Antisense strand to SEQ ID NO: 1276420
uugaagccugggaacgcgc

SEQ ID NO: 1276422 - RNA, 19 nt, Artificial Sequence
  Description of Artificial Sequence: Synthetic oligonucleotide
  Sense strand starting at position 3324 of SEQ ID NO: 1241489
ucagcccucuccuugaaga

SEQ ID NO: 1276423 - RNA, 19 nt, Artificial Sequence
  Description of Artificial Sequence: Synthetic oligonucleotide
  Antisense strand to SEQ ID NO: 1276422
ucuucaaggagagggcuga

SEQ ID NO: 1276424 - RNA, 19 nt, Artificial Sequence
  Description of Artificial Sequence: Synthetic oligonucleotide
  Sense strand starting at position 3326 of SEQ ID NO: 1241489
agcccucuccuugaagaga

SEQ ID NO: 1276425 - RNA, 19 nt, Artificial Sequence
  Description of Artificial Sequence: Synthetic oligonucleotide
  Antisense strand to SEQ ID NO: 1276424
ucucuucaaggagagggcu

SEQ ID NO: 1276426 - RNA, 19 nt, Artificial Sequence
  Description of Artificial Sequence: Synthetic oligonucleotide
  Sense strand starting at position 3406 of SEQ ID NO: 1241489
ccuucuuuaccaggguaaa

SEQ ID NO: 1276427 - RNA, 19 nt, Artificial Sequence
  Description of Artificial Sequence: Synthetic oligonucleotide
  Antisense strand to SEQ ID NO: 1276426
uuuacccugguaaagaagg

SEQ ID NO: 1276428 - RNA, 19 nt, Artificial Sequence
  Description of Artificial Sequence: Synthetic oligonucleotide
  Sense strand starting at position 3407 of SEQ ID NO: 1241489
cuucuuuaccaggguaaag

SEQ ID NO: 1276429 - RNA, 19 nt, Artificial Sequence
  Description of Artificial Sequence: Synthetic oligonucleotide
  Antisense strand to SEQ ID NO: 1276428
cuuuacccugguaaagaag

SEQ ID NO: 1276430 - RNA, 19 nt, Artificial Sequence
  Description of Artificial Sequence: Synthetic oligonucleotide
  Sense strand starting at position 139 of SEQ ID NO: 1241490
agguacuucuguugcuuga

SEQ ID NO: 1276431 - RNA, 19 nt, Artificial Sequence
  Description of Artificial Sequence: Synthetic oligonucleotide
  Antisense strand to SEQ ID NO: 1276430
ucaagcaacagaaguaccu

SEQ ID NO: 1276432 - RNA, 19 nt, Artificial Sequence
  Description of Artificial Sequence: Synthetic oligonucleotide
  Sense strand starting at position 141 of SEQ ID NO: 1241490
guacuucuguugcuugaag

SEQ ID NO: 1276433 - RNA, 19 nt, Artificial Sequence
  Description of Artificial Sequence: Synthetic oligonucleotide
  Antisense strand to SEQ ID NO: 1276432
cuucaagcaacagaaguac

SEQ ID NO: 1276434 - RNA, 19 nt, Artificial Sequence
  Description of Artificial Sequence: Synthetic oligonucleotide
  Sense strand starting at position 318 of SEQ ID NO: 1241490
ggagacuguaagcgacaaa

SEQ ID NO: 1276435 - RNA, 19 nt, Artificial Sequence
  Description of Artificial Sequence: Synthetic oligonucleotide
  Antisense strand to SEQ ID NO: 1276434
uuugucgcuuacagucucc

SEQ ID NO: 1276436 - RNA, 19 nt, Artificial Sequence
  Description of Artificial Sequence: Synthetic oligonucleotide
  Sense strand starting at position 634 of SEQ ID NO: 1241490
gggucagagcauuaggauu

SEQ ID NO: 1276437 - RNA, 19 nt, Artificial Sequence
  Description of Artificial Sequence: Synthetic oligonucleotide
  Antisense strand to SEQ ID NO: 1276436
aauccuaaugcucugaccc

SEQ ID NO: 1276438 - RNA, 19 nt, Artificial Sequence
  Description of Artificial Sequence: Synthetic oligonucleotide
  Sense strand starting at position 645 of SEQ ID NO: 1241490
uuaggauuagcuggccaca

SEQ ID NO: 1276439 - RNA, 19 nt, Artificial Sequence
  Description of Artificial Sequence: Synthetic oligonucleotide
  Antisense strand to SEQ ID NO: 1276438
uguggccagcuaauccuaa

SEQ ID NO: 1276440 - RNA, 19 nt, Artificial Sequence
  Description of Artificial Sequence: Synthetic oligonucleotide
  Sense strand starting at position 1981 of SEQ ID NO: 1241490
gguaaacaccuuuaaguuu

SEQ ID NO: 1276441 - RNA, 19 nt, Artificial Sequence
  Description of Artificial Sequence: Synthetic oligonucleotide
  Antisense strand to SEQ ID NO: 1276440
aaacuuaaagguguuuacc

SEQ ID NO: 1276442 - RNA, 19 nt, Artificial Sequence
  Description of Artificial Sequence: Synthetic oligonucleotide
  Sense strand starting at position 2227 of SEQ ID NO: 1241490
ggugaaugcugcuuugcaa

SEQ ID NO: 1276443 - RNA, 19 nt, Artificial Sequence
  Description of Artificial Sequence: Synthetic oligonucleotide
  Antisense strand to SEQ ID NO: 1276442
uugcaaagcagcauucacc

SEQ ID NO: 1276444 - RNA, 19 nt, Artificial Sequence
  Description of Artificial Sequence: Synthetic oligonucleotide
  Sense strand starting at position 2510 of SEQ ID NO: 1241490
ggucuacgugucugucagu

SEQ ID NO: 1276445 - RNA, 19 nt, Artificial Sequence
  Description of Artificial Sequence: Synthetic oligonucleotide
  Antisense strand to SEQ ID NO: 1276444
acugacagacacguagacc

SEQ ID NO: 1276446 - RNA, 19 nt, Artificial Sequence
  Description of Artificial Sequence: Synthetic oligonucleotide
  Sense strand starting at position 2912 of SEQ ID NO: 1241490
agcugacuuuccgaggaca

SEQ ID NO: 1276447 - RNA, 19 nt, Artificial Sequence
  Description of Artificial Sequence: Synthetic oligonucleotide
  Antisense strand to SEQ ID NO: 1276446
uguccucggaaagucagcu

SEQ ID NO: 1276448 - RNA, 19 nt, Artificial Sequence
  Description of Artificial Sequence: Synthetic oligonucleotide
  Sense strand starting at position 2914 of SEQ ID NO: 1241490
cugacuuuccgaggacauc

SEQ ID NO: 1276449 - RNA, 19 nt, Artificial Sequence
  Description of Artificial Sequence: Synthetic oligonucleotide
  Antisense strand to SEQ ID NO: 1276448
gauguccucggaaagucag

SEQ ID NO: 1276450 - RNA, 19 nt, Artificial Sequence
  Description of Artificial Sequence: Synthetic oligonucleotide
  Sense strand starting at position 3167 of SEQ ID NO: 1241490
gcucuugcuucccgggaau

SEQ ID NO: 1276451 - RNA, 19 nt, Artificial Sequence
  Description of Artificial Sequence: Synthetic oligonucleotide
  Antisense strand to SEQ ID NO: 1276450
auucccgggaagcaagagc

SEQ ID NO: 1276452 - RNA, 19 nt, Artificial Sequence
  Description of Artificial Sequence: Synthetic oligonucleotide
  Sense strand starting at position 3169 of SEQ ID NO: 1241490
ucuugcuucccgggaauaa

SEQ ID NO: 1276453 - RNA, 19 nt, Artificial Sequence
  Description of Artificial Sequence: Synthetic oligonucleotide
  Antisense strand to SEQ ID NO: 1276452
uuauucccgggaagcaaga

SEQ ID NO: 1276454 - RNA, 19 nt, Artificial Sequence
  Description of Artificial Sequence: Synthetic oligonucleotide
  Sense strand starting at position 3170 of SEQ ID NO: 1241490
cuugcuucccgggaauaac

SEQ ID NO: 1276455 - RNA, 19 nt, Artificial Sequence
  Description of Artificial Sequence: Synthetic oligonucleotide
  Antisense strand to SEQ ID NO: 1276454
guuauucccgggaagcaag

SEQ ID NO: 1276456 - RNA, 19 nt, Artificial Sequence
  Description of Artificial Sequence: Synthetic oligonucleotide
  Sense strand starting at position 3199 of SEQ ID NO: 1241490
uguuuaaagugguggcgua

SEQ ID NO: 1276457 - RNA, 19 nt, Artificial Sequence
  Description of Artificial Sequence: Synthetic oligonucleotide
  Antisense strand to SEQ ID NO: 1276456
uacgccaccacuuuaaaca

SEQ ID NO: 1276458 - RNA, 19 nt, Artificial Sequence
  Description of Artificial Sequence: Synthetic oligonucleotide
  Sense strand starting at position 3200 of SEQ ID NO: 1241490
guuuaaagugguggcguaa

SEQ ID NO: 1276459 - RNA, 19 nt, Artificial Sequence
  Description of Artificial Sequence: Synthetic oligonucleotide
  Antisense strand to SEQ ID NO: 1276458
uuacgccaccacuuuaaac

SEQ ID NO: 1276460 - RNA, 19 nt, Artificial Sequence
  Description of Artificial Sequence: Synthetic oligonucleotide
  Sense strand starting at position 3242 of SEQ ID NO: 1241490
gcuggauauuaguagauga

SEQ ID NO: 1276461 - RNA, 19 nt, Artificial Sequence
  Description of Artificial Sequence: Synthetic oligonucleotide
  Antisense strand to SEQ ID NO: 1276460
ucaucuacuaauauccagc

SEQ ID NO: 1276462 - RNA, 19 nt, Artificial Sequence
  Description of Artificial Sequence: Synthetic oligonucleotide
  Sense strand starting at position 3300 of SEQ ID NO: 1241490
gcaagaaacugcuuaggag

SEQ ID NO: 1276463 - RNA, 19 nt, Artificial Sequence
  Description of Artificial Sequence: Synthetic oligonucleotide
  Antisense strand to SEQ ID NO: 1276462
cuccuaagcaguuucuugc

SEQ ID NO: 1276464 - RNA, 19 nt, Artificial Sequence
  Description of Artificial Sequence: Synthetic oligonucleotide
  Sense strand starting at position 3337 of SEQ ID NO: 1241490
gcgcguucccaggcuucaa

SEQ ID NO: 1276465 - RNA, 19 nt, Artificial Sequence
  Description of Artificial Sequence: Synthetic oligonucleotide
  Antisense strand to SEQ ID NO: 1276464
uugaagccugggaacgcgc

SEQ ID NO: 1276466 - RNA, 19 nt, Artificial Sequence
  Description of Artificial Sequence: Synthetic oligonucleotide
  Sense strand starting at position 3851 of SEQ ID NO: 1241490
ucagcccucuccuugaaga

SEQ ID NO: 1276467 - RNA, 19 nt, Artificial Sequence
  Description of Artificial Sequence: Synthetic oligonucleotide
  Antisense strand to SEQ ID NO: 1276466
ucuucaaggagagggcuga

SEQ ID NO: 1276468 - RNA, 19 nt, Artificial Sequence
  Description of Artificial Sequence: Synthetic oligonucleotide
  Sense strand starting at position 3853 of SEQ ID NO: 1241490
agcccucuccuugaagaga

SEQ ID NO: 1276469 - RNA, 19 nt, Artificial Sequence
  Description of Artificial Sequence: Synthetic oligonucleotide
  Antisense strand to SEQ ID NO: 1276468
ucucuucaaggagagggcu

SEQ ID NO: 1276470 - RNA, 19 nt, Artificial Sequence
  Description of Artificial Sequence: Synthetic oligonucleotide
  Sense strand starting at position 3933 of SEQ ID NO: 1241490
ccuucuuuaccaggguaaa

SEQ ID NO: 1276471 - RNA, 19 nt, Artificial Sequence
  Description of Artificial Sequence: Synthetic oligonucleotide
  Antisense strand to SEQ ID NO: 1276470
uuuacccugguaaagaagg

SEQ ID NO: 1276472 - RNA, 19 nt, Artificial Sequence
  Description of Artificial Sequence: Synthetic oligonucleotide
  Sense strand starting at position 3934 of SEQ ID NO: 1241490
cuucuuuaccaggguaaag

SEQ ID NO: 1276473 - RNA, 19 nt, Artificial Sequence
  Description of Artificial Sequence: Synthetic oligonucleotide
  Antisense strand to SEQ ID NO: 1276472
cuuuacccugguaaagaag

SEQ ID NO: 1276474 - RNA, 19 nt, Artificial Sequence
  Description of Artificial Sequence: Synthetic oligonucleotide
  Sense strand starting at position 623 of SEQ ID NO: 1241491
ucagcuuguagcgaugauu

SEQ ID NO: 1276475 - RNA, 19 nt, Artificial Sequence
  Description of Artificial Sequence: Synthetic oligonucleotide
  Antisense strand to SEQ ID NO: 1276474
aaucaucgcuacaagcuga

SEQ ID NO: 1276476 - RNA, 19 nt, Artificial Sequence
  Description of Artificial Sequence: Synthetic oligonucleotide
  Sense strand starting at position 752 of SEQ ID NO: 1241491
gcgucugcgccuuggagaa

SEQ ID NO: 1276477 - RNA, 19 nt, Artificial Sequence
  Description of Artificial Sequence: Synthetic oligonucleotide
  Antisense strand to SEQ ID NO: 1276476
uucuccaaggcgcagacgc

SEQ ID NO: 1276478 - RNA, 19 nt, Artificial Sequence
  Description of Artificial Sequence: Synthetic oligonucleotide
  Sense strand starting at position 1012 of SEQ ID NO: 1241491
gccauuuccugaguccaca

SEQ ID NO: 1276479 - RNA, 19 nt, Artificial Sequence
  Description of Artificial Sequence: Synthetic oligonucleotide
  Antisense strand to SEQ ID NO: 1276478
uguggacucaggaaauggc

SEQ ID NO: 1276480 - RNA, 19 nt, Artificial Sequence
  Description of Artificial Sequence: Synthetic oligonucleotide
  Sense strand starting at position 1265 of SEQ ID NO: 1241491
ggguaaacucgccaacacu

SEQ ID NO: 1276481 - RNA, 19 nt, Artificial Sequence
  Description of Artificial Sequence: Synthetic oligonucleotide
  Antisense strand to SEQ ID NO: 1276480
aguguuggcgaguuuaccc

SEQ ID NO: 1276482 - RNA, 19 nt, Artificial Sequence
  Description of Artificial Sequence: Synthetic oligonucleotide
  Sense strand starting at position 1401 of SEQ ID NO: 1241491
ucuagaaaucgucagacac

SEQ ID NO: 1276483 - RNA, 19 nt, Artificial Sequence
  Description of Artificial Sequence: Synthetic oligonucleotide
  Antisense strand to SEQ ID NO: 1276482
gugucugacgauuucuaga

SEQ ID NO: 1276484 - RNA, 19 nt, Artificial Sequence
  Description of Artificial Sequence: Synthetic oligonucleotide
  Sense strand starting at position 1403 of SEQ ID NO: 1241491
uagaaaucgucagacacag

SEQ ID NO: 1276485 - RNA, 19 nt, Artificial Sequence
  Description of Artificial Sequence: Synthetic oligonucleotide
  Antisense strand to SEQ ID NO: 1276484
cugugucugacgauuucua

SEQ ID NO: 1276486 - RNA, 19 nt, Artificial Sequence
  Description of Artificial Sequence: Synthetic oligonucleotide
  Sense strand starting at position 1455 of SEQ ID NO: 1241491
gggaucugcucuuaggaug

SEQ ID NO: 1276487 - RNA, 19 nt, Artificial Sequence
  Description of Artificial Sequence: Synthetic oligonucleotide
  Antisense strand to SEQ ID NO: 1276486
cauccuaagagcagauccc

SEQ ID NO: 1276488 - RNA, 19 nt, Artificial Sequence
  Description of Artificial Sequence: Synthetic oligonucleotide
  Sense strand starting at position 1521 of SEQ ID NO: 1241491
uuccaagacugaggaaauc

SEQ ID NO: 1276489 - RNA, 19 nt, Artificial Sequence
  Description of Artificial Sequence: Synthetic oligonucleotide
  Antisense strand to SEQ ID NO: 1276488
gauuuccucagucuuggaa

SEQ ID NO: 1276490 - RNA, 19 nt, Artificial Sequence
  Description of Artificial Sequence: Synthetic oligonucleotide
  Sense strand starting at position 1745 of SEQ ID NO: 1241491
cguccugcucggguaaauc

SEQ ID NO: 1276491 - RNA, 19 nt, Artificial Sequence
  Description of Artificial Sequence: Synthetic oligonucleotide
  Antisense strand to SEQ ID NO: 1276490
gauuuacccgagcaggacg

SEQ ID NO: 1276492 - RNA, 19 nt, Artificial Sequence
  Description of Artificial Sequence: Synthetic oligonucleotide
  Sense strand starting at position 1754 of SEQ ID NO: 1241491
cggguaaaucuagaaggcu

SEQ ID NO: 1276493 - RNA, 19 nt, Artificial Sequence
  Description of Artificial Sequence: Synthetic oligonucleotide
  Antisense strand to SEQ ID NO: 1276492
agccuucuagauuuacccg

SEQ ID NO: 1276494 - RNA, 19 nt, Artificial Sequence
  Description of Artificial Sequence: Synthetic oligonucleotide
  Sense strand starting at position 1908 of SEQ ID NO: 1241491
gcuggcagccgggauauua

SEQ ID NO: 1276495 - RNA, 19 nt, Artificial Sequence
  Description of Artificial Sequence: Synthetic oligonucleotide
  Antisense strand to SEQ ID NO: 1276494
uaauaucccggcugccagc

SEQ ID NO: 1276496 - RNA, 19 nt, Artificial Sequence
  Description of Artificial Sequence: Synthetic oligonucleotide
  Sense strand starting at position 1937 of SEQ ID NO: 1241491
agcggaaucucuguuuaua

SEQ ID NO: 1276497 - RNA, 19 nt, Artificial Sequence
  Description of Artificial Sequence: Synthetic oligonucleotide
  Antisense strand to SEQ ID NO: 1276496
uauaaacagagauuccgcu

SEQ ID NO: 1276498 - RNA, 19 nt, Artificial Sequence
  Description of Artificial Sequence: Synthetic oligonucleotide
  Sense strand starting at position 1939 of SEQ ID NO: 1241491
cggaaucucuguuuauaua

SEQ ID NO: 1276499 - RNA, 19 nt, Artificial Sequence
  Description of Artificial Sequence: Synthetic oligonucleotide
  Antisense strand to SEQ ID NO: 1276498
uauauaaacagagauuccg

SEQ ID NO: 1276500 - RNA, 19 nt, Artificial Sequence
  Description of Artificial Sequence: Synthetic oligonucleotide
  Sense strand starting at position 2009 of SEQ ID NO: 1241491
gguguuaaguaccugaaug

SEQ ID NO: 1276501 - RNA, 19 nt, Artificial Sequence
  Description of Artificial Sequence: Synthetic oligonucleotide
  Antisense strand to SEQ ID NO: 1276500
cauucagguacuuaacacc

SEQ ID NO: 1276502 - RNA, 19 nt, Artificial Sequence
  Description of Artificial Sequence: Synthetic oligonucleotide
  Sense strand starting at position 2010 of SEQ ID NO: 1241491
guguuaaguaccugaauga

SEQ ID NO: 1276503 - RNA, 19 nt, Artificial Sequence
  Description of Artificial Sequence: Synthetic oligonucleotide
  Antisense strand to SEQ ID NO: 1276502
ucauucagguacuuaacac

SEQ ID NO: 1276504 - RNA, 19 nt, Artificial Sequence
  Description of Artificial Sequence: Synthetic oligonucleotide
  Sense strand starting at position 2148 of SEQ ID NO: 1241491
agcauuuggcauuagcgau

SEQ ID NO: 1276505 - RNA, 19 nt, Artificial Sequence
  Description of Artificial Sequence: Synthetic oligonucleotide
  Antisense strand to SEQ ID NO: 1276504
aucgcuaaugccaaaugcu

SEQ ID NO: 1276506 - RNA, 19 nt, Artificial Sequence
  Description of Artificial Sequence: Synthetic oligonucleotide
  Sense strand starting at position 2158 of SEQ ID NO: 1241491
auuagcgauucugucugau

SEQ ID NO: 1276507 - RNA, 19 nt, Artificial Sequence
  Description of Artificial Sequence: Synthetic oligonucleotide
  Antisense strand to SEQ ID NO: 1276506
aucagacagaaucgcuaau

SEQ ID NO: 1276508 - RNA, 19 nt, Artificial Sequence
  Description of Artificial Sequence: Synthetic oligonucleotide
  Sense strand starting at position 2160 of SEQ ID NO: 1241491
uagcgauucugucugauua

SEQ ID NO: 1276509 - RNA, 19 nt, Artificial Sequence
  Description of Artificial Sequence: Synthetic oligonucleotide
  Antisense strand to SEQ ID NO: 1276508
uaaucagacagaaucgcua

SEQ ID NO: 1276510 - RNA, 19 nt, Artificial Sequence
  Description of Artificial Sequence: Synthetic oligonucleotide
  Sense strand starting at position 2161 of SEQ ID NO: 1241491
agcgauucugucugauuag

SEQ ID NO: 1276511 - RNA, 19 nt, Artificial Sequence
  Description of Artificial Sequence: Synthetic oligonucleotide
  Antisense strand to SEQ ID NO: 1276510
cuaaucagacagaaucgcu

SEQ ID NO: 1276512 - RNA, 19 nt, Artificial Sequence
  Description of Artificial Sequence: Synthetic oligonucleotide
  Sense strand starting at position 2170 of SEQ ID NO: 1241491
gucugauuagcccaaagug

SEQ ID NO: 1276513 - RNA, 19 nt, Artificial Sequence
  Description of Artificial Sequence: Synthetic oligonucleotide
  Antisense strand to SEQ ID NO: 1276512
cacuuugggcuaaucagac

SEQ ID NO: 1276514 - RNA, 19 nt, Artificial Sequence
  Description of Artificial Sequence: Synthetic oligonucleotide
  Sense strand starting at position 2380 of SEQ ID NO: 1241491
uugcuuuauucuucgagcu

SEQ ID NO: 1276515 - RNA, 19 nt, Artificial Sequence
  Description of Artificial Sequence: Synthetic oligonucleotide
  Antisense strand to SEQ ID NO: 1276514
agcucgaagaauaaagcaa

SEQ ID NO: 1276516 - RNA, 19 nt, Artificial Sequence
  Description of Artificial Sequence: Synthetic oligonucleotide
  Sense strand starting at position 2381 of SEQ ID NO: 1241491
ugcuuuauucuucgagcuu

SEQ ID NO: 1276517 - RNA, 19 nt, Artificial Sequence
  Description of Artificial Sequence: Synthetic oligonucleotide
  Antisense strand to SEQ ID NO: 1276516
aagcucgaagaauaaagca

SEQ ID NO: 1276518 - RNA, 19 nt, Artificial Sequence
  Description of Artificial Sequence: Synthetic oligonucleotide
  Sense strand starting at position 2396 of SEQ ID NO: 1241491
gcuuguuugcuggaguggu

SEQ ID NO: 1276519 - RNA, 19 nt, Artificial Sequence
  Description of Artificial Sequence: Synthetic oligonucleotide
  Antisense strand to SEQ ID NO: 1276518
accacuccagcaaacaagc

SEQ ID NO: 1276520 - RNA, 19 nt, Artificial Sequence
  Description of Artificial Sequence: Synthetic oligonucleotide
  Sense strand starting at position 2409 of SEQ ID NO: 1241491
agugguaguuucccgcaau

SEQ ID NO: 1276521 - RNA, 19 nt, Artificial Sequence
  Description of Artificial Sequence: Synthetic oligonucleotide
  Antisense strand to SEQ ID NO: 1276520
auugcgggaaacuaccacu

SEQ ID NO: 1276522 - RNA, 19 nt, Artificial Sequence
  Description of Artificial Sequence: Synthetic oligonucleotide
  Sense strand starting at position 2412 of SEQ ID NO: 1241491
gguaguuucccgcaauuau

SEQ ID NO: 1276523 - RNA, 19 nt, Artificial Sequence
  Description of Artificial Sequence: Synthetic oligonucleotide
  Antisense strand to SEQ ID NO: 1276522
auaauugcgggaaacuacc

SEQ ID NO: 1276524 - RNA, 19 nt, Artificial Sequence
  Description of Artificial Sequence: Synthetic oligonucleotide
  Sense strand starting at position 2419 of SEQ ID NO: 1241491
ucccgcaauuauccagaaa

SEQ ID NO: 1276525 - RNA, 19 nt, Artificial Sequence
  Description of Artificial Sequence: Synthetic oligonucleotide
  Antisense strand to SEQ ID NO: 1276524
uuucuggauaauugcggga

SEQ ID NO: 1276526 - RNA, 19 nt, Artificial Sequence
  Description of Artificial Sequence: Synthetic oligonucleotide
  Sense strand starting at position 2422 of SEQ ID NO: 1241491
cgcaauuauccagaaagug

SEQ ID NO: 1276527 - RNA, 19 nt, Artificial Sequence
  Description of Artificial Sequence: Synthetic oligonucleotide
  Antisense strand to SEQ ID NO: 1276526
cacuuucuggauaauugcg

SEQ ID NO: 1276528 - RNA, 19 nt, Artificial Sequence
  Description of Artificial Sequence: Synthetic oligonucleotide
  Sense strand starting at position 2693 of SEQ ID NO: 1241491
agaagaggcuuguagccaa

SEQ ID NO: 1276529 - RNA, 19 nt, Artificial Sequence
  Description of Artificial Sequence: Synthetic oligonucleotide
  Antisense strand to SEQ ID NO: 1276528
uuggcuacaagccucuucu

SEQ ID NO: 1276530 - RNA, 19 nt, Artificial Sequence
  Description of Artificial Sequence: Synthetic oligonucleotide
  Sense strand starting at position 3098 of SEQ ID NO: 1241491
uggguuucucugggaucuu

SEQ ID NO: 1276531 - RNA, 19 nt, Artificial Sequence
  Description of Artificial Sequence: Synthetic oligonucleotide
  Antisense strand to SEQ ID NO: 1276530
aagaucccagagaaaccca

SEQ ID NO: 1276532 - RNA, 19 nt, Artificial Sequence
  Description of Artificial Sequence: Synthetic oligonucleotide
  Sense strand starting at position 3247 of SEQ ID NO: 1241491
agaggccucuccuacugaa

SEQ ID NO: 1276533 - RNA, 19 nt, Artificial Sequence
  Description of Artificial Sequence: Synthetic oligonucleotide
  Antisense strand to SEQ ID NO: 1276532
uucaguaggagaggccucu

SEQ ID NO: 1276534 - RNA, 19 nt, Artificial Sequence
  Description of Artificial Sequence: Synthetic oligonucleotide
  Sense strand starting at position 3264 of SEQ ID NO: 1241491
aagcuaguaguuuggauau

SEQ ID NO: 1276535 - RNA, 19 nt, Artificial Sequence
  Description of Artificial Sequence: Synthetic oligonucleotide
  Antisense strand to SEQ ID NO: 1276534
auauccaaacuacuagcuu

SEQ ID NO: 1276536 - RNA, 19 nt, Artificial Sequence
  Description of Artificial Sequence: Synthetic oligonucleotide
  Sense strand starting at position 3266 of SEQ ID NO: 1241491
gcuaguaguuuggauauuu

SEQ ID NO: 1276537 - RNA, 19 nt, Artificial Sequence
  Description of Artificial Sequence: Synthetic oligonucleotide
  Antisense strand to SEQ ID NO: 1276536
aaauauccaaacuacuagc

SEQ ID NO: 1276538 - RNA, 19 nt, Artificial Sequence
  Description of Artificial Sequence: Synthetic oligonucleotide
  Sense strand starting at position 3299 of SEQ ID NO: 1241491
agcgaagggcucuguacuu

SEQ ID NO: 1276539 - RNA, 19 nt, Artificial Sequence
  Description of Artificial Sequence: Synthetic oligonucleotide
  Antisense strand to SEQ ID NO: 1276538
aaguacagagcccuucgcu

SEQ ID NO: 1276540 - RNA, 19 nt, Artificial Sequence
  Description of Artificial Sequence: Synthetic oligonucleotide
  Sense strand starting at position 3552 of SEQ ID NO: 1241491
guuggaagcauuuguucca

SEQ ID NO: 1276541 - RNA, 19 nt, Artificial Sequence
  Description of Artificial Sequence: Synthetic oligonucleotide
  Antisense strand to SEQ ID NO: 1276540
uggaacaaaugcuuccaac

SEQ ID NO: 1276542 - RNA, 19 nt, Artificial Sequence
  Description of Artificial Sequence: Synthetic oligonucleotide
  Sense strand starting at position 3581 of SEQ ID NO: 1241491
ugcauuuguucaguccgga

SEQ ID NO: 1276543 - RNA, 19 nt, Artificial Sequence
  Description of Artificial Sequence: Synthetic oligonucleotide
  Antisense strand to SEQ ID NO: 1276542
uccggacugaacaaaugca

SEQ ID NO: 1276544 - RNA, 19 nt, Artificial Sequence
  Description of Artificial Sequence: Synthetic oligonucleotide
  Sense strand starting at position 3596 of SEQ ID NO: 1241491
cggaauaaugcaugauuga

SEQ ID NO: 1276545 - RNA, 19 nt, Artificial Sequence
  Description of Artificial Sequence: Synthetic oligonucleotide
  Antisense strand to SEQ ID NO: 1276544
ucaaucaugcauuauuccg

SEQ ID NO: 1276546 - RNA, 19 nt, Artificial Sequence
  Description of Artificial Sequence: Synthetic oligonucleotide
  Sense strand starting at position 3610 of SEQ ID NO: 1241491
auugacgucugcucacaau

SEQ ID NO: 1276547 - RNA, 19 nt, Artificial Sequence
  Description of Artificial Sequence: Synthetic oligonucleotide
  Antisense strand to SEQ ID NO: 1276546
auugugagcagacgucaau

SEQ ID NO: 1276548 - RNA, 19 nt, Artificial Sequence
  Description of Artificial Sequence: Synthetic oligonucleotide
  Sense strand starting at position 3631 of SEQ ID NO: 1241491
gcuuuaacgcgccgggaua

SEQ ID NO: 1276549 - RNA, 19 nt, Artificial Sequence
  Description of Artificial Sequence: Synthetic oligonucleotide
  Antisense strand to SEQ ID NO: 1276548
uaucccggcgcguuaaagc

SEQ ID NO: 1276550 - RNA, 19 nt, Artificial Sequence
  Description of Artificial Sequence: Synthetic oligonucleotide
  Sense strand starting at position 3642 of SEQ ID NO: 1241491
ccgggauaaaucggagcuu

SEQ ID NO: 1276551 - RNA, 19 nt, Artificial Sequence
  Description of Artificial Sequence: Synthetic oligonucleotide
  Antisense strand to SEQ ID NO: 1276550
aagcuccgauuuaucccgg

SEQ ID NO: 1276552 - RNA, 19 nt, Artificial Sequence
  Description of Artificial Sequence: Synthetic oligonucleotide
  Sense strand starting at position 3784 of SEQ ID NO: 1241491
acugaaaugacuuggcugu

SEQ ID NO: 1276553 - RNA, 19 nt, Artificial Sequence
  Description of Artificial Sequence: Synthetic oligonucleotide
  Antisense strand to SEQ ID NO: 1276552
acagccaagucauuucagu

SEQ ID NO: 1276554 - RNA, 19 nt, Artificial Sequence
  Description of Artificial Sequence: Synthetic oligonucleotide
  Sense strand starting at position 3 of SEQ ID NO: 1241492
aagugcucugaacgucaaa

SEQ ID NO: 1276555 - RNA, 19 nt, Artificial Sequence
  Description of Artificial Sequence: Synthetic oligonucleotide
  Antisense strand to SEQ ID NO: 1276554
uuugacguucagagcacuu

SEQ ID NO: 1276556 - RNA, 19 nt, Artificial Sequence
  Description of Artificial Sequence: Synthetic oligonucleotide
  Sense strand starting at position 237 of SEQ ID NO: 1241492
ugugcuucugaaggaagau

SEQ ID NO: 1276557 - RNA, 19 nt, Artificial Sequence
  Description of Artificial Sequence: Synthetic oligonucleotide
  Antisense strand to SEQ ID NO: 1276556
aucuuccuucagaagcaca

SEQ ID NO: 1276558 - RNA, 19 nt, Artificial Sequence
  Description of Artificial Sequence: Synthetic oligonucleotide
  Sense strand starting at position 238 of SEQ ID NO: 1241492
gugcuucugaaggaagauu

SEQ ID NO: 1276559 - RNA, 19 nt, Artificial Sequence
  Description of Artificial Sequence: Synthetic oligonucleotide
  Antisense strand to SEQ ID NO: 1276558
aaucuuccuucagaagcac

SEQ ID NO: 1276560 - RNA, 19 nt, Artificial Sequence
  Description of Artificial Sequence: Synthetic oligonucleotide
  Sense strand starting at position 321 of SEQ ID NO: 1241492
aaggauuccgcuuggagau

SEQ ID NO: 1276561 - RNA, 19 nt, Artificial Sequence
  Description of Artificial Sequence: Synthetic oligonucleotide
  Antisense strand to SEQ ID NO: 1276560
aucuccaagcggaauccuu

SEQ ID NO: 1276562 - RNA, 19 nt, Artificial Sequence
  Description of Artificial Sequence: Synthetic oligonucleotide
  Sense strand starting at position 340 of SEQ ID NO: 1241492
gcagaacagauguaguaca

SEQ ID NO: 1276563 - RNA, 19 nt, Artificial Sequence
  Description of Artificial Sequence: Synthetic oligonucleotide
  Antisense strand to SEQ ID NO: 1276562
uguacuacaucuguucugc

SEQ ID NO: 1276564 - RNA, 19 nt, Artificial Sequence
  Description of Artificial Sequence: Synthetic oligonucleotide
  Sense strand starting at position 360 of SEQ ID NO: 1241492
cuaaaugucucuucuggau

SEQ ID NO: 1276565 - RNA, 19 nt, Artificial Sequence
  Description of Artificial Sequence: Synthetic oligonucleotide
  Antisense strand to SEQ ID NO: 1276564
auccagaagagacauuuag

SEQ ID NO: 1276566 - RNA, 19 nt, Artificial Sequence
  Description of Artificial Sequence: Synthetic oligonucleotide
  Sense strand starting at position 364 of SEQ ID NO: 1241492
augucucuucuggaugacu

SEQ ID NO: 1276567 - RNA, 19 nt, Artificial Sequence
  Description of Artificial Sequence: Synthetic oligonucleotide
  Antisense strand to SEQ ID NO: 1276566
agucauccagaagagacau

SEQ ID NO: 1276568 - RNA, 19 nt, Artificial Sequence
  Description of Artificial Sequence: Synthetic oligonucleotide
  Sense strand starting at position 366 of SEQ ID NO: 1241492
gucucuucuggaugacuga

SEQ ID NO: 1276569 - RNA, 19 nt, Artificial Sequence
  Description of Artificial Sequence: Synthetic oligonucleotide
  Antisense strand to SEQ ID NO: 1276568
ucagucauccagaagagac

SEQ ID NO: 1276570 - RNA, 19 nt, Artificial Sequence
  Description of Artificial Sequence: Synthetic oligonucleotide
  Sense strand starting at position 574 of SEQ ID NO: 1241492
ucaaguuaguggucucaac

SEQ ID NO: 1276571 - RNA, 19 nt, Artificial Sequence
  Description of Artificial Sequence: Synthetic oligonucleotide
  Antisense strand to SEQ ID NO: 1276570
guugagaccacuaacuuga

SEQ ID NO: 1276572 - RNA, 19 nt, Artificial Sequence
  Description of Artificial Sequence: Synthetic oligonucleotide
  Sense strand starting at position 671 of SEQ ID NO: 1241492
aggguauaguuuccugaac

SEQ ID NO: 1276573 - RNA, 19 nt, Artificial Sequence
  Description of Artificial Sequence: Synthetic oligonucleotide
  Antisense strand to SEQ ID NO: 1276572
guucaggaaacuauacccu

SEQ ID NO: 1276574 - RNA, 19 nt, Artificial Sequence
  Description of Artificial Sequence: Synthetic oligonucleotide
  Sense strand starting at position 672 of SEQ ID NO: 1241492
ggguauaguuuccugaacu

SEQ ID NO: 1276575 - RNA, 19 nt, Artificial Sequence
  Description of Artificial Sequence: Synthetic oligonucleotide
  Antisense strand to SEQ ID NO: 1276574
aguucaggaaacuauaccc

SEQ ID NO: 1276576 - RNA, 19 nt, Artificial Sequence
  Description of Artificial Sequence: Synthetic oligonucleotide
  Sense strand starting at position 698 of SEQ ID NO: 1241492
gaguccaguguguauguua

SEQ ID NO: 1276577 - RNA, 19 nt, Artificial Sequence
  Description of Artificial Sequence: Synthetic oligonucleotide
  Antisense strand to SEQ ID NO: 1276576
uaacauacacacuggacuc

SEQ ID NO: 1276578 - RNA, 19 nt, Artificial Sequence
  Description of Artificial Sequence: Synthetic oligonucleotide
  Sense strand starting at position 730 of SEQ ID NO: 1241492
ccauuuguauauuaaguca

SEQ ID NO: 1276579 - RNA, 19 nt, Artificial Sequence
  Description of Artificial Sequence: Synthetic oligonucleotide
  Antisense strand to SEQ ID NO: 1276578
ugacuuaauauacaaaugg

SEQ ID NO: 1276580 - RNA, 19 nt, Artificial Sequence
  Description of Artificial Sequence: Synthetic oligonucleotide
  Sense strand starting at position 836 of SEQ ID NO: 1241492
acuaaucuuuggcuugcua

SEQ ID NO: 1276581 - RNA, 19 nt, Artificial Sequence
  Description of Artificial Sequence: Synthetic oligonucleotide
  Antisense strand to SEQ ID NO: 1276580
uagcaagccaaagauuagu

SEQ ID NO: 1276582 - RNA, 19 nt, Artificial Sequence
  Description of Artificial Sequence: Synthetic oligonucleotide
  Sense strand starting at position 881 of SEQ ID NO: 1241492
agcuaauucuucccgguca

SEQ ID NO: 1276583 - RNA, 19 nt, Artificial Sequence
  Description of Artificial Sequence: Synthetic oligonucleotide
  Antisense strand to SEQ ID NO: 1276582
ugaccgggaagaauuagcu

SEQ ID NO: 1276584 - RNA, 19 nt, Artificial Sequence
  Description of Artificial Sequence: Synthetic oligonucleotide
  Sense strand starting at position 883 of SEQ ID NO: 1241492
cuaauucuucccggucaag

SEQ ID NO: 1276585 - RNA, 19 nt, Artificial Sequence
  Description of Artificial Sequence: Synthetic oligonucleotide
  Antisense strand to SEQ ID NO: 1276584
cuugaccgggaagaauuag

SEQ ID NO: 1276586 - RNA, 19 nt, Artificial Sequence
  Description of Artificial Sequence: Synthetic oligonucleotide
  Sense strand starting at position 971 of SEQ ID NO: 1241492
gguccacuuuccucuugua

SEQ ID NO: 1276587 - RNA, 19 nt, Artificial Sequence
  Description of Artificial Sequence: Synthetic oligonucleotide
  Antisense strand to SEQ ID NO: 1276586
uacaagaggaaaguggacc

SEQ ID NO: 1276588 - RNA, 19 nt, Artificial Sequence
  Description of Artificial Sequence: Synthetic oligonucleotide
  Sense strand starting at position 985 of SEQ ID NO: 1241492
uuguaauacuuaccagaug

SEQ ID NO: 1276589 - RNA, 19 nt, Artificial Sequence
  Description of Artificial Sequence: Synthetic oligonucleotide
  Antisense strand to SEQ ID NO: 1276588
caucugguaaguauuacaa

SEQ ID NO: 1276590 - RNA, 19 nt, Artificial Sequence
  Description of Artificial Sequence: Synthetic oligonucleotide
  Sense strand starting at position 1588 of SEQ ID NO: 1241492
cuagaaaguuuccuugccu

SEQ ID NO: 1276591 - RNA, 19 nt, Artificial Sequence
  Description of Artificial Sequence: Synthetic oligonucleotide
  Antisense strand to SEQ ID NO: 1276590
aggcaaggaaacuuucuag

SEQ ID NO: 1276592 - RNA, 19 nt, Artificial Sequence
  Description of Artificial Sequence: Synthetic oligonucleotide
  Sense strand starting at position 1615 of SEQ ID NO: 1241492
uuugaugcucuuggucuaa

SEQ ID NO: 1276593 - RNA, 19 nt, Artificial Sequence
  Description of Artificial Sequence: Synthetic oligonucleotide
  Antisense strand to SEQ ID NO: 1276592
uuagaccaagagcaucaaa

SEQ ID NO: 1276594 - RNA, 19 nt, Artificial Sequence
  Description of Artificial Sequence: Synthetic oligonucleotide
  Sense strand starting at position 2017 of SEQ ID NO: 1241492
gcagcuacuacgucauagu

SEQ ID NO: 1276595 - RNA, 19 nt, Artificial Sequence
  Description of Artificial Sequence: Synthetic oligonucleotide
  Antisense strand to SEQ ID NO: 1276594
acuaugacguaguagcugc

SEQ ID NO: 1276596 - RNA, 19 nt, Artificial Sequence
  Description of Artificial Sequence: Synthetic oligonucleotide
  Sense strand starting at position 2018 of SEQ ID NO: 1241492
cagcuacuacgucauaguu

SEQ ID NO: 1276597 - RNA, 19 nt, Artificial Sequence
  Description of Artificial Sequence: Synthetic oligonucleotide
  Antisense strand to SEQ ID NO: 1276596
aacuaugacguaguagcug

SEQ ID NO: 1276598 - RNA, 19 nt, Artificial Sequence
  Description of Artificial Sequence: Synthetic oligonucleotide
  Sense strand starting at position 2060 of SEQ ID NO: 1241492
gugggugugucacccagau

SEQ ID NO: 1276599 - RNA, 19 nt, Artificial Sequence
  Description of Artificial Sequence: Synthetic oligonucleotide
  Antisense strand to SEQ ID NO: 1276598
aucugggugacacacccac

SEQ ID NO: 1276600 - RNA, 19 nt, Artificial Sequence
  Description of Artificial Sequence: Synthetic oligonucleotide
  Sense strand starting at position 2198 of SEQ ID NO: 1241492
ggcucaaucugggcgagaa

SEQ ID NO: 1276601 - RNA, 19 nt, Artificial Sequence
  Description of Artificial Sequence: Synthetic oligonucleotide
  Antisense strand to SEQ ID NO: 1276600
uucucgcccagauugagcc

SEQ ID NO: 1276602 - RNA, 19 nt, Artificial Sequence
  Description of Artificial Sequence: Synthetic oligonucleotide
  Sense strand starting at position 2199 of SEQ ID NO: 1241492
gcucaaucugggcgagaac

SEQ ID NO: 1276603 - RNA, 19 nt, Artificial Sequence
  Description of Artificial Sequence: Synthetic oligonucleotide
  Antisense strand to SEQ ID NO: 1276602
guucucgcccagauugagc

SEQ ID NO: 1276604 - RNA, 19 nt, Artificial Sequence
  Description of Artificial Sequence: Synthetic oligonucleotide
  Sense strand starting at position 2440 of SEQ ID NO: 1241492
gccagauucccauauccag

SEQ ID NO: 1276605 - RNA, 19 nt, Artificial Sequence
  Description of Artificial Sequence: Synthetic oligonucleotide
  Antisense strand to SEQ ID NO: 1276604
cuggauaugggaaucuggc

SEQ ID NO: 1276606 - RNA, 19 nt, Artificial Sequence
  Description of Artificial Sequence: Synthetic oligonucleotide
  Sense strand starting at position 2466 of SEQ ID NO: 1241492
cacucagaggguuguagua

SEQ ID NO: 1276607 - RNA, 19 nt, Artificial Sequence
  Description of Artificial Sequence: Synthetic oligonucleotide
  Antisense strand to SEQ ID NO: 1276606
uacuacaacccucugagug

SEQ ID NO: 1276608 - RNA, 19 nt, Artificial Sequence
  Description of Artificial Sequence: Synthetic oligonucleotide
  Sense strand starting at position 2689 of SEQ ID NO: 1241492
ccaggcuucccucagagua

SEQ ID NO: 1276609 - RNA, 19 nt, Artificial Sequence
  Description of Artificial Sequence: Synthetic oligonucleotide
  Antisense strand to SEQ ID NO: 1276608
uacucugagggaagccugg

SEQ ID NO: 1276610 - RNA, 19 nt, Artificial Sequence
  Description of Artificial Sequence: Synthetic oligonucleotide
  Sense strand starting at position 2701 of SEQ ID NO: 1241492
cagaguaagucuuugcuuc

SEQ ID NO: 1276611 - RNA, 19 nt, Artificial Sequence
  Description of Artificial Sequence: Synthetic oligonucleotide
  Antisense strand to SEQ ID NO: 1276610
gaagcaaagacuuacucug

SEQ ID NO: 1276612 - RNA, 19 nt, Artificial Sequence
  Description of Artificial Sequence: Synthetic oligonucleotide
  Sense strand starting at position 2705 of SEQ ID NO: 1241492
guaagucuuugcuuccaca

SEQ ID NO: 1276613 - RNA, 19 nt, Artificial Sequence
  Description of Artificial Sequence: Synthetic oligonucleotide
  Antisense strand to SEQ ID NO: 1276612
uguggaagcaaagacuuac

SEQ ID NO: 1276614 - RNA, 19 nt, Artificial Sequence
  Description of Artificial Sequence: Synthetic oligonucleotide
  Sense strand starting at position 2899 of SEQ ID NO: 1241492
gugagugcuuccucuggga

SEQ ID NO: 1276615 - RNA, 19 nt, Artificial Sequence
  Description of Artificial Sequence: Synthetic oligonucleotide
  Antisense strand to SEQ ID NO: 1276614
ucccagaggaagcacucac

SEQ ID NO: 1276616 - RNA, 19 nt, Artificial Sequence
  Description of Artificial Sequence: Synthetic oligonucleotide
  Sense strand starting at position 3097 of SEQ ID NO: 1241492
aaacuuuguguuugagcca

SEQ ID NO: 1276617 - RNA, 19 nt, Artificial Sequence
  Description of Artificial Sequence: Synthetic oligonucleotide
  Antisense strand to SEQ ID NO: 1276616
uggcucaaacacaaaguuu

SEQ ID NO: 1276618 - RNA, 19 nt, Artificial Sequence
  Description of Artificial Sequence: Synthetic oligonucleotide
  Sense strand starting at position 3102 of SEQ ID NO: 1241492
uuguguuugagccaggcau

SEQ ID NO: 1276619 - RNA, 19 nt, Artificial Sequence
  Description of Artificial Sequence: Synthetic oligonucleotide
  Antisense strand to SEQ ID NO: 1276618
augccuggcucaaacacaa

SEQ ID NO: 1276620 - RNA, 19 nt, Artificial Sequence
  Description of Artificial Sequence: Synthetic oligonucleotide
  Sense strand starting at position 3187 of SEQ ID NO: 1241492
ggaguugagccaugaucac

SEQ ID NO: 1276621 - RNA, 19 nt, Artificial Sequence
  Description of Artificial Sequence: Synthetic oligonucleotide
  Antisense strand to SEQ ID NO: 1276620
gugaucauggcucaacucc

SEQ ID NO: 1276622 - RNA, 19 nt, Artificial Sequence
  Description of Artificial Sequence: Synthetic oligonucleotide
  Sense strand starting at position 3426 of SEQ ID NO: 1241492
uuugcuaggcauugguaaa

SEQ ID NO: 1276623 - RNA, 19 nt, Artificial Sequence
  Description of Artificial Sequence: Synthetic oligonucleotide
  Antisense strand to SEQ ID NO: 1276622
uuuaccaaugccuagcaaa

SEQ ID NO: 1276624 - RNA, 19 nt, Artificial Sequence
  Description of Artificial Sequence: Synthetic oligonucleotide
  Sense strand starting at position 3427 of SEQ ID NO: 1241492
uugcuaggcauugguaaac

SEQ ID NO: 1276625 - RNA, 19 nt, Artificial Sequence
  Description of Artificial Sequence: Synthetic oligonucleotide
  Antisense strand to SEQ ID NO: 1276624
guuuaccaaugccuagcaa

SEQ ID NO: 1276626 - RNA, 19 nt, Artificial Sequence
  Description of Artificial Sequence: Synthetic oligonucleotide
  Sense strand starting at position 3437 of SEQ ID NO: 1241492
uugguaaaccacugaaguu

SEQ ID NO: 1276627 - RNA, 19 nt, Artificial Sequence
  Description of Artificial Sequence: Synthetic oligonucleotide
  Antisense strand to SEQ ID NO: 1276626
aacuucagugguuuaccaa

SEQ ID NO: 1276628 - RNA, 19 nt, Artificial Sequence
  Description of Artificial Sequence: Synthetic oligonucleotide
  Sense strand starting at position 3862 of SEQ ID NO: 1241492
auguaaugugaauauggua

SEQ ID NO: 1276629 - RNA, 19 nt, Artificial Sequence
  Description of Artificial Sequence: Synthetic oligonucleotide
  Antisense strand to SEQ ID NO: 1276628
uaccauauucacauuacau

SEQ ID NO: 1276630 - RNA, 19 nt, Artificial Sequence
  Description of Artificial Sequence: Synthetic oligonucleotide
  Sense strand starting at position 3925 of SEQ ID NO: 1241492
ggagcauccagaugacaua

SEQ ID NO: 1276631 - RNA, 19 nt, Artificial Sequence
  Description of Artificial Sequence: Synthetic oligonucleotide
  Antisense strand to SEQ ID NO: 1276630
uaugucaucuggaugcucc

SEQ ID NO: 1276632 - RNA, 19 nt, Artificial Sequence
  Description of Artificial Sequence: Synthetic oligonucleotide
  Sense strand starting at position 3954 of SEQ ID NO: 1241492
uagggaaagugguuuggga

SEQ ID NO: 1276633 - RNA, 19 nt, Artificial Sequence
  Description of Artificial Sequence: Synthetic oligonucleotide
  Antisense strand to SEQ ID NO: 1276632
ucccaaaccacuuucccua

SEQ ID NO: 1276634 - RNA, 19 nt, Artificial Sequence
  Description of Artificial Sequence: Synthetic oligonucleotide
  Sense strand starting at position 222 of SEQ ID NO: 1241493
guaaauagugaugagcuau

SEQ ID NO: 1276635 - RNA, 19 nt, Artificial Sequence
  Description of Artificial Sequence: Synthetic oligonucleotide
  Antisense strand to SEQ ID NO: 1276634
auagcucaucacuauuuac

SEQ ID NO: 1276636 - RNA, 19 nt, Artificial Sequence
  Description of Artificial Sequence: Synthetic oligonucleotide
  Sense strand starting at position 247 of SEQ ID NO: 1241493
uugucauuagcagacacau

SEQ ID NO: 1276637 - RNA, 19 nt, Artificial Sequence
  Description of Artificial Sequence: Synthetic oligonucleotide
  Antisense strand to SEQ ID NO: 1276636
augugucugcuaaugacaa

SEQ ID NO: 1276638 - RNA, 19 nt, Artificial Sequence
  Description of Artificial Sequence: Synthetic oligonucleotide
  Sense strand starting at position 381 of SEQ ID NO: 1241493
ggaaauaacucaguguggu

SEQ ID NO: 1276639 - RNA, 19 nt, Artificial Sequence
  Description of Artificial Sequence: Synthetic oligonucleotide
  Antisense strand to SEQ ID NO: 1276638
accacacugaguuauuucc

SEQ ID NO: 1276640 - RNA, 19 nt, Artificial Sequence
  Description of Artificial Sequence: Synthetic oligonucleotide
  Sense strand starting at position 382 of SEQ ID NO: 1241493
gaaauaacucaguguggug

SEQ ID NO: 1276641 - RNA, 19 nt, Artificial Sequence
  Description of Artificial Sequence: Synthetic oligonucleotide
  Antisense strand to SEQ ID NO: 1276640
caccacacugaguuauuuc

SEQ ID NO: 1276642 - RNA, 19 nt, Artificial Sequence
  Description of Artificial Sequence: Synthetic oligonucleotide
  Sense strand starting at position 424 of SEQ ID NO: 1241493
agugcauuucuuuagcacu

SEQ ID NO: 1276643 - RNA, 19 nt, Artificial Sequence
  Description of Artificial Sequence: Synthetic oligonucleotide
  Antisense strand to SEQ ID NO: 1276642
agugcuaaagaaaugcacu

SEQ ID NO: 1276644 - RNA, 19 nt, Artificial Sequence
  Description of Artificial Sequence: Synthetic oligonucleotide
  Sense strand starting at position 453 of SEQ ID NO: 1241493
ccgugaucucguuuaagcu

SEQ ID NO: 1276645 - RNA, 19 nt, Artificial Sequence
  Description of Artificial Sequence: Synthetic oligonucleotide
  Antisense strand to SEQ ID NO: 1276644
agcuuaaacgagaucacgg

SEQ ID NO: 1276646 - RNA, 19 nt, Artificial Sequence
  Description of Artificial Sequence: Synthetic oligonucleotide
  Sense strand starting at position 729 of SEQ ID NO: 1241493
ucuuaaugugaaugaaugu

SEQ ID NO: 1276647 - RNA, 19 nt, Artificial Sequence
  Description of Artificial Sequence: Synthetic oligonucleotide
  Antisense strand to SEQ ID NO: 1276646
acauucauucacauuaaga

SEQ ID NO: 1276648 - RNA, 19 nt, Artificial Sequence
  Description of Artificial Sequence: Synthetic oligonucleotide
  Sense strand starting at position 736 of SEQ ID NO: 1241493
gugaaugaauguuccaaau

SEQ ID NO: 1276649 - RNA, 19 nt, Artificial Sequence
  Description of Artificial Sequence: Synthetic oligonucleotide
  Antisense strand to SEQ ID NO: 1276648
auuuggaacauucauucac

SEQ ID NO: 1276650 - RNA, 19 nt, Artificial Sequence
  Description of Artificial Sequence: Synthetic oligonucleotide
  Sense strand starting at position 793 of SEQ ID NO: 1241493
aaugcauaugcuggagaua

SEQ ID NO: 1276651 - RNA, 19 nt, Artificial Sequence
  Description of Artificial Sequence: Synthetic oligonucleotide
  Antisense strand to SEQ ID NO: 1276650
uaucuccagcauaugcauu

SEQ ID NO: 1276652 - RNA, 19 nt, Artificial Sequence
  Description of Artificial Sequence: Synthetic oligonucleotide
  Sense strand starting at position 794 of SEQ ID NO: 1241493
augcauaugcuggagauaa

SEQ ID NO: 1276653 - RNA, 19 nt, Artificial Sequence
  Description of Artificial Sequence: Synthetic oligonucleotide
  Antisense strand to SEQ ID NO: 1276652
uuaucuccagcauaugcau

SEQ ID NO: 1276654 - RNA, 19 nt, Artificial Sequence
  Description of Artificial Sequence: Synthetic oligonucleotide
  Sense strand starting at position 796 of SEQ ID NO: 1241493
gcauaugcuggagauaaau

SEQ ID NO: 1276655 - RNA, 19 nt, Artificial Sequence
  Description of Artificial Sequence: Synthetic oligonucleotide
  Antisense strand to SEQ ID NO: 1276654
auuuaucuccagcauaugc

SEQ ID NO: 1276656 - RNA, 19 nt, Artificial Sequence
  Description of Artificial Sequence: Synthetic oligonucleotide
  Sense strand starting at position 843 of SEQ ID NO: 1241493
uuguuaagaugauuccagu

SEQ ID NO: 1276657 - RNA, 19 nt, Artificial Sequence
  Description of Artificial Sequence: Synthetic oligonucleotide
  Antisense strand to SEQ ID NO: 1276656
acuggaaucaucuuaacaa

SEQ ID NO: 1276658 - RNA, 19 nt, Artificial Sequence
  Description of Artificial Sequence: Synthetic oligonucleotide
  Sense strand starting at position 851 of SEQ ID NO: 1241493
augauuccagugcaaauga

SEQ ID NO: 1276659 - RNA, 19 nt, Artificial Sequence
  Description of Artificial Sequence: Synthetic oligonucleotide
  Antisense strand to SEQ ID NO: 1276658
ucauuugcacuggaaucau

SEQ ID NO: 1276660 - RNA, 19 nt, Artificial Sequence
  Description of Artificial Sequence: Synthetic oligonucleotide
  Sense strand starting at position 872 of SEQ ID NO: 1241493
aagcgauaucggucccguu

SEQ ID NO: 1276661 - RNA, 19 nt, Artificial Sequence
  Description of Artificial Sequence: Synthetic oligonucleotide
  Antisense strand to SEQ ID NO: 1276660
aacgggaccgauaucgcuu

SEQ ID NO: 1276662 - RNA, 19 nt, Artificial Sequence
  Description of Artificial Sequence: Synthetic oligonucleotide
  Sense strand starting at position 873 of SEQ ID NO: 1241493
agcgauaucggucccguua

SEQ ID NO: 1276663 - RNA, 19 nt, Artificial Sequence
  Description of Artificial Sequence: Synthetic oligonucleotide
  Antisense strand to SEQ ID NO: 1276662
uaacgggaccgauaucgcu

SEQ ID NO: 1276664 - RNA, 19 nt, Artificial Sequence
  Description of Artificial Sequence: Synthetic oligonucleotide
  Sense strand starting at position 874 of SEQ ID NO: 1241493
gcgauaucggucccguuaa

SEQ ID NO: 1276665 - RNA, 19 nt, Artificial Sequence
  Description of Artificial Sequence: Synthetic oligonucleotide
  Antisense strand to SEQ ID NO: 1276664
uuaacgggaccgauaucgc

SEQ ID NO: 1276666 - RNA, 19 nt, Artificial Sequence
  Description of Artificial Sequence: Synthetic oligonucleotide
  Sense strand starting at position 913 of SEQ ID NO: 1241493
gcaggauguuaacuaacaa

SEQ ID NO: 1276667 - RNA, 19 nt, Artificial Sequence
  Description of Artificial Sequence: Synthetic oligonucleotide
  Antisense strand to SEQ ID NO: 1276666
uuguuaguuaacauccugc

SEQ ID NO: 1276668 - RNA, 19 nt, Artificial Sequence
  Description of Artificial Sequence: Synthetic oligonucleotide
  Sense strand starting at position 1022 of SEQ ID NO: 1241493
gcaugcacucaucaagauu

SEQ ID NO: 1276669 - RNA, 19 nt, Artificial Sequence
  Description of Artificial Sequence: Synthetic oligonucleotide
  Antisense strand to SEQ ID NO: 1276668
aaucuugaugagugcaugc

SEQ ID NO: 1276670 - RNA, 19 nt, Artificial Sequence
  Description of Artificial Sequence: Synthetic oligonucleotide
  Sense strand starting at position 1708 of SEQ ID NO: 1241493
gggagaagguucucccuuu

SEQ ID NO: 1276671 - RNA, 19 nt, Artificial Sequence
  Description of Artificial Sequence: Synthetic oligonucleotide
  Antisense strand to SEQ ID NO: 1276670
aaagggagaaccuucuccc

SEQ ID NO: 1276672 - RNA, 19 nt, Artificial Sequence
  Description of Artificial Sequence: Synthetic oligonucleotide
  Sense strand starting at position 2984 of SEQ ID NO: 1241493
guaugcuuccaggacuucu

SEQ ID NO: 1276673 - RNA, 19 nt, Artificial Sequence
  Description of Artificial Sequence: Synthetic oligonucleotide
  Antisense strand to SEQ ID NO: 1276672
agaaguccuggaagcauac

SEQ ID NO: 1276674 - RNA, 19 nt, Artificial Sequence
  Description of Artificial Sequence: Synthetic oligonucleotide
  Sense strand starting at position 3043 of SEQ ID NO: 1241493
agacauuaauuaguuagca

SEQ ID NO: 1276675 - RNA, 19 nt, Artificial Sequence
  Description of Artificial Sequence: Synthetic oligonucleotide
  Antisense strand to SEQ ID NO: 1276674
ugcuaacuaauuaaugucu

SEQ ID NO: 1276676 - RNA, 19 nt, Artificial Sequence
  Description of Artificial Sequence: Synthetic oligonucleotide
  Sense strand starting at position 3150 of SEQ ID NO: 1241493
ugucacucgccgccuuaaa

SEQ ID NO: 1276677 - RNA, 19 nt, Artificial Sequence
  Description of Artificial Sequence: Synthetic oligonucleotide
  Antisense strand to SEQ ID NO: 1276676
uuuaaggcggcgagugaca

SEQ ID NO: 1276678 - RNA, 19 nt, Artificial Sequence
  Description of Artificial Sequence: Synthetic oligonucleotide
  Sense strand starting at position 3151 of SEQ ID NO: 1241493
gucacucgccgccuuaaau

SEQ ID NO: 1276679 - RNA, 19 nt, Artificial Sequence
  Description of Artificial Sequence: Synthetic oligonucleotide
  Antisense strand to SEQ ID NO: 1276678
auuuaaggcggcgagugac

SEQ ID NO: 1276680 - RNA, 19 nt, Artificial Sequence
  Description of Artificial Sequence: Synthetic oligonucleotide
  Sense strand starting at position 3332 of SEQ ID NO: 1241493
cacggcuuaugauuauaca

SEQ ID NO: 1276681 - RNA, 19 nt, Artificial Sequence
  Description of Artificial Sequence: Synthetic oligonucleotide
  Antisense strand to SEQ ID NO: 1276680
uguauaaucauaagccgug

SEQ ID NO: 1276682 - RNA, 19 nt, Artificial Sequence
  Description of Artificial Sequence: Synthetic oligonucleotide
  Sense strand starting at position 3403 of SEQ ID NO: 1241493
caucuaauguagcuggaau

SEQ ID NO: 1276683 - RNA, 19 nt, Artificial Sequence
  Description of Artificial Sequence: Synthetic oligonucleotide
  Antisense strand to SEQ ID NO: 1276682
auuccagcuacauuagaug

SEQ ID NO: 1276684 - RNA, 19 nt, Artificial Sequence
  Description of Artificial Sequence: Synthetic oligonucleotide
  Sense strand starting at position 3417 of SEQ ID NO: 1241493
ggaauagacucugaaagga

SEQ ID NO: 1276685 - RNA, 19 nt, Artificial Sequence
  Description of Artificial Sequence: Synthetic oligonucleotide
  Antisense strand to SEQ ID NO: 1276684
uccuuucagagucuauucc

SEQ ID NO: 1276686 - RNA, 19 nt, Artificial Sequence
  Description of Artificial Sequence: Synthetic oligonucleotide
  Sense strand starting at position 3434 of SEQ ID NO: 1241493
gacguuaggcauuaucuaa

SEQ ID NO: 1276687 - RNA, 19 nt, Artificial Sequence
  Description of Artificial Sequence: Synthetic oligonucleotide
  Antisense strand to SEQ ID NO: 1276686
uuagauaaugccuaacguc

SEQ ID NO: 1276688 - RNA, 19 nt, Artificial Sequence
  Description of Artificial Sequence: Synthetic oligonucleotide
  Sense strand starting at position 3479 of SEQ ID NO: 1241493
uaaacugacucagugaagu

SEQ ID NO: 1276689 - RNA, 19 nt, Artificial Sequence
  Description of Artificial Sequence: Synthetic oligonucleotide
  Antisense strand to SEQ ID NO: 1276688
acuucacugagucaguuua

SEQ ID NO: 1276690 - RNA, 19 nt, Artificial Sequence
  Description of Artificial Sequence: Synthetic oligonucleotide
  Sense strand starting at position 3535 of SEQ ID NO: 1241493
uuaacucaguguucuagga

SEQ ID NO: 1276691 - RNA, 19 nt, Artificial Sequence
  Description of Artificial Sequence: Synthetic oligonucleotide
  Antisense strand to SEQ ID NO: 1276690
uccuagaacacugaguuaa

SEQ ID NO: 1276692 - RNA, 19 nt, Artificial Sequence
  Description of Artificial Sequence: Synthetic oligonucleotide
  Sense strand starting at position 3576 of SEQ ID NO: 1241493
ggauucggagucugaaauc

SEQ ID NO: 1276693 - RNA, 19 nt, Artificial Sequence
  Description of Artificial Sequence: Synthetic oligonucleotide
  Antisense strand to SEQ ID NO: 1276692
gauuucagacuccgaaucc

SEQ ID NO: 1276694 - RNA, 19 nt, Artificial Sequence
  Description of Artificial Sequence: Synthetic oligonucleotide
  Sense strand starting at position 3586 of SEQ ID NO: 1241493
ucugaaaucuuccuugguu

SEQ ID NO: 1276695 - RNA, 19 nt, Artificial Sequence
  Description of Artificial Sequence: Synthetic oligonucleotide
  Antisense strand to SEQ ID NO: 1276694
aaccaaggaagauuucaga

SEQ ID NO: 1276696 - RNA, 19 nt, Artificial Sequence
  Description of Artificial Sequence: Synthetic oligonucleotide
  Sense strand starting at position 3587 of SEQ ID NO: 1241493
cugaaaucuuccuugguuu

SEQ ID NO: 1276697 - RNA, 19 nt, Artificial Sequence
  Description of Artificial Sequence: Synthetic oligonucleotide
  Antisense strand to SEQ ID NO: 1276696
aaaccaaggaagauuucag

SEQ ID NO: 1276698 - RNA, 19 nt, Artificial Sequence
  Description of Artificial Sequence: Synthetic oligonucleotide
  Sense strand starting at position 3588 of SEQ ID NO: 1241493
ugaaaucuuccuugguuuc

SEQ ID NO: 1276699 - RNA, 19 nt, Artificial Sequence
  Description of Artificial Sequence: Synthetic oligonucleotide
  Antisense strand to SEQ ID NO: 1276698
gaaaccaaggaagauuuca

SEQ ID NO: 1276700 - RNA, 19 nt, Artificial Sequence
  Description of Artificial Sequence: Synthetic oligonucleotide
  Sense strand starting at position 3640 of SEQ ID NO: 1241493
gggcaaaucccuuaacguc

SEQ ID NO: 1276701 - RNA, 19 nt, Artificial Sequence
  Description of Artificial Sequence: Synthetic oligonucleotide
  Antisense strand to SEQ ID NO: 1276700
gacguuaagggauuugccc

SEQ ID NO: 1276702 - RNA, 19 nt, Artificial Sequence
  Description of Artificial Sequence: Synthetic oligonucleotide
  Sense strand starting at position 3650 of SEQ ID NO: 1241493
cuuaacgucuugccauuua

SEQ ID NO: 1276703 - RNA, 19 nt, Artificial Sequence
  Description of Artificial Sequence: Synthetic oligonucleotide
  Antisense strand to SEQ ID NO: 1276702
uaaauggcaagacguuaag

SEQ ID NO: 1276704 - RNA, 19 nt, Artificial Sequence
  Description of Artificial Sequence: Synthetic oligonucleotide
  Sense strand starting at position 3727 of SEQ ID NO: 1241493
gcaguaugucguguaguua

SEQ ID NO: 1276705 - RNA, 19 nt, Artificial Sequence
  Description of Artificial Sequence: Synthetic oligonucleotide
  Antisense strand to SEQ ID NO: 1276704
uaacuacacgacauacugc

SEQ ID NO: 1276706 - RNA, 19 nt, Artificial Sequence
  Description of Artificial Sequence: Synthetic oligonucleotide
  Sense strand starting at position 3730 of SEQ ID NO: 1241493
guaugucguguaguuauua

SEQ ID NO: 1276707 - RNA, 19 nt, Artificial Sequence
  Description of Artificial Sequence: Synthetic oligonucleotide
  Antisense strand to SEQ ID NO: 1276706
uaauaacuacacgacauac

SEQ ID NO: 1276708 - RNA, 19 nt, Artificial Sequence
  Description of Artificial Sequence: Synthetic oligonucleotide
  Sense strand starting at position 3764 of SEQ ID NO: 1241493
gagguaguuuagguuuaaa

SEQ ID NO: 1276709 - RNA, 19 nt, Artificial Sequence
  Description of Artificial Sequence: Synthetic oligonucleotide
  Antisense strand to SEQ ID NO: 1276708
uuuaaaccuaaacuaccuc

SEQ ID NO: 1276710 - RNA, 19 nt, Artificial Sequence
  Description of Artificial Sequence: Synthetic oligonucleotide
  Sense strand starting at position 3767 of SEQ ID NO: 1241493
guaguuuagguuuaaagau

SEQ ID NO: 1276711 - RNA, 19 nt, Artificial Sequence
  Description of Artificial Sequence: Synthetic oligonucleotide
  Antisense strand to SEQ ID NO: 1276710
aucuuuaaaccuaaacuac

SEQ ID NO: 1276712 - RNA, 19 nt, Artificial Sequence
  Description of Artificial Sequence: Synthetic oligonucleotide
  Sense strand starting at position 3876 of SEQ ID NO: 1241493
auuguaauacauuagagcu

SEQ ID NO: 1276713 - RNA, 19 nt, Artificial Sequence
  Description of Artificial Sequence: Synthetic oligonucleotide
  Antisense strand to SEQ ID NO: 1276712
agcucuaauguauuacaau

SEQ ID NO: 1276714 - RNA, 19 nt, Artificial Sequence
  Description of Artificial Sequence: Synthetic oligonucleotide
  Sense strand starting at position 127 of SEQ ID NO: 1241494
gggauaucuuaggugaacu

SEQ ID NO: 1276715 - RNA, 19 nt, Artificial Sequence
  Description of Artificial Sequence: Synthetic oligonucleotide
  Antisense strand to SEQ ID NO: 1276714
aguucaccuaagauauccc

SEQ ID NO: 1276716 - RNA, 19 nt, Artificial Sequence
  Description of Artificial Sequence: Synthetic oligonucleotide
  Sense strand starting at position 128 of SEQ ID NO: 1241494
ggauaucuuaggugaacug

SEQ ID NO: 1276717 - RNA, 19 nt, Artificial Sequence
  Description of Artificial Sequence: Synthetic oligonucleotide
  Antisense strand to SEQ ID NO: 1276716
caguucaccuaagauaucc

SEQ ID NO: 1276718 - RNA, 19 nt, Artificial Sequence
  Description of Artificial Sequence: Synthetic oligonucleotide
  Sense strand starting at position 700 of SEQ ID NO: 1241494
gccuuauauuuguucugua

SEQ ID NO: 1276719 - RNA, 19 nt, Artificial Sequence
  Description of Artificial Sequence: Synthetic oligonucleotide
  Antisense strand to SEQ ID NO: 1276718
uacagaacaaauauaaggc

SEQ ID NO: 1276720 - RNA, 19 nt, Artificial Sequence
  Description of Artificial Sequence: Synthetic oligonucleotide
  Sense strand starting at position 701 of SEQ ID NO: 1241494
ccuuauauuuguucuguau

SEQ ID NO: 1276721 - RNA, 19 nt, Artificial Sequence
  Description of Artificial Sequence: Synthetic oligonucleotide
  Antisense strand to SEQ ID NO: 1276720
auacagaacaaauauaagg

SEQ ID NO: 1276722 - RNA, 19 nt, Artificial Sequence
  Description of Artificial Sequence: Synthetic oligonucleotide
  Sense strand starting at position 710 of SEQ ID NO: 1241494
uguucuguauuucuguaaa

SEQ ID NO: 1276723 - RNA, 19 nt, Artificial Sequence
  Description of Artificial Sequence: Synthetic oligonucleotide
  Antisense strand to SEQ ID NO: 1276722
uuuacagaaauacagaaca

SEQ ID NO: 1276724 - RNA, 19 nt, Artificial Sequence
  Description of Artificial Sequence: Synthetic oligonucleotide
  Sense strand starting at position 756 of SEQ ID NO: 1241494
gcuucuaagcaacauaagu

SEQ ID NO: 1276725 - RNA, 19 nt, Artificial Sequence
  Description of Artificial Sequence: Synthetic oligonucleotide
  Antisense strand to SEQ ID NO: 1276724
acuuauguugcuuagaagc

SEQ ID NO: 1276726 - RNA, 19 nt, Artificial Sequence
  Description of Artificial Sequence: Synthetic oligonucleotide
  Sense strand starting at position 791 of SEQ ID NO: 1241494
cuucucuccugguugaaag

SEQ ID NO: 1276727 - RNA, 19 nt, Artificial Sequence
  Description of Artificial Sequence: Synthetic oligonucleotide
  Antisense strand to SEQ ID NO: 1276726
cuuucaaccaggagagaag

SEQ ID NO: 1276728 - RNA, 19 nt, Artificial Sequence
  Description of Artificial Sequence: Synthetic oligonucleotide
  Sense strand starting at position 823 of SEQ ID NO: 1241494
agugccugauccuuccaaa

SEQ ID NO: 1276729 - RNA, 19 nt, Artificial Sequence
  Description of Artificial Sequence: Synthetic oligonucleotide
  Antisense strand to SEQ ID NO: 1276728
uuuggaaggaucaggcacu

SEQ ID NO: 1276730 - RNA, 19 nt, Artificial Sequence
  Description of Artificial Sequence: Synthetic oligonucleotide
  Sense strand starting at position 965 of SEQ ID NO: 1241494
ggacaugugcuguaucuau

SEQ ID NO: 1276731 - RNA, 19 nt, Artificial Sequence
  Description of Artificial Sequence: Synthetic oligonucleotide
  Antisense strand to SEQ ID NO: 1276730
auagauacagcacaugucc

SEQ ID NO: 1276732 - RNA, 19 nt, Artificial Sequence
  Description of Artificial Sequence: Synthetic oligonucleotide
  Sense strand starting at position 1064 of SEQ ID NO: 1241494
ggugacauaugcucccaga

SEQ ID NO: 1276733 - RNA, 19 nt, Artificial Sequence
  Description of Artificial Sequence: Synthetic oligonucleotide
  Antisense strand to SEQ ID NO: 1276732
ucugggagcauaugucacc

SEQ ID NO: 1276734 - RNA, 19 nt, Artificial Sequence
  Description of Artificial Sequence: Synthetic oligonucleotide
  Sense strand starting at position 1077 of SEQ ID NO: 1241494
cccagagugaccuggaguu

SEQ ID NO: 1276735 - RNA, 19 nt, Artificial Sequence
  Description of Artificial Sequence: Synthetic oligonucleotide
  Antisense strand to SEQ ID NO: 1276734
aacuccaggucacucuggg

SEQ ID NO: 1276736 - RNA, 19 nt, Artificial Sequence
  Description of Artificial Sequence: Synthetic oligonucleotide
  Sense strand starting at position 1267 of SEQ ID NO: 1241494
gguagcuuccuguaaggga

SEQ ID NO: 1276737 - RNA, 19 nt, Artificial Sequence
  Description of Artificial Sequence: Synthetic oligonucleotide
  Antisense strand to SEQ ID NO: 1276736
ucccuuacaggaagcuacc

SEQ ID NO: 1276738 - RNA, 19 nt, Artificial Sequence
  Description of Artificial Sequence: Synthetic oligonucleotide
  Sense strand starting at position 1283 of SEQ ID NO: 1241494
ggagcauuccacuauuacc

SEQ ID NO: 1276739 - RNA, 19 nt, Artificial Sequence
  Description of Artificial Sequence: Synthetic oligonucleotide
  Antisense strand to SEQ ID NO: 1276738
gguaauaguggaaugcucc

SEQ ID NO: 1276740 - RNA, 19 nt, Artificial Sequence
  Description of Artificial Sequence: Synthetic oligonucleotide
  Sense strand starting at position 1388 of SEQ ID NO: 1241494
gcugguggucaugaugacu

SEQ ID NO: 1276741 - RNA, 19 nt, Artificial Sequence
  Description of Artificial Sequence: Synthetic oligonucleotide
  Antisense strand to SEQ ID NO: 1276740
agucaucaugaccaccagc

SEQ ID NO: 1276742 - RNA, 19 nt, Artificial Sequence
  Description of Artificial Sequence: Synthetic oligonucleotide
  Sense strand starting at position 1394 of SEQ ID NO: 1241494
ggucaugaugacugaguga

SEQ ID NO: 1276743 - RNA, 19 nt, Artificial Sequence
  Description of Artificial Sequence: Synthetic oligonucleotide
  Antisense strand to SEQ ID NO: 1276742
ucacucagucaucaugacc

SEQ ID NO: 1276744 - RNA, 19 nt, Artificial Sequence
  Description of Artificial Sequence: Synthetic oligonucleotide
  Sense strand starting at position 1541 of SEQ ID NO: 1241494
cauugacucuggguuggaa

SEQ ID NO: 1276745 - RNA, 19 nt, Artificial Sequence
  Description of Artificial Sequence: Synthetic oligonucleotide
  Antisense strand to SEQ ID NO: 1276744
uuccaacccagagucaaug

SEQ ID NO: 1276746 - RNA, 19 nt, Artificial Sequence
  Description of Artificial Sequence: Synthetic oligonucleotide
  Sense strand starting at position 1620 of SEQ ID NO: 1241494
uuugaauucucagcaguga

SEQ ID NO: 1276747 - RNA, 19 nt, Artificial Sequence
  Description of Artificial Sequence: Synthetic oligonucleotide
  Antisense strand to SEQ ID NO: 1276746
ucacugcugagaauucaaa

SEQ ID NO: 1276748 - RNA, 19 nt, Artificial Sequence
  Description of Artificial Sequence: Synthetic oligonucleotide
  Sense strand starting at position 1624 of SEQ ID NO: 1241494
aauucucagcagugagauu

SEQ ID NO: 1276749 - RNA, 19 nt, Artificial Sequence
  Description of Artificial Sequence: Synthetic oligonucleotide
  Antisense strand to SEQ ID NO: 1276748
aaucucacugcugagaauu

SEQ ID NO: 1276750 - RNA, 19 nt, Artificial Sequence
  Description of Artificial Sequence: Synthetic oligonucleotide
  Sense strand starting at position 1636 of SEQ ID NO: 1241494
ugagauucuuguccaucuu

SEQ ID NO: 1276751 - RNA, 19 nt, Artificial Sequence
  Description of Artificial Sequence: Synthetic oligonucleotide
  Antisense strand to SEQ ID NO: 1276750
aagauggacaagaaucuca

SEQ ID NO: 1276752 - RNA, 19 nt, Artificial Sequence
  Description of Artificial Sequence: Synthetic oligonucleotide
  Sense strand starting at position 1669 of SEQ ID NO: 1241494
cucggcuuaccucaaauua

SEQ ID NO: 1276753 - RNA, 19 nt, Artificial Sequence
  Description of Artificial Sequence: Synthetic oligonucleotide
  Antisense strand to SEQ ID NO: 1276752
uaauuugagguaagccgag

SEQ ID NO: 1276754 - RNA, 19 nt, Artificial Sequence
  Description of Artificial Sequence: Synthetic oligonucleotide
  Sense strand starting at position 1687 of SEQ ID NO: 1241494
auauaauaguuugcagaag

SEQ ID NO: 1276755 - RNA, 19 nt, Artificial Sequence
  Description of Artificial Sequence: Synthetic oligonucleotide
  Antisense strand to SEQ ID NO: 1276754
cuucugcaaacuauuauau

SEQ ID NO: 1276756 - RNA, 19 nt, Artificial Sequence
  Description of Artificial Sequence: Synthetic oligonucleotide
  Sense strand starting at position 1769 of SEQ ID NO: 1241494
auacgaucuuccucuggaa

SEQ ID NO: 1276757 - RNA, 19 nt, Artificial Sequence
  Description of Artificial Sequence: Synthetic oligonucleotide
  Antisense strand to SEQ ID NO: 1276756
uuccagaggaagaucguau

SEQ ID NO: 1276758 - RNA, 19 nt, Artificial Sequence
  Description of Artificial Sequence: Synthetic oligonucleotide
  Sense strand starting at position 2031 of SEQ ID NO: 1241494
gagugugaguguuugagga

SEQ ID NO: 1276759 - RNA, 19 nt, Artificial Sequence
  Description of Artificial Sequence: Synthetic oligonucleotide
  Antisense strand to SEQ ID NO: 1276758
uccucaaacacucacacuc

SEQ ID NO: 1276760 - RNA, 19 nt, Artificial Sequence
  Description of Artificial Sequence: Synthetic oligonucleotide
  Sense strand starting at position 2041 of SEQ ID NO: 1241494
guuugaggauuccuaauca

SEQ ID NO: 1276761 - RNA, 19 nt, Artificial Sequence
  Description of Artificial Sequence: Synthetic oligonucleotide
  Antisense strand to SEQ ID NO: 1276760
ugauuaggaauccucaaac

SEQ ID NO: 1276762 - RNA, 19 nt, Artificial Sequence
  Description of Artificial Sequence: Synthetic oligonucleotide
  Sense strand starting at position 2110 of SEQ ID NO: 1241494
aguauuguuucuccacaca

SEQ ID NO: 1276763 - RNA, 19 nt, Artificial Sequence
  Description of Artificial Sequence: Synthetic oligonucleotide
  Antisense strand to SEQ ID NO: 1276762
uguguggagaaacaauacu

SEQ ID NO: 1276764 - RNA, 19 nt, Artificial Sequence
  Description of Artificial Sequence: Synthetic oligonucleotide
  Sense strand starting at position 2182 of SEQ ID NO: 1241494
agguauucuugggccagga

SEQ ID NO: 1276765 - RNA, 19 nt, Artificial Sequence
  Description of Artificial Sequence: Synthetic oligonucleotide
  Antisense strand to SEQ ID NO: 1276764
uccuggcccaagaauaccu

SEQ ID NO: 1276766 - RNA, 19 nt, Artificial Sequence
  Description of Artificial Sequence: Synthetic oligonucleotide
  Sense strand starting at position 2289 of SEQ ID NO: 1241494
cucuguucuccacagggua

SEQ ID NO: 1276767 - RNA, 19 nt, Artificial Sequence
  Description of Artificial Sequence: Synthetic oligonucleotide
  Antisense strand to SEQ ID NO: 1276766
uacccuguggagaacagag

SEQ ID NO: 1276768 - RNA, 19 nt, Artificial Sequence
  Description of Artificial Sequence: Synthetic oligonucleotide
  Sense strand starting at position 2442 of SEQ ID NO: 1241494
caguacuucugauccugga

SEQ ID NO: 1276769 - RNA, 19 nt, Artificial Sequence
  Description of Artificial Sequence: Synthetic oligonucleotide
  Antisense strand to SEQ ID NO: 1276768
uccaggaucagaaguacug

SEQ ID NO: 1276770 - RNA, 19 nt, Artificial Sequence
  Description of Artificial Sequence: Synthetic oligonucleotide
  Sense strand starting at position 2470 of SEQ ID NO: 1241494
cuacauuucuaaggagaau

SEQ ID NO: 1276771 - RNA, 19 nt, Artificial Sequence
  Description of Artificial Sequence: Synthetic oligonucleotide
  Antisense strand to SEQ ID NO: 1276770
auucuccuuagaaauguag

SEQ ID NO: 1276772 - RNA, 19 nt, Artificial Sequence
  Description of Artificial Sequence: Synthetic oligonucleotide
  Sense strand starting at position 2494 of SEQ ID NO: 1241494
agaaacuugugauuaugac

SEQ ID NO: 1276773 - RNA, 19 nt, Artificial Sequence
  Description of Artificial Sequence: Synthetic oligonucleotide
  Antisense strand to SEQ ID NO: 1276772
gucauaaucacaaguuucu

SEQ ID NO: 1276774 - RNA, 19 nt, Artificial Sequence
  Description of Artificial Sequence: Synthetic oligonucleotide
  Sense strand starting at position 2500 of SEQ ID NO: 1241494
uugugauuaugacuccuua

SEQ ID NO: 1276775 - RNA, 19 nt, Artificial Sequence
  Description of Artificial Sequence: Synthetic oligonucleotide
  Antisense strand to SEQ ID NO: 1276774
uaaggagucauaaucacaa

SEQ ID NO: 1276776 - RNA, 19 nt, Artificial Sequence
  Description of Artificial Sequence: Synthetic oligonucleotide
  Sense strand starting at position 2581 of SEQ ID NO: 1241494
ugcguaucaggacaugagu

SEQ ID NO: 1276777 - RNA, 19 nt, Artificial Sequence
  Description of Artificial Sequence: Synthetic oligonucleotide
  Antisense strand to SEQ ID NO: 1276776
acucauguccugauacgca

SEQ ID NO: 1276778 - RNA, 19 nt, Artificial Sequence
  Description of Artificial Sequence: Synthetic oligonucleotide
  Sense strand starting at position 2658 of SEQ ID NO: 1241494
acagaagauucuggauuuc

SEQ ID NO: 1276779 - RNA, 19 nt, Artificial Sequence
  Description of Artificial Sequence: Synthetic oligonucleotide
  Antisense strand to SEQ ID NO: 1276778
gaaauccagaaucuucugu

SEQ ID NO: 1276780 - RNA, 19 nt, Artificial Sequence
  Description of Artificial Sequence: Synthetic oligonucleotide
  Sense strand starting at position 2710 of SEQ ID NO: 1241494
agaucuuagcacuacuuga

SEQ ID NO: 1276781 - RNA, 19 nt, Artificial Sequence
  Description of Artificial Sequence: Synthetic oligonucleotide
  Antisense strand to SEQ ID NO: 1276780
ucaaguagugcuaagaucu

SEQ ID NO: 1276782 - RNA, 19 nt, Artificial Sequence
  Description of Artificial Sequence: Synthetic oligonucleotide
  Sense strand starting at position 2721 of SEQ ID NO: 1241494
cuacuugaguuaguuuaca

SEQ ID NO: 1276783 - RNA, 19 nt, Artificial Sequence
  Description of Artificial Sequence: Synthetic oligonucleotide
  Antisense strand to SEQ ID NO: 1276782
uguaaacuaacucaaguag

SEQ ID NO: 1276784 - RNA, 19 nt, Artificial Sequence
  Description of Artificial Sequence: Synthetic oligonucleotide
  Sense strand starting at position 3189 of SEQ ID NO: 1241494
guuugaccagccugacuaa

SEQ ID NO: 1276785 - RNA, 19 nt, Artificial Sequence
  Description of Artificial Sequence: Synthetic oligonucleotide
  Antisense strand to SEQ ID NO: 1276784
uuagucaggcuggucaaac

SEQ ID NO: 1276786 - RNA, 19 nt, Artificial Sequence
  Description of Artificial Sequence: Synthetic oligonucleotide
  Sense strand starting at position 3445 of SEQ ID NO: 1241494
gucucugcacuugaaauga

SEQ ID NO: 1276787 - RNA, 19 nt, Artificial Sequence
  Description of Artificial Sequence: Synthetic oligonucleotide
  Antisense strand to SEQ ID NO: 1276786
ucauuucaagugcagagac

SEQ ID NO: 1276788 - RNA, 19 nt, Artificial Sequence
  Description of Artificial Sequence: Synthetic oligonucleotide
  Sense strand starting at position 3471 of SEQ ID NO: 1241494
ggacguucucaucaaaccu

SEQ ID NO: 1276789 - RNA, 19 nt, Artificial Sequence
  Description of Artificial Sequence: Synthetic oligonucleotide
  Antisense strand to SEQ ID NO: 1276788
agguuugaugagaacgucc

SEQ ID NO: 1276790 - RNA, 19 nt, Artificial Sequence
  Description of Artificial Sequence: Synthetic oligonucleotide
  Sense strand starting at position 3581 of SEQ ID NO: 1241494
ccuagauuagcaugaccaa

SEQ ID NO: 1276791 - RNA, 19 nt, Artificial Sequence
  Description of Artificial Sequence: Synthetic oligonucleotide
  Antisense strand to SEQ ID NO: 1276790
uuggucaugcuaaucuagg

SEQ ID NO: 1276792 - RNA, 19 nt, Artificial Sequence
  Description of Artificial Sequence: Synthetic oligonucleotide
  Sense strand starting at position 3621 of SEQ ID NO: 1241494
acaugaauucuaggccuau

SEQ ID NO: 1276793 - RNA, 19 nt, Artificial Sequence
  Description of Artificial Sequence: Synthetic oligonucleotide
  Antisense strand to SEQ ID NO: 1276792
auaggccuagaauucaugu

SEQ ID NO: 1276794 - RNA, 19 nt, Artificial Sequence
  Description of Artificial Sequence: Synthetic oligonucleotide
  Sense strand starting at position 139 of SEQ ID NO: 1241495
cuugcacaaugcucugaga

SEQ ID NO: 1276795 - RNA, 19 nt, Artificial Sequence
  Description of Artificial Sequence: Synthetic oligonucleotide
  Antisense strand to SEQ ID NO: 1276794
ucucagagcauugugcaag

SEQ ID NO: 1276796 - RNA, 19 nt, Artificial Sequence
  Description of Artificial Sequence: Synthetic oligonucleotide
  Sense strand starting at position 141 of SEQ ID NO: 1241495
ugcacaaugcucugagaaa

SEQ ID NO: 1276797 - RNA, 19 nt, Artificial Sequence
  Description of Artificial Sequence: Synthetic oligonucleotide
  Antisense strand to SEQ ID NO: 1276796
uuucucagagcauugugca

SEQ ID NO: 1276798 - RNA, 19 nt, Artificial Sequence
  Description of Artificial Sequence: Synthetic oligonucleotide
  Sense strand starting at position 174 of SEQ ID NO: 1241495
acaagaguaaagugugaau

SEQ ID NO: 1276799 - RNA, 19 nt, Artificial Sequence
  Description of Artificial Sequence: Synthetic oligonucleotide
  Antisense strand to SEQ ID NO: 1276798
auucacacuuuacucuugu

SEQ ID NO: 1276800 - RNA, 19 nt, Artificial Sequence
  Description of Artificial Sequence: Synthetic oligonucleotide
  Sense strand starting at position 176 of SEQ ID NO: 1241495
aagaguaaagugugaauuc

SEQ ID NO: 1276801 - RNA, 19 nt, Artificial Sequence
  Description of Artificial Sequence: Synthetic oligonucleotide
  Antisense strand to SEQ ID NO: 1276800
gaauucacacuuuacucuu

SEQ ID NO: 1276802 - RNA, 19 nt, Artificial Sequence
  Description of Artificial Sequence: Synthetic oligonucleotide
  Sense strand starting at position 240 of SEQ ID NO: 1241495
cuguaugaguugucagauu

SEQ ID NO: 1276803 - RNA, 19 nt, Artificial Sequence
  Description of Artificial Sequence: Synthetic oligonucleotide
  Antisense strand to SEQ ID NO: 1276802
aaucugacaacucauacag

SEQ ID NO: 1276804 - RNA, 19 nt, Artificial Sequence
  Description of Artificial Sequence: Synthetic oligonucleotide
  Sense strand starting at position 263 of SEQ ID NO: 1241495
acaguuugggagcaauagu

SEQ ID NO: 1276805 - RNA, 19 nt, Artificial Sequence
  Description of Artificial Sequence: Synthetic oligonucleotide
  Antisense strand to SEQ ID NO: 1276804
acuauugcucccaaacugu

SEQ ID NO: 1276806 - RNA, 19 nt, Artificial Sequence
  Description of Artificial Sequence: Synthetic oligonucleotide
  Sense strand starting at position 314 of SEQ ID NO: 1241495
uggauuauguaugauuuac

SEQ ID NO: 1276807 - RNA, 19 nt, Artificial Sequence
  Description of Artificial Sequence: Synthetic oligonucleotide
  Antisense strand to SEQ ID NO: 1276806
guaaaucauacauaaucca

SEQ ID NO: 1276808 - RNA, 19 nt, Artificial Sequence
  Description of Artificial Sequence: Synthetic oligonucleotide
  Sense strand starting at position 338 of SEQ ID NO: 1241495
gauauaugauguuuacaga

SEQ ID NO: 1276809 - RNA, 19 nt, Artificial Sequence
  Description of Artificial Sequence: Synthetic oligonucleotide
  Antisense strand to SEQ ID NO: 1276808
ucuguaaacaucauauauc

SEQ ID NO: 1276810 - RNA, 19 nt, Artificial Sequence
  Description of Artificial Sequence: Synthetic oligonucleotide
  Sense strand starting at position 432 of SEQ ID NO: 1241495
uucccuaucguaugaaaga

SEQ ID NO: 1276811 - RNA, 19 nt, Artificial Sequence
  Description of Artificial Sequence: Synthetic oligonucleotide
  Antisense strand to SEQ ID NO: 1276810
ucuuucauacgauagggaa

SEQ ID NO: 1276812 - RNA, 19 nt, Artificial Sequence
  Description of Artificial Sequence: Synthetic oligonucleotide
  Sense strand starting at position 517 of SEQ ID NO: 1241495
ugauguaagcuauagguua

SEQ ID NO: 1276813 - RNA, 19 nt, Artificial Sequence
  Description of Artificial Sequence: Synthetic oligonucleotide
  Antisense strand to SEQ ID NO: 1276812
uaaccuauagcuuacauca

SEQ ID NO: 1276814 - RNA, 19 nt, Artificial Sequence
  Description of Artificial Sequence: Synthetic oligonucleotide
  Sense strand starting at position 620 of SEQ ID NO: 1241495
cacuuaagccugugaggaa

SEQ ID NO: 1276815 - RNA, 19 nt, Artificial Sequence
  Description of Artificial Sequence: Synthetic oligonucleotide
  Antisense strand to SEQ ID NO: 1276814
uuccucacaggcuuaagug

SEQ ID NO: 1276816 - RNA, 19 nt, Artificial Sequence
  Description of Artificial Sequence: Synthetic oligonucleotide
  Sense strand starting at position 667 of SEQ ID NO: 1241495
gcauauaucuuacuguauu

SEQ ID NO: 1276817 - RNA, 19 nt, Artificial Sequence
  Description of Artificial Sequence: Synthetic oligonucleotide
  Antisense strand to SEQ ID NO: 1276816
aauacaguaagauauaugc

SEQ ID NO: 1276818 - RNA, 19 nt, Artificial Sequence
  Description of Artificial Sequence: Synthetic oligonucleotide
  Sense strand starting at position 698 of SEQ ID NO: 1241495
gaaucagugggugacguuu

SEQ ID NO: 1276819 - RNA, 19 nt, Artificial Sequence
  Description of Artificial Sequence: Synthetic oligonucleotide
  Antisense strand to SEQ ID NO: 1276818
aaacgucacccacugauuc

SEQ ID NO: 1276820 - RNA, 19 nt, Artificial Sequence
  Description of Artificial Sequence: Synthetic oligonucleotide
  Sense strand starting at position 801 of SEQ ID NO: 1241495
ucauuaacguugccaauua

SEQ ID NO: 1276821 - RNA, 19 nt, Artificial Sequence
  Description of Artificial Sequence: Synthetic oligonucleotide
  Antisense strand to SEQ ID NO: 1276820
uaauuggcaacguuaauga

SEQ ID NO: 1276822 - RNA, 19 nt, Artificial Sequence
  Description of Artificial Sequence: Synthetic oligonucleotide
  Sense strand starting at position 897 of SEQ ID NO: 1241495
ggugcugaguuacucugaa

SEQ ID NO: 1276823 - RNA, 19 nt, Artificial Sequence
  Description of Artificial Sequence: Synthetic oligonucleotide
  Antisense strand to SEQ ID NO: 1276822
uucagaguaacucagcacc

SEQ ID NO: 1276824 - RNA, 19 nt, Artificial Sequence
  Description of Artificial Sequence: Synthetic oligonucleotide
  Sense strand starting at position 982 of SEQ ID NO: 1241495
gcuguacuaguuuaacuaa

SEQ ID NO: 1276825 - RNA, 19 nt, Artificial Sequence
  Description of Artificial Sequence: Synthetic oligonucleotide
  Antisense strand to SEQ ID NO: 1276824
uuaguuaaacuaguacagc

SEQ ID NO: 1276826 - RNA, 19 nt, Artificial Sequence
  Description of Artificial Sequence: Synthetic oligonucleotide
  Sense strand starting at position 985 of SEQ ID NO: 1241495
guacuaguuuaacuaacuu

SEQ ID NO: 1276827 - RNA, 19 nt, Artificial Sequence
  Description of Artificial Sequence: Synthetic oligonucleotide
  Antisense strand to SEQ ID NO: 1276826
aaguuaguuaaacuaguac

SEQ ID NO: 1276828 - RNA, 19 nt, Artificial Sequence
  Description of Artificial Sequence: Synthetic oligonucleotide
  Sense strand starting at position 1006 of SEQ ID NO: 1241495
aauagacaugcucgacuga

SEQ ID NO: 1276829 - RNA, 19 nt, Artificial Sequence
  Description of Artificial Sequence: Synthetic oligonucleotide
  Antisense strand to SEQ ID NO: 1276828
ucagucgagcaugucuauu

SEQ ID NO: 1276830 - RNA, 19 nt, Artificial Sequence
  Description of Artificial Sequence: Synthetic oligonucleotide
  Sense strand starting at position 1040 of SEQ ID NO: 1241495
augcaauucucaccaggaa

SEQ ID NO: 1276831 - RNA, 19 nt, Artificial Sequence
  Description of Artificial Sequence: Synthetic oligonucleotide
  Antisense strand to SEQ ID NO: 1276830
uuccuggugagaauugcau

SEQ ID NO: 1276832 - RNA, 19 nt, Artificial Sequence
  Description of Artificial Sequence: Synthetic oligonucleotide
  Sense strand starting at position 1095 of SEQ ID NO: 1241495
gggcauagaugcuccaacu

SEQ ID NO: 1276833 - RNA, 19 nt, Artificial Sequence
  Description of Artificial Sequence: Synthetic oligonucleotide
  Antisense strand to SEQ ID NO: 1276832
aguuggagcaucuaugccc

SEQ ID NO: 1276834 - RNA, 19 nt, Artificial Sequence
  Description of Artificial Sequence: Synthetic oligonucleotide
  Sense strand starting at position 1631 of SEQ ID NO: 1241495
gucagugagucacucuauu

SEQ ID NO: 1276835 - RNA, 19 nt, Artificial Sequence
  Description of Artificial Sequence: Synthetic oligonucleotide
  Antisense strand to SEQ ID NO: 1276834
aauagagugacucacugac

SEQ ID NO: 1276836 - RNA, 19 nt, Artificial Sequence
  Description of Artificial Sequence: Synthetic oligonucleotide
  Sense strand starting at position 2865 of SEQ ID NO: 1241495
uucccuucucuggaguauu

SEQ ID NO: 1276837 - RNA, 19 nt, Artificial Sequence
  Description of Artificial Sequence: Synthetic oligonucleotide
  Antisense strand to SEQ ID NO: 1276836
aauacuccagagaagggaa

SEQ ID NO: 1276838 - RNA, 19 nt, Artificial Sequence
  Description of Artificial Sequence: Synthetic oligonucleotide
  Sense strand starting at position 2977 of SEQ ID NO: 1241495
agcggaaaucaauacggau

SEQ ID NO: 1276839 - RNA, 19 nt, Artificial Sequence
  Description of Artificial Sequence: Synthetic oligonucleotide
  Antisense strand to SEQ ID NO: 1276838
auccguauugauuuccgcu

SEQ ID NO: 1276840 - RNA, 19 nt, Artificial Sequence
  Description of Artificial Sequence: Synthetic oligonucleotide
  Sense strand starting at position 3335 of SEQ ID NO: 1241495
uggguagacccuggucaga

SEQ ID NO: 1276841 - RNA, 19 nt, Artificial Sequence
  Description of Artificial Sequence: Synthetic oligonucleotide
  Antisense strand to SEQ ID NO: 1276840
ucugaccagggucuaccca

SEQ ID NO: 1276842 - RNA, 19 nt, Artificial Sequence
  Description of Artificial Sequence: Synthetic oligonucleotide
  Sense strand starting at position 3403 of SEQ ID NO: 1241495
agagacuugggucagucau

SEQ ID NO: 1276843 - RNA, 19 nt, Artificial Sequence
  Description of Artificial Sequence: Synthetic oligonucleotide
  Antisense strand to SEQ ID NO: 1276842
augacugacccaagucucu

SEQ ID NO: 1276844 - RNA, 19 nt, Artificial Sequence
  Description of Artificial Sequence: Synthetic oligonucleotide
  Sense strand starting at position 3459 of SEQ ID NO: 1241495
uuccacuuugaaugaauga

SEQ ID NO: 1276845 - RNA, 19 nt, Artificial Sequence
  Description of Artificial Sequence: Synthetic oligonucleotide
  Antisense strand to SEQ ID NO: 1276844
ucauucauucaaaguggaa

SEQ ID NO: 1276846 - RNA, 19 nt, Artificial Sequence
  Description of Artificial Sequence: Synthetic oligonucleotide
  Sense strand starting at position 3473 of SEQ ID NO: 1241495
aaugaaagcgccugaugga

SEQ ID NO: 1276847 - RNA, 19 nt, Artificial Sequence
  Description of Artificial Sequence: Synthetic oligonucleotide
  Antisense strand to SEQ ID NO: 1276846
uccaucaggcgcuuucauu

SEQ ID NO: 1276848 - RNA, 19 nt, Artificial Sequence
  Description of Artificial Sequence: Synthetic oligonucleotide
  Sense strand starting at position 3505 of SEQ ID NO: 1241495
gugugagguucugcauuug

SEQ ID NO: 1276849 - RNA, 19 nt, Artificial Sequence
  Description of Artificial Sequence: Synthetic oligonucleotide
  Antisense strand to SEQ ID NO: 1276848
caaaugcagaaccucacac

SEQ ID NO: 1276850 - RNA, 19 nt, Artificial Sequence
  Description of Artificial Sequence: Synthetic oligonucleotide
  Sense strand starting at position 3575 of SEQ ID NO: 1241495
ucucuacgacuccaguaaa

SEQ ID NO: 1276851 - RNA, 19 nt, Artificial Sequence
  Description of Artificial Sequence: Synthetic oligonucleotide
  Antisense strand to SEQ ID NO: 1276850
uuuacuggagucguagaga

SEQ ID NO: 1276852 - RNA, 19 nt, Artificial Sequence
  Description of Artificial Sequence: Synthetic oligonucleotide
  Sense strand starting at position 3578 of SEQ ID NO: 1241495
cuacgacuccaguaaagua

SEQ ID NO: 1276853 - RNA, 19 nt, Artificial Sequence
  Description of Artificial Sequence: Synthetic oligonucleotide
  Antisense strand to SEQ ID NO: 1276852
uacuuuacuggagucguag

SEQ ID NO: 1276854 - RNA, 19 nt, Artificial Sequence
  Description of Artificial Sequence: Synthetic oligonucleotide
  Sense strand starting at position 3644 of SEQ ID NO: 1241495
gguagagguguuuaaucug

SEQ ID NO: 1276855 - RNA, 19 nt, Artificial Sequence
  Description of Artificial Sequence: Synthetic oligonucleotide
  Antisense strand to SEQ ID NO: 1276854
cagauuaaacaccucuacc

SEQ ID NO: 1276856 - RNA, 19 nt, Artificial Sequence
  Description of Artificial Sequence: Synthetic oligonucleotide
  Sense strand starting at position 3647 of SEQ ID NO: 1241495
agagguguuuaaucugcau

SEQ ID NO: 1276857 - RNA, 19 nt, Artificial Sequence
  Description of Artificial Sequence: Synthetic oligonucleotide
  Antisense strand to SEQ ID NO: 1276856
augcagauuaaacaccucu

SEQ ID NO: 1276858 - RNA, 19 nt, Artificial Sequence
  Description of Artificial Sequence: Synthetic oligonucleotide
  Sense strand starting at position 3649 of SEQ ID NO: 1241495
agguguuuaaucugcauga

SEQ ID NO: 1276859 - RNA, 19 nt, Artificial Sequence
  Description of Artificial Sequence: Synthetic oligonucleotide
  Antisense strand to SEQ ID NO: 1276858
ucaugcagauuaaacaccu

SEQ ID NO: 1276860 - RNA, 19 nt, Artificial Sequence
  Description of Artificial Sequence: Synthetic oligonucleotide
  Sense strand starting at position 3650 of SEQ ID NO: 1241495
gguguuuaaucugcaugau

SEQ ID NO: 1276861 - RNA, 19 nt, Artificial Sequence
  Description of Artificial Sequence: Synthetic oligonucleotide
  Antisense strand to SEQ ID NO: 1276860
aucaugcagauuaaacacc

SEQ ID NO: 1276862 - RNA, 19 nt, Artificial Sequence
  Description of Artificial Sequence: Synthetic oligonucleotide
  Sense strand starting at position 3651 of SEQ ID NO: 1241495
guguuuaaucugcaugaug

SEQ ID NO: 1276863 - RNA, 19 nt, Artificial Sequence
  Description of Artificial Sequence: Synthetic oligonucleotide
  Antisense strand to SEQ ID NO: 1276862
caucaugcagauuaaacac

SEQ ID NO: 1276864 - RNA, 19 nt, Artificial Sequence
  Description of Artificial Sequence: Synthetic oligonucleotide
  Sense strand starting at position 3674 of SEQ ID NO: 1241495
uuaaguucucuuuggagua

SEQ ID NO: 1276865 - RNA, 19 nt, Artificial Sequence
  Description of Artificial Sequence: Synthetic oligonucleotide
  Antisense strand to SEQ ID NO: 1276864
uacuccaaagagaacuuaa

SEQ ID NO: 1276866 - RNA, 19 nt, Artificial Sequence
  Description of Artificial Sequence: Synthetic oligonucleotide
  Sense strand starting at position 3705 of SEQ ID NO: 1241495
aggagagaaugagaaauga

SEQ ID NO: 1276867 - RNA, 19 nt, Artificial Sequence
  Description of Artificial Sequence: Synthetic oligonucleotide
  Antisense strand to SEQ ID NO: 1276866
ucauuucucauucucuccu

SEQ ID NO: 1276868 - RNA, 19 nt, Artificial Sequence
  Description of Artificial Sequence: Synthetic oligonucleotide
  Sense strand starting at position 3823 of SEQ ID NO: 1241495
ggguuucugcccgaagaug

SEQ ID NO: 1276869 - RNA, 19 nt, Artificial Sequence
  Description of Artificial Sequence: Synthetic oligonucleotide
  Antisense strand to SEQ ID NO: 1276868
caucuucgggcagaaaccc

SEQ ID NO: 1276870 - RNA, 19 nt, Artificial Sequence
  Description of Artificial Sequence: Synthetic oligonucleotide
  Sense strand starting at position 3872 of SEQ ID NO: 1241495
aggccacucuuugcuugaa

SEQ ID NO: 1276871 - RNA, 19 nt, Artificial Sequence
  Description of Artificial Sequence: Synthetic oligonucleotide
  Antisense strand to SEQ ID NO: 1276870
uucaagcaaagaguggccu

SEQ ID NO: 1276872 - RNA, 19 nt, Artificial Sequence
  Description of Artificial Sequence: Synthetic oligonucleotide
  Sense strand starting at position 3873 of SEQ ID NO: 1241495
ggccacucuuugcuugaaa

SEQ ID NO: 1276873 - RNA, 19 nt, Artificial Sequence
  Description of Artificial Sequence: Synthetic oligonucleotide
  Antisense strand to SEQ ID NO: 1276872
uuucaagcaaagaguggcc

SEQ ID NO: 1276874 - RNA, 19 nt, Artificial Sequence
  Description of Artificial Sequence: Synthetic oligonucleotide
  Sense strand starting at position 29 of SEQ ID NO: 1241496
gcuggcuacuaaguuuaau

SEQ ID NO: 1276875 - RNA, 19 nt, Artificial Sequence
  Description of Artificial Sequence: Synthetic oligonucleotide
  Antisense strand to SEQ ID NO: 1276874
auuaaacuuaguagccagc

SEQ ID NO: 1276876 - RNA, 19 nt, Artificial Sequence
  Description of Artificial Sequence: Synthetic oligonucleotide
  Sense strand starting at position 32 of SEQ ID NO: 1241496
ggcuacuaaguuuaaugga

SEQ ID NO: 1276877 - RNA, 19 nt, Artificial Sequence
  Description of Artificial Sequence: Synthetic oligonucleotide
  Antisense strand to SEQ ID NO: 1276876
uccauuaaacuuaguagcc

SEQ ID NO: 1276878 - RNA, 19 nt, Artificial Sequence
  Description of Artificial Sequence: Synthetic oligonucleotide
  Sense strand starting at position 121 of SEQ ID NO: 1241496
aaguguuaaucggccagca

SEQ ID NO: 1276879 - RNA, 19 nt, Artificial Sequence
  Description of Artificial Sequence: Synthetic oligonucleotide
  Antisense strand to SEQ ID NO: 1276878
ugcuggccgauuaacacuu

SEQ ID NO: 1276880 - RNA, 19 nt, Artificial Sequence
  Description of Artificial Sequence: Synthetic oligonucleotide
  Sense strand starting at position 123 of SEQ ID NO: 1241496
guguuaaucggccagcacu

SEQ ID NO: 1276881 - RNA, 19 nt, Artificial Sequence
  Description of Artificial Sequence: Synthetic oligonucleotide
  Antisense strand to SEQ ID NO: 1276880
agugcuggccgauuaacac

SEQ ID NO: 1276882 - RNA, 19 nt, Artificial Sequence
  Description of Artificial Sequence: Synthetic oligonucleotide
  Sense strand starting at position 260 of SEQ ID NO: 1241496
uuacuauuaccugggcacu

SEQ ID NO: 1276883 - RNA, 19 nt, Artificial Sequence
  Description of Artificial Sequence: Synthetic oligonucleotide
  Antisense strand to SEQ ID NO: 1276882
agugcccagguaauaguaa

SEQ ID NO: 1276884 - RNA, 19 nt, Artificial Sequence
  Description of Artificial Sequence: Synthetic oligonucleotide
  Sense strand starting at position 416 of SEQ ID NO: 1241496
gaacuagucuuggagagga

SEQ ID NO: 1276885 - RNA, 19 nt, Artificial Sequence
  Description of Artificial Sequence: Synthetic oligonucleotide
  Antisense strand to SEQ ID NO: 1276884
uccucuccaagacuaguuc

SEQ ID NO: 1276886 - RNA, 19 nt, Artificial Sequence
  Description of Artificial Sequence: Synthetic oligonucleotide
  Sense strand starting at position 441 of SEQ ID NO: 1241496
aguuuaaacucugaaacga

SEQ ID NO: 1276887 - RNA, 19 nt, Artificial Sequence
  Description of Artificial Sequence: Synthetic oligonucleotide
  Antisense strand to SEQ ID NO: 1276886
ucguuucagaguuuaaacu

SEQ ID NO: 1276888 - RNA, 19 nt, Artificial Sequence
  Description of Artificial Sequence: Synthetic oligonucleotide
  Sense strand starting at position 527 of SEQ ID NO: 1241496
acaaauuagcuacgaguuu

SEQ ID NO: 1276889 - RNA, 19 nt, Artificial Sequence
  Description of Artificial Sequence: Synthetic oligonucleotide
  Antisense strand to SEQ ID NO: 1276888
aaacucguagcuaauuugu

SEQ ID NO: 1276890 - RNA, 19 nt, Artificial Sequence
  Description of Artificial Sequence: Synthetic oligonucleotide
  Sense strand starting at position 528 of SEQ ID NO: 1241496
caaauuagcuacgaguuua

SEQ ID NO: 1276891 - RNA, 19 nt, Artificial Sequence
  Description of Artificial Sequence: Synthetic oligonucleotide
  Antisense strand to SEQ ID NO: 1276890
uaaacucguagcuaauuug

SEQ ID NO: 1276892 - RNA, 19 nt, Artificial Sequence
  Description of Artificial Sequence: Synthetic oligonucleotide
  Sense strand starting at position 555 of SEQ ID NO: 1241496
gccgccucuggcuguaaga

SEQ ID NO: 1276893 - RNA, 19 nt, Artificial Sequence
  Description of Artificial Sequence: Synthetic oligonucleotide
  Antisense strand to SEQ ID NO: 1276892
ucuuacagccagaggcggc

SEQ ID NO: 1276894 - RNA, 19 nt, Artificial Sequence
  Description of Artificial Sequence: Synthetic oligonucleotide
  Sense strand starting at position 557 of SEQ ID NO: 1241496
cgccucuggcuguaagagu

SEQ ID NO: 1276895 - RNA, 19 nt, Artificial Sequence
  Description of Artificial Sequence: Synthetic oligonucleotide
  Antisense strand to SEQ ID NO: 1276894
acucuuacagccagaggcg

SEQ ID NO: 1276896 - RNA, 19 nt, Artificial Sequence
  Description of Artificial Sequence: Synthetic oligonucleotide
  Sense strand starting at position 589 of SEQ ID NO: 1241496
aauugcuccugguaaugau

SEQ ID NO: 1276897 - RNA, 19 nt, Artificial Sequence
  Description of Artificial Sequence: Synthetic oligonucleotide
  Antisense strand to SEQ ID NO: 1276896
aucauuaccaggagcaauu

SEQ ID NO: 1276898 - RNA, 19 nt, Artificial Sequence
  Description of Artificial Sequence: Synthetic oligonucleotide
  Sense strand starting at position 598 of SEQ ID NO: 1241496
ugguaaugauaucacuauu

SEQ ID NO: 1276899 - RNA, 19 nt, Artificial Sequence
  Description of Artificial Sequence: Synthetic oligonucleotide
  Antisense strand to SEQ ID NO: 1276898
aauagugauaucauuacca

SEQ ID NO: 1276900 - RNA, 19 nt, Artificial Sequence
  Description of Artificial Sequence: Synthetic oligonucleotide
  Sense strand starting at position 709 of SEQ ID NO: 1241496
cuucgacucuccuaugauu

SEQ ID NO: 1276901 - RNA, 19 nt, Artificial Sequence
  Description of Artificial Sequence: Synthetic oligonucleotide
  Antisense strand to SEQ ID NO: 1276900
aaucauaggagagucgaag

SEQ ID NO: 1276902 - RNA, 19 nt, Artificial Sequence
  Description of Artificial Sequence: Synthetic oligonucleotide
  Sense strand starting at position 818 of SEQ ID NO: 1241496
ggagacugaucugaguaac

SEQ ID NO: 1276903 - RNA, 19 nt, Artificial Sequence
  Description of Artificial Sequence: Synthetic oligonucleotide
  Antisense strand to SEQ ID NO: 1276902
guuacucagaucagucucc

SEQ ID NO: 1276904 - RNA, 19 nt, Artificial Sequence
  Description of Artificial Sequence: Synthetic oligonucleotide
  Sense strand starting at position 824 of SEQ ID NO: 1241496
ugaucugaguaacaauaaa

SEQ ID NO: 1276905 - RNA, 19 nt, Artificial Sequence
  Description of Artificial Sequence: Synthetic oligonucleotide
  Antisense strand to SEQ ID NO: 1276904
uuuauuguuacucagauca

SEQ ID NO: 1276906 - RNA, 19 nt, Artificial Sequence
  Description of Artificial Sequence: Synthetic oligonucleotide
  Sense strand starting at position 982 of SEQ ID NO: 1241496
ugcugcgugacuuuaggua

SEQ ID NO: 1276907 - RNA, 19 nt, Artificial Sequence
  Description of Artificial Sequence: Synthetic oligonucleotide
  Antisense strand to SEQ ID NO: 1276906
uaccuaaagucacgcagca

SEQ ID NO: 1276908 - RNA, 19 nt, Artificial Sequence
  Description of Artificial Sequence: Synthetic oligonucleotide
  Sense strand starting at position 1130 of SEQ ID NO: 1241496
gaacaacauugcucgaguu

SEQ ID NO: 1276909 - RNA, 19 nt, Artificial Sequence
  Description of Artificial Sequence: Synthetic oligonucleotide
  Antisense strand to SEQ ID NO: 1276908
aacucgagcaauguuguuc

SEQ ID NO: 1276910 - RNA, 19 nt, Artificial Sequence
  Description of Artificial Sequence: Synthetic oligonucleotide
  Sense strand starting at position 1131 of SEQ ID NO: 1241496
aacaacauugcucgaguuu

SEQ ID NO: 1276911 - RNA, 19 nt, Artificial Sequence
  Description of Artificial Sequence: Synthetic oligonucleotide
  Antisense strand to SEQ ID NO: 1276910
aaacucgagcaauguuguu

SEQ ID NO: 1276912 - RNA, 19 nt, Artificial Sequence
  Description of Artificial Sequence: Synthetic oligonucleotide
  Sense strand starting at position 1132 of SEQ ID NO: 1241496
acaacauugcucgaguuuc

SEQ ID NO: 1276913 - RNA, 19 nt, Artificial Sequence
  Description of Artificial Sequence: Synthetic oligonucleotide
  Antisense strand to SEQ ID NO: 1276912
gaaacucgagcaauguugu

SEQ ID NO: 1276914 - RNA, 19 nt, Artificial Sequence
  Description of Artificial Sequence: Synthetic oligonucleotide
  Sense strand starting at position 1142 of SEQ ID NO: 1241496
ucgaguuucuguuccgaca

SEQ ID NO: 1276915 - RNA, 19 nt, Artificial Sequence
  Description of Artificial Sequence: Synthetic oligonucleotide
  Antisense strand to SEQ ID NO: 1276914
ugucggaacagaaacucga

SEQ ID NO: 1276916 - RNA, 19 nt, Artificial Sequence
  Description of Artificial Sequence: Synthetic oligonucleotide
  Sense strand starting at position 1242 of SEQ ID NO: 1241496
gcgagagggaguuauguau

SEQ ID NO: 1276917 - RNA, 19 nt, Artificial Sequence
  Description of Artificial Sequence: Synthetic oligonucleotide
  Antisense strand to SEQ ID NO: 1276916
auacauaacucccucucgc

SEQ ID NO: 1276918 - RNA, 19 nt, Artificial Sequence
  Description of Artificial Sequence: Synthetic oligonucleotide
  Sense strand starting at position 1249 of SEQ ID NO: 1241496
ggaguuauguaucacaagc

SEQ ID NO: 1276919 - RNA, 19 nt, Artificial Sequence
  Description of Artificial Sequence: Synthetic oligonucleotide
  Antisense strand to SEQ ID NO: 1276918
gcuugugauacauaacucc

SEQ ID NO: 1276920 - RNA, 19 nt, Artificial Sequence
  Description of Artificial Sequence: Synthetic oligonucleotide
  Sense strand starting at position 1259 of SEQ ID NO: 1241496
aucacaagcugugauuaga

SEQ ID NO: 1276921 - RNA, 19 nt, Artificial Sequence
  Description of Artificial Sequence: Synthetic oligonucleotide
  Antisense strand to SEQ ID NO: 1276920
ucuaaucacagcuugugau

SEQ ID NO: 1276922 - RNA, 19 nt, Artificial Sequence
  Description of Artificial Sequence: Synthetic oligonucleotide
  Sense strand starting at position 1473 of SEQ ID NO: 1241496
aaagaaguucugugcucca

SEQ ID NO: 1276923 - RNA, 19 nt, Artificial Sequence
  Description of Artificial Sequence: Synthetic oligonucleotide
  Antisense strand to SEQ ID NO: 1276922
uggagcacagaacuucuuu

SEQ ID NO: 1276924 - RNA, 19 nt, Artificial Sequence
  Description of Artificial Sequence: Synthetic oligonucleotide
  Sense strand starting at position 1596 of SEQ ID NO: 1241496
acgcguucuaaggaaagaa

SEQ ID NO: 1276925 - RNA, 19 nt, Artificial Sequence
  Description of Artificial Sequence: Synthetic oligonucleotide
  Antisense strand to SEQ ID NO: 1276924
uucuuuccuuagaacgcgu

SEQ ID NO: 1276926 - RNA, 19 nt, Artificial Sequence
  Description of Artificial Sequence: Synthetic oligonucleotide
  Sense strand starting at position 1870 of SEQ ID NO: 1241496
gaauguagcugccaggaaa

SEQ ID NO: 1276927 - RNA, 19 nt, Artificial Sequence
  Description of Artificial Sequence: Synthetic oligonucleotide
  Antisense strand to SEQ ID NO: 1276926
uuuccuggcagcuacauuc

SEQ ID NO: 1276928 - RNA, 19 nt, Artificial Sequence
  Description of Artificial Sequence: Synthetic oligonucleotide
  Sense strand starting at position 1907 of SEQ ID NO: 1241496
guuccaagcucgggaaaga

SEQ ID NO: 1276929 - RNA, 19 nt, Artificial Sequence
  Description of Artificial Sequence: Synthetic oligonucleotide
  Antisense strand to SEQ ID NO: 1276928
ucuuucccgagcuuggaac

SEQ ID NO: 1276930 - RNA, 19 nt, Artificial Sequence
  Description of Artificial Sequence: Synthetic oligonucleotide
  Sense strand starting at position 2169 of SEQ ID NO: 1241496
guuccuucccuuuagagca

SEQ ID NO: 1276931 - RNA, 19 nt, Artificial Sequence
  Description of Artificial Sequence: Synthetic oligonucleotide
  Antisense strand to SEQ ID NO: 1276930
ugcucuaaagggaaggaac

SEQ ID NO: 1276932 - RNA, 19 nt, Artificial Sequence
  Description of Artificial Sequence: Synthetic oligonucleotide
  Sense strand starting at position 3098 of SEQ ID NO: 1241496
ggguuuaccugggaugguu

SEQ ID NO: 1276933 - RNA, 19 nt, Artificial Sequence
  Description of Artificial Sequence: Synthetic oligonucleotide
  Antisense strand to SEQ ID NO: 1276932
aaccaucccagguaaaccc

SEQ ID NO: 1276934 - RNA, 19 nt, Artificial Sequence
  Description of Artificial Sequence: Synthetic oligonucleotide
  Sense strand starting at position 3100 of SEQ ID NO: 1241496
guuuaccugggaugguuaa

SEQ ID NO: 1276935 - RNA, 19 nt, Artificial Sequence
  Description of Artificial Sequence: Synthetic oligonucleotide
  Antisense strand to SEQ ID NO: 1276934
uuaaccaucccagguaaac

SEQ ID NO: 1276936 - RNA, 19 nt, Artificial Sequence
  Description of Artificial Sequence: Synthetic oligonucleotide
  Sense strand starting at position 3124 of SEQ ID NO: 1241496
cccgucucacagugaggau

SEQ ID NO: 1276937 - RNA, 19 nt, Artificial Sequence
  Description of Artificial Sequence: Synthetic oligonucleotide
  Antisense strand to SEQ ID NO: 1276936
auccucacugugagacggg

SEQ ID NO: 1276938 - RNA, 19 nt, Artificial Sequence
  Description of Artificial Sequence: Synthetic oligonucleotide
  Sense strand starting at position 3143 of SEQ ID NO: 1241496
gcaguaaagguuuguuguu

SEQ ID NO: 1276939 - RNA, 19 nt, Artificial Sequence
  Description of Artificial Sequence: Synthetic oligonucleotide
  Antisense strand to SEQ ID NO: 1276938
aacaacaaaccuuuacugc

SEQ ID NO: 1276940 - RNA, 19 nt, Artificial Sequence
  Description of Artificial Sequence: Synthetic oligonucleotide
  Sense strand starting at position 3148 of SEQ ID NO: 1241496
aaagguuuguuguucugaa

SEQ ID NO: 1276941 - RNA, 19 nt, Artificial Sequence
  Description of Artificial Sequence: Synthetic oligonucleotide
  Antisense strand to SEQ ID NO: 1276940
uucagaacaacaaaccuuu

SEQ ID NO: 1276942 - RNA, 19 nt, Artificial Sequence
  Description of Artificial Sequence: Synthetic oligonucleotide
  Sense strand starting at position 3149 of SEQ ID NO: 1241496
aagguuuguuguucugaau

SEQ ID NO: 1276943 - RNA, 19 nt, Artificial Sequence
  Description of Artificial Sequence: Synthetic oligonucleotide
  Antisense strand to SEQ ID NO: 1276942
auucagaacaacaaaccuu

SEQ ID NO: 1276944 - RNA, 19 nt, Artificial Sequence
  Description of Artificial Sequence: Synthetic oligonucleotide
  Sense strand starting at position 3152 of SEQ ID NO: 1241496
guuuguuguucugaaucaa

SEQ ID NO: 1276945 - RNA, 19 nt, Artificial Sequence
  Description of Artificial Sequence: Synthetic oligonucleotide
  Antisense strand to SEQ ID NO: 1276944
uugauucagaacaacaaac

SEQ ID NO: 1276946 - RNA, 19 nt, Artificial Sequence
  Description of Artificial Sequence: Synthetic oligonucleotide
  Sense strand starting at position 3213 of SEQ ID NO: 1241496
uuggguagucgguagaaag

SEQ ID NO: 1276947 - RNA, 19 nt, Artificial Sequence
  Description of Artificial Sequence: Synthetic oligonucleotide
  Antisense strand to SEQ ID NO: 1276946
cuuucuaccgacuacccaa

SEQ ID NO: 1276948 - RNA, 19 nt, Artificial Sequence
  Description of Artificial Sequence: Synthetic oligonucleotide
  Sense strand starting at position 3252 of SEQ ID NO: 1241496
ggcuuaagucccuacacgu

SEQ ID NO: 1276949 - RNA, 19 nt, Artificial Sequence
  Description of Artificial Sequence: Synthetic oligonucleotide
  Antisense strand to SEQ ID NO: 1276948
acguguagggacuuaagcc

SEQ ID NO: 1276950 - RNA, 19 nt, Artificial Sequence
  Description of Artificial Sequence: Synthetic oligonucleotide
  Sense strand starting at position 3337 of SEQ ID NO: 1241496
ggaagcucccucuguacuu

SEQ ID NO: 1276951 - RNA, 19 nt, Artificial Sequence
  Description of Artificial Sequence: Synthetic oligonucleotide
  Antisense strand to SEQ ID NO: 1276950
aaguacagagggagcuucc

SEQ ID NO: 1276952 - RNA, 19 nt, Artificial Sequence
  Description of Artificial Sequence: Synthetic oligonucleotide
  Sense strand starting at position 3401 of SEQ ID NO: 1241496
uuguguuugcgauacuccu

SEQ ID NO: 1276953 - RNA, 19 nt, Artificial Sequence
  Description of Artificial Sequence: Synthetic oligonucleotide
  Antisense strand to SEQ ID NO: 1276952
aggaguaucgcaaacacaa

SEQ ID NO: 1276954 - RNA, 19 nt, Artificial Sequence
  Description of Artificial Sequence: Synthetic oligonucleotide
  Sense strand starting at position 102 of SEQ ID NO: 1241497
agaaguaauuaauccugca

SEQ ID NO: 1276955 - RNA, 19 nt, Artificial Sequence
  Description of Artificial Sequence: Synthetic oligonucleotide
  Antisense strand to SEQ ID NO: 1276954
ugcaggauuaauuacuucu

SEQ ID NO: 1276956 - RNA, 19 nt, Artificial Sequence
  Description of Artificial Sequence: Synthetic oligonucleotide
  Sense strand starting at position 583 of SEQ ID NO: 1241497
ggaaguuaagcccaggagu

SEQ ID NO: 1276957 - RNA, 19 nt, Artificial Sequence
  Description of Artificial Sequence: Synthetic oligonucleotide
  Antisense strand to SEQ ID NO: 1276956
acuccugggcuuaacuucc

SEQ ID NO: 1276958 - RNA, 19 nt, Artificial Sequence
  Description of Artificial Sequence: Synthetic oligonucleotide
  Sense strand starting at position 1049 of SEQ ID NO: 1241497
gcuccuggccaggauuaau

SEQ ID NO: 1276959 - RNA, 19 nt, Artificial Sequence
  Description of Artificial Sequence: Synthetic oligonucleotide
  Antisense strand to SEQ ID NO: 1276958
auuaauccuggccaggagc

SEQ ID NO: 1276960 - RNA, 19 nt, Artificial Sequence
  Description of Artificial Sequence: Synthetic oligonucleotide
  Sense strand starting at position 1115 of SEQ ID NO: 1241497
gcuggaaaugucugggacu

SEQ ID NO: 1276961 - RNA, 19 nt, Artificial Sequence
  Description of Artificial Sequence: Synthetic oligonucleotide
  Antisense strand to SEQ ID NO: 1276960
agucccagacauuuccagc

SEQ ID NO: 1276962 - RNA, 19 nt, Artificial Sequence
  Description of Artificial Sequence: Synthetic oligonucleotide
  Sense strand starting at position 1117 of SEQ ID NO: 1241497
uggaaaugucugggacuua

SEQ ID NO: 1276963 - RNA, 19 nt, Artificial Sequence
  Description of Artificial Sequence: Synthetic oligonucleotide
  Antisense strand to SEQ ID NO: 1276962
uaagucccagacauuucca

SEQ ID NO: 1276964 - RNA, 19 nt, Artificial Sequence
  Description of Artificial Sequence: Synthetic oligonucleotide
  Sense strand starting at position 1259 of SEQ ID NO: 1241497
agcucuaggccgcuaagua

SEQ ID NO: 1276965 - RNA, 19 nt, Artificial Sequence
  Description of Artificial Sequence: Synthetic oligonucleotide
  Antisense strand to SEQ ID NO: 1276964
uacuuagcggccuagagcu

SEQ ID NO: 1276966 - RNA, 19 nt, Artificial Sequence
  Description of Artificial Sequence: Synthetic oligonucleotide
  Sense strand starting at position 1359 of SEQ ID NO: 1241497
aaggguuuccucgagaugu

SEQ ID NO: 1276967 - RNA, 19 nt, Artificial Sequence
  Description of Artificial Sequence: Synthetic oligonucleotide
  Antisense strand to SEQ ID NO: 1276966
acaucucgaggaaacccuu

SEQ ID NO: 1276968 - RNA, 19 nt, Artificial Sequence
  Description of Artificial Sequence: Synthetic oligonucleotide
  Sense strand starting at position 1378 of SEQ ID NO: 1241497
cgaguaucauuauucccaa

SEQ ID NO: 1276969 - RNA, 19 nt, Artificial Sequence
  Description of Artificial Sequence: Synthetic oligonucleotide
  Antisense strand to SEQ ID NO: 1276968
uugggaauaaugauacucg

SEQ ID NO: 1276970 - RNA, 19 nt, Artificial Sequence
  Description of Artificial Sequence: Synthetic oligonucleotide
  Sense strand starting at position 1786 of SEQ ID NO: 1241497
cguucuucucuauagggau

SEQ ID NO: 1276971 - RNA, 19 nt, Artificial Sequence
  Description of Artificial Sequence: Synthetic oligonucleotide
  Antisense strand to SEQ ID NO: 1276970
aucccuauagagaagaacg

SEQ ID NO: 1276972 - RNA, 19 nt, Artificial Sequence
  Description of Artificial Sequence: Synthetic oligonucleotide
  Sense strand starting at position 2143 of SEQ ID NO: 1241497
ugcuaacugggucaacuua

SEQ ID NO: 1276973 - RNA, 19 nt, Artificial Sequence
  Description of Artificial Sequence: Synthetic oligonucleotide
  Antisense strand to SEQ ID NO: 1276972
uaaguugacccaguuagca

SEQ ID NO: 1276974 - RNA, 19 nt, Artificial Sequence
  Description of Artificial Sequence: Synthetic oligonucleotide
  Sense strand starting at position 2221 of SEQ ID NO: 1241497
uuauaaagggccuagcauu

SEQ ID NO: 1276975 - RNA, 19 nt, Artificial Sequence
  Description of Artificial Sequence: Synthetic oligonucleotide
  Antisense strand to SEQ ID NO: 1276974
aaugcuaggcccuuuauaa

SEQ ID NO: 1276976 - RNA, 19 nt, Artificial Sequence
  Description of Artificial Sequence: Synthetic oligonucleotide
  Sense strand starting at position 2238 of SEQ ID NO: 1241497
uugaguccggcccaugaaa

SEQ ID NO: 1276977 - RNA, 19 nt, Artificial Sequence
  Description of Artificial Sequence: Synthetic oligonucleotide
  Antisense strand to SEQ ID NO: 1276976
uuucaugggccggacucaa

SEQ ID NO: 1276978 - RNA, 19 nt, Artificial Sequence
  Description of Artificial Sequence: Synthetic oligonucleotide
  Sense strand starting at position 2311 of SEQ ID NO: 1241497
agucaugugagauauccga

SEQ ID NO: 1276979 - RNA, 19 nt, Artificial Sequence
  Description of Artificial Sequence: Synthetic oligonucleotide
  Antisense strand to SEQ ID NO: 1276978
ucggauaucucacaugacu

SEQ ID NO: 1276980 - RNA, 19 nt, Artificial Sequence
  Description of Artificial Sequence: Synthetic oligonucleotide
  Sense strand starting at position 2315 of SEQ ID NO: 1241497
augugagauauccgaacuu

SEQ ID NO: 1276981 - RNA, 19 nt, Artificial Sequence
  Description of Artificial Sequence: Synthetic oligonucleotide
  Antisense strand to SEQ ID NO: 1276980
aaguucggauaucucacau

SEQ ID NO: 1276982 - RNA, 19 nt, Artificial Sequence
  Description of Artificial Sequence: Synthetic oligonucleotide
  Sense strand starting at position 2391 of SEQ ID NO: 1241497
guucaagggucuuugauag

SEQ ID NO: 1276983 - RNA, 19 nt, Artificial Sequence
  Description of Artificial Sequence: Synthetic oligonucleotide
  Antisense strand to SEQ ID NO: 1276982
cuaucaaagacccuugaac

SEQ ID NO: 1276984 - RNA, 19 nt, Artificial Sequence
  Description of Artificial Sequence: Synthetic oligonucleotide
  Sense strand starting at position 2398 of SEQ ID NO: 1241497
ggucuuugauaguuaggaa

SEQ ID NO: 1276985 - RNA, 19 nt, Artificial Sequence
  Description of Artificial Sequence: Synthetic oligonucleotide
  Antisense strand to SEQ ID NO: 1276984
uuccuaacuaucaaagacc

SEQ ID NO: 1276986 - RNA, 19 nt, Artificial Sequence
  Description of Artificial Sequence: Synthetic oligonucleotide
  Sense strand starting at position 2413 of SEQ ID NO: 1241497
ggaaauaccugucugugaa

SEQ ID NO: 1276987 - RNA, 19 nt, Artificial Sequence
  Description of Artificial Sequence: Synthetic oligonucleotide
  Antisense strand to SEQ ID NO: 1276986
uucacagacagguauuucc

SEQ ID NO: 1276988 - RNA, 19 nt, Artificial Sequence
  Description of Artificial Sequence: Synthetic oligonucleotide
  Sense strand starting at position 2414 of SEQ ID NO: 1241497
gaaauaccugucugugaag

SEQ ID NO: 1276989 - RNA, 19 nt, Artificial Sequence
  Description of Artificial Sequence: Synthetic oligonucleotide
  Antisense strand to SEQ ID NO: 1276988
cuucacagacagguauuuc

SEQ ID NO: 1276990 - RNA, 19 nt, Artificial Sequence
  Description of Artificial Sequence: Synthetic oligonucleotide
  Sense strand starting at position 2508 of SEQ ID NO: 1241497
cuuagaagacuuuguacua

SEQ ID NO: 1276991 - RNA, 19 nt, Artificial Sequence
  Description of Artificial Sequence: Synthetic oligonucleotide
  Antisense strand to SEQ ID NO: 1276990
uaguacaaagucuucuaag

SEQ ID NO: 1276992 - RNA, 19 nt, Artificial Sequence
  Description of Artificial Sequence: Synthetic oligonucleotide
  Sense strand starting at position 2586 of SEQ ID NO: 1241497
uuaacauaucaagggcuuu

SEQ ID NO: 1276993 - RNA, 19 nt, Artificial Sequence
  Description of Artificial Sequence: Synthetic oligonucleotide
  Antisense strand to SEQ ID NO: 1276992
aaagcccuugauauguuaa

SEQ ID NO: 1276994 - RNA, 19 nt, Artificial Sequence
  Description of Artificial Sequence: Synthetic oligonucleotide
  Sense strand starting at position 2608 of SEQ ID NO: 1241497
agggcaggagauuguaaua

SEQ ID NO: 1276995 - RNA, 19 nt, Artificial Sequence
  Description of Artificial Sequence: Synthetic oligonucleotide
  Antisense strand to SEQ ID NO: 1276994
uauuacaaucuccugcccu

SEQ ID NO: 1276996 - RNA, 19 nt, Artificial Sequence
  Description of Artificial Sequence: Synthetic oligonucleotide
  Sense strand starting at position 2619 of SEQ ID NO: 1241497
uuguaauagauacgaagau

SEQ ID NO: 1276997 - RNA, 19 nt, Artificial Sequence
  Description of Artificial Sequence: Synthetic oligonucleotide
  Antisense strand to SEQ ID NO: 1276996
aucuucguaucuauuacaa

SEQ ID NO: 1276998 - RNA, 19 nt, Artificial Sequence
  Description of Artificial Sequence: Synthetic oligonucleotide
  Sense strand starting at position 2803 of SEQ ID NO: 1241497
acuuaugucacugagguga

SEQ ID NO: 1276999 - RNA, 19 nt, Artificial Sequence
  Description of Artificial Sequence: Synthetic oligonucleotide
  Antisense strand to SEQ ID NO: 1276998
ucaccucagugacauaagu

SEQ ID NO: 1277000 - RNA, 19 nt, Artificial Sequence
  Description of Artificial Sequence: Synthetic oligonucleotide
  Sense strand starting at position 3203 of SEQ ID NO: 1241497
agauauauuuauugggauc

SEQ ID NO: 1277001 - RNA, 19 nt, Artificial Sequence
  Description of Artificial Sequence: Synthetic oligonucleotide
  Antisense strand to SEQ ID NO: 1277000
gaucccaauaaauauaucu

SEQ ID NO: 1277002 - RNA, 19 nt, Artificial Sequence
  Description of Artificial Sequence: Synthetic oligonucleotide
  Sense strand starting at position 3229 of SEQ ID NO: 1241497
guuaaagaucuuuaguuag

SEQ ID NO: 1277003 - RNA, 19 nt, Artificial Sequence
  Description of Artificial Sequence: Synthetic oligonucleotide
  Antisense strand to SEQ ID NO: 1277002
cuaacuaaagaucuuuaac

SEQ ID NO: 1277004 - RNA, 19 nt, Artificial Sequence
  Description of Artificial Sequence: Synthetic oligonucleotide
  Sense strand starting at position 3231 of SEQ ID NO: 1241497
uaaagaucuuuaguuagga

SEQ ID NO: 1277005 - RNA, 19 nt, Artificial Sequence
  Description of Artificial Sequence: Synthetic oligonucleotide
  Antisense strand to SEQ ID NO: 1277004
uccuaacuaaagaucuuua

SEQ ID NO: 1277006 - RNA, 19 nt, Artificial Sequence
  Description of Artificial Sequence: Synthetic oligonucleotide
  Sense strand starting at position 3308 of SEQ ID NO: 1241497
ugaugaagucugcagaccu

SEQ ID NO: 1277007 - RNA, 19 nt, Artificial Sequence
  Description of Artificial Sequence: Synthetic oligonucleotide
  Antisense strand to SEQ ID NO: 1277006
aggucugcagacuucauca

SEQ ID NO: 1277008 - RNA, 19 nt, Artificial Sequence
  Description of Artificial Sequence: Synthetic oligonucleotide
  Sense strand starting at position 3316 of SEQ ID NO: 1241497
ucugcagaccugcauaaga

SEQ ID NO: 1277009 - RNA, 19 nt, Artificial Sequence
  Description of Artificial Sequence: Synthetic oligonucleotide
  Antisense strand to SEQ ID NO: 1277008
ucuuaugcaggucugcaga

SEQ ID NO: 1277010 - RNA, 19 nt, Artificial Sequence
  Description of Artificial Sequence: Synthetic oligonucleotide
  Sense strand starting at position 3318 of SEQ ID NO: 1241497
ugcagaccugcauaagaau

SEQ ID NO: 1277011 - RNA, 19 nt, Artificial Sequence
  Description of Artificial Sequence: Synthetic oligonucleotide
  Antisense strand to SEQ ID NO: 1277010
auucuuaugcaggucugca

SEQ ID NO: 1277012 - RNA, 19 nt, Artificial Sequence
  Description of Artificial Sequence: Synthetic oligonucleotide
  Sense strand starting at position 3337 of SEQ ID NO: 1241497
uagguucuaugaguccaaa

SEQ ID NO: 1277013 - RNA, 19 nt, Artificial Sequence
  Description of Artificial Sequence: Synthetic oligonucleotide
  Antisense strand to SEQ ID NO: 1277012
uuuggacucauagaaccua

SEQ ID NO: 1277014 - RNA, 19 nt, Artificial Sequence
  Description of Artificial Sequence: Synthetic oligonucleotide
  Sense strand starting at position 3383 of SEQ ID NO: 1241497
cuggcagaguacuuacaaa

SEQ ID NO: 1277015 - RNA, 19 nt, Artificial Sequence
  Description of Artificial Sequence: Synthetic oligonucleotide
  Antisense strand to SEQ ID NO: 1277014
uuuguaaguacucugccag

SEQ ID NO: 1277016 - RNA, 19 nt, Artificial Sequence
  Description of Artificial Sequence: Synthetic oligonucleotide
  Sense strand starting at position 3403 of SEQ ID NO: 1241497
aggagcuuaguaugacaau

SEQ ID NO: 1277017 - RNA, 19 nt, Artificial Sequence
  Description of Artificial Sequence: Synthetic oligonucleotide
  Antisense strand to SEQ ID NO: 1277016
auugucauacuaagcuccu

SEQ ID NO: 1277018 - RNA, 19 nt, Artificial Sequence
  Description of Artificial Sequence: Synthetic oligonucleotide
  Sense strand starting at position 3510 of SEQ ID NO: 1241497
gcauuugucuuucuuagca

SEQ ID NO: 1277019 - RNA, 19 nt, Artificial Sequence
  Description of Artificial Sequence: Synthetic oligonucleotide
  Antisense strand to SEQ ID NO: 1277018
ugcuaagaaagacaaaugc

SEQ ID NO: 1277020 - RNA, 19 nt, Artificial Sequence
  Description of Artificial Sequence: Synthetic oligonucleotide
  Sense strand starting at position 3665 of SEQ ID NO: 1241497
cuggguauacuagguauau

SEQ ID NO: 1277021 - RNA, 19 nt, Artificial Sequence
  Description of Artificial Sequence: Synthetic oligonucleotide
  Antisense strand to SEQ ID NO: 1277020
auauaccuaguauacccag

SEQ ID NO: 1277022 - RNA, 19 nt, Artificial Sequence
  Description of Artificial Sequence: Synthetic oligonucleotide
  Sense strand starting at position 3666 of SEQ ID NO: 1241497
uggguauacuagguauauu

SEQ ID NO: 1277023 - RNA, 19 nt, Artificial Sequence
  Description of Artificial Sequence: Synthetic oligonucleotide
  Antisense strand to SEQ ID NO: 1277022
aauauaccuaguauaccca

SEQ ID NO: 1277024 - RNA, 19 nt, Artificial Sequence
  Description of Artificial Sequence: Synthetic oligonucleotide
  Sense strand starting at position 3667 of SEQ ID NO: 1241497
ggguauacuagguauauug

SEQ ID NO: 1277025 - RNA, 19 nt, Artificial Sequence
  Description of Artificial Sequence: Synthetic oligonucleotide
  Antisense strand to SEQ ID NO: 1277024
caauauaccuaguauaccc

SEQ ID NO: 1277026 - RNA, 19 nt, Artificial Sequence
  Description of Artificial Sequence: Synthetic oligonucleotide
  Sense strand starting at position 3676 of SEQ ID NO: 1241497
agguauauuguguacuuac

SEQ ID NO: 1277027 - RNA, 19 nt, Artificial Sequence
  Description of Artificial Sequence: Synthetic oligonucleotide
  Antisense strand to SEQ ID NO: 1277026
guaaguacacaauauaccu

SEQ ID NO: 1277028 - RNA, 19 nt, Artificial Sequence
  Description of Artificial Sequence: Synthetic oligonucleotide
  Sense strand starting at position 3703 of SEQ ID NO: 1241497
aagagaauguugcucaaga

SEQ ID NO: 1277029 - RNA, 19 nt, Artificial Sequence
  Description of Artificial Sequence: Synthetic oligonucleotide
  Antisense strand to SEQ ID NO: 1277028
ucuugagcaacauucucuu

SEQ ID NO: 1277030 - RNA, 19 nt, Artificial Sequence
  Description of Artificial Sequence: Synthetic oligonucleotide
  Sense strand starting at position 3704 of SEQ ID NO: 1241497
agagaauguugcucaagag

SEQ ID NO: 1277031 - RNA, 19 nt, Artificial Sequence
  Description of Artificial Sequence: Synthetic oligonucleotide
  Antisense strand to SEQ ID NO: 1277030
cucuugagcaacauucucu

SEQ ID NO: 1277032 - RNA, 19 nt, Artificial Sequence
  Description of Artificial Sequence: Synthetic oligonucleotide
  Sense strand starting at position 3744 of SEQ ID NO: 1241497
gaaaguguauaaucaagua

SEQ ID NO: 1277033 - RNA, 19 nt, Artificial Sequence
  Description of Artificial Sequence: Synthetic oligonucleotide
  Antisense strand to SEQ ID NO: 1277032
uacuugauuauacacuuuc

SEQ ID NO: 1277034 - RNA, 19 nt, Artificial Sequence
  Description of Artificial Sequence: Synthetic oligonucleotide
  Sense strand starting at position 174 of SEQ ID NO: 1241498
agucaaagucauugacaua

SEQ ID NO: 1277035 - RNA, 19 nt, Artificial Sequence
  Description of Artificial Sequence: Synthetic oligonucleotide
  Antisense strand to SEQ ID NO: 1277034
uaugucaaugacuuugacu

SEQ ID NO: 1277036 - RNA, 19 nt, Artificial Sequence
  Description of Artificial Sequence: Synthetic oligonucleotide
  Sense strand starting at position 186 of SEQ ID NO: 1241498
ugacauauuccauggccag

SEQ ID NO: 1277037 - RNA, 19 nt, Artificial Sequence
  Description of Artificial Sequence: Synthetic oligonucleotide
  Antisense strand to SEQ ID NO: 1277036
cuggccauggaauauguca

SEQ ID NO: 1277038 - RNA, 19 nt, Artificial Sequence
  Description of Artificial Sequence: Synthetic oligonucleotide
  Sense strand starting at position 344 of SEQ ID NO: 1241498
ggagcaagaguuugggaaa

SEQ ID NO: 1277039 - RNA, 19 nt, Artificial Sequence
  Description of Artificial Sequence: Synthetic oligonucleotide
  Antisense strand to SEQ ID NO: 1277038
uuucccaaacucuugcucc

SEQ ID NO: 1277040 - RNA, 19 nt, Artificial Sequence
  Description of Artificial Sequence: Synthetic oligonucleotide
  Sense strand starting at position 553 of SEQ ID NO: 1241498
aacccuagugcugagacau

SEQ ID NO: 1277041 - RNA, 19 nt, Artificial Sequence
  Description of Artificial Sequence: Synthetic oligonucleotide
  Antisense strand to SEQ ID NO: 1277040
augucucagcacuaggguu

SEQ ID NO: 1277042 - RNA, 19 nt, Artificial Sequence
  Description of Artificial Sequence: Synthetic oligonucleotide
  Sense strand starting at position 576 of SEQ ID NO: 1241498
agaggucugucaucucaag

SEQ ID NO: 1277043 - RNA, 19 nt, Artificial Sequence
  Description of Artificial Sequence: Synthetic oligonucleotide
  Antisense strand to SEQ ID NO: 1277042
cuugagaugacagaccucu

SEQ ID NO: 1277044 - RNA, 19 nt, Artificial Sequence
  Description of Artificial Sequence: Synthetic oligonucleotide
  Sense strand starting at position 582 of SEQ ID NO: 1241498
cugucaucucaagaggcau

SEQ ID NO: 1277045 - RNA, 19 nt, Artificial Sequence
  Description of Artificial Sequence: Synthetic oligonucleotide
  Antisense strand to SEQ ID NO: 1277044
augccucuugagaugacag

SEQ ID NO: 1277046 - RNA, 19 nt, Artificial Sequence
  Description of Artificial Sequence: Synthetic oligonucleotide
  Sense strand starting at position 643 of SEQ ID NO: 1241498
gugacaaagugaguguaua

SEQ ID NO: 1277047 - RNA, 19 nt, Artificial Sequence
  Description of Artificial Sequence: Synthetic oligonucleotide
  Antisense strand to SEQ ID NO: 1277046
uauacacucacuuugucac

SEQ ID NO: 1277048 - RNA, 19 nt, Artificial Sequence
  Description of Artificial Sequence: Synthetic oligonucleotide
  Sense strand starting at position 644 of SEQ ID NO: 1241498
ugacaaagugaguguauau

SEQ ID NO: 1277049 - RNA, 19 nt, Artificial Sequence
  Description of Artificial Sequence: Synthetic oligonucleotide
  Antisense strand to SEQ ID NO: 1277048
auauacacucacuuuguca

SEQ ID NO: 1277050 - RNA, 19 nt, Artificial Sequence
  Description of Artificial Sequence: Synthetic oligonucleotide
  Sense strand starting at position 706 of SEQ ID NO: 1241498
caaggauaauguguucuua

SEQ ID NO: 1277051 - RNA, 19 nt, Artificial Sequence
  Description of Artificial Sequence: Synthetic oligonucleotide
  Antisense strand to SEQ ID NO: 1277050
uaagaacacauuauccuug

SEQ ID NO: 1277052 - RNA, 19 nt, Artificial Sequence
  Description of Artificial Sequence: Synthetic oligonucleotide
  Sense strand starting at position 708 of SEQ ID NO: 1241498
aggauaauguguucuuaua

SEQ ID NO: 1277053 - RNA, 19 nt, Artificial Sequence
  Description of Artificial Sequence: Synthetic oligonucleotide
  Antisense strand to SEQ ID NO: 1277052
uauaagaacacauuauccu

SEQ ID NO: 1277054 - RNA, 19 nt, Artificial Sequence
  Description of Artificial Sequence: Synthetic oligonucleotide
  Sense strand starting at position 754 of SEQ ID NO: 1241498
aagugccuugccuauagaa

SEQ ID NO: 1277055 - RNA, 19 nt, Artificial Sequence
  Description of Artificial Sequence: Synthetic oligonucleotide
  Antisense strand to SEQ ID NO: 1277054
uucuauaggcaaggcacuu

SEQ ID NO: 1277056 - RNA, 19 nt, Artificial Sequence
  Description of Artificial Sequence: Synthetic oligonucleotide
  Sense strand starting at position 756 of SEQ ID NO: 1241498
gugccuugccuauagaaga

SEQ ID NO: 1277057 - RNA, 19 nt, Artificial Sequence
  Description of Artificial Sequence: Synthetic oligonucleotide
  Antisense strand to SEQ ID NO: 1277056
ucuucuauaggcaaggcac

SEQ ID NO: 1277058 - RNA, 19 nt, Artificial Sequence
  Description of Artificial Sequence: Synthetic oligonucleotide
  Sense strand starting at position 779 of SEQ ID NO: 1241498
caguguacauuuguucuau

SEQ ID NO: 1277059 - RNA, 19 nt, Artificial Sequence
  Description of Artificial Sequence: Synthetic oligonucleotide
  Antisense strand to SEQ ID NO: 1277058
auagaacaaauguacacug

SEQ ID NO: 1277060 - RNA, 19 nt, Artificial Sequence
  Description of Artificial Sequence: Synthetic oligonucleotide
  Sense strand starting at position 1039 of SEQ ID NO: 1241498
gcaguuagacuuuguaaca

SEQ ID NO: 1277061 - RNA, 19 nt, Artificial Sequence
  Description of Artificial Sequence: Synthetic oligonucleotide
  Antisense strand to SEQ ID NO: 1277060
uguuacaaagucuaacugc

SEQ ID NO: 1277062 - RNA, 19 nt, Artificial Sequence
  Description of Artificial Sequence: Synthetic oligonucleotide
  Sense strand starting at position 1061 of SEQ ID NO: 1241498
accaaagaguguucucuag

SEQ ID NO: 1277063 - RNA, 19 nt, Artificial Sequence
  Description of Artificial Sequence: Synthetic oligonucleotide
  Antisense strand to SEQ ID NO: 1277062
cuagagaacacucuuuggu

SEQ ID NO: 1277064 - RNA, 19 nt, Artificial Sequence
  Description of Artificial Sequence: Synthetic oligonucleotide
  Sense strand starting at position 1063 of SEQ ID NO: 1241498
caaagaguguucucuagaa

SEQ ID NO: 1277065 - RNA, 19 nt, Artificial Sequence
  Description of Artificial Sequence: Synthetic oligonucleotide
  Antisense strand to SEQ ID NO: 1277064
uucuagagaacacucuuug

SEQ ID NO: 1277066 - RNA, 19 nt, Artificial Sequence
  Description of Artificial Sequence: Synthetic oligonucleotide
  Sense strand starting at position 1067 of SEQ ID NO: 1241498
gaguguucucuagaacacu

SEQ ID NO: 1277067 - RNA, 19 nt, Artificial Sequence
  Description of Artificial Sequence: Synthetic oligonucleotide
  Antisense strand to SEQ ID NO: 1277066
aguguucuagagaacacuc

SEQ ID NO: 1277068 - RNA, 19 nt, Artificial Sequence
  Description of Artificial Sequence: Synthetic oligonucleotide
  Sense strand starting at position 1107 of SEQ ID NO: 1241498
agaggucugugcucagaua

SEQ ID NO: 1277069 - RNA, 19 nt, Artificial Sequence
  Description of Artificial Sequence: Synthetic oligonucleotide
  Antisense strand to SEQ ID NO: 1277068
uaucugagcacagaccucu

SEQ ID NO: 1277070 - RNA, 19 nt, Artificial Sequence
  Description of Artificial Sequence: Synthetic oligonucleotide
  Sense strand starting at position 1108 of SEQ ID NO: 1241498
gaggucugugcucagauaa

SEQ ID NO: 1277071 - RNA, 19 nt, Artificial Sequence
  Description of Artificial Sequence: Synthetic oligonucleotide
  Antisense strand to SEQ ID NO: 1277070
uuaucugagcacagaccuc

SEQ ID NO: 1277072 - RNA, 19 nt, Artificial Sequence
  Description of Artificial Sequence: Synthetic oligonucleotide
  Sense strand starting at position 1131 of SEQ ID NO: 1241498
gagaaauguugccuccuau

SEQ ID NO: 1277073 - RNA, 19 nt, Artificial Sequence
  Description of Artificial Sequence: Synthetic oligonucleotide
  Antisense strand to SEQ ID NO: 1277072
auaggaggcaacauuucuc

SEQ ID NO: 1277074 - RNA, 19 nt, Artificial Sequence
  Description of Artificial Sequence: Synthetic oligonucleotide
  Sense strand starting at position 1182 of SEQ ID NO: 1241498
gcauauuaaccugagcaau

SEQ ID NO: 1277075 - RNA, 19 nt, Artificial Sequence
  Description of Artificial Sequence: Synthetic oligonucleotide
  Antisense strand to SEQ ID NO: 1277074
auugcucagguuaauaugc

SEQ ID NO: 1277076 - RNA, 19 nt, Artificial Sequence
  Description of Artificial Sequence: Synthetic oligonucleotide
  Sense strand starting at position 1193 of SEQ ID NO: 1241498
ugagcaauccuuuaguaaa

SEQ ID NO: 1277077 - RNA, 19 nt, Artificial Sequence
  Description of Artificial Sequence: Synthetic oligonucleotide
  Antisense strand to SEQ ID NO: 1277076
uuuacuaaaggauugcuca

SEQ ID NO: 1277078 - RNA, 19 nt, Artificial Sequence
  Description of Artificial Sequence: Synthetic oligonucleotide
  Sense strand starting at position 1305 of SEQ ID NO: 1241498
ggaacuucuggcuggguga

SEQ ID NO: 1277079 - RNA, 19 nt, Artificial Sequence
  Description of Artificial Sequence: Synthetic oligonucleotide
  Antisense strand to SEQ ID NO: 1277078
ucacccagccagaaguucc

SEQ ID NO: 1277080 - RNA, 19 nt, Artificial Sequence
  Description of Artificial Sequence: Synthetic oligonucleotide
  Sense strand starting at position 1721 of SEQ ID NO: 1241498
gaagguuguuuaucuuucu

SEQ ID NO: 1277081 - RNA, 19 nt, Artificial Sequence
  Description of Artificial Sequence: Synthetic oligonucleotide
  Antisense strand to SEQ ID NO: 1277080
agaaagauaaacaaccuuc

SEQ ID NO: 1277082 - RNA, 19 nt, Artificial Sequence
  Description of Artificial Sequence: Synthetic oligonucleotide
  Sense strand starting at position 1741 of SEQ ID NO: 1241498
acgugauagcagugaggga

SEQ ID NO: 1277083 - RNA, 19 nt, Artificial Sequence
  Description of Artificial Sequence: Synthetic oligonucleotide
  Antisense strand to SEQ ID NO: 1277082
ucccucacugcuaucacgu

SEQ ID NO: 1277084 - RNA, 19 nt, Artificial Sequence
  Description of Artificial Sequence: Synthetic oligonucleotide
  Sense strand starting at position 1872 of SEQ ID NO: 1241498
ccagguaggcccuggauau

SEQ ID NO: 1277085 - RNA, 19 nt, Artificial Sequence
  Description of Artificial Sequence: Synthetic oligonucleotide
  Antisense strand to SEQ ID NO: 1277084
auauccagggccuaccugg

SEQ ID NO: 1277086 - RNA, 19 nt, Artificial Sequence
  Description of Artificial Sequence: Synthetic oligonucleotide
  Sense strand starting at position 1873 of SEQ ID NO: 1241498
cagguaggcccuggauaua

SEQ ID NO: 1277087 - RNA, 19 nt, Artificial Sequence
  Description of Artificial Sequence: Synthetic oligonucleotide
  Antisense strand to SEQ ID NO: 1277086
uauauccagggccuaccug

SEQ ID NO: 1277088 - RNA, 19 nt, Artificial Sequence
  Description of Artificial Sequence: Synthetic oligonucleotide
  Sense strand starting at position 2097 of SEQ ID NO: 1241498
ggagaucauuugcauaucu

SEQ ID NO: 1277089 - RNA, 19 nt, Artificial Sequence
  Description of Artificial Sequence: Synthetic oligonucleotide
  Antisense strand to SEQ ID NO: 1277088
agauaugcaaaugaucucc

SEQ ID NO: 1277090 - RNA, 19 nt, Artificial Sequence
  Description of Artificial Sequence: Synthetic oligonucleotide
  Sense strand starting at position 2311 of SEQ ID NO: 1241498
ccaugcauagccugggauu

SEQ ID NO: 1277091 - RNA, 19 nt, Artificial Sequence
  Description of Artificial Sequence: Synthetic oligonucleotide
  Antisense strand to SEQ ID NO: 1277090
aaucccaggcuaugcaugg

SEQ ID NO: 1277092 - RNA, 19 nt, Artificial Sequence
  Description of Artificial Sequence: Synthetic oligonucleotide
  Sense strand starting at position 2386 of SEQ ID NO: 1241498
ccucaucugucuuuggaga

SEQ ID NO: 1277093 - RNA, 19 nt, Artificial Sequence
  Description of Artificial Sequence: Synthetic oligonucleotide
  Antisense strand to SEQ ID NO: 1277092
ucuccaaagacagaugagg

SEQ ID NO: 1277094 - RNA, 19 nt, Artificial Sequence
  Description of Artificial Sequence: Synthetic oligonucleotide
  Sense strand starting at position 2391 of SEQ ID NO: 1241498
ucugucuuuggagacuaua

SEQ ID NO: 1277095 - RNA, 19 nt, Artificial Sequence
  Description of Artificial Sequence: Synthetic oligonucleotide
  Antisense strand to SEQ ID NO: 1277094
uauagucuccaaagacaga

SEQ ID NO: 1277096 - RNA, 19 nt, Artificial Sequence
  Description of Artificial Sequence: Synthetic oligonucleotide
  Sense strand starting at position 2606 of SEQ ID NO: 1241498
gcuaauccagcuugggaga

SEQ ID NO: 1277097 - RNA, 19 nt, Artificial Sequence
  Description of Artificial Sequence: Synthetic oligonucleotide
  Antisense strand to SEQ ID NO: 1277096
ucucccaagcuggauuagc

SEQ ID NO: 1277098 - RNA, 19 nt, Artificial Sequence
  Description of Artificial Sequence: Synthetic oligonucleotide
  Sense strand starting at position 2865 of SEQ ID NO: 1241498
gagcuaucaucccugagua

SEQ ID NO: 1277099 - RNA, 19 nt, Artificial Sequence
  Description of Artificial Sequence: Synthetic oligonucleotide
  Antisense strand to SEQ ID NO: 1277098
uacucagggaugauagcuc

SEQ ID NO: 1277100 - RNA, 19 nt, Artificial Sequence
  Description of Artificial Sequence: Synthetic oligonucleotide
  Sense strand starting at position 2866 of SEQ ID NO: 1241498
agcuaucaucccugaguag

SEQ ID NO: 1277101 - RNA, 19 nt, Artificial Sequence
  Description of Artificial Sequence: Synthetic oligonucleotide
  Antisense strand to SEQ ID NO: 1277100
cuacucagggaugauagcu

SEQ ID NO: 1277102 - RNA, 19 nt, Artificial Sequence
  Description of Artificial Sequence: Synthetic oligonucleotide
  Sense strand starting at position 3137 of SEQ ID NO: 1241498
cuaagaaggugguuucuga

SEQ ID NO: 1277103 - RNA, 19 nt, Artificial Sequence
  Description of Artificial Sequence: Synthetic oligonucleotide
  Antisense strand to SEQ ID NO: 1277102
ucagaaaccaccuucuuag

SEQ ID NO: 1277104 - RNA, 19 nt, Artificial Sequence
  Description of Artificial Sequence: Synthetic oligonucleotide
  Sense strand starting at position 3180 of SEQ ID NO: 1241498
uccauaucaccugggaacu

SEQ ID NO: 1277105 - RNA, 19 nt, Artificial Sequence
  Description of Artificial Sequence: Synthetic oligonucleotide
  Antisense strand to SEQ ID NO: 1277104
aguucccaggugauaugga

SEQ ID NO: 1277106 - RNA, 19 nt, Artificial Sequence
  Description of Artificial Sequence: Synthetic oligonucleotide
  Sense strand starting at position 3181 of SEQ ID NO: 1241498
ccauaucaccugggaacuu

SEQ ID NO: 1277107 - RNA, 19 nt, Artificial Sequence
  Description of Artificial Sequence: Synthetic oligonucleotide
  Antisense strand to SEQ ID NO: 1277106
aaguucccaggugauaugg

SEQ ID NO: 1277108 - RNA, 19 nt, Artificial Sequence
  Description of Artificial Sequence: Synthetic oligonucleotide
  Sense strand starting at position 3299 of SEQ ID NO: 1241498
ucugacaugcuugaaaguu

SEQ ID NO: 1277109 - RNA, 19 nt, Artificial Sequence
  Description of Artificial Sequence: Synthetic oligonucleotide
  Antisense strand to SEQ ID NO: 1277108
aacuuucaagcaugucaga

SEQ ID NO: 1277110 - RNA, 19 nt, Artificial Sequence
  Description of Artificial Sequence: Synthetic oligonucleotide
  Sense strand starting at position 3632 of SEQ ID NO: 1241498
acagaaugccugcagucua

SEQ ID NO: 1277111 - RNA, 19 nt, Artificial Sequence
  Description of Artificial Sequence: Synthetic oligonucleotide
  Antisense strand to SEQ ID NO: 1277110
uagacugcaggcauucugu

SEQ ID NO: 1277112 - RNA, 19 nt, Artificial Sequence
  Description of Artificial Sequence: Synthetic oligonucleotide
  Sense strand starting at position 3948 of SEQ ID NO: 1241498
gaauguagcucuccaaagu

SEQ ID NO: 1277113 - RNA, 19 nt, Artificial Sequence
  Description of Artificial Sequence: Synthetic oligonucleotide
  Antisense strand to SEQ ID NO: 1277112
acuuuggagagcuacauuc

SEQ ID NO: 1277114 - RNA, 19 nt, Artificial Sequence
  Description of Artificial Sequence: Synthetic oligonucleotide
  Sense strand starting at position 15 of SEQ ID NO: 1241499
accuguauugugugaacaa

SEQ ID NO: 1277115 - RNA, 19 nt, Artificial Sequence
  Description of Artificial Sequence: Synthetic oligonucleotide
  Antisense strand to SEQ ID NO: 1277114
uuguucacacaauacaggu

SEQ ID NO: 1277116 - RNA, 19 nt, Artificial Sequence
  Description of Artificial Sequence: Synthetic oligonucleotide
  Sense strand starting at position 84 of SEQ ID NO: 1241499
ccaaguuacugucauuuac

SEQ ID NO: 1277117 - RNA, 19 nt, Artificial Sequence
  Description of Artificial Sequence: Synthetic oligonucleotide
  Antisense strand to SEQ ID NO: 1277116
guaaaugacaguaacuugg

SEQ ID NO: 1277118 - RNA, 19 nt, Artificial Sequence
  Description of Artificial Sequence: Synthetic oligonucleotide
  Sense strand starting at position 153 of SEQ ID NO: 1241499
uucugauagcaauaguaga

SEQ ID NO: 1277119 - RNA, 19 nt, Artificial Sequence
  Description of Artificial Sequence: Synthetic oligonucleotide
  Antisense strand to SEQ ID NO: 1277118
ucuacuauugcuaucagaa

SEQ ID NO: 1277120 - RNA, 19 nt, Artificial Sequence
  Description of Artificial Sequence: Synthetic oligonucleotide
  Sense strand starting at position 163 of SEQ ID NO: 1241499
aauaguagauguguaguuu

SEQ ID NO: 1277121 - RNA, 19 nt, Artificial Sequence
  Description of Artificial Sequence: Synthetic oligonucleotide
  Antisense strand to SEQ ID NO: 1277120
aaacuacacaucuacuauu

SEQ ID NO: 1277122 - RNA, 19 nt, Artificial Sequence
  Description of Artificial Sequence: Synthetic oligonucleotide
  Sense strand starting at position 247 of SEQ ID NO: 1241499
ggccacagguuguuaauua

SEQ ID NO: 1277123 - RNA, 19 nt, Artificial Sequence
  Description of Artificial Sequence: Synthetic oligonucleotide
  Antisense strand to SEQ ID NO: 1277122
uaauuaacaaccuguggcc

SEQ ID NO: 1277124 - RNA, 19 nt, Artificial Sequence
  Description of Artificial Sequence: Synthetic oligonucleotide
  Sense strand starting at position 277 of SEQ ID NO: 1241499
uucuuauguucggcuacuu

SEQ ID NO: 1277125 - RNA, 19 nt, Artificial Sequence
  Description of Artificial Sequence: Synthetic oligonucleotide
  Antisense strand to SEQ ID NO: 1277124
aaguagccgaacauaagaa

SEQ ID NO: 1277126 - RNA, 19 nt, Artificial Sequence
  Description of Artificial Sequence: Synthetic oligonucleotide
  Sense strand starting at position 358 of SEQ ID NO: 1241499
ugauuccuguugucagcua

SEQ ID NO: 1277127 - RNA, 19 nt, Artificial Sequence
  Description of Artificial Sequence: Synthetic oligonucleotide
  Antisense strand to SEQ ID NO: 1277126
uagcugacaacaggaauca

SEQ ID NO: 1277128 - RNA, 19 nt, Artificial Sequence
  Description of Artificial Sequence: Synthetic oligonucleotide
  Sense strand starting at position 424 of SEQ ID NO: 1241499
gggugaaagcaaggugaau

SEQ ID NO: 1277129 - RNA, 19 nt, Artificial Sequence
  Description of Artificial Sequence: Synthetic oligonucleotide
  Antisense strand to SEQ ID NO: 1277128
auucaccuugcuuucaccc

SEQ ID NO: 1277130 - RNA, 19 nt, Artificial Sequence
  Description of Artificial Sequence: Synthetic oligonucleotide
  Sense strand starting at position 430 of SEQ ID NO: 1241499
aagcaaggugaaugaauau

SEQ ID NO: 1277131 - RNA, 19 nt, Artificial Sequence
  Description of Artificial Sequence: Synthetic oligonucleotide
  Antisense strand to SEQ ID NO: 1277130
auauucauucaccuugcuu

SEQ ID NO: 1277132 - RNA, 19 nt, Artificial Sequence
  Description of Artificial Sequence: Synthetic oligonucleotide
  Sense strand starting at position 468 of SEQ ID NO: 1241499
ggacucaccugauaaguug

SEQ ID NO: 1277133 - RNA, 19 nt, Artificial Sequence
  Description of Artificial Sequence: Synthetic oligonucleotide
  Antisense strand to SEQ ID NO: 1277132
caacuuaucaggugagucc

SEQ ID NO: 1277134 - RNA, 19 nt, Artificial Sequence
  Description of Artificial Sequence: Synthetic oligonucleotide
  Sense strand starting at position 647 of SEQ ID NO: 1241499
guagaaauuugcuucccuc

SEQ ID NO: 1277135 - RNA, 19 nt, Artificial Sequence
  Description of Artificial Sequence: Synthetic oligonucleotide
  Antisense strand to SEQ ID NO: 1277134
gagggaagcaaauuucuac

SEQ ID NO: 1277136 - RNA, 19 nt, Artificial Sequence
  Description of Artificial Sequence: Synthetic oligonucleotide
  Sense strand starting at position 743 of SEQ ID NO: 1241499
gcuaguggguuagcgaauu

SEQ ID NO: 1277137 - RNA, 19 nt, Artificial Sequence
  Description of Artificial Sequence: Synthetic oligonucleotide
  Antisense strand to SEQ ID NO: 1277136
aauucgcuaacccacuagc

SEQ ID NO: 1277138 - RNA, 19 nt, Artificial Sequence
  Description of Artificial Sequence: Synthetic oligonucleotide
  Sense strand starting at position 749 of SEQ ID NO: 1241499
ggguuagcgaauugcuaug

SEQ ID NO: 1277139 - RNA, 19 nt, Artificial Sequence
  Description of Artificial Sequence: Synthetic oligonucleotide
  Antisense strand to SEQ ID NO: 1277138
cauagcaauucgcuaaccc

SEQ ID NO: 1277140 - RNA, 19 nt, Artificial Sequence
  Description of Artificial Sequence: Synthetic oligonucleotide
  Sense strand starting at position 1989 of SEQ ID NO: 1241499
gggcaagucauaugcaaau

SEQ ID NO: 1277141 - RNA, 19 nt, Artificial Sequence
  Description of Artificial Sequence: Synthetic oligonucleotide
  Antisense strand to SEQ ID NO: 1277140
auuugcauaugacuugccc

SEQ ID NO: 1277142 - RNA, 19 nt, Artificial Sequence
  Description of Artificial Sequence: Synthetic oligonucleotide
  Sense strand starting at position 2009 of SEQ ID NO: 1241499
gcgcacucccgagagcaaa

SEQ ID NO: 1277143 - RNA, 19 nt, Artificial Sequence
  Description of Artificial Sequence: Synthetic oligonucleotide
  Antisense strand to SEQ ID NO: 1277142
uuugcucucgggagugcgc

SEQ ID NO: 1277144 - RNA, 19 nt, Artificial Sequence
  Description of Artificial Sequence: Synthetic oligonucleotide
  Sense strand starting at position 2311 of SEQ ID NO: 1241499
ucucacaauuucggaggaa

SEQ ID NO: 1277145 - RNA, 19 nt, Artificial Sequence
  Description of Artificial Sequence: Synthetic oligonucleotide
  Antisense strand to SEQ ID NO: 1277144
uuccuccgaaauugugaga

SEQ ID NO: 1277146 - RNA, 19 nt, Artificial Sequence
  Description of Artificial Sequence: Synthetic oligonucleotide
  Sense strand starting at position 2312 of SEQ ID NO: 1241499
cucacaauuucggaggaaa

SEQ ID NO: 1277147 - RNA, 19 nt, Artificial Sequence
  Description of Artificial Sequence: Synthetic oligonucleotide
  Antisense strand to SEQ ID NO: 1277146
uuuccuccgaaauugugag

SEQ ID NO: 1277148 - RNA, 19 nt, Artificial Sequence
  Description of Artificial Sequence: Synthetic oligonucleotide
  Sense strand starting at position 2525 of SEQ ID NO: 1241499
gggcgaaugaugggaaucu

SEQ ID NO: 1277149 - RNA, 19 nt, Artificial Sequence
  Description of Artificial Sequence: Synthetic oligonucleotide
  Antisense strand to SEQ ID NO: 1277148
agauucccaucauucgccc

SEQ ID NO: 1277150 - RNA, 19 nt, Artificial Sequence
  Description of Artificial Sequence: Synthetic oligonucleotide
  Sense strand starting at position 2596 of SEQ ID NO: 1241499
ggugaagggcuccgugauu

SEQ ID NO: 1277151 - RNA, 19 nt, Artificial Sequence
  Description of Artificial Sequence: Synthetic oligonucleotide
  Antisense strand to SEQ ID NO: 1277150
aaucacggagcccuucacc

SEQ ID NO: 1277152 - RNA, 19 nt, Artificial Sequence
  Description of Artificial Sequence: Synthetic oligonucleotide
  Sense strand starting at position 2658 of SEQ ID NO: 1241499
ggacacuguugggauucaa

SEQ ID NO: 1277153 - RNA, 19 nt, Artificial Sequence
  Description of Artificial Sequence: Synthetic oligonucleotide
  Antisense strand to SEQ ID NO: 1277152
uugaaucccaacagugucc

SEQ ID NO: 1277154 - RNA, 19 nt, Artificial Sequence
  Description of Artificial Sequence: Synthetic oligonucleotide
  Sense strand starting at position 2698 of SEQ ID NO: 1241499
gccuguaguccugaucaaa

SEQ ID NO: 1277155 - RNA, 19 nt, Artificial Sequence
  Description of Artificial Sequence: Synthetic oligonucleotide
  Antisense strand to SEQ ID NO: 1277154
uuugaucaggacuacaggc

SEQ ID NO: 1277156 - RNA, 19 nt, Artificial Sequence
  Description of Artificial Sequence: Synthetic oligonucleotide
  Sense strand starting at position 2847 of SEQ ID NO: 1241499
cgguguuuaccucacgacu

SEQ ID NO: 1277157 - RNA, 19 nt, Artificial Sequence
  Description of Artificial Sequence: Synthetic oligonucleotide
  Antisense strand to SEQ ID NO: 1277156
agucgugagguaaacaccg

SEQ ID NO: 1277158 - RNA, 19 nt, Artificial Sequence
  Description of Artificial Sequence: Synthetic oligonucleotide
  Sense strand starting at position 2850 of SEQ ID NO: 1241499
uguuuaccucacgacugaa

SEQ ID NO: 1277159 - RNA, 19 nt, Artificial Sequence
  Description of Artificial Sequence: Synthetic oligonucleotide
  Antisense strand to SEQ ID NO: 1277158
uucagucgugagguaaaca

SEQ ID NO: 1277160 - RNA, 19 nt, Artificial Sequence
  Description of Artificial Sequence: Synthetic oligonucleotide
  Sense strand starting at position 3050 of SEQ ID NO: 1241499
gguuguuguccacacaggu

SEQ ID NO: 1277161 - RNA, 19 nt, Artificial Sequence
  Description of Artificial Sequence: Synthetic oligonucleotide
  Antisense strand to SEQ ID NO: 1277160
accuguguggacaacaacc

SEQ ID NO: 1277162 - RNA, 19 nt, Artificial Sequence
  Description of Artificial Sequence: Synthetic oligonucleotide
  Sense strand starting at position 3149 of SEQ ID NO: 1241499
gaacaauacuugcugguua

SEQ ID NO: 1277163 - RNA, 19 nt, Artificial Sequence
  Description of Artificial Sequence: Synthetic oligonucleotide
  Antisense strand to SEQ ID NO: 1277162
uaaccagcaaguauuguuc

SEQ ID NO: 1277164 - RNA, 19 nt, Artificial Sequence
  Description of Artificial Sequence: Synthetic oligonucleotide
  Sense strand starting at position 3151 of SEQ ID NO: 1241499
acaauacuugcugguuaaa

SEQ ID NO: 1277165 - RNA, 19 nt, Artificial Sequence
  Description of Artificial Sequence: Synthetic oligonucleotide
  Antisense strand to SEQ ID NO: 1277164
uuuaaccagcaaguauugu

SEQ ID NO: 1277166 - RNA, 19 nt, Artificial Sequence
  Description of Artificial Sequence: Synthetic oligonucleotide
  Sense strand starting at position 3179 of SEQ ID NO: 1241499
uguuguauuuaggaggcuu

SEQ ID NO: 1277167 - RNA, 19 nt, Artificial Sequence
  Description of Artificial Sequence: Synthetic oligonucleotide
  Antisense strand to SEQ ID NO: 1277166
aagccuccuaaauacaaca

SEQ ID NO: 1277168 - RNA, 19 nt, Artificial Sequence
  Description of Artificial Sequence: Synthetic oligonucleotide
  Sense strand starting at position 3322 of SEQ ID NO: 1241499
acagcauuaugucucucua

SEQ ID NO: 1277169 - RNA, 19 nt, Artificial Sequence
  Description of Artificial Sequence: Synthetic oligonucleotide
  Antisense strand to SEQ ID NO: 1277168
uagagagacauaaugcugu

SEQ ID NO: 1277170 - RNA, 19 nt, Artificial Sequence
  Description of Artificial Sequence: Synthetic oligonucleotide
  Sense strand starting at position 3406 of SEQ ID NO: 1241499
auggcagugaacugguauu

SEQ ID NO: 1277171 - RNA, 19 nt, Artificial Sequence
  Description of Artificial Sequence: Synthetic oligonucleotide
  Antisense strand to SEQ ID NO: 1277170
aauaccaguucacugccau

SEQ ID NO: 1277172 - RNA, 19 nt, Artificial Sequence
  Description of Artificial Sequence: Synthetic oligonucleotide
  Sense strand starting at position 3432 of SEQ ID NO: 1241499
ugaaauugguguccuccaa

SEQ ID NO: 1277173 - RNA, 19 nt, Artificial Sequence
  Description of Artificial Sequence: Synthetic oligonucleotide
  Antisense strand to SEQ ID NO: 1277172
uuggaggacaccaauuuca

SEQ ID NO: 1277174 - RNA, 19 nt, Artificial Sequence
  Description of Artificial Sequence: Synthetic oligonucleotide
  Sense strand starting at position 3456 of SEQ ID NO: 1241499
ucaagcugcccguaguaaa

SEQ ID NO: 1277175 - RNA, 19 nt, Artificial Sequence
  Description of Artificial Sequence: Synthetic oligonucleotide
  Antisense strand to SEQ ID NO: 1277174
uuuacuacgggcagcuuga

SEQ ID NO: 1277176 - RNA, 19 nt, Artificial Sequence
  Description of Artificial Sequence: Synthetic oligonucleotide
  Sense strand starting at position 3463 of SEQ ID NO: 1241499
gcccguaguaaaugaugca

SEQ ID NO: 1277177 - RNA, 19 nt, Artificial Sequence
  Description of Artificial Sequence: Synthetic oligonucleotide
  Antisense strand to SEQ ID NO: 1277176
ugcaucauuuacuacgggc

SEQ ID NO: 1277178 - RNA, 19 nt, Artificial Sequence
  Description of Artificial Sequence: Synthetic oligonucleotide
  Sense strand starting at position 3503 of SEQ ID NO: 1241499
ggcucucauuuguaagggu

SEQ ID NO: 1277179 - RNA, 19 nt, Artificial Sequence
  Description of Artificial Sequence: Synthetic oligonucleotide
  Antisense strand to SEQ ID NO: 1277178
acccuuacaaaugagagcc

SEQ ID NO: 1277180 - RNA, 19 nt, Artificial Sequence
  Description of Artificial Sequence: Synthetic oligonucleotide
  Sense strand starting at position 3648 of SEQ ID NO: 1241499
gugguuuauggacauucca

SEQ ID NO: 1277181 - RNA, 19 nt, Artificial Sequence
  Description of Artificial Sequence: Synthetic oligonucleotide
  Antisense strand to SEQ ID NO: 1277180
uggaauguccauaaaccac

SEQ ID NO: 1277182 - RNA, 19 nt, Artificial Sequence
  Description of Artificial Sequence: Synthetic oligonucleotide
  Sense strand starting at position 3656 of SEQ ID NO: 1241499
uggacauuccauugaaacc

SEQ ID NO: 1277183 - RNA, 19 nt, Artificial Sequence
  Description of Artificial Sequence: Synthetic oligonucleotide
  Antisense strand to SEQ ID NO: 1277182
gguuucaauggaaugucca

SEQ ID NO: 1277184 - RNA, 19 nt, Artificial Sequence
  Description of Artificial Sequence: Synthetic oligonucleotide
  Sense strand starting at position 3779 of SEQ ID NO: 1241499
uggcaauauucuuugucca

SEQ ID NO: 1277185 - RNA, 19 nt, Artificial Sequence
  Description of Artificial Sequence: Synthetic oligonucleotide
  Antisense strand to SEQ ID NO: 1277184
uggacaaagaauauugcca

SEQ ID NO: 1277186 - RNA, 19 nt, Artificial Sequence
  Description of Artificial Sequence: Synthetic oligonucleotide
  Sense strand starting at position 3780 of SEQ ID NO: 1241499
ggcaauauucuuuguccac

SEQ ID NO: 1277187 - RNA, 19 nt, Artificial Sequence
  Description of Artificial Sequence: Synthetic oligonucleotide
  Antisense strand to SEQ ID NO: 1277186
guggacaaagaauauugcc

SEQ ID NO: 1277188 - RNA, 19 nt, Artificial Sequence
  Description of Artificial Sequence: Synthetic oligonucleotide
  Sense strand starting at position 3784 of SEQ ID NO: 1241499
auauucuuuguccacuaga

SEQ ID NO: 1277189 - RNA, 19 nt, Artificial Sequence
  Description of Artificial Sequence: Synthetic oligonucleotide
  Antisense strand to SEQ ID NO: 1277188
ucuaguggacaaagaauau

SEQ ID NO: 1277190 - RNA, 19 nt, Artificial Sequence
  Description of Artificial Sequence: Synthetic oligonucleotide
  Sense strand starting at position 3861 of SEQ ID NO: 1241499
augcuauuauugcuagaaa

SEQ ID NO: 1277191 - RNA, 19 nt, Artificial Sequence
  Description of Artificial Sequence: Synthetic oligonucleotide
  Antisense strand to SEQ ID NO: 1277190
uuucuagcaauaauagcau

SEQ ID NO: 1277192 - RNA, 19 nt, Artificial Sequence
  Description of Artificial Sequence: Synthetic oligonucleotide
  Sense strand starting at position 3959 of SEQ ID NO: 1241499
guggauuuccacugcacuu

SEQ ID NO: 1277193 - RNA, 19 nt, Artificial Sequence
  Description of Artificial Sequence: Synthetic oligonucleotide
  Antisense strand to SEQ ID NO: 1277192
aagugcaguggaaauccac

SEQ ID NO: 1277194 - RNA, 19 nt, Artificial Sequence
  Description of Artificial Sequence: Synthetic oligonucleotide
  Sense strand starting at position 282 of SEQ ID NO: 1241500
gcaggaucggaagggaaau

SEQ ID NO: 1277195 - RNA, 19 nt, Artificial Sequence
  Description of Artificial Sequence: Synthetic oligonucleotide
  Antisense strand to SEQ ID NO: 1277194
auuucccuuccgauccugc

SEQ ID NO: 1277196 - RNA, 19 nt, Artificial Sequence
  Description of Artificial Sequence: Synthetic oligonucleotide
  Sense strand starting at position 555 of SEQ ID NO: 1241500
uguagcaucaagcaugaga

SEQ ID NO: 1277197 - RNA, 19 nt, Artificial Sequence
  Description of Artificial Sequence: Synthetic oligonucleotide
  Antisense strand to SEQ ID NO: 1277196
ucucaugcuugaugcuaca

SEQ ID NO: 1277198 - RNA, 19 nt, Artificial Sequence
  Description of Artificial Sequence: Synthetic oligonucleotide
  Sense strand starting at position 558 of SEQ ID NO: 1241500
agcaucaagcaugagauua

SEQ ID NO: 1277199 - RNA, 19 nt, Artificial Sequence
  Description of Artificial Sequence: Synthetic oligonucleotide
  Antisense strand to SEQ ID NO: 1277198
uaaucucaugcuugaugcu

SEQ ID NO: 1277200 - RNA, 19 nt, Artificial Sequence
  Description of Artificial Sequence: Synthetic oligonucleotide
  Sense strand starting at position 670 of SEQ ID NO: 1241500
agaucaauugcuggaugaa

SEQ ID NO: 1277201 - RNA, 19 nt, Artificial Sequence
  Description of Artificial Sequence: Synthetic oligonucleotide
  Antisense strand to SEQ ID NO: 1277200
uucauccagcaauugaucu

SEQ ID NO: 1277202 - RNA, 19 nt, Artificial Sequence
  Description of Artificial Sequence: Synthetic oligonucleotide
  Sense strand starting at position 754 of SEQ ID NO: 1241500
gccugaaauucuucuggaa

SEQ ID NO: 1277203 - RNA, 19 nt, Artificial Sequence
  Description of Artificial Sequence: Synthetic oligonucleotide
  Antisense strand to SEQ ID NO: 1277202
uuccagaagaauuucaggc

SEQ ID NO: 1277204 - RNA, 19 nt, Artificial Sequence
  Description of Artificial Sequence: Synthetic oligonucleotide
  Sense strand starting at position 1061 of SEQ ID NO: 1241500
cagugaauugaaugaggca

SEQ ID NO: 1277205 - RNA, 19 nt, Artificial Sequence
  Description of Artificial Sequence: Synthetic oligonucleotide
  Antisense strand to SEQ ID NO: 1277204
ugccucauucaauucacug

SEQ ID NO: 1277206 - RNA, 19 nt, Artificial Sequence
  Description of Artificial Sequence: Synthetic oligonucleotide
  Sense strand starting at position 1116 of SEQ ID NO: 1241500
uaauuaucuccagggugac

SEQ ID NO: 1277207 - RNA, 19 nt, Artificial Sequence
  Description of Artificial Sequence: Synthetic oligonucleotide
  Antisense strand to SEQ ID NO: 1277206
gucacccuggagauaauua

SEQ ID NO: 1277208 - RNA, 19 nt, Artificial Sequence
  Description of Artificial Sequence: Synthetic oligonucleotide
  Sense strand starting at position 1117 of SEQ ID NO: 1241500
aauuaucuccagggugaca

SEQ ID NO: 1277209 - RNA, 19 nt, Artificial Sequence
  Description of Artificial Sequence: Synthetic oligonucleotide
  Antisense strand to SEQ ID NO: 1277208
ugucacccuggagauaauu

SEQ ID NO: 1277210 - RNA, 19 nt, Artificial Sequence
  Description of Artificial Sequence: Synthetic oligonucleotide
  Sense strand starting at position 1119 of SEQ ID NO: 1241500
uuaucuccagggugacauu

SEQ ID NO: 1277211 - RNA, 19 nt, Artificial Sequence
  Description of Artificial Sequence: Synthetic oligonucleotide
  Antisense strand to SEQ ID NO: 1277210
aaugucacccuggagauaa

SEQ ID NO: 1277212 - RNA, 19 nt, Artificial Sequence
  Description of Artificial Sequence: Synthetic oligonucleotide
  Sense strand starting at position 1208 of SEQ ID NO: 1241500
cugaccuuuccuuggacau

SEQ ID NO: 1277213 - RNA, 19 nt, Artificial Sequence
  Description of Artificial Sequence: Synthetic oligonucleotide
  Antisense strand to SEQ ID NO: 1277212
auguccaaggaaaggucag

SEQ ID NO: 1277214 - RNA, 19 nt, Artificial Sequence
  Description of Artificial Sequence: Synthetic oligonucleotide
  Sense strand starting at position 1209 of SEQ ID NO: 1241500
ugaccuuuccuuggacauu

SEQ ID NO: 1277215 - RNA, 19 nt, Artificial Sequence
  Description of Artificial Sequence: Synthetic oligonucleotide
  Antisense strand to SEQ ID NO: 1277214
aauguccaaggaaagguca

SEQ ID NO: 1277216 - RNA, 19 nt, Artificial Sequence
  Description of Artificial Sequence: Synthetic oligonucleotide
  Sense strand starting at position 1336 of SEQ ID NO: 1241500
aucugacaagccugaauca

SEQ ID NO: 1277217 - RNA, 19 nt, Artificial Sequence
  Description of Artificial Sequence: Synthetic oligonucleotide
  Antisense strand to SEQ ID NO: 1277216
ugauucaggcuugucagau

SEQ ID NO: 1277218 - RNA, 19 nt, Artificial Sequence
  Description of Artificial Sequence: Synthetic oligonucleotide
  Sense strand starting at position 1452 of SEQ ID NO: 1241500
cuguauugacaacaugcaa

SEQ ID NO: 1277219 - RNA, 19 nt, Artificial Sequence
  Description of Artificial Sequence: Synthetic oligonucleotide
  Antisense strand to SEQ ID NO: 1277218
uugcauguugucaauacag

SEQ ID NO: 1277220 - RNA, 19 nt, Artificial Sequence
  Description of Artificial Sequence: Synthetic oligonucleotide
  Sense strand starting at position 2273 of SEQ ID NO: 1241500
gugugaaucacugacucag

SEQ ID NO: 1277221 - RNA, 19 nt, Artificial Sequence
  Description of Artificial Sequence: Synthetic oligonucleotide
  Antisense strand to SEQ ID NO: 1277220
cugagucagugauucacac

SEQ ID NO: 1277222 - RNA, 19 nt, Artificial Sequence
  Description of Artificial Sequence: Synthetic oligonucleotide
  Sense strand starting at position 2348 of SEQ ID NO: 1241500
ggguaucuacucuacuauu

SEQ ID NO: 1277223 - RNA, 19 nt, Artificial Sequence
  Description of Artificial Sequence: Synthetic oligonucleotide
  Antisense strand to SEQ ID NO: 1277222
aauaguagaguagauaccc

SEQ ID NO: 1277224 - RNA, 19 nt, Artificial Sequence
  Description of Artificial Sequence: Synthetic oligonucleotide
  Sense strand starting at position 2389 of SEQ ID NO: 1241500
cuuugaucagaaugcauga

SEQ ID NO: 1277225 - RNA, 19 nt, Artificial Sequence
  Description of Artificial Sequence: Synthetic oligonucleotide
  Antisense strand to SEQ ID NO: 1277224
ucaugcauucugaucaaag

SEQ ID NO: 1277226 - RNA, 19 nt, Artificial Sequence
  Description of Artificial Sequence: Synthetic oligonucleotide
  Sense strand starting at position 2552 of SEQ ID NO: 1241500
uuggaauauucuguaguaa

SEQ ID NO: 1277227 - RNA, 19 nt, Artificial Sequence
  Description of Artificial Sequence: Synthetic oligonucleotide
  Antisense strand to SEQ ID NO: 1277226
uuacuacagaauauuccaa

SEQ ID NO: 1277228 - RNA, 19 nt, Artificial Sequence
  Description of Artificial Sequence: Synthetic oligonucleotide
  Sense strand starting at position 2564 of SEQ ID NO: 1241500
guaguaaauacaggagucu

SEQ ID NO: 1277229 - RNA, 19 nt, Artificial Sequence
  Description of Artificial Sequence: Synthetic oligonucleotide
  Antisense strand to SEQ ID NO: 1277228
agacuccuguauuuacuac

SEQ ID NO: 1277230 - RNA, 19 nt, Artificial Sequence
  Description of Artificial Sequence: Synthetic oligonucleotide
  Sense strand starting at position 2780 of SEQ ID NO: 1241500
aguuguuacccauaaccuc

SEQ ID NO: 1277231 - RNA, 19 nt, Artificial Sequence
  Description of Artificial Sequence: Synthetic oligonucleotide
  Antisense strand to SEQ ID NO: 1277230
gagguuauggguaacaacu

SEQ ID NO: 1277232 - RNA, 19 nt, Artificial Sequence
  Description of Artificial Sequence: Synthetic oligonucleotide
  Sense strand starting at position 2861 of SEQ ID NO: 1241500
gcagcugaucuuuauuaug

SEQ ID NO: 1277233 - RNA, 19 nt, Artificial Sequence
  Description of Artificial Sequence: Synthetic oligonucleotide
  Antisense strand to SEQ ID NO: 1277232
cauaauaaagaucagcugc

SEQ ID NO: 1277234 - RNA, 19 nt, Artificial Sequence
  Description of Artificial Sequence: Synthetic oligonucleotide
  Sense strand starting at position 2943 of SEQ ID NO: 1241500
agauaugucuaaucaguau

SEQ ID NO: 1277235 - RNA, 19 nt, Artificial Sequence
  Description of Artificial Sequence: Synthetic oligonucleotide
  Antisense strand to SEQ ID NO: 1277234
auacugauuagacauaucu

SEQ ID NO: 1277236 - RNA, 19 nt, Artificial Sequence
  Description of Artificial Sequence: Synthetic oligonucleotide
  Sense strand starting at position 2995 of SEQ ID NO: 1241500
uagagauacuagguaaccu

SEQ ID NO: 1277237 - RNA, 19 nt, Artificial Sequence
  Description of Artificial Sequence: Synthetic oligonucleotide
  Antisense strand to SEQ ID NO: 1277236
agguuaccuaguaucucua

SEQ ID NO: 1277238 - RNA, 19 nt, Artificial Sequence
  Description of Artificial Sequence: Synthetic oligonucleotide
  Sense strand starting at position 3046 of SEQ ID NO: 1241500
ggauuagaccuaugugauu

SEQ ID NO: 1277239 - RNA, 19 nt, Artificial Sequence
  Description of Artificial Sequence: Synthetic oligonucleotide
  Antisense strand to SEQ ID NO: 1277238
aaucacauaggucuaaucc

SEQ ID NO: 1277240 - RNA, 19 nt, Artificial Sequence
  Description of Artificial Sequence: Synthetic oligonucleotide
  Sense strand starting at position 3103 of SEQ ID NO: 1241500
uaaguaggugcucagagua

SEQ ID NO: 1277241 - RNA, 19 nt, Artificial Sequence
  Description of Artificial Sequence: Synthetic oligonucleotide
  Antisense strand to SEQ ID NO: 1277240
uacucugagcaccuacuua

SEQ ID NO: 1277242 - RNA, 19 nt, Artificial Sequence
  Description of Artificial Sequence: Synthetic oligonucleotide
  Sense strand starting at position 3197 of SEQ ID NO: 1241500
uauacaauggcuuguuaag

SEQ ID NO: 1277243 - RNA, 19 nt, Artificial Sequence
  Description of Artificial Sequence: Synthetic oligonucleotide
  Antisense strand to SEQ ID NO: 1277242
cuuaacaagccauuguaua

SEQ ID NO: 1277244 - RNA, 19 nt, Artificial Sequence
  Description of Artificial Sequence: Synthetic oligonucleotide
  Sense strand starting at position 3199 of SEQ ID NO: 1241500
uacaauggcuuguuaagga

SEQ ID NO: 1277245 - RNA, 19 nt, Artificial Sequence
  Description of Artificial Sequence: Synthetic oligonucleotide
  Antisense strand to SEQ ID NO: 1277244
uccuuaacaagccauugua

SEQ ID NO: 1277246 - RNA, 19 nt, Artificial Sequence
  Description of Artificial Sequence: Synthetic oligonucleotide
  Sense strand starting at position 3323 of SEQ ID NO: 1241500
auaggaauuuccuaagaau

SEQ ID NO: 1277247 - RNA, 19 nt, Artificial Sequence
  Description of Artificial Sequence: Synthetic oligonucleotide
  Antisense strand to SEQ ID NO: 1277246
auucuuaggaaauuccuau

SEQ ID NO: 1277248 - RNA, 19 nt, Artificial Sequence
  Description of Artificial Sequence: Synthetic oligonucleotide
  Sense strand starting at position 3326 of SEQ ID NO: 1241500
ggaauuuccuaagaauuau

SEQ ID NO: 1277249 - RNA, 19 nt, Artificial Sequence
  Description of Artificial Sequence: Synthetic oligonucleotide
  Antisense strand to SEQ ID NO: 1277248
auaauucuuaggaaauucc

SEQ ID NO: 1277250 - RNA, 19 nt, Artificial Sequence
  Description of Artificial Sequence: Synthetic oligonucleotide
  Sense strand starting at position 3395 of SEQ ID NO: 1241500
acuacugaauguucuugaa

SEQ ID NO: 1277251 - RNA, 19 nt, Artificial Sequence
  Description of Artificial Sequence: Synthetic oligonucleotide
  Antisense strand to SEQ ID NO: 1277250
uucaagaacauucaguagu

SEQ ID NO: 1277252 - RNA, 19 nt, Artificial Sequence
  Description of Artificial Sequence: Synthetic oligonucleotide
  Sense strand starting at position 3402 of SEQ ID NO: 1241500
aauguucuugaaggugauu

SEQ ID NO: 1277253 - RNA, 19 nt, Artificial Sequence
  Description of Artificial Sequence: Synthetic oligonucleotide
  Antisense strand to SEQ ID NO: 1277252
aaucaccuucaagaacauu

SEQ ID NO: 1277254 - RNA, 19 nt, Artificial Sequence
  Description of Artificial Sequence: Synthetic oligonucleotide
  Sense strand starting at position 3653 of SEQ ID NO: 1241500
uguaauaaaccgcaccauu

SEQ ID NO: 1277255 - RNA, 19 nt, Artificial Sequence
  Description of Artificial Sequence: Synthetic oligonucleotide
  Antisense strand to SEQ ID NO: 1277254
aauggugcgguuuauuaca

SEQ ID NO: 1277256 - RNA, 19 nt, Artificial Sequence
  Description of Artificial Sequence: Synthetic oligonucleotide
  Sense strand starting at position 3767 of SEQ ID NO: 1241500
gcuguacaacauuggaauu

SEQ ID NO: 1277257 - RNA, 19 nt, Artificial Sequence
  Description of Artificial Sequence: Synthetic oligonucleotide
  Antisense strand to SEQ ID NO: 1277256
aauuccaauguuguacagc

SEQ ID NO: 1277258 - RNA, 19 nt, Artificial Sequence
  Description of Artificial Sequence: Synthetic oligonucleotide
  Sense strand starting at position 3817 of SEQ ID NO: 1241500
aucuuacuaguuugaucua

SEQ ID NO: 1277259 - RNA, 19 nt, Artificial Sequence
  Description of Artificial Sequence: Synthetic oligonucleotide
  Antisense strand to SEQ ID NO: 1277258
uagaucaaacuaguaagau

SEQ ID NO: 1277260 - RNA, 19 nt, Artificial Sequence
  Description of Artificial Sequence: Synthetic oligonucleotide
  Sense strand starting at position 3826 of SEQ ID NO: 1241500
guuugaucuagucaaggca

SEQ ID NO: 1277261 - RNA, 19 nt, Artificial Sequence
  Description of Artificial Sequence: Synthetic oligonucleotide
  Antisense strand to SEQ ID NO: 1277260
ugccuugacuagaucaaac

SEQ ID NO: 1277262 - RNA, 19 nt, Artificial Sequence
  Description of Artificial Sequence: Synthetic oligonucleotide
  Sense strand starting at position 3829 of SEQ ID NO: 1241500
ugaucuagucaaggcauua

SEQ ID NO: 1277263 - RNA, 19 nt, Artificial Sequence
  Description of Artificial Sequence: Synthetic oligonucleotide
  Antisense strand to SEQ ID NO: 1277262
uaaugccuugacuagauca

SEQ ID NO: 1277264 - RNA, 19 nt, Artificial Sequence
  Description of Artificial Sequence: Synthetic oligonucleotide
  Sense strand starting at position 3864 of SEQ ID NO: 1241500
agaaacuagugaguauguu

SEQ ID NO: 1277265 - RNA, 19 nt, Artificial Sequence
  Description of Artificial Sequence: Synthetic oligonucleotide
  Antisense strand to SEQ ID NO: 1277264
aacauacucacuaguuucu

SEQ ID NO: 1277266 - RNA, 19 nt, Artificial Sequence
  Description of Artificial Sequence: Synthetic oligonucleotide
  Sense strand starting at position 3919 of SEQ ID NO: 1241500
aguuuagcugguuagauca

SEQ ID NO: 1277267 - RNA, 19 nt, Artificial Sequence
  Description of Artificial Sequence: Synthetic oligonucleotide
  Antisense strand to SEQ ID NO: 1277266
ugaucuaaccagcuaaacu

SEQ ID NO: 1277268 - RNA, 19 nt, Artificial Sequence
  Description of Artificial Sequence: Synthetic oligonucleotide
  Sense strand starting at position 3938 of SEQ ID NO: 1241500
agaaguuaaguaugaguua

SEQ ID NO: 1277269 - RNA, 19 nt, Artificial Sequence
  Description of Artificial Sequence: Synthetic oligonucleotide
  Antisense strand to SEQ ID NO: 1277268
uaacucauacuuaacuucu

SEQ ID NO: 1277270 - RNA, 19 nt, Artificial Sequence
  Description of Artificial Sequence: Synthetic oligonucleotide
  Sense strand starting at position 3941 of SEQ ID NO: 1241500
aguuaaguaugaguuauag

SEQ ID NO: 1277271 - RNA, 19 nt, Artificial Sequence
  Description of Artificial Sequence: Synthetic oligonucleotide
  Antisense strand to SEQ ID NO: 1277270
cuauaacucauacuuaacu

SEQ ID NO: 1277272 - RNA, 19 nt, Artificial Sequence
  Description of Artificial Sequence: Synthetic oligonucleotide
  Sense strand starting at position 3957 of SEQ ID NO: 1241500
uagauugaauccuuaugug

SEQ ID NO: 1277273 - RNA, 19 nt, Artificial Sequence
  Description of Artificial Sequence: Synthetic oligonucleotide
  Antisense strand to SEQ ID NO: 1277272
cacauaaggauucaaucua

SEQ ID NO: 1277274 - RNA, 19 nt, Artificial Sequence
  Description of Artificial Sequence: Synthetic oligonucleotide
  Sense strand starting at position 88 of SEQ ID NO: 1241501
uuaauaguuucugcucaga

SEQ ID NO: 1277275 - RNA, 19 nt, Artificial Sequence
  Description of Artificial Sequence: Synthetic oligonucleotide
  Antisense strand to SEQ ID NO: 1277274
ucugagcagaaacuauuaa

SEQ ID NO: 1277276 - RNA, 19 nt, Artificial Sequence
  Description of Artificial Sequence: Synthetic oligonucleotide
  Sense strand starting at position 91 of SEQ ID NO: 1241501
auaguuucugcucagaucu

SEQ ID NO: 1277277 - RNA, 19 nt, Artificial Sequence
  Description of Artificial Sequence: Synthetic oligonucleotide
  Antisense strand to SEQ ID NO: 1277276
agaucugagcagaaacuau

SEQ ID NO: 1277278 - RNA, 19 nt, Artificial Sequence
  Description of Artificial Sequence: Synthetic oligonucleotide
  Sense strand starting at position 199 of SEQ ID NO: 1241501
uagcuacggacuggugauu

SEQ ID NO: 1277279 - RNA, 19 nt, Artificial Sequence
  Description of Artificial Sequence: Synthetic oligonucleotide
  Antisense strand to SEQ ID NO: 1277278
aaucaccaguccguagcua

SEQ ID NO: 1277280 - RNA, 19 nt, Artificial Sequence
  Description of Artificial Sequence: Synthetic oligonucleotide
  Sense strand starting at position 262 of SEQ ID NO: 1241501
ugcuuuaauugcucacaga

SEQ ID NO: 1277281 - RNA, 19 nt, Artificial Sequence
  Description of Artificial Sequence: Synthetic oligonucleotide
  Antisense strand to SEQ ID NO: 1277280
ucugugagcaauuaaagca

SEQ ID NO: 1277282 - RNA, 19 nt, Artificial Sequence
  Description of Artificial Sequence: Synthetic oligonucleotide
  Sense strand starting at position 263 of SEQ ID NO: 1241501
gcuuuaauugcucacagau

SEQ ID NO: 1277283 - RNA, 19 nt, Artificial Sequence
  Description of Artificial Sequence: Synthetic oligonucleotide
  Antisense strand to SEQ ID NO: 1277282
aucugugagcaauuaaagc

SEQ ID NO: 1277284 - RNA, 19 nt, Artificial Sequence
  Description of Artificial Sequence: Synthetic oligonucleotide
  Sense strand starting at position 416 of SEQ ID NO: 1241501
auuuguuauucuguugcau

SEQ ID NO: 1277285 - RNA, 19 nt, Artificial Sequence
  Description of Artificial Sequence: Synthetic oligonucleotide
  Antisense strand to SEQ ID NO: 1277284
augcaacagaauaacaaau

SEQ ID NO: 1277286 - RNA, 19 nt, Artificial Sequence
  Description of Artificial Sequence: Synthetic oligonucleotide
  Sense strand starting at position 473 of SEQ ID NO: 1241501
guggaauuaugccuaucca

SEQ ID NO: 1277287 - RNA, 19 nt, Artificial Sequence
  Description of Artificial Sequence: Synthetic oligonucleotide
  Antisense strand to SEQ ID NO: 1277286
uggauaggcauaauuccac

SEQ ID NO: 1277288 - RNA, 19 nt, Artificial Sequence
  Description of Artificial Sequence: Synthetic oligonucleotide
  Sense strand starting at position 474 of SEQ ID NO: 1241501
uggaauuaugccuauccag

SEQ ID NO: 1277289 - RNA, 19 nt, Artificial Sequence
  Description of Artificial Sequence: Synthetic oligonucleotide
  Antisense strand to SEQ ID NO: 1277288
cuggauaggcauaauucca

SEQ ID NO: 1277290 - RNA, 19 nt, Artificial Sequence
  Description of Artificial Sequence: Synthetic oligonucleotide
  Sense strand starting at position 483 of SEQ ID NO: 1241501
gccuauccagaaugauagu

SEQ ID NO: 1277291 - RNA, 19 nt, Artificial Sequence
  Description of Artificial Sequence: Synthetic oligonucleotide
  Antisense strand to SEQ ID NO: 1277290
acuaucauucuggauaggc

SEQ ID NO: 1277292 - RNA, 19 nt, Artificial Sequence
  Description of Artificial Sequence: Synthetic oligonucleotide
  Sense strand starting at position 563 of SEQ ID NO: 1241501
auagaaacaugauacagau

SEQ ID NO: 1277293 - RNA, 19 nt, Artificial Sequence
  Description of Artificial Sequence: Synthetic oligonucleotide
  Antisense strand to SEQ ID NO: 1277292
aucuguaucauguuucuau

SEQ ID NO: 1277294 - RNA, 19 nt, Artificial Sequence
  Description of Artificial Sequence: Synthetic oligonucleotide
  Sense strand starting at position 656 of SEQ ID NO: 1241501
acgcauuggucauccuuua

SEQ ID NO: 1277295 - RNA, 19 nt, Artificial Sequence
  Description of Artificial Sequence: Synthetic oligonucleotide
  Antisense strand to SEQ ID NO: 1277294
uaaaggaugaccaaugcgu

SEQ ID NO: 1277296 - RNA, 19 nt, Artificial Sequence
  Description of Artificial Sequence: Synthetic oligonucleotide
  Sense strand starting at position 717 of SEQ ID NO: 1241501
aucaguuuccauggugacu

SEQ ID NO: 1277297 - RNA, 19 nt, Artificial Sequence
  Description of Artificial Sequence: Synthetic oligonucleotide
  Antisense strand to SEQ ID NO: 1277296
agucaccauggaaacugau

SEQ ID NO: 1277298 - RNA, 19 nt, Artificial Sequence
  Description of Artificial Sequence: Synthetic oligonucleotide
  Sense strand starting at position 772 of SEQ ID NO: 1241501
gcacaaauuugagagcaaa

SEQ ID NO: 1277299 - RNA, 19 nt, Artificial Sequence
  Description of Artificial Sequence: Synthetic oligonucleotide
  Antisense strand to SEQ ID NO: 1277298
uuugcucucaaauuugugc

SEQ ID NO: 1277300 - RNA, 19 nt, Artificial Sequence
  Description of Artificial Sequence: Synthetic oligonucleotide
  Sense strand starting at position 801 of SEQ ID NO: 1241501
ggguuuggagaaggcuuau

SEQ ID NO: 1277301 - RNA, 19 nt, Artificial Sequence
  Description of Artificial Sequence: Synthetic oligonucleotide
  Antisense strand to SEQ ID NO: 1277300
auaagccuucuccaaaccc

SEQ ID NO: 1277302 - RNA, 19 nt, Artificial Sequence
  Description of Artificial Sequence: Synthetic oligonucleotide
  Sense strand starting at position 899 of SEQ ID NO: 1241501
cugaguacuuuccuuccuu

SEQ ID NO: 1277303 - RNA, 19 nt, Artificial Sequence
  Description of Artificial Sequence: Synthetic oligonucleotide
  Antisense strand to SEQ ID NO: 1277302
aaggaaggaaaguacucag

SEQ ID NO: 1277304 - RNA, 19 nt, Artificial Sequence
  Description of Artificial Sequence: Synthetic oligonucleotide
  Sense strand starting at position 900 of SEQ ID NO: 1241501
ugaguacuuuccuuccuua

SEQ ID NO: 1277305 - RNA, 19 nt, Artificial Sequence
  Description of Artificial Sequence: Synthetic oligonucleotide
  Antisense strand to SEQ ID NO: 1277304
uaaggaaggaaaguacuca

SEQ ID NO: 1277306 - RNA, 19 nt, Artificial Sequence
  Description of Artificial Sequence: Synthetic oligonucleotide
  Sense strand starting at position 927 of SEQ ID NO: 1241501
auguuacauuguuuaagag

SEQ ID NO: 1277307 - RNA, 19 nt, Artificial Sequence
  Description of Artificial Sequence: Synthetic oligonucleotide
  Antisense strand to SEQ ID NO: 1277306
cucuuaaacaauguaacau

SEQ ID NO: 1277308 - RNA, 19 nt, Artificial Sequence
  Description of Artificial Sequence: Synthetic oligonucleotide
  Sense strand starting at position 952 of SEQ ID NO: 1241501
gcaguaaucuaacucguca

SEQ ID NO: 1277309 - RNA, 19 nt, Artificial Sequence
  Description of Artificial Sequence: Synthetic oligonucleotide
  Antisense strand to SEQ ID NO: 1277308
ugacgaguuagauuacugc

SEQ ID NO: 1277310 - RNA, 19 nt, Artificial Sequence
  Description of Artificial Sequence: Synthetic oligonucleotide
  Sense strand starting at position 967 of SEQ ID NO: 1241501
gucaguuauugcucugaga

SEQ ID NO: 1277311 - RNA, 19 nt, Artificial Sequence
  Description of Artificial Sequence: Synthetic oligonucleotide
  Antisense strand to SEQ ID NO: 1277310
ucucagagcaauaacugac

SEQ ID NO: 1277312 - RNA, 19 nt, Artificial Sequence
  Description of Artificial Sequence: Synthetic oligonucleotide
  Sense strand starting at position 969 of SEQ ID NO: 1241501
caguuauugcucugagaaa

SEQ ID NO: 1277313 - RNA, 19 nt, Artificial Sequence
  Description of Artificial Sequence: Synthetic oligonucleotide
  Antisense strand to SEQ ID NO: 1277312
uuucucagagcaauaacug

SEQ ID NO: 1277314 - RNA, 19 nt, Artificial Sequence
  Description of Artificial Sequence: Synthetic oligonucleotide
  Sense strand starting at position 994 of SEQ ID NO: 1241501
gcuuguuauuuguccugac

SEQ ID NO: 1277315 - RNA, 19 nt, Artificial Sequence
  Description of Artificial Sequence: Synthetic oligonucleotide
  Antisense strand to SEQ ID NO: 1277314
gucaggacaaauaacaagc

SEQ ID NO: 1277316 - RNA, 19 nt, Artificial Sequence
  Description of Artificial Sequence: Synthetic oligonucleotide
  Sense strand starting at position 995 of SEQ ID NO: 1241501
cuuguuauuuguccugaca

SEQ ID NO: 1277317 - RNA, 19 nt, Artificial Sequence
  Description of Artificial Sequence: Synthetic oligonucleotide
  Antisense strand to SEQ ID NO: 1277316
ugucaggacaaauaacaag

SEQ ID NO: 1277318 - RNA, 19 nt, Artificial Sequence
  Description of Artificial Sequence: Synthetic oligonucleotide
  Sense strand starting at position 1003 of SEQ ID NO: 1241501
uuguccugacaguaauaaa

SEQ ID NO: 1277319 - RNA, 19 nt, Artificial Sequence
  Description of Artificial Sequence: Synthetic oligonucleotide
  Antisense strand to SEQ ID NO: 1277318
uuuauuacugucaggacaa

SEQ ID NO: 1277320 - RNA, 19 nt, Artificial Sequence
  Description of Artificial Sequence: Synthetic oligonucleotide
  Sense strand starting at position 1081 of SEQ ID NO: 1241501
gcgguuguacuuuaucauu

SEQ ID NO: 1277321 - RNA, 19 nt, Artificial Sequence
  Description of Artificial Sequence: Synthetic oligonucleotide
  Antisense strand to SEQ ID NO: 1277320
aaugauaaaguacaaccgc

SEQ ID NO: 1277322 - RNA, 19 nt, Artificial Sequence
  Description of Artificial Sequence: Synthetic oligonucleotide
  Sense strand starting at position 1198 of SEQ ID NO: 1241501
gagagacuuucugaagaag

SEQ ID NO: 1277323 - RNA, 19 nt, Artificial Sequence
  Description of Artificial Sequence: Synthetic oligonucleotide
  Antisense strand to SEQ ID NO: 1277322
cuucuucagaaagucucuc

SEQ ID NO: 1277324 - RNA, 19 nt, Artificial Sequence
  Description of Artificial Sequence: Synthetic oligonucleotide
  Sense strand starting at position 1255 of SEQ ID NO: 1241501
ugguuaauuuggcaaagca

SEQ ID NO: 1277325 - RNA, 19 nt, Artificial Sequence
  Description of Artificial Sequence: Synthetic oligonucleotide
  Antisense strand to SEQ ID NO: 1277324
ugcuuugccaaauuaacca

SEQ ID NO: 1277326 - RNA, 19 nt, Artificial Sequence
  Description of Artificial Sequence: Synthetic oligonucleotide
  Sense strand starting at position 1861 of SEQ ID NO: 1241501
gccaaaguguaaucuguuu

SEQ ID NO: 1277327 - RNA, 19 nt, Artificial Sequence
  Description of Artificial Sequence: Synthetic oligonucleotide
  Antisense strand to SEQ ID NO: 1277326
aaacagauuacacuuuggc

SEQ ID NO: 1277328 - RNA, 19 nt, Artificial Sequence
  Description of Artificial Sequence: Synthetic oligonucleotide
  Sense strand starting at position 2530 of SEQ ID NO: 1241501
gccuguaggccauaagaac

SEQ ID NO: 1277329 - RNA, 19 nt, Artificial Sequence
  Description of Artificial Sequence: Synthetic oligonucleotide
  Antisense strand to SEQ ID NO: 1277328
guucuuauggccuacaggc

SEQ ID NO: 1277330 - RNA, 19 nt, Artificial Sequence
  Description of Artificial Sequence: Synthetic oligonucleotide
  Sense strand starting at position 2585 of SEQ ID NO: 1241501
caagguggaugagauuaaa

SEQ ID NO: 1277331 - RNA, 19 nt, Artificial Sequence
  Description of Artificial Sequence: Synthetic oligonucleotide
  Antisense strand to SEQ ID NO: 1277330
uuuaaucucauccaccuug

SEQ ID NO: 1277332 - RNA, 19 nt, Artificial Sequence
  Description of Artificial Sequence: Synthetic oligonucleotide
  Sense strand starting at position 2706 of SEQ ID NO: 1241501
cccacuuagugacugauau

SEQ ID NO: 1277333 - RNA, 19 nt, Artificial Sequence
  Description of Artificial Sequence: Synthetic oligonucleotide
  Antisense strand to SEQ ID NO: 1277332
auaucagucacuaaguggg

SEQ ID NO: 1277334 - RNA, 19 nt, Artificial Sequence
  Description of Artificial Sequence: Synthetic oligonucleotide
  Sense strand starting at position 2707 of SEQ ID NO: 1241501
ccacuuagugacugauaua

SEQ ID NO: 1277335 - RNA, 19 nt, Artificial Sequence
  Description of Artificial Sequence: Synthetic oligonucleotide
  Antisense strand to SEQ ID NO: 1277334
uauaucagucacuaagugg

SEQ ID NO: 1277336 - RNA, 19 nt, Artificial Sequence
  Description of Artificial Sequence: Synthetic oligonucleotide
  Sense strand starting at position 2728 of SEQ ID NO: 1241501
gaaguagagugggugagau

SEQ ID NO: 1277337 - RNA, 19 nt, Artificial Sequence
  Description of Artificial Sequence: Synthetic oligonucleotide
  Antisense strand to SEQ ID NO: 1277336
aucucacccacucuacuuc

SEQ ID NO: 1277338 - RNA, 19 nt, Artificial Sequence
  Description of Artificial Sequence: Synthetic oligonucleotide
  Sense strand starting at position 3152 of SEQ ID NO: 1241501
gaagcaagaccaugugcua

SEQ ID NO: 1277339 - RNA, 19 nt, Artificial Sequence
  Description of Artificial Sequence: Synthetic oligonucleotide
  Antisense strand to SEQ ID NO: 1277338
uagcacauggucuugcuuc

SEQ ID NO: 1277340 - RNA, 19 nt, Artificial Sequence
  Description of Artificial Sequence: Synthetic oligonucleotide
  Sense strand starting at position 3159 of SEQ ID NO: 1241501
gaccaugugcuaggaauaa

SEQ ID NO: 1277341 - RNA, 19 nt, Artificial Sequence
  Description of Artificial Sequence: Synthetic oligonucleotide
  Antisense strand to SEQ ID NO: 1277340
uuauuccuagcacaugguc

SEQ ID NO: 1277342 - RNA, 19 nt, Artificial Sequence
  Description of Artificial Sequence: Synthetic oligonucleotide
  Sense strand starting at position 3224 of SEQ ID NO: 1241501
agaagagcaucugugguaa

SEQ ID NO: 1277343 - RNA, 19 nt, Artificial Sequence
  Description of Artificial Sequence: Synthetic oligonucleotide
  Antisense strand to SEQ ID NO: 1277342
uuaccacagaugcucuucu

SEQ ID NO: 1277344 - RNA, 19 nt, Artificial Sequence
  Description of Artificial Sequence: Synthetic oligonucleotide
  Sense strand starting at position 3328 of SEQ ID NO: 1241501
gucucuaggcuauacauua

SEQ ID NO: 1277345 - RNA, 19 nt, Artificial Sequence
  Description of Artificial Sequence: Synthetic oligonucleotide
  Antisense strand to SEQ ID NO: 1277344
uaauguauagccuagagac

SEQ ID NO: 1277346 - RNA, 19 nt, Artificial Sequence
  Description of Artificial Sequence: Synthetic oligonucleotide
  Sense strand starting at position 3416 of SEQ ID NO: 1241501
acgacuuaagcccaagagu

SEQ ID NO: 1277347 - RNA, 19 nt, Artificial Sequence
  Description of Artificial Sequence: Synthetic oligonucleotide
  Antisense strand to SEQ ID NO: 1277346
acucuugggcuuaagucgu

SEQ ID NO: 1277348 - RNA, 19 nt, Artificial Sequence
  Description of Artificial Sequence: Synthetic oligonucleotide
  Sense strand starting at position 3461 of SEQ ID NO: 1241501
agauccugucucugccaaa

SEQ ID NO: 1277349 - RNA, 19 nt, Artificial Sequence
  Description of Artificial Sequence: Synthetic oligonucleotide
  Antisense strand to SEQ ID NO: 1277348
uuuggcagagacaggaucu

SEQ ID NO: 1277350 - RNA, 19 nt, Artificial Sequence
  Description of Artificial Sequence: Synthetic oligonucleotide
  Sense strand starting at position 3910 of SEQ ID NO: 1241501
gugaacaugaaauguguga

SEQ ID NO: 1277351 - RNA, 19 nt, Artificial Sequence
  Description of Artificial Sequence: Synthetic oligonucleotide
  Antisense strand to SEQ ID NO: 1277350
ucacacauuucauguucac

SEQ ID NO: 1277352 - RNA, 19 nt, Artificial Sequence
  Description of Artificial Sequence: Synthetic oligonucleotide
  Sense strand starting at position 3914 of SEQ ID NO: 1241501
acaugaaaugugugaauuc

SEQ ID NO: 1277353 - RNA, 19 nt, Artificial Sequence
  Description of Artificial Sequence: Synthetic oligonucleotide
  Antisense strand to SEQ ID NO: 1277352
gaauucacacauuucaugu

SEQ ID NO: 1277354 - RNA, 19 nt, Artificial Sequence
  Description of Artificial Sequence: Synthetic oligonucleotide
  Sense strand starting at position 21 of SEQ ID NO: 1241502
aggcaauggucccuuaaga

SEQ ID NO: 1277355 - RNA, 19 nt, Artificial Sequence
  Description of Artificial Sequence: Synthetic oligonucleotide
  Antisense strand to SEQ ID NO: 1277354
ucuuaagggaccauugccu

SEQ ID NO: 1277356 - RNA, 19 nt, Artificial Sequence
  Description of Artificial Sequence: Synthetic oligonucleotide
  Sense strand starting at position 96 of SEQ ID NO: 1241502
agucauaacugucuuaaca

SEQ ID NO: 1277357 - RNA, 19 nt, Artificial Sequence
  Description of Artificial Sequence: Synthetic oligonucleotide
  Antisense strand to SEQ ID NO: 1277356
uguuaagacaguuaugacu

SEQ ID NO: 1277358 - RNA, 19 nt, Artificial Sequence
  Description of Artificial Sequence: Synthetic oligonucleotide
  Sense strand starting at position 215 of SEQ ID NO: 1241502
guacauaauacugggugau

SEQ ID NO: 1277359 - RNA, 19 nt, Artificial Sequence
  Description of Artificial Sequence: Synthetic oligonucleotide
  Antisense strand to SEQ ID NO: 1277358
aucacccaguauuauguac

SEQ ID NO: 1277360 - RNA, 19 nt, Artificial Sequence
  Description of Artificial Sequence: Synthetic oligonucleotide
  Sense strand starting at position 236 of SEQ ID NO: 1241502
ugaugaugauaauaaagga

SEQ ID NO: 1277361 - RNA, 19 nt, Artificial Sequence
  Description of Artificial Sequence: Synthetic oligonucleotide
  Antisense strand to SEQ ID NO: 1277360
uccuuuauuaucaucauca

SEQ ID NO: 1277362 - RNA, 19 nt, Artificial Sequence
  Description of Artificial Sequence: Synthetic oligonucleotide
  Sense strand starting at position 255 of SEQ ID NO: 1241502
ccaugucacugguuuauuu

SEQ ID NO: 1277363 - RNA, 19 nt, Artificial Sequence
  Description of Artificial Sequence: Synthetic oligonucleotide
  Antisense strand to SEQ ID NO: 1277362
aaauaaaccagugacaugg

SEQ ID NO: 1277364 - RNA, 19 nt, Artificial Sequence
  Description of Artificial Sequence: Synthetic oligonucleotide
  Sense strand starting at position 629 of SEQ ID NO: 1241502
uccguacagauguauaaug

SEQ ID NO: 1277365 - RNA, 19 nt, Artificial Sequence
  Description of Artificial Sequence: Synthetic oligonucleotide
  Antisense strand to SEQ ID NO: 1277364
cauuauacaucuguacgga

SEQ ID NO: 1277366 - RNA, 19 nt, Artificial Sequence
  Description of Artificial Sequence: Synthetic oligonucleotide
  Sense strand starting at position 1074 of SEQ ID NO: 1241502
uaggcuaugccauauagag

SEQ ID NO: 1277367 - RNA, 19 nt, Artificial Sequence
  Description of Artificial Sequence: Synthetic oligonucleotide
  Antisense strand to SEQ ID NO: 1277366
cucuauauggcauagccua

SEQ ID NO: 1277368 - RNA, 19 nt, Artificial Sequence
  Description of Artificial Sequence: Synthetic oligonucleotide
  Sense strand starting at position 1219 of SEQ ID NO: 1241502
uguacaugaccuuagcuua

SEQ ID NO: 1277369 - RNA, 19 nt, Artificial Sequence
  Description of Artificial Sequence: Synthetic oligonucleotide
  Antisense strand to SEQ ID NO: 1277368
uaagcuaaggucauguaca

SEQ ID NO: 1277370 - RNA, 19 nt, Artificial Sequence
  Description of Artificial Sequence: Synthetic oligonucleotide
  Sense strand starting at position 1276 of SEQ ID NO: 1241502
cauguuaaggacugauauu

SEQ ID NO: 1277371 - RNA, 19 nt, Artificial Sequence
  Description of Artificial Sequence: Synthetic oligonucleotide
  Antisense strand to SEQ ID NO: 1277370
aauaucaguccuuaacaug

SEQ ID NO: 1277372 - RNA, 19 nt, Artificial Sequence
  Description of Artificial Sequence: Synthetic oligonucleotide
  Sense strand starting at position 1360 of SEQ ID NO: 1241502
gccacaagagaauguagua

SEQ ID NO: 1277373 - RNA, 19 nt, Artificial Sequence
  Description of Artificial Sequence: Synthetic oligonucleotide
  Antisense strand to SEQ ID NO: 1277372
uacuacauucucuuguggc

SEQ ID NO: 1277374 - RNA, 19 nt, Artificial Sequence
  Description of Artificial Sequence: Synthetic oligonucleotide
  Sense strand starting at position 1387 of SEQ ID NO: 1241502
acuuuacgaucaguagauc

SEQ ID NO: 1277375 - RNA, 19 nt, Artificial Sequence
  Description of Artificial Sequence: Synthetic oligonucleotide
  Antisense strand to SEQ ID NO: 1277374
gaucuacugaucguaaagu

SEQ ID NO: 1277376 - RNA, 19 nt, Artificial Sequence
  Description of Artificial Sequence: Synthetic oligonucleotide
  Sense strand starting at position 1388 of SEQ ID NO: 1241502
cuuuacgaucaguagauca

SEQ ID NO: 1277377 - RNA, 19 nt, Artificial Sequence
  Description of Artificial Sequence: Synthetic oligonucleotide
  Antisense strand to SEQ ID NO: 1277376
ugaucuacugaucguaaag

SEQ ID NO: 1277378 - RNA, 19 nt, Artificial Sequence
  Description of Artificial Sequence: Synthetic oligonucleotide
  Sense strand starting at position 1487 of SEQ ID NO: 1241502
cugacuaaagcaugguaga

SEQ ID NO: 1277379 - RNA, 19 nt, Artificial Sequence
  Description of Artificial Sequence: Synthetic oligonucleotide
  Antisense strand to SEQ ID NO: 1277378
ucuaccaugcuuuagucag

SEQ ID NO: 1277380 - RNA, 19 nt, Artificial Sequence
  Description of Artificial Sequence: Synthetic oligonucleotide
  Sense strand starting at position 1523 of SEQ ID NO: 1241502
guauaugguagaugaggga

SEQ ID NO: 1277381 - RNA, 19 nt, Artificial Sequence
  Description of Artificial Sequence: Synthetic oligonucleotide
  Antisense strand to SEQ ID NO: 1277380
ucccucaucuaccauauac

SEQ ID NO: 1277382 - RNA, 19 nt, Artificial Sequence
  Description of Artificial Sequence: Synthetic oligonucleotide
  Sense strand starting at position 1555 of SEQ ID NO: 1241502
uuaguaaauucuuucgaag

SEQ ID NO: 1277383 - RNA, 19 nt, Artificial Sequence
  Description of Artificial Sequence: Synthetic oligonucleotide
  Antisense strand to SEQ ID NO: 1277382
cuucgaaagaauuuacuaa

SEQ ID NO: 1277384 - RNA, 19 nt, Artificial Sequence
  Description of Artificial Sequence: Synthetic oligonucleotide
  Sense strand starting at position 1571 of SEQ ID NO: 1241502
aagaguuuggcuuaaguga

SEQ ID NO: 1277385 - RNA, 19 nt, Artificial Sequence
  Description of Artificial Sequence: Synthetic oligonucleotide
  Antisense strand to SEQ ID NO: 1277384
ucacuuaagccaaacucuu

SEQ ID NO: 1277386 - RNA, 19 nt, Artificial Sequence
  Description of Artificial Sequence: Synthetic oligonucleotide
  Sense strand starting at position 1614 of SEQ ID NO: 1241502
guggaagucauagagucaa

SEQ ID NO: 1277387 - RNA, 19 nt, Artificial Sequence
  Description of Artificial Sequence: Synthetic oligonucleotide
  Antisense strand to SEQ ID NO: 1277386
uugacucuaugacuuccac

SEQ ID NO: 1277388 - RNA, 19 nt, Artificial Sequence
  Description of Artificial Sequence: Synthetic oligonucleotide
  Sense strand starting at position 1631 of SEQ ID NO: 1241502
aaggcaguguuacuuauuu

SEQ ID NO: 1277389 - RNA, 19 nt, Artificial Sequence
  Description of Artificial Sequence: Synthetic oligonucleotide
  Antisense strand to SEQ ID NO: 1277388
aaauaaguaacacugccuu

SEQ ID NO: 1277390 - RNA, 19 nt, Artificial Sequence
  Description of Artificial Sequence: Synthetic oligonucleotide
  Sense strand starting at position 1642 of SEQ ID NO: 1241502
acuuauuucucguuuguug

SEQ ID NO: 1277391 - RNA, 19 nt, Artificial Sequence
  Description of Artificial Sequence: Synthetic oligonucleotide
  Antisense strand to SEQ ID NO: 1277390
caacaaacgagaaauaagu

SEQ ID NO: 1277392 - RNA, 19 nt, Artificial Sequence
  Description of Artificial Sequence: Synthetic oligonucleotide
  Sense strand starting at position 2333 of SEQ ID NO: 1241502
ugaucaugucuuuauauuc

SEQ ID NO: 1277393 - RNA, 19 nt, Artificial Sequence
  Description of Artificial Sequence: Synthetic oligonucleotide
  Antisense strand to SEQ ID NO: 1277392
gaauauaaagacaugauca

SEQ ID NO: 1277394 - RNA, 19 nt, Artificial Sequence
  Description of Artificial Sequence: Synthetic oligonucleotide
  Sense strand starting at position 2441 of SEQ ID NO: 1241502
ugucucauugguuagaacu

SEQ ID NO: 1277395 - RNA, 19 nt, Artificial Sequence
  Description of Artificial Sequence: Synthetic oligonucleotide
  Antisense strand to SEQ ID NO: 1277394
aguucuaaccaaugagaca

SEQ ID NO: 1277396 - RNA, 19 nt, Artificial Sequence
  Description of Artificial Sequence: Synthetic oligonucleotide
  Sense strand starting at position 2548 of SEQ ID NO: 1241502
ugggaauaguuucuacaua

SEQ ID NO: 1277397 - RNA, 19 nt, Artificial Sequence
  Description of Artificial Sequence: Synthetic oligonucleotide
  Antisense strand to SEQ ID NO: 1277396
uauguagaaacuauuccca

SEQ ID NO: 1277398 - RNA, 19 nt, Artificial Sequence
  Description of Artificial Sequence: Synthetic oligonucleotide
  Sense strand starting at position 2695 of SEQ ID NO: 1241502
cuggcugguaauugagaaa

SEQ ID NO: 1277399 - RNA, 19 nt, Artificial Sequence
  Description of Artificial Sequence: Synthetic oligonucleotide
  Antisense strand to SEQ ID NO: 1277398
uuucucaauuaccagccag

SEQ ID NO: 1277400 - RNA, 19 nt, Artificial Sequence
  Description of Artificial Sequence: Synthetic oligonucleotide
  Sense strand starting at position 2706 of SEQ ID NO: 1241502
uugagaaaguuugcaccau

SEQ ID NO: 1277401 - RNA, 19 nt, Artificial Sequence
  Description of Artificial Sequence: Synthetic oligonucleotide
  Antisense strand to SEQ ID NO: 1277400
auggugcaaacuuucucaa

SEQ ID NO: 1277402 - RNA, 19 nt, Artificial Sequence
  Description of Artificial Sequence: Synthetic oligonucleotide
  Sense strand starting at position 2823 of SEQ ID NO: 1241502
uuuaaauaguuccuacgga

SEQ ID NO: 1277403 - RNA, 19 nt, Artificial Sequence
  Description of Artificial Sequence: Synthetic oligonucleotide
  Antisense strand to SEQ ID NO: 1277402
uccguaggaacuauuuaaa

SEQ ID NO: 1277404 - RNA, 19 nt, Artificial Sequence
  Description of Artificial Sequence: Synthetic oligonucleotide
  Sense strand starting at position 2869 of SEQ ID NO: 1241502
acagguuucuaagcaagag

SEQ ID NO: 1277405 - RNA, 19 nt, Artificial Sequence
  Description of Artificial Sequence: Synthetic oligonucleotide
  Antisense strand to SEQ ID NO: 1277404
cucuugcuuagaaaccugu

SEQ ID NO: 1277406 - RNA, 19 nt, Artificial Sequence
  Description of Artificial Sequence: Synthetic oligonucleotide
  Sense strand starting at position 3018 of SEQ ID NO: 1241502
gagaaagucgaaugcugaa

SEQ ID NO: 1277407 - RNA, 19 nt, Artificial Sequence
  Description of Artificial Sequence: Synthetic oligonucleotide
  Antisense strand to SEQ ID NO: 1277406
uucagcauucgacuuucuc

SEQ ID NO: 1277408 - RNA, 19 nt, Artificial Sequence
  Description of Artificial Sequence: Synthetic oligonucleotide
  Sense strand starting at position 3049 of SEQ ID NO: 1241502
uggaguuuauggguuuaga

SEQ ID NO: 1277409 - RNA, 19 nt, Artificial Sequence
  Description of Artificial Sequence: Synthetic oligonucleotide
  Antisense strand to SEQ ID NO: 1277408
ucuaaacccauaaacucca

SEQ ID NO: 1277410 - RNA, 19 nt, Artificial Sequence
  Description of Artificial Sequence: Synthetic oligonucleotide
  Sense strand starting at position 3052 of SEQ ID NO: 1241502
aguuuauggguuuagagua

SEQ ID NO: 1277411 - RNA, 19 nt, Artificial Sequence
  Description of Artificial Sequence: Synthetic oligonucleotide
  Antisense strand to SEQ ID NO: 1277410
uacucuaaacccauaaacu

SEQ ID NO: 1277412 - RNA, 19 nt, Artificial Sequence
  Description of Artificial Sequence: Synthetic oligonucleotide
  Sense strand starting at position 3087 of SEQ ID NO: 1241502
ggguuuguggcacaacuga

SEQ ID NO: 1277413 - RNA, 19 nt, Artificial Sequence
  Description of Artificial Sequence: Synthetic oligonucleotide
  Antisense strand to SEQ ID NO: 1277412
ucaguugugccacaaaccc

SEQ ID NO: 1277414 - RNA, 19 nt, Artificial Sequence
  Description of Artificial Sequence: Synthetic oligonucleotide
  Sense strand starting at position 3115 of SEQ ID NO: 1241502
auacgaaggagcugaaauu

SEQ ID NO: 1277415 - RNA, 19 nt, Artificial Sequence
  Description of Artificial Sequence: Synthetic oligonucleotide
  Antisense strand to SEQ ID NO: 1277414
aauuucagcuccuucguau

SEQ ID NO: 1277416 - RNA, 19 nt, Artificial Sequence
  Description of Artificial Sequence: Synthetic oligonucleotide
  Sense strand starting at position 3127 of SEQ ID NO: 1241502
ugaaauuaucagcaagcca

SEQ ID NO: 1277417 - RNA, 19 nt, Artificial Sequence
  Description of Artificial Sequence: Synthetic oligonucleotide
  Antisense strand to SEQ ID NO: 1277416
uggcuugcugauaauuuca

SEQ ID NO: 1277418 - RNA, 19 nt, Artificial Sequence
  Description of Artificial Sequence: Synthetic oligonucleotide
  Sense strand starting at position 3266 of SEQ ID NO: 1241502
augguaagguaauuaagau

SEQ ID NO: 1277419 - RNA, 19 nt, Artificial Sequence
  Description of Artificial Sequence: Synthetic oligonucleotide
  Antisense strand to SEQ ID NO: 1277418
aucuuaauuaccuuaccau

SEQ ID NO: 1277420 - RNA, 19 nt, Artificial Sequence
  Description of Artificial Sequence: Synthetic oligonucleotide
  Sense strand starting at position 3336 of SEQ ID NO: 1241502
gggcacucaaguugagaaa

SEQ ID NO: 1277421 - RNA, 19 nt, Artificial Sequence
  Description of Artificial Sequence: Synthetic oligonucleotide
  Antisense strand to SEQ ID NO: 1277420
uuucucaacuugagugccc

SEQ ID NO: 1277422 - RNA, 19 nt, Artificial Sequence
  Description of Artificial Sequence: Synthetic oligonucleotide
  Sense strand starting at position 3443 of SEQ ID NO: 1241502
acuaacguuugucuuauuu

SEQ ID NO: 1277423 - RNA, 19 nt, Artificial Sequence
  Description of Artificial Sequence: Synthetic oligonucleotide
  Antisense strand to SEQ ID NO: 1277422
aaauaagacaaacguuagu

SEQ ID NO: 1277424 - RNA, 19 nt, Artificial Sequence
  Description of Artificial Sequence: Synthetic oligonucleotide
  Sense strand starting at position 3447 of SEQ ID NO: 1241502
acguuugucuuauuuaagu

SEQ ID NO: 1277425 - RNA, 19 nt, Artificial Sequence
  Description of Artificial Sequence: Synthetic oligonucleotide
  Antisense strand to SEQ ID NO: 1277424
acuuaaauaagacaaacgu

SEQ ID NO: 1277426 - RNA, 19 nt, Artificial Sequence
  Description of Artificial Sequence: Synthetic oligonucleotide
  Sense strand starting at position 3460 of SEQ ID NO: 1241502
uuaaguuccuuucucagga

SEQ ID NO: 1277427 - RNA, 19 nt, Artificial Sequence
  Description of Artificial Sequence: Synthetic oligonucleotide
  Antisense strand to SEQ ID NO: 1277426
uccugagaaaggaacuuaa

SEQ ID NO: 1277428 - RNA, 19 nt, Artificial Sequence
  Description of Artificial Sequence: Synthetic oligonucleotide
  Sense strand starting at position 3475 of SEQ ID NO: 1241502
aggaaaugauccucagccu

SEQ ID NO: 1277429 - RNA, 19 nt, Artificial Sequence
  Description of Artificial Sequence: Synthetic oligonucleotide
  Antisense strand to SEQ ID NO: 1277428
aggcugaggaucauuuccu

SEQ ID NO: 1277430 - RNA, 19 nt, Artificial Sequence
  Description of Artificial Sequence: Synthetic oligonucleotide
  Sense strand starting at position 3476 of SEQ ID NO: 1241502
ggaaaugauccucagccuu

SEQ ID NO: 1277431 - RNA, 19 nt, Artificial Sequence
  Description of Artificial Sequence: Synthetic oligonucleotide
  Antisense strand to SEQ ID NO: 1277430
aaggcugaggaucauuucc

SEQ ID NO: 1277432 - RNA, 19 nt, Artificial Sequence
  Description of Artificial Sequence: Synthetic oligonucleotide
  Sense strand starting at position 3867 of SEQ ID NO: 1241502
uuugguaacacuggugaga

SEQ ID NO: 1277433 - RNA, 19 nt, Artificial Sequence
  Description of Artificial Sequence: Synthetic oligonucleotide
  Antisense strand to SEQ ID NO: 1277432
ucucaccaguguuaccaaa

SEQ ID NO: 1277434 - RNA, 19 nt, Artificial Sequence
  Description of Artificial Sequence: Synthetic oligonucleotide
  Sense strand starting at position 364 of SEQ ID NO: 1241503
auggauuagugauccacca

SEQ ID NO: 1277435 - RNA, 19 nt, Artificial Sequence
  Description of Artificial Sequence: Synthetic oligonucleotide
  Antisense strand to SEQ ID NO: 1277434
ugguggaucacuaauccau

SEQ ID NO: 1277436 - RNA, 19 nt, Artificial Sequence
  Description of Artificial Sequence: Synthetic oligonucleotide
  Sense strand starting at position 844 of SEQ ID NO: 1241503
acacuaagcuaagugguua

SEQ ID NO: 1277437 - RNA, 19 nt, Artificial Sequence
  Description of Artificial Sequence: Synthetic oligonucleotide
  Antisense strand to SEQ ID NO: 1277436
uaaccacuuagcuuagugu

SEQ ID NO: 1277438 - RNA, 19 nt, Artificial Sequence
  Description of Artificial Sequence: Synthetic oligonucleotide
  Sense strand starting at position 857 of SEQ ID NO: 1241503
ugguuagcuugugcaauuu

SEQ ID NO: 1277439 - RNA, 19 nt, Artificial Sequence
  Description of Artificial Sequence: Synthetic oligonucleotide
  Antisense strand to SEQ ID NO: 1277438
aaauugcacaagcuaacca

SEQ ID NO: 1277440 - RNA, 19 nt, Artificial Sequence
  Description of Artificial Sequence: Synthetic oligonucleotide
  Sense strand starting at position 914 of SEQ ID NO: 1241503
aguuaagugaacugaagau

SEQ ID NO: 1277441 - RNA, 19 nt, Artificial Sequence
  Description of Artificial Sequence: Synthetic oligonucleotide
  Antisense strand to SEQ ID NO: 1277440
aucuucaguucacuuaacu

SEQ ID NO: 1277442 - RNA, 19 nt, Artificial Sequence
  Description of Artificial Sequence: Synthetic oligonucleotide
  Sense strand starting at position 1113 of SEQ ID NO: 1241503
ugcacuugucuguuggcau

SEQ ID NO: 1277443 - RNA, 19 nt, Artificial Sequence
  Description of Artificial Sequence: Synthetic oligonucleotide
  Antisense strand to SEQ ID NO: 1277442
augccaacagacaagugca

SEQ ID NO: 1277444 - RNA, 19 nt, Artificial Sequence
  Description of Artificial Sequence: Synthetic oligonucleotide
  Sense strand starting at position 1126 of SEQ ID NO: 1241503
uggcauaaguucuuaauca

SEQ ID NO: 1277445 - RNA, 19 nt, Artificial Sequence
  Description of Artificial Sequence: Synthetic oligonucleotide
  Antisense strand to SEQ ID NO: 1277444
ugauuaagaacuuaugcca

SEQ ID NO: 1277446 - RNA, 19 nt, Artificial Sequence
  Description of Artificial Sequence: Synthetic oligonucleotide
  Sense strand starting at position 1516 of SEQ ID NO: 1241503
gcaggauacgcugaacguu

SEQ ID NO: 1277447 - RNA, 19 nt, Artificial Sequence
  Description of Artificial Sequence: Synthetic oligonucleotide
  Antisense strand to SEQ ID NO: 1277446
aacguucagcguauccugc

SEQ ID NO: 1277448 - RNA, 19 nt, Artificial Sequence
  Description of Artificial Sequence: Synthetic oligonucleotide
  Sense strand starting at position 1552 of SEQ ID NO: 1241503
ugccucuuuacggagauaa

SEQ ID NO: 1277449 - RNA, 19 nt, Artificial Sequence
  Description of Artificial Sequence: Synthetic oligonucleotide
  Antisense strand to SEQ ID NO: 1277448
uuaucuccguaaagaggca

SEQ ID NO: 1277450 - RNA, 19 nt, Artificial Sequence
  Description of Artificial Sequence: Synthetic oligonucleotide
  Sense strand starting at position 1622 of SEQ ID NO: 1241503
ccaagaaagcaauguagaa

SEQ ID NO: 1277451 - RNA, 19 nt, Artificial Sequence
  Description of Artificial Sequence: Synthetic oligonucleotide
  Antisense strand to SEQ ID NO: 1277450
uucuacauugcuuucuugg

SEQ ID NO: 1277452 - RNA, 19 nt, Artificial Sequence
  Description of Artificial Sequence: Synthetic oligonucleotide
  Sense strand starting at position 1748 of SEQ ID NO: 1241503
agucuuuggcaagaagcaa

SEQ ID NO: 1277453 - RNA, 19 nt, Artificial Sequence
  Description of Artificial Sequence: Synthetic oligonucleotide
  Antisense strand to SEQ ID NO: 1277452
uugcuucuugccaaagacu

SEQ ID NO: 1277454 - RNA, 19 nt, Artificial Sequence
  Description of Artificial Sequence: Synthetic oligonucleotide
  Sense strand starting at position 2126 of SEQ ID NO: 1241503
uuacuaaacguuugugaag

SEQ ID NO: 1277455 - RNA, 19 nt, Artificial Sequence
  Description of Artificial Sequence: Synthetic oligonucleotide
  Antisense strand to SEQ ID NO: 1277454
cuucacaaacguuuaguaa

SEQ ID NO: 1277456 - RNA, 19 nt, Artificial Sequence
  Description of Artificial Sequence: Synthetic oligonucleotide
  Sense strand starting at position 2127 of SEQ ID NO: 1241503
uacuaaacguuugugaagu

SEQ ID NO: 1277457 - RNA, 19 nt, Artificial Sequence
  Description of Artificial Sequence: Synthetic oligonucleotide
  Antisense strand to SEQ ID NO: 1277456
acuucacaaacguuuagua

SEQ ID NO: 1277458 - RNA, 19 nt, Artificial Sequence
  Description of Artificial Sequence: Synthetic oligonucleotide
  Sense strand starting at position 2307 of SEQ ID NO: 1241503
aggauuucuuacuaagcag

SEQ ID NO: 1277459 - RNA, 19 nt, Artificial Sequence
  Description of Artificial Sequence: Synthetic oligonucleotide
  Antisense strand to SEQ ID NO: 1277458
cugcuuaguaagaaauccu

SEQ ID NO: 1277460 - RNA, 19 nt, Artificial Sequence
  Description of Artificial Sequence: Synthetic oligonucleotide
  Sense strand starting at position 2388 of SEQ ID NO: 1241503
ugugaucuacagugagagu

SEQ ID NO: 1277461 - RNA, 19 nt, Artificial Sequence
  Description of Artificial Sequence: Synthetic oligonucleotide
  Antisense strand to SEQ ID NO: 1277460
acucucacuguagaucaca

SEQ ID NO: 1277462 - RNA, 19 nt, Artificial Sequence
  Description of Artificial Sequence: Synthetic oligonucleotide
  Sense strand starting at position 2437 of SEQ ID NO: 1241503
ugcugacaguucccugaaa

SEQ ID NO: 1277463 - RNA, 19 nt, Artificial Sequence
  Description of Artificial Sequence: Synthetic oligonucleotide
  Antisense strand to SEQ ID NO: 1277462
uuucagggaacugucagca

SEQ ID NO: 1277464 - RNA, 19 nt, Artificial Sequence
  Description of Artificial Sequence: Synthetic oligonucleotide
  Sense strand starting at position 2438 of SEQ ID NO: 1241503
gcugacaguucccugaaag

SEQ ID NO: 1277465 - RNA, 19 nt, Artificial Sequence
  Description of Artificial Sequence: Synthetic oligonucleotide
  Antisense strand to SEQ ID NO: 1277464
cuuucagggaacugucagc

SEQ ID NO: 1277466 - RNA, 19 nt, Artificial Sequence
  Description of Artificial Sequence: Synthetic oligonucleotide
  Sense strand starting at position 2439 of SEQ ID NO: 1241503
cugacaguucccugaaaga

SEQ ID NO: 1277467 - RNA, 19 nt, Artificial Sequence
  Description of Artificial Sequence: Synthetic oligonucleotide
  Antisense strand to SEQ ID NO: 1277466
ucuuucagggaacugucag

SEQ ID NO: 1277468 - RNA, 19 nt, Artificial Sequence
  Description of Artificial Sequence: Synthetic oligonucleotide
  Sense strand starting at position 2485 of SEQ ID NO: 1241503
gguaaagaacuuugcaagu

SEQ ID NO: 1277469 - RNA, 19 nt, Artificial Sequence
  Description of Artificial Sequence: Synthetic oligonucleotide
  Antisense strand to SEQ ID NO: 1277468
acuugcaaaguucuuuacc

SEQ ID NO: 1277470 - RNA, 19 nt, Artificial Sequence
  Description of Artificial Sequence: Synthetic oligonucleotide
  Sense strand starting at position 2494 of SEQ ID NO: 1241503
cuuugcaaguucuuccaga

SEQ ID NO: 1277471 - RNA, 19 nt, Artificial Sequence
  Description of Artificial Sequence: Synthetic oligonucleotide
  Antisense strand to SEQ ID NO: 1277470
ucuggaagaacuugcaaag

SEQ ID NO: 1277472 - RNA, 19 nt, Artificial Sequence
  Description of Artificial Sequence: Synthetic oligonucleotide
  Sense strand starting at position 2531 of SEQ ID NO: 1241503
aacaaauauucguugagca

SEQ ID NO: 1277473 - RNA, 19 nt, Artificial Sequence
  Description of Artificial Sequence: Synthetic oligonucleotide
  Antisense strand to SEQ ID NO: 1277472
ugcucaacgaauauuuguu

SEQ ID NO: 1277474 - RNA, 19 nt, Artificial Sequence
  Description of Artificial Sequence: Synthetic oligonucleotide
  Sense strand starting at position 2532 of SEQ ID NO: 1241503
acaaauauucguugagcaa

SEQ ID NO: 1277475 - RNA, 19 nt, Artificial Sequence
  Description of Artificial Sequence: Synthetic oligonucleotide
  Antisense strand to SEQ ID NO: 1277474
uugcucaacgaauauuugu

SEQ ID NO: 1277476 - RNA, 19 nt, Artificial Sequence
  Description of Artificial Sequence: Synthetic oligonucleotide
  Sense strand starting at position 2533 of SEQ ID NO: 1241503
caaauauucguugagcaac

SEQ ID NO: 1277477 - RNA, 19 nt, Artificial Sequence
  Description of Artificial Sequence: Synthetic oligonucleotide
  Antisense strand to SEQ ID NO: 1277476
guugcucaacgaauauuug

SEQ ID NO: 1277478 - RNA, 19 nt, Artificial Sequence
  Description of Artificial Sequence: Synthetic oligonucleotide
  Sense strand starting at position 2535 of SEQ ID NO: 1241503
aauauucguugagcaacua

SEQ ID NO: 1277479 - RNA, 19 nt, Artificial Sequence
  Description of Artificial Sequence: Synthetic oligonucleotide
  Antisense strand to SEQ ID NO: 1277478
uaguugcucaacgaauauu

SEQ ID NO: 1277480 - RNA, 19 nt, Artificial Sequence
  Description of Artificial Sequence: Synthetic oligonucleotide
  Sense strand starting at position 2554 of SEQ ID NO: 1241503
cuauguaccgaguacuaca

SEQ ID NO: 1277481 - RNA, 19 nt, Artificial Sequence
  Description of Artificial Sequence: Synthetic oligonucleotide
  Antisense strand to SEQ ID NO: 1277480
uguaguacucgguacauag

SEQ ID NO: 1277482 - RNA, 19 nt, Artificial Sequence
  Description of Artificial Sequence: Synthetic oligonucleotide
  Sense strand starting at position 2562 of SEQ ID NO: 1241503
cgaguacuacaguagacuu

SEQ ID NO: 1277483 - RNA, 19 nt, Artificial Sequence
  Description of Artificial Sequence: Synthetic oligonucleotide
  Antisense strand to SEQ ID NO: 1277482
aagucuacuguaguacucg

SEQ ID NO: 1277484 - RNA, 19 nt, Artificial Sequence
  Description of Artificial Sequence: Synthetic oligonucleotide
  Sense strand starting at position 2589 of SEQ ID NO: 1241503
cagcauugagaccgacaua

SEQ ID NO: 1277485 - RNA, 19 nt, Artificial Sequence
  Description of Artificial Sequence: Synthetic oligonucleotide
  Antisense strand to SEQ ID NO: 1277484
uaugucggucucaaugcug

SEQ ID NO: 1277486 - RNA, 19 nt, Artificial Sequence
  Description of Artificial Sequence: Synthetic oligonucleotide
  Sense strand starting at position 2669 of SEQ ID NO: 1241503
ugcgguauaauaugauaag

SEQ ID NO: 1277487 - RNA, 19 nt, Artificial Sequence
  Description of Artificial Sequence: Synthetic oligonucleotide
  Antisense strand to SEQ ID NO: 1277486
cuuaucauauuauaccgca

SEQ ID NO: 1277488 - RNA, 19 nt, Artificial Sequence
  Description of Artificial Sequence: Synthetic oligonucleotide
  Sense strand starting at position 2779 of SEQ ID NO: 1241503
gguaauaucuaagcugaau

SEQ ID NO: 1277489 - RNA, 19 nt, Artificial Sequence
  Description of Artificial Sequence: Synthetic oligonucleotide
  Antisense strand to SEQ ID NO: 1277488
auucagcuuagauauuacc

SEQ ID NO: 1277490 - RNA, 19 nt, Artificial Sequence
  Description of Artificial Sequence: Synthetic oligonucleotide
  Sense strand starting at position 2798 of SEQ ID NO: 1241503
gcugaaucugaauaaugug

SEQ ID NO: 1277491 - RNA, 19 nt, Artificial Sequence
  Description of Artificial Sequence: Synthetic oligonucleotide
  Antisense strand to SEQ ID NO: 1277490
cacauuauucagauucagc

SEQ ID NO: 1277492 - RNA, 19 nt, Artificial Sequence
  Description of Artificial Sequence: Synthetic oligonucleotide
  Sense strand starting at position 2804 of SEQ ID NO: 1241503
ucugaauaauguguagaag

SEQ ID NO: 1277493 - RNA, 19 nt, Artificial Sequence
  Description of Artificial Sequence: Synthetic oligonucleotide
  Antisense strand to SEQ ID NO: 1277492
cuucuacacauuauucaga

SEQ ID NO: 1277494 - RNA, 19 nt, Artificial Sequence
  Description of Artificial Sequence: Synthetic oligonucleotide
  Sense strand starting at position 2805 of SEQ ID NO: 1241503
cugaauaauguguagaagu

SEQ ID NO: 1277495 - RNA, 19 nt, Artificial Sequence
  Description of Artificial Sequence: Synthetic oligonucleotide
  Antisense strand to SEQ ID NO: 1277494
acuucuacacauuauucag

SEQ ID NO: 1277496 - RNA, 19 nt, Artificial Sequence
  Description of Artificial Sequence: Synthetic oligonucleotide
  Sense strand starting at position 2816 of SEQ ID NO: 1241503
guagaaguuagcugggaga

SEQ ID NO: 1277497 - RNA, 19 nt, Artificial Sequence
  Description of Artificial Sequence: Synthetic oligonucleotide
  Antisense strand to SEQ ID NO: 1277496
ucucccagcuaacuucuac

SEQ ID NO: 1277498 - RNA, 19 nt, Artificial Sequence
  Description of Artificial Sequence: Synthetic oligonucleotide
  Sense strand starting at position 2818 of SEQ ID NO: 1241503
agaaguuagcugggagaau

SEQ ID NO: 1277499 - RNA, 19 nt, Artificial Sequence
  Description of Artificial Sequence: Synthetic oligonucleotide
  Antisense strand to SEQ ID NO: 1277498
auucucccagcuaacuucu

SEQ ID NO: 1277500 - RNA, 19 nt, Artificial Sequence
  Description of Artificial Sequence: Synthetic oligonucleotide
  Sense strand starting at position 2836 of SEQ ID NO: 1241503
uggcaaggagauuguugua

SEQ ID NO: 1277501 - RNA, 19 nt, Artificial Sequence
  Description of Artificial Sequence: Synthetic oligonucleotide
  Antisense strand to SEQ ID NO: 1277500
uacaacaaucuccuugcca

SEQ ID NO: 1277502 - RNA, 19 nt, Artificial Sequence
  Description of Artificial Sequence: Synthetic oligonucleotide
  Sense strand starting at position 2842 of SEQ ID NO: 1241503
ggagauuguuguaaagagg

SEQ ID NO: 1277503 - RNA, 19 nt, Artificial Sequence
  Description of Artificial Sequence: Synthetic oligonucleotide
  Antisense strand to SEQ ID NO: 1277502
ccucuuuacaacaaucucc

SEQ ID NO: 1277504 - RNA, 19 nt, Artificial Sequence
  Description of Artificial Sequence: Synthetic oligonucleotide
  Sense strand starting at position 2845 of SEQ ID NO: 1241503
gauuguuguaaagagguua

SEQ ID NO: 1277505 - RNA, 19 nt, Artificial Sequence
  Description of Artificial Sequence: Synthetic oligonucleotide
  Antisense strand to SEQ ID NO: 1277504
uaaccucuuuacaacaauc

SEQ ID NO: 1277506 - RNA, 19 nt, Artificial Sequence
  Description of Artificial Sequence: Synthetic oligonucleotide
  Sense strand starting at position 2861 of SEQ ID NO: 1241503
uuagaaauggacugcuaag

SEQ ID NO: 1277507 - RNA, 19 nt, Artificial Sequence
  Description of Artificial Sequence: Synthetic oligonucleotide
  Antisense strand to SEQ ID NO: 1277506
cuuagcaguccauuucuaa

SEQ ID NO: 1277508 - RNA, 19 nt, Artificial Sequence
  Description of Artificial Sequence: Synthetic oligonucleotide
  Sense strand starting at position 3009 of SEQ ID NO: 1241503
agugacaccuugucagaag

SEQ ID NO: 1277509 - RNA, 19 nt, Artificial Sequence
  Description of Artificial Sequence: Synthetic oligonucleotide
  Antisense strand to SEQ ID NO: 1277508
cuucugacaaggugucacu

SEQ ID NO: 1277510 - RNA, 19 nt, Artificial Sequence
  Description of Artificial Sequence: Synthetic oligonucleotide
  Sense strand starting at position 3970 of SEQ ID NO: 1241503
uguaaaugaucugugcaac

SEQ ID NO: 1277511 - RNA, 19 nt, Artificial Sequence
  Description of Artificial Sequence: Synthetic oligonucleotide
  Antisense strand to SEQ ID NO: 1277510
guugcacagaucauuuaca

SEQ ID NO: 1277512 - RNA, 19 nt, Artificial Sequence
  Description of Artificial Sequence: Synthetic oligonucleotide
  Sense strand starting at position 3971 of SEQ ID NO: 1241503
guaaaugaucugugcaacu

SEQ ID NO: 1277513 - RNA, 19 nt, Artificial Sequence
  Description of Artificial Sequence: Synthetic oligonucleotide
  Antisense strand to SEQ ID NO: 1277512
aguugcacagaucauuuac

SEQ ID NO: 1277514 - RNA, 19 nt, Artificial Sequence
  Description of Artificial Sequence: Synthetic oligonucleotide
  Sense strand starting at position 556 of SEQ ID NO: 1241504
ggcagaguccuggauguga

SEQ ID NO: 1277515 - RNA, 19 nt, Artificial Sequence
  Description of Artificial Sequence: Synthetic oligonucleotide
  Antisense strand to SEQ ID NO: 1277514
ucacauccaggacucugcc

SEQ ID NO: 1277516 - RNA, 19 nt, Artificial Sequence
  Description of Artificial Sequence: Synthetic oligonucleotide
  Sense strand starting at position 683 of SEQ ID NO: 1241504
gaagguggucuuugccuua

SEQ ID NO: 1277517 - RNA, 19 nt, Artificial Sequence
  Description of Artificial Sequence: Synthetic oligonucleotide
  Antisense strand to SEQ ID NO: 1277516
uaaggcaaagaccaccuuc

SEQ ID NO: 1277518 - RNA, 19 nt, Artificial Sequence
  Description of Artificial Sequence: Synthetic oligonucleotide
  Sense strand starting at position 686 of SEQ ID NO: 1241504
gguggucuuugccuuaaug

SEQ ID NO: 1277519 - RNA, 19 nt, Artificial Sequence
  Description of Artificial Sequence: Synthetic oligonucleotide
  Antisense strand to SEQ ID NO: 1277518
cauuaaggcaaagaccacc

SEQ ID NO: 1277520 - RNA, 19 nt, Artificial Sequence
  Description of Artificial Sequence: Synthetic oligonucleotide
  Sense strand starting at position 696 of SEQ ID NO: 1241504
gccuuaauggcaugaagga

SEQ ID NO: 1277521 - RNA, 19 nt, Artificial Sequence
  Description of Artificial Sequence: Synthetic oligonucleotide
  Antisense strand to SEQ ID NO: 1277520
uccuucaugccauuaaggc

SEQ ID NO: 1277522 - RNA, 19 nt, Artificial Sequence
  Description of Artificial Sequence: Synthetic oligonucleotide
  Sense strand starting at position 817 of SEQ ID NO: 1241504
cagugauccacuggaugug

SEQ ID NO: 1277523 - RNA, 19 nt, Artificial Sequence
  Description of Artificial Sequence: Synthetic oligonucleotide
  Antisense strand to SEQ ID NO: 1277522
cacauccaguggaucacug

SEQ ID NO: 1277524 - RNA, 19 nt, Artificial Sequence
  Description of Artificial Sequence: Synthetic oligonucleotide
  Sense strand starting at position 1190 of SEQ ID NO: 1241504
ggugcuaagugaggcaaua

SEQ ID NO: 1277525 - RNA, 19 nt, Artificial Sequence
  Description of Artificial Sequence: Synthetic oligonucleotide
  Antisense strand to SEQ ID NO: 1277524
uauugccucacuuagcacc

SEQ ID NO: 1277526 - RNA, 19 nt, Artificial Sequence
  Description of Artificial Sequence: Synthetic oligonucleotide
  Sense strand starting at position 1325 of SEQ ID NO: 1241504
gaggaagccugcuuugaga

SEQ ID NO: 1277527 - RNA, 19 nt, Artificial Sequence
  Description of Artificial Sequence: Synthetic oligonucleotide
  Antisense strand to SEQ ID NO: 1277526
ucucaaagcaggcuuccuc

SEQ ID NO: 1277528 - RNA, 19 nt, Artificial Sequence
  Description of Artificial Sequence: Synthetic oligonucleotide
  Sense strand starting at position 1338 of SEQ ID NO: 1241504
uugagaggcucucucaagu

SEQ ID NO: 1277529 - RNA, 19 nt, Artificial Sequence
  Description of Artificial Sequence: Synthetic oligonucleotide
  Antisense strand to SEQ ID NO: 1277528
acuugagagagccucucaa

SEQ ID NO: 1277530 - RNA, 19 nt, Artificial Sequence
  Description of Artificial Sequence: Synthetic oligonucleotide
  Sense strand starting at position 1555 of SEQ ID NO: 1241504
agcaaugcuuccuugaaag

SEQ ID NO: 1277531 - RNA, 19 nt, Artificial Sequence
  Description of Artificial Sequence: Synthetic oligonucleotide
  Antisense strand to SEQ ID NO: 1277530
cuuucaaggaagcauugcu

SEQ ID NO: 1277532 - RNA, 19 nt, Artificial Sequence
  Description of Artificial Sequence: Synthetic oligonucleotide
  Sense strand starting at position 2786 of SEQ ID NO: 1241504
gcaccugcuuucugaacua

SEQ ID NO: 1277533 - RNA, 19 nt, Artificial Sequence
  Description of Artificial Sequence: Synthetic oligonucleotide
  Antisense strand to SEQ ID NO: 1277532
uaguucagaaagcaggugc

SEQ ID NO: 1277534 - RNA, 19 nt, Artificial Sequence
  Description of Artificial Sequence: Synthetic oligonucleotide
  Sense strand starting at position 2856 of SEQ ID NO: 1241504
cucccaguucccuguuaac

SEQ ID NO: 1277535 - RNA, 19 nt, Artificial Sequence
  Description of Artificial Sequence: Synthetic oligonucleotide
  Antisense strand to SEQ ID NO: 1277534
guuaacagggaacugggag

SEQ ID NO: 1277536 - RNA, 19 nt, Artificial Sequence
  Description of Artificial Sequence: Synthetic oligonucleotide
  Sense strand starting at position 2859 of SEQ ID NO: 1241504
ccaguucccuguuaacuau

SEQ ID NO: 1277537 - RNA, 19 nt, Artificial Sequence
  Description of Artificial Sequence: Synthetic oligonucleotide
  Antisense strand to SEQ ID NO: 1277536
auaguuaacagggaacugg

SEQ ID NO: 1277538 - RNA, 19 nt, Artificial Sequence
  Description of Artificial Sequence: Synthetic oligonucleotide
  Sense strand starting at position 2868 of SEQ ID NO: 1241504
uguuaacuauugccgugua

SEQ ID NO: 1277539 - RNA, 19 nt, Artificial Sequence
  Description of Artificial Sequence: Synthetic oligonucleotide
  Antisense strand to SEQ ID NO: 1277538
uacacggcaauaguuaaca

SEQ ID NO: 1277540 - RNA, 19 nt, Artificial Sequence
  Description of Artificial Sequence: Synthetic oligonucleotide
  Sense strand starting at position 2869 of SEQ ID NO: 1241504
guuaacuauugccguguaa

SEQ ID NO: 1277541 - RNA, 19 nt, Artificial Sequence
  Description of Artificial Sequence: Synthetic oligonucleotide
  Antisense strand to SEQ ID NO: 1277540
uuacacggcaauaguuaac

SEQ ID NO: 1277542 - RNA, 19 nt, Artificial Sequence
  Description of Artificial Sequence: Synthetic oligonucleotide
  Sense strand starting at position 2871 of SEQ ID NO: 1241504
uaacuauugccguguaaca

SEQ ID NO: 1277543 - RNA, 19 nt, Artificial Sequence
  Description of Artificial Sequence: Synthetic oligonucleotide
  Antisense strand to SEQ ID NO: 1277542
uguuacacggcaauaguua

SEQ ID NO: 1277544 - RNA, 19 nt, Artificial Sequence
  Description of Artificial Sequence: Synthetic oligonucleotide
  Sense strand starting at position 2873 of SEQ ID NO: 1241504
acuauugccguguaacaaa

SEQ ID NO: 1277545 - RNA, 19 nt, Artificial Sequence
  Description of Artificial Sequence: Synthetic oligonucleotide
  Antisense strand to SEQ ID NO: 1277544
uuuguuacacggcaauagu

SEQ ID NO: 1277546 - RNA, 19 nt, Artificial Sequence
  Description of Artificial Sequence: Synthetic oligonucleotide
  Sense strand starting at position 2902 of SEQ ID NO: 1241504
aaagcuuagugccuuaaag

SEQ ID NO: 1277547 - RNA, 19 nt, Artificial Sequence
  Description of Artificial Sequence: Synthetic oligonucleotide
  Antisense strand to SEQ ID NO: 1277546
cuuuaaggcacuaagcuuu

SEQ ID NO: 1277548 - RNA, 19 nt, Artificial Sequence
  Description of Artificial Sequence: Synthetic oligonucleotide
  Sense strand starting at position 3012 of SEQ ID NO: 1241504
gggcuggagucgucugaag

SEQ ID NO: 1277549 - RNA, 19 nt, Artificial Sequence
  Description of Artificial Sequence: Synthetic oligonucleotide
  Antisense strand to SEQ ID NO: 1277548
cuucagacgacuccagccc

SEQ ID NO: 1277550 - RNA, 19 nt, Artificial Sequence
  Description of Artificial Sequence: Synthetic oligonucleotide
  Sense strand starting at position 3017 of SEQ ID NO: 1241504
ggagucgucugaaggccaa

SEQ ID NO: 1277551 - RNA, 19 nt, Artificial Sequence
  Description of Artificial Sequence: Synthetic oligonucleotide
  Antisense strand to SEQ ID NO: 1277550
uuggccuucagacgacucc

SEQ ID NO: 1277552 - RNA, 19 nt, Artificial Sequence
  Description of Artificial Sequence: Synthetic oligonucleotide
  Sense strand starting at position 3162 of SEQ ID NO: 1241504
guuggauucucccguggca

SEQ ID NO: 1277553 - RNA, 19 nt, Artificial Sequence
  Description of Artificial Sequence: Synthetic oligonucleotide
  Antisense strand to SEQ ID NO: 1277552
ugccacgggagaauccaac

SEQ ID NO: 1277554 - RNA, 19 nt, Artificial Sequence
  Description of Artificial Sequence: Synthetic oligonucleotide
  Sense strand starting at position 3249 of SEQ ID NO: 1241504
gaugucauauggugucauu

SEQ ID NO: 1277555 - RNA, 19 nt, Artificial Sequence
  Description of Artificial Sequence: Synthetic oligonucleotide
  Antisense strand to SEQ ID NO: 1277554
aaugacaccauaugacauc

SEQ ID NO: 1277556 - RNA, 19 nt, Artificial Sequence
  Description of Artificial Sequence: Synthetic oligonucleotide
  Sense strand starting at position 3578 of SEQ ID NO: 1241504
gcccgugguugcauggaaa

SEQ ID NO: 1277557 - RNA, 19 nt, Artificial Sequence
  Description of Artificial Sequence: Synthetic oligonucleotide
  Antisense strand to SEQ ID NO: 1277556
uuuccaugcaaccacgggc

SEQ ID NO: 1277558 - RNA, 19 nt, Artificial Sequence
  Description of Artificial Sequence: Synthetic oligonucleotide
  Sense strand starting at position 3601 of SEQ ID NO: 1241504
ggaugagucucagcuucca

SEQ ID NO: 1277559 - RNA, 19 nt, Artificial Sequence
  Description of Artificial Sequence: Synthetic oligonucleotide
  Antisense strand to SEQ ID NO: 1277558
uggaagcugagacucaucc

SEQ ID NO: 1277560 - RNA, 19 nt, Artificial Sequence
  Description of Artificial Sequence: Synthetic oligonucleotide
  Sense strand starting at position 3847 of SEQ ID NO: 1241504
gcaacugucuuccugggua

SEQ ID NO: 1277561 - RNA, 19 nt, Artificial Sequence
  Description of Artificial Sequence: Synthetic oligonucleotide
  Antisense strand to SEQ ID NO: 1277560
uacccaggaagacaguugc

SEQ ID NO: 1277562 - RNA, 19 nt, Artificial Sequence
  Description of Artificial Sequence: Synthetic oligonucleotide
  Sense strand starting at position 3897 of SEQ ID NO: 1241504
gacagaugcuuccucacag

SEQ ID NO: 1277563 - RNA, 19 nt, Artificial Sequence
  Description of Artificial Sequence: Synthetic oligonucleotide
  Antisense strand to SEQ ID NO: 1277562
cugugaggaagcaucuguc

SEQ ID NO: 1277564 - RNA, 19 nt, Artificial Sequence
  Description of Artificial Sequence: Synthetic oligonucleotide
  Sense strand starting at position 3975 of SEQ ID NO: 1241504
aguguagacguguaaggua

SEQ ID NO: 1277565 - RNA, 19 nt, Artificial Sequence
  Description of Artificial Sequence: Synthetic oligonucleotide
  Antisense strand to SEQ ID NO: 1277564
uaccuuacacgucuacacu

SEQ ID NO: 1277566 - RNA, 19 nt, Artificial Sequence
  Description of Artificial Sequence: Synthetic oligonucleotide
  Sense strand starting at position 114 of SEQ ID NO: 1241505
gcaauuugccucuaccugu

SEQ ID NO: 1277567 - RNA, 19 nt, Artificial Sequence
  Description of Artificial Sequence: Synthetic oligonucleotide
  Antisense strand to SEQ ID NO: 1277566
acagguagaggcaaauugc

SEQ ID NO: 1277568 - RNA, 19 nt, Artificial Sequence
  Description of Artificial Sequence: Synthetic oligonucleotide
  Sense strand starting at position 131 of SEQ ID NO: 1241505
gucucuuuagcagguauuu

SEQ ID NO: 1277569 - RNA, 19 nt, Artificial Sequence
  Description of Artificial Sequence: Synthetic oligonucleotide
  Antisense strand to SEQ ID NO: 1277568
aaauaccugcuaaagagac

SEQ ID NO: 1277570 - RNA, 19 nt, Artificial Sequence
  Description of Artificial Sequence: Synthetic oligonucleotide
  Sense strand starting at position 211 of SEQ ID NO: 1241505
ugaccaacgugaucaucau

SEQ ID NO: 1277571 - RNA, 19 nt, Artificial Sequence
  Description of Artificial Sequence: Synthetic oligonucleotide
  Antisense strand to SEQ ID NO: 1277570
augaugaucacguugguca

SEQ ID NO: 1277572 - RNA, 19 nt, Artificial Sequence
  Description of Artificial Sequence: Synthetic oligonucleotide
  Sense strand starting at position 212 of SEQ ID NO: 1241505
gaccaacgugaucaucauu

SEQ ID NO: 1277573 - RNA, 19 nt, Artificial Sequence
  Description of Artificial Sequence: Synthetic oligonucleotide
  Antisense strand to SEQ ID NO: 1277572
aaugaugaucacguugguc

SEQ ID NO: 1277574 - RNA, 19 nt, Artificial Sequence
  Description of Artificial Sequence: Synthetic oligonucleotide
  Sense strand starting at position 220 of SEQ ID NO: 1241505
ugaucaucauuugagauaa

SEQ ID NO: 1277575 - RNA, 19 nt, Artificial Sequence
  Description of Artificial Sequence: Synthetic oligonucleotide
  Antisense strand to SEQ ID NO: 1277574
uuaucucaaaugaugauca

SEQ ID NO: 1277576 - RNA, 19 nt, Artificial Sequence
  Description of Artificial Sequence: Synthetic oligonucleotide
  Sense strand starting at position 374 of SEQ ID NO: 1241505
gaagucaggucuuuaucgu

SEQ ID NO: 1277577 - RNA, 19 nt, Artificial Sequence
  Description of Artificial Sequence: Synthetic oligonucleotide
  Antisense strand to SEQ ID NO: 1277576
acgauaaagaccugacuuc

SEQ ID NO: 1277578 - RNA, 19 nt, Artificial Sequence
  Description of Artificial Sequence: Synthetic oligonucleotide
  Sense strand starting at position 382 of SEQ ID NO: 1241505
gucuuuaucgucuauugaa

SEQ ID NO: 1277579 - RNA, 19 nt, Artificial Sequence
  Description of Artificial Sequence: Synthetic oligonucleotide
  Antisense strand to SEQ ID NO: 1277578
uucaauagacgauaaagac

SEQ ID NO: 1277580 - RNA, 19 nt, Artificial Sequence
  Description of Artificial Sequence: Synthetic oligonucleotide
  Sense strand starting at position 546 of SEQ ID NO: 1241505
uagcuaagugguggaacua

SEQ ID NO: 1277581 - RNA, 19 nt, Artificial Sequence
  Description of Artificial Sequence: Synthetic oligonucleotide
  Antisense strand to SEQ ID NO: 1277580
uaguuccaccacuuagcua

SEQ ID NO: 1277582 - RNA, 19 nt, Artificial Sequence
  Description of Artificial Sequence: Synthetic oligonucleotide
  Sense strand starting at position 831 of SEQ ID NO: 1241505
ugugaagaccugugaaccu

SEQ ID NO: 1277583 - RNA, 19 nt, Artificial Sequence
  Description of Artificial Sequence: Synthetic oligonucleotide
  Antisense strand to SEQ ID NO: 1277582
agguucacaggucuucaca

SEQ ID NO: 1277584 - RNA, 19 nt, Artificial Sequence
  Description of Artificial Sequence: Synthetic oligonucleotide
  Sense strand starting at position 922 of SEQ ID NO: 1241505
gggcaacuuucuuucucua

SEQ ID NO: 1277585 - RNA, 19 nt, Artificial Sequence
  Description of Artificial Sequence: Synthetic oligonucleotide
  Antisense strand to SEQ ID NO: 1277584
uagagaaagaaaguugccc

SEQ ID NO: 1277586 - RNA, 19 nt, Artificial Sequence
  Description of Artificial Sequence: Synthetic oligonucleotide
  Sense strand starting at position 1193 of SEQ ID NO: 1241505
gugcaagaucucuacucgu

SEQ ID NO: 1277587 - RNA, 19 nt, Artificial Sequence
  Description of Artificial Sequence: Synthetic oligonucleotide
  Antisense strand to SEQ ID NO: 1277586
acgaguagagaucuugcac

SEQ ID NO: 1277588 - RNA, 19 nt, Artificial Sequence
  Description of Artificial Sequence: Synthetic oligonucleotide
  Sense strand starting at position 1332 of SEQ ID NO: 1241505
gcaagucugcucccuguca

SEQ ID NO: 1277589 - RNA, 19 nt, Artificial Sequence
  Description of Artificial Sequence: Synthetic oligonucleotide
  Antisense strand to SEQ ID NO: 1277588
ugacagggagcagacuugc

SEQ ID NO: 1277590 - RNA, 19 nt, Artificial Sequence
  Description of Artificial Sequence: Synthetic oligonucleotide
  Sense strand starting at position 1682 of SEQ ID NO: 1241505
ccuaccuuccucgggagaa

SEQ ID NO: 1277591 - RNA, 19 nt, Artificial Sequence
  Description of Artificial Sequence: Synthetic oligonucleotide
  Antisense strand to SEQ ID NO: 1277590
uucucccgaggaagguagg

SEQ ID NO: 1277592 - RNA, 19 nt, Artificial Sequence
  Description of Artificial Sequence: Synthetic oligonucleotide
  Sense strand starting at position 1684 of SEQ ID NO: 1241505
uaccuuccucgggagaacu

SEQ ID NO: 1277593 - RNA, 19 nt, Artificial Sequence
  Description of Artificial Sequence: Synthetic oligonucleotide
  Antisense strand to SEQ ID NO: 1277592
aguucucccgaggaaggua

SEQ ID NO: 1277594 - RNA, 19 nt, Artificial Sequence
  Description of Artificial Sequence: Synthetic oligonucleotide
  Sense strand starting at position 1845 of SEQ ID NO: 1241505
gagugcugagcuggagauu

SEQ ID NO: 1277595 - RNA, 19 nt, Artificial Sequence
  Description of Artificial Sequence: Synthetic oligonucleotide
  Antisense strand to SEQ ID NO: 1277594
aaucuccagcucagcacuc

SEQ ID NO: 1277596 - RNA, 19 nt, Artificial Sequence
  Description of Artificial Sequence: Synthetic oligonucleotide
  Sense strand starting at position 2056 of SEQ ID NO: 1241505
cuccucucugauugguuua

SEQ ID NO: 1277597 - RNA, 19 nt, Artificial Sequence
  Description of Artificial Sequence: Synthetic oligonucleotide
  Antisense strand to SEQ ID NO: 1277596
uaaaccaaucagagaggag

SEQ ID NO: 1277598 - RNA, 19 nt, Artificial Sequence
  Description of Artificial Sequence: Synthetic oligonucleotide
  Sense strand starting at position 2059 of SEQ ID NO: 1241505
cucucugauugguuuagua

SEQ ID NO: 1277599 - RNA, 19 nt, Artificial Sequence
  Description of Artificial Sequence: Synthetic oligonucleotide
  Antisense strand to SEQ ID NO: 1277598
uacuaaaccaaucagagag

SEQ ID NO: 1277600 - RNA, 19 nt, Artificial Sequence
  Description of Artificial Sequence: Synthetic oligonucleotide
  Sense strand starting at position 2061 of SEQ ID NO: 1241505
cucugauugguuuaguaua

SEQ ID NO: 1277601 - RNA, 19 nt, Artificial Sequence
  Description of Artificial Sequence: Synthetic oligonucleotide
  Antisense strand to SEQ ID NO: 1277600
uauacuaaaccaaucagag

SEQ ID NO: 1277602 - RNA, 19 nt, Artificial Sequence
  Description of Artificial Sequence: Synthetic oligonucleotide
  Sense strand starting at position 2163 of SEQ ID NO: 1241505
uuuaguuguaauugguuga

SEQ ID NO: 1277603 - RNA, 19 nt, Artificial Sequence
  Description of Artificial Sequence: Synthetic oligonucleotide
  Antisense strand to SEQ ID NO: 1277602
ucaaccaauuacaacuaaa

SEQ ID NO: 1277604 - RNA, 19 nt, Artificial Sequence
  Description of Artificial Sequence: Synthetic oligonucleotide
  Sense strand starting at position 2167 of SEQ ID NO: 1241505
guuguaauugguugagggu

SEQ ID NO: 1277605 - RNA, 19 nt, Artificial Sequence
  Description of Artificial Sequence: Synthetic oligonucleotide
  Antisense strand to SEQ ID NO: 1277604
acccucaaccaauuacaac

SEQ ID NO: 1277606 - RNA, 19 nt, Artificial Sequence
  Description of Artificial Sequence: Synthetic oligonucleotide
  Sense strand starting at position 2168 of SEQ ID NO: 1241505
uuguaauugguugaggguu

SEQ ID NO: 1277607 - RNA, 19 nt, Artificial Sequence
  Description of Artificial Sequence: Synthetic oligonucleotide
  Antisense strand to SEQ ID NO: 1277606
aacccucaaccaauuacaa

SEQ ID NO: 1277608 - RNA, 19 nt, Artificial Sequence
  Description of Artificial Sequence: Synthetic oligonucleotide
  Sense strand starting at position 2189 of SEQ ID NO: 1241505
gcaauucgaaguuaugaua

SEQ ID NO: 1277609 - RNA, 19 nt, Artificial Sequence
  Description of Artificial Sequence: Synthetic oligonucleotide
  Antisense strand to SEQ ID NO: 1277608
uaucauaacuucgaauugc

SEQ ID NO: 1277610 - RNA, 19 nt, Artificial Sequence
  Description of Artificial Sequence: Synthetic oligonucleotide
  Sense strand starting at position 2197 of SEQ ID NO: 1241505
aaguuaugauaggcugcua

SEQ ID NO: 1277611 - RNA, 19 nt, Artificial Sequence
  Description of Artificial Sequence: Synthetic oligonucleotide
  Antisense strand to SEQ ID NO: 1277610
uagcagccuaucauaacuu

SEQ ID NO: 1277612 - RNA, 19 nt, Artificial Sequence
  Description of Artificial Sequence: Synthetic oligonucleotide
  Sense strand starting at position 2243 of SEQ ID NO: 1241505
agacgugacgguuaagguu

SEQ ID NO: 1277613 - RNA, 19 nt, Artificial Sequence
  Description of Artificial Sequence: Synthetic oligonucleotide
  Antisense strand to SEQ ID NO: 1277612
aaccuuaaccgucacgucu

SEQ ID NO: 1277614 - RNA, 19 nt, Artificial Sequence
  Description of Artificial Sequence: Synthetic oligonucleotide
  Sense strand starting at position 2259 of SEQ ID NO: 1241505
guugauucacgcuugugca

SEQ ID NO: 1277615 - RNA, 19 nt, Artificial Sequence
  Description of Artificial Sequence: Synthetic oligonucleotide
  Antisense strand to SEQ ID NO: 1277614
ugcacaagcgugaaucaac

SEQ ID NO: 1277616 - RNA, 19 nt, Artificial Sequence
  Description of Artificial Sequence: Synthetic oligonucleotide
  Sense strand starting at position 2343 of SEQ ID NO: 1241505
gguuaagucuuuguuguag

SEQ ID NO: 1277617 - RNA, 19 nt, Artificial Sequence
  Description of Artificial Sequence: Synthetic oligonucleotide
  Antisense strand to SEQ ID NO: 1277616
cuacaacaaagacuuaacc

SEQ ID NO: 1277618 - RNA, 19 nt, Artificial Sequence
  Description of Artificial Sequence: Synthetic oligonucleotide
  Sense strand starting at position 2462 of SEQ ID NO: 1241505
aacauuagagguuguguuu

SEQ ID NO: 1277619 - RNA, 19 nt, Artificial Sequence
  Description of Artificial Sequence: Synthetic oligonucleotide
  Antisense strand to SEQ ID NO: 1277618
aaacacaaccucuaauguu

SEQ ID NO: 1277620 - RNA, 19 nt, Artificial Sequence
  Description of Artificial Sequence: Synthetic oligonucleotide
  Sense strand starting at position 2465 of SEQ ID NO: 1241505
auuagagguuguguuuaag

SEQ ID NO: 1277621 - RNA, 19 nt, Artificial Sequence
  Description of Artificial Sequence: Synthetic oligonucleotide
  Antisense strand to SEQ ID NO: 1277620
cuuaaacacaaccucuaau

SEQ ID NO: 1277622 - RNA, 19 nt, Artificial Sequence
  Description of Artificial Sequence: Synthetic oligonucleotide
  Sense strand starting at position 2468 of SEQ ID NO: 1241505
agagguuguguuuaagaag

SEQ ID NO: 1277623 - RNA, 19 nt, Artificial Sequence
  Description of Artificial Sequence: Synthetic oligonucleotide
  Antisense strand to SEQ ID NO: 1277622
cuucuuaaacacaaccucu

SEQ ID NO: 1277624 - RNA, 19 nt, Artificial Sequence
  Description of Artificial Sequence: Synthetic oligonucleotide
  Sense strand starting at position 2503 of SEQ ID NO: 1241505
ggagaaagguaucagagag

SEQ ID NO: 1277625 - RNA, 19 nt, Artificial Sequence
  Description of Artificial Sequence: Synthetic oligonucleotide
  Antisense strand to SEQ ID NO: 1277624
cucucugauaccuuucucc

SEQ ID NO: 1277626 - RNA, 19 nt, Artificial Sequence
  Description of Artificial Sequence: Synthetic oligonucleotide
  Sense strand starting at position 2683 of SEQ ID NO: 1241505
uauugagaguucuccagcu

SEQ ID NO: 1277627 - RNA, 19 nt, Artificial Sequence
  Description of Artificial Sequence: Synthetic oligonucleotide
  Antisense strand to SEQ ID NO: 1277626
agcuggagaacucucaaua

SEQ ID NO: 1277628 - RNA, 19 nt, Artificial Sequence
  Description of Artificial Sequence: Synthetic oligonucleotide
  Sense strand starting at position 2685 of SEQ ID NO: 1241505
uugagaguucuccagcuuc

SEQ ID NO: 1277629 - RNA, 19 nt, Artificial Sequence
  Description of Artificial Sequence: Synthetic oligonucleotide
  Antisense strand to SEQ ID NO: 1277628
gaagcuggagaacucucaa

SEQ ID NO: 1277630 - RNA, 19 nt, Artificial Sequence
  Description of Artificial Sequence: Synthetic oligonucleotide
  Sense strand starting at position 3059 of SEQ ID NO: 1241505
ccuuuaugaugcucuggaa

SEQ ID NO: 1277631 - RNA, 19 nt, Artificial Sequence
  Description of Artificial Sequence: Synthetic oligonucleotide
  Antisense strand to SEQ ID NO: 1277630
uuccagagcaucauaaagg

SEQ ID NO: 1277632 - RNA, 19 nt, Artificial Sequence
  Description of Artificial Sequence: Synthetic oligonucleotide
  Sense strand starting at position 3154 of SEQ ID NO: 1241505
cugugugucagauacuuua

SEQ ID NO: 1277633 - RNA, 19 nt, Artificial Sequence
  Description of Artificial Sequence: Synthetic oligonucleotide
  Antisense strand to SEQ ID NO: 1277632
uaaaguaucugacacacag

SEQ ID NO: 1277634 - RNA, 19 nt, Artificial Sequence
  Description of Artificial Sequence: Synthetic oligonucleotide
  Sense strand starting at position 3241 of SEQ ID NO: 1241505
gaaugaauugccggguugu

SEQ ID NO: 1277635 - RNA, 19 nt, Artificial Sequence
  Description of Artificial Sequence: Synthetic oligonucleotide
  Antisense strand to SEQ ID NO: 1277634
acaacccggcaauucauuc

SEQ ID NO: 1277636 - RNA, 19 nt, Artificial Sequence
  Description of Artificial Sequence: Synthetic oligonucleotide
  Sense strand starting at position 3290 of SEQ ID NO: 1241505
uggcacaaugcacaagaau

SEQ ID NO: 1277637 - RNA, 19 nt, Artificial Sequence
  Description of Artificial Sequence: Synthetic oligonucleotide
  Antisense strand to SEQ ID NO: 1277636
auucuugugcauugugcca

SEQ ID NO: 1277638 - RNA, 19 nt, Artificial Sequence
  Description of Artificial Sequence: Synthetic oligonucleotide
  Sense strand starting at position 3810 of SEQ ID NO: 1241505
ggauguggacuuuggaaau

SEQ ID NO: 1277639 - RNA, 19 nt, Artificial Sequence
  Description of Artificial Sequence: Synthetic oligonucleotide
  Antisense strand to SEQ ID NO: 1277638
auuuccaaaguccacaucc

SEQ ID NO: 1277640 - RNA, 19 nt, Artificial Sequence
  Description of Artificial Sequence: Synthetic oligonucleotide
  Sense strand starting at position 3816 of SEQ ID NO: 1241505
ggacuuuggaaaugugcuu

SEQ ID NO: 1277641 - RNA, 19 nt, Artificial Sequence
  Description of Artificial Sequence: Synthetic oligonucleotide
  Antisense strand to SEQ ID NO: 1277640
aagcacauuuccaaagucc

SEQ ID NO: 1277642 - RNA, 19 nt, Artificial Sequence
  Description of Artificial Sequence: Synthetic oligonucleotide
  Sense strand starting at position 3821 of SEQ ID NO: 1241505
uuggaaaugugcuuugucu

SEQ ID NO: 1277643 - RNA, 19 nt, Artificial Sequence
  Description of Artificial Sequence: Synthetic oligonucleotide
  Antisense strand to SEQ ID NO: 1277642
agacaaagcacauuuccaa

SEQ ID NO: 1277644 - RNA, 19 nt, Artificial Sequence
  Description of Artificial Sequence: Synthetic oligonucleotide
  Sense strand starting at position 3823 of SEQ ID NO: 1241505
ggaaaugugcuuugucucu

SEQ ID NO: 1277645 - RNA, 19 nt, Artificial Sequence
  Description of Artificial Sequence: Synthetic oligonucleotide
  Antisense strand to SEQ ID NO: 1277644
agagacaaagcacauuucc

SEQ ID NO: 1277646 - RNA, 19 nt, Artificial Sequence
  Description of Artificial Sequence: Synthetic oligonucleotide
  Sense strand starting at position 146 of SEQ ID NO: 1241506
guacauauguucuuuggga

SEQ ID NO: 1277647 - RNA, 19 nt, Artificial Sequence
  Description of Artificial Sequence: Synthetic oligonucleotide
  Antisense strand to SEQ ID NO: 1277646
ucccaaagaacauauguac

SEQ ID NO: 1277648 - RNA, 19 nt, Artificial Sequence
  Description of Artificial Sequence: Synthetic oligonucleotide
  Sense strand starting at position 147 of SEQ ID NO: 1241506
uacauauguucuuugggaa

SEQ ID NO: 1277649 - RNA, 19 nt, Artificial Sequence
  Description of Artificial Sequence: Synthetic oligonucleotide
  Antisense strand to SEQ ID NO: 1277648
uucccaaagaacauaugua

SEQ ID NO: 1277650 - RNA, 19 nt, Artificial Sequence
  Description of Artificial Sequence: Synthetic oligonucleotide
  Sense strand starting at position 148 of SEQ ID NO: 1241506
acauauguucuuugggaag

SEQ ID NO: 1277651 - RNA, 19 nt, Artificial Sequence
  Description of Artificial Sequence: Synthetic oligonucleotide
  Antisense strand to SEQ ID NO: 1277650
cuucccaaagaacauaugu

SEQ ID NO: 1277652 - RNA, 19 nt, Artificial Sequence
  Description of Artificial Sequence: Synthetic oligonucleotide
  Sense strand starting at position 396 of SEQ ID NO: 1241506
guggcauuccuacaaagaa

SEQ ID NO: 1277653 - RNA, 19 nt, Artificial Sequence
  Description of Artificial Sequence: Synthetic oligonucleotide
  Antisense strand to SEQ ID NO: 1277652
uucuuuguaggaaugccac

SEQ ID NO: 1277654 - RNA, 19 nt, Artificial Sequence
  Description of Artificial Sequence: Synthetic oligonucleotide
  Sense strand starting at position 425 of SEQ ID NO: 1241506
aaaggaaucuaagggaaga

SEQ ID NO: 1277655 - RNA, 19 nt, Artificial Sequence
  Description of Artificial Sequence: Synthetic oligonucleotide
  Antisense strand to SEQ ID NO: 1277654
ucuucccuuagauuccuuu

SEQ ID NO: 1277656 - RNA, 19 nt, Artificial Sequence
  Description of Artificial Sequence: Synthetic oligonucleotide
  Sense strand starting at position 796 of SEQ ID NO: 1241506
accaguaccucaucuguaa

SEQ ID NO: 1277657 - RNA, 19 nt, Artificial Sequence
  Description of Artificial Sequence: Synthetic oligonucleotide
  Antisense strand to SEQ ID NO: 1277656
uuacagaugagguacuggu

SEQ ID NO: 1277658 - RNA, 19 nt, Artificial Sequence
  Description of Artificial Sequence: Synthetic oligonucleotide
  Sense strand starting at position 816 of SEQ ID NO: 1241506
augccaguaucacucuaga

SEQ ID NO: 1277659 - RNA, 19 nt, Artificial Sequence
  Description of Artificial Sequence: Synthetic oligonucleotide
  Antisense strand to SEQ ID NO: 1277658
ucuagagugauacuggcau

SEQ ID NO: 1277660 - RNA, 19 nt, Artificial Sequence
  Description of Artificial Sequence: Synthetic oligonucleotide
  Sense strand starting at position 821 of SEQ ID NO: 1241506
aguaucacucuagaagcau

SEQ ID NO: 1277661 - RNA, 19 nt, Artificial Sequence
  Description of Artificial Sequence: Synthetic oligonucleotide
  Antisense strand to SEQ ID NO: 1277660
augcuucuagagugauacu

SEQ ID NO: 1277662 - RNA, 19 nt, Artificial Sequence
  Description of Artificial Sequence: Synthetic oligonucleotide
  Sense strand starting at position 934 of SEQ ID NO: 1241506
ucagucuugguggagaaca

SEQ ID NO: 1277663 - RNA, 19 nt, Artificial Sequence
  Description of Artificial Sequence: Synthetic oligonucleotide
  Antisense strand to SEQ ID NO: 1277662
uguucuccaccaagacuga

SEQ ID NO: 1277664 - RNA, 19 nt, Artificial Sequence
  Description of Artificial Sequence: Synthetic oligonucleotide
  Sense strand starting at position 1294 of SEQ ID NO: 1241506
gagugaucuggcuggaaga

SEQ ID NO: 1277665 - RNA, 19 nt, Artificial Sequence
  Description of Artificial Sequence: Synthetic oligonucleotide
  Antisense strand to SEQ ID NO: 1277664
ucuuccagccagaucacuc

SEQ ID NO: 1277666 - RNA, 19 nt, Artificial Sequence
  Description of Artificial Sequence: Synthetic oligonucleotide
  Sense strand starting at position 1327 of SEQ ID NO: 1241506
gggagaagcuguuuaccuu

SEQ ID NO: 1277667 - RNA, 19 nt, Artificial Sequence
  Description of Artificial Sequence: Synthetic oligonucleotide
  Antisense strand to SEQ ID NO: 1277666
aagguaaacagcuucuccc

SEQ ID NO: 1277668 - RNA, 19 nt, Artificial Sequence
  Description of Artificial Sequence: Synthetic oligonucleotide
  Sense strand starting at position 2016 of SEQ ID NO: 1241506
ggucaaaguuaguuuccuu

SEQ ID NO: 1277669 - RNA, 19 nt, Artificial Sequence
  Description of Artificial Sequence: Synthetic oligonucleotide
  Antisense strand to SEQ ID NO: 1277668
aaggaaacuaacuuugacc

SEQ ID NO: 1277670 - RNA, 19 nt, Artificial Sequence
  Description of Artificial Sequence: Synthetic oligonucleotide
  Sense strand starting at position 2023 of SEQ ID NO: 1241506
guuaguuuccuuccacguu

SEQ ID NO: 1277671 - RNA, 19 nt, Artificial Sequence
  Description of Artificial Sequence: Synthetic oligonucleotide
  Antisense strand to SEQ ID NO: 1277670
aacguggaaggaaacuaac

SEQ ID NO: 1277672 - RNA, 19 nt, Artificial Sequence
  Description of Artificial Sequence: Synthetic oligonucleotide
  Sense strand starting at position 2204 of SEQ ID NO: 1241506
acuccuucccugggaggaa

SEQ ID NO: 1277673 - RNA, 19 nt, Artificial Sequence
  Description of Artificial Sequence: Synthetic oligonucleotide
  Antisense strand to SEQ ID NO: 1277672
uuccucccagggaaggagu

SEQ ID NO: 1277674 - RNA, 19 nt, Artificial Sequence
  Description of Artificial Sequence: Synthetic oligonucleotide
  Sense strand starting at position 2428 of SEQ ID NO: 1241506
agacuugaguuguuuauga

SEQ ID NO: 1277675 - RNA, 19 nt, Artificial Sequence
  Description of Artificial Sequence: Synthetic oligonucleotide
  Antisense strand to SEQ ID NO: 1277674
ucauaaacaacucaagucu

SEQ ID NO: 1277676 - RNA, 19 nt, Artificial Sequence
  Description of Artificial Sequence: Synthetic oligonucleotide
  Sense strand starting at position 2430 of SEQ ID NO: 1241506
acuugaguuguuuaugaaa

SEQ ID NO: 1277677 - RNA, 19 nt, Artificial Sequence
  Description of Artificial Sequence: Synthetic oligonucleotide
  Antisense strand to SEQ ID NO: 1277676
uuucauaaacaacucaagu

SEQ ID NO: 1277678 - RNA, 19 nt, Artificial Sequence
  Description of Artificial Sequence: Synthetic oligonucleotide
  Sense strand starting at position 2493 of SEQ ID NO: 1241506
agaggguccgggcaguaau

SEQ ID NO: 1277679 - RNA, 19 nt, Artificial Sequence
  Description of Artificial Sequence: Synthetic oligonucleotide
  Antisense strand to SEQ ID NO: 1277678
auuacugcccggacccucu

SEQ ID NO: 1277680 - RNA, 19 nt, Artificial Sequence
  Description of Artificial Sequence: Synthetic oligonucleotide
  Sense strand starting at position 2559 of SEQ ID NO: 1241506
aucaguggucugggacuaa

SEQ ID NO: 1277681 - RNA, 19 nt, Artificial Sequence
  Description of Artificial Sequence: Synthetic oligonucleotide
  Antisense strand to SEQ ID NO: 1277680
uuagucccagaccacugau

SEQ ID NO: 1277682 - RNA, 19 nt, Artificial Sequence
  Description of Artificial Sequence: Synthetic oligonucleotide
  Sense strand starting at position 2648 of SEQ ID NO: 1241506
agccuugggccugaauaga

SEQ ID NO: 1277683 - RNA, 19 nt, Artificial Sequence
  Description of Artificial Sequence: Synthetic oligonucleotide
  Antisense strand to SEQ ID NO: 1277682
ucuauucaggcccaaggcu

SEQ ID NO: 1277684 - RNA, 19 nt, Artificial Sequence
  Description of Artificial Sequence: Synthetic oligonucleotide
  Sense strand starting at position 2693 of SEQ ID NO: 1241506
augucucggccucaaugau

SEQ ID NO: 1277685 - RNA, 19 nt, Artificial Sequence
  Description of Artificial Sequence: Synthetic oligonucleotide
  Antisense strand to SEQ ID NO: 1277684
aucauugaggccgagacau

SEQ ID NO: 1277686 - RNA, 19 nt, Artificial Sequence
  Description of Artificial Sequence: Synthetic oligonucleotide
  Sense strand starting at position 2699 of SEQ ID NO: 1241506
cggccucaaugaucuuauu

SEQ ID NO: 1277687 - RNA, 19 nt, Artificial Sequence
  Description of Artificial Sequence: Synthetic oligonucleotide
  Antisense strand to SEQ ID NO: 1277686
aauaagaucauugaggccg

SEQ ID NO: 1277688 - RNA, 19 nt, Artificial Sequence
  Description of Artificial Sequence: Synthetic oligonucleotide
  Sense strand starting at position 2755 of SEQ ID NO: 1241506
caaguauaccuaugagguc

SEQ ID NO: 1277689 - RNA, 19 nt, Artificial Sequence
  Description of Artificial Sequence: Synthetic oligonucleotide
  Antisense strand to SEQ ID NO: 1277688
gaccucauagguauacuug

SEQ ID NO: 1277690 - RNA, 19 nt, Artificial Sequence
  Description of Artificial Sequence: Synthetic oligonucleotide
  Sense strand starting at position 2825 of SEQ ID NO: 1241506
ggucguuauguguuugugu

SEQ ID NO: 1277691 - RNA, 19 nt, Artificial Sequence
  Description of Artificial Sequence: Synthetic oligonucleotide
  Antisense strand to SEQ ID NO: 1277690
acacaaacacauaacgacc

SEQ ID NO: 1277692 - RNA, 19 nt, Artificial Sequence
  Description of Artificial Sequence: Synthetic oligonucleotide
  Sense strand starting at position 2971 of SEQ ID NO: 1241506
uucuucucccuagauugga

SEQ ID NO: 1277693 - RNA, 19 nt, Artificial Sequence
  Description of Artificial Sequence: Synthetic oligonucleotide
  Antisense strand to SEQ ID NO: 1277692
uccaaucuagggagaagaa

SEQ ID NO: 1277694 - RNA, 19 nt, Artificial Sequence
  Description of Artificial Sequence: Synthetic oligonucleotide
  Sense strand starting at position 3015 of SEQ ID NO: 1241506
uguuacuucuggcuccaaa

SEQ ID NO: 1277695 - RNA, 19 nt, Artificial Sequence
  Description of Artificial Sequence: Synthetic oligonucleotide
  Antisense strand to SEQ ID NO: 1277694
uuuggagccagaaguaaca

SEQ ID NO: 1277696 - RNA, 19 nt, Artificial Sequence
  Description of Artificial Sequence: Synthetic oligonucleotide
  Sense strand starting at position 3074 of SEQ ID NO: 1241506
ucucuaguaccuugaagca

SEQ ID NO: 1277697 - RNA, 19 nt, Artificial Sequence
  Description of Artificial Sequence: Synthetic oligonucleotide
  Antisense strand to SEQ ID NO: 1277696
ugcuucaagguacuagaga

SEQ ID NO: 1277698 - RNA, 19 nt, Artificial Sequence
  Description of Artificial Sequence: Synthetic oligonucleotide
  Sense strand starting at position 3312 of SEQ ID NO: 1241506
uggagaacuccuggguuua

SEQ ID NO: 1277699 - RNA, 19 nt, Artificial Sequence
  Description of Artificial Sequence: Synthetic oligonucleotide
  Antisense strand to SEQ ID NO: 1277698
uaaacccaggaguucucca

SEQ ID NO: 1277700 - RNA, 19 nt, Artificial Sequence
  Description of Artificial Sequence: Synthetic oligonucleotide
  Sense strand starting at position 3313 of SEQ ID NO: 1241506
ggagaacuccuggguuuaa

SEQ ID NO: 1277701 - RNA, 19 nt, Artificial Sequence
  Description of Artificial Sequence: Synthetic oligonucleotide
  Antisense strand to SEQ ID NO: 1277700
uuaaacccaggaguucucc

SEQ ID NO: 1277702 - RNA, 19 nt, Artificial Sequence
  Description of Artificial Sequence: Synthetic oligonucleotide
  Sense strand starting at position 3314 of SEQ ID NO: 1241506
gagaacuccuggguuuaau

SEQ ID NO: 1277703 - RNA, 19 nt, Artificial Sequence
  Description of Artificial Sequence: Synthetic oligonucleotide
  Antisense strand to SEQ ID NO: 1277702
auuaaacccaggaguucuc

SEQ ID NO: 1277704 - RNA, 19 nt, Artificial Sequence
  Description of Artificial Sequence: Synthetic oligonucleotide
  Sense strand starting at position 3347 of SEQ ID NO: 1241506
ggccauguugagggucaga

SEQ ID NO: 1277705 - RNA, 19 nt, Artificial Sequence
  Description of Artificial Sequence: Synthetic oligonucleotide
  Antisense strand to SEQ ID NO: 1277704
ucugacccucaacauggcc

SEQ ID NO: 1277706 - RNA, 19 nt, Artificial Sequence
  Description of Artificial Sequence: Synthetic oligonucleotide
  Sense strand starting at position 3536 of SEQ ID NO: 1241506
guagauacccaauauaugu

SEQ ID NO: 1277707 - RNA, 19 nt, Artificial Sequence
  Description of Artificial Sequence: Synthetic oligonucleotide
  Antisense strand to SEQ ID NO: 1277706
acauauauuggguaucuac

SEQ ID NO: 1277708 - RNA, 19 nt, Artificial Sequence
  Description of Artificial Sequence: Synthetic oligonucleotide
  Sense strand starting at position 3726 of SEQ ID NO: 1241506
ugcucaguucuggaugagu

SEQ ID NO: 1277709 - RNA, 19 nt, Artificial Sequence
  Description of Artificial Sequence: Synthetic oligonucleotide
  Antisense strand to SEQ ID NO: 1277708
acucauccagaacugagca

SEQ ID NO: 1277710 - RNA, 19 nt, Artificial Sequence
  Description of Artificial Sequence: Synthetic oligonucleotide
  Sense strand starting at position 3728 of SEQ ID NO: 1241506
cucaguucuggaugaguua

SEQ ID NO: 1277711 - RNA, 19 nt, Artificial Sequence
  Description of Artificial Sequence: Synthetic oligonucleotide
  Antisense strand to SEQ ID NO: 1277710
uaacucauccagaacugag

SEQ ID NO: 1277712 - RNA, 19 nt, Artificial Sequence
  Description of Artificial Sequence: Synthetic oligonucleotide
  Sense strand starting at position 3731 of SEQ ID NO: 1241506
aguucuggaugaguuacau

SEQ ID NO: 1277713 - RNA, 19 nt, Artificial Sequence
  Description of Artificial Sequence: Synthetic oligonucleotide
  Antisense strand to SEQ ID NO: 1277712
auguaacucauccagaacu

SEQ ID NO: 1277714 - RNA, 19 nt, Artificial Sequence
  Description of Artificial Sequence: Synthetic oligonucleotide
  Sense strand starting at position 3737 of SEQ ID NO: 1241506
ggaugaguuacaugaguua

SEQ ID NO: 1277715 - RNA, 19 nt, Artificial Sequence
  Description of Artificial Sequence: Synthetic oligonucleotide
  Antisense strand to SEQ ID NO: 1277714
uaacucauguaacucaucc

SEQ ID NO: 1277716 - RNA, 19 nt, Artificial Sequence
  Description of Artificial Sequence: Synthetic oligonucleotide
  Sense strand starting at position 3740 of SEQ ID NO: 1241506
ugaguuacaugaguuaaug

SEQ ID NO: 1277717 - RNA, 19 nt, Artificial Sequence
  Description of Artificial Sequence: Synthetic oligonucleotide
  Antisense strand to SEQ ID NO: 1277716
cauuaacucauguaacuca

SEQ ID NO: 1277718 - RNA, 19 nt, Artificial Sequence
  Description of Artificial Sequence: Synthetic oligonucleotide
  Sense strand starting at position 3795 of SEQ ID NO: 1241506
ugggcuuccucaucuaaau

SEQ ID NO: 1277719 - RNA, 19 nt, Artificial Sequence
  Description of Artificial Sequence: Synthetic oligonucleotide
  Antisense strand to SEQ ID NO: 1277718
auuuagaugaggaagccca

SEQ ID NO: 1277720 - RNA, 19 nt, Artificial Sequence
  Description of Artificial Sequence: Synthetic oligonucleotide
  Sense strand starting at position 3869 of SEQ ID NO: 1241506
gagugucuacuaugagcca

SEQ ID NO: 1277721 - RNA, 19 nt, Artificial Sequence
  Description of Artificial Sequence: Synthetic oligonucleotide
  Antisense strand to SEQ ID NO: 1277720
uggcucauaguagacacuc

SEQ ID NO: 1277722 - RNA, 19 nt, Artificial Sequence
  Description of Artificial Sequence: Synthetic oligonucleotide
  Sense strand starting at position 3895 of SEQ ID NO: 1241506
agaguauggcauugaguaa

SEQ ID NO: 1277723 - RNA, 19 nt, Artificial Sequence
  Description of Artificial Sequence: Synthetic oligonucleotide
  Antisense strand to SEQ ID NO: 1277722
uuacucaaugccauacucu

SEQ ID NO: 1277724 - RNA, 19 nt, Artificial Sequence
  Description of Artificial Sequence: Synthetic oligonucleotide
  Sense strand starting at position 3896 of SEQ ID NO: 1241506
gaguauggcauugaguaag

SEQ ID NO: 1277725 - RNA, 19 nt, Artificial Sequence
  Description of Artificial Sequence: Synthetic oligonucleotide
  Antisense strand to SEQ ID NO: 1277724
cuuacucaaugccauacuc

SEQ ID NO: 1277726 - RNA, 19 nt, Artificial Sequence
  Description of Artificial Sequence: Synthetic oligonucleotide
  Sense strand starting at position 49 of SEQ ID NO: 1241507
ggaaguauuuaauauggau

SEQ ID NO: 1277727 - RNA, 19 nt, Artificial Sequence
  Description of Artificial Sequence: Synthetic oligonucleotide
  Antisense strand to SEQ ID NO: 1277726
auccauauuaaauacuucc

SEQ ID NO: 1277728 - RNA, 19 nt, Artificial Sequence
  Description of Artificial Sequence: Synthetic oligonucleotide
  Sense strand starting at position 84 of SEQ ID NO: 1241507
uugucacuuggucaauaug

SEQ ID NO: 1277729 - RNA, 19 nt, Artificial Sequence
  Description of Artificial Sequence: Synthetic oligonucleotide
  Antisense strand to SEQ ID NO: 1277728
cauauugaccaagugacaa

SEQ ID NO: 1277730 - RNA, 19 nt, Artificial Sequence
  Description of Artificial Sequence: Synthetic oligonucleotide
  Sense strand starting at position 113 of SEQ ID NO: 1241507
acuuauauuccaggcagag

SEQ ID NO: 1277731 - RNA, 19 nt, Artificial Sequence
  Description of Artificial Sequence: Synthetic oligonucleotide
  Antisense strand to SEQ ID NO: 1277730
cucugccuggaauauaagu

SEQ ID NO: 1277732 - RNA, 19 nt, Artificial Sequence
  Description of Artificial Sequence: Synthetic oligonucleotide
  Sense strand starting at position 185 of SEQ ID NO: 1241507
gcaauaaaucagugagggu

SEQ ID NO: 1277733 - RNA, 19 nt, Artificial Sequence
  Description of Artificial Sequence: Synthetic oligonucleotide
  Antisense strand to SEQ ID NO: 1277732
acccucacugauuuauugc

SEQ ID NO: 1277734 - RNA, 19 nt, Artificial Sequence
  Description of Artificial Sequence: Synthetic oligonucleotide
  Sense strand starting at position 243 of SEQ ID NO: 1241507
augugaagccaagauugca

SEQ ID NO: 1277735 - RNA, 19 nt, Artificial Sequence
  Description of Artificial Sequence: Synthetic oligonucleotide
  Antisense strand to SEQ ID NO: 1277734
ugcaaucuuggcuucacau

SEQ ID NO: 1277736 - RNA, 19 nt, Artificial Sequence
  Description of Artificial Sequence: Synthetic oligonucleotide
  Sense strand starting at position 315 of SEQ ID NO: 1241507
cgaagaguccuacagauuc

SEQ ID NO: 1277737 - RNA, 19 nt, Artificial Sequence
  Description of Artificial Sequence: Synthetic oligonucleotide
  Antisense strand to SEQ ID NO: 1277736
gaaucuguaggacucuucg

SEQ ID NO: 1277738 - RNA, 19 nt, Artificial Sequence
  Description of Artificial Sequence: Synthetic oligonucleotide
  Sense strand starting at position 353 of SEQ ID NO: 1241507
uugauuguggucuagauga

SEQ ID NO: 1277739 - RNA, 19 nt, Artificial Sequence
  Description of Artificial Sequence: Synthetic oligonucleotide
  Antisense strand to SEQ ID NO: 1277738
ucaucuagaccacaaucaa

SEQ ID NO: 1277740 - RNA, 19 nt, Artificial Sequence
  Description of Artificial Sequence: Synthetic oligonucleotide
  Sense strand starting at position 917 of SEQ ID NO: 1241507
gagaguggcagugauaaug

SEQ ID NO: 1277741 - RNA, 19 nt, Artificial Sequence
  Description of Artificial Sequence: Synthetic oligonucleotide
  Antisense strand to SEQ ID NO: 1277740
cauuaucacugccacucuc

SEQ ID NO: 1277742 - RNA, 19 nt, Artificial Sequence
  Description of Artificial Sequence: Synthetic oligonucleotide
  Sense strand starting at position 927 of SEQ ID NO: 1241507
gugauaaugaugcagaugu

SEQ ID NO: 1277743 - RNA, 19 nt, Artificial Sequence
  Description of Artificial Sequence: Synthetic oligonucleotide
  Antisense strand to SEQ ID NO: 1277742
acaucugcaucauuaucac

SEQ ID NO: 1277744 - RNA, 19 nt, Artificial Sequence
  Description of Artificial Sequence: Synthetic oligonucleotide
  Sense strand starting at position 1608 of SEQ ID NO: 1241507
acgggauagccuugaugga

SEQ ID NO: 1277745 - RNA, 19 nt, Artificial Sequence
  Description of Artificial Sequence: Synthetic oligonucleotide
  Antisense strand to SEQ ID NO: 1277744
uccaucaaggcuaucccgu

SEQ ID NO: 1277746 - RNA, 19 nt, Artificial Sequence
  Description of Artificial Sequence: Synthetic oligonucleotide
  Sense strand starting at position 1609 of SEQ ID NO: 1241507
cgggauagccuugauggaa

SEQ ID NO: 1277747 - RNA, 19 nt, Artificial Sequence
  Description of Artificial Sequence: Synthetic oligonucleotide
  Antisense strand to SEQ ID NO: 1277746
uuccaucaaggcuaucccg

SEQ ID NO: 1277748 - RNA, 19 nt, Artificial Sequence
  Description of Artificial Sequence: Synthetic oligonucleotide
  Sense strand starting at position 1740 of SEQ ID NO: 1241507
cccacauggugagcagaau

SEQ ID NO: 1277749 - RNA, 19 nt, Artificial Sequence
  Description of Artificial Sequence: Synthetic oligonucleotide
  Antisense strand to SEQ ID NO: 1277748
auucugcucaccauguggg

SEQ ID NO: 1277750 - RNA, 19 nt, Artificial Sequence
  Description of Artificial Sequence: Synthetic oligonucleotide
  Sense strand starting at position 1927 of SEQ ID NO: 1241507
aauggugacguuugacaag

SEQ ID NO: 1277751 - RNA, 19 nt, Artificial Sequence
  Description of Artificial Sequence: Synthetic oligonucleotide
  Antisense strand to SEQ ID NO: 1277750
cuugucaaacgucaccauu

SEQ ID NO: 1277752 - RNA, 19 nt, Artificial Sequence
  Description of Artificial Sequence: Synthetic oligonucleotide
  Sense strand starting at position 1988 of SEQ ID NO: 1241507
gaugauugaugccuaggaa

SEQ ID NO: 1277753 - RNA, 19 nt, Artificial Sequence
  Description of Artificial Sequence: Synthetic oligonucleotide
  Antisense strand to SEQ ID NO: 1277752
uuccuaggcaucaaucauc

SEQ ID NO: 1277754 - RNA, 19 nt, Artificial Sequence
  Description of Artificial Sequence: Synthetic oligonucleotide
  Sense strand starting at position 1991 of SEQ ID NO: 1241507
gauugaugccuaggaauua

SEQ ID NO: 1277755 - RNA, 19 nt, Artificial Sequence
  Description of Artificial Sequence: Synthetic oligonucleotide
  Antisense strand to SEQ ID NO: 1277754
uaauuccuaggcaucaauc

SEQ ID NO: 1277756 - RNA, 19 nt, Artificial Sequence
  Description of Artificial Sequence: Synthetic oligonucleotide
  Sense strand starting at position 2054 of SEQ ID NO: 1241507
uggugucaccauuaguuau

SEQ ID NO: 1277757 - RNA, 19 nt, Artificial Sequence
  Description of Artificial Sequence: Synthetic oligonucleotide
  Antisense strand to SEQ ID NO: 1277756
auaacuaauggugacacca

SEQ ID NO: 1277758 - RNA, 19 nt, Artificial Sequence
  Description of Artificial Sequence: Synthetic oligonucleotide
  Sense strand starting at position 2056 of SEQ ID NO: 1241507
gugucaccauuaguuauuu

SEQ ID NO: 1277759 - RNA, 19 nt, Artificial Sequence
  Description of Artificial Sequence: Synthetic oligonucleotide
  Antisense strand to SEQ ID NO: 1277758
aaauaacuaauggugacac

SEQ ID NO: 1277760 - RNA, 19 nt, Artificial Sequence
  Description of Artificial Sequence: Synthetic oligonucleotide
  Sense strand starting at position 2110 of SEQ ID NO: 1241507
guuaguuuccuagauggga

SEQ ID NO: 1277761 - RNA, 19 nt, Artificial Sequence
  Description of Artificial Sequence: Synthetic oligonucleotide
  Antisense strand to SEQ ID NO: 1277760
ucccaucuaggaaacuaac

SEQ ID NO: 1277762 - RNA, 19 nt, Artificial Sequence
  Description of Artificial Sequence: Synthetic oligonucleotide
  Sense strand starting at position 2129 of SEQ ID NO: 1241507
ggaaacucuuguccauuga

SEQ ID NO: 1277763 - RNA, 19 nt, Artificial Sequence
  Description of Artificial Sequence: Synthetic oligonucleotide
  Antisense strand to SEQ ID NO: 1277762
ucaauggacaagaguuucc

SEQ ID NO: 1277764 - RNA, 19 nt, Artificial Sequence
  Description of Artificial Sequence: Synthetic oligonucleotide
  Sense strand starting at position 2133 of SEQ ID NO: 1241507
acucuuguccauugagaga

SEQ ID NO: 1277765 - RNA, 19 nt, Artificial Sequence
  Description of Artificial Sequence: Synthetic oligonucleotide
  Antisense strand to SEQ ID NO: 1277764
ucucucaauggacaagagu

SEQ ID NO: 1277766 - RNA, 19 nt, Artificial Sequence
  Description of Artificial Sequence: Synthetic oligonucleotide
  Sense strand starting at position 2231 of SEQ ID NO: 1241507
aagugaguucgccaaggag

SEQ ID NO: 1277767 - RNA, 19 nt, Artificial Sequence
  Description of Artificial Sequence: Synthetic oligonucleotide
  Antisense strand to SEQ ID NO: 1277766
cuccuuggcgaacucacuu

SEQ ID NO: 1277768 - RNA, 19 nt, Artificial Sequence
  Description of Artificial Sequence: Synthetic oligonucleotide
  Sense strand starting at position 2491 of SEQ ID NO: 1241507
gggacuuacgcacacacua

SEQ ID NO: 1277769 - RNA, 19 nt, Artificial Sequence
  Description of Artificial Sequence: Synthetic oligonucleotide
  Antisense strand to SEQ ID NO: 1277768
uagugugugcguaaguccc

SEQ ID NO: 1277770 - RNA, 19 nt, Artificial Sequence
  Description of Artificial Sequence: Synthetic oligonucleotide
  Sense strand starting at position 2598 of SEQ ID NO: 1241507
cccugaggacaaugcuuau

SEQ ID NO: 1277771 - RNA, 19 nt, Artificial Sequence
  Description of Artificial Sequence: Synthetic oligonucleotide
  Antisense strand to SEQ ID NO: 1277770
auaagcauuguccucaggg

SEQ ID NO: 1277772 - RNA, 19 nt, Artificial Sequence
  Description of Artificial Sequence: Synthetic oligonucleotide
  Sense strand starting at position 2601 of SEQ ID NO: 1241507
ugaggacaaugcuuauacu

SEQ ID NO: 1277773 - RNA, 19 nt, Artificial Sequence
  Description of Artificial Sequence: Synthetic oligonucleotide
  Antisense strand to SEQ ID NO: 1277772
aguauaagcauuguccuca

SEQ ID NO: 1277774 - RNA, 19 nt, Artificial Sequence
  Description of Artificial Sequence: Synthetic oligonucleotide
  Sense strand starting at position 2773 of SEQ ID NO: 1241507
auacauuguuucucuugau

SEQ ID NO: 1277775 - RNA, 19 nt, Artificial Sequence
  Description of Artificial Sequence: Synthetic oligonucleotide
  Antisense strand to SEQ ID NO: 1277774
aucaagagaaacaauguau

SEQ ID NO: 1277776 - RNA, 19 nt, Artificial Sequence
  Description of Artificial Sequence: Synthetic oligonucleotide
  Sense strand starting at position 2777 of SEQ ID NO: 1241507
auuguuucucuugaucuuu

SEQ ID NO: 1277777 - RNA, 19 nt, Artificial Sequence
  Description of Artificial Sequence: Synthetic oligonucleotide
  Antisense strand to SEQ ID NO: 1277776
aaagaucaagagaaacaau

SEQ ID NO: 1277778 - RNA, 19 nt, Artificial Sequence
  Description of Artificial Sequence: Synthetic oligonucleotide
  Sense strand starting at position 2857 of SEQ ID NO: 1241507
cauguaauauggguauaau

SEQ ID NO: 1277779 - RNA, 19 nt, Artificial Sequence
  Description of Artificial Sequence: Synthetic oligonucleotide
  Antisense strand to SEQ ID NO: 1277778
auuauacccauauuacaug

SEQ ID NO: 1277780 - RNA, 19 nt, Artificial Sequence
  Description of Artificial Sequence: Synthetic oligonucleotide
  Sense strand starting at position 2914 of SEQ ID NO: 1241507
uuugcuccaggauaucauu

SEQ ID NO: 1277781 - RNA, 19 nt, Artificial Sequence
  Description of Artificial Sequence: Synthetic oligonucleotide
  Antisense strand to SEQ ID NO: 1277780
aaugauauccuggagcaaa

SEQ ID NO: 1277782 - RNA, 19 nt, Artificial Sequence
  Description of Artificial Sequence: Synthetic oligonucleotide
  Sense strand starting at position 2954 of SEQ ID NO: 1241507
augguucauugguuuggga

SEQ ID NO: 1277783 - RNA, 19 nt, Artificial Sequence
  Description of Artificial Sequence: Synthetic oligonucleotide
  Antisense strand to SEQ ID NO: 1277782
ucccaaaccaaugaaccau

SEQ ID NO: 1277784 - RNA, 19 nt, Artificial Sequence
  Description of Artificial Sequence: Synthetic oligonucleotide
  Sense strand starting at position 3043 of SEQ ID NO: 1241507
aggacuugaucuuuagugu

SEQ ID NO: 1277785 - RNA, 19 nt, Artificial Sequence
  Description of Artificial Sequence: Synthetic oligonucleotide
  Antisense strand to SEQ ID NO: 1277784
acacuaaagaucaaguccu

SEQ ID NO: 1277786 - RNA, 19 nt, Artificial Sequence
  Description of Artificial Sequence: Synthetic oligonucleotide
  Sense strand starting at position 3044 of SEQ ID NO: 1241507
ggacuugaucuuuagugug

SEQ ID NO: 1277787 - RNA, 19 nt, Artificial Sequence
  Description of Artificial Sequence: Synthetic oligonucleotide
  Antisense strand to SEQ ID NO: 1277786
cacacuaaagaucaagucc

SEQ ID NO: 1277788 - RNA, 19 nt, Artificial Sequence
  Description of Artificial Sequence: Synthetic oligonucleotide
  Sense strand starting at position 3054 of SEQ ID NO: 1241507
uuuagugugcuugugugua

SEQ ID NO: 1277789 - RNA, 19 nt, Artificial Sequence
  Description of Artificial Sequence: Synthetic oligonucleotide
  Antisense strand to SEQ ID NO: 1277788
uacacacaagcacacuaaa

SEQ ID NO: 1277790 - RNA, 19 nt, Artificial Sequence
  Description of Artificial Sequence: Synthetic oligonucleotide
  Sense strand starting at position 3080 of SEQ ID NO: 1241507
uguauugcagucuaucaaa

SEQ ID NO: 1277791 - RNA, 19 nt, Artificial Sequence
  Description of Artificial Sequence: Synthetic oligonucleotide
  Antisense strand to SEQ ID NO: 1277790
uuugauagacugcaauaca

SEQ ID NO: 1277792 - RNA, 19 nt, Artificial Sequence
  Description of Artificial Sequence: Synthetic oligonucleotide
  Sense strand starting at position 3192 of SEQ ID NO: 1241507
uuaaauagguugcuugaua

SEQ ID NO: 1277793 - RNA, 19 nt, Artificial Sequence
  Description of Artificial Sequence: Synthetic oligonucleotide
  Antisense strand to SEQ ID NO: 1277792
uaucaagcaaccuauuuaa

SEQ ID NO: 1277794 - RNA, 19 nt, Artificial Sequence
  Description of Artificial Sequence: Synthetic oligonucleotide
  Sense strand starting at position 3193 of SEQ ID NO: 1241507
uaaauagguugcuugauaa

SEQ ID NO: 1277795 - RNA, 19 nt, Artificial Sequence
  Description of Artificial Sequence: Synthetic oligonucleotide
  Antisense strand to SEQ ID NO: 1277794
uuaucaagcaaccuauuua

SEQ ID NO: 1277796 - RNA, 19 nt, Artificial Sequence
  Description of Artificial Sequence: Synthetic oligonucleotide
  Sense strand starting at position 3222 of SEQ ID NO: 1241507
cucuauauaugguuugaga

SEQ ID NO: 1277797 - RNA, 19 nt, Artificial Sequence
  Description of Artificial Sequence: Synthetic oligonucleotide
  Antisense strand to SEQ ID NO: 1277796
ucucaaaccauauauagag

SEQ ID NO: 1277798 - RNA, 19 nt, Artificial Sequence
  Description of Artificial Sequence: Synthetic oligonucleotide
  Sense strand starting at position 3224 of SEQ ID NO: 1241507
cuauauaugguuugagaug

SEQ ID NO: 1277799 - RNA, 19 nt, Artificial Sequence
  Description of Artificial Sequence: Synthetic oligonucleotide
  Antisense strand to SEQ ID NO: 1277798
caucucaaaccauauauag

SEQ ID NO: 1277800 - RNA, 19 nt, Artificial Sequence
  Description of Artificial Sequence: Synthetic oligonucleotide
  Sense strand starting at position 3350 of SEQ ID NO: 1241507
aaguuuaaucucuaucgga

SEQ ID NO: 1277801 - RNA, 19 nt, Artificial Sequence
  Description of Artificial Sequence: Synthetic oligonucleotide
  Antisense strand to SEQ ID NO: 1277800
uccgauagagauuaaacuu

SEQ ID NO: 1277802 - RNA, 19 nt, Artificial Sequence
  Description of Artificial Sequence: Synthetic oligonucleotide
  Sense strand starting at position 3550 of SEQ ID NO: 1241507
ugaguuucaggaggacacu

SEQ ID NO: 1277803 - RNA, 19 nt, Artificial Sequence
  Description of Artificial Sequence: Synthetic oligonucleotide
  Antisense strand to SEQ ID NO: 1277802
aguguccuccugaaacuca

SEQ ID NO: 1277804 - RNA, 19 nt, Artificial Sequence
  Description of Artificial Sequence: Synthetic oligonucleotide
  Sense strand starting at position 3559 of SEQ ID NO: 1241507
ggaggacacuuugauuuau

SEQ ID NO: 1277805 - RNA, 19 nt, Artificial Sequence
  Description of Artificial Sequence: Synthetic oligonucleotide
  Antisense strand to SEQ ID NO: 1277804
auaaaucaaaguguccucc

SEQ ID NO: 1277806 - RNA, 19 nt, Artificial Sequence
  Description of Artificial Sequence: Synthetic oligonucleotide
  Sense strand starting at position 758 of SEQ ID NO: 1241508
gggagaauuuauuacugag

SEQ ID NO: 1277807 - RNA, 19 nt, Artificial Sequence
  Description of Artificial Sequence: Synthetic oligonucleotide
  Antisense strand to SEQ ID NO: 1277806
cucaguaauaaauucuccc

SEQ ID NO: 1277808 - RNA, 19 nt, Artificial Sequence
  Description of Artificial Sequence: Synthetic oligonucleotide
  Sense strand starting at position 761 of SEQ ID NO: 1241508
agaauuuauuacugagaca

SEQ ID NO: 1277809 - RNA, 19 nt, Artificial Sequence
  Description of Artificial Sequence: Synthetic oligonucleotide
  Antisense strand to SEQ ID NO: 1277808
ugucucaguaauaaauucu

SEQ ID NO: 1277810 - RNA, 19 nt, Artificial Sequence
  Description of Artificial Sequence: Synthetic oligonucleotide
  Sense strand starting at position 764 of SEQ ID NO: 1241508
auuuauuacugagacauug

SEQ ID NO: 1277811 - RNA, 19 nt, Artificial Sequence
  Description of Artificial Sequence: Synthetic oligonucleotide
  Antisense strand to SEQ ID NO: 1277810
caaugucucaguaauaaau

SEQ ID NO: 1277812 - RNA, 19 nt, Artificial Sequence
  Description of Artificial Sequence: Synthetic oligonucleotide
  Sense strand starting at position 800 of SEQ ID NO: 1241508
uucuuucuucuggauuguu

SEQ ID NO: 1277813 - RNA, 19 nt, Artificial Sequence
  Description of Artificial Sequence: Synthetic oligonucleotide
  Antisense strand to SEQ ID NO: 1277812
aacaauccagaagaaagaa

SEQ ID NO: 1277814 - RNA, 19 nt, Artificial Sequence
  Description of Artificial Sequence: Synthetic oligonucleotide
  Sense strand starting at position 803 of SEQ ID NO: 1241508
uuucuucuggauuguuuaa

SEQ ID NO: 1277815 - RNA, 19 nt, Artificial Sequence
  Description of Artificial Sequence: Synthetic oligonucleotide
  Antisense strand to SEQ ID NO: 1277814
uuaaacaauccagaagaaa

SEQ ID NO: 1277816 - RNA, 19 nt, Artificial Sequence
  Description of Artificial Sequence: Synthetic oligonucleotide
  Sense strand starting at position 845 of SEQ ID NO: 1241508
ggucucauucucuacucuu

SEQ ID NO: 1277817 - RNA, 19 nt, Artificial Sequence
  Description of Artificial Sequence: Synthetic oligonucleotide
  Antisense strand to SEQ ID NO: 1277816
aagaguagagaaugagacc

SEQ ID NO: 1277818 - RNA, 19 nt, Artificial Sequence
  Description of Artificial Sequence: Synthetic oligonucleotide
  Sense strand starting at position 869 of SEQ ID NO: 1241508
ggcugagaguuaucuugag

SEQ ID NO: 1277819 - RNA, 19 nt, Artificial Sequence
  Description of Artificial Sequence: Synthetic oligonucleotide
  Antisense strand to SEQ ID NO: 1277818
cucaagauaacucucagcc

SEQ ID NO: 1277820 - RNA, 19 nt, Artificial Sequence
  Description of Artificial Sequence: Synthetic oligonucleotide
  Sense strand starting at position 877 of SEQ ID NO: 1241508
guuaucuugagaggauacu

SEQ ID NO: 1277821 - RNA, 19 nt, Artificial Sequence
  Description of Artificial Sequence: Synthetic oligonucleotide
  Antisense strand to SEQ ID NO: 1277820
aguauccucucaagauaac

SEQ ID NO: 1277822 - RNA, 19 nt, Artificial Sequence
  Description of Artificial Sequence: Synthetic oligonucleotide
  Sense strand starting at position 902 of SEQ ID NO: 1241508
cuguuagaaaguuaguauu

SEQ ID NO: 1277823 - RNA, 19 nt, Artificial Sequence
  Description of Artificial Sequence: Synthetic oligonucleotide
  Antisense strand to SEQ ID NO: 1277822
aauacuaacuuucuaacag

SEQ ID NO: 1277824 - RNA, 19 nt, Artificial Sequence
  Description of Artificial Sequence: Synthetic oligonucleotide
  Sense strand starting at position 923 of SEQ ID NO: 1241508
accuuaaacuguguuugau

SEQ ID NO: 1277825 - RNA, 19 nt, Artificial Sequence
  Description of Artificial Sequence: Synthetic oligonucleotide
  Antisense strand to SEQ ID NO: 1277824
aucaaacacaguuuaaggu

SEQ ID NO: 1277826 - RNA, 19 nt, Artificial Sequence
  Description of Artificial Sequence: Synthetic oligonucleotide
  Sense strand starting at position 925 of SEQ ID NO: 1241508
cuuaaacuguguuugauca

SEQ ID NO: 1277827 - RNA, 19 nt, Artificial Sequence
  Description of Artificial Sequence: Synthetic oligonucleotide
  Antisense strand to SEQ ID NO: 1277826
ugaucaaacacaguuuaag

SEQ ID NO: 1277828 - RNA, 19 nt, Artificial Sequence
  Description of Artificial Sequence: Synthetic oligonucleotide
  Sense strand starting at position 926 of SEQ ID NO: 1241508
uuaaacuguguuugaucau

SEQ ID NO: 1277829 - RNA, 19 nt, Artificial Sequence
  Description of Artificial Sequence: Synthetic oligonucleotide
  Antisense strand to SEQ ID NO: 1277828
augaucaaacacaguuuaa

SEQ ID NO: 1277830 - RNA, 19 nt, Artificial Sequence
  Description of Artificial Sequence: Synthetic oligonucleotide
  Sense strand starting at position 1325 of SEQ ID NO: 1241508
uggccugaaugaucuguau

SEQ ID NO: 1277831 - RNA, 19 nt, Artificial Sequence
  Description of Artificial Sequence: Synthetic oligonucleotide
  Antisense strand to SEQ ID NO: 1277830
auacagaucauucaggcca

SEQ ID NO: 1277832 - RNA, 19 nt, Artificial Sequence
  Description of Artificial Sequence: Synthetic oligonucleotide
  Sense strand starting at position 1328 of SEQ ID NO: 1241508
ccugaaugaucuguaugua

SEQ ID NO: 1277833 - RNA, 19 nt, Artificial Sequence
  Description of Artificial Sequence: Synthetic oligonucleotide
  Antisense strand to SEQ ID NO: 1277832
uacauacagaucauucagg

SEQ ID NO: 1277834 - RNA, 19 nt, Artificial Sequence
  Description of Artificial Sequence: Synthetic oligonucleotide
  Sense strand starting at position 1329 of SEQ ID NO: 1241508
cugaaugaucuguauguag

SEQ ID NO: 1277835 - RNA, 19 nt, Artificial Sequence
  Description of Artificial Sequence: Synthetic oligonucleotide
  Antisense strand to SEQ ID NO: 1277834
cuacauacagaucauucag

SEQ ID NO: 1277836 - RNA, 19 nt, Artificial Sequence
  Description of Artificial Sequence: Synthetic oligonucleotide
  Sense strand starting at position 1331 of SEQ ID NO: 1241508
gaaugaucuguauguagga

SEQ ID NO: 1277837 - RNA, 19 nt, Artificial Sequence
  Description of Artificial Sequence: Synthetic oligonucleotide
  Antisense strand to SEQ ID NO: 1277836
uccuacauacagaucauuc

SEQ ID NO: 1277838 - RNA, 19 nt, Artificial Sequence
  Description of Artificial Sequence: Synthetic oligonucleotide
  Sense strand starting at position 1725 of SEQ ID NO: 1241508
ggguuugacaccuaaagug

SEQ ID NO: 1277839 - RNA, 19 nt, Artificial Sequence
  Description of Artificial Sequence: Synthetic oligonucleotide
  Antisense strand to SEQ ID NO: 1277838
cacuuuaggugucaaaccc

SEQ ID NO: 1277840 - RNA, 19 nt, Artificial Sequence
  Description of Artificial Sequence: Synthetic oligonucleotide
  Sense strand starting at position 1781 of SEQ ID NO: 1241508
ugcucauaucaaugacuga

SEQ ID NO: 1277841 - RNA, 19 nt, Artificial Sequence
  Description of Artificial Sequence: Synthetic oligonucleotide
  Antisense strand to SEQ ID NO: 1277840
ucagucauugauaugagca

SEQ ID NO: 1277842 - RNA, 19 nt, Artificial Sequence
  Description of Artificial Sequence: Synthetic oligonucleotide
  Sense strand starting at position 1788 of SEQ ID NO: 1241508
aucaaugacugagagaaca

SEQ ID NO: 1277843 - RNA, 19 nt, Artificial Sequence
  Description of Artificial Sequence: Synthetic oligonucleotide
  Antisense strand to SEQ ID NO: 1277842
uguucucucagucauugau

SEQ ID NO: 1277844 - RNA, 19 nt, Artificial Sequence
  Description of Artificial Sequence: Synthetic oligonucleotide
  Sense strand starting at position 1847 of SEQ ID NO: 1241508
cugcccagacagugauuaa

SEQ ID NO: 1277845 - RNA, 19 nt, Artificial Sequence
  Description of Artificial Sequence: Synthetic oligonucleotide
  Antisense strand to SEQ ID NO: 1277844
uuaaucacugucugggcag

SEQ ID NO: 1277846 - RNA, 19 nt, Artificial Sequence
  Description of Artificial Sequence: Synthetic oligonucleotide
  Sense strand starting at position 1928 of SEQ ID NO: 1241508
uccuuagccugaguggaua

SEQ ID NO: 1277847 - RNA, 19 nt, Artificial Sequence
  Description of Artificial Sequence: Synthetic oligonucleotide
  Antisense strand to SEQ ID NO: 1277846
uauccacucaggcuaagga

SEQ ID NO: 1277848 - RNA, 19 nt, Artificial Sequence
  Description of Artificial Sequence: Synthetic oligonucleotide
  Sense strand starting at position 1985 of SEQ ID NO: 1241508
uguugauucuuuccauauc

SEQ ID NO: 1277849 - RNA, 19 nt, Artificial Sequence
  Description of Artificial Sequence: Synthetic oligonucleotide
  Antisense strand to SEQ ID NO: 1277848
gauauggaaagaaucaaca

SEQ ID NO: 1277850 - RNA, 19 nt, Artificial Sequence
  Description of Artificial Sequence: Synthetic oligonucleotide
  Sense strand starting at position 2099 of SEQ ID NO: 1241508
ggcaguggcagagaaguuu

SEQ ID NO: 1277851 - RNA, 19 nt, Artificial Sequence
  Description of Artificial Sequence: Synthetic oligonucleotide
  Antisense strand to SEQ ID NO: 1277850
aaacuucucugccacugcc

SEQ ID NO: 1277852 - RNA, 19 nt, Artificial Sequence
  Description of Artificial Sequence: Synthetic oligonucleotide
  Sense strand starting at position 2116 of SEQ ID NO: 1241508
uucuuucuuacguggaaag

SEQ ID NO: 1277853 - RNA, 19 nt, Artificial Sequence
  Description of Artificial Sequence: Synthetic oligonucleotide
  Antisense strand to SEQ ID NO: 1277852
cuuuccacguaagaaagaa

SEQ ID NO: 1277854 - RNA, 19 nt, Artificial Sequence
  Description of Artificial Sequence: Synthetic oligonucleotide
  Sense strand starting at position 2117 of SEQ ID NO: 1241508
ucuuucuuacguggaaaga

SEQ ID NO: 1277855 - RNA, 19 nt, Artificial Sequence
  Description of Artificial Sequence: Synthetic oligonucleotide
  Antisense strand to SEQ ID NO: 1277854
ucuuuccacguaagaaaga

SEQ ID NO: 1277856 - RNA, 19 nt, Artificial Sequence
  Description of Artificial Sequence: Synthetic oligonucleotide
  Sense strand starting at position 2118 of SEQ ID NO: 1241508
cuuucuuacguggaaagau

SEQ ID NO: 1277857 - RNA, 19 nt, Artificial Sequence
  Description of Artificial Sequence: Synthetic oligonucleotide
  Antisense strand to SEQ ID NO: 1277856
aucuuuccacguaagaaag

SEQ ID NO: 1277858 - RNA, 19 nt, Artificial Sequence
  Description of Artificial Sequence: Synthetic oligonucleotide
  Sense strand starting at position 2149 of SEQ ID NO: 1241508
gaaacaauguucucuggca

SEQ ID NO: 1277859 - RNA, 19 nt, Artificial Sequence
  Description of Artificial Sequence: Synthetic oligonucleotide
  Antisense strand to SEQ ID NO: 1277858
ugccagagaacauuguuuc

SEQ ID NO: 1277860 - RNA, 19 nt, Artificial Sequence
  Description of Artificial Sequence: Synthetic oligonucleotide
  Sense strand starting at position 2254 of SEQ ID NO: 1241508
agagaugagugguugcauu

SEQ ID NO: 1277861 - RNA, 19 nt, Artificial Sequence
  Description of Artificial Sequence: Synthetic oligonucleotide
  Antisense strand to SEQ ID NO: 1277860
aaugcaaccacucaucucu

SEQ ID NO: 1277862 - RNA, 19 nt, Artificial Sequence
  Description of Artificial Sequence: Synthetic oligonucleotide
  Sense strand starting at position 2264 of SEQ ID NO: 1241508
gguugcauuuagcuugcaa

SEQ ID NO: 1277863 - RNA, 19 nt, Artificial Sequence
  Description of Artificial Sequence: Synthetic oligonucleotide
  Antisense strand to SEQ ID NO: 1277862
uugcaagcuaaaugcaacc

SEQ ID NO: 1277864 - RNA, 19 nt, Artificial Sequence
  Description of Artificial Sequence: Synthetic oligonucleotide
  Sense strand starting at position 2426 of SEQ ID NO: 1241508
auaugugagaaaggguauu

SEQ ID NO: 1277865 - RNA, 19 nt, Artificial Sequence
  Description of Artificial Sequence: Synthetic oligonucleotide
  Antisense strand to SEQ ID NO: 1277864
aauacccuuucucacauau

SEQ ID NO: 1277866 - RNA, 19 nt, Artificial Sequence
  Description of Artificial Sequence: Synthetic oligonucleotide
  Sense strand starting at position 2456 of SEQ ID NO: 1241508
gugcucugcccgcucagaa

SEQ ID NO: 1277867 - RNA, 19 nt, Artificial Sequence
  Description of Artificial Sequence: Synthetic oligonucleotide
  Antisense strand to SEQ ID NO: 1277866
uucugagcgggcagagcac

SEQ ID NO: 1277868 - RNA, 19 nt, Artificial Sequence
  Description of Artificial Sequence: Synthetic oligonucleotide
  Sense strand starting at position 2457 of SEQ ID NO: 1241508
ugcucugcccgcucagaau

SEQ ID NO: 1277869 - RNA, 19 nt, Artificial Sequence
  Description of Artificial Sequence: Synthetic oligonucleotide
  Antisense strand to SEQ ID NO: 1277868
auucugagcgggcagagca

SEQ ID NO: 1277870 - RNA, 19 nt, Artificial Sequence
  Description of Artificial Sequence: Synthetic oligonucleotide
  Sense strand starting at position 2496 of SEQ ID NO: 1241508
acucuuaucucugccagga

SEQ ID NO: 1277871 - RNA, 19 nt, Artificial Sequence
  Description of Artificial Sequence: Synthetic oligonucleotide
  Antisense strand to SEQ ID NO: 1277870
uccuggcagagauaagagu

SEQ ID NO: 1277872 - RNA, 19 nt, Artificial Sequence
  Description of Artificial Sequence: Synthetic oligonucleotide
  Sense strand starting at position 2500 of SEQ ID NO: 1241508
uuaucucugccaggacaua

SEQ ID NO: 1277873 - RNA, 19 nt, Artificial Sequence
  Description of Artificial Sequence: Synthetic oligonucleotide
  Antisense strand to SEQ ID NO: 1277872
uauguccuggcagagauaa

SEQ ID NO: 1277874 - RNA, 19 nt, Artificial Sequence
  Description of Artificial Sequence: Synthetic oligonucleotide
  Sense strand starting at position 2646 of SEQ ID NO: 1241508
ugaccaugaagcuguaagu

SEQ ID NO: 1277875 - RNA, 19 nt, Artificial Sequence
  Description of Artificial Sequence: Synthetic oligonucleotide
  Antisense strand to SEQ ID NO: 1277874
acuuacagcuucaugguca

SEQ ID NO: 1277876 - RNA, 19 nt, Artificial Sequence
  Description of Artificial Sequence: Synthetic oligonucleotide
  Sense strand starting at position 2677 of SEQ ID NO: 1241508
ugaggacuaucgccacuau

SEQ ID NO: 1277877 - RNA, 19 nt, Artificial Sequence
  Description of Artificial Sequence: Synthetic oligonucleotide
  Antisense strand to SEQ ID NO: 1277876
auaguggcgauaguccuca

SEQ ID NO: 1277878 - RNA, 19 nt, Artificial Sequence
  Description of Artificial Sequence: Synthetic oligonucleotide
  Sense strand starting at position 2734 of SEQ ID NO: 1241508
cuuugcaugugaucauuua

SEQ ID NO: 1277879 - RNA, 19 nt, Artificial Sequence
  Description of Artificial Sequence: Synthetic oligonucleotide
  Antisense strand to SEQ ID NO: 1277878
uaaaugaucacaugcaaag

SEQ ID NO: 1277880 - RNA, 19 nt, Artificial Sequence
  Description of Artificial Sequence: Synthetic oligonucleotide
  Sense strand starting at position 2877 of SEQ ID NO: 1241508
aaccacucucaguguggaa

SEQ ID NO: 1277881 - RNA, 19 nt, Artificial Sequence
  Description of Artificial Sequence: Synthetic oligonucleotide
  Antisense strand to SEQ ID NO: 1277880
uuccacacugagagugguu

SEQ ID NO: 1277882 - RNA, 19 nt, Artificial Sequence
  Description of Artificial Sequence: Synthetic oligonucleotide
  Sense strand starting at position 2879 of SEQ ID NO: 1241508
ccacucucaguguggaaga

SEQ ID NO: 1277883 - RNA, 19 nt, Artificial Sequence
  Description of Artificial Sequence: Synthetic oligonucleotide
  Antisense strand to SEQ ID NO: 1277882
ucuuccacacugagagugg

SEQ ID NO: 1277884 - RNA, 19 nt, Artificial Sequence
  Description of Artificial Sequence: Synthetic oligonucleotide
  Sense strand starting at position 2904 of SEQ ID NO: 1241508
uuaaguucuuaguccaacu

SEQ ID NO: 1277885 - RNA, 19 nt, Artificial Sequence
  Description of Artificial Sequence: Synthetic oligonucleotide
  Antisense strand to SEQ ID NO: 1277884
aguuggacuaagaacuuaa

SEQ ID NO: 1277886 - RNA, 19 nt, Artificial Sequence
  Description of Artificial Sequence: Synthetic oligonucleotide
  Sense strand starting at position 69 of SEQ ID NO: 1241509
uuggauuucuaagcugugu

SEQ ID NO: 1277887 - RNA, 19 nt, Artificial Sequence
  Description of Artificial Sequence: Synthetic oligonucleotide
  Antisense strand to SEQ ID NO: 1277886
acacagcuuagaaauccaa

SEQ ID NO: 1277888 - RNA, 19 nt, Artificial Sequence
  Description of Artificial Sequence: Synthetic oligonucleotide
  Sense strand starting at position 71 of SEQ ID NO: 1241509
ggauuucuaagcugugugu

SEQ ID NO: 1277889 - RNA, 19 nt, Artificial Sequence
  Description of Artificial Sequence: Synthetic oligonucleotide
  Antisense strand to SEQ ID NO: 1277888
acacacagcuuagaaaucc

SEQ ID NO: 1277890 - RNA, 19 nt, Artificial Sequence
  Description of Artificial Sequence: Synthetic oligonucleotide
  Sense strand starting at position 334 of SEQ ID NO: 1241509
acaaguagugcuuaaauag

SEQ ID NO: 1277891 - RNA, 19 nt, Artificial Sequence
  Description of Artificial Sequence: Synthetic oligonucleotide
  Antisense strand to SEQ ID NO: 1277890
cuauuuaagcacuacuugu

SEQ ID NO: 1277892 - RNA, 19 nt, Artificial Sequence
  Description of Artificial Sequence: Synthetic oligonucleotide
  Sense strand starting at position 352 of SEQ ID NO: 1241509
gaaucaaugugaucugccu

SEQ ID NO: 1277893 - RNA, 19 nt, Artificial Sequence
  Description of Artificial Sequence: Synthetic oligonucleotide
  Antisense strand to SEQ ID NO: 1277892
aggcagaucacauugauuc

SEQ ID NO: 1277894 - RNA, 19 nt, Artificial Sequence
  Description of Artificial Sequence: Synthetic oligonucleotide
  Sense strand starting at position 462 of SEQ ID NO: 1241509
aacauugaggcauguuaca

SEQ ID NO: 1277895 - RNA, 19 nt, Artificial Sequence
  Description of Artificial Sequence: Synthetic oligonucleotide
  Antisense strand to SEQ ID NO: 1277894
uguaacaugccucaauguu

SEQ ID NO: 1277896 - RNA, 19 nt, Artificial Sequence
  Description of Artificial Sequence: Synthetic oligonucleotide
  Sense strand starting at position 543 of SEQ ID NO: 1241509
agcuuuggccaauaguaag

SEQ ID NO: 1277897 - RNA, 19 nt, Artificial Sequence
  Description of Artificial Sequence: Synthetic oligonucleotide
  Antisense strand to SEQ ID NO: 1277896
cuuacuauuggccaaagcu

SEQ ID NO: 1277898 - RNA, 19 nt, Artificial Sequence
  Description of Artificial Sequence: Synthetic oligonucleotide
  Sense strand starting at position 928 of SEQ ID NO: 1241509
aagauuaauuacgcaagga

SEQ ID NO: 1277899 - RNA, 19 nt, Artificial Sequence
  Description of Artificial Sequence: Synthetic oligonucleotide
  Antisense strand to SEQ ID NO: 1277898
uccuugcguaauuaaucuu

SEQ ID NO: 1277900 - RNA, 19 nt, Artificial Sequence
  Description of Artificial Sequence: Synthetic oligonucleotide
  Sense strand starting at position 2040 of SEQ ID NO: 1241509
gaaugcagauaugucaaua

SEQ ID NO: 1277901 - RNA, 19 nt, Artificial Sequence
  Description of Artificial Sequence: Synthetic oligonucleotide
  Antisense strand to SEQ ID NO: 1277900
uauugacauaucugcauuc

SEQ ID NO: 1277902 - RNA, 19 nt, Artificial Sequence
  Description of Artificial Sequence: Synthetic oligonucleotide
  Sense strand starting at position 2048 of SEQ ID NO: 1241509
auaugucaauagucacuuu

SEQ ID NO: 1277903 - RNA, 19 nt, Artificial Sequence
  Description of Artificial Sequence: Synthetic oligonucleotide
  Antisense strand to SEQ ID NO: 1277902
aaagugacuauugacauau

SEQ ID NO: 1277904 - RNA, 19 nt, Artificial Sequence
  Description of Artificial Sequence: Synthetic oligonucleotide
  Sense strand starting at position 2081 of SEQ ID NO: 1241509
gacguauugaucuggauug

SEQ ID NO: 1277905 - RNA, 19 nt, Artificial Sequence
  Description of Artificial Sequence: Synthetic oligonucleotide
  Antisense strand to SEQ ID NO: 1277904
caauccagaucaauacguc

SEQ ID NO: 1277906 - RNA, 19 nt, Artificial Sequence
  Description of Artificial Sequence: Synthetic oligonucleotide
  Sense strand starting at position 2083 of SEQ ID NO: 1241509
cguauugaucuggauugau

SEQ ID NO: 1277907 - RNA, 19 nt, Artificial Sequence
  Description of Artificial Sequence: Synthetic oligonucleotide
  Antisense strand to SEQ ID NO: 1277906
aucaauccagaucaauacg

SEQ ID NO: 1277908 - RNA, 19 nt, Artificial Sequence
  Description of Artificial Sequence: Synthetic oligonucleotide
  Sense strand starting at position 2185 of SEQ ID NO: 1241509
guguaaagccauuauaauu

SEQ ID NO: 1277909 - RNA, 19 nt, Artificial Sequence
  Description of Artificial Sequence: Synthetic oligonucleotide
  Antisense strand to SEQ ID NO: 1277908
aauuauaauggcuuuacac

SEQ ID NO: 1277910 - RNA, 19 nt, Artificial Sequence
  Description of Artificial Sequence: Synthetic oligonucleotide
  Sense strand starting at position 2230 of SEQ ID NO: 1241509
ucaagagccuuuguauaaa

SEQ ID NO: 1277911 - RNA, 19 nt, Artificial Sequence
  Description of Artificial Sequence: Synthetic oligonucleotide
  Antisense strand to SEQ ID NO: 1277910
uuuauacaaaggcucuuga

SEQ ID NO: 1277912 - RNA, 19 nt, Artificial Sequence
  Description of Artificial Sequence: Synthetic oligonucleotide
  Sense strand starting at position 2233 of SEQ ID NO: 1241509
agagccuuuguauaaauau

SEQ ID NO: 1277913 - RNA, 19 nt, Artificial Sequence
  Description of Artificial Sequence: Synthetic oligonucleotide
  Antisense strand to SEQ ID NO: 1277912
auauuuauacaaaggcucu

SEQ ID NO: 1277914 - RNA, 19 nt, Artificial Sequence
  Description of Artificial Sequence: Synthetic oligonucleotide
  Sense strand starting at position 2344 of SEQ ID NO: 1241509
agugaaacuguguagccau

SEQ ID NO: 1277915 - RNA, 19 nt, Artificial Sequence
  Description of Artificial Sequence: Synthetic oligonucleotide
  Antisense strand to SEQ ID NO: 1277914
auggcuacacaguuucacu

SEQ ID NO: 1277916 - RNA, 19 nt, Artificial Sequence
  Description of Artificial Sequence: Synthetic oligonucleotide
  Sense strand starting at position 2412 of SEQ ID NO: 1241509
ugacacuggccuuauucua

SEQ ID NO: 1277917 - RNA, 19 nt, Artificial Sequence
  Description of Artificial Sequence: Synthetic oligonucleotide
  Antisense strand to SEQ ID NO: 1277916
uagaauaaggccaguguca

SEQ ID NO: 1277918 - RNA, 19 nt, Artificial Sequence
  Description of Artificial Sequence: Synthetic oligonucleotide
  Sense strand starting at position 2491 of SEQ ID NO: 1241509
ucaaaucaauuagaggaaa

SEQ ID NO: 1277919 - RNA, 19 nt, Artificial Sequence
  Description of Artificial Sequence: Synthetic oligonucleotide
  Antisense strand to SEQ ID NO: 1277918
uuuccucuaauugauuuga

SEQ ID NO: 1277920 - RNA, 19 nt, Artificial Sequence
  Description of Artificial Sequence: Synthetic oligonucleotide
  Sense strand starting at position 2502 of SEQ ID NO: 1241509
agaggaaauuagcuguugu

SEQ ID NO: 1277921 - RNA, 19 nt, Artificial Sequence
  Description of Artificial Sequence: Synthetic oligonucleotide
  Antisense strand to SEQ ID NO: 1277920
acaacagcuaauuuccucu

SEQ ID NO: 1277922 - RNA, 19 nt, Artificial Sequence
  Description of Artificial Sequence: Synthetic oligonucleotide
  Sense strand starting at position 2609 of SEQ ID NO: 1241509
gcuugccgugaagaauaua

SEQ ID NO: 1277923 - RNA, 19 nt, Artificial Sequence
  Description of Artificial Sequence: Synthetic oligonucleotide
  Antisense strand to SEQ ID NO: 1277922
uauauucuucacggcaagc

SEQ ID NO: 1277924 - RNA, 19 nt, Artificial Sequence
  Description of Artificial Sequence: Synthetic oligonucleotide
  Sense strand starting at position 2612 of SEQ ID NO: 1241509
ugccgugaagaauauauaa

SEQ ID NO: 1277925 - RNA, 19 nt, Artificial Sequence
  Description of Artificial Sequence: Synthetic oligonucleotide
  Antisense strand to SEQ ID NO: 1277924
uuauauauucuucacggca

SEQ ID NO: 1277926 - RNA, 19 nt, Artificial Sequence
  Description of Artificial Sequence: Synthetic oligonucleotide
  Sense strand starting at position 2633 of SEQ ID NO: 1241509
uugccuagacuauaguuaa

SEQ ID NO: 1277927 - RNA, 19 nt, Artificial Sequence
  Description of Artificial Sequence: Synthetic oligonucleotide
  Antisense strand to SEQ ID NO: 1277926
uuaacuauagucuaggcaa

SEQ ID NO: 1277928 - RNA, 19 nt, Artificial Sequence
  Description of Artificial Sequence: Synthetic oligonucleotide
  Sense strand starting at position 2707 of SEQ ID NO: 1241509
ucuaaauaacaguggguuu

SEQ ID NO: 1277929 - RNA, 19 nt, Artificial Sequence
  Description of Artificial Sequence: Synthetic oligonucleotide
  Antisense strand to SEQ ID NO: 1277928
aaacccacuguuauuuaga

SEQ ID NO: 1277930 - RNA, 19 nt, Artificial Sequence
  Description of Artificial Sequence: Synthetic oligonucleotide
  Sense strand starting at position 2720 of SEQ ID NO: 1241509
ggguuuguaggcgauauua

SEQ ID NO: 1277931 - RNA, 19 nt, Artificial Sequence
  Description of Artificial Sequence: Synthetic oligonucleotide
  Antisense strand to SEQ ID NO: 1277930
uaauaucgccuacaaaccc

SEQ ID NO: 1277932 - RNA, 19 nt, Artificial Sequence
  Description of Artificial Sequence: Synthetic oligonucleotide
  Sense strand starting at position 2722 of SEQ ID NO: 1241509
guuuguaggcgauauuaga

SEQ ID NO: 1277933 - RNA, 19 nt, Artificial Sequence
  Description of Artificial Sequence: Synthetic oligonucleotide
  Antisense strand to SEQ ID NO: 1277932
ucuaauaucgccuacaaac

SEQ ID NO: 1277934 - RNA, 19 nt, Artificial Sequence
  Description of Artificial Sequence: Synthetic oligonucleotide
  Sense strand starting at position 2730 of SEQ ID NO: 1241509
gcgauauuagacuaaagcu

SEQ ID NO: 1277935 - RNA, 19 nt, Artificial Sequence
  Description of Artificial Sequence: Synthetic oligonucleotide
  Antisense strand to SEQ ID NO: 1277934
agcuuuagucuaauaucgc

SEQ ID NO: 1277936 - RNA, 19 nt, Artificial Sequence
  Description of Artificial Sequence: Synthetic oligonucleotide
  Sense strand starting at position 2805 of SEQ ID NO: 1241509
ggcugaauaucugcaugau

SEQ ID NO: 1277937 - RNA, 19 nt, Artificial Sequence
  Description of Artificial Sequence: Synthetic oligonucleotide
  Antisense strand to SEQ ID NO: 1277936
aucaugcagauauucagcc

SEQ ID NO: 1277938 - RNA, 19 nt, Artificial Sequence
  Description of Artificial Sequence: Synthetic oligonucleotide
  Sense strand starting at position 2806 of SEQ ID NO: 1241509
gcugaauaucugcaugaug

SEQ ID NO: 1277939 - RNA, 19 nt, Artificial Sequence
  Description of Artificial Sequence: Synthetic oligonucleotide
  Antisense strand to SEQ ID NO: 1277938
caucaugcagauauucagc

SEQ ID NO: 1277940 - RNA, 19 nt, Artificial Sequence
  Description of Artificial Sequence: Synthetic oligonucleotide
  Sense strand starting at position 2905 of SEQ ID NO: 1241509
ucuaaauaagcgcauaagu

SEQ ID NO: 1277941 - RNA, 19 nt, Artificial Sequence
  Description of Artificial Sequence: Synthetic oligonucleotide
  Antisense strand to SEQ ID NO: 1277940
acuuaugcgcuuauuuaga

SEQ ID NO: 1277942 - RNA, 19 nt, Artificial Sequence
  Description of Artificial Sequence: Synthetic oligonucleotide
  Sense strand starting at position 2907 of SEQ ID NO: 1241509
uaaauaagcgcauaaguga

SEQ ID NO: 1277943 - RNA, 19 nt, Artificial Sequence
  Description of Artificial Sequence: Synthetic oligonucleotide
  Antisense strand to SEQ ID NO: 1277942
ucacuuaugcgcuuauuua

SEQ ID NO: 1277944 - RNA, 19 nt, Artificial Sequence
  Description of Artificial Sequence: Synthetic oligonucleotide
  Sense strand starting at position 2915 of SEQ ID NO: 1241509
cgcauaagugagcaaacua

SEQ ID NO: 1277945 - RNA, 19 nt, Artificial Sequence
  Description of Artificial Sequence: Synthetic oligonucleotide
  Antisense strand to SEQ ID NO: 1277944
uaguuugcucacuuaugcg

SEQ ID NO: 1277946 - RNA, 19 nt, Artificial Sequence
  Description of Artificial Sequence: Synthetic oligonucleotide
  Sense strand starting at position 3043 of SEQ ID NO: 1241509
gccacuuuggcauaagauu

SEQ ID NO: 1277947 - RNA, 19 nt, Artificial Sequence
  Description of Artificial Sequence: Synthetic oligonucleotide
  Antisense strand to SEQ ID NO: 1277946
aaucuuaugccaaaguggc

SEQ ID NO: 1277948 - RNA, 19 nt, Artificial Sequence
  Description of Artificial Sequence: Synthetic oligonucleotide
  Sense strand starting at position 3286 of SEQ ID NO: 1241509
uccauuaguuuguccauaa

SEQ ID NO: 1277949 - RNA, 19 nt, Artificial Sequence
  Description of Artificial Sequence: Synthetic oligonucleotide
  Antisense strand to SEQ ID NO: 1277948
uuauggacaaacuaaugga

SEQ ID NO: 1277950 - RNA, 19 nt, Artificial Sequence
  Description of Artificial Sequence: Synthetic oligonucleotide
  Sense strand starting at position 3287 of SEQ ID NO: 1241509
ccauuaguuuguccauaau

SEQ ID NO: 1277951 - RNA, 19 nt, Artificial Sequence
  Description of Artificial Sequence: Synthetic oligonucleotide
  Antisense strand to SEQ ID NO: 1277950
auuauggacaaacuaaugg

SEQ ID NO: 1277952 - RNA, 19 nt, Artificial Sequence
  Description of Artificial Sequence: Synthetic oligonucleotide
  Sense strand starting at position 3382 of SEQ ID NO: 1241509
auuauucuuuagcugagau

SEQ ID NO: 1277953 - RNA, 19 nt, Artificial Sequence
  Description of Artificial Sequence: Synthetic oligonucleotide
  Antisense strand to SEQ ID NO: 1277952
aucucagcuaaagaauaau

SEQ ID NO: 1277954 - RNA, 19 nt, Artificial Sequence
  Description of Artificial Sequence: Synthetic oligonucleotide
  Sense strand starting at position 3431 of SEQ ID NO: 1241509
uugaguuacucaucuccca

SEQ ID NO: 1277955 - RNA, 19 nt, Artificial Sequence
  Description of Artificial Sequence: Synthetic oligonucleotide
  Antisense strand to SEQ ID NO: 1277954
ugggagaugaguaacucaa

SEQ ID NO: 1277956 - RNA, 19 nt, Artificial Sequence
  Description of Artificial Sequence: Synthetic oligonucleotide
  Sense strand starting at position 3449 of SEQ ID NO: 1241509
agugcucccauguguauuu

SEQ ID NO: 1277957 - RNA, 19 nt, Artificial Sequence
  Description of Artificial Sequence: Synthetic oligonucleotide
  Antisense strand to SEQ ID NO: 1277956
aaauacacaugggagcacu

SEQ ID NO: 1277958 - RNA, 19 nt, Artificial Sequence
  Description of Artificial Sequence: Synthetic oligonucleotide
  Sense strand starting at position 3450 of SEQ ID NO: 1241509
gugcucccauguguauuua

SEQ ID NO: 1277959 - RNA, 19 nt, Artificial Sequence
  Description of Artificial Sequence: Synthetic oligonucleotide
  Antisense strand to SEQ ID NO: 1277958
uaaauacacaugggagcac

SEQ ID NO: 1277960 - RNA, 19 nt, Artificial Sequence
  Description of Artificial Sequence: Synthetic oligonucleotide
  Sense strand starting at position 3586 of SEQ ID NO: 1241509
cccugcagagucuacuaau

SEQ ID NO: 1277961 - RNA, 19 nt, Artificial Sequence
  Description of Artificial Sequence: Synthetic oligonucleotide
  Antisense strand to SEQ ID NO: 1277960
auuaguagacucugcaggg

SEQ ID NO: 1277962 - RNA, 19 nt, Artificial Sequence
  Description of Artificial Sequence: Synthetic oligonucleotide
  Sense strand starting at position 3696 of SEQ ID NO: 1241509
ugaguacuuagagguuuau

SEQ ID NO: 1277963 - RNA, 19 nt, Artificial Sequence
  Description of Artificial Sequence: Synthetic oligonucleotide
  Antisense strand to SEQ ID NO: 1277962
auaaaccucuaaguacuca

SEQ ID NO: 1277964 - RNA, 19 nt, Artificial Sequence
  Description of Artificial Sequence: Synthetic oligonucleotide
  Sense strand starting at position 3706 of SEQ ID NO: 1241509
gagguuuauguuggaagaa

SEQ ID NO: 1277965 - RNA, 19 nt, Artificial Sequence
  Description of Artificial Sequence: Synthetic oligonucleotide
  Antisense strand to SEQ ID NO: 1277964
uucuuccaacauaaaccuc

SEQ ID NO: 1277966 - RNA, 19 nt, Artificial Sequence
  Description of Artificial Sequence: Synthetic oligonucleotide
  Sense strand starting at position 2774 of SEQ ID NO: 1241510
ugagauugauguuccuuau

SEQ ID NO: 1277967 - RNA, 19 nt, Artificial Sequence
  Description of Artificial Sequence: Synthetic oligonucleotide
  Antisense strand to SEQ ID NO: 1277966
auaaggaacaucaaucuca

SEQ ID NO: 1277968 - RNA, 19 nt, Artificial Sequence
  Description of Artificial Sequence: Synthetic oligonucleotide
  Sense strand starting at position 2777 of SEQ ID NO: 1241510
gauugauguuccuuauaug

SEQ ID NO: 1277969 - RNA, 19 nt, Artificial Sequence
  Description of Artificial Sequence: Synthetic oligonucleotide
  Antisense strand to SEQ ID NO: 1277968
cauauaaggaacaucaauc

SEQ ID NO: 1277970 - RNA, 19 nt, Artificial Sequence
  Description of Artificial Sequence: Synthetic oligonucleotide
  Sense strand starting at position 2780 of SEQ ID NO: 1241510
ugauguuccuuauaugcuu

SEQ ID NO: 1277971 - RNA, 19 nt, Artificial Sequence
  Description of Artificial Sequence: Synthetic oligonucleotide
  Antisense strand to SEQ ID NO: 1277970
aagcauauaaggaacauca

SEQ ID NO: 1277972 - RNA, 19 nt, Artificial Sequence
  Description of Artificial Sequence: Synthetic oligonucleotide
  Sense strand starting at position 3936 of SEQ ID NO: 1241510
ugugaaguaguugaggaua

SEQ ID NO: 1277973 - RNA, 19 nt, Artificial Sequence
  Description of Artificial Sequence: Synthetic oligonucleotide
  Antisense strand to SEQ ID NO: 1277972
uauccucaacuacuucaca

SEQ ID NO: 1277974 - RNA, 19 nt, Artificial Sequence
  Description of Artificial Sequence: Synthetic oligonucleotide
  Sense strand starting at position 3938 of SEQ ID NO: 1241510
ugaaguaguugaggauauc

SEQ ID NO: 1277975 - RNA, 19 nt, Artificial Sequence
  Description of Artificial Sequence: Synthetic oligonucleotide
  Antisense strand to SEQ ID NO: 1277974
gauauccucaacuacuuca

SEQ ID NO: 1277976 - RNA, 19 nt, Artificial Sequence
  Description of Artificial Sequence: Synthetic oligonucleotide
  Sense strand starting at position 3944 of SEQ ID NO: 1241510
aguugaggauaucagggau

SEQ ID NO: 1277977 - RNA, 19 nt, Artificial Sequence
  Description of Artificial Sequence: Synthetic oligonucleotide
  Antisense strand to SEQ ID NO: 1277976
aucccugauauccucaacu

SEQ ID NO: 1277978 - RNA, 19 nt, Artificial Sequence
  Description of Artificial Sequence: Synthetic oligonucleotide
  Sense strand starting at position 41 of SEQ ID NO: 1241511
uuuagaaucugcccuuuag

SEQ ID NO: 1277979 - RNA, 19 nt, Artificial Sequence
  Description of Artificial Sequence: Synthetic oligonucleotide
  Antisense strand to SEQ ID NO: 1277978
cuaaagggcagauucuaaa

SEQ ID NO: 1277980 - RNA, 19 nt, Artificial Sequence
  Description of Artificial Sequence: Synthetic oligonucleotide
  Sense strand starting at position 70 of SEQ ID NO: 1241511
ggagguaauguuuggauau

SEQ ID NO: 1277981 - RNA, 19 nt, Artificial Sequence
  Description of Artificial Sequence: Synthetic oligonucleotide
  Antisense strand to SEQ ID NO: 1277980
auauccaaacauuaccucc

SEQ ID NO: 1277982 - RNA, 19 nt, Artificial Sequence
  Description of Artificial Sequence: Synthetic oligonucleotide
  Sense strand starting at position 80 of SEQ ID NO: 1241511
uuuggauaucauuaggcua

SEQ ID NO: 1277983 - RNA, 19 nt, Artificial Sequence
  Description of Artificial Sequence: Synthetic oligonucleotide
  Antisense strand to SEQ ID NO: 1277982
uagccuaaugauauccaaa

SEQ ID NO: 1277984 - RNA, 19 nt, Artificial Sequence
  Description of Artificial Sequence: Synthetic oligonucleotide
  Sense strand starting at position 83 of SEQ ID NO: 1241511
ggauaucauuaggcuagaa

SEQ ID NO: 1277985 - RNA, 19 nt, Artificial Sequence
  Description of Artificial Sequence: Synthetic oligonucleotide
  Antisense strand to SEQ ID NO: 1277984
uucuagccuaaugauaucc

SEQ ID NO: 1277986 - RNA, 19 nt, Artificial Sequence
  Description of Artificial Sequence: Synthetic oligonucleotide
  Sense strand starting at position 136 of SEQ ID NO: 1241511
cuuauaagggcuuauguau

SEQ ID NO: 1277987 - RNA, 19 nt, Artificial Sequence
  Description of Artificial Sequence: Synthetic oligonucleotide
  Antisense strand to SEQ ID NO: 1277986
auacauaagcccuuauaag

SEQ ID NO: 1277988 - RNA, 19 nt, Artificial Sequence
  Description of Artificial Sequence: Synthetic oligonucleotide
  Sense strand starting at position 145 of SEQ ID NO: 1241511
gcuuauguauuaguaauga

SEQ ID NO: 1277989 - RNA, 19 nt, Artificial Sequence
  Description of Artificial Sequence: Synthetic oligonucleotide
  Antisense strand to SEQ ID NO: 1277988
ucauuacuaauacauaagc

SEQ ID NO: 1277990 - RNA, 19 nt, Artificial Sequence
  Description of Artificial Sequence: Synthetic oligonucleotide
  Sense strand starting at position 153 of SEQ ID NO: 1241511
auuaguaaugaccauguca

SEQ ID NO: 1277991 - RNA, 19 nt, Artificial Sequence
  Description of Artificial Sequence: Synthetic oligonucleotide
  Antisense strand to SEQ ID NO: 1277990
ugacauggucauuacuaau

SEQ ID NO: 1277992 - RNA, 19 nt, Artificial Sequence
  Description of Artificial Sequence: Synthetic oligonucleotide
  Sense strand starting at position 361 of SEQ ID NO: 1241511
cccaaauauguguauuccu

SEQ ID NO: 1277993 - RNA, 19 nt, Artificial Sequence
  Description of Artificial Sequence: Synthetic oligonucleotide
  Antisense strand to SEQ ID NO: 1277992
aggaauacacauauuuggg

SEQ ID NO: 1277994 - RNA, 19 nt, Artificial Sequence
  Description of Artificial Sequence: Synthetic oligonucleotide
  Sense strand starting at position 368 of SEQ ID NO: 1241511
auguguauuccucaguuaa

SEQ ID NO: 1277995 - RNA, 19 nt, Artificial Sequence
  Description of Artificial Sequence: Synthetic oligonucleotide
  Antisense strand to SEQ ID NO: 1277994
uuaacugaggaauacacau

SEQ ID NO: 1277996 - RNA, 19 nt, Artificial Sequence
  Description of Artificial Sequence: Synthetic oligonucleotide
  Sense strand starting at position 461 of SEQ ID NO: 1241511
ggguccaacagguguuuaa

SEQ ID NO: 1277997 - RNA, 19 nt, Artificial Sequence
  Description of Artificial Sequence: Synthetic oligonucleotide
  Antisense strand to SEQ ID NO: 1277996
uuaaacaccuguuggaccc

SEQ ID NO: 1277998 - RNA, 19 nt, Artificial Sequence
  Description of Artificial Sequence: Synthetic oligonucleotide
  Sense strand starting at position 601 of SEQ ID NO: 1241511
gccuuagauuauguuggaa

SEQ ID NO: 1277999 - RNA, 19 nt, Artificial Sequence
  Description of Artificial Sequence: Synthetic oligonucleotide
  Antisense strand to SEQ ID NO: 1277998
uuccaacauaaucuaaggc

SEQ ID NO: 1278000 - RNA, 19 nt, Artificial Sequence
  Description of Artificial Sequence: Synthetic oligonucleotide
  Sense strand starting at position 726 of SEQ ID NO: 1241511
ucugcaucccuguagaaug

SEQ ID NO: 1278001 - RNA, 19 nt, Artificial Sequence
  Description of Artificial Sequence: Synthetic oligonucleotide
  Antisense strand to SEQ ID NO: 1278000
cauucuacagggaugcaga

SEQ ID NO: 1278002 - RNA, 19 nt, Artificial Sequence
  Description of Artificial Sequence: Synthetic oligonucleotide
  Sense strand starting at position 768 of SEQ ID NO: 1241511
ugaccauaagagggcuaua

SEQ ID NO: 1278003 - RNA, 19 nt, Artificial Sequence
  Description of Artificial Sequence: Synthetic oligonucleotide
  Antisense strand to SEQ ID NO: 1278002
uauagcccucuuaugguca

SEQ ID NO: 1278004 - RNA, 19 nt, Artificial Sequence
  Description of Artificial Sequence: Synthetic oligonucleotide
  Sense strand starting at position 771 of SEQ ID NO: 1241511
ccauaagagggcuauagca

SEQ ID NO: 1278005 - RNA, 19 nt, Artificial Sequence
  Description of Artificial Sequence: Synthetic oligonucleotide
  Antisense strand to SEQ ID NO: 1278004
ugcuauagcccucuuaugg

SEQ ID NO: 1278006 - RNA, 19 nt, Artificial Sequence
  Description of Artificial Sequence: Synthetic oligonucleotide
  Sense strand starting at position 822 of SEQ ID NO: 1241511
uagagaaggccuuaugucu

SEQ ID NO: 1278007 - RNA, 19 nt, Artificial Sequence
  Description of Artificial Sequence: Synthetic oligonucleotide
  Antisense strand to SEQ ID NO: 1278006
agacauaaggccuucucua

SEQ ID NO: 1278008 - RNA, 19 nt, Artificial Sequence
  Description of Artificial Sequence: Synthetic oligonucleotide
  Sense strand starting at position 1020 of SEQ ID NO: 1241511
uaauguuugggccacagaa

SEQ ID NO: 1278009 - RNA, 19 nt, Artificial Sequence
  Description of Artificial Sequence: Synthetic oligonucleotide
  Antisense strand to SEQ ID NO: 1278008
uucuguggcccaaacauua

SEQ ID NO: 1278010 - RNA, 19 nt, Artificial Sequence
  Description of Artificial Sequence: Synthetic oligonucleotide
  Sense strand starting at position 1041 of SEQ ID NO: 1241511
gcuucugagagaugagaac

SEQ ID NO: 1278011 - RNA, 19 nt, Artificial Sequence
  Description of Artificial Sequence: Synthetic oligonucleotide
  Antisense strand to SEQ ID NO: 1278010
guucucaucucucagaagc

SEQ ID NO: 1278012 - RNA, 19 nt, Artificial Sequence
  Description of Artificial Sequence: Synthetic oligonucleotide
  Sense strand starting at position 1106 of SEQ ID NO: 1241511
accaguuuggcauagagau

SEQ ID NO: 1278013 - RNA, 19 nt, Artificial Sequence
  Description of Artificial Sequence: Synthetic oligonucleotide
  Antisense strand to SEQ ID NO: 1278012
aucucuaugccaaacuggu

SEQ ID NO: 1278014 - RNA, 19 nt, Artificial Sequence
  Description of Artificial Sequence: Synthetic oligonucleotide
  Sense strand starting at position 1116 of SEQ ID NO: 1241511
cauagagaugcccagucau

SEQ ID NO: 1278015 - RNA, 19 nt, Artificial Sequence
  Description of Artificial Sequence: Synthetic oligonucleotide
  Antisense strand to SEQ ID NO: 1278014
augacugggcaucucuaug

SEQ ID NO: 1278016 - RNA, 19 nt, Artificial Sequence
  Description of Artificial Sequence: Synthetic oligonucleotide
  Sense strand starting at position 1123 of SEQ ID NO: 1241511
augcccagucaugauauua

SEQ ID NO: 1278017 - RNA, 19 nt, Artificial Sequence
  Description of Artificial Sequence: Synthetic oligonucleotide
  Antisense strand to SEQ ID NO: 1278016
uaauaucaugacugggcau

SEQ ID NO: 1278018 - RNA, 19 nt, Artificial Sequence
  Description of Artificial Sequence: Synthetic oligonucleotide
  Sense strand starting at position 1548 of SEQ ID NO: 1241511
ucauuaggccagugacaug

SEQ ID NO: 1278019 - RNA, 19 nt, Artificial Sequence
  Description of Artificial Sequence: Synthetic oligonucleotide
  Antisense strand to SEQ ID NO: 1278018
caugucacuggccuaauga

SEQ ID NO: 1278020 - RNA, 19 nt, Artificial Sequence
  Description of Artificial Sequence: Synthetic oligonucleotide
  Sense strand starting at position 2022 of SEQ ID NO: 1241511
aagagaauguaguuuacuu

SEQ ID NO: 1278021 - RNA, 19 nt, Artificial Sequence
  Description of Artificial Sequence: Synthetic oligonucleotide
  Antisense strand to SEQ ID NO: 1278020
aaguaaacuacauucucuu

SEQ ID NO: 1278022 - RNA, 19 nt, Artificial Sequence
  Description of Artificial Sequence: Synthetic oligonucleotide
  Sense strand starting at position 2045 of SEQ ID NO: 1241511
ucggcuauacaguauauga

SEQ ID NO: 1278023 - RNA, 19 nt, Artificial Sequence
  Description of Artificial Sequence: Synthetic oligonucleotide
  Antisense strand to SEQ ID NO: 1278022
ucauauacuguauagccga

SEQ ID NO: 1278024 - RNA, 19 nt, Artificial Sequence
  Description of Artificial Sequence: Synthetic oligonucleotide
  Sense strand starting at position 2203 of SEQ ID NO: 1241511
ugaauauaguuucuggaua

SEQ ID NO: 1278025 - RNA, 19 nt, Artificial Sequence
  Description of Artificial Sequence: Synthetic oligonucleotide
  Antisense strand to SEQ ID NO: 1278024
uauccagaaacuauauuca

SEQ ID NO: 1278026 - RNA, 19 nt, Artificial Sequence
  Description of Artificial Sequence: Synthetic oligonucleotide
  Sense strand starting at position 2284 of SEQ ID NO: 1241511
caacuuauggugcaauaga

SEQ ID NO: 1278027 - RNA, 19 nt, Artificial Sequence
  Description of Artificial Sequence: Synthetic oligonucleotide
  Antisense strand to SEQ ID NO: 1278026
ucuauugcaccauaaguug

SEQ ID NO: 1278028 - RNA, 19 nt, Artificial Sequence
  Description of Artificial Sequence: Synthetic oligonucleotide
  Sense strand starting at position 2295 of SEQ ID NO: 1241511
gcaauagacucaguaaaga

SEQ ID NO: 1278029 - RNA, 19 nt, Artificial Sequence
  Description of Artificial Sequence: Synthetic oligonucleotide
  Antisense strand to SEQ ID NO: 1278028
ucuuuacugagucuauugc

SEQ ID NO: 1278030 - RNA, 19 nt, Artificial Sequence
  Description of Artificial Sequence: Synthetic oligonucleotide
  Sense strand starting at position 2398 of SEQ ID NO: 1241511
auugguagcaaucacguua

SEQ ID NO: 1278031 - RNA, 19 nt, Artificial Sequence
  Description of Artificial Sequence: Synthetic oligonucleotide
  Antisense strand to SEQ ID NO: 1278030
uaacgugauugcuaccaau

SEQ ID NO: 1278032 - RNA, 19 nt, Artificial Sequence
  Description of Artificial Sequence: Synthetic oligonucleotide
  Sense strand starting at position 2876 of SEQ ID NO: 1241511
augugaguccuagauauca

SEQ ID NO: 1278033 - RNA, 19 nt, Artificial Sequence
  Description of Artificial Sequence: Synthetic oligonucleotide
  Antisense strand to SEQ ID NO: 1278032
ugauaucuaggacucacau

SEQ ID NO: 1278034 - RNA, 19 nt, Artificial Sequence
  Description of Artificial Sequence: Synthetic oligonucleotide
  Sense strand starting at position 2954 of SEQ ID NO: 1241511
acaccagugcucugggaag

SEQ ID NO: 1278035 - RNA, 19 nt, Artificial Sequence
  Description of Artificial Sequence: Synthetic oligonucleotide
  Antisense strand to SEQ ID NO: 1278034
cuucccagagcacuggugu

SEQ ID NO: 1278036 - RNA, 19 nt, Artificial Sequence
  Description of Artificial Sequence: Synthetic oligonucleotide
  Sense strand starting at position 2978 of SEQ ID NO: 1241511
ucguaugacuaguuagaag

SEQ ID NO: 1278037 - RNA, 19 nt, Artificial Sequence
  Description of Artificial Sequence: Synthetic oligonucleotide
  Antisense strand to SEQ ID NO: 1278036
cuucuaacuagucauacga

SEQ ID NO: 1278038 - RNA, 19 nt, Artificial Sequence
  Description of Artificial Sequence: Synthetic oligonucleotide
  Sense strand starting at position 3038 of SEQ ID NO: 1241511
ggcuuccaaccagaaucau

SEQ ID NO: 1278039 - RNA, 19 nt, Artificial Sequence
  Description of Artificial Sequence: Synthetic oligonucleotide
  Antisense strand to SEQ ID NO: 1278038
augauucugguuggaagcc

SEQ ID NO: 1278040 - RNA, 19 nt, Artificial Sequence
  Description of Artificial Sequence: Synthetic oligonucleotide
  Sense strand starting at position 3261 of SEQ ID NO: 1241511
cacauucuccugggaugua

SEQ ID NO: 1278041 - RNA, 19 nt, Artificial Sequence
  Description of Artificial Sequence: Synthetic oligonucleotide
  Antisense strand to SEQ ID NO: 1278040
uacaucccaggagaaugug

SEQ ID NO: 1278042 - RNA, 19 nt, Artificial Sequence
  Description of Artificial Sequence: Synthetic oligonucleotide
  Sense strand starting at position 3273 of SEQ ID NO: 1241511
ggauguagccucuauagca

SEQ ID NO: 1278043 - RNA, 19 nt, Artificial Sequence
  Description of Artificial Sequence: Synthetic oligonucleotide
  Antisense strand to SEQ ID NO: 1278042
ugcuauagaggcuacaucc

SEQ ID NO: 1278044 - RNA, 19 nt, Artificial Sequence
  Description of Artificial Sequence: Synthetic oligonucleotide
  Sense strand starting at position 3487 of SEQ ID NO: 1241511
uugacauaauguuuaggaa

SEQ ID NO: 1278045 - RNA, 19 nt, Artificial Sequence
  Description of Artificial Sequence: Synthetic oligonucleotide
  Antisense strand to SEQ ID NO: 1278044
uuccuaaacauuaugucaa

SEQ ID NO: 1278046 - RNA, 19 nt, Artificial Sequence
  Description of Artificial Sequence: Synthetic oligonucleotide
  Sense strand starting at position 3521 of SEQ ID NO: 1241511
ugugcauauauuggaggau

SEQ ID NO: 1278047 - RNA, 19 nt, Artificial Sequence
  Description of Artificial Sequence: Synthetic oligonucleotide
  Antisense strand to SEQ ID NO: 1278046
auccuccaauauaugcaca

SEQ ID NO: 1278048 - RNA, 19 nt, Artificial Sequence
  Description of Artificial Sequence: Synthetic oligonucleotide
  Sense strand starting at position 3524 of SEQ ID NO: 1241511
gcauauauuggaggauaua

SEQ ID NO: 1278049 - RNA, 19 nt, Artificial Sequence
  Description of Artificial Sequence: Synthetic oligonucleotide
  Antisense strand to SEQ ID NO: 1278048
uauauccuccaauauaugc

SEQ ID NO: 1278050 - RNA, 19 nt, Artificial Sequence
  Description of Artificial Sequence: Synthetic oligonucleotide
  Sense strand starting at position 3567 of SEQ ID NO: 1241511
guuccaacauugucacaca

SEQ ID NO: 1278051 - RNA, 19 nt, Artificial Sequence
  Description of Artificial Sequence: Synthetic oligonucleotide
  Antisense strand to SEQ ID NO: 1278050
ugugugacaauguuggaac

SEQ ID NO: 1278052 - RNA, 19 nt, Artificial Sequence
  Description of Artificial Sequence: Synthetic oligonucleotide
  Sense strand starting at position 3639 of SEQ ID NO: 1241511
uugccagaauccuuuagau

SEQ ID NO: 1278053 - RNA, 19 nt, Artificial Sequence
  Description of Artificial Sequence: Synthetic oligonucleotide
  Antisense strand to SEQ ID NO: 1278052
aucuaaaggauucuggcaa

SEQ ID NO: 1278054 - RNA, 19 nt, Artificial Sequence
  Description of Artificial Sequence: Synthetic oligonucleotide
  Sense strand starting at position 3641 of SEQ ID NO: 1241511
gccagaauccuuuagauau

SEQ ID NO: 1278055 - RNA, 19 nt, Artificial Sequence
  Description of Artificial Sequence: Synthetic oligonucleotide
  Antisense strand to SEQ ID NO: 1278054
auaucuaaaggauucuggc

SEQ ID NO: 1278056 - RNA, 19 nt, Artificial Sequence
  Description of Artificial Sequence: Synthetic oligonucleotide
  Sense strand starting at position 3764 of SEQ ID NO: 1241511
auuagugucucuucuauuu

SEQ ID NO: 1278057 - RNA, 19 nt, Artificial Sequence
  Description of Artificial Sequence: Synthetic oligonucleotide
  Antisense strand to SEQ ID NO: 1278056
aaauagaagagacacuaau

SEQ ID NO: 1278058 - RNA, 19 nt, Artificial Sequence
  Description of Artificial Sequence: Synthetic oligonucleotide
  Sense strand starting at position 469 of SEQ ID NO: 1241512
auguauugacucugaggag

SEQ ID NO: 1278059 - RNA, 19 nt, Artificial Sequence
  Description of Artificial Sequence: Synthetic oligonucleotide
  Antisense strand to SEQ ID NO: 1278058
cuccucagagucaauacau

SEQ ID NO: 1278060 - RNA, 19 nt, Artificial Sequence
  Description of Artificial Sequence: Synthetic oligonucleotide
  Sense strand starting at position 680 of SEQ ID NO: 1241512
ggagcauaccuguaguuga

SEQ ID NO: 1278061 - RNA, 19 nt, Artificial Sequence
  Description of Artificial Sequence: Synthetic oligonucleotide
  Antisense strand to SEQ ID NO: 1278060
ucaacuacagguaugcucc

SEQ ID NO: 1278062 - RNA, 19 nt, Artificial Sequence
  Description of Artificial Sequence: Synthetic oligonucleotide
  Sense strand starting at position 683 of SEQ ID NO: 1241512
gcauaccuguaguugaaca

SEQ ID NO: 1278063 - RNA, 19 nt, Artificial Sequence
  Description of Artificial Sequence: Synthetic oligonucleotide
  Antisense strand to SEQ ID NO: 1278062
uguucaacuacagguaugc

SEQ ID NO: 1278064 - RNA, 19 nt, Artificial Sequence
  Description of Artificial Sequence: Synthetic oligonucleotide
  Sense strand starting at position 697 of SEQ ID NO: 1241512
gaacaaaguuggguuuauu

SEQ ID NO: 1278065 - RNA, 19 nt, Artificial Sequence
  Description of Artificial Sequence: Synthetic oligonucleotide
  Antisense strand to SEQ ID NO: 1278064
aauaaacccaacuuuguuc

SEQ ID NO: 1278066 - RNA, 19 nt, Artificial Sequence
  Description of Artificial Sequence: Synthetic oligonucleotide
  Sense strand starting at position 775 of SEQ ID NO: 1241512
gggcaucucauguagaaau

SEQ ID NO: 1278067 - RNA, 19 nt, Artificial Sequence
  Description of Artificial Sequence: Synthetic oligonucleotide
  Antisense strand to SEQ ID NO: 1278066
auuucuacaugagaugccc

SEQ ID NO: 1278068 - RNA, 19 nt, Artificial Sequence
  Description of Artificial Sequence: Synthetic oligonucleotide
  Sense strand starting at position 777 of SEQ ID NO: 1241512
gcaucucauguagaaauuc

SEQ ID NO: 1278069 - RNA, 19 nt, Artificial Sequence
  Description of Artificial Sequence: Synthetic oligonucleotide
  Antisense strand to SEQ ID NO: 1278068
gaauuucuacaugagaugc

SEQ ID NO: 1278070 - RNA, 19 nt, Artificial Sequence
  Description of Artificial Sequence: Synthetic oligonucleotide
  Sense strand starting at position 864 of SEQ ID NO: 1241512
gguuuaaagagucagugcu

SEQ ID NO: 1278071 - RNA, 19 nt, Artificial Sequence
  Description of Artificial Sequence: Synthetic oligonucleotide
  Antisense strand to SEQ ID NO: 1278070
agcacugacucuuuaaacc

SEQ ID NO: 1278072 - RNA, 19 nt, Artificial Sequence
  Description of Artificial Sequence: Synthetic oligonucleotide
  Sense strand starting at position 871 of SEQ ID NO: 1241512
agagucagugcuggaaaca

SEQ ID NO: 1278073 - RNA, 19 nt, Artificial Sequence
  Description of Artificial Sequence: Synthetic oligonucleotide
  Antisense strand to SEQ ID NO: 1278072
uguuuccagcacugacucu

SEQ ID NO: 1278074 - RNA, 19 nt, Artificial Sequence
  Description of Artificial Sequence: Synthetic oligonucleotide
  Sense strand starting at position 872 of SEQ ID NO: 1241512
gagucagugcuggaaacau

SEQ ID NO: 1278075 - RNA, 19 nt, Artificial Sequence
  Description of Artificial Sequence: Synthetic oligonucleotide
  Antisense strand to SEQ ID NO: 1278074
auguuuccagcacugacuc

SEQ ID NO: 1278076 - RNA, 19 nt, Artificial Sequence
  Description of Artificial Sequence: Synthetic oligonucleotide
  Sense strand starting at position 982 of SEQ ID NO: 1241512
gaccuuguucuucguuaga

SEQ ID NO: 1278077 - RNA, 19 nt, Artificial Sequence
  Description of Artificial Sequence: Synthetic oligonucleotide
  Antisense strand to SEQ ID NO: 1278076
ucuaacgaagaacaagguc

SEQ ID NO: 1278078 - RNA, 19 nt, Artificial Sequence
  Description of Artificial Sequence: Synthetic oligonucleotide
  Sense strand starting at position 984 of SEQ ID NO: 1241512
ccuuguucuucguuagaac

SEQ ID NO: 1278079 - RNA, 19 nt, Artificial Sequence
  Description of Artificial Sequence: Synthetic oligonucleotide
  Antisense strand to SEQ ID NO: 1278078
guucuaacgaagaacaagg

SEQ ID NO: 1278080 - RNA, 19 nt, Artificial Sequence
  Description of Artificial Sequence: Synthetic oligonucleotide
  Sense strand starting at position 985 of SEQ ID NO: 1241512
cuuguucuucguuagaacu

SEQ ID NO: 1278081 - RNA, 19 nt, Artificial Sequence
  Description of Artificial Sequence: Synthetic oligonucleotide
  Antisense strand to SEQ ID NO: 1278080
aguucuaacgaagaacaag

SEQ ID NO: 1278082 - RNA, 19 nt, Artificial Sequence
  Description of Artificial Sequence: Synthetic oligonucleotide
  Sense strand starting at position 992 of SEQ ID NO: 1241512
uucguuagaacuuguaagu

SEQ ID NO: 1278083 - RNA, 19 nt, Artificial Sequence
  Description of Artificial Sequence: Synthetic oligonucleotide
  Antisense strand to SEQ ID NO: 1278082
acuuacaaguucuaacgaa

SEQ ID NO: 1278084 - RNA, 19 nt, Artificial Sequence
  Description of Artificial Sequence: Synthetic oligonucleotide
  Sense strand starting at position 1005 of SEQ ID NO: 1241512
guaaguauggcacaucuuu

SEQ ID NO: 1278085 - RNA, 19 nt, Artificial Sequence
  Description of Artificial Sequence: Synthetic oligonucleotide
  Antisense strand to SEQ ID NO: 1278084
aaagaugugccauacuuac

SEQ ID NO: 1278086 - RNA, 19 nt, Artificial Sequence
  Description of Artificial Sequence: Synthetic oligonucleotide
  Sense strand starting at position 1016 of SEQ ID NO: 1241512
acaucuuuggcucacgaau

SEQ ID NO: 1278087 - RNA, 19 nt, Artificial Sequence
  Description of Artificial Sequence: Synthetic oligonucleotide
  Antisense strand to SEQ ID NO: 1278086
auucgugagccaaagaugu

SEQ ID NO: 1278088 - RNA, 19 nt, Artificial Sequence
  Description of Artificial Sequence: Synthetic oligonucleotide
  Sense strand starting at position 1993 of SEQ ID NO: 1241512
gaaagacaugaguguaauc

SEQ ID NO: 1278089 - RNA, 19 nt, Artificial Sequence
  Description of Artificial Sequence: Synthetic oligonucleotide
  Antisense strand to SEQ ID NO: 1278088
gauuacacucaugucuuuc

SEQ ID NO: 1278090 - RNA, 19 nt, Artificial Sequence
  Description of Artificial Sequence: Synthetic oligonucleotide
  Sense strand starting at position 2014 of SEQ ID NO: 1241512
agucucuuggaguguaauc

SEQ ID NO: 1278091 - RNA, 19 nt, Artificial Sequence
  Description of Artificial Sequence: Synthetic oligonucleotide
  Antisense strand to SEQ ID NO: 1278090
gauuacacuccaagagacu

SEQ ID NO: 1278092 - RNA, 19 nt, Artificial Sequence
  Description of Artificial Sequence: Synthetic oligonucleotide
  Sense strand starting at position 2019 of SEQ ID NO: 1241512
cuuggaguguaauccaauu

SEQ ID NO: 1278093 - RNA, 19 nt, Artificial Sequence
  Description of Artificial Sequence: Synthetic oligonucleotide
  Antisense strand to SEQ ID NO: 1278092
aauuggauuacacuccaag

SEQ ID NO: 1278094 - RNA, 19 nt, Artificial Sequence
  Description of Artificial Sequence: Synthetic oligonucleotide
  Sense strand starting at position 2098 of SEQ ID NO: 1241512
augagauaaucugagacca

SEQ ID NO: 1278095 - RNA, 19 nt, Artificial Sequence
  Description of Artificial Sequence: Synthetic oligonucleotide
  Antisense strand to SEQ ID NO: 1278094
uggucucagauuaucucau

SEQ ID NO: 1278096 - RNA, 19 nt, Artificial Sequence
  Description of Artificial Sequence: Synthetic oligonucleotide
  Sense strand starting at position 2118 of SEQ ID NO: 1241512
gugggaauauguccuacca

SEQ ID NO: 1278097 - RNA, 19 nt, Artificial Sequence
  Description of Artificial Sequence: Synthetic oligonucleotide
  Antisense strand to SEQ ID NO: 1278096
ugguaggacauauucccac

SEQ ID NO: 1278098 - RNA, 19 nt, Artificial Sequence
  Description of Artificial Sequence: Synthetic oligonucleotide
  Sense strand starting at position 2120 of SEQ ID NO: 1241512
gggaauauguccuaccaaa

SEQ ID NO: 1278099 - RNA, 19 nt, Artificial Sequence
  Description of Artificial Sequence: Synthetic oligonucleotide
  Antisense strand to SEQ ID NO: 1278098
uuugguaggacauauuccc

SEQ ID NO: 1278100 - RNA, 19 nt, Artificial Sequence
  Description of Artificial Sequence: Synthetic oligonucleotide
  Sense strand starting at position 2152 of SEQ ID NO: 1241512
gugguucucuguguuauuu

SEQ ID NO: 1278101 - RNA, 19 nt, Artificial Sequence
  Description of Artificial Sequence: Synthetic oligonucleotide
  Antisense strand to SEQ ID NO: 1278100
aaauaacacagagaaccac

SEQ ID NO: 1278102 - RNA, 19 nt, Artificial Sequence
  Description of Artificial Sequence: Synthetic oligonucleotide
  Sense strand starting at position 2172 of SEQ ID NO: 1241512
gcuagaauccaaugcaauc

SEQ ID NO: 1278103 - RNA, 19 nt, Artificial Sequence
  Description of Artificial Sequence: Synthetic oligonucleotide
  Antisense strand to SEQ ID NO: 1278102
gauugcauuggauucuagc

SEQ ID NO: 1278104 - RNA, 19 nt, Artificial Sequence
  Description of Artificial Sequence: Synthetic oligonucleotide
  Sense strand starting at position 2564 of SEQ ID NO: 1241512
caggguauugucugagguu

SEQ ID NO: 1278105 - RNA, 19 nt, Artificial Sequence
  Description of Artificial Sequence: Synthetic oligonucleotide
  Antisense strand to SEQ ID NO: 1278104
aaccucagacaauacccug

SEQ ID NO: 1278106 - RNA, 19 nt, Artificial Sequence
  Description of Artificial Sequence: Synthetic oligonucleotide
  Sense strand starting at position 2669 of SEQ ID NO: 1241512
gcugacguggauuaguaaa

SEQ ID NO: 1278107 - RNA, 19 nt, Artificial Sequence
  Description of Artificial Sequence: Synthetic oligonucleotide
  Antisense strand to SEQ ID NO: 1278106
uuuacuaauccacgucagc

SEQ ID NO: 1278108 - RNA, 19 nt, Artificial Sequence
  Description of Artificial Sequence: Synthetic oligonucleotide
  Sense strand starting at position 2746 of SEQ ID NO: 1241512
ggaacugaaugucuaggua

SEQ ID NO: 1278109 - RNA, 19 nt, Artificial Sequence
  Description of Artificial Sequence: Synthetic oligonucleotide
  Antisense strand to SEQ ID NO: 1278108
uaccuagacauucaguucc

SEQ ID NO: 1278110 - RNA, 19 nt, Artificial Sequence
  Description of Artificial Sequence: Synthetic oligonucleotide
  Sense strand starting at position 2749 of SEQ ID NO: 1241512
acugaaugucuagguauaa

SEQ ID NO: 1278111 - RNA, 19 nt, Artificial Sequence
  Description of Artificial Sequence: Synthetic oligonucleotide
  Antisense strand to SEQ ID NO: 1278110
uuauaccuagacauucagu

SEQ ID NO: 1278112 - RNA, 19 nt, Artificial Sequence
  Description of Artificial Sequence: Synthetic oligonucleotide
  Sense strand starting at position 2750 of SEQ ID NO: 1241512
cugaaugucuagguauaaa

SEQ ID NO: 1278113 - RNA, 19 nt, Artificial Sequence
  Description of Artificial Sequence: Synthetic oligonucleotide
  Antisense strand to SEQ ID NO: 1278112
uuuauaccuagacauucag

SEQ ID NO: 1278114 - RNA, 19 nt, Artificial Sequence
  Description of Artificial Sequence: Synthetic oligonucleotide
  Sense strand starting at position 3096 of SEQ ID NO: 1241512
guccuuggugugcugagua

SEQ ID NO: 1278115 - RNA, 19 nt, Artificial Sequence
  Description of Artificial Sequence: Synthetic oligonucleotide
  Antisense strand to SEQ ID NO: 1278114
uacucagcacaccaaggac

SEQ ID NO: 1278116 - RNA, 19 nt, Artificial Sequence
  Description of Artificial Sequence: Synthetic oligonucleotide
  Sense strand starting at position 3278 of SEQ ID NO: 1241512
uuccuuggaugcuugagaa

SEQ ID NO: 1278117 - RNA, 19 nt, Artificial Sequence
  Description of Artificial Sequence: Synthetic oligonucleotide
  Antisense strand to SEQ ID NO: 1278116
uucucaagcauccaaggaa

SEQ ID NO: 1278118 - RNA, 19 nt, Artificial Sequence
  Description of Artificial Sequence: Synthetic oligonucleotide
  Sense strand starting at position 3375 of SEQ ID NO: 1241512
uagcacaaguuguuagaaa

SEQ ID NO: 1278119 - RNA, 19 nt, Artificial Sequence
  Description of Artificial Sequence: Synthetic oligonucleotide
  Antisense strand to SEQ ID NO: 1278118
uuucuaacaacuugugcua

SEQ ID NO: 1278120 - RNA, 19 nt, Artificial Sequence
  Description of Artificial Sequence: Synthetic oligonucleotide
  Sense strand starting at position 3427 of SEQ ID NO: 1241512
ugguuuagauguuugaaca

SEQ ID NO: 1278121 - RNA, 19 nt, Artificial Sequence
  Description of Artificial Sequence: Synthetic oligonucleotide
  Antisense strand to SEQ ID NO: 1278120
uguucaaacaucuaaacca

SEQ ID NO: 1278122 - RNA, 19 nt, Artificial Sequence
  Description of Artificial Sequence: Synthetic oligonucleotide
  Sense strand starting at position 3428 of SEQ ID NO: 1241512
gguuuagauguuugaacaa

SEQ ID NO: 1278123 - RNA, 19 nt, Artificial Sequence
  Description of Artificial Sequence: Synthetic oligonucleotide
  Antisense strand to SEQ ID NO: 1278122
uuguucaaacaucuaaacc

SEQ ID NO: 1278124 - RNA, 19 nt, Artificial Sequence
  Description of Artificial Sequence: Synthetic oligonucleotide
  Sense strand starting at position 3458 of SEQ ID NO: 1241512
uugacugcugcauggagau

SEQ ID NO: 1278125 - RNA, 19 nt, Artificial Sequence
  Description of Artificial Sequence: Synthetic oligonucleotide
  Antisense strand to SEQ ID NO: 1278124
aucuccaugcagcagucaa

SEQ ID NO: 1278126 - RNA, 19 nt, Artificial Sequence
  Description of Artificial Sequence: Synthetic oligonucleotide
  Sense strand starting at position 3712 of SEQ ID NO: 1241512
cugcaauccuauguauuag

SEQ ID NO: 1278127 - RNA, 19 nt, Artificial Sequence
  Description of Artificial Sequence: Synthetic oligonucleotide
  Antisense strand to SEQ ID NO: 1278126
cuaauacauaggauugcag

SEQ ID NO: 1278128 - RNA, 19 nt, Artificial Sequence
  Description of Artificial Sequence: Synthetic oligonucleotide
  Sense strand starting at position 3841 of SEQ ID NO: 1241512
guguuuaaacaacaguaau

SEQ ID NO: 1278129 - RNA, 19 nt, Artificial Sequence
  Description of Artificial Sequence: Synthetic oligonucleotide
  Antisense strand to SEQ ID NO: 1278128
auuacuguuguuuaaacac

SEQ ID NO: 1278130 - RNA, 19 nt, Artificial Sequence
  Description of Artificial Sequence: Synthetic oligonucleotide
  Sense strand starting at position 3884 of SEQ ID NO: 1241512
ugugcugauuaagucuuaa

SEQ ID NO: 1278131 - RNA, 19 nt, Artificial Sequence
  Description of Artificial Sequence: Synthetic oligonucleotide
  Antisense strand to SEQ ID NO: 1278130
uuaagacuuaaucagcaca

SEQ ID NO: 1278132 - RNA, 19 nt, Artificial Sequence
  Description of Artificial Sequence: Synthetic oligonucleotide
  Sense strand starting at position 3929 of SEQ ID NO: 1241512
augucuuaugccuauaguu

SEQ ID NO: 1278133 - RNA, 19 nt, Artificial Sequence
  Description of Artificial Sequence: Synthetic oligonucleotide
  Antisense strand to SEQ ID NO: 1278132
aacuauaggcauaagacau

SEQ ID NO: 1278134 - RNA, 19 nt, Artificial Sequence
  Description of Artificial Sequence: Synthetic oligonucleotide
  Sense strand starting at position 3969 of SEQ ID NO: 1241512
guggguagaucgcugaagu

SEQ ID NO: 1278135 - RNA, 19 nt, Artificial Sequence
  Description of Artificial Sequence: Synthetic oligonucleotide
  Antisense strand to SEQ ID NO: 1278134
acuucagcgaucuacccac

SEQ ID NO: 1278136 - RNA, 19 nt, Artificial Sequence
  Description of Artificial Sequence: Synthetic oligonucleotide
  Sense strand starting at position 3970 of SEQ ID NO: 1241512
uggguagaucgcugaaguc

SEQ ID NO: 1278137 - RNA, 19 nt, Artificial Sequence
  Description of Artificial Sequence: Synthetic oligonucleotide
  Antisense strand to SEQ ID NO: 1278136
gacuucagcgaucuaccca

SEQ ID NO: 1278138 - RNA, 19 nt, Artificial Sequence
  Description of Artificial Sequence: Synthetic oligonucleotide
  Sense strand starting at position 400 of SEQ ID NO: 1241513
gcagucuugcucuaucaug

SEQ ID NO: 1278139 - RNA, 19 nt, Artificial Sequence
  Description of Artificial Sequence: Synthetic oligonucleotide
  Antisense strand to SEQ ID NO: 1278138
caugauagagcaagacugc

SEQ ID NO: 1278140 - RNA, 19 nt, Artificial Sequence
  Description of Artificial Sequence: Synthetic oligonucleotide
  Sense strand starting at position 715 of SEQ ID NO: 1241513
uugauuucuucugucagcu

SEQ ID NO: 1278141 - RNA, 19 nt, Artificial Sequence
  Description of Artificial Sequence: Synthetic oligonucleotide
  Antisense strand to SEQ ID NO: 1278140
agcugacagaagaaaucaa

SEQ ID NO: 1278142 - RNA, 19 nt, Artificial Sequence
  Description of Artificial Sequence: Synthetic oligonucleotide
  Sense strand starting at position 719 of SEQ ID NO: 1241513
uuucuucugucagcuaaga

SEQ ID NO: 1278143 - RNA, 19 nt, Artificial Sequence
  Description of Artificial Sequence: Synthetic oligonucleotide
  Antisense strand to SEQ ID NO: 1278142
ucuuagcugacagaagaaa

SEQ ID NO: 1278144 - RNA, 19 nt, Artificial Sequence
  Description of Artificial Sequence: Synthetic oligonucleotide
  Sense strand starting at position 813 of SEQ ID NO: 1241513
gaggccacauauguuuaaa

SEQ ID NO: 1278145 - RNA, 19 nt, Artificial Sequence
  Description of Artificial Sequence: Synthetic oligonucleotide
  Antisense strand to SEQ ID NO: 1278144
uuuaaacauauguggccuc

SEQ ID NO: 1278146 - RNA, 19 nt, Artificial Sequence
  Description of Artificial Sequence: Synthetic oligonucleotide
  Sense strand starting at position 836 of SEQ ID NO: 1241513
uuuauugagcauuggcauu

SEQ ID NO: 1278147 - RNA, 19 nt, Artificial Sequence
  Description of Artificial Sequence: Synthetic oligonucleotide
  Antisense strand to SEQ ID NO: 1278146
aaugccaaugcucaauaaa

SEQ ID NO: 1278148 - RNA, 19 nt, Artificial Sequence
  Description of Artificial Sequence: Synthetic oligonucleotide
  Sense strand starting at position 878 of SEQ ID NO: 1241513
cugcuaaggaacugugaaa

SEQ ID NO: 1278149 - RNA, 19 nt, Artificial Sequence
  Description of Artificial Sequence: Synthetic oligonucleotide
  Antisense strand to SEQ ID NO: 1278148
uuucacaguuccuuagcag

SEQ ID NO: 1278150 - RNA, 19 nt, Artificial Sequence
  Description of Artificial Sequence: Synthetic oligonucleotide
  Sense strand starting at position 893 of SEQ ID NO: 1241513
gaaagauaagucugucuac

SEQ ID NO: 1278151 - RNA, 19 nt, Artificial Sequence
  Description of Artificial Sequence: Synthetic oligonucleotide
  Antisense strand to SEQ ID NO: 1278150
guagacagacuuaucuuuc

SEQ ID NO: 1278152 - RNA, 19 nt, Artificial Sequence
  Description of Artificial Sequence: Synthetic oligonucleotide
  Sense strand starting at position 896 of SEQ ID NO: 1241513
agauaagucugucuaccug

SEQ ID NO: 1278153 - RNA, 19 nt, Artificial Sequence
  Description of Artificial Sequence: Synthetic oligonucleotide
  Antisense strand to SEQ ID NO: 1278152
cagguagacagacuuaucu

SEQ ID NO: 1278154 - RNA, 19 nt, Artificial Sequence
  Description of Artificial Sequence: Synthetic oligonucleotide
  Sense strand starting at position 922 of SEQ ID NO: 1241513
gccagaacauacuacugaa

SEQ ID NO: 1278155 - RNA, 19 nt, Artificial Sequence
  Description of Artificial Sequence: Synthetic oligonucleotide
  Antisense strand to SEQ ID NO: 1278154
uucaguaguauguucuggc

SEQ ID NO: 1278156 - RNA, 19 nt, Artificial Sequence
  Description of Artificial Sequence: Synthetic oligonucleotide
  Sense strand starting at position 937 of SEQ ID NO: 1241513
ugaagcuacucucuauagu

SEQ ID NO: 1278157 - RNA, 19 nt, Artificial Sequence
  Description of Artificial Sequence: Synthetic oligonucleotide
  Antisense strand to SEQ ID NO: 1278156
acuauagagaguagcuuca

SEQ ID NO: 1278158 - RNA, 19 nt, Artificial Sequence
  Description of Artificial Sequence: Synthetic oligonucleotide
  Sense strand starting at position 940 of SEQ ID NO: 1241513
agcuacucucuauaguuau

SEQ ID NO: 1278159 - RNA, 19 nt, Artificial Sequence
  Description of Artificial Sequence: Synthetic oligonucleotide
  Antisense strand to SEQ ID NO: 1278158
auaacuauagagaguagcu

SEQ ID NO: 1278160 - RNA, 19 nt, Artificial Sequence
  Description of Artificial Sequence: Synthetic oligonucleotide
  Sense strand starting at position 2014 of SEQ ID NO: 1241513
cuaacucaugcuggaugau

SEQ ID NO: 1278161 - RNA, 19 nt, Artificial Sequence
  Description of Artificial Sequence: Synthetic oligonucleotide
  Antisense strand to SEQ ID NO: 1278160
aucauccagcaugaguuag

SEQ ID NO: 1278162 - RNA, 19 nt, Artificial Sequence
  Description of Artificial Sequence: Synthetic oligonucleotide
  Sense strand starting at position 2017 of SEQ ID NO: 1241513
acucaugcuggaugaugua

SEQ ID NO: 1278163 - RNA, 19 nt, Artificial Sequence
  Description of Artificial Sequence: Synthetic oligonucleotide
  Antisense strand to SEQ ID NO: 1278162
uacaucauccagcaugagu

SEQ ID NO: 1278164 - RNA, 19 nt, Artificial Sequence
  Description of Artificial Sequence: Synthetic oligonucleotide
  Sense strand starting at position 2095 of SEQ ID NO: 1241513
ggagguauucuuuacccuu

SEQ ID NO: 1278165 - RNA, 19 nt, Artificial Sequence
  Description of Artificial Sequence: Synthetic oligonucleotide
  Antisense strand to SEQ ID NO: 1278164
aaggguaaagaauaccucc

SEQ ID NO: 1278166 - RNA, 19 nt, Artificial Sequence
  Description of Artificial Sequence: Synthetic oligonucleotide
  Sense strand starting at position 2209 of SEQ ID NO: 1241513
uuuggagauugguuuggaa

SEQ ID NO: 1278167 - RNA, 19 nt, Artificial Sequence
  Description of Artificial Sequence: Synthetic oligonucleotide
  Antisense strand to SEQ ID NO: 1278166
uuccaaaccaaucuccaaa

SEQ ID NO: 1278168 - RNA, 19 nt, Artificial Sequence
  Description of Artificial Sequence: Synthetic oligonucleotide
  Sense strand starting at position 2211 of SEQ ID NO: 1241513
uggagauugguuuggaaca

SEQ ID NO: 1278169 - RNA, 19 nt, Artificial Sequence
  Description of Artificial Sequence: Synthetic oligonucleotide
  Antisense strand to SEQ ID NO: 1278168
uguuccaaaccaaucucca

SEQ ID NO: 1278170 - RNA, 19 nt, Artificial Sequence
  Description of Artificial Sequence: Synthetic oligonucleotide
  Sense strand starting at position 2213 of SEQ ID NO: 1241513
gagauugguuuggaacaaa

SEQ ID NO: 1278171 - RNA, 19 nt, Artificial Sequence
  Description of Artificial Sequence: Synthetic oligonucleotide
  Antisense strand to SEQ ID NO: 1278170
uuuguuccaaaccaaucuc

SEQ ID NO: 1278172 - RNA, 19 nt, Artificial Sequence
  Description of Artificial Sequence: Synthetic oligonucleotide
  Sense strand starting at position 2259 of SEQ ID NO: 1241513
cccugagucucaguaaugu

SEQ ID NO: 1278173 - RNA, 19 nt, Artificial Sequence
  Description of Artificial Sequence: Synthetic oligonucleotide
  Antisense strand to SEQ ID NO: 1278172
acauuacugagacucaggg

SEQ ID NO: 1278174 - RNA, 19 nt, Artificial Sequence
  Description of Artificial Sequence: Synthetic oligonucleotide
  Sense strand starting at position 2411 of SEQ ID NO: 1241513
uucuuagagccucauaugu

SEQ ID NO: 1278175 - RNA, 19 nt, Artificial Sequence
  Description of Artificial Sequence: Synthetic oligonucleotide
  Antisense strand to SEQ ID NO: 1278174
acauaugaggcucuaagaa

SEQ ID NO: 1278176 - RNA, 19 nt, Artificial Sequence
  Description of Artificial Sequence: Synthetic oligonucleotide
  Sense strand starting at position 2539 of SEQ ID NO: 1241513
gucugaaagcuacaaaucu

SEQ ID NO: 1278177 - RNA, 19 nt, Artificial Sequence
  Description of Artificial Sequence: Synthetic oligonucleotide
  Antisense strand to SEQ ID NO: 1278176
agauuuguagcuuucagac

SEQ ID NO: 1278178 - RNA, 19 nt, Artificial Sequence
  Description of Artificial Sequence: Synthetic oligonucleotide
  Sense strand starting at position 2632 of SEQ ID NO: 1241513
agcucuaguucucucaaag

SEQ ID NO: 1278179 - RNA, 19 nt, Artificial Sequence
  Description of Artificial Sequence: Synthetic oligonucleotide
  Antisense strand to SEQ ID NO: 1278178
cuuugagagaacuagagcu

SEQ ID NO: 1278180 - RNA, 19 nt, Artificial Sequence
  Description of Artificial Sequence: Synthetic oligonucleotide
  Sense strand starting at position 2653 of SEQ ID NO: 1241513
cuucuuuauggugagcaaa

SEQ ID NO: 1278181 - RNA, 19 nt, Artificial Sequence
  Description of Artificial Sequence: Synthetic oligonucleotide
  Antisense strand to SEQ ID NO: 1278180
uuugcucaccauaaagaag

SEQ ID NO: 1278182 - RNA, 19 nt, Artificial Sequence
  Description of Artificial Sequence: Synthetic oligonucleotide
  Sense strand starting at position 2655 of SEQ ID NO: 1241513
ucuuuauggugagcaaacu

SEQ ID NO: 1278183 - RNA, 19 nt, Artificial Sequence
  Description of Artificial Sequence: Synthetic oligonucleotide
  Antisense strand to SEQ ID NO: 1278182
aguuugcucaccauaaaga

SEQ ID NO: 1278184 - RNA, 19 nt, Artificial Sequence
  Description of Artificial Sequence: Synthetic oligonucleotide
  Sense strand starting at position 2656 of SEQ ID NO: 1241513
cuuuauggugagcaaacuu

SEQ ID NO: 1278185 - RNA, 19 nt, Artificial Sequence
  Description of Artificial Sequence: Synthetic oligonucleotide
  Antisense strand to SEQ ID NO: 1278184
aaguuugcucaccauaaag

SEQ ID NO: 1278186 - RNA, 19 nt, Artificial Sequence
  Description of Artificial Sequence: Synthetic oligonucleotide
  Sense strand starting at position 2723 of SEQ ID NO: 1241513
gcagguaaacuuugacuuu

SEQ ID NO: 1278187 - RNA, 19 nt, Artificial Sequence
  Description of Artificial Sequence: Synthetic oligonucleotide
  Antisense strand to SEQ ID NO: 1278186
aaagucaaaguuuaccugc

SEQ ID NO: 1278188 - RNA, 19 nt, Artificial Sequence
  Description of Artificial Sequence: Synthetic oligonucleotide
  Sense strand starting at position 2726 of SEQ ID NO: 1241513
gguaaacuuugacuuuguu

SEQ ID NO: 1278189 - RNA, 19 nt, Artificial Sequence
  Description of Artificial Sequence: Synthetic oligonucleotide
  Antisense strand to SEQ ID NO: 1278188
aacaaagucaaaguuuacc

SEQ ID NO: 1278190 - RNA, 19 nt, Artificial Sequence
  Description of Artificial Sequence: Synthetic oligonucleotide
  Sense strand starting at position 2733 of SEQ ID NO: 1241513
uuugacuuuguugaaacua

SEQ ID NO: 1278191 - RNA, 19 nt, Artificial Sequence
  Description of Artificial Sequence: Synthetic oligonucleotide
  Antisense strand to SEQ ID NO: 1278190
uaguuucaacaaagucaaa

SEQ ID NO: 1278192 - RNA, 19 nt, Artificial Sequence
  Description of Artificial Sequence: Synthetic oligonucleotide
  Sense strand starting at position 2817 of SEQ ID NO: 1241513
uguuaugucccuuaccuau

SEQ ID NO: 1278193 - RNA, 19 nt, Artificial Sequence
  Description of Artificial Sequence: Synthetic oligonucleotide
  Antisense strand to SEQ ID NO: 1278192
auagguaagggacauaaca

SEQ ID NO: 1278194 - RNA, 19 nt, Artificial Sequence
  Description of Artificial Sequence: Synthetic oligonucleotide
  Sense strand starting at position 2830 of SEQ ID NO: 1241513
accuaugacuucuuuggca

SEQ ID NO: 1278195 - RNA, 19 nt, Artificial Sequence
  Description of Artificial Sequence: Synthetic oligonucleotide
  Antisense strand to SEQ ID NO: 1278194
ugccaaagaagucauaggu

SEQ ID NO: 1278196 - RNA, 19 nt, Artificial Sequence
  Description of Artificial Sequence: Synthetic oligonucleotide
  Sense strand starting at position 2892 of SEQ ID NO: 1241513
uguacuauucuacaucaug

SEQ ID NO: 1278197 - RNA, 19 nt, Artificial Sequence
  Description of Artificial Sequence: Synthetic oligonucleotide
  Antisense strand to SEQ ID NO: 1278196
caugauguagaauaguaca

SEQ ID NO: 1278198 - RNA, 19 nt, Artificial Sequence
  Description of Artificial Sequence: Synthetic oligonucleotide
  Sense strand starting at position 2926 of SEQ ID NO: 1241513
gagcuugcuguuggguaaa

SEQ ID NO: 1278199 - RNA, 19 nt, Artificial Sequence
  Description of Artificial Sequence: Synthetic oligonucleotide
  Antisense strand to SEQ ID NO: 1278198
uuuacccaacagcaagcuc

SEQ ID NO: 1278200 - RNA, 19 nt, Artificial Sequence
  Description of Artificial Sequence: Synthetic oligonucleotide
  Sense strand starting at position 2929 of SEQ ID NO: 1241513
cuugcuguuggguaaauca

SEQ ID NO: 1278201 - RNA, 19 nt, Artificial Sequence
  Description of Artificial Sequence: Synthetic oligonucleotide
  Antisense strand to SEQ ID NO: 1278200
ugauuuacccaacagcaag

SEQ ID NO: 1278202 - RNA, 19 nt, Artificial Sequence
  Description of Artificial Sequence: Synthetic oligonucleotide
  Sense strand starting at position 2957 of SEQ ID NO: 1241513
guaauaaagccaugugccu

SEQ ID NO: 1278203 - RNA, 19 nt, Artificial Sequence
  Description of Artificial Sequence: Synthetic oligonucleotide
  Antisense strand to SEQ ID NO: 1278202
aggcacauggcuuuauuac

SEQ ID NO: 1278204 - RNA, 19 nt, Artificial Sequence
  Description of Artificial Sequence: Synthetic oligonucleotide
  Sense strand starting at position 3184 of SEQ ID NO: 1241513
ggcuuauuucuguguccuc

SEQ ID NO: 1278205 - RNA, 19 nt, Artificial Sequence
  Description of Artificial Sequence: Synthetic oligonucleotide
  Antisense strand to SEQ ID NO: 1278204
gaggacacagaaauaagcc

SEQ ID NO: 1278206 - RNA, 19 nt, Artificial Sequence
  Description of Artificial Sequence: Synthetic oligonucleotide
  Sense strand starting at position 3185 of SEQ ID NO: 1241513
gcuuauuucuguguccuca

SEQ ID NO: 1278207 - RNA, 19 nt, Artificial Sequence
  Description of Artificial Sequence: Synthetic oligonucleotide
  Antisense strand to SEQ ID NO: 1278206
ugaggacacagaaauaagc

SEQ ID NO: 1278208 - RNA, 19 nt, Artificial Sequence
  Description of Artificial Sequence: Synthetic oligonucleotide
  Sense strand starting at position 3235 of SEQ ID NO: 1241513
uggguaagccacuaucaau

SEQ ID NO: 1278209 - RNA, 19 nt, Artificial Sequence
  Description of Artificial Sequence: Synthetic oligonucleotide
  Antisense strand to SEQ ID NO: 1278208
auugauaguggcuuaccca

SEQ ID NO: 1278210 - RNA, 19 nt, Artificial Sequence
  Description of Artificial Sequence: Synthetic oligonucleotide
  Sense strand starting at position 3301 of SEQ ID NO: 1241513
guauuauuagcgucacugu

SEQ ID NO: 1278211 - RNA, 19 nt, Artificial Sequence
  Description of Artificial Sequence: Synthetic oligonucleotide
  Antisense strand to SEQ ID NO: 1278210
acagugacgcuaauaauac

SEQ ID NO: 1278212 - RNA, 19 nt, Artificial Sequence
  Description of Artificial Sequence: Synthetic oligonucleotide
  Sense strand starting at position 3302 of SEQ ID NO: 1241513
uauuauuagcgucacuguu

SEQ ID NO: 1278213 - RNA, 19 nt, Artificial Sequence
  Description of Artificial Sequence: Synthetic oligonucleotide
  Antisense strand to SEQ ID NO: 1278212
aacagugacgcuaauaaua

SEQ ID NO: 1278214 - RNA, 19 nt, Artificial Sequence
  Description of Artificial Sequence: Synthetic oligonucleotide
  Sense strand starting at position 3304 of SEQ ID NO: 1241513
uuauuagcgucacuguuaa

SEQ ID NO: 1278215 - RNA, 19 nt, Artificial Sequence
  Description of Artificial Sequence: Synthetic oligonucleotide
  Antisense strand to SEQ ID NO: 1278214
uuaacagugacgcuaauaa

SEQ ID NO: 1278216 - RNA, 19 nt, Artificial Sequence
  Description of Artificial Sequence: Synthetic oligonucleotide
  Sense strand starting at position 3394 of SEQ ID NO: 1241513
uugaucaaaccuggagcaa

SEQ ID NO: 1278217 - RNA, 19 nt, Artificial Sequence
  Description of Artificial Sequence: Synthetic oligonucleotide
  Antisense strand to SEQ ID NO: 1278216
uugcuccagguuugaucaa

SEQ ID NO: 1278218 - RNA, 19 nt, Artificial Sequence
  Description of Artificial Sequence: Synthetic oligonucleotide
  Sense strand starting at position 41 of SEQ ID NO: 1241514
uaagaaauuugucauggau

SEQ ID NO: 1278219 - RNA, 19 nt, Artificial Sequence
  Description of Artificial Sequence: Synthetic oligonucleotide
  Antisense strand to SEQ ID NO: 1278218
auccaugacaaauuucuua

SEQ ID NO: 1278220 - RNA, 19 nt, Artificial Sequence
  Description of Artificial Sequence: Synthetic oligonucleotide
  Sense strand starting at position 43 of SEQ ID NO: 1241514
agaaauuugucauggaucc

SEQ ID NO: 1278221 - RNA, 19 nt, Artificial Sequence
  Description of Artificial Sequence: Synthetic oligonucleotide
  Antisense strand to SEQ ID NO: 1278220
ggauccaugacaaauuucu

SEQ ID NO: 1278222 - RNA, 19 nt, Artificial Sequence
  Description of Artificial Sequence: Synthetic oligonucleotide
  Sense strand starting at position 106 of SEQ ID NO: 1241514
cagcccaaugagugauagu

SEQ ID NO: 1278223 - RNA, 19 nt, Artificial Sequence
  Description of Artificial Sequence: Synthetic oligonucleotide
  Antisense strand to SEQ ID NO: 1278222
acuaucacucauugggcug

SEQ ID NO: 1278224 - RNA, 19 nt, Artificial Sequence
  Description of Artificial Sequence: Synthetic oligonucleotide
  Sense strand starting at position 107 of SEQ ID NO: 1241514
agcccaaugagugauagua

SEQ ID NO: 1278225 - RNA, 19 nt, Artificial Sequence
  Description of Artificial Sequence: Synthetic oligonucleotide
  Antisense strand to SEQ ID NO: 1278224
uacuaucacucauugggcu

SEQ ID NO: 1278226 - RNA, 19 nt, Artificial Sequence
  Description of Artificial Sequence: Synthetic oligonucleotide
  Sense strand starting at position 109 of SEQ ID NO: 1241514
cccaaugagugauaguagu

SEQ ID NO: 1278227 - RNA, 19 nt, Artificial Sequence
  Description of Artificial Sequence: Synthetic oligonucleotide
  Antisense strand to SEQ ID NO: 1278226
acuacuaucacucauuggg

SEQ ID NO: 1278228 - RNA, 19 nt, Artificial Sequence
  Description of Artificial Sequence: Synthetic oligonucleotide
  Sense strand starting at position 115 of SEQ ID NO: 1241514
gagugauaguaguuaauga

SEQ ID NO: 1278229 - RNA, 19 nt, Artificial Sequence
  Description of Artificial Sequence: Synthetic oligonucleotide
  Antisense strand to SEQ ID NO: 1278228
ucauuaacuacuaucacuc

SEQ ID NO: 1278230 - RNA, 19 nt, Artificial Sequence
  Description of Artificial Sequence: Synthetic oligonucleotide
  Sense strand starting at position 116 of SEQ ID NO: 1241514
agugauaguaguuaaugau

SEQ ID NO: 1278231 - RNA, 19 nt, Artificial Sequence
  Description of Artificial Sequence: Synthetic oligonucleotide
  Antisense strand to SEQ ID NO: 1278230
aucauuaacuacuaucacu

SEQ ID NO: 1278232 - RNA, 19 nt, Artificial Sequence
  Description of Artificial Sequence: Synthetic oligonucleotide
  Sense strand starting at position 119 of SEQ ID NO: 1241514
gauaguaguuaaugauuag

SEQ ID NO: 1278233 - RNA, 19 nt, Artificial Sequence
  Description of Artificial Sequence: Synthetic oligonucleotide
  Antisense strand to SEQ ID NO: 1278232
cuaaucauuaacuacuauc

SEQ ID NO: 1278234 - RNA, 19 nt, Artificial Sequence
  Description of Artificial Sequence: Synthetic oligonucleotide
  Sense strand starting at position 123 of SEQ ID NO: 1241514
guaguuaaugauuagcuga

SEQ ID NO: 1278235 - RNA, 19 nt, Artificial Sequence
  Description of Artificial Sequence: Synthetic oligonucleotide
  Antisense strand to SEQ ID NO: 1278234
ucagcuaaucauuaacuac

SEQ ID NO: 1278236 - RNA, 19 nt, Artificial Sequence
  Description of Artificial Sequence: Synthetic oligonucleotide
  Sense strand starting at position 125 of SEQ ID NO: 1241514
aguuaaugauuagcugaga

SEQ ID NO: 1278237 - RNA, 19 nt, Artificial Sequence
  Description of Artificial Sequence: Synthetic oligonucleotide
  Antisense strand to SEQ ID NO: 1278236
ucucagcuaaucauuaacu

SEQ ID NO: 1278238 - RNA, 19 nt, Artificial Sequence
  Description of Artificial Sequence: Synthetic oligonucleotide
  Sense strand starting at position 351 of SEQ ID NO: 1241514
gcgacagaguaauuaggaa

SEQ ID NO: 1278239 - RNA, 19 nt, Artificial Sequence
  Description of Artificial Sequence: Synthetic oligonucleotide
  Antisense strand to SEQ ID NO: 1278238
uuccuaauuacucugucgc

SEQ ID NO: 1278240 - RNA, 19 nt, Artificial Sequence
  Description of Artificial Sequence: Synthetic oligonucleotide
  Sense strand starting at position 415 of SEQ ID NO: 1241514
acuauucuuguggguguau

SEQ ID NO: 1278241 - RNA, 19 nt, Artificial Sequence
  Description of Artificial Sequence: Synthetic oligonucleotide
  Antisense strand to SEQ ID NO: 1278240
auacacccacaagaauagu

SEQ ID NO: 1278242 - RNA, 19 nt, Artificial Sequence
  Description of Artificial Sequence: Synthetic oligonucleotide
  Sense strand starting at position 416 of SEQ ID NO: 1241514
cuauucuuguggguguaua

SEQ ID NO: 1278243 - RNA, 19 nt, Artificial Sequence
  Description of Artificial Sequence: Synthetic oligonucleotide
  Antisense strand to SEQ ID NO: 1278242
uauacacccacaagaauag

SEQ ID NO: 1278244 - RNA, 19 nt, Artificial Sequence
  Description of Artificial Sequence: Synthetic oligonucleotide
  Sense strand starting at position 656 of SEQ ID NO: 1241514
auguauaaaucacaggagu

SEQ ID NO: 1278245 - RNA, 19 nt, Artificial Sequence
  Description of Artificial Sequence: Synthetic oligonucleotide
  Antisense strand to SEQ ID NO: 1278244
acuccugugauuuauacau

SEQ ID NO: 1278246 - RNA, 19 nt, Artificial Sequence
  Description of Artificial Sequence: Synthetic oligonucleotide
  Sense strand starting at position 658 of SEQ ID NO: 1241514
guauaaaucacaggaguga

SEQ ID NO: 1278247 - RNA, 19 nt, Artificial Sequence
  Description of Artificial Sequence: Synthetic oligonucleotide
  Antisense strand to SEQ ID NO: 1278246
ucacuccugugauuuauac

SEQ ID NO: 1278248 - RNA, 19 nt, Artificial Sequence
  Description of Artificial Sequence: Synthetic oligonucleotide
  Sense strand starting at position 662 of SEQ ID NO: 1241514
aaaucacaggagugaugua

SEQ ID NO: 1278249 - RNA, 19 nt, Artificial Sequence
  Description of Artificial Sequence: Synthetic oligonucleotide
  Antisense strand to SEQ ID NO: 1278248
uacaucacuccugugauuu

SEQ ID NO: 1278250 - RNA, 19 nt, Artificial Sequence
  Description of Artificial Sequence: Synthetic oligonucleotide
  Sense strand starting at position 667 of SEQ ID NO: 1241514
acaggagugauguauagcu

SEQ ID NO: 1278251 - RNA, 19 nt, Artificial Sequence
  Description of Artificial Sequence: Synthetic oligonucleotide
  Antisense strand to SEQ ID NO: 1278250
agcuauacaucacuccugu

SEQ ID NO: 1278252 - RNA, 19 nt, Artificial Sequence
  Description of Artificial Sequence: Synthetic oligonucleotide
  Sense strand starting at position 915 of SEQ ID NO: 1241514
aguucuuaucuuuaaugag

SEQ ID NO: 1278253 - RNA, 19 nt, Artificial Sequence
  Description of Artificial Sequence: Synthetic oligonucleotide
  Antisense strand to SEQ ID NO: 1278252
cucauuaaagauaagaacu

SEQ ID NO: 1278254 - RNA, 19 nt, Artificial Sequence
  Description of Artificial Sequence: Synthetic oligonucleotide
  Sense strand starting at position 933 of SEQ ID NO: 1241514
gcagaaaucugaccugcuc

SEQ ID NO: 1278255 - RNA, 19 nt, Artificial Sequence
  Description of Artificial Sequence: Synthetic oligonucleotide
  Antisense strand to SEQ ID NO: 1278254
gagcaggucagauuucugc

SEQ ID NO: 1278256 - RNA, 19 nt, Artificial Sequence
  Description of Artificial Sequence: Synthetic oligonucleotide
  Sense strand starting at position 1019 of SEQ ID NO: 1241514
uaaggauguggcugcaauu

SEQ ID NO: 1278257 - RNA, 19 nt, Artificial Sequence
  Description of Artificial Sequence: Synthetic oligonucleotide
  Antisense strand to SEQ ID NO: 1278256
aauugcagccacauccuua

SEQ ID NO: 1278258 - RNA, 19 nt, Artificial Sequence
  Description of Artificial Sequence: Synthetic oligonucleotide
  Sense strand starting at position 1030 of SEQ ID NO: 1241514
cugcaauuaugucugcaau

SEQ ID NO: 1278259 - RNA, 19 nt, Artificial Sequence
  Description of Artificial Sequence: Synthetic oligonucleotide
  Antisense strand to SEQ ID NO: 1278258
auugcagacauaauugcag

SEQ ID NO: 1278260 - RNA, 19 nt, Artificial Sequence
  Description of Artificial Sequence: Synthetic oligonucleotide
  Sense strand starting at position 1031 of SEQ ID NO: 1241514
ugcaauuaugucugcaauc

SEQ ID NO: 1278261 - RNA, 19 nt, Artificial Sequence
  Description of Artificial Sequence: Synthetic oligonucleotide
  Antisense strand to SEQ ID NO: 1278260
gauugcagacauaauugca

SEQ ID NO: 1278262 - RNA, 19 nt, Artificial Sequence
  Description of Artificial Sequence: Synthetic oligonucleotide
  Sense strand starting at position 1049 of SEQ ID NO: 1241514
cccagugcccauuauguau

SEQ ID NO: 1278263 - RNA, 19 nt, Artificial Sequence
  Description of Artificial Sequence: Synthetic oligonucleotide
  Antisense strand to SEQ ID NO: 1278262
auacauaaugggcacuggg

SEQ ID NO: 1278264 - RNA, 19 nt, Artificial Sequence
  Description of Artificial Sequence: Synthetic oligonucleotide
  Sense strand starting at position 1055 of SEQ ID NO: 1241514
gcccauuauguauaugauu

SEQ ID NO: 1278265 - RNA, 19 nt, Artificial Sequence
  Description of Artificial Sequence: Synthetic oligonucleotide
  Antisense strand to SEQ ID NO: 1278264
aaucauauacauaaugggc

SEQ ID NO: 1278266 - RNA, 19 nt, Artificial Sequence
  Description of Artificial Sequence: Synthetic oligonucleotide
  Sense strand starting at position 2114 of SEQ ID NO: 1241514
gcauauagcuuaugaaauc

SEQ ID NO: 1278267 - RNA, 19 nt, Artificial Sequence
  Description of Artificial Sequence: Synthetic oligonucleotide
  Antisense strand to SEQ ID NO: 1278266
gauuucauaagcuauaugc

SEQ ID NO: 1278268 - RNA, 19 nt, Artificial Sequence
  Description of Artificial Sequence: Synthetic oligonucleotide
  Sense strand starting at position 2138 of SEQ ID NO: 1241514
aacaguaguuguuacagua

SEQ ID NO: 1278269 - RNA, 19 nt, Artificial Sequence
  Description of Artificial Sequence: Synthetic oligonucleotide
  Antisense strand to SEQ ID NO: 1278268
uacuguaacaacuacuguu

SEQ ID NO: 1278270 - RNA, 19 nt, Artificial Sequence
  Description of Artificial Sequence: Synthetic oligonucleotide
  Sense strand starting at position 2229 of SEQ ID NO: 1241514
uuguuucugccuugcagau

SEQ ID NO: 1278271 - RNA, 19 nt, Artificial Sequence
  Description of Artificial Sequence: Synthetic oligonucleotide
  Antisense strand to SEQ ID NO: 1278270
aucugcaaggcagaaacaa

SEQ ID NO: 1278272 - RNA, 19 nt, Artificial Sequence
  Description of Artificial Sequence: Synthetic oligonucleotide
  Sense strand starting at position 2235 of SEQ ID NO: 1241514
cugccuugcagaugagauc

SEQ ID NO: 1278273 - RNA, 19 nt, Artificial Sequence
  Description of Artificial Sequence: Synthetic oligonucleotide
  Antisense strand to SEQ ID NO: 1278272
gaucucaucugcaaggcag

SEQ ID NO: 1278274 - RNA, 19 nt, Artificial Sequence
  Description of Artificial Sequence: Synthetic oligonucleotide
  Sense strand starting at position 2244 of SEQ ID NO: 1241514
agaugagaucagugagccu

SEQ ID NO: 1278275 - RNA, 19 nt, Artificial Sequence
  Description of Artificial Sequence: Synthetic oligonucleotide
  Antisense strand to SEQ ID NO: 1278274
aggcucacugaucucaucu

SEQ ID NO: 1278276 - RNA, 19 nt, Artificial Sequence
  Description of Artificial Sequence: Synthetic oligonucleotide
  Sense strand starting at position 2247 of SEQ ID NO: 1241514
ugagaucagugagccuuua

SEQ ID NO: 1278277 - RNA, 19 nt, Artificial Sequence
  Description of Artificial Sequence: Synthetic oligonucleotide
  Antisense strand to SEQ ID NO: 1278276
uaaaggcucacugaucuca

SEQ ID NO: 1278278 - RNA, 19 nt, Artificial Sequence
  Description of Artificial Sequence: Synthetic oligonucleotide
  Sense strand starting at position 2297 of SEQ ID NO: 1241514
auuaguuauuuggcucuuu

SEQ ID NO: 1278279 - RNA, 19 nt, Artificial Sequence
  Description of Artificial Sequence: Synthetic oligonucleotide
  Antisense strand to SEQ ID NO: 1278278
aaagagccaaauaacuaau

SEQ ID NO: 1278280 - RNA, 19 nt, Artificial Sequence
  Description of Artificial Sequence: Synthetic oligonucleotide
  Sense strand starting at position 2772 of SEQ ID NO: 1241514
augagauaccauuggcuau

SEQ ID NO: 1278281 - RNA, 19 nt, Artificial Sequence
  Description of Artificial Sequence: Synthetic oligonucleotide
  Antisense strand to SEQ ID NO: 1278280
auagccaaugguaucucau

SEQ ID NO: 1278282 - RNA, 19 nt, Artificial Sequence
  Description of Artificial Sequence: Synthetic oligonucleotide
  Sense strand starting at position 2774 of SEQ ID NO: 1241514
gagauaccauuggcuauua

SEQ ID NO: 1278283 - RNA, 19 nt, Artificial Sequence
  Description of Artificial Sequence: Synthetic oligonucleotide
  Antisense strand to SEQ ID NO: 1278282
uaauagccaaugguaucuc

SEQ ID NO: 1278284 - RNA, 19 nt, Artificial Sequence
  Description of Artificial Sequence: Synthetic oligonucleotide
  Sense strand starting at position 2779 of SEQ ID NO: 1241514
accauuggcuauuaugaaa

SEQ ID NO: 1278285 - RNA, 19 nt, Artificial Sequence
  Description of Artificial Sequence: Synthetic oligonucleotide
  Antisense strand to SEQ ID NO: 1278284
uuucauaauagccaauggu

SEQ ID NO: 1278286 - RNA, 19 nt, Artificial Sequence
  Description of Artificial Sequence: Synthetic oligonucleotide
  Sense strand starting at position 3306 of SEQ ID NO: 1241514
gggcuuaauaccugacgau

SEQ ID NO: 1278287 - RNA, 19 nt, Artificial Sequence
  Description of Artificial Sequence: Synthetic oligonucleotide
  Antisense strand to SEQ ID NO: 1278286
aucgucagguauuaagccc

SEQ ID NO: 1278288 - RNA, 19 nt, Artificial Sequence
  Description of Artificial Sequence: Synthetic oligonucleotide
  Sense strand starting at position 3307 of SEQ ID NO: 1241514
ggcuuaauaccugacgauc

SEQ ID NO: 1278289 - RNA, 19 nt, Artificial Sequence
  Description of Artificial Sequence: Synthetic oligonucleotide
  Antisense strand to SEQ ID NO: 1278288
gaucgucagguauuaagcc

SEQ ID NO: 1278290 - RNA, 19 nt, Artificial Sequence
  Description of Artificial Sequence: Synthetic oligonucleotide
  Sense strand starting at position 3321 of SEQ ID NO: 1241514
cgaucugugcuguaaacca

SEQ ID NO: 1278291 - RNA, 19 nt, Artificial Sequence
  Description of Artificial Sequence: Synthetic oligonucleotide
  Antisense strand to SEQ ID NO: 1278290
ugguuuacagcacagaucg

SEQ ID NO: 1278292 - RNA, 19 nt, Artificial Sequence
  Description of Artificial Sequence: Synthetic oligonucleotide
  Sense strand starting at position 3431 of SEQ ID NO: 1241514
ucacuuugucuuugacuau

SEQ ID NO: 1278293 - RNA, 19 nt, Artificial Sequence
  Description of Artificial Sequence: Synthetic oligonucleotide
  Antisense strand to SEQ ID NO: 1278292
auagucaaagacaaaguga

SEQ ID NO: 1278294 - RNA, 19 nt, Artificial Sequence
  Description of Artificial Sequence: Synthetic oligonucleotide
  Sense strand starting at position 3523 of SEQ ID NO: 1241514
uaugguccuugaccuguaa

SEQ ID NO: 1278295 - RNA, 19 nt, Artificial Sequence
  Description of Artificial Sequence: Synthetic oligonucleotide
  Antisense strand to SEQ ID NO: 1278294
uuacaggucaaggaccaua

SEQ ID NO: 1278296 - RNA, 19 nt, Artificial Sequence
  Description of Artificial Sequence: Synthetic oligonucleotide
  Sense strand starting at position 3917 of SEQ ID NO: 1241514
ggacuuauccuuugcagca

SEQ ID NO: 1278297 - RNA, 19 nt, Artificial Sequence
  Description of Artificial Sequence: Synthetic oligonucleotide
  Antisense strand to SEQ ID NO: 1278296
ugcugcaaaggauaagucc

SEQ ID NO: 1278298 - RNA, 19 nt, Artificial Sequence
  Description of Artificial Sequence: Synthetic oligonucleotide
  Sense strand starting at position 70 of SEQ ID NO: 1241515
aaugauuugugucauucug

SEQ ID NO: 1278299 - RNA, 19 nt, Artificial Sequence
  Description of Artificial Sequence: Synthetic oligonucleotide
  Antisense strand to SEQ ID NO: 1278298
cagaaugacacaaaucauu

SEQ ID NO: 1278300 - RNA, 19 nt, Artificial Sequence
  Description of Artificial Sequence: Synthetic oligonucleotide
  Sense strand starting at position 72 of SEQ ID NO: 1241515
ugauuugugucauucugua

SEQ ID NO: 1278301 - RNA, 19 nt, Artificial Sequence
  Description of Artificial Sequence: Synthetic oligonucleotide
  Antisense strand to SEQ ID NO: 1278300
uacagaaugacacaaauca

SEQ ID NO: 1278302 - RNA, 19 nt, Artificial Sequence
  Description of Artificial Sequence: Synthetic oligonucleotide
  Sense strand starting at position 76 of SEQ ID NO: 1241515
uugugucauucuguacauu

SEQ ID NO: 1278303 - RNA, 19 nt, Artificial Sequence
  Description of Artificial Sequence: Synthetic oligonucleotide
  Antisense strand to SEQ ID NO: 1278302
aauguacagaaugacacaa

SEQ ID NO: 1278304 - RNA, 19 nt, Artificial Sequence
  Description of Artificial Sequence: Synthetic oligonucleotide
  Sense strand starting at position 87 of SEQ ID NO: 1241515
uguacauuuguaugcguua

SEQ ID NO: 1278305 - RNA, 19 nt, Artificial Sequence
  Description of Artificial Sequence: Synthetic oligonucleotide
  Antisense strand to SEQ ID NO: 1278304
uaacgcauacaaauguaca

SEQ ID NO: 1278306 - RNA, 19 nt, Artificial Sequence
  Description of Artificial Sequence: Synthetic oligonucleotide
  Sense strand starting at position 90 of SEQ ID NO: 1241515
acauuuguaugcguuagau

SEQ ID NO: 1278307 - RNA, 19 nt, Artificial Sequence
  Description of Artificial Sequence: Synthetic oligonucleotide
  Antisense strand to SEQ ID NO: 1278306
aucuaacgcauacaaaugu

SEQ ID NO: 1278308 - RNA, 19 nt, Artificial Sequence
  Description of Artificial Sequence: Synthetic oligonucleotide
  Sense strand starting at position 96 of SEQ ID NO: 1241515
guaugcguuagauacuuua

SEQ ID NO: 1278309 - RNA, 19 nt, Artificial Sequence
  Description of Artificial Sequence: Synthetic oligonucleotide
  Antisense strand to SEQ ID NO: 1278308
uaaaguaucuaacgcauac

SEQ ID NO: 1278310 - RNA, 19 nt, Artificial Sequence
  Description of Artificial Sequence: Synthetic oligonucleotide
  Sense strand starting at position 99 of SEQ ID NO: 1241515
ugcguuagauacuuuacuu

SEQ ID NO: 1278311 - RNA, 19 nt, Artificial Sequence
  Description of Artificial Sequence: Synthetic oligonucleotide
  Antisense strand to SEQ ID NO: 1278310
aaguaaaguaucuaacgca

SEQ ID NO: 1278312 - RNA, 19 nt, Artificial Sequence
  Description of Artificial Sequence: Synthetic oligonucleotide
  Sense strand starting at position 185 of SEQ ID NO: 1241515
cugugaauaauguggaauu

SEQ ID NO: 1278313 - RNA, 19 nt, Artificial Sequence
  Description of Artificial Sequence: Synthetic oligonucleotide
  Antisense strand to SEQ ID NO: 1278312
aauuccacauuauucacag

SEQ ID NO: 1278314 - RNA, 19 nt, Artificial Sequence
  Description of Artificial Sequence: Synthetic oligonucleotide
  Sense strand starting at position 542 of SEQ ID NO: 1241515
aggugaaauccauguugua

SEQ ID NO: 1278315 - RNA, 19 nt, Artificial Sequence
  Description of Artificial Sequence: Synthetic oligonucleotide
  Antisense strand to SEQ ID NO: 1278314
uacaacauggauuucaccu

SEQ ID NO: 1278316 - RNA, 19 nt, Artificial Sequence
  Description of Artificial Sequence: Synthetic oligonucleotide
  Sense strand starting at position 577 of SEQ ID NO: 1241515
cuacuaugucaauguaugu

SEQ ID NO: 1278317 - RNA, 19 nt, Artificial Sequence
  Description of Artificial Sequence: Synthetic oligonucleotide
  Antisense strand to SEQ ID NO: 1278316
acauacauugacauaguag

SEQ ID NO: 1278318 - RNA, 19 nt, Artificial Sequence
  Description of Artificial Sequence: Synthetic oligonucleotide
  Sense strand starting at position 581 of SEQ ID NO: 1241515
uaugucaauguauguugua

SEQ ID NO: 1278319 - RNA, 19 nt, Artificial Sequence
  Description of Artificial Sequence: Synthetic oligonucleotide
  Antisense strand to SEQ ID NO: 1278318
uacaacauacauugacaua

SEQ ID NO: 1278320 - RNA, 19 nt, Artificial Sequence
  Description of Artificial Sequence: Synthetic oligonucleotide
  Sense strand starting at position 582 of SEQ ID NO: 1241515
augucaauguauguuguaa

SEQ ID NO: 1278321 - RNA, 19 nt, Artificial Sequence
  Description of Artificial Sequence: Synthetic oligonucleotide
  Antisense strand to SEQ ID NO: 1278320
uuacaacauacauugacau

SEQ ID NO: 1278322 - RNA, 19 nt, Artificial Sequence
  Description of Artificial Sequence: Synthetic oligonucleotide
  Sense strand starting at position 616 of SEQ ID NO: 1241515
ggguaaagauaucagaaau

SEQ ID NO: 1278323 - RNA, 19 nt, Artificial Sequence
  Description of Artificial Sequence: Synthetic oligonucleotide
  Antisense strand to SEQ ID NO: 1278322
auuucugauaucuuuaccc

SEQ ID NO: 1278324 - RNA, 19 nt, Artificial Sequence
  Description of Artificial Sequence: Synthetic oligonucleotide
  Sense strand starting at position 663 of SEQ ID NO: 1241515
ggucuaaauuuaugaugua

SEQ ID NO: 1278325 - RNA, 19 nt, Artificial Sequence
  Description of Artificial Sequence: Synthetic oligonucleotide
  Antisense strand to SEQ ID NO: 1278324
uacaucauaaauuuagacc

SEQ ID NO: 1278326 - RNA, 19 nt, Artificial Sequence
  Description of Artificial Sequence: Synthetic oligonucleotide
  Sense strand starting at position 2093 of SEQ ID NO: 1241515
uguaaauacucaguugacu

SEQ ID NO: 1278327 - RNA, 19 nt, Artificial Sequence
  Description of Artificial Sequence: Synthetic oligonucleotide
  Antisense strand to SEQ ID NO: 1278326
agucaacugaguauuuaca

SEQ ID NO: 1278328 - RNA, 19 nt, Artificial Sequence
  Description of Artificial Sequence: Synthetic oligonucleotide
  Sense strand starting at position 2124 of SEQ ID NO: 1241515
ccaugacugcuaugaaagu

SEQ ID NO: 1278329 - RNA, 19 nt, Artificial Sequence
  Description of Artificial Sequence: Synthetic oligonucleotide
  Antisense strand to SEQ ID NO: 1278328
acuuucauagcagucaugg

SEQ ID NO: 1278330 - RNA, 19 nt, Artificial Sequence
  Description of Artificial Sequence: Synthetic oligonucleotide
  Sense strand starting at position 2131 of SEQ ID NO: 1241515
ugcuaugaaaguugaaaga

SEQ ID NO: 1278331 - RNA, 19 nt, Artificial Sequence
  Description of Artificial Sequence: Synthetic oligonucleotide
  Antisense strand to SEQ ID NO: 1278330
ucuuucaacuuucauagca

SEQ ID NO: 1278332 - RNA, 19 nt, Artificial Sequence
  Description of Artificial Sequence: Synthetic oligonucleotide
  Sense strand starting at position 2167 of SEQ ID NO: 1241515
agauaugaaucccugucau

SEQ ID NO: 1278333 - RNA, 19 nt, Artificial Sequence
  Description of Artificial Sequence: Synthetic oligonucleotide
  Antisense strand to SEQ ID NO: 1278332
augacagggauucauaucu

SEQ ID NO: 1278334 - RNA, 19 nt, Artificial Sequence
  Description of Artificial Sequence: Synthetic oligonucleotide
  Sense strand starting at position 2358 of SEQ ID NO: 1241515
guuugaaauuugcuagcca

SEQ ID NO: 1278335 - RNA, 19 nt, Artificial Sequence
  Description of Artificial Sequence: Synthetic oligonucleotide
  Antisense strand to SEQ ID NO: 1278334
uggcuagcaaauuucaaac

SEQ ID NO: 1278336 - RNA, 19 nt, Artificial Sequence
  Description of Artificial Sequence: Synthetic oligonucleotide
  Sense strand starting at position 2359 of SEQ ID NO: 1241515
uuugaaauuugcuagccaa

SEQ ID NO: 1278337 - RNA, 19 nt, Artificial Sequence
  Description of Artificial Sequence: Synthetic oligonucleotide
  Antisense strand to SEQ ID NO: 1278336
uuggcuagcaaauuucaaa

SEQ ID NO: 1278338 - RNA, 19 nt, Artificial Sequence
  Description of Artificial Sequence: Synthetic oligonucleotide
  Sense strand starting at position 2464 of SEQ ID NO: 1241515
aggaaacuguuaguugagu

SEQ ID NO: 1278339 - RNA, 19 nt, Artificial Sequence
  Description of Artificial Sequence: Synthetic oligonucleotide
  Antisense strand to SEQ ID NO: 1278338
acucaacuaacaguuuccu

SEQ ID NO: 1278340 - RNA, 19 nt, Artificial Sequence
  Description of Artificial Sequence: Synthetic oligonucleotide
  Sense strand starting at position 2489 of SEQ ID NO: 1241515
gcuggagagugugcuaaga

SEQ ID NO: 1278341 - RNA, 19 nt, Artificial Sequence
  Description of Artificial Sequence: Synthetic oligonucleotide
  Antisense strand to SEQ ID NO: 1278340
ucuuagcacacucuccagc

SEQ ID NO: 1278342 - RNA, 19 nt, Artificial Sequence
  Description of Artificial Sequence: Synthetic oligonucleotide
  Sense strand starting at position 2520 of SEQ ID NO: 1241515
uaaauuaacgaaugguaga

SEQ ID NO: 1278343 - RNA, 19 nt, Artificial Sequence
  Description of Artificial Sequence: Synthetic oligonucleotide
  Antisense strand to SEQ ID NO: 1278342
ucuaccauucguuaauuua

SEQ ID NO: 1278344 - RNA, 19 nt, Artificial Sequence
  Description of Artificial Sequence: Synthetic oligonucleotide
  Sense strand starting at position 2539 of SEQ ID NO: 1241515
ucaggagcaaaucgugaau

SEQ ID NO: 1278345 - RNA, 19 nt, Artificial Sequence
  Description of Artificial Sequence: Synthetic oligonucleotide
  Antisense strand to SEQ ID NO: 1278344
auucacgauuugcuccuga

SEQ ID NO: 1278346 - RNA, 19 nt, Artificial Sequence
  Description of Artificial Sequence: Synthetic oligonucleotide
  Sense strand starting at position 2542 of SEQ ID NO: 1241515
ggagcaaaucgugaaugca

SEQ ID NO: 1278347 - RNA, 19 nt, Artificial Sequence
  Description of Artificial Sequence: Synthetic oligonucleotide
  Antisense strand to SEQ ID NO: 1278346
ugcauucacgauuugcucc

SEQ ID NO: 1278348 - RNA, 19 nt, Artificial Sequence
  Description of Artificial Sequence: Synthetic oligonucleotide
  Sense strand starting at position 2545 of SEQ ID NO: 1241515
gcaaaucgugaaugcaauu

SEQ ID NO: 1278349 - RNA, 19 nt, Artificial Sequence
  Description of Artificial Sequence: Synthetic oligonucleotide
  Antisense strand to SEQ ID NO: 1278348
aauugcauucacgauuugc

SEQ ID NO: 1278350 - RNA, 19 nt, Artificial Sequence
  Description of Artificial Sequence: Synthetic oligonucleotide
  Sense strand starting at position 2594 of SEQ ID NO: 1241515
gagucauaauguucuugga

SEQ ID NO: 1278351 - RNA, 19 nt, Artificial Sequence
  Description of Artificial Sequence: Synthetic oligonucleotide
  Antisense strand to SEQ ID NO: 1278350
uccaagaacauuaugacuc

SEQ ID NO: 1278352 - RNA, 19 nt, Artificial Sequence
  Description of Artificial Sequence: Synthetic oligonucleotide
  Sense strand starting at position 2596 of SEQ ID NO: 1241515
gucauaauguucuuggaag

SEQ ID NO: 1278353 - RNA, 19 nt, Artificial Sequence
  Description of Artificial Sequence: Synthetic oligonucleotide
  Antisense strand to SEQ ID NO: 1278352
cuuccaagaacauuaugac

SEQ ID NO: 1278354 - RNA, 19 nt, Artificial Sequence
  Description of Artificial Sequence: Synthetic oligonucleotide
  Sense strand starting at position 2598 of SEQ ID NO: 1241515
cauaauguucuuggaagua

SEQ ID NO: 1278355 - RNA, 19 nt, Artificial Sequence
  Description of Artificial Sequence: Synthetic oligonucleotide
  Antisense strand to SEQ ID NO: 1278354
uacuuccaagaacauuaug

SEQ ID NO: 1278356 - RNA, 19 nt, Artificial Sequence
  Description of Artificial Sequence: Synthetic oligonucleotide
  Sense strand starting at position 2991 of SEQ ID NO: 1241515
ggaagagccaaugguuaca

SEQ ID NO: 1278357 - RNA, 19 nt, Artificial Sequence
  Description of Artificial Sequence: Synthetic oligonucleotide
  Antisense strand to SEQ ID NO: 1278356
uguaaccauuggcucuucc

SEQ ID NO: 1278358 - RNA, 19 nt, Artificial Sequence
  Description of Artificial Sequence: Synthetic oligonucleotide
  Sense strand starting at position 3219 of SEQ ID NO: 1241515
caggaaugguccuuuaaga

SEQ ID NO: 1278359 - RNA, 19 nt, Artificial Sequence
  Description of Artificial Sequence: Synthetic oligonucleotide
  Antisense strand to SEQ ID NO: 1278358
ucuuaaaggaccauuccug

SEQ ID NO: 1278360 - RNA, 19 nt, Artificial Sequence
  Description of Artificial Sequence: Synthetic oligonucleotide
  Sense strand starting at position 3408 of SEQ ID NO: 1241515
cuuagcucuguguauccaa

SEQ ID NO: 1278361 - RNA, 19 nt, Artificial Sequence
  Description of Artificial Sequence: Synthetic oligonucleotide
  Antisense strand to SEQ ID NO: 1278360
uuggauacacagagcuaag

SEQ ID NO: 1278362 - RNA, 19 nt, Artificial Sequence
  Description of Artificial Sequence: Synthetic oligonucleotide
  Sense strand starting at position 3415 of SEQ ID NO: 1241515
cuguguauccaacaguaca

SEQ ID NO: 1278363 - RNA, 19 nt, Artificial Sequence
  Description of Artificial Sequence: Synthetic oligonucleotide
  Antisense strand to SEQ ID NO: 1278362
uguacuguuggauacacag

SEQ ID NO: 1278364 - RNA, 19 nt, Artificial Sequence
  Description of Artificial Sequence: Synthetic oligonucleotide
  Sense strand starting at position 3496 of SEQ ID NO: 1241515
guuuguuagaaccagguua

SEQ ID NO: 1278365 - RNA, 19 nt, Artificial Sequence
  Description of Artificial Sequence: Synthetic oligonucleotide
  Antisense strand to SEQ ID NO: 1278364
uaaccugguucuaacaaac

SEQ ID NO: 1278366 - RNA, 19 nt, Artificial Sequence
  Description of Artificial Sequence: Synthetic oligonucleotide
  Sense strand starting at position 3498 of SEQ ID NO: 1241515
uuguuagaaccagguuauu

SEQ ID NO: 1278367 - RNA, 19 nt, Artificial Sequence
  Description of Artificial Sequence: Synthetic oligonucleotide
  Antisense strand to SEQ ID NO: 1278366
aauaaccugguucuaacaa

SEQ ID NO: 1278368 - RNA, 19 nt, Artificial Sequence
  Description of Artificial Sequence: Synthetic oligonucleotide
  Sense strand starting at position 3507 of SEQ ID NO: 1241515
ccagguuauuuagacauga

SEQ ID NO: 1278369 - RNA, 19 nt, Artificial Sequence
  Description of Artificial Sequence: Synthetic oligonucleotide
  Antisense strand to SEQ ID NO: 1278368
ucaugucuaaauaaccugg

SEQ ID NO: 1278370 - RNA, 19 nt, Artificial Sequence
  Description of Artificial Sequence: Synthetic oligonucleotide
  Sense strand starting at position 3641 of SEQ ID NO: 1241515
guuggagcacuauauccua

SEQ ID NO: 1278371 - RNA, 19 nt, Artificial Sequence
  Description of Artificial Sequence: Synthetic oligonucleotide
  Antisense strand to SEQ ID NO: 1278370
uaggauauagugcuccaac

SEQ ID NO: 1278372 - RNA, 19 nt, Artificial Sequence
  Description of Artificial Sequence: Synthetic oligonucleotide
  Sense strand starting at position 3668 of SEQ ID NO: 1241515
gggcuuuccguguuugcau

SEQ ID NO: 1278373 - RNA, 19 nt, Artificial Sequence
  Description of Artificial Sequence: Synthetic oligonucleotide
  Antisense strand to SEQ ID NO: 1278372
augcaaacacggaaagccc

SEQ ID NO: 1278374 - RNA, 19 nt, Artificial Sequence
  Description of Artificial Sequence: Synthetic oligonucleotide
  Sense strand starting at position 3679 of SEQ ID NO: 1241515
guuugcauugguuaugaag

SEQ ID NO: 1278375 - RNA, 19 nt, Artificial Sequence
  Description of Artificial Sequence: Synthetic oligonucleotide
  Antisense strand to SEQ ID NO: 1278374
cuucauaaccaaugcaaac

SEQ ID NO: 1278376 - RNA, 19 nt, Artificial Sequence
  Description of Artificial Sequence: Synthetic oligonucleotide
  Sense strand starting at position 3801 of SEQ ID NO: 1241515
ucaagaccugccuggcaau

SEQ ID NO: 1278377 - RNA, 19 nt, Artificial Sequence
  Description of Artificial Sequence: Synthetic oligonucleotide
  Antisense strand to SEQ ID NO: 1278376
auugccaggcaggucuuga

SEQ ID NO: 1278378 - RNA, 19 nt, Artificial Sequence
  Description of Artificial Sequence: Synthetic oligonucleotide
  Sense strand starting at position 55 of SEQ ID NO: 1241516
uccaaagaguguccuauau

SEQ ID NO: 1278379 - RNA, 19 nt, Artificial Sequence
  Description of Artificial Sequence: Synthetic oligonucleotide
  Antisense strand to SEQ ID NO: 1278378
auauaggacacucuuugga

SEQ ID NO: 1278380 - RNA, 19 nt, Artificial Sequence
  Description of Artificial Sequence: Synthetic oligonucleotide
  Sense strand starting at position 177 of SEQ ID NO: 1241516
ugugucaugcuucuaugca

SEQ ID NO: 1278381 - RNA, 19 nt, Artificial Sequence
  Description of Artificial Sequence: Synthetic oligonucleotide
  Antisense strand to SEQ ID NO: 1278380
ugcauagaagcaugacaca

SEQ ID NO: 1278382 - RNA, 19 nt, Artificial Sequence
  Description of Artificial Sequence: Synthetic oligonucleotide
  Sense strand starting at position 244 of SEQ ID NO: 1241516
agcugaugcuaacuauaag

SEQ ID NO: 1278383 - RNA, 19 nt, Artificial Sequence
  Description of Artificial Sequence: Synthetic oligonucleotide
  Antisense strand to SEQ ID NO: 1278382
cuuauaguuagcaucagcu

SEQ ID NO: 1278384 - RNA, 19 nt, Artificial Sequence
  Description of Artificial Sequence: Synthetic oligonucleotide
  Sense strand starting at position 250 of SEQ ID NO: 1241516
ugcuaacuauaaguggaaa

SEQ ID NO: 1278385 - RNA, 19 nt, Artificial Sequence
  Description of Artificial Sequence: Synthetic oligonucleotide
  Antisense strand to SEQ ID NO: 1278384
uuuccacuuauaguuagca

SEQ ID NO: 1278386 - RNA, 19 nt, Artificial Sequence
  Description of Artificial Sequence: Synthetic oligonucleotide
  Sense strand starting at position 363 of SEQ ID NO: 1241516
ccaauuuaguuugcucgau

SEQ ID NO: 1278387 - RNA, 19 nt, Artificial Sequence
  Description of Artificial Sequence: Synthetic oligonucleotide
  Antisense strand to SEQ ID NO: 1278386
aucgagcaaacuaaauugg

SEQ ID NO: 1278388 - RNA, 19 nt, Artificial Sequence
  Description of Artificial Sequence: Synthetic oligonucleotide
  Sense strand starting at position 365 of SEQ ID NO: 1241516
aauuuaguuugcucgaucu

SEQ ID NO: 1278389 - RNA, 19 nt, Artificial Sequence
  Description of Artificial Sequence: Synthetic oligonucleotide
  Antisense strand to SEQ ID NO: 1278388
agaucgagcaaacuaaauu

SEQ ID NO: 1278390 - RNA, 19 nt, Artificial Sequence
  Description of Artificial Sequence: Synthetic oligonucleotide
  Sense strand starting at position 466 of SEQ ID NO: 1241516
acacacuguguuuauggaa

SEQ ID NO: 1278391 - RNA, 19 nt, Artificial Sequence
  Description of Artificial Sequence: Synthetic oligonucleotide
  Antisense strand to SEQ ID NO: 1278390
uuccauaaacacagugugu

SEQ ID NO: 1278392 - RNA, 19 nt, Artificial Sequence
  Description of Artificial Sequence: Synthetic oligonucleotide
  Sense strand starting at position 548 of SEQ ID NO: 1241516
cuguaaggcacuuggauaa

SEQ ID NO: 1278393 - RNA, 19 nt, Artificial Sequence
  Description of Artificial Sequence: Synthetic oligonucleotide
  Antisense strand to SEQ ID NO: 1278392
uuauccaagugccuuacag

SEQ ID NO: 1278394 - RNA, 19 nt, Artificial Sequence
  Description of Artificial Sequence: Synthetic oligonucleotide
  Sense strand starting at position 560 of SEQ ID NO: 1241516
uggauaaauaaccgugaug

SEQ ID NO: 1278395 - RNA, 19 nt, Artificial Sequence
  Description of Artificial Sequence: Synthetic oligonucleotide
  Antisense strand to SEQ ID NO: 1278394
caucacgguuauuuaucca

SEQ ID NO: 1278396 - RNA, 19 nt, Artificial Sequence
  Description of Artificial Sequence: Synthetic oligonucleotide
  Sense strand starting at position 562 of SEQ ID NO: 1241516
gauaaauaaccgugaugag

SEQ ID NO: 1278397 - RNA, 19 nt, Artificial Sequence
  Description of Artificial Sequence: Synthetic oligonucleotide
  Antisense strand to SEQ ID NO: 1278396
cucaucacgguuauuuauc

SEQ ID NO: 1278398 - RNA, 19 nt, Artificial Sequence
  Description of Artificial Sequence: Synthetic oligonucleotide
  Sense strand starting at position 659 of SEQ ID NO: 1241516
gagguuuaagagcaugcua

SEQ ID NO: 1278399 - RNA, 19 nt, Artificial Sequence
  Description of Artificial Sequence: Synthetic oligonucleotide
  Antisense strand to SEQ ID NO: 1278398
uagcaugcucuuaaaccuc

SEQ ID NO: 1278400 - RNA, 19 nt, Artificial Sequence
  Description of Artificial Sequence: Synthetic oligonucleotide
  Sense strand starting at position 776 of SEQ ID NO: 1241516
ugauaaaggugggauuuaa

SEQ ID NO: 1278401 - RNA, 19 nt, Artificial Sequence
  Description of Artificial Sequence: Synthetic oligonucleotide
  Antisense strand to SEQ ID NO: 1278400
uuaaaucccaccuuuauca

SEQ ID NO: 1278402 - RNA, 19 nt, Artificial Sequence
  Description of Artificial Sequence: Synthetic oligonucleotide
  Sense strand starting at position 804 of SEQ ID NO: 1241516
agccaaacuguagauauua

SEQ ID NO: 1278403 - RNA, 19 nt, Artificial Sequence
  Description of Artificial Sequence: Synthetic oligonucleotide
  Antisense strand to SEQ ID NO: 1278402
uaauaucuacaguuuggcu

SEQ ID NO: 1278404 - RNA, 19 nt, Artificial Sequence
  Description of Artificial Sequence: Synthetic oligonucleotide
  Sense strand starting at position 814 of SEQ ID NO: 1241516
uagauauuauguguuugac

SEQ ID NO: 1278405 - RNA, 19 nt, Artificial Sequence
  Description of Artificial Sequence: Synthetic oligonucleotide
  Antisense strand to SEQ ID NO: 1278404
gucaaacacauaauaucua

SEQ ID NO: 1278406 - RNA, 19 nt, Artificial Sequence
  Description of Artificial Sequence: Synthetic oligonucleotide
  Sense strand starting at position 816 of SEQ ID NO: 1241516
gauauuauguguuugacca

SEQ ID NO: 1278407 - RNA, 19 nt, Artificial Sequence
  Description of Artificial Sequence: Synthetic oligonucleotide
  Antisense strand to SEQ ID NO: 1278406
uggucaaacacauaauauc

SEQ ID NO: 1278408 - RNA, 19 nt, Artificial Sequence
  Description of Artificial Sequence: Synthetic oligonucleotide
  Sense strand starting at position 820 of SEQ ID NO: 1241516
uuauguguuugaccauaaa

SEQ ID NO: 1278409 - RNA, 19 nt, Artificial Sequence
  Description of Artificial Sequence: Synthetic oligonucleotide
  Antisense strand to SEQ ID NO: 1278408
uuuauggucaaacacauaa

SEQ ID NO: 1278410 - RNA, 19 nt, Artificial Sequence
  Description of Artificial Sequence: Synthetic oligonucleotide
  Sense strand starting at position 1317 of SEQ ID NO: 1241516
acgguaccuaacugagaau

SEQ ID NO: 1278411 - RNA, 19 nt, Artificial Sequence
  Description of Artificial Sequence: Synthetic oligonucleotide
  Antisense strand to SEQ ID NO: 1278410
auucucaguuagguaccgu

SEQ ID NO: 1278412 - RNA, 19 nt, Artificial Sequence
  Description of Artificial Sequence: Synthetic oligonucleotide
  Sense strand starting at position 1436 of SEQ ID NO: 1241516
aggcaaguuuaaucacaag

SEQ ID NO: 1278413 - RNA, 19 nt, Artificial Sequence
  Description of Artificial Sequence: Synthetic oligonucleotide
  Antisense strand to SEQ ID NO: 1278412
cuugugauuaaacuugccu

SEQ ID NO: 1278414 - RNA, 19 nt, Artificial Sequence
  Description of Artificial Sequence: Synthetic oligonucleotide
  Sense strand starting at position 1525 of SEQ ID NO: 1241516
ugacuagaugagugcacaa

SEQ ID NO: 1278415 - RNA, 19 nt, Artificial Sequence
  Description of Artificial Sequence: Synthetic oligonucleotide
  Antisense strand to SEQ ID NO: 1278414
uugugcacucaucuaguca

SEQ ID NO: 1278416 - RNA, 19 nt, Artificial Sequence
  Description of Artificial Sequence: Synthetic oligonucleotide
  Sense strand starting at position 1590 of SEQ ID NO: 1241516
gcucaugauggucauguaa

SEQ ID NO: 1278417 - RNA, 19 nt, Artificial Sequence
  Description of Artificial Sequence: Synthetic oligonucleotide
  Antisense strand to SEQ ID NO: 1278416
uuacaugaccaucaugagc

SEQ ID NO: 1278418 - RNA, 19 nt, Artificial Sequence
  Description of Artificial Sequence: Synthetic oligonucleotide
  Sense strand starting at position 1716 of SEQ ID NO: 1241516
ccaccaugagauggucuua

SEQ ID NO: 1278419 - RNA, 19 nt, Artificial Sequence
  Description of Artificial Sequence: Synthetic oligonucleotide
  Antisense strand to SEQ ID NO: 1278418
uaagaccaucucauggugg

SEQ ID NO: 1278420 - RNA, 19 nt, Artificial Sequence
  Description of Artificial Sequence: Synthetic oligonucleotide
  Sense strand starting at position 1734 of SEQ ID NO: 1241516
acguucucggaggaaaucu

SEQ ID NO: 1278421 - RNA, 19 nt, Artificial Sequence
  Description of Artificial Sequence: Synthetic oligonucleotide
  Antisense strand to SEQ ID NO: 1278420
agauuuccuccgagaacgu

SEQ ID NO: 1278422 - RNA, 19 nt, Artificial Sequence
  Description of Artificial Sequence: Synthetic oligonucleotide
  Sense strand starting at position 1784 of SEQ ID NO: 1241516
ggaucauaucaaugcagga

SEQ ID NO: 1278423 - RNA, 19 nt, Artificial Sequence
  Description of Artificial Sequence: Synthetic oligonucleotide
  Antisense strand to SEQ ID NO: 1278422
uccugcauugauaugaucc

SEQ ID NO: 1278424 - RNA, 19 nt, Artificial Sequence
  Description of Artificial Sequence: Synthetic oligonucleotide
  Sense strand starting at position 1802 of SEQ ID NO: 1241516
agagguugcuaagcagaaa

SEQ ID NO: 1278425 - RNA, 19 nt, Artificial Sequence
  Description of Artificial Sequence: Synthetic oligonucleotide
  Antisense strand to SEQ ID NO: 1278424
uuucugcuuagcaaccucu

SEQ ID NO: 1278426 - RNA, 19 nt, Artificial Sequence
  Description of Artificial Sequence: Synthetic oligonucleotide
  Sense strand starting at position 1831 of SEQ ID NO: 1241516
gugugaaggagcgaaucaa

SEQ ID NO: 1278427 - RNA, 19 nt, Artificial Sequence
  Description of Artificial Sequence: Synthetic oligonucleotide
  Antisense strand to SEQ ID NO: 1278426
uugauucgcuccuucacac

SEQ ID NO: 1278428 - RNA, 19 nt, Artificial Sequence
  Description of Artificial Sequence: Synthetic oligonucleotide
  Sense strand starting at position 1867 of SEQ ID NO: 1241516
augagcagguuuccuaaca

SEQ ID NO: 1278429 - RNA, 19 nt, Artificial Sequence
  Description of Artificial Sequence: Synthetic oligonucleotide
  Antisense strand to SEQ ID NO: 1278428
uguuaggaaaccugcucau

SEQ ID NO: 1278430 - RNA, 19 nt, Artificial Sequence
  Description of Artificial Sequence: Synthetic oligonucleotide
  Sense strand starting at position 2190 of SEQ ID NO: 1241516
cccaaauagucaguagaau

SEQ ID NO: 1278431 - RNA, 19 nt, Artificial Sequence
  Description of Artificial Sequence: Synthetic oligonucleotide
  Antisense strand to SEQ ID NO: 1278430
auucuacugacuauuuggg

SEQ ID NO: 1278432 - RNA, 19 nt, Artificial Sequence
  Description of Artificial Sequence: Synthetic oligonucleotide
  Sense strand starting at position 2620 of SEQ ID NO: 1241516
gcaugaaucccucacagau

SEQ ID NO: 1278433 - RNA, 19 nt, Artificial Sequence
  Description of Artificial Sequence: Synthetic oligonucleotide
  Antisense strand to SEQ ID NO: 1278432
aucugugagggauucaugc

SEQ ID NO: 1278434 - RNA, 19 nt, Artificial Sequence
  Description of Artificial Sequence: Synthetic oligonucleotide
  Sense strand starting at position 2668 of SEQ ID NO: 1241516
ugaagugucaaguauaugu

SEQ ID NO: 1278435 - RNA, 19 nt, Artificial Sequence
  Description of Artificial Sequence: Synthetic oligonucleotide
  Antisense strand to SEQ ID NO: 1278434
acauauacuugacacuuca

SEQ ID NO: 1278436 - RNA, 19 nt, Artificial Sequence
  Description of Artificial Sequence: Synthetic oligonucleotide
  Sense strand starting at position 2670 of SEQ ID NO: 1241516
aagugucaaguauauguau

SEQ ID NO: 1278437 - RNA, 19 nt, Artificial Sequence
  Description of Artificial Sequence: Synthetic oligonucleotide
  Antisense strand to SEQ ID NO: 1278436
auacauauacuugacacuu

SEQ ID NO: 1278438 - RNA, 19 nt, Artificial Sequence
  Description of Artificial Sequence: Synthetic oligonucleotide
  Sense strand starting at position 2791 of SEQ ID NO: 1241516
uccucuagaugguuagaca

SEQ ID NO: 1278439 - RNA, 19 nt, Artificial Sequence
  Description of Artificial Sequence: Synthetic oligonucleotide
  Antisense strand to SEQ ID NO: 1278438
ugucuaaccaucuagagga

SEQ ID NO: 1278440 - RNA, 19 nt, Artificial Sequence
  Description of Artificial Sequence: Synthetic oligonucleotide
  Sense strand starting at position 2802 of SEQ ID NO: 1241516
guuagacaauguguacaaa

SEQ ID NO: 1278441 - RNA, 19 nt, Artificial Sequence
  Description of Artificial Sequence: Synthetic oligonucleotide
  Antisense strand to SEQ ID NO: 1278440
uuuguacacauugucuaac

SEQ ID NO: 1278442 - RNA, 19 nt, Artificial Sequence
  Description of Artificial Sequence: Synthetic oligonucleotide
  Sense strand starting at position 2829 of SEQ ID NO: 1241516
agucaaauguaauugacua

SEQ ID NO: 1278443 - RNA, 19 nt, Artificial Sequence
  Description of Artificial Sequence: Synthetic oligonucleotide
  Antisense strand to SEQ ID NO: 1278442
uagucaauuacauuugacu

SEQ ID NO: 1278444 - RNA, 19 nt, Artificial Sequence
  Description of Artificial Sequence: Synthetic oligonucleotide
  Sense strand starting at position 2945 of SEQ ID NO: 1241516
augacuuagcuugauguaa

SEQ ID NO: 1278445 - RNA, 19 nt, Artificial Sequence
  Description of Artificial Sequence: Synthetic oligonucleotide
  Antisense strand to SEQ ID NO: 1278444
uuacaucaagcuaagucau

SEQ ID NO: 1278446 - RNA, 19 nt, Artificial Sequence
  Description of Artificial Sequence: Synthetic oligonucleotide
  Sense strand starting at position 3627 of SEQ ID NO: 1241516
ccuccacaucuggaauagu

SEQ ID NO: 1278447 - RNA, 19 nt, Artificial Sequence
  Description of Artificial Sequence: Synthetic oligonucleotide
  Antisense strand to SEQ ID NO: 1278446
acuauuccagauguggagg

SEQ ID NO: 1278448 - RNA, 19 nt, Artificial Sequence
  Description of Artificial Sequence: Synthetic oligonucleotide
  Sense strand starting at position 3635 of SEQ ID NO: 1241516
ucuggaauagugcauauca

SEQ ID NO: 1278449 - RNA, 19 nt, Artificial Sequence
  Description of Artificial Sequence: Synthetic oligonucleotide
  Antisense strand to SEQ ID NO: 1278448
ugauaugcacuauuccaga

SEQ ID NO: 1278450 - RNA, 19 nt, Artificial Sequence
  Description of Artificial Sequence: Synthetic oligonucleotide
  Sense strand starting at position 3660 of SEQ ID NO: 1241516
cuaagugaauaucuguuga

SEQ ID NO: 1278451 - RNA, 19 nt, Artificial Sequence
  Description of Artificial Sequence: Synthetic oligonucleotide
  Antisense strand to SEQ ID NO: 1278450
ucaacagauauucacuuag

SEQ ID NO: 1278452 - RNA, 19 nt, Artificial Sequence
  Description of Artificial Sequence: Synthetic oligonucleotide
  Sense strand starting at position 3662 of SEQ ID NO: 1241516
aagugaauaucuguugaau

SEQ ID NO: 1278453 - RNA, 19 nt, Artificial Sequence
  Description of Artificial Sequence: Synthetic oligonucleotide
  Antisense strand to SEQ ID NO: 1278452
auucaacagauauucacuu

SEQ ID NO: 1278454 - RNA, 19 nt, Artificial Sequence
  Description of Artificial Sequence: Synthetic oligonucleotide
  Sense strand starting at position 3711 of SEQ ID NO: 1241516
uagauuaagucagcugacu

SEQ ID NO: 1278455 - RNA, 19 nt, Artificial Sequence
  Description of Artificial Sequence: Synthetic oligonucleotide
  Antisense strand to SEQ ID NO: 1278454
agucagcugacuuaaucua

SEQ ID NO: 1278456 - RNA, 19 nt, Artificial Sequence
  Description of Artificial Sequence: Synthetic oligonucleotide
  Sense strand starting at position 3784 of SEQ ID NO: 1241516
ugucaaauugaauguugaa

SEQ ID NO: 1278457 - RNA, 19 nt, Artificial Sequence
  Description of Artificial Sequence: Synthetic oligonucleotide
  Antisense strand to SEQ ID NO: 1278456
uucaacauucaauuugaca

SEQ ID NO: 1278458 - RNA, 19 nt, Artificial Sequence
  Description of Artificial Sequence: Synthetic oligonucleotide
  Sense strand starting at position 357 of SEQ ID NO: 1241517
aauauauguguggaguuga

SEQ ID NO: 1278459 - RNA, 19 nt, Artificial Sequence
  Description of Artificial Sequence: Synthetic oligonucleotide
  Antisense strand to SEQ ID NO: 1278458
ucaacuccacacauauauu

SEQ ID NO: 1278460 - RNA, 19 nt, Artificial Sequence
  Description of Artificial Sequence: Synthetic oligonucleotide
  Sense strand starting at position 362 of SEQ ID NO: 1241517
auguguggaguugaagaua

SEQ ID NO: 1278461 - RNA, 19 nt, Artificial Sequence
  Description of Artificial Sequence: Synthetic oligonucleotide
  Antisense strand to SEQ ID NO: 1278460
uaucuucaacuccacacau

SEQ ID NO: 1278462 - RNA, 19 nt, Artificial Sequence
  Description of Artificial Sequence: Synthetic oligonucleotide
  Sense strand starting at position 700 of SEQ ID NO: 1241517
cguuucucugaauaaauaa

SEQ ID NO: 1278463 - RNA, 19 nt, Artificial Sequence
  Description of Artificial Sequence: Synthetic oligonucleotide
  Antisense strand to SEQ ID NO: 1278462
uuauuuauucagagaaacg

SEQ ID NO: 1278464 - RNA, 19 nt, Artificial Sequence
  Description of Artificial Sequence: Synthetic oligonucleotide
  Sense strand starting at position 933 of SEQ ID NO: 1241517
acuguuucucuguaauaua

SEQ ID NO: 1278465 - RNA, 19 nt, Artificial Sequence
  Description of Artificial Sequence: Synthetic oligonucleotide
  Antisense strand to SEQ ID NO: 1278464
uauauuacagagaaacagu

SEQ ID NO: 1278466 - RNA, 19 nt, Artificial Sequence
  Description of Artificial Sequence: Synthetic oligonucleotide
  Sense strand starting at position 983 of SEQ ID NO: 1241517
gaaugaaaucuuugagcag

SEQ ID NO: 1278467 - RNA, 19 nt, Artificial Sequence
  Description of Artificial Sequence: Synthetic oligonucleotide
  Antisense strand to SEQ ID NO: 1278466
cugcucaaagauuucauuc

SEQ ID NO: 1278468 - RNA, 19 nt, Artificial Sequence
  Description of Artificial Sequence: Synthetic oligonucleotide
  Sense strand starting at position 986 of SEQ ID NO: 1241517
ugaaaucuuugagcagaau

SEQ ID NO: 1278469 - RNA, 19 nt, Artificial Sequence
  Description of Artificial Sequence: Synthetic oligonucleotide
  Antisense strand to SEQ ID NO: 1278468
auucugcucaaagauuuca

SEQ ID NO: 1278470 - RNA, 19 nt, Artificial Sequence
  Description of Artificial Sequence: Synthetic oligonucleotide
  Sense strand starting at position 1126 of SEQ ID NO: 1241517
uuucucaauguguagauaa

SEQ ID NO: 1278471 - RNA, 19 nt, Artificial Sequence
  Description of Artificial Sequence: Synthetic oligonucleotide
  Antisense strand to SEQ ID NO: 1278470
uuaucuacacauugagaaa

SEQ ID NO: 1278472 - RNA, 19 nt, Artificial Sequence
  Description of Artificial Sequence: Synthetic oligonucleotide
  Sense strand starting at position 1128 of SEQ ID NO: 1241517
ucucaauguguagauaaug

SEQ ID NO: 1278473 - RNA, 19 nt, Artificial Sequence
  Description of Artificial Sequence: Synthetic oligonucleotide
  Antisense strand to SEQ ID NO: 1278472
cauuaucuacacauugaga

SEQ ID NO: 1278474 - RNA, 19 nt, Artificial Sequence
  Description of Artificial Sequence: Synthetic oligonucleotide
  Sense strand starting at position 1147 of SEQ ID NO: 1241517
ggguucaggaguggaguaa

SEQ ID NO: 1278475 - RNA, 19 nt, Artificial Sequence
  Description of Artificial Sequence: Synthetic oligonucleotide
  Antisense strand to SEQ ID NO: 1278474
uuacuccacuccugaaccc

SEQ ID NO: 1278476 - RNA, 19 nt, Artificial Sequence
  Description of Artificial Sequence: Synthetic oligonucleotide
  Sense strand starting at position 1264 of SEQ ID NO: 1241517
augauaugugcagagcaag

SEQ ID NO: 1278477 - RNA, 19 nt, Artificial Sequence
  Description of Artificial Sequence: Synthetic oligonucleotide
  Antisense strand to SEQ ID NO: 1278476
cuugcucugcacauaucau

SEQ ID NO: 1278478 - RNA, 19 nt, Artificial Sequence
  Description of Artificial Sequence: Synthetic oligonucleotide
  Sense strand starting at position 1308 of SEQ ID NO: 1241517
ggcagcacgcugucugaua

SEQ ID NO: 1278479 - RNA, 19 nt, Artificial Sequence
  Description of Artificial Sequence: Synthetic oligonucleotide
  Antisense strand to SEQ ID NO: 1278478
uaucagacagcgugcugcc

SEQ ID NO: 1278480 - RNA, 19 nt, Artificial Sequence
  Description of Artificial Sequence: Synthetic oligonucleotide
  Sense strand starting at position 1331 of SEQ ID NO: 1241517
ggaggaucacgguguagga

SEQ ID NO: 1278481 - RNA, 19 nt, Artificial Sequence
  Description of Artificial Sequence: Synthetic oligonucleotide
  Antisense strand to SEQ ID NO: 1278480
uccuacaccgugauccucc

SEQ ID NO: 1278482 - RNA, 19 nt, Artificial Sequence
  Description of Artificial Sequence: Synthetic oligonucleotide
  Sense strand starting at position 1464 of SEQ ID NO: 1241517
gaagaagcugucuaccuca

SEQ ID NO: 1278483 - RNA, 19 nt, Artificial Sequence
  Description of Artificial Sequence: Synthetic oligonucleotide
  Antisense strand to SEQ ID NO: 1278482
ugagguagacagcuucuuc

SEQ ID NO: 1278484 - RNA, 19 nt, Artificial Sequence
  Description of Artificial Sequence: Synthetic oligonucleotide
  Sense strand starting at position 1688 of SEQ ID NO: 1241517
agaagaagauuugagccau

SEQ ID NO: 1278485 - RNA, 19 nt, Artificial Sequence
  Description of Artificial Sequence: Synthetic oligonucleotide
  Antisense strand to SEQ ID NO: 1278484
auggcucaaaucuucuucu

SEQ ID NO: 1278486 - RNA, 19 nt, Artificial Sequence
  Description of Artificial Sequence: Synthetic oligonucleotide
  Sense strand starting at position 1712 of SEQ ID NO: 1241517
cuccaaaggagaugaguuu

SEQ ID NO: 1278487 - RNA, 19 nt, Artificial Sequence
  Description of Artificial Sequence: Synthetic oligonucleotide
  Antisense strand to SEQ ID NO: 1278486
aaacucaucuccuuuggag

SEQ ID NO: 1278488 - RNA, 19 nt, Artificial Sequence
  Description of Artificial Sequence: Synthetic oligonucleotide
  Sense strand starting at position 1742 of SEQ ID NO: 1241517
ggaaaucccugaucaucuu

SEQ ID NO: 1278489 - RNA, 19 nt, Artificial Sequence
  Description of Artificial Sequence: Synthetic oligonucleotide
  Antisense strand to SEQ ID NO: 1278488
aagaugaucagggauuucc

SEQ ID NO: 1278490 - RNA, 19 nt, Artificial Sequence
  Description of Artificial Sequence: Synthetic oligonucleotide
  Sense strand starting at position 1779 of SEQ ID NO: 1241517
cagccacauguccaggaaa

SEQ ID NO: 1278491 - RNA, 19 nt, Artificial Sequence
  Description of Artificial Sequence: Synthetic oligonucleotide
  Antisense strand to SEQ ID NO: 1278490
uuuccuggacauguggcug

SEQ ID NO: 1278492 - RNA, 19 nt, Artificial Sequence
  Description of Artificial Sequence: Synthetic oligonucleotide
  Sense strand starting at position 1782 of SEQ ID NO: 1241517
ccacauguccaggaaagcu

SEQ ID NO: 1278493 - RNA, 19 nt, Artificial Sequence
  Description of Artificial Sequence: Synthetic oligonucleotide
  Antisense strand to SEQ ID NO: 1278492
agcuuuccuggacaugugg

SEQ ID NO: 1278494 - RNA, 19 nt, Artificial Sequence
  Description of Artificial Sequence: Synthetic oligonucleotide
  Sense strand starting at position 1872 of SEQ ID NO: 1241517
aagguuacccagcauaaug

SEQ ID NO: 1278495 - RNA, 19 nt, Artificial Sequence
  Description of Artificial Sequence: Synthetic oligonucleotide
  Antisense strand to SEQ ID NO: 1278494
cauuaugcuggguaaccuu

SEQ ID NO: 1278496 - RNA, 19 nt, Artificial Sequence
  Description of Artificial Sequence: Synthetic oligonucleotide
  Sense strand starting at position 2061 of SEQ ID NO: 1241517
gcaacaccucaaggacauu

SEQ ID NO: 1278497 - RNA, 19 nt, Artificial Sequence
  Description of Artificial Sequence: Synthetic oligonucleotide
  Antisense strand to SEQ ID NO: 1278496
aauguccuugagguguugc

SEQ ID NO: 1278498 - RNA, 19 nt, Artificial Sequence
  Description of Artificial Sequence: Synthetic oligonucleotide
  Sense strand starting at position 2067 of SEQ ID NO: 1241517
ccucaaggacauuguauua

SEQ ID NO: 1278499 - RNA, 19 nt, Artificial Sequence
  Description of Artificial Sequence: Synthetic oligonucleotide
  Antisense strand to SEQ ID NO: 1278498
uaauacaauguccuugagg

SEQ ID NO: 1278500 - RNA, 19 nt, Artificial Sequence
  Description of Artificial Sequence: Synthetic oligonucleotide
  Sense strand starting at position 2215 of SEQ ID NO: 1241517
gagggauaaguucgucaaa

SEQ ID NO: 1278501 - RNA, 19 nt, Artificial Sequence
  Description of Artificial Sequence: Synthetic oligonucleotide
  Antisense strand to SEQ ID NO: 1278500
uuugacgaacuuaucccuc

SEQ ID NO: 1278502 - RNA, 19 nt, Artificial Sequence
  Description of Artificial Sequence: Synthetic oligonucleotide
  Sense strand starting at position 2216 of SEQ ID NO: 1241517
agggauaaguucgucaaag

SEQ ID NO: 1278503 - RNA, 19 nt, Artificial Sequence
  Description of Artificial Sequence: Synthetic oligonucleotide
  Antisense strand to SEQ ID NO: 1278502
cuuugacgaacuuaucccu

SEQ ID NO: 1278504 - RNA, 19 nt, Artificial Sequence
  Description of Artificial Sequence: Synthetic oligonucleotide
  Sense strand starting at position 2217 of SEQ ID NO: 1241517
gggauaaguucgucaaaga

SEQ ID NO: 1278505 - RNA, 19 nt, Artificial Sequence
  Description of Artificial Sequence: Synthetic oligonucleotide
  Antisense strand to SEQ ID NO: 1278504
ucuuugacgaacuuauccc

SEQ ID NO: 1278506 - RNA, 19 nt, Artificial Sequence
  Description of Artificial Sequence: Synthetic oligonucleotide
  Sense strand starting at position 2348 of SEQ ID NO: 1241517
uugcauugucaucacagaa

SEQ ID NO: 1278507 - RNA, 19 nt, Artificial Sequence
  Description of Artificial Sequence: Synthetic oligonucleotide
  Antisense strand to SEQ ID NO: 1278506
uucugugaugacaaugcaa

SEQ ID NO: 1278508 - RNA, 19 nt, Artificial Sequence
  Description of Artificial Sequence: Synthetic oligonucleotide
  Sense strand starting at position 2524 of SEQ ID NO: 1241517
ggcacaugaaagugaucaa

SEQ ID NO: 1278509 - RNA, 19 nt, Artificial Sequence
  Description of Artificial Sequence: Synthetic oligonucleotide
  Antisense strand to SEQ ID NO: 1278508
uugaucacuuucaugugcc

SEQ ID NO: 1278510 - RNA, 19 nt, Artificial Sequence
  Description of Artificial Sequence: Synthetic oligonucleotide
  Sense strand starting at position 2673 of SEQ ID NO: 1241517
ggaagacuucugcauaggu

SEQ ID NO: 1278511 - RNA, 19 nt, Artificial Sequence
  Description of Artificial Sequence: Synthetic oligonucleotide
  Antisense strand to SEQ ID NO: 1278510
accuaugcagaagucuucc

SEQ ID NO: 1278512 - RNA, 19 nt, Artificial Sequence
  Description of Artificial Sequence: Synthetic oligonucleotide
  Sense strand starting at position 2675 of SEQ ID NO: 1241517
aagacuucugcauagguga

SEQ ID NO: 1278513 - RNA, 19 nt, Artificial Sequence
  Description of Artificial Sequence: Synthetic oligonucleotide
  Antisense strand to SEQ ID NO: 1278512
ucaccuaugcagaagucuu

SEQ ID NO: 1278514 - RNA, 19 nt, Artificial Sequence
  Description of Artificial Sequence: Synthetic oligonucleotide
  Sense strand starting at position 2686 of SEQ ID NO: 1241517
auaggugagaguuguagga

SEQ ID NO: 1278515 - RNA, 19 nt, Artificial Sequence
  Description of Artificial Sequence: Synthetic oligonucleotide
  Antisense strand to SEQ ID NO: 1278514
uccuacaacucucaccuau

SEQ ID NO: 1278516 - RNA, 19 nt, Artificial Sequence
  Description of Artificial Sequence: Synthetic oligonucleotide
  Sense strand starting at position 2834 of SEQ ID NO: 1241517
accaucucugucgauauca

SEQ ID NO: 1278517 - RNA, 19 nt, Artificial Sequence
  Description of Artificial Sequence: Synthetic oligonucleotide
  Antisense strand to SEQ ID NO: 1278516
ugauaucgacagagauggu

SEQ ID NO: 1278518 - RNA, 19 nt, Artificial Sequence
  Description of Artificial Sequence: Synthetic oligonucleotide
  Sense strand starting at position 2853 of SEQ ID NO: 1241517
uugcccaauggguaauuaa

SEQ ID NO: 1278519 - RNA, 19 nt, Artificial Sequence
  Description of Artificial Sequence: Synthetic oligonucleotide
  Antisense strand to SEQ ID NO: 1278518
uuaauuacccauugggcaa

SEQ ID NO: 1278520 - RNA, 19 nt, Artificial Sequence
  Description of Artificial Sequence: Synthetic oligonucleotide
  Sense strand starting at position 2856 of SEQ ID NO: 1241517
cccaauggguaauuaauua

SEQ ID NO: 1278521 - RNA, 19 nt, Artificial Sequence
  Description of Artificial Sequence: Synthetic oligonucleotide
  Antisense strand to SEQ ID NO: 1278520
uaauuaauuacccauuggg

SEQ ID NO: 1278522 - RNA, 19 nt, Artificial Sequence
  Description of Artificial Sequence: Synthetic oligonucleotide
  Sense strand starting at position 2927 of SEQ ID NO: 1241517
acguaagacaugggaaacu

SEQ ID NO: 1278523 - RNA, 19 nt, Artificial Sequence
  Description of Artificial Sequence: Synthetic oligonucleotide
  Antisense strand to SEQ ID NO: 1278522
aguuucccaugucuuacgu

SEQ ID NO: 1278524 - RNA, 19 nt, Artificial Sequence
  Description of Artificial Sequence: Synthetic oligonucleotide
  Sense strand starting at position 3026 of SEQ ID NO: 1241517
cauguugauagguagaugu

SEQ ID NO: 1278525 - RNA, 19 nt, Artificial Sequence
  Description of Artificial Sequence: Synthetic oligonucleotide
  Antisense strand to SEQ ID NO: 1278524
acaucuaccuaucaacaug

SEQ ID NO: 1278526 - RNA, 19 nt, Artificial Sequence
  Description of Artificial Sequence: Synthetic oligonucleotide
  Sense strand starting at position 3028 of SEQ ID NO: 1241517
uguugauagguagauguau

SEQ ID NO: 1278527 - RNA, 19 nt, Artificial Sequence
  Description of Artificial Sequence: Synthetic oligonucleotide
  Antisense strand to SEQ ID NO: 1278526
auacaucuaccuaucaaca

SEQ ID NO: 1278528 - RNA, 19 nt, Artificial Sequence
  Description of Artificial Sequence: Synthetic oligonucleotide
  Sense strand starting at position 3036 of SEQ ID NO: 1241517
gguagauguaucuauguau

SEQ ID NO: 1278529 - RNA, 19 nt, Artificial Sequence
  Description of Artificial Sequence: Synthetic oligonucleotide
  Antisense strand to SEQ ID NO: 1278528
auacauagauacaucuacc

SEQ ID NO: 1278530 - RNA, 19 nt, Artificial Sequence
  Description of Artificial Sequence: Synthetic oligonucleotide
  Sense strand starting at position 3387 of SEQ ID NO: 1241517
ugugcuaucagggaggaca

SEQ ID NO: 1278531 - RNA, 19 nt, Artificial Sequence
  Description of Artificial Sequence: Synthetic oligonucleotide
  Antisense strand to SEQ ID NO: 1278530
uguccucccugauagcaca

SEQ ID NO: 1278532 - RNA, 19 nt, Artificial Sequence
  Description of Artificial Sequence: Synthetic oligonucleotide
  Sense strand starting at position 3601 of SEQ ID NO: 1241517
aagaguguagacugauaau

SEQ ID NO: 1278533 - RNA, 19 nt, Artificial Sequence
  Description of Artificial Sequence: Synthetic oligonucleotide
  Antisense strand to SEQ ID NO: 1278532
auuaucagucuacacucuu

SEQ ID NO: 1278534 - RNA, 19 nt, Artificial Sequence
  Description of Artificial Sequence: Synthetic oligonucleotide
  Sense strand starting at position 3829 of SEQ ID NO: 1241517
agaaauugcuuccuauaga

SEQ ID NO: 1278535 - RNA, 19 nt, Artificial Sequence
  Description of Artificial Sequence: Synthetic oligonucleotide
  Antisense strand to SEQ ID NO: 1278534
ucuauaggaagcaauuucu

SEQ ID NO: 1278536 - RNA, 19 nt, Artificial Sequence
  Description of Artificial Sequence: Synthetic oligonucleotide
  Sense strand starting at position 3840 of SEQ ID NO: 1241517
ccuauagagccauaauguu

SEQ ID NO: 1278537 - RNA, 19 nt, Artificial Sequence
  Description of Artificial Sequence: Synthetic oligonucleotide
  Antisense strand to SEQ ID NO: 1278536
aacauuauggcucuauagg

SEQ ID NO: 1278538 - RNA, 19 nt, Artificial Sequence
  Description of Artificial Sequence: Synthetic oligonucleotide
  Sense strand starting at position 6 of SEQ ID NO: 1241518
ggguaaauuuaugaugaac

SEQ ID NO: 1278539 - RNA, 19 nt, Artificial Sequence
  Description of Artificial Sequence: Synthetic oligonucleotide
  Antisense strand to SEQ ID NO: 1278538
guucaucauaaauuuaccc

SEQ ID NO: 1278540 - RNA, 19 nt, Artificial Sequence
  Description of Artificial Sequence: Synthetic oligonucleotide
  Sense strand starting at position 8 of SEQ ID NO: 1241518
guaaauuuaugaugaacuc

SEQ ID NO: 1278541 - RNA, 19 nt, Artificial Sequence
  Description of Artificial Sequence: Synthetic oligonucleotide
  Antisense strand to SEQ ID NO: 1278540
gaguucaucauaaauuuac

SEQ ID NO: 1278542 - RNA, 19 nt, Artificial Sequence
  Description of Artificial Sequence: Synthetic oligonucleotide
  Sense strand starting at position 23 of SEQ ID NO: 1241518
acucuaaggucuugaaaua

SEQ ID NO: 1278543 - RNA, 19 nt, Artificial Sequence
  Description of Artificial Sequence: Synthetic oligonucleotide
  Antisense strand to SEQ ID NO: 1278542
uauuucaagaccuuagagu

SEQ ID NO: 1278544 - RNA, 19 nt, Artificial Sequence
  Description of Artificial Sequence: Synthetic oligonucleotide
  Sense strand starting at position 240 of SEQ ID NO: 1241518
agagaauuauaacucgucu

SEQ ID NO: 1278545 - RNA, 19 nt, Artificial Sequence
  Description of Artificial Sequence: Synthetic oligonucleotide
  Antisense strand to SEQ ID NO: 1278544
agacgaguuauaauucucu

SEQ ID NO: 1278546 - RNA, 19 nt, Artificial Sequence
  Description of Artificial Sequence: Synthetic oligonucleotide
  Sense strand starting at position 384 of SEQ ID NO: 1241518
ugaugaaggcuuugugaaa

SEQ ID NO: 1278547 - RNA, 19 nt, Artificial Sequence
  Description of Artificial Sequence: Synthetic oligonucleotide
  Antisense strand to SEQ ID NO: 1278546
uuucacaaagccuucauca

SEQ ID NO: 1278548 - RNA, 19 nt, Artificial Sequence
  Description of Artificial Sequence: Synthetic oligonucleotide
  Sense strand starting at position 385 of SEQ ID NO: 1241518
gaugaaggcuuugugaaag

SEQ ID NO: 1278549 - RNA, 19 nt, Artificial Sequence
  Description of Artificial Sequence: Synthetic oligonucleotide
  Antisense strand to SEQ ID NO: 1278548
cuuucacaaagccuucauc

SEQ ID NO: 1278550 - RNA, 19 nt, Artificial Sequence
  Description of Artificial Sequence: Synthetic oligonucleotide
  Sense strand starting at position 395 of SEQ ID NO: 1241518
uugugaaagugugaaaugu

SEQ ID NO: 1278551 - RNA, 19 nt, Artificial Sequence
  Description of Artificial Sequence: Synthetic oligonucleotide
  Antisense strand to SEQ ID NO: 1278550
acauuucacacuuucacaa

SEQ ID NO: 1278552 - RNA, 19 nt, Artificial Sequence
  Description of Artificial Sequence: Synthetic oligonucleotide
  Sense strand starting at position 580 of SEQ ID NO: 1241518
ucuauuauaucuguggcuu

SEQ ID NO: 1278553 - RNA, 19 nt, Artificial Sequence
  Description of Artificial Sequence: Synthetic oligonucleotide
  Antisense strand to SEQ ID NO: 1278552
aagccacagauauaauaga

SEQ ID NO: 1278554 - RNA, 19 nt, Artificial Sequence
  Description of Artificial Sequence: Synthetic oligonucleotide
  Sense strand starting at position 581 of SEQ ID NO: 1241518
cuauuauaucuguggcuug

SEQ ID NO: 1278555 - RNA, 19 nt, Artificial Sequence
  Description of Artificial Sequence: Synthetic oligonucleotide
  Antisense strand to SEQ ID NO: 1278554
caagccacagauauaauag

SEQ ID NO: 1278556 - RNA, 19 nt, Artificial Sequence
  Description of Artificial Sequence: Synthetic oligonucleotide
  Sense strand starting at position 586 of SEQ ID NO: 1241518
auaucuguggcuuggagau

SEQ ID NO: 1278557 - RNA, 19 nt, Artificial Sequence
  Description of Artificial Sequence: Synthetic oligonucleotide
  Antisense strand to SEQ ID NO: 1278556
aucuccaagccacagauau

SEQ ID NO: 1278558 - RNA, 19 nt, Artificial Sequence
  Description of Artificial Sequence: Synthetic oligonucleotide
  Sense strand starting at position 588 of SEQ ID NO: 1241518
aucuguggcuuggagauau

SEQ ID NO: 1278559 - RNA, 19 nt, Artificial Sequence
  Description of Artificial Sequence: Synthetic oligonucleotide
  Antisense strand to SEQ ID NO: 1278558
auaucuccaagccacagau

SEQ ID NO: 1278560 - RNA, 19 nt, Artificial Sequence
  Description of Artificial Sequence: Synthetic oligonucleotide
  Sense strand starting at position 707 of SEQ ID NO: 1241518
ucaucaaagucuguaucuu

SEQ ID NO: 1278561 - RNA, 19 nt, Artificial Sequence
  Description of Artificial Sequence: Synthetic oligonucleotide
  Antisense strand to SEQ ID NO: 1278560
aagauacagacuuugauga

SEQ ID NO: 1278562 - RNA, 19 nt, Artificial Sequence
  Description of Artificial Sequence: Synthetic oligonucleotide
  Sense strand starting at position 936 of SEQ ID NO: 1241518
ugguaacagucucauaagu

SEQ ID NO: 1278563 - RNA, 19 nt, Artificial Sequence
  Description of Artificial Sequence: Synthetic oligonucleotide
  Antisense strand to SEQ ID NO: 1278562
acuuaugagacuguuacca

SEQ ID NO: 1278564 - RNA, 19 nt, Artificial Sequence
  Description of Artificial Sequence: Synthetic oligonucleotide
  Sense strand starting at position 938 of SEQ ID NO: 1241518
guaacagucucauaaguuu

SEQ ID NO: 1278565 - RNA, 19 nt, Artificial Sequence
  Description of Artificial Sequence: Synthetic oligonucleotide
  Antisense strand to SEQ ID NO: 1278564
aaacuuaugagacuguuac

SEQ ID NO: 1278566 - RNA, 19 nt, Artificial Sequence
  Description of Artificial Sequence: Synthetic oligonucleotide
  Sense strand starting at position 1992 of SEQ ID NO: 1241518
aagugagcauggguuugau

SEQ ID NO: 1278567 - RNA, 19 nt, Artificial Sequence
  Description of Artificial Sequence: Synthetic oligonucleotide
  Antisense strand to SEQ ID NO: 1278566
aucaaacccaugcucacuu

SEQ ID NO: 1278568 - RNA, 19 nt, Artificial Sequence
  Description of Artificial Sequence: Synthetic oligonucleotide
  Sense strand starting at position 2045 of SEQ ID NO: 1241518
uuccuauugcuauguaugu

SEQ ID NO: 1278569 - RNA, 19 nt, Artificial Sequence
  Description of Artificial Sequence: Synthetic oligonucleotide
  Antisense strand to SEQ ID NO: 1278568
acauacauagcaauaggaa

SEQ ID NO: 1278570 - RNA, 19 nt, Artificial Sequence
  Description of Artificial Sequence: Synthetic oligonucleotide
  Sense strand starting at position 2104 of SEQ ID NO: 1241518
acagcuaaguauggaagau

SEQ ID NO: 1278571 - RNA, 19 nt, Artificial Sequence
  Description of Artificial Sequence: Synthetic oligonucleotide
  Antisense strand to SEQ ID NO: 1278570
aucuuccauacuuagcugu

SEQ ID NO: 1278572 - RNA, 19 nt, Artificial Sequence
  Description of Artificial Sequence: Synthetic oligonucleotide
  Sense strand starting at position 2114 of SEQ ID NO: 1241518
auggaagauugcguuaaag

SEQ ID NO: 1278573 - RNA, 19 nt, Artificial Sequence
  Description of Artificial Sequence: Synthetic oligonucleotide
  Antisense strand to SEQ ID NO: 1278572
cuuuaacgcaaucuuccau

SEQ ID NO: 1278574 - RNA, 19 nt, Artificial Sequence
  Description of Artificial Sequence: Synthetic oligonucleotide
  Sense strand starting at position 2116 of SEQ ID NO: 1241518
ggaagauugcguuaaaggg

SEQ ID NO: 1278575 - RNA, 19 nt, Artificial Sequence
  Description of Artificial Sequence: Synthetic oligonucleotide
  Antisense strand to SEQ ID NO: 1278574
cccuuuaacgcaaucuucc

SEQ ID NO: 1278576 - RNA, 19 nt, Artificial Sequence
  Description of Artificial Sequence: Synthetic oligonucleotide
  Sense strand starting at position 2135 of SEQ ID NO: 1241518
gaggguugucaaggagaug

SEQ ID NO: 1278577 - RNA, 19 nt, Artificial Sequence
  Description of Artificial Sequence: Synthetic oligonucleotide
  Antisense strand to SEQ ID NO: 1278576
caucuccuugacaacccuc

SEQ ID NO: 1278578 - RNA, 19 nt, Artificial Sequence
  Description of Artificial Sequence: Synthetic oligonucleotide
  Sense strand starting at position 2136 of SEQ ID NO: 1241518
aggguugucaaggagaugu

SEQ ID NO: 1278579 - RNA, 19 nt, Artificial Sequence
  Description of Artificial Sequence: Synthetic oligonucleotide
  Antisense strand to SEQ ID NO: 1278578
acaucuccuugacaacccu

SEQ ID NO: 1278580 - RNA, 19 nt, Artificial Sequence
  Description of Artificial Sequence: Synthetic oligonucleotide
  Sense strand starting at position 2217 of SEQ ID NO: 1241518
auuugagcaucugaaguuu

SEQ ID NO: 1278581 - RNA, 19 nt, Artificial Sequence
  Description of Artificial Sequence: Synthetic oligonucleotide
  Antisense strand to SEQ ID NO: 1278580
aaacuucagaugcucaaau

SEQ ID NO: 1278582 - RNA, 19 nt, Artificial Sequence
  Description of Artificial Sequence: Synthetic oligonucleotide
  Sense strand starting at position 2428 of SEQ ID NO: 1241518
ggcaaacuaagguguagaa

SEQ ID NO: 1278583 - RNA, 19 nt, Artificial Sequence
  Description of Artificial Sequence: Synthetic oligonucleotide
  Antisense strand to SEQ ID NO: 1278582
uucuacaccuuaguuugcc

SEQ ID NO: 1278584 - RNA, 19 nt, Artificial Sequence
  Description of Artificial Sequence: Synthetic oligonucleotide
  Sense strand starting at position 2535 of SEQ ID NO: 1241518
gauaguuacaugggaguau

SEQ ID NO: 1278585 - RNA, 19 nt, Artificial Sequence
  Description of Artificial Sequence: Synthetic oligonucleotide
  Antisense strand to SEQ ID NO: 1278584
auacucccauguaacuauc

SEQ ID NO: 1278586 - RNA, 19 nt, Artificial Sequence
  Description of Artificial Sequence: Synthetic oligonucleotide
  Sense strand starting at position 2536 of SEQ ID NO: 1241518
auaguuacaugggaguauu

SEQ ID NO: 1278587 - RNA, 19 nt, Artificial Sequence
  Description of Artificial Sequence: Synthetic oligonucleotide
  Antisense strand to SEQ ID NO: 1278586
aauacucccauguaacuau

SEQ ID NO: 1278588 - RNA, 19 nt, Artificial Sequence
  Description of Artificial Sequence: Synthetic oligonucleotide
  Sense strand starting at position 2697 of SEQ ID NO: 1241518
gccuuaagugauuauaccu

SEQ ID NO: 1278589 - RNA, 19 nt, Artificial Sequence
  Description of Artificial Sequence: Synthetic oligonucleotide
  Antisense strand to SEQ ID NO: 1278588
agguauaaucacuuaaggc

SEQ ID NO: 1278590 - RNA, 19 nt, Artificial Sequence
  Description of Artificial Sequence: Synthetic oligonucleotide
  Sense strand starting at position 2879 of SEQ ID NO: 1241518
guaugaagcuucuuuaaac

SEQ ID NO: 1278591 - RNA, 19 nt, Artificial Sequence
  Description of Artificial Sequence: Synthetic oligonucleotide
  Antisense strand to SEQ ID NO: 1278590
guuuaaagaagcuucauac

SEQ ID NO: 1278592 - RNA, 19 nt, Artificial Sequence
  Description of Artificial Sequence: Synthetic oligonucleotide
  Sense strand starting at position 2954 of SEQ ID NO: 1241518
uuugaugugauguggcuua

SEQ ID NO: 1278593 - RNA, 19 nt, Artificial Sequence
  Description of Artificial Sequence: Synthetic oligonucleotide
  Antisense strand to SEQ ID NO: 1278592
uaagccacaucacaucaaa

SEQ ID NO: 1278594 - RNA, 19 nt, Artificial Sequence
  Description of Artificial Sequence: Synthetic oligonucleotide
  Sense strand starting at position 3094 of SEQ ID NO: 1241518
auucuauguuaucagagcu

SEQ ID NO: 1278595 - RNA, 19 nt, Artificial Sequence
  Description of Artificial Sequence: Synthetic oligonucleotide
  Antisense strand to SEQ ID NO: 1278594
agcucugauaacauagaau

SEQ ID NO: 1278596 - RNA, 19 nt, Artificial Sequence
  Description of Artificial Sequence: Synthetic oligonucleotide
  Sense strand starting at position 3139 of SEQ ID NO: 1241518
agaagcuauuuagaacuua

SEQ ID NO: 1278597 - RNA, 19 nt, Artificial Sequence
  Description of Artificial Sequence: Synthetic oligonucleotide
  Antisense strand to SEQ ID NO: 1278596
uaaguucuaaauagcuucu

SEQ ID NO: 1278598 - RNA, 19 nt, Artificial Sequence
  Description of Artificial Sequence: Synthetic oligonucleotide
  Sense strand starting at position 3247 of SEQ ID NO: 1241518
uuaaucaggucuugggaga

SEQ ID NO: 1278599 - RNA, 19 nt, Artificial Sequence
  Description of Artificial Sequence: Synthetic oligonucleotide
  Antisense strand to SEQ ID NO: 1278598
ucucccaagaccugauuaa

SEQ ID NO: 1278600 - RNA, 19 nt, Artificial Sequence
  Description of Artificial Sequence: Synthetic oligonucleotide
  Sense strand starting at position 3334 of SEQ ID NO: 1241518
gcugcaaauugcuuagucu

SEQ ID NO: 1278601 - RNA, 19 nt, Artificial Sequence
  Description of Artificial Sequence: Synthetic oligonucleotide
  Antisense strand to SEQ ID NO: 1278600
agacuaagcaauuugcagc

SEQ ID NO: 1278602 - RNA, 19 nt, Artificial Sequence
  Description of Artificial Sequence: Synthetic oligonucleotide
  Sense strand starting at position 3346 of SEQ ID NO: 1241518
uuagucucucuuuggguua

SEQ ID NO: 1278603 - RNA, 19 nt, Artificial Sequence
  Description of Artificial Sequence: Synthetic oligonucleotide
  Antisense strand to SEQ ID NO: 1278602
uaacccaaagagagacuaa

SEQ ID NO: 1278604 - RNA, 19 nt, Artificial Sequence
  Description of Artificial Sequence: Synthetic oligonucleotide
  Sense strand starting at position 3349 of SEQ ID NO: 1241518
gucucucuuuggguuagau

SEQ ID NO: 1278605 - RNA, 19 nt, Artificial Sequence
  Description of Artificial Sequence: Synthetic oligonucleotide
  Antisense strand to SEQ ID NO: 1278604
aucuaacccaaagagagac

SEQ ID NO: 1278606 - RNA, 19 nt, Artificial Sequence
  Description of Artificial Sequence: Synthetic oligonucleotide
  Sense strand starting at position 3359 of SEQ ID NO: 1241518
ggguuagauuggaggguuu

SEQ ID NO: 1278607 - RNA, 19 nt, Artificial Sequence
  Description of Artificial Sequence: Synthetic oligonucleotide
  Antisense strand to SEQ ID NO: 1278606
aaacccuccaaucuaaccc

SEQ ID NO: 1278608 - RNA, 19 nt, Artificial Sequence
  Description of Artificial Sequence: Synthetic oligonucleotide
  Sense strand starting at position 3361 of SEQ ID NO: 1241518
guuagauuggaggguuuau

SEQ ID NO: 1278609 - RNA, 19 nt, Artificial Sequence
  Description of Artificial Sequence: Synthetic oligonucleotide
  Antisense strand to SEQ ID NO: 1278608
auaaacccuccaaucuaac

SEQ ID NO: 1278610 - RNA, 19 nt, Artificial Sequence
  Description of Artificial Sequence: Synthetic oligonucleotide
  Sense strand starting at position 3496 of SEQ ID NO: 1241518
ugcagauaauguguuccaa

SEQ ID NO: 1278611 - RNA, 19 nt, Artificial Sequence
  Description of Artificial Sequence: Synthetic oligonucleotide
  Antisense strand to SEQ ID NO: 1278610
uuggaacacauuaucugca

SEQ ID NO: 1278612 - RNA, 19 nt, Artificial Sequence
  Description of Artificial Sequence: Synthetic oligonucleotide
  Sense strand starting at position 3500 of SEQ ID NO: 1241518
gauaauguguuccaagaac

SEQ ID NO: 1278613 - RNA, 19 nt, Artificial Sequence
  Description of Artificial Sequence: Synthetic oligonucleotide
  Antisense strand to SEQ ID NO: 1278612
guucuuggaacacauuauc

SEQ ID NO: 1278614 - RNA, 19 nt, Artificial Sequence
  Description of Artificial Sequence: Synthetic oligonucleotide
  Sense strand starting at position 3802 of SEQ ID NO: 1241518
ggaggacucuuguauuauc

SEQ ID NO: 1278615 - RNA, 19 nt, Artificial Sequence
  Description of Artificial Sequence: Synthetic oligonucleotide
  Antisense strand to SEQ ID NO: 1278614
gauaauacaagaguccucc

SEQ ID NO: 1278616 - RNA, 19 nt, Artificial Sequence
  Description of Artificial Sequence: Synthetic oligonucleotide
  Sense strand starting at position 3805 of SEQ ID NO: 1241518
ggacucuuguauuaucaca

SEQ ID NO: 1278617 - RNA, 19 nt, Artificial Sequence
  Description of Artificial Sequence: Synthetic oligonucleotide
  Antisense strand to SEQ ID NO: 1278616
ugugauaauacaagagucc

SEQ ID NO: 1278618 - RNA, 19 nt, Artificial Sequence
  Description of Artificial Sequence: Synthetic oligonucleotide
  Sense strand starting at position 100 of SEQ ID NO: 1241519
ugugaugauuauguuaaug

SEQ ID NO: 1278619 - RNA, 19 nt, Artificial Sequence
  Description of Artificial Sequence: Synthetic oligonucleotide
  Antisense strand to SEQ ID NO: 1278618
cauuaacauaaucaucaca

SEQ ID NO: 1278620 - RNA, 19 nt, Artificial Sequence
  Description of Artificial Sequence: Synthetic oligonucleotide
  Sense strand starting at position 401 of SEQ ID NO: 1241519
gcuguagauaagggaugaa

SEQ ID NO: 1278621 - RNA, 19 nt, Artificial Sequence
  Description of Artificial Sequence: Synthetic oligonucleotide
  Antisense strand to SEQ ID NO: 1278620
uucaucccuuaucuacagc

SEQ ID NO: 1278622 - RNA, 19 nt, Artificial Sequence
  Description of Artificial Sequence: Synthetic oligonucleotide
  Sense strand starting at position 449 of SEQ ID NO: 1241519
ggccuauuagggugaggaa

SEQ ID NO: 1278623 - RNA, 19 nt, Artificial Sequence
  Description of Artificial Sequence: Synthetic oligonucleotide
  Antisense strand to SEQ ID NO: 1278622
uuccucacccuaauaggcc

SEQ ID NO: 1278624 - RNA, 19 nt, Artificial Sequence
  Description of Artificial Sequence: Synthetic oligonucleotide
  Sense strand starting at position 2060 of SEQ ID NO: 1241519
agugucaguaucuauuaag

SEQ ID NO: 1278625 - RNA, 19 nt, Artificial Sequence
  Description of Artificial Sequence: Synthetic oligonucleotide
  Antisense strand to SEQ ID NO: 1278624
cuuaauagauacugacacu

SEQ ID NO: 1278626 - RNA, 19 nt, Artificial Sequence
  Description of Artificial Sequence: Synthetic oligonucleotide
  Sense strand starting at position 2066 of SEQ ID NO: 1241519
aguaucuauuaagucugaa

SEQ ID NO: 1278627 - RNA, 19 nt, Artificial Sequence
  Description of Artificial Sequence: Synthetic oligonucleotide
  Antisense strand to SEQ ID NO: 1278626
uucagacuuaauagauacu

SEQ ID NO: 1278628 - RNA, 19 nt, Artificial Sequence
  Description of Artificial Sequence: Synthetic oligonucleotide
  Sense strand starting at position 2145 of SEQ ID NO: 1241519
guugguuucccagaagcaa

SEQ ID NO: 1278629 - RNA, 19 nt, Artificial Sequence
  Description of Artificial Sequence: Synthetic oligonucleotide
  Antisense strand to SEQ ID NO: 1278628
uugcuucugggaaaccaac

SEQ ID NO: 1278630 - RNA, 19 nt, Artificial Sequence
  Description of Artificial Sequence: Synthetic oligonucleotide
  Sense strand starting at position 2165 of SEQ ID NO: 1241519
ccacaagcucuggagcaua

SEQ ID NO: 1278631 - RNA, 19 nt, Artificial Sequence
  Description of Artificial Sequence: Synthetic oligonucleotide
  Antisense strand to SEQ ID NO: 1278630
uaugcuccagagcuugugg

SEQ ID NO: 1278632 - RNA, 19 nt, Artificial Sequence
  Description of Artificial Sequence: Synthetic oligonucleotide
  Sense strand starting at position 2176 of SEQ ID NO: 1241519
ggagcauauaaguguaucu

SEQ ID NO: 1278633 - RNA, 19 nt, Artificial Sequence
  Description of Artificial Sequence: Synthetic oligonucleotide
  Antisense strand to SEQ ID NO: 1278632
agauacacuuauaugcucc

SEQ ID NO: 1278634 - RNA, 19 nt, Artificial Sequence
  Description of Artificial Sequence: Synthetic oligonucleotide
  Sense strand starting at position 2223 of SEQ ID NO: 1241519
ucaggaaaucugugacuuu

SEQ ID NO: 1278635 - RNA, 19 nt, Artificial Sequence
  Description of Artificial Sequence: Synthetic oligonucleotide
  Antisense strand to SEQ ID NO: 1278634
aaagucacagauuuccuga

SEQ ID NO: 1278636 - RNA, 19 nt, Artificial Sequence
  Description of Artificial Sequence: Synthetic oligonucleotide
  Sense strand starting at position 2233 of SEQ ID NO: 1241519
ugugacuuucuggguugaa

SEQ ID NO: 1278637 - RNA, 19 nt, Artificial Sequence
  Description of Artificial Sequence: Synthetic oligonucleotide
  Antisense strand to SEQ ID NO: 1278636
uucaacccagaaagucaca

SEQ ID NO: 1278638 - RNA, 19 nt, Artificial Sequence
  Description of Artificial Sequence: Synthetic oligonucleotide
  Sense strand starting at position 2234 of SEQ ID NO: 1241519
gugacuuucuggguugaaa

SEQ ID NO: 1278639 - RNA, 19 nt, Artificial Sequence
  Description of Artificial Sequence: Synthetic oligonucleotide
  Antisense strand to SEQ ID NO: 1278638
uuucaacccagaaagucac

SEQ ID NO: 1278640 - RNA, 19 nt, Artificial Sequence
  Description of Artificial Sequence: Synthetic oligonucleotide
  Sense strand starting at position 2236 of SEQ ID NO: 1241519
gacuuucuggguugaaaga

SEQ ID NO: 1278641 - RNA, 19 nt, Artificial Sequence
  Description of Artificial Sequence: Synthetic oligonucleotide
  Antisense strand to SEQ ID NO: 1278640
ucuuucaacccagaaaguc

SEQ ID NO: 1278642 - RNA, 19 nt, Artificial Sequence
  Description of Artificial Sequence: Synthetic oligonucleotide
  Sense strand starting at position 2243 of SEQ ID NO: 1241519
uggguugaaagaugguuua

SEQ ID NO: 1278643 - RNA, 19 nt, Artificial Sequence
  Description of Artificial Sequence: Synthetic oligonucleotide
  Antisense strand to SEQ ID NO: 1278642
uaaaccaucuuucaaccca

SEQ ID NO: 1278644 - RNA, 19 nt, Artificial Sequence
  Description of Artificial Sequence: Synthetic oligonucleotide
  Sense strand starting at position 2246 of SEQ ID NO: 1241519
guugaaagaugguuuaguc

SEQ ID NO: 1278645 - RNA, 19 nt, Artificial Sequence
  Description of Artificial Sequence: Synthetic oligonucleotide
  Antisense strand to SEQ ID NO: 1278644
gacuaaaccaucuuucaac

SEQ ID NO: 1278646 - RNA, 19 nt, Artificial Sequence
  Description of Artificial Sequence: Synthetic oligonucleotide
  Sense strand starting at position 2250 of SEQ ID NO: 1241519
aaagaugguuuagucugaa

SEQ ID NO: 1278647 - RNA, 19 nt, Artificial Sequence
  Description of Artificial Sequence: Synthetic oligonucleotide
  Antisense strand to SEQ ID NO: 1278646
uucagacuaaaccaucuuu

SEQ ID NO: 1278648 - RNA, 19 nt, Artificial Sequence
  Description of Artificial Sequence: Synthetic oligonucleotide
  Sense strand starting at position 2253 of SEQ ID NO: 1241519
gaugguuuagucugaauuc

SEQ ID NO: 1278649 - RNA, 19 nt, Artificial Sequence
  Description of Artificial Sequence: Synthetic oligonucleotide
  Antisense strand to SEQ ID NO: 1278648
gaauucagacuaaaccauc

SEQ ID NO: 1278650 - RNA, 19 nt, Artificial Sequence
  Description of Artificial Sequence: Synthetic oligonucleotide
  Sense strand starting at position 2262 of SEQ ID NO: 1241519
gucugaauuccuuggagaa

SEQ ID NO: 1278651 - RNA, 19 nt, Artificial Sequence
  Description of Artificial Sequence: Synthetic oligonucleotide
  Antisense strand to SEQ ID NO: 1278650
uucuccaaggaauucagac

SEQ ID NO: 1278652 - RNA, 19 nt, Artificial Sequence
  Description of Artificial Sequence: Synthetic oligonucleotide
  Sense strand starting at position 2263 of SEQ ID NO: 1241519
ucugaauuccuuggagaac

SEQ ID NO: 1278653 - RNA, 19 nt, Artificial Sequence
  Description of Artificial Sequence: Synthetic oligonucleotide
  Antisense strand to SEQ ID NO: 1278652
guucuccaaggaauucaga

SEQ ID NO: 1278654 - RNA, 19 nt, Artificial Sequence
  Description of Artificial Sequence: Synthetic oligonucleotide
  Sense strand starting at position 2436 of SEQ ID NO: 1241519
aaagcugcucuagauaagu

SEQ ID NO: 1278655 - RNA, 19 nt, Artificial Sequence
  Description of Artificial Sequence: Synthetic oligonucleotide
  Antisense strand to SEQ ID NO: 1278654
acuuaucuagagcagcuuu

SEQ ID NO: 1278656 - RNA, 19 nt, Artificial Sequence
  Description of Artificial Sequence: Synthetic oligonucleotide
  Sense strand starting at position 2438 of SEQ ID NO: 1241519
agcugcucuagauaaguga

SEQ ID NO: 1278657 - RNA, 19 nt, Artificial Sequence
  Description of Artificial Sequence: Synthetic oligonucleotide
  Antisense strand to SEQ ID NO: 1278656
ucacuuaucuagagcagcu

SEQ ID NO: 1278658 - RNA, 19 nt, Artificial Sequence
  Description of Artificial Sequence: Synthetic oligonucleotide
  Sense strand starting at position 2640 of SEQ ID NO: 1241519
gccaaaggaggcugagauu

SEQ ID NO: 1278659 - RNA, 19 nt, Artificial Sequence
  Description of Artificial Sequence: Synthetic oligonucleotide
  Antisense strand to SEQ ID NO: 1278658
aaucucagccuccuuuggc

SEQ ID NO: 1278660 - RNA, 19 nt, Artificial Sequence
  Description of Artificial Sequence: Synthetic oligonucleotide
  Sense strand starting at position 2831 of SEQ ID NO: 1241519
auuguauaccuugagcaaa

SEQ ID NO: 1278661 - RNA, 19 nt, Artificial Sequence
  Description of Artificial Sequence: Synthetic oligonucleotide
  Antisense strand to SEQ ID NO: 1278660
uuugcucaagguauacaau

SEQ ID NO: 1278662 - RNA, 19 nt, Artificial Sequence
  Description of Artificial Sequence: Synthetic oligonucleotide
  Sense strand starting at position 2841 of SEQ ID NO: 1241519
uugagcaaaccagguuuaa

SEQ ID NO: 1278663 - RNA, 19 nt, Artificial Sequence
  Description of Artificial Sequence: Synthetic oligonucleotide
  Antisense strand to SEQ ID NO: 1278662
uuaaaccugguuugcucaa

SEQ ID NO: 1278664 - RNA, 19 nt, Artificial Sequence
  Description of Artificial Sequence: Synthetic oligonucleotide
  Sense strand starting at position 2845 of SEQ ID NO: 1241519
gcaaaccagguuuaacaau

SEQ ID NO: 1278665 - RNA, 19 nt, Artificial Sequence
  Description of Artificial Sequence: Synthetic oligonucleotide
  Antisense strand to SEQ ID NO: 1278664
auuguuaaaccugguuugc

SEQ ID NO: 1278666 - RNA, 19 nt, Artificial Sequence
  Description of Artificial Sequence: Synthetic oligonucleotide
  Sense strand starting at position 2967 of SEQ ID NO: 1241519
ugaggauaugacuguaacu

SEQ ID NO: 1278667 - RNA, 19 nt, Artificial Sequence
  Description of Artificial Sequence: Synthetic oligonucleotide
  Antisense strand to SEQ ID NO: 1278666
aguuacagucauauccuca

SEQ ID NO: 1278668 - RNA, 19 nt, Artificial Sequence
  Description of Artificial Sequence: Synthetic oligonucleotide
  Sense strand starting at position 3000 of SEQ ID NO: 1241519
acuaguagaucacuauguu

SEQ ID NO: 1278669 - RNA, 19 nt, Artificial Sequence
  Description of Artificial Sequence: Synthetic oligonucleotide
  Antisense strand to SEQ ID NO: 1278668
aacauagugaucuacuagu

SEQ ID NO: 1278670 - RNA, 19 nt, Artificial Sequence
  Description of Artificial Sequence: Synthetic oligonucleotide
  Sense strand starting at position 3001 of SEQ ID NO: 1241519
cuaguagaucacuauguuc

SEQ ID NO: 1278671 - RNA, 19 nt, Artificial Sequence
  Description of Artificial Sequence: Synthetic oligonucleotide
  Antisense strand to SEQ ID NO: 1278670
gaacauagugaucuacuag

SEQ ID NO: 1278672 - RNA, 19 nt, Artificial Sequence
  Description of Artificial Sequence: Synthetic oligonucleotide
  Sense strand starting at position 3003 of SEQ ID NO: 1241519
aguagaucacuauguucca

SEQ ID NO: 1278673 - RNA, 19 nt, Artificial Sequence
  Description of Artificial Sequence: Synthetic oligonucleotide
  Antisense strand to SEQ ID NO: 1278672
uggaacauagugaucuacu

SEQ ID NO: 1278674 - RNA, 19 nt, Artificial Sequence
  Description of Artificial Sequence: Synthetic oligonucleotide
  Sense strand starting at position 3004 of SEQ ID NO: 1241519
guagaucacuauguuccaa

SEQ ID NO: 1278675 - RNA, 19 nt, Artificial Sequence
  Description of Artificial Sequence: Synthetic oligonucleotide
  Antisense strand to SEQ ID NO: 1278674
uuggaacauagugaucuac

SEQ ID NO: 1278676 - RNA, 19 nt, Artificial Sequence
  Description of Artificial Sequence: Synthetic oligonucleotide
  Sense strand starting at position 3073 of SEQ ID NO: 1241519
gugugugagacagauuaug

SEQ ID NO: 1278677 - RNA, 19 nt, Artificial Sequence
  Description of Artificial Sequence: Synthetic oligonucleotide
  Antisense strand to SEQ ID NO: 1278676
cauaaucugucucacacac

SEQ ID NO: 1278678 - RNA, 19 nt, Artificial Sequence
  Description of Artificial Sequence: Synthetic oligonucleotide
  Sense strand starting at position 3168 of SEQ ID NO: 1241519
gcuucugugaguuacaaug

SEQ ID NO: 1278679 - RNA, 19 nt, Artificial Sequence
  Description of Artificial Sequence: Synthetic oligonucleotide
  Antisense strand to SEQ ID NO: 1278678
cauuguaacucacagaagc

SEQ ID NO: 1278680 - RNA, 19 nt, Artificial Sequence
  Description of Artificial Sequence: Synthetic oligonucleotide
  Sense strand starting at position 3175 of SEQ ID NO: 1241519
ugaguuacaaugugagaag

SEQ ID NO: 1278681 - RNA, 19 nt, Artificial Sequence
  Description of Artificial Sequence: Synthetic oligonucleotide
  Antisense strand to SEQ ID NO: 1278680
cuucucacauuguaacuca

SEQ ID NO: 1278682 - RNA, 19 nt, Artificial Sequence
  Description of Artificial Sequence: Synthetic oligonucleotide
  Sense strand starting at position 3190 of SEQ ID NO: 1241519
gaagaaucaguaggcuauu

SEQ ID NO: 1278683 - RNA, 19 nt, Artificial Sequence
  Description of Artificial Sequence: Synthetic oligonucleotide
  Antisense strand to SEQ ID NO: 1278682
aauagccuacugauucuuc

SEQ ID NO: 1278684 - RNA, 19 nt, Artificial Sequence
  Description of Artificial Sequence: Synthetic oligonucleotide
  Sense strand starting at position 3199 of SEQ ID NO: 1241519
guaggcuauuuggagagaa

SEQ ID NO: 1278685 - RNA, 19 nt, Artificial Sequence
  Description of Artificial Sequence: Synthetic oligonucleotide
  Antisense strand to SEQ ID NO: 1278684
uucucuccaaauagccuac

SEQ ID NO: 1278686 - RNA, 19 nt, Artificial Sequence
  Description of Artificial Sequence: Synthetic oligonucleotide
  Sense strand starting at position 3440 of SEQ ID NO: 1241519
cuuguuagcuaauuugauu

SEQ ID NO: 1278687 - RNA, 19 nt, Artificial Sequence
  Description of Artificial Sequence: Synthetic oligonucleotide
  Antisense strand to SEQ ID NO: 1278686
aaucaaauuagcuaacaag

SEQ ID NO: 1278688 - RNA, 19 nt, Artificial Sequence
  Description of Artificial Sequence: Synthetic oligonucleotide
  Sense strand starting at position 3529 of SEQ ID NO: 1241519
ugugauauaucuuuaucuc

SEQ ID NO: 1278689 - RNA, 19 nt, Artificial Sequence
  Description of Artificial Sequence: Synthetic oligonucleotide
  Antisense strand to SEQ ID NO: 1278688
gagauaaagauauaucaca

SEQ ID NO: 1278690 - RNA, 19 nt, Artificial Sequence
  Description of Artificial Sequence: Synthetic oligonucleotide
  Sense strand starting at position 3530 of SEQ ID NO: 1241519
gugauauaucuuuaucucc

SEQ ID NO: 1278691 - RNA, 19 nt, Artificial Sequence
  Description of Artificial Sequence: Synthetic oligonucleotide
  Antisense strand to SEQ ID NO: 1278690
ggagauaaagauauaucac

SEQ ID NO: 1278692 - RNA, 19 nt, Artificial Sequence
  Description of Artificial Sequence: Synthetic oligonucleotide
  Sense strand starting at position 3786 of SEQ ID NO: 1241519
aaggauuaugagugugcua

SEQ ID NO: 1278693 - RNA, 19 nt, Artificial Sequence
  Description of Artificial Sequence: Synthetic oligonucleotide
  Antisense strand to SEQ ID NO: 1278692
uagcacacucauaauccuu

SEQ ID NO: 1278694 - RNA, 19 nt, Artificial Sequence
  Description of Artificial Sequence: Synthetic oligonucleotide
  Sense strand starting at position 3789 of SEQ ID NO: 1241519
gauuaugagugugcuauaa

SEQ ID NO: 1278695 - RNA, 19 nt, Artificial Sequence
  Description of Artificial Sequence: Synthetic oligonucleotide
  Antisense strand to SEQ ID NO: 1278694
uuauagcacacucauaauc

SEQ ID NO: 1278696 - RNA, 19 nt, Artificial Sequence
  Description of Artificial Sequence: Synthetic oligonucleotide
  Sense strand starting at position 3818 of SEQ ID NO: 1241519
guaacaguacuguagauac

SEQ ID NO: 1278697 - RNA, 19 nt, Artificial Sequence
  Description of Artificial Sequence: Synthetic oligonucleotide
  Antisense strand to SEQ ID NO: 1278696
guaucuacaguacuguuac

SEQ ID NO: 1278698 - RNA, 19 nt, Artificial Sequence
  Description of Artificial Sequence: Synthetic oligonucleotide
  Sense strand starting at position 44 of SEQ ID NO: 1241520
guaguaauacuuuguauac

SEQ ID NO: 1278699 - RNA, 19 nt, Artificial Sequence
  Description of Artificial Sequence: Synthetic oligonucleotide
  Antisense strand to SEQ ID NO: 1278698
guauacaaaguauuacuac

SEQ ID NO: 1278700 - RNA, 19 nt, Artificial Sequence
  Description of Artificial Sequence: Synthetic oligonucleotide
  Sense strand starting at position 345 of SEQ ID NO: 1241520
uguacugaucugcaacuca

SEQ ID NO: 1278701 - RNA, 19 nt, Artificial Sequence
  Description of Artificial Sequence: Synthetic oligonucleotide
  Antisense strand to SEQ ID NO: 1278700
ugaguugcagaucaguaca

SEQ ID NO: 1278702 - RNA, 19 nt, Artificial Sequence
  Description of Artificial Sequence: Synthetic oligonucleotide
  Sense strand starting at position 404 of SEQ ID NO: 1241520
cucauuccgcauuaucaga

SEQ ID NO: 1278703 - RNA, 19 nt, Artificial Sequence
  Description of Artificial Sequence: Synthetic oligonucleotide
  Antisense strand to SEQ ID NO: 1278702
ucugauaaugcggaaugag

SEQ ID NO: 1278704 - RNA, 19 nt, Artificial Sequence
  Description of Artificial Sequence: Synthetic oligonucleotide
  Sense strand starting at position 436 of SEQ ID NO: 1241520
acuguauugcuuugaugau

SEQ ID NO: 1278705 - RNA, 19 nt, Artificial Sequence
  Description of Artificial Sequence: Synthetic oligonucleotide
  Antisense strand to SEQ ID NO: 1278704
aucaucaaagcaauacagu

SEQ ID NO: 1278706 - RNA, 19 nt, Artificial Sequence
  Description of Artificial Sequence: Synthetic oligonucleotide
  Sense strand starting at position 467 of SEQ ID NO: 1241520
guugguaaagauugcuaca

SEQ ID NO: 1278707 - RNA, 19 nt, Artificial Sequence
  Description of Artificial Sequence: Synthetic oligonucleotide
  Antisense strand to SEQ ID NO: 1278706
uguagcaaucuuuaccaac

SEQ ID NO: 1278708 - RNA, 19 nt, Artificial Sequence
  Description of Artificial Sequence: Synthetic oligonucleotide
  Sense strand starting at position 469 of SEQ ID NO: 1241520
ugguaaagauugcuacacu

SEQ ID NO: 1278709 - RNA, 19 nt, Artificial Sequence
  Description of Artificial Sequence: Synthetic oligonucleotide
  Antisense strand to SEQ ID NO: 1278708
aguguagcaaucuuuacca

SEQ ID NO: 1278710 - RNA, 19 nt, Artificial Sequence
  Description of Artificial Sequence: Synthetic oligonucleotide
  Sense strand starting at position 499 of SEQ ID NO: 1241520
uauggacgucauuaacauu

SEQ ID NO: 1278711 - RNA, 19 nt, Artificial Sequence
  Description of Artificial Sequence: Synthetic oligonucleotide
  Antisense strand to SEQ ID NO: 1278710
aauguuaaugacguccaua

SEQ ID NO: 1278712 - RNA, 19 nt, Artificial Sequence
  Description of Artificial Sequence: Synthetic oligonucleotide
  Sense strand starting at position 570 of SEQ ID NO: 1241520
uuaaauguuaaguaggagu

SEQ ID NO: 1278713 - RNA, 19 nt, Artificial Sequence
  Description of Artificial Sequence: Synthetic oligonucleotide
  Antisense strand to SEQ ID NO: 1278712
acuccuacuuaacauuuaa

SEQ ID NO: 1278714 - RNA, 19 nt, Artificial Sequence
  Description of Artificial Sequence: Synthetic oligonucleotide
  Sense strand starting at position 669 of SEQ ID NO: 1241520
auaggaaucuugcuagcuu

SEQ ID NO: 1278715 - RNA, 19 nt, Artificial Sequence
  Description of Artificial Sequence: Synthetic oligonucleotide
  Antisense strand to SEQ ID NO: 1278714
aagcuagcaagauuccuau

SEQ ID NO: 1278716 - RNA, 19 nt, Artificial Sequence
  Description of Artificial Sequence: Synthetic oligonucleotide
  Sense strand starting at position 699 of SEQ ID NO: 1241520
ggagcaucucacuaaguga

SEQ ID NO: 1278717 - RNA, 19 nt, Artificial Sequence
  Description of Artificial Sequence: Synthetic oligonucleotide
  Antisense strand to SEQ ID NO: 1278716
ucacuuagugagaugcucc

SEQ ID NO: 1278718 - RNA, 19 nt, Artificial Sequence
  Description of Artificial Sequence: Synthetic oligonucleotide
  Sense strand starting at position 734 of SEQ ID NO: 1241520
ggguaauugucauuaucuc

SEQ ID NO: 1278719 - RNA, 19 nt, Artificial Sequence
  Description of Artificial Sequence: Synthetic oligonucleotide
  Antisense strand to SEQ ID NO: 1278718
gagauaaugacaauuaccc

SEQ ID NO: 1278720 - RNA, 19 nt, Artificial Sequence
  Description of Artificial Sequence: Synthetic oligonucleotide
  Sense strand starting at position 818 of SEQ ID NO: 1241520
auugauauugaauguccua

SEQ ID NO: 1278721 - RNA, 19 nt, Artificial Sequence
  Description of Artificial Sequence: Synthetic oligonucleotide
  Antisense strand to SEQ ID NO: 1278720
uaggacauucaauaucaau

SEQ ID NO: 1278722 - RNA, 19 nt, Artificial Sequence
  Description of Artificial Sequence: Synthetic oligonucleotide
  Sense strand starting at position 2219 of SEQ ID NO: 1241520
cuuaaaucauagguauuga

SEQ ID NO: 1278723 - RNA, 19 nt, Artificial Sequence
  Description of Artificial Sequence: Synthetic oligonucleotide
  Antisense strand to SEQ ID NO: 1278722
ucaauaccuaugauuuaag

SEQ ID NO: 1278724 - RNA, 19 nt, Artificial Sequence
  Description of Artificial Sequence: Synthetic oligonucleotide
  Sense strand starting at position 2335 of SEQ ID NO: 1241520
uaagucuaacgauaacagu

SEQ ID NO: 1278725 - RNA, 19 nt, Artificial Sequence
  Description of Artificial Sequence: Synthetic oligonucleotide
  Antisense strand to SEQ ID NO: 1278724
acuguuaucguuagacuua

SEQ ID NO: 1278726 - RNA, 19 nt, Artificial Sequence
  Description of Artificial Sequence: Synthetic oligonucleotide
  Sense strand starting at position 2369 of SEQ ID NO: 1241520
gcugacaaugugugaaaca

SEQ ID NO: 1278727 - RNA, 19 nt, Artificial Sequence
  Description of Artificial Sequence: Synthetic oligonucleotide
  Antisense strand to SEQ ID NO: 1278726
uguuucacacauugucagc

SEQ ID NO: 1278728 - RNA, 19 nt, Artificial Sequence
  Description of Artificial Sequence: Synthetic oligonucleotide
  Sense strand starting at position 2477 of SEQ ID NO: 1241520
ggcucuuaagcacauuaua

SEQ ID NO: 1278729 - RNA, 19 nt, Artificial Sequence
  Description of Artificial Sequence: Synthetic oligonucleotide
  Antisense strand to SEQ ID NO: 1278728
uauaaugugcuuaagagcc

SEQ ID NO: 1278730 - RNA, 19 nt, Artificial Sequence
  Description of Artificial Sequence: Synthetic oligonucleotide
  Sense strand starting at position 2497 of SEQ ID NO: 1241520
ugaaguuucgauggacagu

SEQ ID NO: 1278731 - RNA, 19 nt, Artificial Sequence
  Description of Artificial Sequence: Synthetic oligonucleotide
  Antisense strand to SEQ ID NO: 1278730
acuguccaucgaaacuuca

SEQ ID NO: 1278732 - RNA, 19 nt, Artificial Sequence
  Description of Artificial Sequence: Synthetic oligonucleotide
  Sense strand starting at position 2498 of SEQ ID NO: 1241520
gaaguuucgauggacaguu

SEQ ID NO: 1278733 - RNA, 19 nt, Artificial Sequence
  Description of Artificial Sequence: Synthetic oligonucleotide
  Antisense strand to SEQ ID NO: 1278732
aacuguccaucgaaacuuc

SEQ ID NO: 1278734 - RNA, 19 nt, Artificial Sequence
  Description of Artificial Sequence: Synthetic oligonucleotide
  Sense strand starting at position 2525 of SEQ ID NO: 1241520
cuuguaaauuuccagagau

SEQ ID NO: 1278735 - RNA, 19 nt, Artificial Sequence
  Description of Artificial Sequence: Synthetic oligonucleotide
  Antisense strand to SEQ ID NO: 1278734
aucucuggaaauuuacaag

SEQ ID NO: 1278736 - RNA, 19 nt, Artificial Sequence
  Description of Artificial Sequence: Synthetic oligonucleotide
  Sense strand starting at position 2547 of SEQ ID NO: 1241520
cuguuaaaguauucccaga

SEQ ID NO: 1278737 - RNA, 19 nt, Artificial Sequence
  Description of Artificial Sequence: Synthetic oligonucleotide
  Antisense strand to SEQ ID NO: 1278736
ucugggaauacuuuaacag

SEQ ID NO: 1278738 - RNA, 19 nt, Artificial Sequence
  Description of Artificial Sequence: Synthetic oligonucleotide
  Sense strand starting at position 2549 of SEQ ID NO: 1241520
guuaaaguauucccagaua

SEQ ID NO: 1278739 - RNA, 19 nt, Artificial Sequence
  Description of Artificial Sequence: Synthetic oligonucleotide
  Antisense strand to SEQ ID NO: 1278738
uaucugggaauacuuuaac

SEQ ID NO: 1278740 - RNA, 19 nt, Artificial Sequence
  Description of Artificial Sequence: Synthetic oligonucleotide
  Sense strand starting at position 2711 of SEQ ID NO: 1241520
auaugacuguguuccuuau

SEQ ID NO: 1278741 - RNA, 19 nt, Artificial Sequence
  Description of Artificial Sequence: Synthetic oligonucleotide
  Antisense strand to SEQ ID NO: 1278740
auaaggaacacagucauau

SEQ ID NO: 1278742 - RNA, 19 nt, Artificial Sequence
  Description of Artificial Sequence: Synthetic oligonucleotide
  Sense strand starting at position 2713 of SEQ ID NO: 1241520
augacuguguuccuuauaa

SEQ ID NO: 1278743 - RNA, 19 nt, Artificial Sequence
  Description of Artificial Sequence: Synthetic oligonucleotide
  Antisense strand to SEQ ID NO: 1278742
uuauaaggaacacagucau

SEQ ID NO: 1278744 - RNA, 19 nt, Artificial Sequence
  Description of Artificial Sequence: Synthetic oligonucleotide
  Sense strand starting at position 2791 of SEQ ID NO: 1241520
augggaaagugcucaaaga

SEQ ID NO: 1278745 - RNA, 19 nt, Artificial Sequence
  Description of Artificial Sequence: Synthetic oligonucleotide
  Antisense strand to SEQ ID NO: 1278744
ucuuugagcacuuucccau

SEQ ID NO: 1278746 - RNA, 19 nt, Artificial Sequence
  Description of Artificial Sequence: Synthetic oligonucleotide
  Sense strand starting at position 2801 of SEQ ID NO: 1241520
gcucaaagaucagucucuu

SEQ ID NO: 1278747 - RNA, 19 nt, Artificial Sequence
  Description of Artificial Sequence: Synthetic oligonucleotide
  Antisense strand to SEQ ID NO: 1278746
aagagacugaucuuugagc

SEQ ID NO: 1278748 - RNA, 19 nt, Artificial Sequence
  Description of Artificial Sequence: Synthetic oligonucleotide
  Sense strand starting at position 3077 of SEQ ID NO: 1241520
uugaaucauuaguugugua

SEQ ID NO: 1278749 - RNA, 19 nt, Artificial Sequence
  Description of Artificial Sequence: Synthetic oligonucleotide
  Antisense strand to SEQ ID NO: 1278748
uacacaacuaaugauucaa

SEQ ID NO: 1278750 - RNA, 19 nt, Artificial Sequence
  Description of Artificial Sequence: Synthetic oligonucleotide
  Sense strand starting at position 3078 of SEQ ID NO: 1241520
ugaaucauuaguuguguau

SEQ ID NO: 1278751 - RNA, 19 nt, Artificial Sequence
  Description of Artificial Sequence: Synthetic oligonucleotide
  Antisense strand to SEQ ID NO: 1278750
auacacaacuaaugauuca

SEQ ID NO: 1278752 - RNA, 19 nt, Artificial Sequence
  Description of Artificial Sequence: Synthetic oligonucleotide
  Sense strand starting at position 3117 of SEQ ID NO: 1241520
guuguagggacaugggaau

SEQ ID NO: 1278753 - RNA, 19 nt, Artificial Sequence
  Description of Artificial Sequence: Synthetic oligonucleotide
  Antisense strand to SEQ ID NO: 1278752
auucccaugucccuacaac

SEQ ID NO: 1278754 - RNA, 19 nt, Artificial Sequence
  Description of Artificial Sequence: Synthetic oligonucleotide
  Sense strand starting at position 3181 of SEQ ID NO: 1241520
uggcauuauugaguugaca

SEQ ID NO: 1278755 - RNA, 19 nt, Artificial Sequence
  Description of Artificial Sequence: Synthetic oligonucleotide
  Antisense strand to SEQ ID NO: 1278754
ugucaacucaauaaugcca

SEQ ID NO: 1278756 - RNA, 19 nt, Artificial Sequence
  Description of Artificial Sequence: Synthetic oligonucleotide
  Sense strand starting at position 3216 of SEQ ID NO: 1241520
agaaucuuaugggaauuua

SEQ ID NO: 1278757 - RNA, 19 nt, Artificial Sequence
  Description of Artificial Sequence: Synthetic oligonucleotide
  Antisense strand to SEQ ID NO: 1278756
uaaauucccauaagauucu

SEQ ID NO: 1278758 - RNA, 19 nt, Artificial Sequence
  Description of Artificial Sequence: Synthetic oligonucleotide
  Sense strand starting at position 3280 of SEQ ID NO: 1241520
uugggaaaguccuaauuuc

SEQ ID NO: 1278759 - RNA, 19 nt, Artificial Sequence
  Description of Artificial Sequence: Synthetic oligonucleotide
  Antisense strand to SEQ ID NO: 1278758
gaaauuaggacuuucccaa

SEQ ID NO: 1278760 - RNA, 19 nt, Artificial Sequence
  Description of Artificial Sequence: Synthetic oligonucleotide
  Sense strand starting at position 3561 of SEQ ID NO: 1241520
ugguaaugugcagaaucaa

SEQ ID NO: 1278761 - RNA, 19 nt, Artificial Sequence
  Description of Artificial Sequence: Synthetic oligonucleotide
  Antisense strand to SEQ ID NO: 1278760
uugauucugcacauuacca

SEQ ID NO: 1278762 - RNA, 19 nt, Artificial Sequence
  Description of Artificial Sequence: Synthetic oligonucleotide
  Sense strand starting at position 3588 of SEQ ID NO: 1241520
guguucuugcaggagacau

SEQ ID NO: 1278763 - RNA, 19 nt, Artificial Sequence
  Description of Artificial Sequence: Synthetic oligonucleotide
  Antisense strand to SEQ ID NO: 1278762
augucuccugcaagaacac

SEQ ID NO: 1278764 - RNA, 19 nt, Artificial Sequence
  Description of Artificial Sequence: Synthetic oligonucleotide
  Sense strand starting at position 3684 of SEQ ID NO: 1241520
gcagcuuauuugccaugaa

SEQ ID NO: 1278765 - RNA, 19 nt, Artificial Sequence
  Description of Artificial Sequence: Synthetic oligonucleotide
  Antisense strand to SEQ ID NO: 1278764
uucauggcaaauaagcugc

SEQ ID NO: 1278766 - RNA, 19 nt, Artificial Sequence
  Description of Artificial Sequence: Synthetic oligonucleotide
  Sense strand starting at position 3707 of SEQ ID NO: 1241520
gauauuuaguuagcaguuu

SEQ ID NO: 1278767 - RNA, 19 nt, Artificial Sequence
  Description of Artificial Sequence: Synthetic oligonucleotide
  Antisense strand to SEQ ID NO: 1278766
aaacugcuaacuaaauauc

SEQ ID NO: 1278768 - RNA, 19 nt, Artificial Sequence
  Description of Artificial Sequence: Synthetic oligonucleotide
  Sense strand starting at position 3713 of SEQ ID NO: 1241520
uaguuagcaguuuagaaga

SEQ ID NO: 1278769 - RNA, 19 nt, Artificial Sequence
  Description of Artificial Sequence: Synthetic oligonucleotide
  Antisense strand to SEQ ID NO: 1278768
ucuucuaaacugcuaacua

SEQ ID NO: 1278770 - RNA, 19 nt, Artificial Sequence
  Description of Artificial Sequence: Synthetic oligonucleotide
  Sense strand starting at position 3921 of SEQ ID NO: 1241520
cagaaaugugaaugugauu

SEQ ID NO: 1278771 - RNA, 19 nt, Artificial Sequence
  Description of Artificial Sequence: Synthetic oligonucleotide
  Antisense strand to SEQ ID NO: 1278770
aaucacauucacauuucug

SEQ ID NO: 1278772 - RNA, 19 nt, Artificial Sequence
  Description of Artificial Sequence: Synthetic oligonucleotide
  Sense strand starting at position 3926 of SEQ ID NO: 1241520
augugaaugugauuguaau

SEQ ID NO: 1278773 - RNA, 19 nt, Artificial Sequence
  Description of Artificial Sequence: Synthetic oligonucleotide
  Antisense strand to SEQ ID NO: 1278772
auuacaaucacauucacau

SEQ ID NO: 1278774 - RNA, 19 nt, Artificial Sequence
  Description of Artificial Sequence: Synthetic oligonucleotide
  Sense strand starting at position 3927 of SEQ ID NO: 1241520
ugugaaugugauuguaauu

SEQ ID NO: 1278775 - RNA, 19 nt, Artificial Sequence
  Description of Artificial Sequence: Synthetic oligonucleotide
  Antisense strand to SEQ ID NO: 1278774
aauuacaaucacauucaca

SEQ ID NO: 1278776 - RNA, 19 nt, Artificial Sequence
  Description of Artificial Sequence: Synthetic oligonucleotide
  Sense strand starting at position 3964 of SEQ ID NO: 1241520
aguaacugucauuaugaau

SEQ ID NO: 1278777 - RNA, 19 nt, Artificial Sequence
  Description of Artificial Sequence: Synthetic oligonucleotide
  Antisense strand to SEQ ID NO: 1278776
auucauaaugacaguuacu

SEQ ID NO: 1278778 - RNA, 19 nt, Artificial Sequence
  Description of Artificial Sequence: Synthetic oligonucleotide
  Sense strand starting at position 135 of SEQ ID NO: 1241521
gagagagguucucuggguu

SEQ ID NO: 1278779 - RNA, 19 nt, Artificial Sequence
  Description of Artificial Sequence: Synthetic oligonucleotide
  Antisense strand to SEQ ID NO: 1278778
aacccagagaaccucucuc

SEQ ID NO: 1278780 - RNA, 19 nt, Artificial Sequence
  Description of Artificial Sequence: Synthetic oligonucleotide
  Sense strand starting at position 396 of SEQ ID NO: 1241521
ggaauuaucuagccaauca

SEQ ID NO: 1278781 - RNA, 19 nt, Artificial Sequence
  Description of Artificial Sequence: Synthetic oligonucleotide
  Antisense strand to SEQ ID NO: 1278780
ugauuggcuagauaauucc

SEQ ID NO: 1278782 - RNA, 19 nt, Artificial Sequence
  Description of Artificial Sequence: Synthetic oligonucleotide
  Sense strand starting at position 415 of SEQ ID NO: 1241521
gaggcagcccuuuaaauga

SEQ ID NO: 1278783 - RNA, 19 nt, Artificial Sequence
  Description of Artificial Sequence: Synthetic oligonucleotide
  Antisense strand to SEQ ID NO: 1278782
ucauuuaaagggcugccuc

SEQ ID NO: 1278784 - RNA, 19 nt, Artificial Sequence
  Description of Artificial Sequence: Synthetic oligonucleotide
  Sense strand starting at position 537 of SEQ ID NO: 1241521
ggagucucauaaccuaaua

SEQ ID NO: 1278785 - RNA, 19 nt, Artificial Sequence
  Description of Artificial Sequence: Synthetic oligonucleotide
  Antisense strand to SEQ ID NO: 1278784
uauuagguuaugagacucc

SEQ ID NO: 1278786 - RNA, 19 nt, Artificial Sequence
  Description of Artificial Sequence: Synthetic oligonucleotide
  Sense strand starting at position 695 of SEQ ID NO: 1241521
cugacaaauguuugaaugu

SEQ ID NO: 1278787 - RNA, 19 nt, Artificial Sequence
  Description of Artificial Sequence: Synthetic oligonucleotide
  Antisense strand to SEQ ID NO: 1278786
acauucaaacauuugucag

SEQ ID NO: 1278788 - RNA, 19 nt, Artificial Sequence
  Description of Artificial Sequence: Synthetic oligonucleotide
  Sense strand starting at position 710 of SEQ ID NO: 1241521
auguaugcccaccagagaa

SEQ ID NO: 1278789 - RNA, 19 nt, Artificial Sequence
  Description of Artificial Sequence: Synthetic oligonucleotide
  Antisense strand to SEQ ID NO: 1278788
uucucuggugggcauacau

SEQ ID NO: 1278790 - RNA, 19 nt, Artificial Sequence
  Description of Artificial Sequence: Synthetic oligonucleotide
  Sense strand starting at position 712 of SEQ ID NO: 1241521
guaugcccaccagagaauu

SEQ ID NO: 1278791 - RNA, 19 nt, Artificial Sequence
  Description of Artificial Sequence: Synthetic oligonucleotide
  Antisense strand to SEQ ID NO: 1278790
aauucucuggugggcauac

SEQ ID NO: 1278792 - RNA, 19 nt, Artificial Sequence
  Description of Artificial Sequence: Synthetic oligonucleotide
  Sense strand starting at position 725 of SEQ ID NO: 1241521
agaauuagguucucauuga

SEQ ID NO: 1278793 - RNA, 19 nt, Artificial Sequence
  Description of Artificial Sequence: Synthetic oligonucleotide
  Antisense strand to SEQ ID NO: 1278792
ucaaugagaaccuaauucu

SEQ ID NO: 1278794 - RNA, 19 nt, Artificial Sequence
  Description of Artificial Sequence: Synthetic oligonucleotide
  Sense strand starting at position 781 of SEQ ID NO: 1241521
gcaguaaaugcauacauau

SEQ ID NO: 1278795 - RNA, 19 nt, Artificial Sequence
  Description of Artificial Sequence: Synthetic oligonucleotide
  Antisense strand to SEQ ID NO: 1278794
auauguaugcauuuacugc

SEQ ID NO: 1278796 - RNA, 19 nt, Artificial Sequence
  Description of Artificial Sequence: Synthetic oligonucleotide
  Sense strand starting at position 994 of SEQ ID NO: 1241521
aguguauugaccugaggaa

SEQ ID NO: 1278797 - RNA, 19 nt, Artificial Sequence
  Description of Artificial Sequence: Synthetic oligonucleotide
  Antisense strand to SEQ ID NO: 1278796
uuccucaggucaauacacu

SEQ ID NO: 1278798 - RNA, 19 nt, Artificial Sequence
  Description of Artificial Sequence: Synthetic oligonucleotide
  Sense strand starting at position 995 of SEQ ID NO: 1241521
guguauugaccugaggaau

SEQ ID NO: 1278799 - RNA, 19 nt, Artificial Sequence
  Description of Artificial Sequence: Synthetic oligonucleotide
  Antisense strand to SEQ ID NO: 1278798
auuccucaggucaauacac

SEQ ID NO: 1278800 - RNA, 19 nt, Artificial Sequence
  Description of Artificial Sequence: Synthetic oligonucleotide
  Sense strand starting at position 1027 of SEQ ID NO: 1241521
gucuuaaugaaaggaaguu

SEQ ID NO: 1278801 - RNA, 19 nt, Artificial Sequence
  Description of Artificial Sequence: Synthetic oligonucleotide
  Antisense strand to SEQ ID NO: 1278800
aacuuccuuucauuaagac

SEQ ID NO: 1278802 - RNA, 19 nt, Artificial Sequence
  Description of Artificial Sequence: Synthetic oligonucleotide
  Sense strand starting at position 1990 of SEQ ID NO: 1241521
ggacuuauccaugguucca

SEQ ID NO: 1278803 - RNA, 19 nt, Artificial Sequence
  Description of Artificial Sequence: Synthetic oligonucleotide
  Antisense strand to SEQ ID NO: 1278802
uggaaccauggauaagucc

SEQ ID NO: 1278804 - RNA, 19 nt, Artificial Sequence
  Description of Artificial Sequence: Synthetic oligonucleotide
  Sense strand starting at position 2114 of SEQ ID NO: 1241521
uaaugugcauuugcugaau

SEQ ID NO: 1278805 - RNA, 19 nt, Artificial Sequence
  Description of Artificial Sequence: Synthetic oligonucleotide
  Antisense strand to SEQ ID NO: 1278804
auucagcaaaugcacauua

SEQ ID NO: 1278806 - RNA, 19 nt, Artificial Sequence
  Description of Artificial Sequence: Synthetic oligonucleotide
  Sense strand starting at position 2117 of SEQ ID NO: 1241521
ugugcauuugcugaaugca

SEQ ID NO: 1278807 - RNA, 19 nt, Artificial Sequence
  Description of Artificial Sequence: Synthetic oligonucleotide
  Antisense strand to SEQ ID NO: 1278806
ugcauucagcaaaugcaca

SEQ ID NO: 1278808 - RNA, 19 nt, Artificial Sequence
  Description of Artificial Sequence: Synthetic oligonucleotide
  Sense strand starting at position 2151 of SEQ ID NO: 1241521
ccauaauaguaugucugga

SEQ ID NO: 1278809 - RNA, 19 nt, Artificial Sequence
  Description of Artificial Sequence: Synthetic oligonucleotide
  Antisense strand to SEQ ID NO: 1278808
uccagacauacuauuaugg

SEQ ID NO: 1278810 - RNA, 19 nt, Artificial Sequence
  Description of Artificial Sequence: Synthetic oligonucleotide
  Sense strand starting at position 2153 of SEQ ID NO: 1241521
auaauaguaugucuggaua

SEQ ID NO: 1278811 - RNA, 19 nt, Artificial Sequence
  Description of Artificial Sequence: Synthetic oligonucleotide
  Antisense strand to SEQ ID NO: 1278810
uauccagacauacuauuau

SEQ ID NO: 1278812 - RNA, 19 nt, Artificial Sequence
  Description of Artificial Sequence: Synthetic oligonucleotide
  Sense strand starting at position 2156 of SEQ ID NO: 1241521
auaguaugucuggauaggu

SEQ ID NO: 1278813 - RNA, 19 nt, Artificial Sequence
  Description of Artificial Sequence: Synthetic oligonucleotide
  Antisense strand to SEQ ID NO: 1278812
accuauccagacauacuau

SEQ ID NO: 1278814 - RNA, 19 nt, Artificial Sequence
  Description of Artificial Sequence: Synthetic oligonucleotide
  Sense strand starting at position 2353 of SEQ ID NO: 1241521
agccucauagguugacaaa

SEQ ID NO: 1278815 - RNA, 19 nt, Artificial Sequence
  Description of Artificial Sequence: Synthetic oligonucleotide
  Antisense strand to SEQ ID NO: 1278814
uuugucaaccuaugaggcu

SEQ ID NO: 1278816 - RNA, 19 nt, Artificial Sequence
  Description of Artificial Sequence: Synthetic oligonucleotide
  Sense strand starting at position 2577 of SEQ ID NO: 1241521
uuuagaguuuaagcagaau

SEQ ID NO: 1278817 - RNA, 19 nt, Artificial Sequence
  Description of Artificial Sequence: Synthetic oligonucleotide
  Antisense strand to SEQ ID NO: 1278816
auucugcuuaaacucuaaa

SEQ ID NO: 1278818 - RNA, 19 nt, Artificial Sequence
  Description of Artificial Sequence: Synthetic oligonucleotide
  Sense strand starting at position 2623 of SEQ ID NO: 1241521
auuguauugcaacauauga

SEQ ID NO: 1278819 - RNA, 19 nt, Artificial Sequence
  Description of Artificial Sequence: Synthetic oligonucleotide
  Antisense strand to SEQ ID NO: 1278818
ucauauguugcaauacaau

SEQ ID NO: 1278820 - RNA, 19 nt, Artificial Sequence
  Description of Artificial Sequence: Synthetic oligonucleotide
  Sense strand starting at position 2672 of SEQ ID NO: 1241521
gaaauuuaccuucgugcuc

SEQ ID NO: 1278821 - RNA, 19 nt, Artificial Sequence
  Description of Artificial Sequence: Synthetic oligonucleotide
  Antisense strand to SEQ ID NO: 1278820
gagcacgaagguaaauuuc

SEQ ID NO: 1278822 - RNA, 19 nt, Artificial Sequence
  Description of Artificial Sequence: Synthetic oligonucleotide
  Sense strand starting at position 2695 of SEQ ID NO: 1241521
aggagucauuuacaauuag

SEQ ID NO: 1278823 - RNA, 19 nt, Artificial Sequence
  Description of Artificial Sequence: Synthetic oligonucleotide
  Antisense strand to SEQ ID NO: 1278822
cuaauuguaaaugacuccu

SEQ ID NO: 1278824 - RNA, 19 nt, Artificial Sequence
  Description of Artificial Sequence: Synthetic oligonucleotide
  Sense strand starting at position 2746 of SEQ ID NO: 1241521
auauuauacuggccuauag

SEQ ID NO: 1278825 - RNA, 19 nt, Artificial Sequence
  Description of Artificial Sequence: Synthetic oligonucleotide
  Antisense strand to SEQ ID NO: 1278824
cuauaggccaguauaauau

SEQ ID NO: 1278826 - RNA, 19 nt, Artificial Sequence
  Description of Artificial Sequence: Synthetic oligonucleotide
  Sense strand starting at position 2748 of SEQ ID NO: 1241521
auuauacuggccuauaguu

SEQ ID NO: 1278827 - RNA, 19 nt, Artificial Sequence
  Description of Artificial Sequence: Synthetic oligonucleotide
  Antisense strand to SEQ ID NO: 1278826
aacuauaggccaguauaau

SEQ ID NO: 1278828 - RNA, 19 nt, Artificial Sequence
  Description of Artificial Sequence: Synthetic oligonucleotide
  Sense strand starting at position 2779 of SEQ ID NO: 1241521
gucaauuaguuauccaaua

SEQ ID NO: 1278829 - RNA, 19 nt, Artificial Sequence
  Description of Artificial Sequence: Synthetic oligonucleotide
  Antisense strand to SEQ ID NO: 1278828
uauuggauaacuaauugac

SEQ ID NO: 1278830 - RNA, 19 nt, Artificial Sequence
  Description of Artificial Sequence: Synthetic oligonucleotide
  Sense strand starting at position 2847 of SEQ ID NO: 1241521
uucuguugauuauccaaga

SEQ ID NO: 1278831 - RNA, 19 nt, Artificial Sequence
  Description of Artificial Sequence: Synthetic oligonucleotide
  Antisense strand to SEQ ID NO: 1278830
ucuuggauaaucaacagaa

SEQ ID NO: 1278832 - RNA, 19 nt, Artificial Sequence
  Description of Artificial Sequence: Synthetic oligonucleotide
  Sense strand starting at position 2936 of SEQ ID NO: 1241521
agaguucuccaugaucuuc

SEQ ID NO: 1278833 - RNA, 19 nt, Artificial Sequence
  Description of Artificial Sequence: Synthetic oligonucleotide
  Antisense strand to SEQ ID NO: 1278832
gaagaucauggagaacucu

SEQ ID NO: 1278834 - RNA, 19 nt, Artificial Sequence
  Description of Artificial Sequence: Synthetic oligonucleotide
  Sense strand starting at position 3187 of SEQ ID NO: 1241521
guugacaacagucauagua

SEQ ID NO: 1278835 - RNA, 19 nt, Artificial Sequence
  Description of Artificial Sequence: Synthetic oligonucleotide
  Antisense strand to SEQ ID NO: 1278834
uacuaugacuguugucaac

SEQ ID NO: 1278836 - RNA, 19 nt, Artificial Sequence
  Description of Artificial Sequence: Synthetic oligonucleotide
  Sense strand starting at position 3201 of SEQ ID NO: 1241521
uaguaagaggccugagaga

SEQ ID NO: 1278837 - RNA, 19 nt, Artificial Sequence
  Description of Artificial Sequence: Synthetic oligonucleotide
  Antisense strand to SEQ ID NO: 1278836
ucucucaggccucuuacua

SEQ ID NO: 1278838 - RNA, 19 nt, Artificial Sequence
  Description of Artificial Sequence: Synthetic oligonucleotide
  Sense strand starting at position 3388 of SEQ ID NO: 1241521
uauuguguacucuauugga

SEQ ID NO: 1278839 - RNA, 19 nt, Artificial Sequence
  Description of Artificial Sequence: Synthetic oligonucleotide
  Antisense strand to SEQ ID NO: 1278838
uccaauagaguacacaaua

SEQ ID NO: 1278840 - RNA, 19 nt, Artificial Sequence
  Description of Artificial Sequence: Synthetic oligonucleotide
  Sense strand starting at position 3392 of SEQ ID NO: 1241521
guguacucuauuggaagaa

SEQ ID NO: 1278841 - RNA, 19 nt, Artificial Sequence
  Description of Artificial Sequence: Synthetic oligonucleotide
  Antisense strand to SEQ ID NO: 1278840
uucuuccaauagaguacac

SEQ ID NO: 1278842 - RNA, 19 nt, Artificial Sequence
  Description of Artificial Sequence: Synthetic oligonucleotide
  Sense strand starting at position 3503 of SEQ ID NO: 1241521
uguuuaaagcauuaguaac

SEQ ID NO: 1278843 - RNA, 19 nt, Artificial Sequence
  Description of Artificial Sequence: Synthetic oligonucleotide
  Antisense strand to SEQ ID NO: 1278842
guuacuaaugcuuuaaaca

SEQ ID NO: 1278844 - RNA, 19 nt, Artificial Sequence
  Description of Artificial Sequence: Synthetic oligonucleotide
  Sense strand starting at position 3520 of SEQ ID NO: 1241521
acaacaaaucagugucuau

SEQ ID NO: 1278845 - RNA, 19 nt, Artificial Sequence
  Description of Artificial Sequence: Synthetic oligonucleotide
  Antisense strand to SEQ ID NO: 1278844
auagacacugauuuguugu

SEQ ID NO: 1278846 - RNA, 19 nt, Artificial Sequence
  Description of Artificial Sequence: Synthetic oligonucleotide
  Sense strand starting at position 3523 of SEQ ID NO: 1241521
acaaaucagugucuauaau

SEQ ID NO: 1278847 - RNA, 19 nt, Artificial Sequence
  Description of Artificial Sequence: Synthetic oligonucleotide
  Antisense strand to SEQ ID NO: 1278846
auuauagacacugauuugu

SEQ ID NO: 1278848 - RNA, 19 nt, Artificial Sequence
  Description of Artificial Sequence: Synthetic oligonucleotide
  Sense strand starting at position 3594 of SEQ ID NO: 1241521
ugccaugugugacucauuu

SEQ ID NO: 1278849 - RNA, 19 nt, Artificial Sequence
  Description of Artificial Sequence: Synthetic oligonucleotide
  Antisense strand to SEQ ID NO: 1278848
aaaugagucacacauggca

SEQ ID NO: 1278850 - RNA, 19 nt, Artificial Sequence
  Description of Artificial Sequence: Synthetic oligonucleotide
  Sense strand starting at position 3889 of SEQ ID NO: 1241521
ggguuacuaaacugcagaa

SEQ ID NO: 1278851 - RNA, 19 nt, Artificial Sequence
  Description of Artificial Sequence: Synthetic oligonucleotide
  Antisense strand to SEQ ID NO: 1278850
uucugcaguuuaguaaccc

SEQ ID NO: 1278852 - RNA, 19 nt, Artificial Sequence
  Description of Artificial Sequence: Synthetic oligonucleotide
  Sense strand starting at position 3934 of SEQ ID NO: 1241521
acuaaucuguggucagaca

SEQ ID NO: 1278853 - RNA, 19 nt, Artificial Sequence
  Description of Artificial Sequence: Synthetic oligonucleotide
  Antisense strand to SEQ ID NO: 1278852
ugucugaccacagauuagu

SEQ ID NO: 1278854 - RNA, 19 nt, Artificial Sequence
  Description of Artificial Sequence: Synthetic oligonucleotide
  Sense strand starting at position 3935 of SEQ ID NO: 1241521
cuaaucuguggucagacau

SEQ ID NO: 1278855 - RNA, 19 nt, Artificial Sequence
  Description of Artificial Sequence: Synthetic oligonucleotide
  Antisense strand to SEQ ID NO: 1278854
augucugaccacagauuag

SEQ ID NO: 1278856 - RNA, 19 nt, Artificial Sequence
  Description of Artificial Sequence: Synthetic oligonucleotide
  Sense strand starting at position 3950 of SEQ ID NO: 1241521
acaucuaguaagggucaga

SEQ ID NO: 1278857 - RNA, 19 nt, Artificial Sequence
  Description of Artificial Sequence: Synthetic oligonucleotide
  Antisense strand to SEQ ID NO: 1278856
ucugacccuuacuagaugu

SEQ ID NO: 1278858 - RNA, 19 nt, Artificial Sequence
  Description of Artificial Sequence: Synthetic oligonucleotide
  Sense strand starting at position 37 of SEQ ID NO: 1241522
aguugagaauuugaaccua

SEQ ID NO: 1278859 - RNA, 19 nt, Artificial Sequence
  Description of Artificial Sequence: Synthetic oligonucleotide
  Antisense strand to SEQ ID NO: 1278858
uagguucaaauucucaacu

SEQ ID NO: 1278860 - RNA, 19 nt, Artificial Sequence
  Description of Artificial Sequence: Synthetic oligonucleotide
  Sense strand starting at position 128 of SEQ ID NO: 1241522
gcugcuuauagagaaugca

SEQ ID NO: 1278861 - RNA, 19 nt, Artificial Sequence
  Description of Artificial Sequence: Synthetic oligonucleotide
  Antisense strand to SEQ ID NO: 1278860
ugcauucucuauaagcagc

SEQ ID NO: 1278862 - RNA, 19 nt, Artificial Sequence
  Description of Artificial Sequence: Synthetic oligonucleotide
  Sense strand starting at position 169 of SEQ ID NO: 1241522
guaacugauuuaggauuaa

SEQ ID NO: 1278863 - RNA, 19 nt, Artificial Sequence
  Description of Artificial Sequence: Synthetic oligonucleotide
  Antisense strand to SEQ ID NO: 1278862
uuaauccuaaaucaguuac

SEQ ID NO: 1278864 - RNA, 19 nt, Artificial Sequence
  Description of Artificial Sequence: Synthetic oligonucleotide
  Sense strand starting at position 215 of SEQ ID NO: 1241522
aaaugauggugucuuuaau

SEQ ID NO: 1278865 - RNA, 19 nt, Artificial Sequence
  Description of Artificial Sequence: Synthetic oligonucleotide
  Antisense strand to SEQ ID NO: 1278864
auuaaagacaccaucauuu

SEQ ID NO: 1278866 - RNA, 19 nt, Artificial Sequence
  Description of Artificial Sequence: Synthetic oligonucleotide
  Sense strand starting at position 310 of SEQ ID NO: 1241522
gcacaaacaucagauuuag

SEQ ID NO: 1278867 - RNA, 19 nt, Artificial Sequence
  Description of Artificial Sequence: Synthetic oligonucleotide
  Antisense strand to SEQ ID NO: 1278866
cuaaaucugauguuugugc

SEQ ID NO: 1278868 - RNA, 19 nt, Artificial Sequence
  Description of Artificial Sequence: Synthetic oligonucleotide
  Sense strand starting at position 347 of SEQ ID NO: 1241522
uuggaauccuaccagagga

SEQ ID NO: 1278869 - RNA, 19 nt, Artificial Sequence
  Description of Artificial Sequence: Synthetic oligonucleotide
  Antisense strand to SEQ ID NO: 1278868
uccucugguaggauuccaa

SEQ ID NO: 1278870 - RNA, 19 nt, Artificial Sequence
  Description of Artificial Sequence: Synthetic oligonucleotide
  Sense strand starting at position 400 of SEQ ID NO: 1241522
aagguaaagcuacauggua

SEQ ID NO: 1278871 - RNA, 19 nt, Artificial Sequence
  Description of Artificial Sequence: Synthetic oligonucleotide
  Antisense strand to SEQ ID NO: 1278870
uaccauguagcuuuaccuu

SEQ ID NO: 1278872 - RNA, 19 nt, Artificial Sequence
  Description of Artificial Sequence: Synthetic oligonucleotide
  Sense strand starting at position 402 of SEQ ID NO: 1241522
gguaaagcuacaugguaua

SEQ ID NO: 1278873 - RNA, 19 nt, Artificial Sequence
  Description of Artificial Sequence: Synthetic oligonucleotide
  Antisense strand to SEQ ID NO: 1278872
uauaccauguagcuuuacc

SEQ ID NO: 1278874 - RNA, 19 nt, Artificial Sequence
  Description of Artificial Sequence: Synthetic oligonucleotide
  Sense strand starting at position 519 of SEQ ID NO: 1241522
agggcuguucguuuguagu

SEQ ID NO: 1278875 - RNA, 19 nt, Artificial Sequence
  Description of Artificial Sequence: Synthetic oligonucleotide
  Antisense strand to SEQ ID NO: 1278874
acuacaaacgaacagcccu

SEQ ID NO: 1278876 - RNA, 19 nt, Artificial Sequence
  Description of Artificial Sequence: Synthetic oligonucleotide
  Sense strand starting at position 605 of SEQ ID NO: 1241522
guggacucauucuuacuuu

SEQ ID NO: 1278877 - RNA, 19 nt, Artificial Sequence
  Description of Artificial Sequence: Synthetic oligonucleotide
  Antisense strand to SEQ ID NO: 1278876
aaaguaagaaugaguccac

SEQ ID NO: 1278878 - RNA, 19 nt, Artificial Sequence
  Description of Artificial Sequence: Synthetic oligonucleotide
  Sense strand starting at position 887 of SEQ ID NO: 1241522
gcugcagaucucuauccuu

SEQ ID NO: 1278879 - RNA, 19 nt, Artificial Sequence
  Description of Artificial Sequence: Synthetic oligonucleotide
  Antisense strand to SEQ ID NO: 1278878
aaggauagagaucugcagc

SEQ ID NO: 1278880 - RNA, 19 nt, Artificial Sequence
  Description of Artificial Sequence: Synthetic oligonucleotide
  Sense strand starting at position 1062 of SEQ ID NO: 1241522
ucuagaaauucugugcaga

SEQ ID NO: 1278881 - RNA, 19 nt, Artificial Sequence
  Description of Artificial Sequence: Synthetic oligonucleotide
  Antisense strand to SEQ ID NO: 1278880
ucugcacagaauuucuaga

SEQ ID NO: 1278882 - RNA, 19 nt, Artificial Sequence
  Description of Artificial Sequence: Synthetic oligonucleotide
  Sense strand starting at position 2087 of SEQ ID NO: 1241522
uuucuauuaguuggugaua

SEQ ID NO: 1278883 - RNA, 19 nt, Artificial Sequence
  Description of Artificial Sequence: Synthetic oligonucleotide
  Antisense strand to SEQ ID NO: 1278882
uaucaccaacuaauagaaa

SEQ ID NO: 1278884 - RNA, 19 nt, Artificial Sequence
  Description of Artificial Sequence: Synthetic oligonucleotide
  Sense strand starting at position 2088 of SEQ ID NO: 1241522
uucuauuaguuggugauaa

SEQ ID NO: 1278885 - RNA, 19 nt, Artificial Sequence
  Description of Artificial Sequence: Synthetic oligonucleotide
  Antisense strand to SEQ ID NO: 1278884
uuaucaccaacuaauagaa

SEQ ID NO: 1278886 - RNA, 19 nt, Artificial Sequence
  Description of Artificial Sequence: Synthetic oligonucleotide
  Sense strand starting at position 2090 of SEQ ID NO: 1241522
cuauuaguuggugauaaua

SEQ ID NO: 1278887 - RNA, 19 nt, Artificial Sequence
  Description of Artificial Sequence: Synthetic oligonucleotide
  Antisense strand to SEQ ID NO: 1278886
uauuaucaccaacuaauag

SEQ ID NO: 1278888 - RNA, 19 nt, Artificial Sequence
  Description of Artificial Sequence: Synthetic oligonucleotide
  Sense strand starting at position 2098 of SEQ ID NO: 1241522
uggugauaauaguugauga

SEQ ID NO: 1278889 - RNA, 19 nt, Artificial Sequence
  Description of Artificial Sequence: Synthetic oligonucleotide
  Antisense strand to SEQ ID NO: 1278888
ucaucaacuauuaucacca

SEQ ID NO: 1278890 - RNA, 19 nt, Artificial Sequence
  Description of Artificial Sequence: Synthetic oligonucleotide
  Sense strand starting at position 2099 of SEQ ID NO: 1241522
ggugauaauaguugaugau

SEQ ID NO: 1278891 - RNA, 19 nt, Artificial Sequence
  Description of Artificial Sequence: Synthetic oligonucleotide
  Antisense strand to SEQ ID NO: 1278890
aucaucaacuauuaucacc

SEQ ID NO: 1278892 - RNA, 19 nt, Artificial Sequence
  Description of Artificial Sequence: Synthetic oligonucleotide
  Sense strand starting at position 2105 of SEQ ID NO: 1241522
aauaguugaugauaugaga

SEQ ID NO: 1278893 - RNA, 19 nt, Artificial Sequence
  Description of Artificial Sequence: Synthetic oligonucleotide
  Antisense strand to SEQ ID NO: 1278892
ucucauaucaucaacuauu

SEQ ID NO: 1278894 - RNA, 19 nt, Artificial Sequence
  Description of Artificial Sequence: Synthetic oligonucleotide
  Sense strand starting at position 2365 of SEQ ID NO: 1241522
ccugcacuucuugagauua

SEQ ID NO: 1278895 - RNA, 19 nt, Artificial Sequence
  Description of Artificial Sequence: Synthetic oligonucleotide
  Antisense strand to SEQ ID NO: 1278894
uaaucucaagaagugcagg

SEQ ID NO: 1278896 - RNA, 19 nt, Artificial Sequence
  Description of Artificial Sequence: Synthetic oligonucleotide
  Sense strand starting at position 2370 of SEQ ID NO: 1241522
acuucuugagauuauguua

SEQ ID NO: 1278897 - RNA, 19 nt, Artificial Sequence
  Description of Artificial Sequence: Synthetic oligonucleotide
  Antisense strand to SEQ ID NO: 1278896
uaacauaaucucaagaagu

SEQ ID NO: 1278898 - RNA, 19 nt, Artificial Sequence
  Description of Artificial Sequence: Synthetic oligonucleotide
  Sense strand starting at position 2435 of SEQ ID NO: 1241522
uguucuacaucucugaagu

SEQ ID NO: 1278899 - RNA, 19 nt, Artificial Sequence
  Description of Artificial Sequence: Synthetic oligonucleotide
  Antisense strand to SEQ ID NO: 1278898
acuucagagauguagaaca

SEQ ID NO: 1278900 - RNA, 19 nt, Artificial Sequence
  Description of Artificial Sequence: Synthetic oligonucleotide
  Sense strand starting at position 2436 of SEQ ID NO: 1241522
guucuacaucucugaagua

SEQ ID NO: 1278901 - RNA, 19 nt, Artificial Sequence
  Description of Artificial Sequence: Synthetic oligonucleotide
  Antisense strand to SEQ ID NO: 1278900
uacuucagagauguagaac

SEQ ID NO: 1278902 - RNA, 19 nt, Artificial Sequence
  Description of Artificial Sequence: Synthetic oligonucleotide
  Sense strand starting at position 2448 of SEQ ID NO: 1241522
ugaaguaauuuaugaaggu

SEQ ID NO: 1278903 - RNA, 19 nt, Artificial Sequence
  Description of Artificial Sequence: Synthetic oligonucleotide
  Antisense strand to SEQ ID NO: 1278902
accuucauaaauuacuuca

SEQ ID NO: 1278904 - RNA, 19 nt, Artificial Sequence
  Description of Artificial Sequence: Synthetic oligonucleotide
  Sense strand starting at position 2449 of SEQ ID NO: 1241522
gaaguaauuuaugaagguu

SEQ ID NO: 1278905 - RNA, 19 nt, Artificial Sequence
  Description of Artificial Sequence: Synthetic oligonucleotide
  Antisense strand to SEQ ID NO: 1278904
aaccuucauaaauuacuuc

SEQ ID NO: 1278906 - RNA, 19 nt, Artificial Sequence
  Description of Artificial Sequence: Synthetic oligonucleotide
  Sense strand starting at position 2663 of SEQ ID NO: 1241522
aacugaggguuugugacaa

SEQ ID NO: 1278907 - RNA, 19 nt, Artificial Sequence
  Description of Artificial Sequence: Synthetic oligonucleotide
  Antisense strand to SEQ ID NO: 1278906
uugucacaaacccucaguu

SEQ ID NO: 1278908 - RNA, 19 nt, Artificial Sequence
  Description of Artificial Sequence: Synthetic oligonucleotide
  Sense strand starting at position 2801 of SEQ ID NO: 1241522
cacguuauuugaucuguga

SEQ ID NO: 1278909 - RNA, 19 nt, Artificial Sequence
  Description of Artificial Sequence: Synthetic oligonucleotide
  Antisense strand to SEQ ID NO: 1278908
ucacagaucaaauaacgug

SEQ ID NO: 1278910 - RNA, 19 nt, Artificial Sequence
  Description of Artificial Sequence: Synthetic oligonucleotide
  Sense strand starting at position 2808 of SEQ ID NO: 1241522
uuugaucugugaccaguaa

SEQ ID NO: 1278911 - RNA, 19 nt, Artificial Sequence
  Description of Artificial Sequence: Synthetic oligonucleotide
  Antisense strand to SEQ ID NO: 1278910
uuacuggucacagaucaaa

SEQ ID NO: 1278912 - RNA, 19 nt, Artificial Sequence
  Description of Artificial Sequence: Synthetic oligonucleotide
  Sense strand starting at position 2809 of SEQ ID NO: 1241522
uugaucugugaccaguaau

SEQ ID NO: 1278913 - RNA, 19 nt, Artificial Sequence
  Description of Artificial Sequence: Synthetic oligonucleotide
  Antisense strand to SEQ ID NO: 1278912
auuacuggucacagaucaa

SEQ ID NO: 1278914 - RNA, 19 nt, Artificial Sequence
  Description of Artificial Sequence: Synthetic oligonucleotide
  Sense strand starting at position 3160 of SEQ ID NO: 1241522
cggagaauuugcaggguau

SEQ ID NO: 1278915 - RNA, 19 nt, Artificial Sequence
  Description of Artificial Sequence: Synthetic oligonucleotide
  Antisense strand to SEQ ID NO: 1278914
auacccugcaaauucuccg

SEQ ID NO: 1278916 - RNA, 19 nt, Artificial Sequence
  Description of Artificial Sequence: Synthetic oligonucleotide
  Sense strand starting at position 3286 of SEQ ID NO: 1241522
agauaauaaugugcaaugu

SEQ ID NO: 1278917 - RNA, 19 nt, Artificial Sequence
  Description of Artificial Sequence: Synthetic oligonucleotide
  Antisense strand to SEQ ID NO: 1278916
acauugcacauuauuaucu

SEQ ID NO: 1278918 - RNA, 19 nt, Artificial Sequence
  Description of Artificial Sequence: Synthetic oligonucleotide
  Sense strand starting at position 3471 of SEQ ID NO: 1241522
gccagaagugauuaagcuu

SEQ ID NO: 1278919 - RNA, 19 nt, Artificial Sequence
  Description of Artificial Sequence: Synthetic oligonucleotide
  Antisense strand to SEQ ID NO: 1278918
aagcuuaaucacuucuggc

SEQ ID NO: 1278920 - RNA, 19 nt, Artificial Sequence
  Description of Artificial Sequence: Synthetic oligonucleotide
  Sense strand starting at position 3717 of SEQ ID NO: 1241522
agccuaauccagggcaaga

SEQ ID NO: 1278921 - RNA, 19 nt, Artificial Sequence
  Description of Artificial Sequence: Synthetic oligonucleotide
  Antisense strand to SEQ ID NO: 1278920
ucuugcccuggauuaggcu

SEQ ID NO: 1278922 - RNA, 19 nt, Artificial Sequence
  Description of Artificial Sequence: Synthetic oligonucleotide
  Sense strand starting at position 3752 of SEQ ID NO: 1241522
uucugugaaaucugggaga

SEQ ID NO: 1278923 - RNA, 19 nt, Artificial Sequence
  Description of Artificial Sequence: Synthetic oligonucleotide
  Antisense strand to SEQ ID NO: 1278922
ucucccagauuucacagaa

SEQ ID NO: 1278924 - RNA, 19 nt, Artificial Sequence
  Description of Artificial Sequence: Synthetic oligonucleotide
  Sense strand starting at position 3755 of SEQ ID NO: 1241522
ugugaaaucugggagagga

SEQ ID NO: 1278925 - RNA, 19 nt, Artificial Sequence
  Description of Artificial Sequence: Synthetic oligonucleotide
  Antisense strand to SEQ ID NO: 1278924
uccucucccagauuucaca

SEQ ID NO: 1278926 - RNA, 19 nt, Artificial Sequence
  Description of Artificial Sequence: Synthetic oligonucleotide
  Sense strand starting at position 3814 of SEQ ID NO: 1241522
aguucaugagguugaaaga

SEQ ID NO: 1278927 - RNA, 19 nt, Artificial Sequence
  Description of Artificial Sequence: Synthetic oligonucleotide
  Antisense strand to SEQ ID NO: 1278926
ucuuucaaccucaugaacu

SEQ ID NO: 1278928 - RNA, 19 nt, Artificial Sequence
  Description of Artificial Sequence: Synthetic oligonucleotide
  Sense strand starting at position 3885 of SEQ ID NO: 1241522
auagaagcugccgaaaguu

SEQ ID NO: 1278929 - RNA, 19 nt, Artificial Sequence
  Description of Artificial Sequence: Synthetic oligonucleotide
  Antisense strand to SEQ ID NO: 1278928
aacuuucggcagcuucuau

SEQ ID NO: 1278930 - RNA, 19 nt, Artificial Sequence
  Description of Artificial Sequence: Synthetic oligonucleotide
  Sense strand starting at position 3893 of SEQ ID NO: 1241522
ugccgaaaguuauccagaa

SEQ ID NO: 1278931 - RNA, 19 nt, Artificial Sequence
  Description of Artificial Sequence: Synthetic oligonucleotide
  Antisense strand to SEQ ID NO: 1278930
uucuggauaacuuucggca

SEQ ID NO: 1278932 - RNA, 19 nt, Artificial Sequence
  Description of Artificial Sequence: Synthetic oligonucleotide
  Sense strand starting at position 3894 of SEQ ID NO: 1241522
gccgaaaguuauccagaau

SEQ ID NO: 1278933 - RNA, 19 nt, Artificial Sequence
  Description of Artificial Sequence: Synthetic oligonucleotide
  Antisense strand to SEQ ID NO: 1278932
auucuggauaacuuucggc

SEQ ID NO: 1278934 - RNA, 19 nt, Artificial Sequence
  Description of Artificial Sequence: Synthetic oligonucleotide
  Sense strand starting at position 3905 of SEQ ID NO: 1241522
uccagaauaucugacuaag

SEQ ID NO: 1278935 - RNA, 19 nt, Artificial Sequence
  Description of Artificial Sequence: Synthetic oligonucleotide
  Antisense strand to SEQ ID NO: 1278934
cuuagucagauauucugga

SEQ ID NO: 1278936 - RNA, 19 nt, Artificial Sequence
  Description of Artificial Sequence: Synthetic oligonucleotide
  Sense strand starting at position 3930 of SEQ ID NO: 1241522
gauaaagauggcuaugcua

SEQ ID NO: 1278937 - RNA, 19 nt, Artificial Sequence
  Description of Artificial Sequence: Synthetic oligonucleotide
  Antisense strand to SEQ ID NO: 1278936
uagcauagccaucuuuauc

SEQ ID NO: 1278938 - RNA, 19 nt, Artificial Sequence
  Description of Artificial Sequence: Synthetic oligonucleotide
  Sense strand starting at position 105 of SEQ ID NO: 1241523
caggucucucaaugggaaa

SEQ ID NO: 1278939 - RNA, 19 nt, Artificial Sequence
  Description of Artificial Sequence: Synthetic oligonucleotide
  Antisense strand to SEQ ID NO: 1278938
uuucccauugagagaccug

SEQ ID NO: 1278940 - RNA, 19 nt, Artificial Sequence
  Description of Artificial Sequence: Synthetic oligonucleotide
  Sense strand starting at position 106 of SEQ ID NO: 1241523
aggucucucaaugggaaau

SEQ ID NO: 1278941 - RNA, 19 nt, Artificial Sequence
  Description of Artificial Sequence: Synthetic oligonucleotide
  Antisense strand to SEQ ID NO: 1278940
auuucccauugagagaccu

SEQ ID NO: 1278942 - RNA, 19 nt, Artificial Sequence
  Description of Artificial Sequence: Synthetic oligonucleotide
  Sense strand starting at position 107 of SEQ ID NO: 1241523
ggucucucaaugggaaaua

SEQ ID NO: 1278943 - RNA, 19 nt, Artificial Sequence
  Description of Artificial Sequence: Synthetic oligonucleotide
  Antisense strand to SEQ ID NO: 1278942
uauuucccauugagagacc

SEQ ID NO: 1278944 - RNA, 19 nt, Artificial Sequence
  Description of Artificial Sequence: Synthetic oligonucleotide
  Sense strand starting at position 108 of SEQ ID NO: 1241523
gucucucaaugggaaauaa

SEQ ID NO: 1278945 - RNA, 19 nt, Artificial Sequence
  Description of Artificial Sequence: Synthetic oligonucleotide
  Antisense strand to SEQ ID NO: 1278944
uuauuucccauugagagac

SEQ ID NO: 1278946 - RNA, 19 nt, Artificial Sequence
  Description of Artificial Sequence: Synthetic oligonucleotide
  Sense strand starting at position 119 of SEQ ID NO: 1241523
ggaaauaacucugaauuaa

SEQ ID NO: 1278947 - RNA, 19 nt, Artificial Sequence
  Description of Artificial Sequence: Synthetic oligonucleotide
  Antisense strand to SEQ ID NO: 1278946
uuaauucagaguuauuucc

SEQ ID NO: 1278948 - RNA, 19 nt, Artificial Sequence
  Description of Artificial Sequence: Synthetic oligonucleotide
  Sense strand starting at position 130 of SEQ ID NO: 1241523
ugaauuaagcgcuaacaaa

SEQ ID NO: 1278949 - RNA, 19 nt, Artificial Sequence
  Description of Artificial Sequence: Synthetic oligonucleotide
  Antisense strand to SEQ ID NO: 1278948
uuuguuagcgcuuaauuca

SEQ ID NO: 1278950 - RNA, 19 nt, Artificial Sequence
  Description of Artificial Sequence: Synthetic oligonucleotide
  Sense strand starting at position 181 of SEQ ID NO: 1241523
gaggcaggauuagcaauua

SEQ ID NO: 1278951 - RNA, 19 nt, Artificial Sequence
  Description of Artificial Sequence: Synthetic oligonucleotide
  Antisense strand to SEQ ID NO: 1278950
uaauugcuaauccugccuc

SEQ ID NO: 1278952 - RNA, 19 nt, Artificial Sequence
  Description of Artificial Sequence: Synthetic oligonucleotide
  Sense strand starting at position 455 of SEQ ID NO: 1241523
ugaguucugucuccaacug

SEQ ID NO: 1278953 - RNA, 19 nt, Artificial Sequence
  Description of Artificial Sequence: Synthetic oligonucleotide
  Antisense strand to SEQ ID NO: 1278952
caguuggagacagaacuca

SEQ ID NO: 1278954 - RNA, 19 nt, Artificial Sequence
  Description of Artificial Sequence: Synthetic oligonucleotide
  Sense strand starting at position 456 of SEQ ID NO: 1241523
gaguucugucuccaacugu

SEQ ID NO: 1278955 - RNA, 19 nt, Artificial Sequence
  Description of Artificial Sequence: Synthetic oligonucleotide
  Antisense strand to SEQ ID NO: 1278954
acaguuggagacagaacuc

SEQ ID NO: 1278956 - RNA, 19 nt, Artificial Sequence
  Description of Artificial Sequence: Synthetic oligonucleotide
  Sense strand starting at position 590 of SEQ ID NO: 1241523
cagcaagauguuuaccaga

SEQ ID NO: 1278957 - RNA, 19 nt, Artificial Sequence
  Description of Artificial Sequence: Synthetic oligonucleotide
  Antisense strand to SEQ ID NO: 1278956
ucugguaaacaucuugcug

SEQ ID NO: 1278958 - RNA, 19 nt, Artificial Sequence
  Description of Artificial Sequence: Synthetic oligonucleotide
  Sense strand starting at position 592 of SEQ ID NO: 1241523
gcaagauguuuaccagaua

SEQ ID NO: 1278959 - RNA, 19 nt, Artificial Sequence
  Description of Artificial Sequence: Synthetic oligonucleotide
  Antisense strand to SEQ ID NO: 1278958
uaucugguaaacaucuugc

SEQ ID NO: 1278960 - RNA, 19 nt, Artificial Sequence
  Description of Artificial Sequence: Synthetic oligonucleotide
  Sense strand starting at position 975 of SEQ ID NO: 1241523
aagugaaugcagcauuauu

SEQ ID NO: 1278961 - RNA, 19 nt, Artificial Sequence
  Description of Artificial Sequence: Synthetic oligonucleotide
  Antisense strand to SEQ ID NO: 1278960
aauaaugcugcauucacuu

SEQ ID NO: 1278962 - RNA, 19 nt, Artificial Sequence
  Description of Artificial Sequence: Synthetic oligonucleotide
  Sense strand starting at position 1019 of SEQ ID NO: 1241523
caaugauccucaggaggac

SEQ ID NO: 1278963 - RNA, 19 nt, Artificial Sequence
  Description of Artificial Sequence: Synthetic oligonucleotide
  Antisense strand to SEQ ID NO: 1278962
guccuccugaggaucauug

SEQ ID NO: 1278964 - RNA, 19 nt, Artificial Sequence
  Description of Artificial Sequence: Synthetic oligonucleotide
  Sense strand starting at position 2125 of SEQ ID NO: 1241523
cagauuacaugaggauaca

SEQ ID NO: 1278965 - RNA, 19 nt, Artificial Sequence
  Description of Artificial Sequence: Synthetic oligonucleotide
  Antisense strand to SEQ ID NO: 1278964
uguauccucauguaaucug

SEQ ID NO: 1278966 - RNA, 19 nt, Artificial Sequence
  Description of Artificial Sequence: Synthetic oligonucleotide
  Sense strand starting at position 2180 of SEQ ID NO: 1241523
gagaaaguaugugaugaac

SEQ ID NO: 1278967 - RNA, 19 nt, Artificial Sequence
  Description of Artificial Sequence: Synthetic oligonucleotide
  Antisense strand to SEQ ID NO: 1278966
guucaucacauacuuucuc

SEQ ID NO: 1278968 - RNA, 19 nt, Artificial Sequence
  Description of Artificial Sequence: Synthetic oligonucleotide
  Sense strand starting at position 2182 of SEQ ID NO: 1241523
gaaaguaugugaugaacuu

SEQ ID NO: 1278969 - RNA, 19 nt, Artificial Sequence
  Description of Artificial Sequence: Synthetic oligonucleotide
  Antisense strand to SEQ ID NO: 1278968
aaguucaucacauacuuuc

SEQ ID NO: 1278970 - RNA, 19 nt, Artificial Sequence
  Description of Artificial Sequence: Synthetic oligonucleotide
  Sense strand starting at position 2198 of SEQ ID NO: 1241523
cuuauaaauugggaacacu

SEQ ID NO: 1278971 - RNA, 19 nt, Artificial Sequence
  Description of Artificial Sequence: Synthetic oligonucleotide
  Antisense strand to SEQ ID NO: 1278970
aguguucccaauuuauaag

SEQ ID NO: 1278972 - RNA, 19 nt, Artificial Sequence
  Description of Artificial Sequence: Synthetic oligonucleotide
  Sense strand starting at position 2248 of SEQ ID NO: 1241523
acucaaaucucggcuuguu

SEQ ID NO: 1278973 - RNA, 19 nt, Artificial Sequence
  Description of Artificial Sequence: Synthetic oligonucleotide
  Antisense strand to SEQ ID NO: 1278972
aacaagccgagauuugagu

SEQ ID NO: 1278974 - RNA, 19 nt, Artificial Sequence
  Description of Artificial Sequence: Synthetic oligonucleotide
  Sense strand starting at position 2251 of SEQ ID NO: 1241523
caaaucucggcuuguuaau

SEQ ID NO: 1278975 - RNA, 19 nt, Artificial Sequence
  Description of Artificial Sequence: Synthetic oligonucleotide
  Antisense strand to SEQ ID NO: 1278974
auuaacaagccgagauuug

SEQ ID NO: 1278976 - RNA, 19 nt, Artificial Sequence
  Description of Artificial Sequence: Synthetic oligonucleotide
  Sense strand starting at position 2288 of SEQ ID NO: 1241523
ucugaaauucggcaaugca

SEQ ID NO: 1278977 - RNA, 19 nt, Artificial Sequence
  Description of Artificial Sequence: Synthetic oligonucleotide
  Antisense strand to SEQ ID NO: 1278976
ugcauugccgaauuucaga

SEQ ID NO: 1278978 - RNA, 19 nt, Artificial Sequence
  Description of Artificial Sequence: Synthetic oligonucleotide
  Sense strand starting at position 2291 of SEQ ID NO: 1241523
gaaauucggcaaugcacua

SEQ ID NO: 1278979 - RNA, 19 nt, Artificial Sequence
  Description of Artificial Sequence: Synthetic oligonucleotide
  Antisense strand to SEQ ID NO: 1278978
uagugcauugccgaauuuc

SEQ ID NO: 1278980 - RNA, 19 nt, Artificial Sequence
  Description of Artificial Sequence: Synthetic oligonucleotide
  Sense strand starting at position 2553 of SEQ ID NO: 1241523
uuuccauaagcguaaccaa

SEQ ID NO: 1278981 - RNA, 19 nt, Artificial Sequence
  Description of Artificial Sequence: Synthetic oligonucleotide
  Antisense strand to SEQ ID NO: 1278980
uugguuacgcuuauggaaa

SEQ ID NO: 1278982 - RNA, 19 nt, Artificial Sequence
  Description of Artificial Sequence: Synthetic oligonucleotide
  Sense strand starting at position 2579 of SEQ ID NO: 1241523
auagcuuaauccuugguaa

SEQ ID NO: 1278983 - RNA, 19 nt, Artificial Sequence
  Description of Artificial Sequence: Synthetic oligonucleotide
  Antisense strand to SEQ ID NO: 1278982
uuaccaaggauuaagcuau

SEQ ID NO: 1278984 - RNA, 19 nt, Artificial Sequence
  Description of Artificial Sequence: Synthetic oligonucleotide
  Sense strand starting at position 2683 of SEQ ID NO: 1241523
cuacauugaguaugaaauu

SEQ ID NO: 1278985 - RNA, 19 nt, Artificial Sequence
  Description of Artificial Sequence: Synthetic oligonucleotide
  Antisense strand to SEQ ID NO: 1278984
aauuucauacucaauguag

SEQ ID NO: 1278986 - RNA, 19 nt, Artificial Sequence
  Description of Artificial Sequence: Synthetic oligonucleotide
  Sense strand starting at position 2728 of SEQ ID NO: 1241523
gguguagugaucugggaaa

SEQ ID NO: 1278987 - RNA, 19 nt, Artificial Sequence
  Description of Artificial Sequence: Synthetic oligonucleotide
  Antisense strand to SEQ ID NO: 1278986
uuucccagaucacuacacc

SEQ ID NO: 1278988 - RNA, 19 nt, Artificial Sequence
  Description of Artificial Sequence: Synthetic oligonucleotide
  Sense strand starting at position 2730 of SEQ ID NO: 1241523
uguagugaucugggaaaug

SEQ ID NO: 1278989 - RNA, 19 nt, Artificial Sequence
  Description of Artificial Sequence: Synthetic oligonucleotide
  Antisense strand to SEQ ID NO: 1278988
cauuucccagaucacuaca

SEQ ID NO: 1278990 - RNA, 19 nt, Artificial Sequence
  Description of Artificial Sequence: Synthetic oligonucleotide
  Sense strand starting at position 2739 of SEQ ID NO: 1241523
cugggaaaugaguaugcuu

SEQ ID NO: 1278991 - RNA, 19 nt, Artificial Sequence
  Description of Artificial Sequence: Synthetic oligonucleotide
  Antisense strand to SEQ ID NO: 1278990
aagcauacucauuucccag

SEQ ID NO: 1278992 - RNA, 19 nt, Artificial Sequence
  Description of Artificial Sequence: Synthetic oligonucleotide
  Sense strand starting at position 3108 of SEQ ID NO: 1241523
agauguggcuguguccaaa

SEQ ID NO: 1278993 - RNA, 19 nt, Artificial Sequence
  Description of Artificial Sequence: Synthetic oligonucleotide
  Antisense strand to SEQ ID NO: 1278992
uuuggacacagccacaucu

SEQ ID NO: 1278994 - RNA, 19 nt, Artificial Sequence
  Description of Artificial Sequence: Synthetic oligonucleotide
  Sense strand starting at position 3356 of SEQ ID NO: 1241523
cucagaaauugaguaaugu

SEQ ID NO: 1278995 - RNA, 19 nt, Artificial Sequence
  Description of Artificial Sequence: Synthetic oligonucleotide
  Antisense strand to SEQ ID NO: 1278994
acauuacucaauuucugag

SEQ ID NO: 1278996 - RNA, 19 nt, Artificial Sequence
  Description of Artificial Sequence: Synthetic oligonucleotide
  Sense strand starting at position 3360 of SEQ ID NO: 1241523
gaaauugaguaauguggga

SEQ ID NO: 1278997 - RNA, 19 nt, Artificial Sequence
  Description of Artificial Sequence: Synthetic oligonucleotide
  Antisense strand to SEQ ID NO: 1278996
ucccacauuacucaauuuc

SEQ ID NO: 1278998 - RNA, 19 nt, Artificial Sequence
  Description of Artificial Sequence: Synthetic oligonucleotide
  Sense strand starting at position 3364 of SEQ ID NO: 1241523
uugaguaaugugggacuau

SEQ ID NO: 1278999 - RNA, 19 nt, Artificial Sequence
  Description of Artificial Sequence: Synthetic oligonucleotide
  Antisense strand to SEQ ID NO: 1278998
auagucccacauuacucaa

SEQ ID NO: 1279000 - RNA, 19 nt, Artificial Sequence
  Description of Artificial Sequence: Synthetic oligonucleotide
  Sense strand starting at position 3365 of SEQ ID NO: 1241523
ugaguaaugugggacuauu

SEQ ID NO: 1279001 - RNA, 19 nt, Artificial Sequence
  Description of Artificial Sequence: Synthetic oligonucleotide
  Antisense strand to SEQ ID NO: 1279000
aauagucccacauuacuca

SEQ ID NO: 1279002 - RNA, 19 nt, Artificial Sequence
  Description of Artificial Sequence: Synthetic oligonucleotide
  Sense strand starting at position 3410 of SEQ ID NO: 1241523
ccauaaauugcccaguaug

SEQ ID NO: 1279003 - RNA, 19 nt, Artificial Sequence
  Description of Artificial Sequence: Synthetic oligonucleotide
  Antisense strand to SEQ ID NO: 1279002
cauacugggcaauuuaugg

SEQ ID NO: 1279004 - RNA, 19 nt, Artificial Sequence
  Description of Artificial Sequence: Synthetic oligonucleotide
  Sense strand starting at position 3517 of SEQ ID NO: 1241523
gguuauccagaaugacaua

SEQ ID NO: 1279005 - RNA, 19 nt, Artificial Sequence
  Description of Artificial Sequence: Synthetic oligonucleotide
  Antisense strand to SEQ ID NO: 1279004
uaugucauucuggauaacc

SEQ ID NO: 1279006 - RNA, 19 nt, Artificial Sequence
  Description of Artificial Sequence: Synthetic oligonucleotide
  Sense strand starting at position 3617 of SEQ ID NO: 1241523
acagguauagcuuauaaau

SEQ ID NO: 1279007 - RNA, 19 nt, Artificial Sequence
  Description of Artificial Sequence: Synthetic oligonucleotide
  Antisense strand to SEQ ID NO: 1279006
auuuauaagcuauaccugu

SEQ ID NO: 1279008 - RNA, 19 nt, Artificial Sequence
  Description of Artificial Sequence: Synthetic oligonucleotide
  Sense strand starting at position 3649 of SEQ ID NO: 1241523
auuaguuaugagggcuuga

SEQ ID NO: 1279009 - RNA, 19 nt, Artificial Sequence
  Description of Artificial Sequence: Synthetic oligonucleotide
  Antisense strand to SEQ ID NO: 1279008
ucaagcccucauaacuaau

SEQ ID NO: 1279010 - RNA, 19 nt, Artificial Sequence
  Description of Artificial Sequence: Synthetic oligonucleotide
  Sense strand starting at position 3658 of SEQ ID NO: 1241523
gagggcuugagcuaguuau

SEQ ID NO: 1279011 - RNA, 19 nt, Artificial Sequence
  Description of Artificial Sequence: Synthetic oligonucleotide
  Antisense strand to SEQ ID NO: 1279010
auaacuagcucaagcccuc

SEQ ID NO: 1279012 - RNA, 19 nt, Artificial Sequence
  Description of Artificial Sequence: Synthetic oligonucleotide
  Sense strand starting at position 3664 of SEQ ID NO: 1241523
uugagcuaguuauauacua

SEQ ID NO: 1279013 - RNA, 19 nt, Artificial Sequence
  Description of Artificial Sequence: Synthetic oligonucleotide
  Antisense strand to SEQ ID NO: 1279012
uaguauauaacuagcucaa

SEQ ID NO: 1279014 - RNA, 19 nt, Artificial Sequence
  Description of Artificial Sequence: Synthetic oligonucleotide
  Sense strand starting at position 3791 of SEQ ID NO: 1241523
gcuauuaugccauguaguu

SEQ ID NO: 1279015 - RNA, 19 nt, Artificial Sequence
  Description of Artificial Sequence: Synthetic oligonucleotide
  Antisense strand to SEQ ID NO: 1279014
aacuacauggcauaauagc

SEQ ID NO: 1279016 - RNA, 19 nt, Artificial Sequence
  Description of Artificial Sequence: Synthetic oligonucleotide
  Sense strand starting at position 3888 of SEQ ID NO: 1241523
agcgguaaauaccauuaca

SEQ ID NO: 1279017 - RNA, 19 nt, Artificial Sequence
  Description of Artificial Sequence: Synthetic oligonucleotide
  Antisense strand to SEQ ID NO: 1279016
uguaaugguauuuaccgcu

SEQ ID NO: 1279018 - RNA, 19 nt, Artificial Sequence
  Description of Artificial Sequence: Synthetic oligonucleotide
  Sense strand starting at position 4 of SEQ ID NO: 1241524
guacaucucguacgauauc

SEQ ID NO: 1279019 - RNA, 19 nt, Artificial Sequence
  Description of Artificial Sequence: Synthetic oligonucleotide
  Antisense strand to SEQ ID NO: 1279018
gauaucguacgagauguac

SEQ ID NO: 1279020 - RNA, 19 nt, Artificial Sequence
  Description of Artificial Sequence: Synthetic oligonucleotide
  Sense strand starting at position 15 of SEQ ID NO: 1241524
acgauaucuagccaggguu

SEQ ID NO: 1279021 - RNA, 19 nt, Artificial Sequence
  Description of Artificial Sequence: Synthetic oligonucleotide
  Antisense strand to SEQ ID NO: 1279020
aacccuggcuagauaucgu

SEQ ID NO: 1279022 - RNA, 19 nt, Artificial Sequence
  Description of Artificial Sequence: Synthetic oligonucleotide
  Sense strand starting at position 91 of SEQ ID NO: 1241524
uggacuauauauucgaauu

SEQ ID NO: 1279023 - RNA, 19 nt, Artificial Sequence
  Description of Artificial Sequence: Synthetic oligonucleotide
  Antisense strand to SEQ ID NO: 1279022
aauucgaauauauagucca

SEQ ID NO: 1279024 - RNA, 19 nt, Artificial Sequence
  Description of Artificial Sequence: Synthetic oligonucleotide
  Sense strand starting at position 117 of SEQ ID NO: 1241524
cgaguuguuuauucucugu

SEQ ID NO: 1279025 - RNA, 19 nt, Artificial Sequence
  Description of Artificial Sequence: Synthetic oligonucleotide
  Antisense strand to SEQ ID NO: 1279024
acagagaauaaacaacucg

SEQ ID NO: 1279026 - RNA, 19 nt, Artificial Sequence
  Description of Artificial Sequence: Synthetic oligonucleotide
  Sense strand starting at position 151 of SEQ ID NO: 1241524
augguaaugaguuguagau

SEQ ID NO: 1279027 - RNA, 19 nt, Artificial Sequence
  Description of Artificial Sequence: Synthetic oligonucleotide
  Antisense strand to SEQ ID NO: 1279026
aucuacaacucauuaccau

SEQ ID NO: 1279028 - RNA, 19 nt, Artificial Sequence
  Description of Artificial Sequence: Synthetic oligonucleotide
  Sense strand starting at position 153 of SEQ ID NO: 1241524
gguaaugaguuguagauuu

SEQ ID NO: 1279029 - RNA, 19 nt, Artificial Sequence
  Description of Artificial Sequence: Synthetic oligonucleotide
  Antisense strand to SEQ ID NO: 1279028
aaaucuacaacucauuacc

SEQ ID NO: 1279030 - RNA, 19 nt, Artificial Sequence
  Description of Artificial Sequence: Synthetic oligonucleotide
  Sense strand starting at position 181 of SEQ ID NO: 1241524
auguaaucuuucucagaag

SEQ ID NO: 1279031 - RNA, 19 nt, Artificial Sequence
  Description of Artificial Sequence: Synthetic oligonucleotide
  Antisense strand to SEQ ID NO: 1279030
cuucugagaaagauuacau

SEQ ID NO: 1279032 - RNA, 19 nt, Artificial Sequence
  Description of Artificial Sequence: Synthetic oligonucleotide
  Sense strand starting at position 260 of SEQ ID NO: 1241524
accggucuuugagcucaga

SEQ ID NO: 1279033 - RNA, 19 nt, Artificial Sequence
  Description of Artificial Sequence: Synthetic oligonucleotide
  Antisense strand to SEQ ID NO: 1279032
ucugagcucaaagaccggu

SEQ ID NO: 1279034 - RNA, 19 nt, Artificial Sequence
  Description of Artificial Sequence: Synthetic oligonucleotide
  Sense strand starting at position 263 of SEQ ID NO: 1241524
ggucuuugagcucagagau

SEQ ID NO: 1279035 - RNA, 19 nt, Artificial Sequence
  Description of Artificial Sequence: Synthetic oligonucleotide
  Antisense strand to SEQ ID NO: 1279034
aucucugagcucaaagacc

SEQ ID NO: 1279036 - RNA, 19 nt, Artificial Sequence
  Description of Artificial Sequence: Synthetic oligonucleotide
  Sense strand starting at position 308 of SEQ ID NO: 1241524
uguuaauauuuccaacugu

SEQ ID NO: 1279037 - RNA, 19 nt, Artificial Sequence
  Description of Artificial Sequence: Synthetic oligonucleotide
  Antisense strand to SEQ ID NO: 1279036
acaguuggaaauauuaaca

SEQ ID NO: 1279038 - RNA, 19 nt, Artificial Sequence
  Description of Artificial Sequence: Synthetic oligonucleotide
  Sense strand starting at position 328 of SEQ ID NO: 1241524
uuaugaaguucuucuagug

SEQ ID NO: 1279039 - RNA, 19 nt, Artificial Sequence
  Description of Artificial Sequence: Synthetic oligonucleotide
  Antisense strand to SEQ ID NO: 1279038
cacuagaagaacuucauaa

SEQ ID NO: 1279040 - RNA, 19 nt, Artificial Sequence
  Description of Artificial Sequence: Synthetic oligonucleotide
  Sense strand starting at position 510 of SEQ ID NO: 1241524
ucaguaauuuauuaugggu

SEQ ID NO: 1279041 - RNA, 19 nt, Artificial Sequence
  Description of Artificial Sequence: Synthetic oligonucleotide
  Antisense strand to SEQ ID NO: 1279040
acccauaauaaauuacuga

SEQ ID NO: 1279042 - RNA, 19 nt, Artificial Sequence
  Description of Artificial Sequence: Synthetic oligonucleotide
  Sense strand starting at position 513 of SEQ ID NO: 1241524
guaauuuauuauggguaag

SEQ ID NO: 1279043 - RNA, 19 nt, Artificial Sequence
  Description of Artificial Sequence: Synthetic oligonucleotide
  Antisense strand to SEQ ID NO: 1279042
cuuacccauaauaaauuac

SEQ ID NO: 1279044 - RNA, 19 nt, Artificial Sequence
  Description of Artificial Sequence: Synthetic oligonucleotide
  Sense strand starting at position 531 of SEQ ID NO: 1241524
ggaaucauugcugggaaac

SEQ ID NO: 1279045 - RNA, 19 nt, Artificial Sequence
  Description of Artificial Sequence: Synthetic oligonucleotide
  Antisense strand to SEQ ID NO: 1279044
guuucccagcaaugauucc

SEQ ID NO: 1279046 - RNA, 19 nt, Artificial Sequence
  Description of Artificial Sequence: Synthetic oligonucleotide
  Sense strand starting at position 532 of SEQ ID NO: 1241524
gaaucauugcugggaaaca

SEQ ID NO: 1279047 - RNA, 19 nt, Artificial Sequence
  Description of Artificial Sequence: Synthetic oligonucleotide
  Antisense strand to SEQ ID NO: 1279046
uguuucccagcaaugauuc

SEQ ID NO: 1279048 - RNA, 19 nt, Artificial Sequence
  Description of Artificial Sequence: Synthetic oligonucleotide
  Sense strand starting at position 562 of SEQ ID NO: 1241524
cuugaaugaccuugaaugu

SEQ ID NO: 1279049 - RNA, 19 nt, Artificial Sequence
  Description of Artificial Sequence: Synthetic oligonucleotide
  Antisense strand to SEQ ID NO: 1279048
acauucaaggucauucaag

SEQ ID NO: 1279050 - RNA, 19 nt, Artificial Sequence
  Description of Artificial Sequence: Synthetic oligonucleotide
  Sense strand starting at position 749 of SEQ ID NO: 1241524
aagcaaauggucugauucu

SEQ ID NO: 1279051 - RNA, 19 nt, Artificial Sequence
  Description of Artificial Sequence: Synthetic oligonucleotide
  Antisense strand to SEQ ID NO: 1279050
agaaucagaccauuugcuu

SEQ ID NO: 1279052 - RNA, 19 nt, Artificial Sequence
  Description of Artificial Sequence: Synthetic oligonucleotide
  Sense strand starting at position 758 of SEQ ID NO: 1241524
gucugauucuaauuccaga

SEQ ID NO: 1279053 - RNA, 19 nt, Artificial Sequence
  Description of Artificial Sequence: Synthetic oligonucleotide
  Antisense strand to SEQ ID NO: 1279052
ucuggaauuagaaucagac

SEQ ID NO: 1279054 - RNA, 19 nt, Artificial Sequence
  Description of Artificial Sequence: Synthetic oligonucleotide
  Sense strand starting at position 991 of SEQ ID NO: 1241524
guauuagagcauugagaua

SEQ ID NO: 1279055 - RNA, 19 nt, Artificial Sequence
  Description of Artificial Sequence: Synthetic oligonucleotide
  Antisense strand to SEQ ID NO: 1279054
uaucucaaugcucuaauac

SEQ ID NO: 1279056 - RNA, 19 nt, Artificial Sequence
  Description of Artificial Sequence: Synthetic oligonucleotide
  Sense strand starting at position 1029 of SEQ ID NO: 1241524
cgggacugagcucgacauu

SEQ ID NO: 1279057 - RNA, 19 nt, Artificial Sequence
  Description of Artificial Sequence: Synthetic oligonucleotide
  Antisense strand to SEQ ID NO: 1279056
aaugucgagcucagucccg

SEQ ID NO: 1279058 - RNA, 19 nt, Artificial Sequence
  Description of Artificial Sequence: Synthetic oligonucleotide
  Sense strand starting at position 1404 of SEQ ID NO: 1241524
gcaguauuaagagguaagu

SEQ ID NO: 1279059 - RNA, 19 nt, Artificial Sequence
  Description of Artificial Sequence: Synthetic oligonucleotide
  Antisense strand to SEQ ID NO: 1279058
acuuaccucuuaauacugc

SEQ ID NO: 1279060 - RNA, 19 nt, Artificial Sequence
  Description of Artificial Sequence: Synthetic oligonucleotide
  Sense strand starting at position 1406 of SEQ ID NO: 1241524
aguauuaagagguaaguuu

SEQ ID NO: 1279061 - RNA, 19 nt, Artificial Sequence
  Description of Artificial Sequence: Synthetic oligonucleotide
  Antisense strand to SEQ ID NO: 1279060
aaacuuaccucuuaauacu

SEQ ID NO: 1279062 - RNA, 19 nt, Artificial Sequence
  Description of Artificial Sequence: Synthetic oligonucleotide
  Sense strand starting at position 1414 of SEQ ID NO: 1241524
gagguaaguuuauaucacu

SEQ ID NO: 1279063 - RNA, 19 nt, Artificial Sequence
  Description of Artificial Sequence: Synthetic oligonucleotide
  Antisense strand to SEQ ID NO: 1279062
agugauauaaacuuaccuc

SEQ ID NO: 1279064 - RNA, 19 nt, Artificial Sequence
  Description of Artificial Sequence: Synthetic oligonucleotide
  Sense strand starting at position 1447 of SEQ ID NO: 1241524
aucagaagauuggaaagau

SEQ ID NO: 1279065 - RNA, 19 nt, Artificial Sequence
  Description of Artificial Sequence: Synthetic oligonucleotide
  Antisense strand to SEQ ID NO: 1279064
aucuuuccaaucuucugau

SEQ ID NO: 1279066 - RNA, 19 nt, Artificial Sequence
  Description of Artificial Sequence: Synthetic oligonucleotide
  Sense strand starting at position 1524 of SEQ ID NO: 1241524
ucccaaagcuagcaagaua

SEQ ID NO: 1279067 - RNA, 19 nt, Artificial Sequence
  Description of Artificial Sequence: Synthetic oligonucleotide
  Antisense strand to SEQ ID NO: 1279066
uaucuugcuagcuuuggga

SEQ ID NO: 1279068 - RNA, 19 nt, Artificial Sequence
  Description of Artificial Sequence: Synthetic oligonucleotide
  Sense strand starting at position 1653 of SEQ ID NO: 1241524
uagagcauuggcuagacua

SEQ ID NO: 1279069 - RNA, 19 nt, Artificial Sequence
  Description of Artificial Sequence: Synthetic oligonucleotide
  Antisense strand to SEQ ID NO: 1279068
uagucuagccaaugcucua

SEQ ID NO: 1279070 - RNA, 19 nt, Artificial Sequence
  Description of Artificial Sequence: Synthetic oligonucleotide
  Sense strand starting at position 1655 of SEQ ID NO: 1241524
gagcauuggcuagacuaau

SEQ ID NO: 1279071 - RNA, 19 nt, Artificial Sequence
  Description of Artificial Sequence: Synthetic oligonucleotide
  Antisense strand to SEQ ID NO: 1279070
auuagucuagccaaugcuc

SEQ ID NO: 1279072 - RNA, 19 nt, Artificial Sequence
  Description of Artificial Sequence: Synthetic oligonucleotide
  Sense strand starting at position 1891 of SEQ ID NO: 1241524
uuccaagauuguguuagua

SEQ ID NO: 1279073 - RNA, 19 nt, Artificial Sequence
  Description of Artificial Sequence: Synthetic oligonucleotide
  Antisense strand to SEQ ID NO: 1279072
uacuaacacaaucuuggaa

SEQ ID NO: 1279074 - RNA, 19 nt, Artificial Sequence
  Description of Artificial Sequence: Synthetic oligonucleotide
  Sense strand starting at position 1987 of SEQ ID NO: 1241524
gcuaguaccuuuccucuga

SEQ ID NO: 1279075 - RNA, 19 nt, Artificial Sequence
  Description of Artificial Sequence: Synthetic oligonucleotide
  Antisense strand to SEQ ID NO: 1279074
ucagaggaaagguacuagc

SEQ ID NO: 1279076 - RNA, 19 nt, Artificial Sequence
  Description of Artificial Sequence: Synthetic oligonucleotide
  Sense strand starting at position 2186 of SEQ ID NO: 1241524
ggcuuuauacuuggaacac

SEQ ID NO: 1279077 - RNA, 19 nt, Artificial Sequence
  Description of Artificial Sequence: Synthetic oligonucleotide
  Antisense strand to SEQ ID NO: 1279076
guguuccaaguauaaagcc

SEQ ID NO: 1279078 - RNA, 19 nt, Artificial Sequence
  Description of Artificial Sequence: Synthetic oligonucleotide
  Sense strand starting at position 2187 of SEQ ID NO: 1241524
gcuuuauacuuggaacaca

SEQ ID NO: 1279079 - RNA, 19 nt, Artificial Sequence
  Description of Artificial Sequence: Synthetic oligonucleotide
  Antisense strand to SEQ ID NO: 1279078
uguguuccaaguauaaagc

SEQ ID NO: 1279080 - RNA, 19 nt, Artificial Sequence
  Description of Artificial Sequence: Synthetic oligonucleotide
  Sense strand starting at position 2349 of SEQ ID NO: 1241524
acuagacagccauaugcaa

SEQ ID NO: 1279081 - RNA, 19 nt, Artificial Sequence
  Description of Artificial Sequence: Synthetic oligonucleotide
  Antisense strand to SEQ ID NO: 1279080
uugcauauggcugucuagu

SEQ ID NO: 1279082 - RNA, 19 nt, Artificial Sequence
  Description of Artificial Sequence: Synthetic oligonucleotide
  Sense strand starting at position 3109 of SEQ ID NO: 1241524
acacuuugccaagaagcau

SEQ ID NO: 1279083 - RNA, 19 nt, Artificial Sequence
  Description of Artificial Sequence: Synthetic oligonucleotide
  Antisense strand to SEQ ID NO: 1279082
augcuucuuggcaaagugu

SEQ ID NO: 1279084 - RNA, 19 nt, Artificial Sequence
  Description of Artificial Sequence: Synthetic oligonucleotide
  Sense strand starting at position 3474 of SEQ ID NO: 1241524
augucauggaaucaacgua

SEQ ID NO: 1279085 - RNA, 19 nt, Artificial Sequence
  Description of Artificial Sequence: Synthetic oligonucleotide
  Antisense strand to SEQ ID NO: 1279084
uacguugauuccaugacau

SEQ ID NO: 1279086 - RNA, 19 nt, Artificial Sequence
  Description of Artificial Sequence: Synthetic oligonucleotide
  Sense strand starting at position 3487 of SEQ ID NO: 1241524
aacguagaugcccaucaau

SEQ ID NO: 1279087 - RNA, 19 nt, Artificial Sequence
  Description of Artificial Sequence: Synthetic oligonucleotide
  Antisense strand to SEQ ID NO: 1279086
auugaugggcaucuacguu

SEQ ID NO: 1279088 - RNA, 19 nt, Artificial Sequence
  Description of Artificial Sequence: Synthetic oligonucleotide
  Sense strand starting at position 3530 of SEQ ID NO: 1241524
guacaaguauacuauggaa

SEQ ID NO: 1279089 - RNA, 19 nt, Artificial Sequence
  Description of Artificial Sequence: Synthetic oligonucleotide
  Antisense strand to SEQ ID NO: 1279088
uuccauaguauacuuguac

SEQ ID NO: 1279090 - RNA, 19 nt, Artificial Sequence
  Description of Artificial Sequence: Synthetic oligonucleotide
  Sense strand starting at position 3676 of SEQ ID NO: 1241524
auuggagauaaacguugaa

SEQ ID NO: 1279091 - RNA, 19 nt, Artificial Sequence
  Description of Artificial Sequence: Synthetic oligonucleotide
  Antisense strand to SEQ ID NO: 1279090
uucaacguuuaucuccaau

SEQ ID NO: 1279092 - RNA, 19 nt, Artificial Sequence
  Description of Artificial Sequence: Synthetic oligonucleotide
  Sense strand starting at position 3679 of SEQ ID NO: 1241524
ggagauaaacguugaauac

SEQ ID NO: 1279093 - RNA, 19 nt, Artificial Sequence
  Description of Artificial Sequence: Synthetic oligonucleotide
  Antisense strand to SEQ ID NO: 1279092
guauucaacguuuaucucc

SEQ ID NO: 1279094 - RNA, 19 nt, Artificial Sequence
  Description of Artificial Sequence: Synthetic oligonucleotide
  Sense strand starting at position 3722 of SEQ ID NO: 1241524
caaauacuugggcauaguu

SEQ ID NO: 1279095 - RNA, 19 nt, Artificial Sequence
  Description of Artificial Sequence: Synthetic oligonucleotide
  Antisense strand to SEQ ID NO: 1279094
aacuaugcccaaguauuug

SEQ ID NO: 1279096 - RNA, 19 nt, Artificial Sequence
  Description of Artificial Sequence: Synthetic oligonucleotide
  Sense strand starting at position 3741 of SEQ ID NO: 1241524
gagauuggaugguggcaaa

SEQ ID NO: 1279097 - RNA, 19 nt, Artificial Sequence
  Description of Artificial Sequence: Synthetic oligonucleotide
  Antisense strand to SEQ ID NO: 1279096
uuugccaccauccaaucuc

SEQ ID NO: 1279098 - RNA, 19 nt, Artificial Sequence
  Description of Artificial Sequence: Synthetic oligonucleotide
  Sense strand starting at position 17 of SEQ ID NO: 1241525
aaauaaucagagugguuua

SEQ ID NO: 1279099 - RNA, 19 nt, Artificial Sequence
  Description of Artificial Sequence: Synthetic oligonucleotide
  Antisense strand to SEQ ID NO: 1279098
uaaaccacucugauuauuu

SEQ ID NO: 1279100 - RNA, 19 nt, Artificial Sequence
  Description of Artificial Sequence: Synthetic oligonucleotide
  Sense strand starting at position 22 of SEQ ID NO: 1241525
aucagagugguuuaguuau

SEQ ID NO: 1279101 - RNA, 19 nt, Artificial Sequence
  Description of Artificial Sequence: Synthetic oligonucleotide
  Antisense strand to SEQ ID NO: 1279100
auaacuaaaccacucugau

SEQ ID NO: 1279102 - RNA, 19 nt, Artificial Sequence
  Description of Artificial Sequence: Synthetic oligonucleotide
  Sense strand starting at position 336 of SEQ ID NO: 1241525
acucauaguucuguaauca

SEQ ID NO: 1279103 - RNA, 19 nt, Artificial Sequence
  Description of Artificial Sequence: Synthetic oligonucleotide
  Antisense strand to SEQ ID NO: 1279102
ugauuacagaacuaugagu

SEQ ID NO: 1279104 - RNA, 19 nt, Artificial Sequence
  Description of Artificial Sequence: Synthetic oligonucleotide
  Sense strand starting at position 337 of SEQ ID NO: 1241525
cucauaguucuguaaucag

SEQ ID NO: 1279105 - RNA, 19 nt, Artificial Sequence
  Description of Artificial Sequence: Synthetic oligonucleotide
  Antisense strand to SEQ ID NO: 1279104
cugauuacagaacuaugag

SEQ ID NO: 1279106 - RNA, 19 nt, Artificial Sequence
  Description of Artificial Sequence: Synthetic oligonucleotide
  Sense strand starting at position 358 of SEQ ID NO: 1241525
ucuugaggaucuucccuua

SEQ ID NO: 1279107 - RNA, 19 nt, Artificial Sequence
  Description of Artificial Sequence: Synthetic oligonucleotide
  Antisense strand to SEQ ID NO: 1279106
uaagggaagauccucaaga

SEQ ID NO: 1279108 - RNA, 19 nt, Artificial Sequence
  Description of Artificial Sequence: Synthetic oligonucleotide
  Sense strand starting at position 361 of SEQ ID NO: 1241525
ugaggaucuucccuuaagu

SEQ ID NO: 1279109 - RNA, 19 nt, Artificial Sequence
  Description of Artificial Sequence: Synthetic oligonucleotide
  Antisense strand to SEQ ID NO: 1279108
acuuaagggaagauccuca

SEQ ID NO: 1279110 - RNA, 19 nt, Artificial Sequence
  Description of Artificial Sequence: Synthetic oligonucleotide
  Sense strand starting at position 591 of SEQ ID NO: 1241525
cucauaagaucuuuggauu

SEQ ID NO: 1279111 - RNA, 19 nt, Artificial Sequence
  Description of Artificial Sequence: Synthetic oligonucleotide
  Antisense strand to SEQ ID NO: 1279110
aauccaaagaucuuaugag

SEQ ID NO: 1279112 - RNA, 19 nt, Artificial Sequence
  Description of Artificial Sequence: Synthetic oligonucleotide
  Sense strand starting at position 592 of SEQ ID NO: 1241525
ucauaagaucuuuggauuc

SEQ ID NO: 1279113 - RNA, 19 nt, Artificial Sequence
  Description of Artificial Sequence: Synthetic oligonucleotide
  Antisense strand to SEQ ID NO: 1279112
gaauccaaagaucuuauga

SEQ ID NO: 1279114 - RNA, 19 nt, Artificial Sequence
  Description of Artificial Sequence: Synthetic oligonucleotide
  Sense strand starting at position 649 of SEQ ID NO: 1241525
cagauauuugcaugguugu

SEQ ID NO: 1279115 - RNA, 19 nt, Artificial Sequence
  Description of Artificial Sequence: Synthetic oligonucleotide
  Antisense strand to SEQ ID NO: 1279114
acaaccaugcaaauaucug

SEQ ID NO: 1279116 - RNA, 19 nt, Artificial Sequence
  Description of Artificial Sequence: Synthetic oligonucleotide
  Sense strand starting at position 650 of SEQ ID NO: 1241525
agauauuugcaugguuguu

SEQ ID NO: 1279117 - RNA, 19 nt, Artificial Sequence
  Description of Artificial Sequence: Synthetic oligonucleotide
  Antisense strand to SEQ ID NO: 1279116
aacaaccaugcaaauaucu

SEQ ID NO: 1279118 - RNA, 19 nt, Artificial Sequence
  Description of Artificial Sequence: Synthetic oligonucleotide
  Sense strand starting at position 904 of SEQ ID NO: 1241525
ccuggaaucuuaccugucu

SEQ ID NO: 1279119 - RNA, 19 nt, Artificial Sequence
  Description of Artificial Sequence: Synthetic oligonucleotide
  Antisense strand to SEQ ID NO: 1279118
agacagguaagauuccagg

SEQ ID NO: 1279120 - RNA, 19 nt, Artificial Sequence
  Description of Artificial Sequence: Synthetic oligonucleotide
  Sense strand starting at position 979 of SEQ ID NO: 1241525
uugcuaaaugacugacuga

SEQ ID NO: 1279121 - RNA, 19 nt, Artificial Sequence
  Description of Artificial Sequence: Synthetic oligonucleotide
  Antisense strand to SEQ ID NO: 1279120
ucagucagucauuuagcaa

SEQ ID NO: 1279122 - RNA, 19 nt, Artificial Sequence
  Description of Artificial Sequence: Synthetic oligonucleotide
  Sense strand starting at position 2272 of SEQ ID NO: 1241525
aggcuacuuugcuugaaga

SEQ ID NO: 1279123 - RNA, 19 nt, Artificial Sequence
  Description of Artificial Sequence: Synthetic oligonucleotide
  Antisense strand to SEQ ID NO: 1279122
ucuucaagcaaaguagccu

SEQ ID NO: 1279124 - RNA, 19 nt, Artificial Sequence
  Description of Artificial Sequence: Synthetic oligonucleotide
  Sense strand starting at position 2273 of SEQ ID NO: 1241525
ggcuacuuugcuugaagaa

SEQ ID NO: 1279125 - RNA, 19 nt, Artificial Sequence
  Description of Artificial Sequence: Synthetic oligonucleotide
  Antisense strand to SEQ ID NO: 1279124
uucuucaagcaaaguagcc

SEQ ID NO: 1279126 - RNA, 19 nt, Artificial Sequence
  Description of Artificial Sequence: Synthetic oligonucleotide
  Sense strand starting at position 2274 of SEQ ID NO: 1241525
gcuacuuugcuugaagaau

SEQ ID NO: 1279127 - RNA, 19 nt, Artificial Sequence
  Description of Artificial Sequence: Synthetic oligonucleotide
  Antisense strand to SEQ ID NO: 1279126
auucuucaagcaaaguagc

SEQ ID NO: 1279128 - RNA, 19 nt, Artificial Sequence
  Description of Artificial Sequence: Synthetic oligonucleotide
  Sense strand starting at position 2313 of SEQ ID NO: 1241525
agcauaacuuaagcaugau

SEQ ID NO: 1279129 - RNA, 19 nt, Artificial Sequence
  Description of Artificial Sequence: Synthetic oligonucleotide
  Antisense strand to SEQ ID NO: 1279128
aucaugcuuaaguuaugcu

SEQ ID NO: 1279130 - RNA, 19 nt, Artificial Sequence
  Description of Artificial Sequence: Synthetic oligonucleotide
  Sense strand starting at position 2319 of SEQ ID NO: 1241525
acuuaagcaugaucaaguu

SEQ ID NO: 1279131 - RNA, 19 nt, Artificial Sequence
  Description of Artificial Sequence: Synthetic oligonucleotide
  Antisense strand to SEQ ID NO: 1279130
aacuugaucaugcuuaagu

SEQ ID NO: 1279132 - RNA, 19 nt, Artificial Sequence
  Description of Artificial Sequence: Synthetic oligonucleotide
  Sense strand starting at position 2373 of SEQ ID NO: 1241525
gguccacugucucuaaaug

SEQ ID NO: 1279133 - RNA, 19 nt, Artificial Sequence
  Description of Artificial Sequence: Synthetic oligonucleotide
  Antisense strand to SEQ ID NO: 1279132
cauuuagagacaguggacc

SEQ ID NO: 1279134 - RNA, 19 nt, Artificial Sequence
  Description of Artificial Sequence: Synthetic oligonucleotide
  Sense strand starting at position 2374 of SEQ ID NO: 1241525
guccacugucucuaaaugu

SEQ ID NO: 1279135 - RNA, 19 nt, Artificial Sequence
  Description of Artificial Sequence: Synthetic oligonucleotide
  Antisense strand to SEQ ID NO: 1279134
acauuuagagacaguggac

SEQ ID NO: 1279136 - RNA, 19 nt, Artificial Sequence
  Description of Artificial Sequence: Synthetic oligonucleotide
  Sense strand starting at position 2493 of SEQ ID NO: 1241525
gguuguuaccuauaugacu

SEQ ID NO: 1279137 - RNA, 19 nt, Artificial Sequence
  Description of Artificial Sequence: Synthetic oligonucleotide
  Antisense strand to SEQ ID NO: 1279136
agucauauagguaacaacc

SEQ ID NO: 1279138 - RNA, 19 nt, Artificial Sequence
  Description of Artificial Sequence: Synthetic oligonucleotide
  Sense strand starting at position 2557 of SEQ ID NO: 1241525
uuuggugcucuuguguauu

SEQ ID NO: 1279139 - RNA, 19 nt, Artificial Sequence
  Description of Artificial Sequence: Synthetic oligonucleotide
  Antisense strand to SEQ ID NO: 1279138
aauacacaagagcaccaaa

SEQ ID NO: 1279140 - RNA, 19 nt, Artificial Sequence
  Description of Artificial Sequence: Synthetic oligonucleotide
  Sense strand starting at position 2636 of SEQ ID NO: 1241525
ggaauucccuaguuaaagc

SEQ ID NO: 1279141 - RNA, 19 nt, Artificial Sequence
  Description of Artificial Sequence: Synthetic oligonucleotide
  Antisense strand to SEQ ID NO: 1279140
gcuuuaacuagggaauucc

SEQ ID NO: 1279142 - RNA, 19 nt, Artificial Sequence
  Description of Artificial Sequence: Synthetic oligonucleotide
  Sense strand starting at position 2661 of SEQ ID NO: 1241525
ugaguaccacucugaaucu

SEQ ID NO: 1279143 - RNA, 19 nt, Artificial Sequence
  Description of Artificial Sequence: Synthetic oligonucleotide
  Antisense strand to SEQ ID NO: 1279142
agauucagagugguacuca

SEQ ID NO: 1279144 - RNA, 19 nt, Artificial Sequence
  Description of Artificial Sequence: Synthetic oligonucleotide
  Sense strand starting at position 2773 of SEQ ID NO: 1241525
gugagagccaaaugauauu

SEQ ID NO: 1279145 - RNA, 19 nt, Artificial Sequence
  Description of Artificial Sequence: Synthetic oligonucleotide
  Antisense strand to SEQ ID NO: 1279144
aauaucauuuggcucucac

SEQ ID NO: 1279146 - RNA, 19 nt, Artificial Sequence
  Description of Artificial Sequence: Synthetic oligonucleotide
  Sense strand starting at position 2939 of SEQ ID NO: 1241525
aaugcaauugcagagaagu

SEQ ID NO: 1279147 - RNA, 19 nt, Artificial Sequence
  Description of Artificial Sequence: Synthetic oligonucleotide
  Antisense strand to SEQ ID NO: 1279146
acuucucugcaauugcauu

SEQ ID NO: 1279148 - RNA, 19 nt, Artificial Sequence
  Description of Artificial Sequence: Synthetic oligonucleotide
  Sense strand starting at position 2941 of SEQ ID NO: 1241525
ugcaauugcagagaaguuu

SEQ ID NO: 1279149 - RNA, 19 nt, Artificial Sequence
  Description of Artificial Sequence: Synthetic oligonucleotide
  Antisense strand to SEQ ID NO: 1279148
aaacuucucugcaauugca

SEQ ID NO: 1279150 - RNA, 19 nt, Artificial Sequence
  Description of Artificial Sequence: Synthetic oligonucleotide
  Sense strand starting at position 2959 of SEQ ID NO: 1241525
uuaaacuugcaaugaguuu

SEQ ID NO: 1279151 - RNA, 19 nt, Artificial Sequence
  Description of Artificial Sequence: Synthetic oligonucleotide
  Antisense strand to SEQ ID NO: 1279150
aaacucauugcaaguuuaa

SEQ ID NO: 1279152 - RNA, 19 nt, Artificial Sequence
  Description of Artificial Sequence: Synthetic oligonucleotide
  Sense strand starting at position 3013 of SEQ ID NO: 1241525
gguauuuauuccucaguuu

SEQ ID NO: 1279153 - RNA, 19 nt, Artificial Sequence
  Description of Artificial Sequence: Synthetic oligonucleotide
  Antisense strand to SEQ ID NO: 1279152
aaacugaggaauaaauacc

SEQ ID NO: 1279154 - RNA, 19 nt, Artificial Sequence
  Description of Artificial Sequence: Synthetic oligonucleotide
  Sense strand starting at position 3080 of SEQ ID NO: 1241525
uuaggcacuuaaguaaaua

SEQ ID NO: 1279155 - RNA, 19 nt, Artificial Sequence
  Description of Artificial Sequence: Synthetic oligonucleotide
  Antisense strand to SEQ ID NO: 1279154
uauuuacuuaagugccuaa

SEQ ID NO: 1279156 - RNA, 19 nt, Artificial Sequence
  Description of Artificial Sequence: Synthetic oligonucleotide
  Sense strand starting at position 3182 of SEQ ID NO: 1241525
aauuaagguuuagucugua

SEQ ID NO: 1279157 - RNA, 19 nt, Artificial Sequence
  Description of Artificial Sequence: Synthetic oligonucleotide
  Antisense strand to SEQ ID NO: 1279156
uacagacuaaaccuuaauu

SEQ ID NO: 1279158 - RNA, 19 nt, Artificial Sequence
  Description of Artificial Sequence: Synthetic oligonucleotide
  Sense strand starting at position 3187 of SEQ ID NO: 1241525
agguuuagucuguauacua

SEQ ID NO: 1279159 - RNA, 19 nt, Artificial Sequence
  Description of Artificial Sequence: Synthetic oligonucleotide
  Antisense strand to SEQ ID NO: 1279158
uaguauacagacuaaaccu

SEQ ID NO: 1279160 - RNA, 19 nt, Artificial Sequence
  Description of Artificial Sequence: Synthetic oligonucleotide
  Sense strand starting at position 3273 of SEQ ID NO: 1241525
auggaacuucucugcauau

SEQ ID NO: 1279161 - RNA, 19 nt, Artificial Sequence
  Description of Artificial Sequence: Synthetic oligonucleotide
  Antisense strand to SEQ ID NO: 1279160
auaugcagagaaguuccau

SEQ ID NO: 1279162 - RNA, 19 nt, Artificial Sequence
  Description of Artificial Sequence: Synthetic oligonucleotide
  Sense strand starting at position 3274 of SEQ ID NO: 1241525
uggaacuucucugcauauu

SEQ ID NO: 1279163 - RNA, 19 nt, Artificial Sequence
  Description of Artificial Sequence: Synthetic oligonucleotide
  Antisense strand to SEQ ID NO: 1279162
aauaugcagagaaguucca

SEQ ID NO: 1279164 - RNA, 19 nt, Artificial Sequence
  Description of Artificial Sequence: Synthetic oligonucleotide
  Sense strand starting at position 3275 of SEQ ID NO: 1241525
ggaacuucucugcauauua

SEQ ID NO: 1279165 - RNA, 19 nt, Artificial Sequence
  Description of Artificial Sequence: Synthetic oligonucleotide
  Antisense strand to SEQ ID NO: 1279164
uaauaugcagagaaguucc

SEQ ID NO: 1279166 - RNA, 19 nt, Artificial Sequence
  Description of Artificial Sequence: Synthetic oligonucleotide
  Sense strand starting at position 3631 of SEQ ID NO: 1241525
aaugaucguguugagauua

SEQ ID NO: 1279167 - RNA, 19 nt, Artificial Sequence
  Description of Artificial Sequence: Synthetic oligonucleotide
  Antisense strand to SEQ ID NO: 1279166
uaaucucaacacgaucauu

SEQ ID NO: 1279168 - RNA, 19 nt, Artificial Sequence
  Description of Artificial Sequence: Synthetic oligonucleotide
  Sense strand starting at position 3636 of SEQ ID NO: 1241525
ucguguugagauuauuaua

SEQ ID NO: 1279169 - RNA, 19 nt, Artificial Sequence
  Description of Artificial Sequence: Synthetic oligonucleotide
  Antisense strand to SEQ ID NO: 1279168
uauaauaaucucaacacga

SEQ ID NO: 1279170 - RNA, 19 nt, Artificial Sequence
  Description of Artificial Sequence: Synthetic oligonucleotide
  Sense strand starting at position 3702 of SEQ ID NO: 1241525
ucacuauugcaaugaauga

SEQ ID NO: 1279171 - RNA, 19 nt, Artificial Sequence
  Description of Artificial Sequence: Synthetic oligonucleotide
  Antisense strand to SEQ ID NO: 1279170
ucauucauugcaauaguga

SEQ ID NO: 1279172 - RNA, 19 nt, Artificial Sequence
  Description of Artificial Sequence: Synthetic oligonucleotide
  Sense strand starting at position 3771 of SEQ ID NO: 1241525
guacaaauguuacccuuga

SEQ ID NO: 1279173 - RNA, 19 nt, Artificial Sequence
  Description of Artificial Sequence: Synthetic oligonucleotide
  Antisense strand to SEQ ID NO: 1279172
ucaaggguaacauuuguac

SEQ ID NO: 1279174 - RNA, 19 nt, Artificial Sequence
  Description of Artificial Sequence: Synthetic oligonucleotide
  Sense strand starting at position 3820 of SEQ ID NO: 1241525
aagugcuguggauacaaua

SEQ ID NO: 1279175 - RNA, 19 nt, Artificial Sequence
  Description of Artificial Sequence: Synthetic oligonucleotide
  Antisense strand to SEQ ID NO: 1279174
uauuguauccacagcacuu

SEQ ID NO: 1279176 - RNA, 19 nt, Artificial Sequence
  Description of Artificial Sequence: Synthetic oligonucleotide
  Sense strand starting at position 3956 of SEQ ID NO: 1241525
uuauaaugugcugauuaca

SEQ ID NO: 1279177 - RNA, 19 nt, Artificial Sequence
  Description of Artificial Sequence: Synthetic oligonucleotide
  Antisense strand to SEQ ID NO: 1279176
uguaaucagcacauuauaa

SEQ ID NO: 1279178 - RNA, 19 nt, Artificial Sequence
  Description of Artificial Sequence: Synthetic oligonucleotide
  Sense strand starting at position 92 of SEQ ID NO: 1241526
gagcuuucuugauugauug

SEQ ID NO: 1279179 - RNA, 19 nt, Artificial Sequence
  Description of Artificial Sequence: Synthetic oligonucleotide
  Antisense strand to SEQ ID NO: 1279178
caaucaaucaagaaagcuc

SEQ ID NO: 1279180 - RNA, 19 nt, Artificial Sequence
  Description of Artificial Sequence: Synthetic oligonucleotide
  Sense strand starting at position 96 of SEQ ID NO: 1241526
uuucuugauugauugcauu

SEQ ID NO: 1279181 - RNA, 19 nt, Artificial Sequence
  Description of Artificial Sequence: Synthetic oligonucleotide
  Antisense strand to SEQ ID NO: 1279180
aaugcaaucaaucaagaaa

SEQ ID NO: 1279182 - RNA, 19 nt, Artificial Sequence
  Description of Artificial Sequence: Synthetic oligonucleotide
  Sense strand starting at position 137 of SEQ ID NO: 1241526
gucacuuaacucugaguuc

SEQ ID NO: 1279183 - RNA, 19 nt, Artificial Sequence
  Description of Artificial Sequence: Synthetic oligonucleotide
  Antisense strand to SEQ ID NO: 1279182
gaacucagaguuaagugac

SEQ ID NO: 1279184 - RNA, 19 nt, Artificial Sequence
  Description of Artificial Sequence: Synthetic oligonucleotide
  Sense strand starting at position 264 of SEQ ID NO: 1241526
cuuccucuguuccuuuaga

SEQ ID NO: 1279185 - RNA, 19 nt, Artificial Sequence
  Description of Artificial Sequence: Synthetic oligonucleotide
  Antisense strand to SEQ ID NO: 1279184
ucuaaaggaacagaggaag

SEQ ID NO: 1279186 - RNA, 19 nt, Artificial Sequence
  Description of Artificial Sequence: Synthetic oligonucleotide
  Sense strand starting at position 378 of SEQ ID NO: 1241526
agguaccucuucuugagaa

SEQ ID NO: 1279187 - RNA, 19 nt, Artificial Sequence
  Description of Artificial Sequence: Synthetic oligonucleotide
  Antisense strand to SEQ ID NO: 1279186
uucucaagaagagguaccu

SEQ ID NO: 1279188 - RNA, 19 nt, Artificial Sequence
  Description of Artificial Sequence: Synthetic oligonucleotide
  Sense strand starting at position 459 of SEQ ID NO: 1241526
acgcauaaacuuuguuaag

SEQ ID NO: 1279189 - RNA, 19 nt, Artificial Sequence
  Description of Artificial Sequence: Synthetic oligonucleotide
  Antisense strand to SEQ ID NO: 1279188
cuuaacaaaguuuaugcgu

SEQ ID NO: 1279190 - RNA, 19 nt, Artificial Sequence
  Description of Artificial Sequence: Synthetic oligonucleotide
  Sense strand starting at position 460 of SEQ ID NO: 1241526
cgcauaaacuuuguuaaga

SEQ ID NO: 1279191 - RNA, 19 nt, Artificial Sequence
  Description of Artificial Sequence: Synthetic oligonucleotide
  Antisense strand to SEQ ID NO: 1279190
ucuuaacaaaguuuaugcg

SEQ ID NO: 1279192 - RNA, 19 nt, Artificial Sequence
  Description of Artificial Sequence: Synthetic oligonucleotide
  Sense strand starting at position 461 of SEQ ID NO: 1241526
gcauaaacuuuguuaagag

SEQ ID NO: 1279193 - RNA, 19 nt, Artificial Sequence
  Description of Artificial Sequence: Synthetic oligonucleotide
  Antisense strand to SEQ ID NO: 1279192
cucuuaacaaaguuuaugc

SEQ ID NO: 1279194 - RNA, 19 nt, Artificial Sequence
  Description of Artificial Sequence: Synthetic oligonucleotide
  Sense strand starting at position 494 of SEQ ID NO: 1241526
acugaugccugacuacauu

SEQ ID NO: 1279195 - RNA, 19 nt, Artificial Sequence
  Description of Artificial Sequence: Synthetic oligonucleotide
  Antisense strand to SEQ ID NO: 1279194
aauguagucaggcaucagu

SEQ ID NO: 1279196 - RNA, 19 nt, Artificial Sequence
  Description of Artificial Sequence: Synthetic oligonucleotide
  Sense strand starting at position 818 of SEQ ID NO: 1241526
guuuguggccaguaaauuc

SEQ ID NO: 1279197 - RNA, 19 nt, Artificial Sequence
  Description of Artificial Sequence: Synthetic oligonucleotide
  Antisense strand to SEQ ID NO: 1279196
gaauuuacuggccacaaac

SEQ ID NO: 1279198 - RNA, 19 nt, Artificial Sequence
  Description of Artificial Sequence: Synthetic oligonucleotide
  Sense strand starting at position 835 of SEQ ID NO: 1241526
ucuacugaguuccugaguu

SEQ ID NO: 1279199 - RNA, 19 nt, Artificial Sequence
  Description of Artificial Sequence: Synthetic oligonucleotide
  Antisense strand to SEQ ID NO: 1279198
aacucaggaacucaguaga

SEQ ID NO: 1279200 - RNA, 19 nt, Artificial Sequence
  Description of Artificial Sequence: Synthetic oligonucleotide
  Sense strand starting at position 837 of SEQ ID NO: 1241526
uacugaguuccugaguucu

SEQ ID NO: 1279201 - RNA, 19 nt, Artificial Sequence
  Description of Artificial Sequence: Synthetic oligonucleotide
  Antisense strand to SEQ ID NO: 1279200
agaacucaggaacucagua

SEQ ID NO: 1279202 - RNA, 19 nt, Artificial Sequence
  Description of Artificial Sequence: Synthetic oligonucleotide
  Sense strand starting at position 876 of SEQ ID NO: 1241526
auagguggcuuucuagagu

SEQ ID NO: 1279203 - RNA, 19 nt, Artificial Sequence
  Description of Artificial Sequence: Synthetic oligonucleotide
  Antisense strand to SEQ ID NO: 1279202
acucuagaaagccaccuau

SEQ ID NO: 1279204 - RNA, 19 nt, Artificial Sequence
  Description of Artificial Sequence: Synthetic oligonucleotide
  Sense strand starting at position 914 of SEQ ID NO: 1241526
uguaaucaagagugaucca

SEQ ID NO: 1279205 - RNA, 19 nt, Artificial Sequence
  Description of Artificial Sequence: Synthetic oligonucleotide
  Antisense strand to SEQ ID NO: 1279204
uggaucacucuugauuaca

SEQ ID NO: 1279206 - RNA, 19 nt, Artificial Sequence
  Description of Artificial Sequence: Synthetic oligonucleotide
  Sense strand starting at position 961 of SEQ ID NO: 1241526
auaccaacgucaucaaagu

SEQ ID NO: 1279207 - RNA, 19 nt, Artificial Sequence
  Description of Artificial Sequence: Synthetic oligonucleotide
  Antisense strand to SEQ ID NO: 1279206
acuuugaugacguugguau

SEQ ID NO: 1279208 - RNA, 19 nt, Artificial Sequence
  Description of Artificial Sequence: Synthetic oligonucleotide
  Sense strand starting at position 2071 of SEQ ID NO: 1241526
auguguacacuauauacau

SEQ ID NO: 1279209 - RNA, 19 nt, Artificial Sequence
  Description of Artificial Sequence: Synthetic oligonucleotide
  Antisense strand to SEQ ID NO: 1279208
auguauauaguguacacau

SEQ ID NO: 1279210 - RNA, 19 nt, Artificial Sequence
  Description of Artificial Sequence: Synthetic oligonucleotide
  Sense strand starting at position 2138 of SEQ ID NO: 1241526
ucggguaauauaggcagua

SEQ ID NO: 1279211 - RNA, 19 nt, Artificial Sequence
  Description of Artificial Sequence: Synthetic oligonucleotide
  Antisense strand to SEQ ID NO: 1279210
uacugccuauauuacccga

SEQ ID NO: 1279212 - RNA, 19 nt, Artificial Sequence
  Description of Artificial Sequence: Synthetic oligonucleotide
  Sense strand starting at position 2140 of SEQ ID NO: 1241526
ggguaauauaggcaguaca

SEQ ID NO: 1279213 - RNA, 19 nt, Artificial Sequence
  Description of Artificial Sequence: Synthetic oligonucleotide
  Antisense strand to SEQ ID NO: 1279212
uguacugccuauauuaccc

SEQ ID NO: 1279214 - RNA, 19 nt, Artificial Sequence
  Description of Artificial Sequence: Synthetic oligonucleotide
  Sense strand starting at position 2167 of SEQ ID NO: 1241526
uugauagaaugaggaauuu

SEQ ID NO: 1279215 - RNA, 19 nt, Artificial Sequence
  Description of Artificial Sequence: Synthetic oligonucleotide
  Antisense strand to SEQ ID NO: 1279214
aaauuccucauucuaucaa

SEQ ID NO: 1279216 - RNA, 19 nt, Artificial Sequence
  Description of Artificial Sequence: Synthetic oligonucleotide
  Sense strand starting at position 2254 of SEQ ID NO: 1241526
acacaaugacguggacauu

SEQ ID NO: 1279217 - RNA, 19 nt, Artificial Sequence
  Description of Artificial Sequence: Synthetic oligonucleotide
  Antisense strand to SEQ ID NO: 1279216
aauguccacgucauugugu

SEQ ID NO: 1279218 - RNA, 19 nt, Artificial Sequence
  Description of Artificial Sequence: Synthetic oligonucleotide
  Sense strand starting at position 2263 of SEQ ID NO: 1241526
cguggacauuaggugauaa

SEQ ID NO: 1279219 - RNA, 19 nt, Artificial Sequence
  Description of Artificial Sequence: Synthetic oligonucleotide
  Antisense strand to SEQ ID NO: 1279218
uuaucaccuaauguccacg

SEQ ID NO: 1279220 - RNA, 19 nt, Artificial Sequence
  Description of Artificial Sequence: Synthetic oligonucleotide
  Sense strand starting at position 2271 of SEQ ID NO: 1241526
uuaggugauaagugcuaau

SEQ ID NO: 1279221 - RNA, 19 nt, Artificial Sequence
  Description of Artificial Sequence: Synthetic oligonucleotide
  Antisense strand to SEQ ID NO: 1279220
auuagcacuuaucaccuaa

SEQ ID NO: 1279222 - RNA, 19 nt, Artificial Sequence
  Description of Artificial Sequence: Synthetic oligonucleotide
  Sense strand starting at position 2558 of SEQ ID NO: 1241526
uuguauccgcaacacaaua

SEQ ID NO: 1279223 - RNA, 19 nt, Artificial Sequence
  Description of Artificial Sequence: Synthetic oligonucleotide
  Antisense strand to SEQ ID NO: 1279222
uauuguguugcggauacaa

SEQ ID NO: 1279224 - RNA, 19 nt, Artificial Sequence
  Description of Artificial Sequence: Synthetic oligonucleotide
  Sense strand starting at position 2574 of SEQ ID NO: 1241526
auacuuacugcauagcaga

SEQ ID NO: 1279225 - RNA, 19 nt, Artificial Sequence
  Description of Artificial Sequence: Synthetic oligonucleotide
  Antisense strand to SEQ ID NO: 1279224
ucugcuaugcaguaaguau

SEQ ID NO: 1279226 - RNA, 19 nt, Artificial Sequence
  Description of Artificial Sequence: Synthetic oligonucleotide
  Sense strand starting at position 2652 of SEQ ID NO: 1241526
guacaaagguuaguaguua

SEQ ID NO: 1279227 - RNA, 19 nt, Artificial Sequence
  Description of Artificial Sequence: Synthetic oligonucleotide
  Antisense strand to SEQ ID NO: 1279226
uaacuacuaaccuuuguac

SEQ ID NO: 1279228 - RNA, 19 nt, Artificial Sequence
  Description of Artificial Sequence: Synthetic oligonucleotide
  Sense strand starting at position 2656 of SEQ ID NO: 1241526
aaagguuaguaguuacuau

SEQ ID NO: 1279229 - RNA, 19 nt, Artificial Sequence
  Description of Artificial Sequence: Synthetic oligonucleotide
  Antisense strand to SEQ ID NO: 1279228
auaguaacuacuaaccuuu

SEQ ID NO: 1279230 - RNA, 19 nt, Artificial Sequence
  Description of Artificial Sequence: Synthetic oligonucleotide
  Sense strand starting at position 2738 of SEQ ID NO: 1241526
uuuacuaucccaggucaca

SEQ ID NO: 1279231 - RNA, 19 nt, Artificial Sequence
  Description of Artificial Sequence: Synthetic oligonucleotide
  Antisense strand to SEQ ID NO: 1279230
ugugaccugggauaguaaa

SEQ ID NO: 1279232 - RNA, 19 nt, Artificial Sequence
  Description of Artificial Sequence: Synthetic oligonucleotide
  Sense strand starting at position 2822 of SEQ ID NO: 1241526
cgucagacucgggaugagu

SEQ ID NO: 1279233 - RNA, 19 nt, Artificial Sequence
  Description of Artificial Sequence: Synthetic oligonucleotide
  Antisense strand to SEQ ID NO: 1279232
acucaucccgagucugacg

SEQ ID NO: 1279234 - RNA, 19 nt, Artificial Sequence
  Description of Artificial Sequence: Synthetic oligonucleotide
  Sense strand starting at position 2830 of SEQ ID NO: 1241526
ucgggaugaguaggauaau

SEQ ID NO: 1279235 - RNA, 19 nt, Artificial Sequence
  Description of Artificial Sequence: Synthetic oligonucleotide
  Antisense strand to SEQ ID NO: 1279234
auuauccuacucaucccga

SEQ ID NO: 1279236 - RNA, 19 nt, Artificial Sequence
  Description of Artificial Sequence: Synthetic oligonucleotide
  Sense strand starting at position 2893 of SEQ ID NO: 1241526
acccauaucacggaggcau

SEQ ID NO: 1279237 - RNA, 19 nt, Artificial Sequence
  Description of Artificial Sequence: Synthetic oligonucleotide
  Antisense strand to SEQ ID NO: 1279236
augccuccgugauaugggu

SEQ ID NO: 1279238 - RNA, 19 nt, Artificial Sequence
  Description of Artificial Sequence: Synthetic oligonucleotide
  Sense strand starting at position 2939 of SEQ ID NO: 1241526
aggacagaguaauaagaga

SEQ ID NO: 1279239 - RNA, 19 nt, Artificial Sequence
  Description of Artificial Sequence: Synthetic oligonucleotide
  Antisense strand to SEQ ID NO: 1279238
ucucuuauuacucuguccu

SEQ ID NO: 1279240 - RNA, 19 nt, Artificial Sequence
  Description of Artificial Sequence: Synthetic oligonucleotide
  Sense strand starting at position 3085 of SEQ ID NO: 1241526
augacaguaccuuggauua

SEQ ID NO: 1279241 - RNA, 19 nt, Artificial Sequence
  Description of Artificial Sequence: Synthetic oligonucleotide
  Antisense strand to SEQ ID NO: 1279240
uaauccaagguacugucau

SEQ ID NO: 1279242 - RNA, 19 nt, Artificial Sequence
  Description of Artificial Sequence: Synthetic oligonucleotide
  Sense strand starting at position 3117 of SEQ ID NO: 1241526
agagaacauugauacauuu

SEQ ID NO: 1279243 - RNA, 19 nt, Artificial Sequence
  Description of Artificial Sequence: Synthetic oligonucleotide
  Antisense strand to SEQ ID NO: 1279242
aaauguaucaauguucucu

SEQ ID NO: 1279244 - RNA, 19 nt, Artificial Sequence
  Description of Artificial Sequence: Synthetic oligonucleotide
  Sense strand starting at position 3161 of SEQ ID NO: 1241526
guagaugccugucuagaau

SEQ ID NO: 1279245 - RNA, 19 nt, Artificial Sequence
  Description of Artificial Sequence: Synthetic oligonucleotide
  Antisense strand to SEQ ID NO: 1279244
auucuagacaggcaucuac

SEQ ID NO: 1279246 - RNA, 19 nt, Artificial Sequence
  Description of Artificial Sequence: Synthetic oligonucleotide
  Sense strand starting at position 3164 of SEQ ID NO: 1241526
gaugccugucuagaauauu

SEQ ID NO: 1279247 - RNA, 19 nt, Artificial Sequence
  Description of Artificial Sequence: Synthetic oligonucleotide
  Antisense strand to SEQ ID NO: 1279246
aauauucuagacaggcauc

SEQ ID NO: 1279248 - RNA, 19 nt, Artificial Sequence
  Description of Artificial Sequence: Synthetic oligonucleotide
  Sense strand starting at position 3396 of SEQ ID NO: 1241526
cuuucucuaggauguuauu

SEQ ID NO: 1279249 - RNA, 19 nt, Artificial Sequence
  Description of Artificial Sequence: Synthetic oligonucleotide
  Antisense strand to SEQ ID NO: 1279248
aauaacauccuagagaaag

SEQ ID NO: 1279250 - RNA, 19 nt, Artificial Sequence
  Description of Artificial Sequence: Synthetic oligonucleotide
  Sense strand starting at position 3402 of SEQ ID NO: 1241526
cuaggauguuauuccaaga

SEQ ID NO: 1279251 - RNA, 19 nt, Artificial Sequence
  Description of Artificial Sequence: Synthetic oligonucleotide
  Antisense strand to SEQ ID NO: 1279250
ucuuggaauaacauccuag

SEQ ID NO: 1279252 - RNA, 19 nt, Artificial Sequence
  Description of Artificial Sequence: Synthetic oligonucleotide
  Sense strand starting at position 3407 of SEQ ID NO: 1241526
auguuauuccaagauaagc

SEQ ID NO: 1279253 - RNA, 19 nt, Artificial Sequence
  Description of Artificial Sequence: Synthetic oligonucleotide
  Antisense strand to SEQ ID NO: 1279252
gcuuaucuuggaauaacau

SEQ ID NO: 1279254 - RNA, 19 nt, Artificial Sequence
  Description of Artificial Sequence: Synthetic oligonucleotide
  Sense strand starting at position 3655 of SEQ ID NO: 1241526
ugagcucugcuauauugaa

SEQ ID NO: 1279255 - RNA, 19 nt, Artificial Sequence
  Description of Artificial Sequence: Synthetic oligonucleotide
  Antisense strand to SEQ ID NO: 1279254
uucaauauagcagagcuca

SEQ ID NO: 1279256 - RNA, 19 nt, Artificial Sequence
  Description of Artificial Sequence: Synthetic oligonucleotide
  Sense strand starting at position 3695 of SEQ ID NO: 1241526
ugcaccaaggauuguaaau

SEQ ID NO: 1279257 - RNA, 19 nt, Artificial Sequence
  Description of Artificial Sequence: Synthetic oligonucleotide
  Antisense strand to SEQ ID NO: 1279256
auuuacaauccuuggugca

SEQ ID NO: 1279258 - RNA, 19 nt, Artificial Sequence
  Description of Artificial Sequence: Synthetic oligonucleotide
  Sense strand starting at position 143 of SEQ ID NO: 1241527
cucugaagaugagucuuau

SEQ ID NO: 1279259 - RNA, 19 nt, Artificial Sequence
  Description of Artificial Sequence: Synthetic oligonucleotide
  Antisense strand to SEQ ID NO: 1279258
auaagacucaucuucagag

SEQ ID NO: 1279260 - RNA, 19 nt, Artificial Sequence
  Description of Artificial Sequence: Synthetic oligonucleotide
  Sense strand starting at position 147 of SEQ ID NO: 1241527
gaagaugagucuuauuuag

SEQ ID NO: 1279261 - RNA, 19 nt, Artificial Sequence
  Description of Artificial Sequence: Synthetic oligonucleotide
  Antisense strand to SEQ ID NO: 1279260
cuaaauaagacucaucuuc

SEQ ID NO: 1279262 - RNA, 19 nt, Artificial Sequence
  Description of Artificial Sequence: Synthetic oligonucleotide
  Sense strand starting at position 166 of SEQ ID NO: 1241527
ggcauuuggcuuuguagau

SEQ ID NO: 1279263 - RNA, 19 nt, Artificial Sequence
  Description of Artificial Sequence: Synthetic oligonucleotide
  Antisense strand to SEQ ID NO: 1279262
aucuacaaagccaaaugcc

SEQ ID NO: 1279264 - RNA, 19 nt, Artificial Sequence
  Description of Artificial Sequence: Synthetic oligonucleotide
  Sense strand starting at position 167 of SEQ ID NO: 1241527
gcauuuggcuuuguagaug

SEQ ID NO: 1279265 - RNA, 19 nt, Artificial Sequence
  Description of Artificial Sequence: Synthetic oligonucleotide
  Antisense strand to SEQ ID NO: 1279264
caucuacaaagccaaaugc

SEQ ID NO: 1279266 - RNA, 19 nt, Artificial Sequence
  Description of Artificial Sequence: Synthetic oligonucleotide
  Sense strand starting at position 170 of SEQ ID NO: 1241527
uuuggcuuuguagaugaaa

SEQ ID NO: 1279267 - RNA, 19 nt, Artificial Sequence
  Description of Artificial Sequence: Synthetic oligonucleotide
  Antisense strand to SEQ ID NO: 1279266
uuucaucuacaaagccaaa

SEQ ID NO: 1279268 - RNA, 19 nt, Artificial Sequence
  Description of Artificial Sequence: Synthetic oligonucleotide
  Sense strand starting at position 690 of SEQ ID NO: 1241527
ugccaacagguugaauuau

SEQ ID NO: 1279269 - RNA, 19 nt, Artificial Sequence
  Description of Artificial Sequence: Synthetic oligonucleotide
  Antisense strand to SEQ ID NO: 1279268
auaauucaaccuguuggca

SEQ ID NO: 1279270 - RNA, 19 nt, Artificial Sequence
  Description of Artificial Sequence: Synthetic oligonucleotide
  Sense strand starting at position 734 of SEQ ID NO: 1241527
cuucuuagucucuaggaca

SEQ ID NO: 1279271 - RNA, 19 nt, Artificial Sequence
  Description of Artificial Sequence: Synthetic oligonucleotide
  Antisense strand to SEQ ID NO: 1279270
uguccuagagacuaagaag

SEQ ID NO: 1279272 - RNA, 19 nt, Artificial Sequence
  Description of Artificial Sequence: Synthetic oligonucleotide
  Sense strand starting at position 881 of SEQ ID NO: 1241527
uucuaaagauaugugguaa

SEQ ID NO: 1279273 - RNA, 19 nt, Artificial Sequence
  Description of Artificial Sequence: Synthetic oligonucleotide
  Antisense strand to SEQ ID NO: 1279272
uuaccacauaucuuuagaa

SEQ ID NO: 1279274 - RNA, 19 nt, Artificial Sequence
  Description of Artificial Sequence: Synthetic oligonucleotide
  Sense strand starting at position 1266 of SEQ ID NO: 1241527
cagugaggugucuacacaa

SEQ ID NO: 1279275 - RNA, 19 nt, Artificial Sequence
  Description of Artificial Sequence: Synthetic oligonucleotide
  Antisense strand to SEQ ID NO: 1279274
uuguguagacaccucacug

SEQ ID NO: 1279276 - RNA, 19 nt, Artificial Sequence
  Description of Artificial Sequence: Synthetic oligonucleotide
  Sense strand starting at position 1330 of SEQ ID NO: 1241527
acaugagcaccgcagaauu

SEQ ID NO: 1279277 - RNA, 19 nt, Artificial Sequence
  Description of Artificial Sequence: Synthetic oligonucleotide
  Antisense strand to SEQ ID NO: 1279276
aauucugcggugcucaugu

SEQ ID NO: 1279278 - RNA, 19 nt, Artificial Sequence
  Description of Artificial Sequence: Synthetic oligonucleotide
  Sense strand starting at position 1385 of SEQ ID NO: 1241527
ugaggaauccugcacugua

SEQ ID NO: 1279279 - RNA, 19 nt, Artificial Sequence
  Description of Artificial Sequence: Synthetic oligonucleotide
  Antisense strand to SEQ ID NO: 1279278
uacagugcaggauuccuca

SEQ ID NO: 1279280 - RNA, 19 nt, Artificial Sequence
  Description of Artificial Sequence: Synthetic oligonucleotide
  Sense strand starting at position 1436 of SEQ ID NO: 1241527
gagacaugaugguugagua

SEQ ID NO: 1279281 - RNA, 19 nt, Artificial Sequence
  Description of Artificial Sequence: Synthetic oligonucleotide
  Antisense strand to SEQ ID NO: 1279280
uacucaaccaucaugucuc

SEQ ID NO: 1279282 - RNA, 19 nt, Artificial Sequence
  Description of Artificial Sequence: Synthetic oligonucleotide
  Sense strand starting at position 1437 of SEQ ID NO: 1241527
agacaugaugguugaguag

SEQ ID NO: 1279283 - RNA, 19 nt, Artificial Sequence
  Description of Artificial Sequence: Synthetic oligonucleotide
  Antisense strand to SEQ ID NO: 1279282
cuacucaaccaucaugucu

SEQ ID NO: 1279284 - RNA, 19 nt, Artificial Sequence
  Description of Artificial Sequence: Synthetic oligonucleotide
  Sense strand starting at position 1923 of SEQ ID NO: 1241527
uuuaauucugccuaaggac

SEQ ID NO: 1279285 - RNA, 19 nt, Artificial Sequence
  Description of Artificial Sequence: Synthetic oligonucleotide
  Antisense strand to SEQ ID NO: 1279284
guccuuaggcagaauuaaa

SEQ ID NO: 1279286 - RNA, 19 nt, Artificial Sequence
  Description of Artificial Sequence: Synthetic oligonucleotide
  Sense strand starting at position 1941 of SEQ ID NO: 1241527
cagccuucugaagaugagu

SEQ ID NO: 1279287 - RNA, 19 nt, Artificial Sequence
  Description of Artificial Sequence: Synthetic oligonucleotide
  Antisense strand to SEQ ID NO: 1279286
acucaucuucagaaggcug

SEQ ID NO: 1279288 - RNA, 19 nt, Artificial Sequence
  Description of Artificial Sequence: Synthetic oligonucleotide
  Sense strand starting at position 1946 of SEQ ID NO: 1241527
uucugaagaugagucuuau

SEQ ID NO: 1279289 - RNA, 19 nt, Artificial Sequence
  Description of Artificial Sequence: Synthetic oligonucleotide
  Antisense strand to SEQ ID NO: 1279288
auaagacucaucuucagaa

SEQ ID NO: 1279290 - RNA, 19 nt, Artificial Sequence
  Description of Artificial Sequence: Synthetic oligonucleotide
  Sense strand starting at position 1969 of SEQ ID NO: 1241527
ggcauuuggcuuugcagau

SEQ ID NO: 1279291 - RNA, 19 nt, Artificial Sequence
  Description of Artificial Sequence: Synthetic oligonucleotide
  Antisense strand to SEQ ID NO: 1279290
aucugcaaagccaaaugcc

SEQ ID NO: 1279292 - RNA, 19 nt, Artificial Sequence
  Description of Artificial Sequence: Synthetic oligonucleotide
  Sense strand starting at position 1973 of SEQ ID NO: 1241527
uuuggcuuugcagaugaaa

SEQ ID NO: 1279293 - RNA, 19 nt, Artificial Sequence
  Description of Artificial Sequence: Synthetic oligonucleotide
  Antisense strand to SEQ ID NO: 1279292
uuucaucugcaaagccaaa

SEQ ID NO: 1279294 - RNA, 19 nt, Artificial Sequence
  Description of Artificial Sequence: Synthetic oligonucleotide
  Sense strand starting at position 1984 of SEQ ID NO: 1241527
agaugaaacucugucauag

SEQ ID NO: 1279295 - RNA, 19 nt, Artificial Sequence
  Description of Artificial Sequence: Synthetic oligonucleotide
  Antisense strand to SEQ ID NO: 1279294
cuaugacagaguuucaucu

SEQ ID NO: 1279296 - RNA, 19 nt, Artificial Sequence
  Description of Artificial Sequence: Synthetic oligonucleotide
  Sense strand starting at position 1994 of SEQ ID NO: 1241527
cugucauagagaggaucuu

SEQ ID NO: 1279297 - RNA, 19 nt, Artificial Sequence
  Description of Artificial Sequence: Synthetic oligonucleotide
  Antisense strand to SEQ ID NO: 1279296
aagauccucucuaugacag

SEQ ID NO: 1279298 - RNA, 19 nt, Artificial Sequence
  Description of Artificial Sequence: Synthetic oligonucleotide
  Sense strand starting at position 2123 of SEQ ID NO: 1241527
acagucacucaccaaguau

SEQ ID NO: 1279299 - RNA, 19 nt, Artificial Sequence
  Description of Artificial Sequence: Synthetic oligonucleotide
  Antisense strand to SEQ ID NO: 1279298
auacuuggugagugacugu

SEQ ID NO: 1279300 - RNA, 19 nt, Artificial Sequence
  Description of Artificial Sequence: Synthetic oligonucleotide
  Sense strand starting at position 2215 of SEQ ID NO: 1241527
gcuuauauucuacagacag

SEQ ID NO: 1279301 - RNA, 19 nt, Artificial Sequence
  Description of Artificial Sequence: Synthetic oligonucleotide
  Antisense strand to SEQ ID NO: 1279300
cugucuguagaauauaagc

SEQ ID NO: 1279302 - RNA, 19 nt, Artificial Sequence
  Description of Artificial Sequence: Synthetic oligonucleotide
  Sense strand starting at position 2292 of SEQ ID NO: 1241527
ggacuuugccauuaacuag

SEQ ID NO: 1279303 - RNA, 19 nt, Artificial Sequence
  Description of Artificial Sequence: Synthetic oligonucleotide
  Antisense strand to SEQ ID NO: 1279302
cuaguuaauggcaaagucc

SEQ ID NO: 1279304 - RNA, 19 nt, Artificial Sequence
  Description of Artificial Sequence: Synthetic oligonucleotide
  Sense strand starting at position 2379 of SEQ ID NO: 1241527
auagcaacugucuauaaag

SEQ ID NO: 1279305 - RNA, 19 nt, Artificial Sequence
  Description of Artificial Sequence: Synthetic oligonucleotide
  Antisense strand to SEQ ID NO: 1279304
cuuuauagacaguugcuau

SEQ ID NO: 1279306 - RNA, 19 nt, Artificial Sequence
  Description of Artificial Sequence: Synthetic oligonucleotide
  Sense strand starting at position 2381 of SEQ ID NO: 1241527
agcaacugucuauaaagau

SEQ ID NO: 1279307 - RNA, 19 nt, Artificial Sequence
  Description of Artificial Sequence: Synthetic oligonucleotide
  Antisense strand to SEQ ID NO: 1279306
aucuuuauagacaguugcu

SEQ ID NO: 1279308 - RNA, 19 nt, Artificial Sequence
  Description of Artificial Sequence: Synthetic oligonucleotide
  Sense strand starting at position 2468 of SEQ ID NO: 1241527
caaagaagguuagcuauga

SEQ ID NO: 1279309 - RNA, 19 nt, Artificial Sequence
  Description of Artificial Sequence: Synthetic oligonucleotide
  Antisense strand to SEQ ID NO: 1279308
ucauagcuaaccuucuuug

SEQ ID NO: 1279310 - RNA, 19 nt, Artificial Sequence
  Description of Artificial Sequence: Synthetic oligonucleotide
  Sense strand starting at position 2700 of SEQ ID NO: 1241527
uaaugugaauacuuaaggu

SEQ ID NO: 1279311 - RNA, 19 nt, Artificial Sequence
  Description of Artificial Sequence: Synthetic oligonucleotide
  Antisense strand to SEQ ID NO: 1279310
accuuaaguauucacauua

SEQ ID NO: 1279312 - RNA, 19 nt, Artificial Sequence
  Description of Artificial Sequence: Synthetic oligonucleotide
  Sense strand starting at position 2784 of SEQ ID NO: 1241527
gggagagucuccucaucau

SEQ ID NO: 1279313 - RNA, 19 nt, Artificial Sequence
  Description of Artificial Sequence: Synthetic oligonucleotide
  Antisense strand to SEQ ID NO: 1279312
augaugaggagacucuccc

SEQ ID NO: 1279314 - RNA, 19 nt, Artificial Sequence
  Description of Artificial Sequence: Synthetic oligonucleotide
  Sense strand starting at position 2841 of SEQ ID NO: 1241527
ccuggacucagaggauguu

SEQ ID NO: 1279315 - RNA, 19 nt, Artificial Sequence
  Description of Artificial Sequence: Synthetic oligonucleotide
  Antisense strand to SEQ ID NO: 1279314
aacauccucugaguccagg

SEQ ID NO: 1279316 - RNA, 19 nt, Artificial Sequence
  Description of Artificial Sequence: Synthetic oligonucleotide
  Sense strand starting at position 2856 of SEQ ID NO: 1241527
uguuauggccaguaggaaa

SEQ ID NO: 1279317 - RNA, 19 nt, Artificial Sequence
  Description of Artificial Sequence: Synthetic oligonucleotide
  Antisense strand to SEQ ID NO: 1279316
uuuccuacuggccauaaca

SEQ ID NO: 1279318 - RNA, 19 nt, Artificial Sequence
  Description of Artificial Sequence: Synthetic oligonucleotide
  Sense strand starting at position 2932 of SEQ ID NO: 1241527
gcuugaaugcaucaccuaa

SEQ ID NO: 1279319 - RNA, 19 nt, Artificial Sequence
  Description of Artificial Sequence: Synthetic oligonucleotide
  Antisense strand to SEQ ID NO: 1279318
uuaggugaugcauucaagc

SEQ ID NO: 1279320 - RNA, 19 nt, Artificial Sequence
  Description of Artificial Sequence: Synthetic oligonucleotide
  Sense strand starting at position 3047 of SEQ ID NO: 1241527
ugaagacucucaguuacaa

SEQ ID NO: 1279321 - RNA, 19 nt, Artificial Sequence
  Description of Artificial Sequence: Synthetic oligonucleotide
  Antisense strand to SEQ ID NO: 1279320
uuguaacugagagucuuca

SEQ ID NO: 1279322 - RNA, 19 nt, Artificial Sequence
  Description of Artificial Sequence: Synthetic oligonucleotide
  Sense strand starting at position 3302 of SEQ ID NO: 1241527
uuaguugucaggcagggaa

SEQ ID NO: 1279323 - RNA, 19 nt, Artificial Sequence
  Description of Artificial Sequence: Synthetic oligonucleotide
  Antisense strand to SEQ ID NO: 1279322
uucccugccugacaacuaa

SEQ ID NO: 1279324 - RNA, 19 nt, Artificial Sequence
  Description of Artificial Sequence: Synthetic oligonucleotide
  Sense strand starting at position 3324 of SEQ ID NO: 1241527
ggcaccauuuguguugaua

SEQ ID NO: 1279325 - RNA, 19 nt, Artificial Sequence
  Description of Artificial Sequence: Synthetic oligonucleotide
  Antisense strand to SEQ ID NO: 1279324
uaucaacacaaauggugcc

SEQ ID NO: 1279326 - RNA, 19 nt, Artificial Sequence
  Description of Artificial Sequence: Synthetic oligonucleotide
  Sense strand starting at position 3390 of SEQ ID NO: 1241527
gagguaacaugcccuaaua

SEQ ID NO: 1279327 - RNA, 19 nt, Artificial Sequence
  Description of Artificial Sequence: Synthetic oligonucleotide
  Antisense strand to SEQ ID NO: 1279326
uauuagggcauguuaccuc

SEQ ID NO: 1279328 - RNA, 19 nt, Artificial Sequence
  Description of Artificial Sequence: Synthetic oligonucleotide
  Sense strand starting at position 3392 of SEQ ID NO: 1241527
gguaacaugcccuaauaaa

SEQ ID NO: 1279329 - RNA, 19 nt, Artificial Sequence
  Description of Artificial Sequence: Synthetic oligonucleotide
  Antisense strand to SEQ ID NO: 1279328
uuuauuagggcauguuacc

SEQ ID NO: 1279330 - RNA, 19 nt, Artificial Sequence
  Description of Artificial Sequence: Synthetic oligonucleotide
  Sense strand starting at position 3481 of SEQ ID NO: 1241527
gcaauucugugacuuauuu

SEQ ID NO: 1279331 - RNA, 19 nt, Artificial Sequence
  Description of Artificial Sequence: Synthetic oligonucleotide
  Antisense strand to SEQ ID NO: 1279330
aaauaagucacagaauugc

SEQ ID NO: 1279332 - RNA, 19 nt, Artificial Sequence
  Description of Artificial Sequence: Synthetic oligonucleotide
  Sense strand starting at position 3722 of SEQ ID NO: 1241527
auagaaagguggucauuag

SEQ ID NO: 1279333 - RNA, 19 nt, Artificial Sequence
  Description of Artificial Sequence: Synthetic oligonucleotide
  Antisense strand to SEQ ID NO: 1279332
cuaaugaccaccuuucuau

SEQ ID NO: 1279334 - RNA, 19 nt, Artificial Sequence
  Description of Artificial Sequence: Synthetic oligonucleotide
  Sense strand starting at position 3726 of SEQ ID NO: 1241527
aaagguggucauuaggagu

SEQ ID NO: 1279335 - RNA, 19 nt, Artificial Sequence
  Description of Artificial Sequence: Synthetic oligonucleotide
  Antisense strand to SEQ ID NO: 1279334
acuccuaaugaccaccuuu

SEQ ID NO: 1279336 - RNA, 19 nt, Artificial Sequence
  Description of Artificial Sequence: Synthetic oligonucleotide
  Sense strand starting at position 3858 of SEQ ID NO: 1241527
uagaaauaugugcaaugcu

SEQ ID NO: 1279337 - RNA, 19 nt, Artificial Sequence
  Description of Artificial Sequence: Synthetic oligonucleotide
  Antisense strand to SEQ ID NO: 1279336
agcauugcacauauuucua

SEQ ID NO: 1279338 - RNA, 19 nt, Artificial Sequence
  Description of Artificial Sequence: Synthetic oligonucleotide
  Sense strand starting at position 31 of SEQ ID NO: 1241528
guaauuaagucccuuuauu

SEQ ID NO: 1279339 - RNA, 19 nt, Artificial Sequence
  Description of Artificial Sequence: Synthetic oligonucleotide
  Antisense strand to SEQ ID NO: 1279338
aauaaagggacuuaauuac

SEQ ID NO: 1279340 - RNA, 19 nt, Artificial Sequence
  Description of Artificial Sequence: Synthetic oligonucleotide
  Sense strand starting at position 192 of SEQ ID NO: 1241528
guuggaaggcucuacuuag

SEQ ID NO: 1279341 - RNA, 19 nt, Artificial Sequence
  Description of Artificial Sequence: Synthetic oligonucleotide
  Antisense strand to SEQ ID NO: 1279340
cuaaguagagccuuccaac

SEQ ID NO: 1279342 - RNA, 19 nt, Artificial Sequence
  Description of Artificial Sequence: Synthetic oligonucleotide
  Sense strand starting at position 327 of SEQ ID NO: 1241528
gauaccuauugggcauaua

SEQ ID NO: 1279343 - RNA, 19 nt, Artificial Sequence
  Description of Artificial Sequence: Synthetic oligonucleotide
  Antisense strand to SEQ ID NO: 1279342
uauaugcccaauagguauc

SEQ ID NO: 1279344 - RNA, 19 nt, Artificial Sequence
  Description of Artificial Sequence: Synthetic oligonucleotide
  Sense strand starting at position 421 of SEQ ID NO: 1241528
uuaggaaguggcgaugaua

SEQ ID NO: 1279345 - RNA, 19 nt, Artificial Sequence
  Description of Artificial Sequence: Synthetic oligonucleotide
  Antisense strand to SEQ ID NO: 1279344
uaucaucgccacuuccuaa

SEQ ID NO: 1279346 - RNA, 19 nt, Artificial Sequence
  Description of Artificial Sequence: Synthetic oligonucleotide
  Sense strand starting at position 432 of SEQ ID NO: 1241528
cgaugauauugaucacgau

SEQ ID NO: 1279347 - RNA, 19 nt, Artificial Sequence
  Description of Artificial Sequence: Synthetic oligonucleotide
  Antisense strand to SEQ ID NO: 1279346
aucgugaucaauaucaucg

SEQ ID NO: 1279348 - RNA, 19 nt, Artificial Sequence
  Description of Artificial Sequence: Synthetic oligonucleotide
  Sense strand starting at position 598 of SEQ ID NO: 1241528
cggaaaggagcaugauaau

SEQ ID NO: 1279349 - RNA, 19 nt, Artificial Sequence
  Description of Artificial Sequence: Synthetic oligonucleotide
  Antisense strand to SEQ ID NO: 1279348
auuaucaugcuccuuuccg

SEQ ID NO: 1279350 - RNA, 19 nt, Artificial Sequence
  Description of Artificial Sequence: Synthetic oligonucleotide
  Sense strand starting at position 740 of SEQ ID NO: 1241528
uugagacuagccuggucau

SEQ ID NO: 1279351 - RNA, 19 nt, Artificial Sequence
  Description of Artificial Sequence: Synthetic oligonucleotide
  Antisense strand to SEQ ID NO: 1279350
augaccaggcuagucucaa

SEQ ID NO: 1279352 - RNA, 19 nt, Artificial Sequence
  Description of Artificial Sequence: Synthetic oligonucleotide
  Sense strand starting at position 1012 of SEQ ID NO: 1241528
acugcuuucucacugagac

SEQ ID NO: 1279353 - RNA, 19 nt, Artificial Sequence
  Description of Artificial Sequence: Synthetic oligonucleotide
  Antisense strand to SEQ ID NO: 1279352
gucucagugagaaagcagu

SEQ ID NO: 1279354 - RNA, 19 nt, Artificial Sequence
  Description of Artificial Sequence: Synthetic oligonucleotide
  Sense strand starting at position 1013 of SEQ ID NO: 1241528
cugcuuucucacugagaca

SEQ ID NO: 1279355 - RNA, 19 nt, Artificial Sequence
  Description of Artificial Sequence: Synthetic oligonucleotide
  Antisense strand to SEQ ID NO: 1279354
ugucucagugagaaagcag

SEQ ID NO: 1279356 - RNA, 19 nt, Artificial Sequence
  Description of Artificial Sequence: Synthetic oligonucleotide
  Sense strand starting at position 1025 of SEQ ID NO: 1241528
ugagacauuuaucaaguaa

SEQ ID NO: 1279357 - RNA, 19 nt, Artificial Sequence
  Description of Artificial Sequence: Synthetic oligonucleotide
  Antisense strand to SEQ ID NO: 1279356
uuacuugauaaaugucuca

SEQ ID NO: 1279358 - RNA, 19 nt, Artificial Sequence
  Description of Artificial Sequence: Synthetic oligonucleotide
  Sense strand starting at position 1100 of SEQ ID NO: 1241528
ugacuugcucauuacguaa

SEQ ID NO: 1279359 - RNA, 19 nt, Artificial Sequence
  Description of Artificial Sequence: Synthetic oligonucleotide
  Antisense strand to SEQ ID NO: 1279358
uuacguaaugagcaaguca

SEQ ID NO: 1279360 - RNA, 19 nt, Artificial Sequence
  Description of Artificial Sequence: Synthetic oligonucleotide
  Sense strand starting at position 1111 of SEQ ID NO: 1241528
uuacguaaggcauagauga

SEQ ID NO: 1279361 - RNA, 19 nt, Artificial Sequence
  Description of Artificial Sequence: Synthetic oligonucleotide
  Antisense strand to SEQ ID NO: 1279360
ucaucuaugccuuacguaa

SEQ ID NO: 1279362 - RNA, 19 nt, Artificial Sequence
  Description of Artificial Sequence: Synthetic oligonucleotide
  Sense strand starting at position 1113 of SEQ ID NO: 1241528
acguaaggcauagaugaau

SEQ ID NO: 1279363 - RNA, 19 nt, Artificial Sequence
  Description of Artificial Sequence: Synthetic oligonucleotide
  Antisense strand to SEQ ID NO: 1279362
auucaucuaugccuuacgu

SEQ ID NO: 1279364 - RNA, 19 nt, Artificial Sequence
  Description of Artificial Sequence: Synthetic oligonucleotide
  Sense strand starting at position 1176 of SEQ ID NO: 1241528
ccaguuaguguccacagaa

SEQ ID NO: 1279365 - RNA, 19 nt, Artificial Sequence
  Description of Artificial Sequence: Synthetic oligonucleotide
  Antisense strand to SEQ ID NO: 1279364
uucuguggacacuaacugg

SEQ ID NO: 1279366 - RNA, 19 nt, Artificial Sequence
  Description of Artificial Sequence: Synthetic oligonucleotide
  Sense strand starting at position 1347 of SEQ ID NO: 1241528
agcagugaucagcaaggaa

SEQ ID NO: 1279367 - RNA, 19 nt, Artificial Sequence
  Description of Artificial Sequence: Synthetic oligonucleotide
  Antisense strand to SEQ ID NO: 1279366
uuccuugcugaucacugcu

SEQ ID NO: 1279368 - RNA, 19 nt, Artificial Sequence
  Description of Artificial Sequence: Synthetic oligonucleotide
  Sense strand starting at position 1350 of SEQ ID NO: 1241528
agugaucagcaaggaagau

SEQ ID NO: 1279369 - RNA, 19 nt, Artificial Sequence
  Description of Artificial Sequence: Synthetic oligonucleotide
  Antisense strand to SEQ ID NO: 1279368
aucuuccuugcugaucacu

SEQ ID NO: 1279370 - RNA, 19 nt, Artificial Sequence
  Description of Artificial Sequence: Synthetic oligonucleotide
  Sense strand starting at position 1458 of SEQ ID NO: 1241528
gaagaagugcuguaccaca

SEQ ID NO: 1279371 - RNA, 19 nt, Artificial Sequence
  Description of Artificial Sequence: Synthetic oligonucleotide
  Antisense strand to SEQ ID NO: 1279370
ugugguacagcacuucuuc

SEQ ID NO: 1279372 - RNA, 19 nt, Artificial Sequence
  Description of Artificial Sequence: Synthetic oligonucleotide
  Sense strand starting at position 1627 of SEQ ID NO: 1241528
uagcgauccgcagacauga

SEQ ID NO: 1279373 - RNA, 19 nt, Artificial Sequence
  Description of Artificial Sequence: Synthetic oligonucleotide
  Antisense strand to SEQ ID NO: 1279372
ucaugucugcggaucgcua

SEQ ID NO: 1279374 - RNA, 19 nt, Artificial Sequence
  Description of Artificial Sequence: Synthetic oligonucleotide
  Sense strand starting at position 1697 of SEQ ID NO: 1241528
gggugauacaugcagcaaa

SEQ ID NO: 1279375 - RNA, 19 nt, Artificial Sequence
  Description of Artificial Sequence: Synthetic oligonucleotide
  Antisense strand to SEQ ID NO: 1279374
uuugcugcauguaucaccc

SEQ ID NO: 1279376 - RNA, 19 nt, Artificial Sequence
  Description of Artificial Sequence: Synthetic oligonucleotide
  Sense strand starting at position 1723 of SEQ ID NO: 1241528
guguguugccuugagagga

SEQ ID NO: 1279377 - RNA, 19 nt, Artificial Sequence
  Description of Artificial Sequence: Synthetic oligonucleotide
  Antisense strand to SEQ ID NO: 1279376
uccucucaaggcaacacac

SEQ ID NO: 1279378 - RNA, 19 nt, Artificial Sequence
  Description of Artificial Sequence: Synthetic oligonucleotide
  Sense strand starting at position 1727 of SEQ ID NO: 1241528
guugccuugagaggaaauu

SEQ ID NO: 1279379 - RNA, 19 nt, Artificial Sequence
  Description of Artificial Sequence: Synthetic oligonucleotide
  Antisense strand to SEQ ID NO: 1279378
aauuuccucucaaggcaac

SEQ ID NO: 1279380 - RNA, 19 nt, Artificial Sequence
  Description of Artificial Sequence: Synthetic oligonucleotide
  Sense strand starting at position 1736 of SEQ ID NO: 1241528
agaggaaauugcucagcau

SEQ ID NO: 1279381 - RNA, 19 nt, Artificial Sequence
  Description of Artificial Sequence: Synthetic oligonucleotide
  Antisense strand to SEQ ID NO: 1279380
augcugagcaauuuccucu

SEQ ID NO: 1279382 - RNA, 19 nt, Artificial Sequence
  Description of Artificial Sequence: Synthetic oligonucleotide
  Sense strand starting at position 1737 of SEQ ID NO: 1241528
gaggaaauugcucagcauc

SEQ ID NO: 1279383 - RNA, 19 nt, Artificial Sequence
  Description of Artificial Sequence: Synthetic oligonucleotide
  Antisense strand to SEQ ID NO: 1279382
gaugcugagcaauuuccuc

SEQ ID NO: 1279384 - RNA, 19 nt, Artificial Sequence
  Description of Artificial Sequence: Synthetic oligonucleotide
  Sense strand starting at position 1739 of SEQ ID NO: 1241528
ggaaauugcucagcaucuu

SEQ ID NO: 1279385 - RNA, 19 nt, Artificial Sequence
  Description of Artificial Sequence: Synthetic oligonucleotide
  Antisense strand to SEQ ID NO: 1279384
aagaugcugagcaauuucc

SEQ ID NO: 1279386 - RNA, 19 nt, Artificial Sequence
  Description of Artificial Sequence: Synthetic oligonucleotide
  Sense strand starting at position 1751 of SEQ ID NO: 1241528
gcaucuuuggaaugaugac

SEQ ID NO: 1279387 - RNA, 19 nt, Artificial Sequence
  Description of Artificial Sequence: Synthetic oligonucleotide
  Antisense strand to SEQ ID NO: 1279386
gucaucauuccaaagaugc

SEQ ID NO: 1279388 - RNA, 19 nt, Artificial Sequence
  Description of Artificial Sequence: Synthetic oligonucleotide
  Sense strand starting at position 1770 of SEQ ID NO: 1241528
agaagugagcaguaucucu

SEQ ID NO: 1279389 - RNA, 19 nt, Artificial Sequence
  Description of Artificial Sequence: Synthetic oligonucleotide
  Antisense strand to SEQ ID NO: 1279388
agagauacugcucacuucu

SEQ ID NO: 1279390 - RNA, 19 nt, Artificial Sequence
  Description of Artificial Sequence: Synthetic oligonucleotide
  Sense strand starting at position 2057 of SEQ ID NO: 1241528
gcuuacaguccugaaacuu

SEQ ID NO: 1279391 - RNA, 19 nt, Artificial Sequence
  Description of Artificial Sequence: Synthetic oligonucleotide
  Antisense strand to SEQ ID NO: 1279390
aaguuucaggacuguaagc

SEQ ID NO: 1279392 - RNA, 19 nt, Artificial Sequence
  Description of Artificial Sequence: Synthetic oligonucleotide
  Sense strand starting at position 2309 of SEQ ID NO: 1241528
gagcaucugaguugggcaa

SEQ ID NO: 1279393 - RNA, 19 nt, Artificial Sequence
  Description of Artificial Sequence: Synthetic oligonucleotide
  Antisense strand to SEQ ID NO: 1279392
uugcccaacucagaugcuc

SEQ ID NO: 1279394 - RNA, 19 nt, Artificial Sequence
  Description of Artificial Sequence: Synthetic oligonucleotide
  Sense strand starting at position 2388 of SEQ ID NO: 1241528
gagucagacuaccuaguuu

SEQ ID NO: 1279395 - RNA, 19 nt, Artificial Sequence
  Description of Artificial Sequence: Synthetic oligonucleotide
  Antisense strand to SEQ ID NO: 1279394
aaacuagguagucugacuc

SEQ ID NO: 1279396 - RNA, 19 nt, Artificial Sequence
  Description of Artificial Sequence: Synthetic oligonucleotide
  Sense strand starting at position 2421 of SEQ ID NO: 1241528
uccacuuacuggcugagua

SEQ ID NO: 1279397 - RNA, 19 nt, Artificial Sequence
  Description of Artificial Sequence: Synthetic oligonucleotide
  Antisense strand to SEQ ID NO: 1279396
uacucagccaguaagugga

SEQ ID NO: 1279398 - RNA, 19 nt, Artificial Sequence
  Description of Artificial Sequence: Synthetic oligonucleotide
  Sense strand starting at position 2479 of SEQ ID NO: 1241528
ugugaaaugcuguaaggag

SEQ ID NO: 1279399 - RNA, 19 nt, Artificial Sequence
  Description of Artificial Sequence: Synthetic oligonucleotide
  Antisense strand to SEQ ID NO: 1279398
cuccuuacagcauuucaca

SEQ ID NO: 1279400 - RNA, 19 nt, Artificial Sequence
  Description of Artificial Sequence: Synthetic oligonucleotide
  Sense strand starting at position 2611 of SEQ ID NO: 1241528
gccauuacucuuggaagau

SEQ ID NO: 1279401 - RNA, 19 nt, Artificial Sequence
  Description of Artificial Sequence: Synthetic oligonucleotide
  Antisense strand to SEQ ID NO: 1279400
aucuuccaagaguaauggc

SEQ ID NO: 1279402 - RNA, 19 nt, Artificial Sequence
  Description of Artificial Sequence: Synthetic oligonucleotide
  Sense strand starting at position 2621 of SEQ ID NO: 1241528
uuggaagauuaucaauuug

SEQ ID NO: 1279403 - RNA, 19 nt, Artificial Sequence
  Description of Artificial Sequence: Synthetic oligonucleotide
  Antisense strand to SEQ ID NO: 1279402
caaauugauaaucuuccaa

SEQ ID NO: 1279404 - RNA, 19 nt, Artificial Sequence
  Description of Artificial Sequence: Synthetic oligonucleotide
  Sense strand starting at position 2670 of SEQ ID NO: 1241528
acaggaaucuaggccauua

SEQ ID NO: 1279405 - RNA, 19 nt, Artificial Sequence
  Description of Artificial Sequence: Synthetic oligonucleotide
  Antisense strand to SEQ ID NO: 1279404
uaauggccuagauuccugu

SEQ ID NO: 1279406 - RNA, 19 nt, Artificial Sequence
  Description of Artificial Sequence: Synthetic oligonucleotide
  Sense strand starting at position 2672 of SEQ ID NO: 1241528
aggaaucuaggccauuagu

SEQ ID NO: 1279407 - RNA, 19 nt, Artificial Sequence
  Description of Artificial Sequence: Synthetic oligonucleotide
  Antisense strand to SEQ ID NO: 1279406
acuaauggccuagauuccu

SEQ ID NO: 1279408 - RNA, 19 nt, Artificial Sequence
  Description of Artificial Sequence: Synthetic oligonucleotide
  Sense strand starting at position 2680 of SEQ ID NO: 1241528
aggccauuaguauaccuaa

SEQ ID NO: 1279409 - RNA, 19 nt, Artificial Sequence
  Description of Artificial Sequence: Synthetic oligonucleotide
  Antisense strand to SEQ ID NO: 1279408
uuagguauacuaauggccu

SEQ ID NO: 1279410 - RNA, 19 nt, Artificial Sequence
  Description of Artificial Sequence: Synthetic oligonucleotide
  Sense strand starting at position 3018 of SEQ ID NO: 1241528
ggagaauccuuacucccuu

SEQ ID NO: 1279411 - RNA, 19 nt, Artificial Sequence
  Description of Artificial Sequence: Synthetic oligonucleotide
  Antisense strand to SEQ ID NO: 1279410
aagggaguaaggauucucc

SEQ ID NO: 1279412 - RNA, 19 nt, Artificial Sequence
  Description of Artificial Sequence: Synthetic oligonucleotide
  Sense strand starting at position 3052 of SEQ ID NO: 1241528
caccaucgucuuggacaaa

SEQ ID NO: 1279413 - RNA, 19 nt, Artificial Sequence
  Description of Artificial Sequence: Synthetic oligonucleotide
  Antisense strand to SEQ ID NO: 1279412
uuuguccaagacgauggug

SEQ ID NO: 1279414 - RNA, 19 nt, Artificial Sequence
  Description of Artificial Sequence: Synthetic oligonucleotide
  Sense strand starting at position 3347 of SEQ ID NO: 1241528
gaaagauuaugggaacaga

SEQ ID NO: 1279415 - RNA, 19 nt, Artificial Sequence
  Description of Artificial Sequence: Synthetic oligonucleotide
  Antisense strand to SEQ ID NO: 1279414
ucuguucccauaaucuuuc

SEQ ID NO: 1279416 - RNA, 19 nt, Artificial Sequence
  Description of Artificial Sequence: Synthetic oligonucleotide
  Sense strand starting at position 3983 of SEQ ID NO: 1241528
cuuauuguucuccagcaua

SEQ ID NO: 1279417 - RNA, 19 nt, Artificial Sequence
  Description of Artificial Sequence: Synthetic oligonucleotide
  Antisense strand to SEQ ID NO: 1279416
uaugcuggagaacaauaag

SEQ ID NO: 1279418 - RNA, 19 nt, Artificial Sequence
  Description of Artificial Sequence: Synthetic oligonucleotide
  Sense strand starting at position 17 of SEQ ID NO: 1241529
aucucaaagcauugaguau

SEQ ID NO: 1279419 - RNA, 19 nt, Artificial Sequence
  Description of Artificial Sequence: Synthetic oligonucleotide
  Antisense strand to SEQ ID NO: 1279418
auacucaaugcuuugagau

SEQ ID NO: 1279420 - RNA, 19 nt, Artificial Sequence
  Description of Artificial Sequence: Synthetic oligonucleotide
  Sense strand starting at position 106 of SEQ ID NO: 1241529
uagugaguaucugucacaa

SEQ ID NO: 1279421 - RNA, 19 nt, Artificial Sequence
  Description of Artificial Sequence: Synthetic oligonucleotide
  Antisense strand to SEQ ID NO: 1279420
uugugacagauacucacua

SEQ ID NO: 1279422 - RNA, 19 nt, Artificial Sequence
  Description of Artificial Sequence: Synthetic oligonucleotide
  Sense strand starting at position 445 of SEQ ID NO: 1241529
gaaacaugguuucuccaug

SEQ ID NO: 1279423 - RNA, 19 nt, Artificial Sequence
  Description of Artificial Sequence: Synthetic oligonucleotide
  Antisense strand to SEQ ID NO: 1279422
cauggagaaaccauguuuc

SEQ ID NO: 1279424 - RNA, 19 nt, Artificial Sequence
  Description of Artificial Sequence: Synthetic oligonucleotide
  Sense strand starting at position 987 of SEQ ID NO: 1241529
gccaguucugucugacaug

SEQ ID NO: 1279425 - RNA, 19 nt, Artificial Sequence
  Description of Artificial Sequence: Synthetic oligonucleotide
  Antisense strand to SEQ ID NO: 1279424
caugucagacagaacuggc

SEQ ID NO: 1279426 - RNA, 19 nt, Artificial Sequence
  Description of Artificial Sequence: Synthetic oligonucleotide
  Sense strand starting at position 1002 of SEQ ID NO: 1241529
cauguaagccgggagucuu

SEQ ID NO: 1279427 - RNA, 19 nt, Artificial Sequence
  Description of Artificial Sequence: Synthetic oligonucleotide
  Antisense strand to SEQ ID NO: 1279426
aagacucccggcuuacaug

SEQ ID NO: 1279428 - RNA, 19 nt, Artificial Sequence
  Description of Artificial Sequence: Synthetic oligonucleotide
  Sense strand starting at position 1134 of SEQ ID NO: 1241529
acagaauauuucgagucca

SEQ ID NO: 1279429 - RNA, 19 nt, Artificial Sequence
  Description of Artificial Sequence: Synthetic oligonucleotide
  Antisense strand to SEQ ID NO: 1279428
uggacucgaaauauucugu

SEQ ID NO: 1279430 - RNA, 19 nt, Artificial Sequence
  Description of Artificial Sequence: Synthetic oligonucleotide
  Sense strand starting at position 1144 of SEQ ID NO: 1241529
ucgaguccaucucuauuau

SEQ ID NO: 1279431 - RNA, 19 nt, Artificial Sequence
  Description of Artificial Sequence: Synthetic oligonucleotide
  Antisense strand to SEQ ID NO: 1279430
auaauagagauggacucga

SEQ ID NO: 1279432 - RNA, 19 nt, Artificial Sequence
  Description of Artificial Sequence: Synthetic oligonucleotide
  Sense strand starting at position 1145 of SEQ ID NO: 1241529
cgaguccaucucuauuaua

SEQ ID NO: 1279433 - RNA, 19 nt, Artificial Sequence
  Description of Artificial Sequence: Synthetic oligonucleotide
  Antisense strand to SEQ ID NO: 1279432
uauaauagagauggacucg

SEQ ID NO: 1279434 - RNA, 19 nt, Artificial Sequence
  Description of Artificial Sequence: Synthetic oligonucleotide
  Sense strand starting at position 1167 of SEQ ID NO: 1241529
uuuaucaugcuguaguaua

SEQ ID NO: 1279435 - RNA, 19 nt, Artificial Sequence
  Description of Artificial Sequence: Synthetic oligonucleotide
  Antisense strand to SEQ ID NO: 1279434
uauacuacagcaugauaaa

SEQ ID NO: 1279436 - RNA, 19 nt, Artificial Sequence
  Description of Artificial Sequence: Synthetic oligonucleotide
  Sense strand starting at position 1193 of SEQ ID NO: 1241529
auuuauaugucugacucca

SEQ ID NO: 1279437 - RNA, 19 nt, Artificial Sequence
  Description of Artificial Sequence: Synthetic oligonucleotide
  Antisense strand to SEQ ID NO: 1279436
uggagucagacauauaaau

SEQ ID NO: 1279438 - RNA, 19 nt, Artificial Sequence
  Description of Artificial Sequence: Synthetic oligonucleotide
  Sense strand starting at position 1195 of SEQ ID NO: 1241529
uuauaugucugacuccaca

SEQ ID NO: 1279439 - RNA, 19 nt, Artificial Sequence
  Description of Artificial Sequence: Synthetic oligonucleotide
  Antisense strand to SEQ ID NO: 1279438
uguggagucagacauauaa

SEQ ID NO: 1279440 - RNA, 19 nt, Artificial Sequence
  Description of Artificial Sequence: Synthetic oligonucleotide
  Sense strand starting at position 1278 of SEQ ID NO: 1241529
ucaucagauccacguccaa

SEQ ID NO: 1279441 - RNA, 19 nt, Artificial Sequence
  Description of Artificial Sequence: Synthetic oligonucleotide
  Antisense strand to SEQ ID NO: 1279440
uuggacguggaucugauga

SEQ ID NO: 1279442 - RNA, 19 nt, Artificial Sequence
  Description of Artificial Sequence: Synthetic oligonucleotide
  Sense strand starting at position 1373 of SEQ ID NO: 1241529
gcugcaccucacuaguauu

SEQ ID NO: 1279443 - RNA, 19 nt, Artificial Sequence
  Description of Artificial Sequence: Synthetic oligonucleotide
  Antisense strand to SEQ ID NO: 1279442
aauacuagugaggugcagc

SEQ ID NO: 1279444 - RNA, 19 nt, Artificial Sequence
  Description of Artificial Sequence: Synthetic oligonucleotide
  Sense strand starting at position 1626 of SEQ ID NO: 1241529
uguggagguccucacuagu

SEQ ID NO: 1279445 - RNA, 19 nt, Artificial Sequence
  Description of Artificial Sequence: Synthetic oligonucleotide
  Antisense strand to SEQ ID NO: 1279444
acuagugaggaccuccaca

SEQ ID NO: 1279446 - RNA, 19 nt, Artificial Sequence
  Description of Artificial Sequence: Synthetic oligonucleotide
  Sense strand starting at position 1692 of SEQ ID NO: 1241529
ugcagauagcacugggaaa

SEQ ID NO: 1279447 - RNA, 19 nt, Artificial Sequence
  Description of Artificial Sequence: Synthetic oligonucleotide
  Antisense strand to SEQ ID NO: 1279446
uuucccagugcuaucugca

SEQ ID NO: 1279448 - RNA, 19 nt, Artificial Sequence
  Description of Artificial Sequence: Synthetic oligonucleotide
  Sense strand starting at position 1788 of SEQ ID NO: 1241529
gagccaacucugugccuua

SEQ ID NO: 1279449 - RNA, 19 nt, Artificial Sequence
  Description of Artificial Sequence: Synthetic oligonucleotide
  Antisense strand to SEQ ID NO: 1279448
uaaggcacagaguuggcuc

SEQ ID NO: 1279450 - RNA, 19 nt, Artificial Sequence
  Description of Artificial Sequence: Synthetic oligonucleotide
  Sense strand starting at position 1873 of SEQ ID NO: 1241529
ucuugcacauaguuagaau

SEQ ID NO: 1279451 - RNA, 19 nt, Artificial Sequence
  Description of Artificial Sequence: Synthetic oligonucleotide
  Antisense strand to SEQ ID NO: 1279450
auucuaacuaugugcaaga

SEQ ID NO: 1279452 - RNA, 19 nt, Artificial Sequence
  Description of Artificial Sequence: Synthetic oligonucleotide
  Sense strand starting at position 1890 of SEQ ID NO: 1241529
aucuuaagucagugucaca

SEQ ID NO: 1279453 - RNA, 19 nt, Artificial Sequence
  Description of Artificial Sequence: Synthetic oligonucleotide
  Antisense strand to SEQ ID NO: 1279452
ugugacacugacuuaagau

SEQ ID NO: 1279454 - RNA, 19 nt, Artificial Sequence
  Description of Artificial Sequence: Synthetic oligonucleotide
  Sense strand starting at position 1963 of SEQ ID NO: 1241529
cuaaguguccuagagaauu

SEQ ID NO: 1279455 - RNA, 19 nt, Artificial Sequence
  Description of Artificial Sequence: Synthetic oligonucleotide
  Antisense strand to SEQ ID NO: 1279454
aauucucuaggacacuuag

SEQ ID NO: 1279456 - RNA, 19 nt, Artificial Sequence
  Description of Artificial Sequence: Synthetic oligonucleotide
  Sense strand starting at position 2367 of SEQ ID NO: 1241529
uagagauaacgugguuuga

SEQ ID NO: 1279457 - RNA, 19 nt, Artificial Sequence
  Description of Artificial Sequence: Synthetic oligonucleotide
  Antisense strand to SEQ ID NO: 1279456
ucaaaccacguuaucucua

SEQ ID NO: 1279458 - RNA, 19 nt, Artificial Sequence
  Description of Artificial Sequence: Synthetic oligonucleotide
  Sense strand starting at position 2369 of SEQ ID NO: 1241529
gagauaacgugguuugaaa

SEQ ID NO: 1279459 - RNA, 19 nt, Artificial Sequence
  Description of Artificial Sequence: Synthetic oligonucleotide
  Antisense strand to SEQ ID NO: 1279458
uuucaaaccacguuaucuc

SEQ ID NO: 1279460 - RNA, 19 nt, Artificial Sequence
  Description of Artificial Sequence: Synthetic oligonucleotide
  Sense strand starting at position 2447 of SEQ ID NO: 1241529
ucaugauuucuuugcgucu

SEQ ID NO: 1279461 - RNA, 19 nt, Artificial Sequence
  Description of Artificial Sequence: Synthetic oligonucleotide
  Antisense strand to SEQ ID NO: 1279460
agacgcaaagaaaucauga

SEQ ID NO: 1279462 - RNA, 19 nt, Artificial Sequence
  Description of Artificial Sequence: Synthetic oligonucleotide
  Sense strand starting at position 2450 of SEQ ID NO: 1241529
ugauuucuuugcgucugua

SEQ ID NO: 1279463 - RNA, 19 nt, Artificial Sequence
  Description of Artificial Sequence: Synthetic oligonucleotide
  Antisense strand to SEQ ID NO: 1279462
uacagacgcaaagaaauca

SEQ ID NO: 1279464 - RNA, 19 nt, Artificial Sequence
  Description of Artificial Sequence: Synthetic oligonucleotide
  Sense strand starting at position 2643 of SEQ ID NO: 1241529
guuugucauucccuugaug

SEQ ID NO: 1279465 - RNA, 19 nt, Artificial Sequence
  Description of Artificial Sequence: Synthetic oligonucleotide
  Antisense strand to SEQ ID NO: 1279464
caucaagggaaugacaaac

SEQ ID NO: 1279466 - RNA, 19 nt, Artificial Sequence
  Description of Artificial Sequence: Synthetic oligonucleotide
  Sense strand starting at position 2645 of SEQ ID NO: 1241529
uugucauucccuugaugua

SEQ ID NO: 1279467 - RNA, 19 nt, Artificial Sequence
  Description of Artificial Sequence: Synthetic oligonucleotide
  Antisense strand to SEQ ID NO: 1279466
uacaucaagggaaugacaa

SEQ ID NO: 1279468 - RNA, 19 nt, Artificial Sequence
  Description of Artificial Sequence: Synthetic oligonucleotide
  Sense strand starting at position 2646 of SEQ ID NO: 1241529
ugucauucccuugauguac

SEQ ID NO: 1279469 - RNA, 19 nt, Artificial Sequence
  Description of Artificial Sequence: Synthetic oligonucleotide
  Antisense strand to SEQ ID NO: 1279468
guacaucaagggaaugaca

SEQ ID NO: 1279470 - RNA, 19 nt, Artificial Sequence
  Description of Artificial Sequence: Synthetic oligonucleotide
  Sense strand starting at position 2726 of SEQ ID NO: 1241529
uuucguugggucuauaguu

SEQ ID NO: 1279471 - RNA, 19 nt, Artificial Sequence
  Description of Artificial Sequence: Synthetic oligonucleotide
  Antisense strand to SEQ ID NO: 1279470
aacuauagacccaacgaaa

SEQ ID NO: 1279472 - RNA, 19 nt, Artificial Sequence
  Description of Artificial Sequence: Synthetic oligonucleotide
  Sense strand starting at position 2984 of SEQ ID NO: 1241529
aggauuagaugugagugga

SEQ ID NO: 1279473 - RNA, 19 nt, Artificial Sequence
  Description of Artificial Sequence: Synthetic oligonucleotide
  Antisense strand to SEQ ID NO: 1279472
uccacucacaucuaauccu

SEQ ID NO: 1279474 - RNA, 19 nt, Artificial Sequence
  Description of Artificial Sequence: Synthetic oligonucleotide
  Sense strand starting at position 2987 of SEQ ID NO: 1241529
auuagaugugaguggaauu

SEQ ID NO: 1279475 - RNA, 19 nt, Artificial Sequence
  Description of Artificial Sequence: Synthetic oligonucleotide
  Antisense strand to SEQ ID NO: 1279474
aauuccacucacaucuaau

SEQ ID NO: 1279476 - RNA, 19 nt, Artificial Sequence
  Description of Artificial Sequence: Synthetic oligonucleotide
  Sense strand starting at position 2997 of SEQ ID NO: 1241529
aguggaauuugagggaaag

SEQ ID NO: 1279477 - RNA, 19 nt, Artificial Sequence
  Description of Artificial Sequence: Synthetic oligonucleotide
  Antisense strand to SEQ ID NO: 1279476
cuuucccucaaauuccacu

SEQ ID NO: 1279478 - RNA, 19 nt, Artificial Sequence
  Description of Artificial Sequence: Synthetic oligonucleotide
  Sense strand starting at position 3126 of SEQ ID NO: 1241529
agucuugccaguuguauuu

SEQ ID NO: 1279479 - RNA, 19 nt, Artificial Sequence
  Description of Artificial Sequence: Synthetic oligonucleotide
  Antisense strand to SEQ ID NO: 1279478
aaauacaacuggcaagacu

SEQ ID NO: 1279480 - RNA, 19 nt, Artificial Sequence
  Description of Artificial Sequence: Synthetic oligonucleotide
  Sense strand starting at position 3135 of SEQ ID NO: 1241529
aguuguauuuccuaaaugu

SEQ ID NO: 1279481 - RNA, 19 nt, Artificial Sequence
  Description of Artificial Sequence: Synthetic oligonucleotide
  Antisense strand to SEQ ID NO: 1279480
acauuuaggaaauacaacu

SEQ ID NO: 1279482 - RNA, 19 nt, Artificial Sequence
  Description of Artificial Sequence: Synthetic oligonucleotide
  Sense strand starting at position 3144 of SEQ ID NO: 1241529
uccuaaaugucuguuccuu

SEQ ID NO: 1279483 - RNA, 19 nt, Artificial Sequence
  Description of Artificial Sequence: Synthetic oligonucleotide
  Antisense strand to SEQ ID NO: 1279482
aaggaacagacauuuagga

SEQ ID NO: 1279484 - RNA, 19 nt, Artificial Sequence
  Description of Artificial Sequence: Synthetic oligonucleotide
  Sense strand starting at position 3351 of SEQ ID NO: 1241529
cuuggcauagcauguaaga

SEQ ID NO: 1279485 - RNA, 19 nt, Artificial Sequence
  Description of Artificial Sequence: Synthetic oligonucleotide
  Antisense strand to SEQ ID NO: 1279484
ucuuacaugcuaugccaag

SEQ ID NO: 1279486 - RNA, 19 nt, Artificial Sequence
  Description of Artificial Sequence: Synthetic oligonucleotide
  Sense strand starting at position 3353 of SEQ ID NO: 1241529
uggcauagcauguaagacu

SEQ ID NO: 1279487 - RNA, 19 nt, Artificial Sequence
  Description of Artificial Sequence: Synthetic oligonucleotide
  Antisense strand to SEQ ID NO: 1279486
agucuuacaugcuaugcca

SEQ ID NO: 1279488 - RNA, 19 nt, Artificial Sequence
  Description of Artificial Sequence: Synthetic oligonucleotide
  Sense strand starting at position 3405 of SEQ ID NO: 1241529
agcuuagaauuguuugaau

SEQ ID NO: 1279489 - RNA, 19 nt, Artificial Sequence
  Description of Artificial Sequence: Synthetic oligonucleotide
  Antisense strand to SEQ ID NO: 1279488
auucaaacaauucuaagcu

SEQ ID NO: 1279490 - RNA, 19 nt, Artificial Sequence
  Description of Artificial Sequence: Synthetic oligonucleotide
  Sense strand starting at position 3450 of SEQ ID NO: 1241529
aggccaagagacuguuuaa

SEQ ID NO: 1279491 - RNA, 19 nt, Artificial Sequence
  Description of Artificial Sequence: Synthetic oligonucleotide
  Antisense strand to SEQ ID NO: 1279490
uuaaacagucucuuggccu

SEQ ID NO: 1279492 - RNA, 19 nt, Artificial Sequence
  Description of Artificial Sequence: Synthetic oligonucleotide
  Sense strand starting at position 3460 of SEQ ID NO: 1241529
acuguuuaacccgugcgua

SEQ ID NO: 1279493 - RNA, 19 nt, Artificial Sequence
  Description of Artificial Sequence: Synthetic oligonucleotide
  Antisense strand to SEQ ID NO: 1279492
uacgcacggguuaaacagu

SEQ ID NO: 1279494 - RNA, 19 nt, Artificial Sequence
  Description of Artificial Sequence: Synthetic oligonucleotide
  Sense strand starting at position 3508 of SEQ ID NO: 1241529
aaauguucugcugaauuga

SEQ ID NO: 1279495 - RNA, 19 nt, Artificial Sequence
  Description of Artificial Sequence: Synthetic oligonucleotide
  Antisense strand to SEQ ID NO: 1279494
ucaauucagcagaacauuu

SEQ ID NO: 1279496 - RNA, 19 nt, Artificial Sequence
  Description of Artificial Sequence: Synthetic oligonucleotide
  Sense strand starting at position 3768 of SEQ ID NO: 1241529
ugccuaaugccugaacucu

SEQ ID NO: 1279497 - RNA, 19 nt, Artificial Sequence
  Description of Artificial Sequence: Synthetic oligonucleotide
  Antisense strand to SEQ ID NO: 1279496
agaguucaggcauuaggca

SEQ ID NO: 1279498 - RNA, 19 nt, Artificial Sequence
  Description of Artificial Sequence: Synthetic oligonucleotide
  Sense strand starting at position 161 of SEQ ID NO: 1241530
gugauuaccagacagacgu

SEQ ID NO: 1279499 - RNA, 19 nt, Artificial Sequence
  Description of Artificial Sequence: Synthetic oligonucleotide
  Antisense strand to SEQ ID NO: 1279498
acgucugucugguaaucac

SEQ ID NO: 1279500 - RNA, 19 nt, Artificial Sequence
  Description of Artificial Sequence: Synthetic oligonucleotide
  Sense strand starting at position 714 of SEQ ID NO: 1241530
ugcccagucauaggagaga

SEQ ID NO: 1279501 - RNA, 19 nt, Artificial Sequence
  Description of Artificial Sequence: Synthetic oligonucleotide
  Antisense strand to SEQ ID NO: 1279500
ucucuccuaugacugggca

SEQ ID NO: 1279502 - RNA, 19 nt, Artificial Sequence
  Description of Artificial Sequence: Synthetic oligonucleotide
  Sense strand starting at position 733 of SEQ ID NO: 1241530
ggaggcuaagcuugaagaa

SEQ ID NO: 1279503 - RNA, 19 nt, Artificial Sequence
  Description of Artificial Sequence: Synthetic oligonucleotide
  Antisense strand to SEQ ID NO: 1279502
uucuucaagcuuagccucc

SEQ ID NO: 1279504 - RNA, 19 nt, Artificial Sequence
  Description of Artificial Sequence: Synthetic oligonucleotide
  Sense strand starting at position 1208 of SEQ ID NO: 1241530
ccucguucugcgcagacaa

SEQ ID NO: 1279505 - RNA, 19 nt, Artificial Sequence
  Description of Artificial Sequence: Synthetic oligonucleotide
  Antisense strand to SEQ ID NO: 1279504
uugucugcgcagaacgagg

SEQ ID NO: 1279506 - RNA, 19 nt, Artificial Sequence
  Description of Artificial Sequence: Synthetic oligonucleotide
  Sense strand starting at position 1656 of SEQ ID NO: 1241530
cgcgacuuggcccucagua

SEQ ID NO: 1279507 - RNA, 19 nt, Artificial Sequence
  Description of Artificial Sequence: Synthetic oligonucleotide
  Antisense strand to SEQ ID NO: 1279506
uacugagggccaagucgcg

SEQ ID NO: 1279508 - RNA, 19 nt, Artificial Sequence
  Description of Artificial Sequence: Synthetic oligonucleotide
  Sense strand starting at position 2125 of SEQ ID NO: 1241530
ugcguuaggguccauuuga

SEQ ID NO: 1279509 - RNA, 19 nt, Artificial Sequence
  Description of Artificial Sequence: Synthetic oligonucleotide
  Antisense strand to SEQ ID NO: 1279508
ucaaauggacccuaacgca

SEQ ID NO: 1279510 - RNA, 19 nt, Artificial Sequence
  Description of Artificial Sequence: Synthetic oligonucleotide
  Sense strand starting at position 2181 of SEQ ID NO: 1241530
uuaacuagcagaggaguua

SEQ ID NO: 1279511 - RNA, 19 nt, Artificial Sequence
  Description of Artificial Sequence: Synthetic oligonucleotide
  Antisense strand to SEQ ID NO: 1279510
uaacuccucugcuaguuaa

SEQ ID NO: 1279512 - RNA, 19 nt, Artificial Sequence
  Description of Artificial Sequence: Synthetic oligonucleotide
  Sense strand starting at position 2216 of SEQ ID NO: 1241530
cagguccucguuuguaaag

SEQ ID NO: 1279513 - RNA, 19 nt, Artificial Sequence
  Description of Artificial Sequence: Synthetic oligonucleotide
  Antisense strand to SEQ ID NO: 1279512
cuuuacaaacgaggaccug

SEQ ID NO: 1279514 - RNA, 19 nt, Artificial Sequence
  Description of Artificial Sequence: Synthetic oligonucleotide
  Sense strand starting at position 2266 of SEQ ID NO: 1241530
gagucuucugaaggauuag

SEQ ID NO: 1279515 - RNA, 19 nt, Artificial Sequence
  Description of Artificial Sequence: Synthetic oligonucleotide
  Antisense strand to SEQ ID NO: 1279514
cuaauccuucagaagacuc

SEQ ID NO: 1279516 - RNA, 19 nt, Artificial Sequence
  Description of Artificial Sequence: Synthetic oligonucleotide
  Sense strand starting at position 2277 of SEQ ID NO: 1241530
aggauuagcuggccgucau

SEQ ID NO: 1279517 - RNA, 19 nt, Artificial Sequence
  Description of Artificial Sequence: Synthetic oligonucleotide
  Antisense strand to SEQ ID NO: 1279516
augacggccagcuaauccu

SEQ ID NO: 1279518 - RNA, 19 nt, Artificial Sequence
  Description of Artificial Sequence: Synthetic oligonucleotide
  Sense strand starting at position 2281 of SEQ ID NO: 1241530
uuagcuggccgucauuaau

SEQ ID NO: 1279519 - RNA, 19 nt, Artificial Sequence
  Description of Artificial Sequence: Synthetic oligonucleotide
  Antisense strand to SEQ ID NO: 1279518
auuaaugacggccagcuaa

SEQ ID NO: 1279520 - RNA, 19 nt, Artificial Sequence
  Description of Artificial Sequence: Synthetic oligonucleotide
  Sense strand starting at position 2316 of SEQ ID NO: 1241530
auaaguauaguuugcacaa

SEQ ID NO: 1279521 - RNA, 19 nt, Artificial Sequence
  Description of Artificial Sequence: Synthetic oligonucleotide
  Antisense strand to SEQ ID NO: 1279520
uugugcaaacuauacuuau

SEQ ID NO: 1279522 - RNA, 19 nt, Artificial Sequence
  Description of Artificial Sequence: Synthetic oligonucleotide
  Sense strand starting at position 2323 of SEQ ID NO: 1241530
uaguuugcacaagaucaga

SEQ ID NO: 1279523 - RNA, 19 nt, Artificial Sequence
  Description of Artificial Sequence: Synthetic oligonucleotide
  Antisense strand to SEQ ID NO: 1279522
ucugaucuugugcaaacua

SEQ ID NO: 1279524 - RNA, 19 nt, Artificial Sequence
  Description of Artificial Sequence: Synthetic oligonucleotide
  Sense strand starting at position 2328 of SEQ ID NO: 1241530
ugcacaagaucagaggaua

SEQ ID NO: 1279525 - RNA, 19 nt, Artificial Sequence
  Description of Artificial Sequence: Synthetic oligonucleotide
  Antisense strand to SEQ ID NO: 1279524
uauccucugaucuugugca

SEQ ID NO: 1279526 - RNA, 19 nt, Artificial Sequence
  Description of Artificial Sequence: Synthetic oligonucleotide
  Sense strand starting at position 2355 of SEQ ID NO: 1241530
gggaacacguguccaauaa

SEQ ID NO: 1279527 - RNA, 19 nt, Artificial Sequence
  Description of Artificial Sequence: Synthetic oligonucleotide
  Antisense strand to SEQ ID NO: 1279526
uuauuggacacguguuccc

SEQ ID NO: 1279528 - RNA, 19 nt, Artificial Sequence
  Description of Artificial Sequence: Synthetic oligonucleotide
  Sense strand starting at position 2356 of SEQ ID NO: 1241530
ggaacacguguccaauaac

SEQ ID NO: 1279529 - RNA, 19 nt, Artificial Sequence
  Description of Artificial Sequence: Synthetic oligonucleotide
  Antisense strand to SEQ ID NO: 1279528
guuauuggacacguguucc

SEQ ID NO: 1279530 - RNA, 19 nt, Artificial Sequence
  Description of Artificial Sequence: Synthetic oligonucleotide
  Sense strand starting at position 2359 of SEQ ID NO: 1241530
acacguguccaauaacauu

SEQ ID NO: 1279531 - RNA, 19 nt, Artificial Sequence
  Description of Artificial Sequence: Synthetic oligonucleotide
  Antisense strand to SEQ ID NO: 1279530
aauguuauuggacacgugu

SEQ ID NO: 1279532 - RNA, 19 nt, Artificial Sequence
  Description of Artificial Sequence: Synthetic oligonucleotide
  Sense strand starting at position 2441 of SEQ ID NO: 1241530
cccaguuaauguuuguuga

SEQ ID NO: 1279533 - RNA, 19 nt, Artificial Sequence
  Description of Artificial Sequence: Synthetic oligonucleotide
  Antisense strand to SEQ ID NO: 1279532
ucaacaaacauuaacuggg

SEQ ID NO: 1279534 - RNA, 19 nt, Artificial Sequence
  Description of Artificial Sequence: Synthetic oligonucleotide
  Sense strand starting at position 2442 of SEQ ID NO: 1241530
ccaguuaauguuuguugaa

SEQ ID NO: 1279535 - RNA, 19 nt, Artificial Sequence
  Description of Artificial Sequence: Synthetic oligonucleotide
  Antisense strand to SEQ ID NO: 1279534
uucaacaaacauuaacugg

SEQ ID NO: 1279536 - RNA, 19 nt, Artificial Sequence
  Description of Artificial Sequence: Synthetic oligonucleotide
  Sense strand starting at position 2463 of SEQ ID NO: 1241530
aaugaauguccaggaucgu

SEQ ID NO: 1279537 - RNA, 19 nt, Artificial Sequence
  Description of Artificial Sequence: Synthetic oligonucleotide
  Antisense strand to SEQ ID NO: 1279536
acgauccuggacauucauu

SEQ ID NO: 1279538 - RNA, 19 nt, Artificial Sequence
  Description of Artificial Sequence: Synthetic oligonucleotide
  Sense strand starting at position 2464 of SEQ ID NO: 1241530
augaauguccaggaucguu

SEQ ID NO: 1279539 - RNA, 19 nt, Artificial Sequence
  Description of Artificial Sequence: Synthetic oligonucleotide
  Antisense strand to SEQ ID NO: 1279538
aacgauccuggacauucau

SEQ ID NO: 1279540 - RNA, 19 nt, Artificial Sequence
  Description of Artificial Sequence: Synthetic oligonucleotide
  Sense strand starting at position 2494 of SEQ ID NO: 1241530
ucuggaauuguagggauau

SEQ ID NO: 1279541 - RNA, 19 nt, Artificial Sequence
  Description of Artificial Sequence: Synthetic oligonucleotide
  Antisense strand to SEQ ID NO: 1279540
auaucccuacaauuccaga

SEQ ID NO: 1279542 - RNA, 19 nt, Artificial Sequence
  Description of Artificial Sequence: Synthetic oligonucleotide
  Sense strand starting at position 2504 of SEQ ID NO: 1241530
uagggauauccgugaacca

SEQ ID NO: 1279543 - RNA, 19 nt, Artificial Sequence
  Description of Artificial Sequence: Synthetic oligonucleotide
  Antisense strand to SEQ ID NO: 1279542
ugguucacggauaucccua

SEQ ID NO: 1279544 - RNA, 19 nt, Artificial Sequence
  Description of Artificial Sequence: Synthetic oligonucleotide
  Sense strand starting at position 2772 of SEQ ID NO: 1241530
ccacucuuacuacguaagu

SEQ ID NO: 1279545 - RNA, 19 nt, Artificial Sequence
  Description of Artificial Sequence: Synthetic oligonucleotide
  Antisense strand to SEQ ID NO: 1279544
acuuacguaguaagagugg

SEQ ID NO: 1279546 - RNA, 19 nt, Artificial Sequence
  Description of Artificial Sequence: Synthetic oligonucleotide
  Sense strand starting at position 2862 of SEQ ID NO: 1241530
ggagugugaggucaaugga

SEQ ID NO: 1279547 - RNA, 19 nt, Artificial Sequence
  Description of Artificial Sequence: Synthetic oligonucleotide
  Antisense strand to SEQ ID NO: 1279546
uccauugaccucacacucc

SEQ ID NO: 1279548 - RNA, 19 nt, Artificial Sequence
  Description of Artificial Sequence: Synthetic oligonucleotide
  Sense strand starting at position 2894 of SEQ ID NO: 1241530
guaacaauagcagguaauu

SEQ ID NO: 1279549 - RNA, 19 nt, Artificial Sequence
  Description of Artificial Sequence: Synthetic oligonucleotide
  Antisense strand to SEQ ID NO: 1279548
aauuaccugcuauuguuac

SEQ ID NO: 1279550 - RNA, 19 nt, Artificial Sequence
  Description of Artificial Sequence: Synthetic oligonucleotide
  Sense strand starting at position 3076 of SEQ ID NO: 1241530
cagagaguuuacguuccuu

SEQ ID NO: 1279551 - RNA, 19 nt, Artificial Sequence
  Description of Artificial Sequence: Synthetic oligonucleotide
  Antisense strand to SEQ ID NO: 1279550
aaggaacguaaacucucug

SEQ ID NO: 1279552 - RNA, 19 nt, Artificial Sequence
  Description of Artificial Sequence: Synthetic oligonucleotide
  Sense strand starting at position 3293 of SEQ ID NO: 1241530
cagugcugcugagcuaaga

SEQ ID NO: 1279553 - RNA, 19 nt, Artificial Sequence
  Description of Artificial Sequence: Synthetic oligonucleotide
  Antisense strand to SEQ ID NO: 1279552
ucuuagcucagcagcacug

SEQ ID NO: 1279554 - RNA, 19 nt, Artificial Sequence
  Description of Artificial Sequence: Synthetic oligonucleotide
  Sense strand starting at position 3412 of SEQ ID NO: 1241530
uuccauggugucugaguga

SEQ ID NO: 1279555 - RNA, 19 nt, Artificial Sequence
  Description of Artificial Sequence: Synthetic oligonucleotide
  Antisense strand to SEQ ID NO: 1279554
ucacucagacaccauggaa

SEQ ID NO: 1279556 - RNA, 19 nt, Artificial Sequence
  Description of Artificial Sequence: Synthetic oligonucleotide
  Sense strand starting at position 3583 of SEQ ID NO: 1241530
gcuggaguccaugaggaau

SEQ ID NO: 1279557 - RNA, 19 nt, Artificial Sequence
  Description of Artificial Sequence: Synthetic oligonucleotide
  Antisense strand to SEQ ID NO: 1279556
auuccucauggacuccagc

SEQ ID NO: 1279558 - RNA, 19 nt, Artificial Sequence
  Description of Artificial Sequence: Synthetic oligonucleotide
  Sense strand starting at position 3594 of SEQ ID NO: 1241530
ugaggaauucugggcccuu

SEQ ID NO: 1279559 - RNA, 19 nt, Artificial Sequence
  Description of Artificial Sequence: Synthetic oligonucleotide
  Antisense strand to SEQ ID NO: 1279558
aagggcccagaauuccuca

SEQ ID NO: 1279560 - RNA, 19 nt, Artificial Sequence
  Description of Artificial Sequence: Synthetic oligonucleotide
  Sense strand starting at position 3684 of SEQ ID NO: 1241530
cagugagaggguuggacaa

SEQ ID NO: 1279561 - RNA, 19 nt, Artificial Sequence
  Description of Artificial Sequence: Synthetic oligonucleotide
  Antisense strand to SEQ ID NO: 1279560
uuguccaacccucucacug

SEQ ID NO: 1279562 - RNA, 19 nt, Artificial Sequence
  Description of Artificial Sequence: Synthetic oligonucleotide
  Sense strand starting at position 3696 of SEQ ID NO: 1241530
uggacaaucugggugguua

SEQ ID NO: 1279563 - RNA, 19 nt, Artificial Sequence
  Description of Artificial Sequence: Synthetic oligonucleotide
  Antisense strand to SEQ ID NO: 1279562
uaaccacccagauugucca

SEQ ID NO: 1279564 - RNA, 19 nt, Artificial Sequence
  Description of Artificial Sequence: Synthetic oligonucleotide
  Sense strand starting at position 3697 of SEQ ID NO: 1241530
ggacaaucugggugguuaa

SEQ ID NO: 1279565 - RNA, 19 nt, Artificial Sequence
  Description of Artificial Sequence: Synthetic oligonucleotide
  Antisense strand to SEQ ID NO: 1279564
uuaaccacccagauugucc

SEQ ID NO: 1279566 - RNA, 19 nt, Artificial Sequence
  Description of Artificial Sequence: Synthetic oligonucleotide
  Sense strand starting at position 3698 of SEQ ID NO: 1241530
gacaaucugggugguuaaa

SEQ ID NO: 1279567 - RNA, 19 nt, Artificial Sequence
  Description of Artificial Sequence: Synthetic oligonucleotide
  Antisense strand to SEQ ID NO: 1279566
uuuaaccacccagauuguc

SEQ ID NO: 1279568 - RNA, 19 nt, Artificial Sequence
  Description of Artificial Sequence: Synthetic oligonucleotide
  Sense strand starting at position 3746 of SEQ ID NO: 1241530
uguaguaaugaaggcuuua

SEQ ID NO: 1279569 - RNA, 19 nt, Artificial Sequence
  Description of Artificial Sequence: Synthetic oligonucleotide
  Antisense strand to SEQ ID NO: 1279568
uaaagccuucauuacuaca

SEQ ID NO: 1279570 - RNA, 19 nt, Artificial Sequence
  Description of Artificial Sequence: Synthetic oligonucleotide
  Sense strand starting at position 3790 of SEQ ID NO: 1241530
acaagaaucucagugcaug

SEQ ID NO: 1279571 - RNA, 19 nt, Artificial Sequence
  Description of Artificial Sequence: Synthetic oligonucleotide
  Antisense strand to SEQ ID NO: 1279570
caugcacugagauucuugu

SEQ ID NO: 1279572 - RNA, 19 nt, Artificial Sequence
  Description of Artificial Sequence: Synthetic oligonucleotide
  Sense strand starting at position 3804 of SEQ ID NO: 1241530
gcaugcguaacagaauauu

SEQ ID NO: 1279573 - RNA, 19 nt, Artificial Sequence
  Description of Artificial Sequence: Synthetic oligonucleotide
  Antisense strand to SEQ ID NO: 1279572
aauauucuguuacgcaugc

SEQ ID NO: 1279574 - RNA, 19 nt, Artificial Sequence
  Description of Artificial Sequence: Synthetic oligonucleotide
  Sense strand starting at position 3895 of SEQ ID NO: 1241530
ucucuaaagccugguuaga

SEQ ID NO: 1279575 - RNA, 19 nt, Artificial Sequence
  Description of Artificial Sequence: Synthetic oligonucleotide
  Antisense strand to SEQ ID NO: 1279574
ucuaaccaggcuuuagaga

SEQ ID NO: 1279576 - RNA, 19 nt, Artificial Sequence
  Description of Artificial Sequence: Synthetic oligonucleotide
  Sense strand starting at position 3897 of SEQ ID NO: 1241530
ucuaaagccugguuagaag

SEQ ID NO: 1279577 - RNA, 19 nt, Artificial Sequence
  Description of Artificial Sequence: Synthetic oligonucleotide
  Antisense strand to SEQ ID NO: 1279576
cuucuaaccaggcuuuaga

SEQ ID NO: 1279578 - RNA, 19 nt, Artificial Sequence
  Description of Artificial Sequence: Synthetic oligonucleotide
  Sense strand starting at position 28 of SEQ ID NO: 1241531
gaggaagaaacgugccaaa

SEQ ID NO: 1279579 - RNA, 19 nt, Artificial Sequence
  Description of Artificial Sequence: Synthetic oligonucleotide
  Antisense strand to SEQ ID NO: 1279578
uuuggcacguuucuuccuc

SEQ ID NO: 1279580 - RNA, 19 nt, Artificial Sequence
  Description of Artificial Sequence: Synthetic oligonucleotide
  Sense strand starting at position 46 of SEQ ID NO: 1241531
aaggguuggccuugacuau

SEQ ID NO: 1279581 - RNA, 19 nt, Artificial Sequence
  Description of Artificial Sequence: Synthetic oligonucleotide
  Antisense strand to SEQ ID NO: 1279580
auagucaaggccaacccuu

SEQ ID NO: 1279582 - RNA, 19 nt, Artificial Sequence
  Description of Artificial Sequence: Synthetic oligonucleotide
  Sense strand starting at position 47 of SEQ ID NO: 1241531
aggguuggccuugacuauu

SEQ ID NO: 1279583 - RNA, 19 nt, Artificial Sequence
  Description of Artificial Sequence: Synthetic oligonucleotide
  Antisense strand to SEQ ID NO: 1279582
aauagucaaggccaacccu

SEQ ID NO: 1279584 - RNA, 19 nt, Artificial Sequence
  Description of Artificial Sequence: Synthetic oligonucleotide
  Sense strand starting at position 50 of SEQ ID NO: 1241531
guuggccuugacuauuaau

SEQ ID NO: 1279585 - RNA, 19 nt, Artificial Sequence
  Description of Artificial Sequence: Synthetic oligonucleotide
  Antisense strand to SEQ ID NO: 1279584
auuaauagucaaggccaac

SEQ ID NO: 1279586 - RNA, 19 nt, Artificial Sequence
  Description of Artificial Sequence: Synthetic oligonucleotide
  Sense strand starting at position 62 of SEQ ID NO: 1241531
uauuaauuaucguugggag

SEQ ID NO: 1279587 - RNA, 19 nt, Artificial Sequence
  Description of Artificial Sequence: Synthetic oligonucleotide
  Antisense strand to SEQ ID NO: 1279586
cucccaacgauaauuaaua

SEQ ID NO: 1279588 - RNA, 19 nt, Artificial Sequence
  Description of Artificial Sequence: Synthetic oligonucleotide
  Sense strand starting at position 63 of SEQ ID NO: 1241531
auuaauuaucguugggaga

SEQ ID NO: 1279589 - RNA, 19 nt, Artificial Sequence
  Description of Artificial Sequence: Synthetic oligonucleotide
  Antisense strand to SEQ ID NO: 1279588
ucucccaacgauaauuaau

SEQ ID NO: 1279590 - RNA, 19 nt, Artificial Sequence
  Description of Artificial Sequence: Synthetic oligonucleotide
  Sense strand starting at position 64 of SEQ ID NO: 1241531
uuaauuaucguugggagaa

SEQ ID NO: 1279591 - RNA, 19 nt, Artificial Sequence
  Description of Artificial Sequence: Synthetic oligonucleotide
  Antisense strand to SEQ ID NO: 1279590
uucucccaacgauaauuaa

SEQ ID NO: 1279592 - RNA, 19 nt, Artificial Sequence
  Description of Artificial Sequence: Synthetic oligonucleotide
  Sense strand starting at position 192 of SEQ ID NO: 1241531
cgagcugagcaggagaaau

SEQ ID NO: 1279593 - RNA, 19 nt, Artificial Sequence
  Description of Artificial Sequence: Synthetic oligonucleotide
  Antisense strand to SEQ ID NO: 1279592
auuucuccugcucagcucg

SEQ ID NO: 1279594 - RNA, 19 nt, Artificial Sequence
  Description of Artificial Sequence: Synthetic oligonucleotide
  Sense strand starting at position 239 of SEQ ID NO: 1241531
gagaauuucuaggagcgac

SEQ ID NO: 1279595 - RNA, 19 nt, Artificial Sequence
  Description of Artificial Sequence: Synthetic oligonucleotide
  Antisense strand to SEQ ID NO: 1279594
gucgcuccuagaaauucuc

SEQ ID NO: 1279596 - RNA, 19 nt, Artificial Sequence
  Description of Artificial Sequence: Synthetic oligonucleotide
  Sense strand starting at position 328 of SEQ ID NO: 1241531
caguucuaucugugaagga

SEQ ID NO: 1279597 - RNA, 19 nt, Artificial Sequence
  Description of Artificial Sequence: Synthetic oligonucleotide
  Antisense strand to SEQ ID NO: 1279596
uccuucacagauagaacug

SEQ ID NO: 1279598 - RNA, 19 nt, Artificial Sequence
  Description of Artificial Sequence: Synthetic oligonucleotide
  Sense strand starting at position 403 of SEQ ID NO: 1241531
cccgaaaucgggcaucgau

SEQ ID NO: 1279599 - RNA, 19 nt, Artificial Sequence
  Description of Artificial Sequence: Synthetic oligonucleotide
  Antisense strand to SEQ ID NO: 1279598
aucgaugcccgauuucggg

SEQ ID NO: 1279600 - RNA, 19 nt, Artificial Sequence
  Description of Artificial Sequence: Synthetic oligonucleotide
  Sense strand starting at position 449 of SEQ ID NO: 1241531
cgaagacuucuugggaguu

SEQ ID NO: 1279601 - RNA, 19 nt, Artificial Sequence
  Description of Artificial Sequence: Synthetic oligonucleotide
  Antisense strand to SEQ ID NO: 1279600
aacucccaagaagucuucg

SEQ ID NO: 1279602 - RNA, 19 nt, Artificial Sequence
  Description of Artificial Sequence: Synthetic oligonucleotide
  Sense strand starting at position 1482 of SEQ ID NO: 1241531
cgcucucaucucuagauca

SEQ ID NO: 1279603 - RNA, 19 nt, Artificial Sequence
  Description of Artificial Sequence: Synthetic oligonucleotide
  Antisense strand to SEQ ID NO: 1279602
ugaucuagagaugagagcg

SEQ ID NO: 1279604 - RNA, 19 nt, Artificial Sequence
  Description of Artificial Sequence: Synthetic oligonucleotide
  Sense strand starting at position 1513 of SEQ ID NO: 1241531
ugcaacgaucguuauuaca

SEQ ID NO: 1279605 - RNA, 19 nt, Artificial Sequence
  Description of Artificial Sequence: Synthetic oligonucleotide
  Antisense strand to SEQ ID NO: 1279604
uguaauaacgaucguugca

SEQ ID NO: 1279606 - RNA, 19 nt, Artificial Sequence
  Description of Artificial Sequence: Synthetic oligonucleotide
  Sense strand starting at position 1848 of SEQ ID NO: 1241531
gaggaaggcggcuagaguu

SEQ ID NO: 1279607 - RNA, 19 nt, Artificial Sequence
  Description of Artificial Sequence: Synthetic oligonucleotide
  Antisense strand to SEQ ID NO: 1279606
aacucuagccgccuuccuc

SEQ ID NO: 1279608 - RNA, 19 nt, Artificial Sequence
  Description of Artificial Sequence: Synthetic oligonucleotide
  Sense strand starting at position 1981 of SEQ ID NO: 1241531
ucccgcucucagggagauu

SEQ ID NO: 1279609 - RNA, 19 nt, Artificial Sequence
  Description of Artificial Sequence: Synthetic oligonucleotide
  Antisense strand to SEQ ID NO: 1279608
aaucucccugagagcggga

SEQ ID NO: 1279610 - RNA, 19 nt, Artificial Sequence
  Description of Artificial Sequence: Synthetic oligonucleotide
  Sense strand starting at position 2171 of SEQ ID NO: 1241531
ccgacauuaccagaauguu

SEQ ID NO: 1279611 - RNA, 19 nt, Artificial Sequence
  Description of Artificial Sequence: Synthetic oligonucleotide
  Antisense strand to SEQ ID NO: 1279610
aacauucugguaaugucgg

SEQ ID NO: 1279612 - RNA, 19 nt, Artificial Sequence
  Description of Artificial Sequence: Synthetic oligonucleotide
  Sense strand starting at position 2179 of SEQ ID NO: 1241531
accagaauguucuuuaaag

SEQ ID NO: 1279613 - RNA, 19 nt, Artificial Sequence
  Description of Artificial Sequence: Synthetic oligonucleotide
  Antisense strand to SEQ ID NO: 1279612
cuuuaaagaacauucuggu

SEQ ID NO: 1279614 - RNA, 19 nt, Artificial Sequence
  Description of Artificial Sequence: Synthetic oligonucleotide
  Sense strand starting at position 2180 of SEQ ID NO: 1241531
ccagaauguucuuuaaaga

SEQ ID NO: 1279615 - RNA, 19 nt, Artificial Sequence
  Description of Artificial Sequence: Synthetic oligonucleotide
  Antisense strand to SEQ ID NO: 1279614
ucuuuaaagaacauucugg

SEQ ID NO: 1279616 - RNA, 19 nt, Artificial Sequence
  Description of Artificial Sequence: Synthetic oligonucleotide
  Sense strand starting at position 2221 of SEQ ID NO: 1241531
acauuaugggccggagcau

SEQ ID NO: 1279617 - RNA, 19 nt, Artificial Sequence
  Description of Artificial Sequence: Synthetic oligonucleotide
  Antisense strand to SEQ ID NO: 1279616
augcuccggcccauaaugu

SEQ ID NO: 1279618 - RNA, 19 nt, Artificial Sequence
  Description of Artificial Sequence: Synthetic oligonucleotide
  Sense strand starting at position 2422 of SEQ ID NO: 1241531
uaaguaaaugcuggagaau

SEQ ID NO: 1279619 - RNA, 19 nt, Artificial Sequence
  Description of Artificial Sequence: Synthetic oligonucleotide
  Antisense strand to SEQ ID NO: 1279618
auucuccagcauuuacuua

SEQ ID NO: 1279620 - RNA, 19 nt, Artificial Sequence
  Description of Artificial Sequence: Synthetic oligonucleotide
  Sense strand starting at position 2448 of SEQ ID NO: 1241531
uagggagugacuggguuau

SEQ ID NO: 1279621 - RNA, 19 nt, Artificial Sequence
  Description of Artificial Sequence: Synthetic oligonucleotide
  Antisense strand to SEQ ID NO: 1279620
auaacccagucacucccua

SEQ ID NO: 1279622 - RNA, 19 nt, Artificial Sequence
  Description of Artificial Sequence: Synthetic oligonucleotide
  Sense strand starting at position 2450 of SEQ ID NO: 1241531
gggagugacuggguuauca

SEQ ID NO: 1279623 - RNA, 19 nt, Artificial Sequence
  Description of Artificial Sequence: Synthetic oligonucleotide
  Antisense strand to SEQ ID NO: 1279622
ugauaacccagucacuccc

SEQ ID NO: 1279624 - RNA, 19 nt, Artificial Sequence
  Description of Artificial Sequence: Synthetic oligonucleotide
  Sense strand starting at position 2452 of SEQ ID NO: 1241531
gagugacuggguuaucaca

SEQ ID NO: 1279625 - RNA, 19 nt, Artificial Sequence
  Description of Artificial Sequence: Synthetic oligonucleotide
  Antisense strand to SEQ ID NO: 1279624
ugugauaacccagucacuc

SEQ ID NO: 1279626 - RNA, 19 nt, Artificial Sequence
  Description of Artificial Sequence: Synthetic oligonucleotide
  Sense strand starting at position 2454 of SEQ ID NO: 1241531
gugacuggguuaucacauu

SEQ ID NO: 1279627 - RNA, 19 nt, Artificial Sequence
  Description of Artificial Sequence: Synthetic oligonucleotide
  Antisense strand to SEQ ID NO: 1279626
aaugugauaacccagucac

SEQ ID NO: 1279628 - RNA, 19 nt, Artificial Sequence
  Description of Artificial Sequence: Synthetic oligonucleotide
  Sense strand starting at position 2481 of SEQ ID NO: 1241531
gcaauaaguguguggauga

SEQ ID NO: 1279629 - RNA, 19 nt, Artificial Sequence
  Description of Artificial Sequence: Synthetic oligonucleotide
  Antisense strand to SEQ ID NO: 1279628
ucauccacacacuuauugc

SEQ ID NO: 1279630 - RNA, 19 nt, Artificial Sequence
  Description of Artificial Sequence: Synthetic oligonucleotide
  Sense strand starting at position 2891 of SEQ ID NO: 1241531
gagugugaggucgacaaga

SEQ ID NO: 1279631 - RNA, 19 nt, Artificial Sequence
  Description of Artificial Sequence: Synthetic oligonucleotide
  Antisense strand to SEQ ID NO: 1279630
ucuugucgaccucacacuc

SEQ ID NO: 1279632 - RNA, 19 nt, Artificial Sequence
  Description of Artificial Sequence: Synthetic oligonucleotide
  Sense strand starting at position 2893 of SEQ ID NO: 1241531
gugugaggucgacaagaua

SEQ ID NO: 1279633 - RNA, 19 nt, Artificial Sequence
  Description of Artificial Sequence: Synthetic oligonucleotide
  Antisense strand to SEQ ID NO: 1279632
uaucuugucgaccucacac

SEQ ID NO: 1279634 - RNA, 19 nt, Artificial Sequence
  Description of Artificial Sequence: Synthetic oligonucleotide
  Sense strand starting at position 2945 of SEQ ID NO: 1241531
uggaaacaguuucuguguu

SEQ ID NO: 1279635 - RNA, 19 nt, Artificial Sequence
  Description of Artificial Sequence: Synthetic oligonucleotide
  Antisense strand to SEQ ID NO: 1279634
aacacagaaacuguuucca

SEQ ID NO: 1279636 - RNA, 19 nt, Artificial Sequence
  Description of Artificial Sequence: Synthetic oligonucleotide
  Sense strand starting at position 2947 of SEQ ID NO: 1241531
gaaacaguuucuguguuag

SEQ ID NO: 1279637 - RNA, 19 nt, Artificial Sequence
  Description of Artificial Sequence: Synthetic oligonucleotide
  Antisense strand to SEQ ID NO: 1279636
cuaacacagaaacuguuuc

SEQ ID NO: 1279638 - RNA, 19 nt, Artificial Sequence
  Description of Artificial Sequence: Synthetic oligonucleotide
  Sense strand starting at position 2949 of SEQ ID NO: 1241531
aacaguuucuguguuagaa

SEQ ID NO: 1279639 - RNA, 19 nt, Artificial Sequence
  Description of Artificial Sequence: Synthetic oligonucleotide
  Antisense strand to SEQ ID NO: 1279638
uucuaacacagaaacuguu

SEQ ID NO: 1279640 - RNA, 19 nt, Artificial Sequence
  Description of Artificial Sequence: Synthetic oligonucleotide
  Sense strand starting at position 3152 of SEQ ID NO: 1241531
ggauccgagucccuagaaa

SEQ ID NO: 1279641 - RNA, 19 nt, Artificial Sequence
  Description of Artificial Sequence: Synthetic oligonucleotide
  Antisense strand to SEQ ID NO: 1279640
uuucuagggacucggaucc

SEQ ID NO: 1279642 - RNA, 19 nt, Artificial Sequence
  Description of Artificial Sequence: Synthetic oligonucleotide
  Sense strand starting at position 3419 of SEQ ID NO: 1241531
uguuaaugaaguugguaau

SEQ ID NO: 1279643 - RNA, 19 nt, Artificial Sequence
  Description of Artificial Sequence: Synthetic oligonucleotide
  Antisense strand to SEQ ID NO: 1279642
auuaccaacuucauuaaca

SEQ ID NO: 1279644 - RNA, 19 nt, Artificial Sequence
  Description of Artificial Sequence: Synthetic oligonucleotide
  Sense strand starting at position 3420 of SEQ ID NO: 1241531
guuaaugaaguugguaauu

SEQ ID NO: 1279645 - RNA, 19 nt, Artificial Sequence
  Description of Artificial Sequence: Synthetic oligonucleotide
  Antisense strand to SEQ ID NO: 1279644
aauuaccaacuucauuaac

SEQ ID NO: 1279646 - RNA, 19 nt, Artificial Sequence
  Description of Artificial Sequence: Synthetic oligonucleotide
  Sense strand starting at position 3435 of SEQ ID NO: 1241531
aauuaauucgucgcuuugu

SEQ ID NO: 1279647 - RNA, 19 nt, Artificial Sequence
  Description of Artificial Sequence: Synthetic oligonucleotide
  Antisense strand to SEQ ID NO: 1279646
acaaagcgacgaauuaauu

SEQ ID NO: 1279648 - RNA, 19 nt, Artificial Sequence
  Description of Artificial Sequence: Synthetic oligonucleotide
  Sense strand starting at position 3448 of SEQ ID NO: 1241531
cuuuguugucgguucuuau

SEQ ID NO: 1279649 - RNA, 19 nt, Artificial Sequence
  Description of Artificial Sequence: Synthetic oligonucleotide
  Antisense strand to SEQ ID NO: 1279648
auaagaaccgacaacaaag

SEQ ID NO: 1279650 - RNA, 19 nt, Artificial Sequence
  Description of Artificial Sequence: Synthetic oligonucleotide
  Sense strand starting at position 3468 of SEQ ID NO: 1241531
cuguauguguacucaaaug

SEQ ID NO: 1279651 - RNA, 19 nt, Artificial Sequence
  Description of Artificial Sequence: Synthetic oligonucleotide
  Antisense strand to SEQ ID NO: 1279650
cauuugaguacacauacag

SEQ ID NO: 1279652 - RNA, 19 nt, Artificial Sequence
  Description of Artificial Sequence: Synthetic oligonucleotide
  Sense strand starting at position 3937 of SEQ ID NO: 1241531
gugcgcuuggucagaguca

SEQ ID NO: 1279653 - RNA, 19 nt, Artificial Sequence
  Description of Artificial Sequence: Synthetic oligonucleotide
  Antisense strand to SEQ ID NO: 1279652
ugacucugaccaagcgcac

SEQ ID NO: 1279654 - RNA, 19 nt, Artificial Sequence
  Description of Artificial Sequence: Synthetic oligonucleotide
  Sense strand starting at position 3939 of SEQ ID NO: 1241531
gcgcuuggucagagucaug

SEQ ID NO: 1279655 - RNA, 19 nt, Artificial Sequence
  Description of Artificial Sequence: Synthetic oligonucleotide
  Antisense strand to SEQ ID NO: 1279654
caugacucugaccaagcgc

SEQ ID NO: 1279656 - RNA, 19 nt, Artificial Sequence
  Description of Artificial Sequence: Synthetic oligonucleotide
  Sense strand starting at position 3956 of SEQ ID NO: 1241531
ugaugcuuucgaugaagga

SEQ ID NO: 1279657 - RNA, 19 nt, Artificial Sequence
  Description of Artificial Sequence: Synthetic oligonucleotide
  Antisense strand to SEQ ID NO: 1279656
uccuucaucgaaagcauca

SEQ ID NO: 1279658 - RNA, 19 nt, Artificial Sequence
  Description of Artificial Sequence: Synthetic oligonucleotide
  Sense strand starting at position 118 of SEQ ID NO: 1241532
aguuaugaccuugagcaag

SEQ ID NO: 1279659 - RNA, 19 nt, Artificial Sequence
  Description of Artificial Sequence: Synthetic oligonucleotide
  Antisense strand to SEQ ID NO: 1279658
cuugcucaaggucauaacu

SEQ ID NO: 1279660 - RNA, 19 nt, Artificial Sequence
  Description of Artificial Sequence: Synthetic oligonucleotide
  Sense strand starting at position 171 of SEQ ID NO: 1241532
uggacuguccaagagcuaa

SEQ ID NO: 1279661 - RNA, 19 nt, Artificial Sequence
  Description of Artificial Sequence: Synthetic oligonucleotide
  Antisense strand to SEQ ID NO: 1279660
uuagcucuuggacagucca

SEQ ID NO: 1279662 - RNA, 19 nt, Artificial Sequence
  Description of Artificial Sequence: Synthetic oligonucleotide
  Sense strand starting at position 202 of SEQ ID NO: 1241532
cguacaaguccaugagaau

SEQ ID NO: 1279663 - RNA, 19 nt, Artificial Sequence
  Description of Artificial Sequence: Synthetic oligonucleotide
  Antisense strand to SEQ ID NO: 1279662
auucucauggacuuguacg

SEQ ID NO: 1279664 - RNA, 19 nt, Artificial Sequence
  Description of Artificial Sequence: Synthetic oligonucleotide
  Sense strand starting at position 262 of SEQ ID NO: 1241532
ccacgugacuacucuugaa

SEQ ID NO: 1279665 - RNA, 19 nt, Artificial Sequence
  Description of Artificial Sequence: Synthetic oligonucleotide
  Antisense strand to SEQ ID NO: 1279664
uucaagaguagucacgugg

SEQ ID NO: 1279666 - RNA, 19 nt, Artificial Sequence
  Description of Artificial Sequence: Synthetic oligonucleotide
  Sense strand starting at position 266 of SEQ ID NO: 1241532
gugacuacucuugaaaccu

SEQ ID NO: 1279667 - RNA, 19 nt, Artificial Sequence
  Description of Artificial Sequence: Synthetic oligonucleotide
  Antisense strand to SEQ ID NO: 1279666
agguuucaagaguagucac

SEQ ID NO: 1279668 - RNA, 19 nt, Artificial Sequence
  Description of Artificial Sequence: Synthetic oligonucleotide
  Sense strand starting at position 275 of SEQ ID NO: 1241532
cuugaaaccugcucaagga

SEQ ID NO: 1279669 - RNA, 19 nt, Artificial Sequence
  Description of Artificial Sequence: Synthetic oligonucleotide
  Antisense strand to SEQ ID NO: 1279668
uccuugagcagguuucaag

SEQ ID NO: 1279670 - RNA, 19 nt, Artificial Sequence
  Description of Artificial Sequence: Synthetic oligonucleotide
  Sense strand starting at position 572 of SEQ ID NO: 1241532
gcaugaagaugucugggua

SEQ ID NO: 1279671 - RNA, 19 nt, Artificial Sequence
  Description of Artificial Sequence: Synthetic oligonucleotide
  Antisense strand to SEQ ID NO: 1279670
uacccagacaucuucaugc

SEQ ID NO: 1279672 - RNA, 19 nt, Artificial Sequence
  Description of Artificial Sequence: Synthetic oligonucleotide
  Sense strand starting at position 900 of SEQ ID NO: 1241532
uugagauugcuccaaucag

SEQ ID NO: 1279673 - RNA, 19 nt, Artificial Sequence
  Description of Artificial Sequence: Synthetic oligonucleotide
  Antisense strand to SEQ ID NO: 1279672
cugauuggagcaaucucaa

SEQ ID NO: 1279674 - RNA, 19 nt, Artificial Sequence
  Description of Artificial Sequence: Synthetic oligonucleotide
  Sense strand starting at position 917 of SEQ ID NO: 1241532
agagcaucacuuggaaagu

SEQ ID NO: 1279675 - RNA, 19 nt, Artificial Sequence
  Description of Artificial Sequence: Synthetic oligonucleotide
  Antisense strand to SEQ ID NO: 1279674
acuuuccaagugaugcucu

SEQ ID NO: 1279676 - RNA, 19 nt, Artificial Sequence
  Description of Artificial Sequence: Synthetic oligonucleotide
  Sense strand starting at position 1009 of SEQ ID NO: 1241532
aggcuauuccaagaaguca

SEQ ID NO: 1279677 - RNA, 19 nt, Artificial Sequence
  Description of Artificial Sequence: Synthetic oligonucleotide
  Antisense strand to SEQ ID NO: 1279676
ugacuucuuggaauagccu

SEQ ID NO: 1279678 - RNA, 19 nt, Artificial Sequence
  Description of Artificial Sequence: Synthetic oligonucleotide
  Sense strand starting at position 1216 of SEQ ID NO: 1241532
gccucuugggauuaaagca

SEQ ID NO: 1279679 - RNA, 19 nt, Artificial Sequence
  Description of Artificial Sequence: Synthetic oligonucleotide
  Antisense strand to SEQ ID NO: 1279678
ugcuuuaaucccaagaggc

SEQ ID NO: 1279680 - RNA, 19 nt, Artificial Sequence
  Description of Artificial Sequence: Synthetic oligonucleotide
  Sense strand starting at position 1341 of SEQ ID NO: 1241532
uucugaggaauuggucauu

SEQ ID NO: 1279681 - RNA, 19 nt, Artificial Sequence
  Description of Artificial Sequence: Synthetic oligonucleotide
  Antisense strand to SEQ ID NO: 1279680
aaugaccaauuccucagaa

SEQ ID NO: 1279682 - RNA, 19 nt, Artificial Sequence
  Description of Artificial Sequence: Synthetic oligonucleotide
  Sense strand starting at position 1352 of SEQ ID NO: 1241532
uggucauugagauaugggu

SEQ ID NO: 1279683 - RNA, 19 nt, Artificial Sequence
  Description of Artificial Sequence: Synthetic oligonucleotide
  Antisense strand to SEQ ID NO: 1279682
acccauaucucaaugacca

SEQ ID NO: 1279684 - RNA, 19 nt, Artificial Sequence
  Description of Artificial Sequence: Synthetic oligonucleotide
  Sense strand starting at position 1354 of SEQ ID NO: 1241532
gucauugagauauggguag

SEQ ID NO: 1279685 - RNA, 19 nt, Artificial Sequence
  Description of Artificial Sequence: Synthetic oligonucleotide
  Antisense strand to SEQ ID NO: 1279684
cuacccauaucucaaugac

SEQ ID NO: 1279686 - RNA, 19 nt, Artificial Sequence
  Description of Artificial Sequence: Synthetic oligonucleotide
  Sense strand starting at position 1523 of SEQ ID NO: 1241532
caguaaaugcccugggacu

SEQ ID NO: 1279687 - RNA, 19 nt, Artificial Sequence
  Description of Artificial Sequence: Synthetic oligonucleotide
  Antisense strand to SEQ ID NO: 1279686
agucccagggcauuuacug

SEQ ID NO: 1279688 - RNA, 19 nt, Artificial Sequence
  Description of Artificial Sequence: Synthetic oligonucleotide
  Sense strand starting at position 1535 of SEQ ID NO: 1241532
ugggacugcuuccucagaa

SEQ ID NO: 1279689 - RNA, 19 nt, Artificial Sequence
  Description of Artificial Sequence: Synthetic oligonucleotide
  Antisense strand to SEQ ID NO: 1279688
uucugaggaagcaguccca

SEQ ID NO: 1279690 - RNA, 19 nt, Artificial Sequence
  Description of Artificial Sequence: Synthetic oligonucleotide
  Sense strand starting at position 1536 of SEQ ID NO: 1241532
gggacugcuuccucagaag

SEQ ID NO: 1279691 - RNA, 19 nt, Artificial Sequence
  Description of Artificial Sequence: Synthetic oligonucleotide
  Antisense strand to SEQ ID NO: 1279690
cuucugaggaagcaguccc

SEQ ID NO: 1279692 - RNA, 19 nt, Artificial Sequence
  Description of Artificial Sequence: Synthetic oligonucleotide
  Sense strand starting at position 2327 of SEQ ID NO: 1241532
agaacucuuuggcuaaaua

SEQ ID NO: 1279693 - RNA, 19 nt, Artificial Sequence
  Description of Artificial Sequence: Synthetic oligonucleotide
  Antisense strand to SEQ ID NO: 1279692
uauuuagccaaagaguucu

SEQ ID NO: 1279694 - RNA, 19 nt, Artificial Sequence
  Description of Artificial Sequence: Synthetic oligonucleotide
  Sense strand starting at position 2599 of SEQ ID NO: 1241532
uaauuaguagucuggguaa

SEQ ID NO: 1279695 - RNA, 19 nt, Artificial Sequence
  Description of Artificial Sequence: Synthetic oligonucleotide
  Antisense strand to SEQ ID NO: 1279694
uuacccagacuacuaauua

SEQ ID NO: 1279696 - RNA, 19 nt, Artificial Sequence
  Description of Artificial Sequence: Synthetic oligonucleotide
  Sense strand starting at position 2602 of SEQ ID NO: 1241532
uuaguagucuggguaauua

SEQ ID NO: 1279697 - RNA, 19 nt, Artificial Sequence
  Description of Artificial Sequence: Synthetic oligonucleotide
  Antisense strand to SEQ ID NO: 1279696
uaauuacccagacuacuaa

SEQ ID NO: 1279698 - RNA, 19 nt, Artificial Sequence
  Description of Artificial Sequence: Synthetic oligonucleotide
  Sense strand starting at position 2606 of SEQ ID NO: 1241532
uagucuggguaauuagauu

SEQ ID NO: 1279699 - RNA, 19 nt, Artificial Sequence
  Description of Artificial Sequence: Synthetic oligonucleotide
  Antisense strand to SEQ ID NO: 1279698
aaucuaauuacccagacua

SEQ ID NO: 1279700 - RNA, 19 nt, Artificial Sequence
  Description of Artificial Sequence: Synthetic oligonucleotide
  Sense strand starting at position 2615 of SEQ ID NO: 1241532
uaauuagauuucgagguaa

SEQ ID NO: 1279701 - RNA, 19 nt, Artificial Sequence
  Description of Artificial Sequence: Synthetic oligonucleotide
  Antisense strand to SEQ ID NO: 1279700
uuaccucgaaaucuaauua

SEQ ID NO: 1279702 - RNA, 19 nt, Artificial Sequence
  Description of Artificial Sequence: Synthetic oligonucleotide
  Sense strand starting at position 2623 of SEQ ID NO: 1241532
uuucgagguaaguaacaga

SEQ ID NO: 1279703 - RNA, 19 nt, Artificial Sequence
  Description of Artificial Sequence: Synthetic oligonucleotide
  Antisense strand to SEQ ID NO: 1279702
ucuguuacuuaccucgaaa

SEQ ID NO: 1279704 - RNA, 19 nt, Artificial Sequence
  Description of Artificial Sequence: Synthetic oligonucleotide
  Sense strand starting at position 2664 of SEQ ID NO: 1241532
uugauuauaugugucuaag

SEQ ID NO: 1279705 - RNA, 19 nt, Artificial Sequence
  Description of Artificial Sequence: Synthetic oligonucleotide
  Antisense strand to SEQ ID NO: 1279704
cuuagacacauauaaucaa

SEQ ID NO: 1279706 - RNA, 19 nt, Artificial Sequence
  Description of Artificial Sequence: Synthetic oligonucleotide
  Sense strand starting at position 2666 of SEQ ID NO: 1241532
gauuauaugugucuaagga

SEQ ID NO: 1279707 - RNA, 19 nt, Artificial Sequence
  Description of Artificial Sequence: Synthetic oligonucleotide
  Antisense strand to SEQ ID NO: 1279706
uccuuagacacauauaauc

SEQ ID NO: 1279708 - RNA, 19 nt, Artificial Sequence
  Description of Artificial Sequence: Synthetic oligonucleotide
  Sense strand starting at position 2772 of SEQ ID NO: 1241532
cagggcuugccagaaauug

SEQ ID NO: 1279709 - RNA, 19 nt, Artificial Sequence
  Description of Artificial Sequence: Synthetic oligonucleotide
  Antisense strand to SEQ ID NO: 1279708
caauuucuggcaagcccug

SEQ ID NO: 1279710 - RNA, 19 nt, Artificial Sequence
  Description of Artificial Sequence: Synthetic oligonucleotide
  Sense strand starting at position 3171 of SEQ ID NO: 1241532
guuaauauagacuggcagu

SEQ ID NO: 1279711 - RNA, 19 nt, Artificial Sequence
  Description of Artificial Sequence: Synthetic oligonucleotide
  Antisense strand to SEQ ID NO: 1279710
acugccagucuauauuaac

SEQ ID NO: 1279712 - RNA, 19 nt, Artificial Sequence
  Description of Artificial Sequence: Synthetic oligonucleotide
  Sense strand starting at position 3222 of SEQ ID NO: 1241532
ggcacuuauaugcaaggau

SEQ ID NO: 1279713 - RNA, 19 nt, Artificial Sequence
  Description of Artificial Sequence: Synthetic oligonucleotide
  Antisense strand to SEQ ID NO: 1279712
auccuugcauauaagugcc

SEQ ID NO: 1279714 - RNA, 19 nt, Artificial Sequence
  Description of Artificial Sequence: Synthetic oligonucleotide
  Sense strand starting at position 3231 of SEQ ID NO: 1241532
augcaaggaucucuacuuu

SEQ ID NO: 1279715 - RNA, 19 nt, Artificial Sequence
  Description of Artificial Sequence: Synthetic oligonucleotide
  Antisense strand to SEQ ID NO: 1279714
aaaguagagauccuugcau

SEQ ID NO: 1279716 - RNA, 19 nt, Artificial Sequence
  Description of Artificial Sequence: Synthetic oligonucleotide
  Sense strand starting at position 3237 of SEQ ID NO: 1241532
ggaucucuacuuugaaacu

SEQ ID NO: 1279717 - RNA, 19 nt, Artificial Sequence
  Description of Artificial Sequence: Synthetic oligonucleotide
  Antisense strand to SEQ ID NO: 1279716
aguuucaaaguagagaucc

SEQ ID NO: 1279718 - RNA, 19 nt, Artificial Sequence
  Description of Artificial Sequence: Synthetic oligonucleotide
  Sense strand starting at position 3300 of SEQ ID NO: 1241532
aggucucacugacuuuaaa

SEQ ID NO: 1279719 - RNA, 19 nt, Artificial Sequence
  Description of Artificial Sequence: Synthetic oligonucleotide
  Antisense strand to SEQ ID NO: 1279718
uuuaaagucagugagaccu

SEQ ID NO: 1279720 - RNA, 19 nt, Artificial Sequence
  Description of Artificial Sequence: Synthetic oligonucleotide
  Sense strand starting at position 3332 of SEQ ID NO: 1241532
ucauauuuacguugcuuaa

SEQ ID NO: 1279721 - RNA, 19 nt, Artificial Sequence
  Description of Artificial Sequence: Synthetic oligonucleotide
  Antisense strand to SEQ ID NO: 1279720
uuaagcaacguaaauauga

SEQ ID NO: 1279722 - RNA, 19 nt, Artificial Sequence
  Description of Artificial Sequence: Synthetic oligonucleotide
  Sense strand starting at position 3491 of SEQ ID NO: 1241532
uuguauuauccucaguaca

SEQ ID NO: 1279723 - RNA, 19 nt, Artificial Sequence
  Description of Artificial Sequence: Synthetic oligonucleotide
  Antisense strand to SEQ ID NO: 1279722
uguacugaggauaauacaa

SEQ ID NO: 1279724 - RNA, 19 nt, Artificial Sequence
  Description of Artificial Sequence: Synthetic oligonucleotide
  Sense strand starting at position 3493 of SEQ ID NO: 1241532
guauuauccucaguacaac

SEQ ID NO: 1279725 - RNA, 19 nt, Artificial Sequence
  Description of Artificial Sequence: Synthetic oligonucleotide
  Antisense strand to SEQ ID NO: 1279724
guuguacugaggauaauac

SEQ ID NO: 1279726 - RNA, 19 nt, Artificial Sequence
  Description of Artificial Sequence: Synthetic oligonucleotide
  Sense strand starting at position 3614 of SEQ ID NO: 1241532
cuuagaggcuguuuaaaca

SEQ ID NO: 1279727 - RNA, 19 nt, Artificial Sequence
  Description of Artificial Sequence: Synthetic oligonucleotide
  Antisense strand to SEQ ID NO: 1279726
uguuuaaacagccucuaag

SEQ ID NO: 1279728 - RNA, 19 nt, Artificial Sequence
  Description of Artificial Sequence: Synthetic oligonucleotide
  Sense strand starting at position 3630 of SEQ ID NO: 1241532
acacauaugcgacagcuuu

SEQ ID NO: 1279729 - RNA, 19 nt, Artificial Sequence
  Description of Artificial Sequence: Synthetic oligonucleotide
  Antisense strand to SEQ ID NO: 1279728
aaagcugucgcauaugugu

SEQ ID NO: 1279730 - RNA, 19 nt, Artificial Sequence
  Description of Artificial Sequence: Synthetic oligonucleotide
  Sense strand starting at position 3659 of SEQ ID NO: 1241532
uguauauguguuuaaacag

SEQ ID NO: 1279731 - RNA, 19 nt, Artificial Sequence
  Description of Artificial Sequence: Synthetic oligonucleotide
  Antisense strand to SEQ ID NO: 1279730
cuguuuaaacacauauaca

SEQ ID NO: 1279732 - RNA, 19 nt, Artificial Sequence
  Description of Artificial Sequence: Synthetic oligonucleotide
  Sense strand starting at position 3731 of SEQ ID NO: 1241532
ucugaacuacagugcuaua

SEQ ID NO: 1279733 - RNA, 19 nt, Artificial Sequence
  Description of Artificial Sequence: Synthetic oligonucleotide
  Antisense strand to SEQ ID NO: 1279732
uauagcacuguaguucaga

SEQ ID NO: 1279734 - RNA, 19 nt, Artificial Sequence
  Description of Artificial Sequence: Synthetic oligonucleotide
  Sense strand starting at position 3789 of SEQ ID NO: 1241532
auggaaauguucuuacaug

SEQ ID NO: 1279735 - RNA, 19 nt, Artificial Sequence
  Description of Artificial Sequence: Synthetic oligonucleotide
  Antisense strand to SEQ ID NO: 1279734
cauguaagaacauuuccau

SEQ ID NO: 1279736 - RNA, 19 nt, Artificial Sequence
  Description of Artificial Sequence: Synthetic oligonucleotide
  Sense strand starting at position 3823 of SEQ ID NO: 1241532
auuagaaaugccugacaca

SEQ ID NO: 1279737 - RNA, 19 nt, Artificial Sequence
  Description of Artificial Sequence: Synthetic oligonucleotide
  Antisense strand to SEQ ID NO: 1279736
ugugucaggcauuucuaau

SEQ ID NO: 1279738 - RNA, 19 nt, Artificial Sequence
  Description of Artificial Sequence: Synthetic oligonucleotide
  Sense strand starting at position 15 of SEQ ID NO: 1241533
gcuaguggcuucccaauuu

SEQ ID NO: 1279739 - RNA, 19 nt, Artificial Sequence
  Description of Artificial Sequence: Synthetic oligonucleotide
  Antisense strand to SEQ ID NO: 1279738
aaauugggaagccacuagc

SEQ ID NO: 1279740 - RNA, 19 nt, Artificial Sequence
  Description of Artificial Sequence: Synthetic oligonucleotide
  Sense strand starting at position 63 of SEQ ID NO: 1241533
guucuaaaccaggauagcu

SEQ ID NO: 1279741 - RNA, 19 nt, Artificial Sequence
  Description of Artificial Sequence: Synthetic oligonucleotide
  Antisense strand to SEQ ID NO: 1279740
agcuauccugguuuagaac

SEQ ID NO: 1279742 - RNA, 19 nt, Artificial Sequence
  Description of Artificial Sequence: Synthetic oligonucleotide
  Sense strand starting at position 183 of SEQ ID NO: 1241533
uaagaaauauaggcagagu

SEQ ID NO: 1279743 - RNA, 19 nt, Artificial Sequence
  Description of Artificial Sequence: Synthetic oligonucleotide
  Antisense strand to SEQ ID NO: 1279742
acucugccuauauuucuua

SEQ ID NO: 1279744 - RNA, 19 nt, Artificial Sequence
  Description of Artificial Sequence: Synthetic oligonucleotide
  Sense strand starting at position 186 of SEQ ID NO: 1241533
gaaauauaggcagagugca

SEQ ID NO: 1279745 - RNA, 19 nt, Artificial Sequence
  Description of Artificial Sequence: Synthetic oligonucleotide
  Antisense strand to SEQ ID NO: 1279744
ugcacucugccuauauuuc

SEQ ID NO: 1279746 - RNA, 19 nt, Artificial Sequence
  Description of Artificial Sequence: Synthetic oligonucleotide
  Sense strand starting at position 296 of SEQ ID NO: 1241533
aauugccaucuaugagguu

SEQ ID NO: 1279747 - RNA, 19 nt, Artificial Sequence
  Description of Artificial Sequence: Synthetic oligonucleotide
  Antisense strand to SEQ ID NO: 1279746
aaccucauagauggcaauu

SEQ ID NO: 1279748 - RNA, 19 nt, Artificial Sequence
  Description of Artificial Sequence: Synthetic oligonucleotide
  Sense strand starting at position 323 of SEQ ID NO: 1241533
aacccauguccaggguaua

SEQ ID NO: 1279749 - RNA, 19 nt, Artificial Sequence
  Description of Artificial Sequence: Synthetic oligonucleotide
  Antisense strand to SEQ ID NO: 1279748
uauacccuggacauggguu

SEQ ID NO: 1279750 - RNA, 19 nt, Artificial Sequence
  Description of Artificial Sequence: Synthetic oligonucleotide
  Sense strand starting at position 324 of SEQ ID NO: 1241533
acccauguccaggguauau

SEQ ID NO: 1279751 - RNA, 19 nt, Artificial Sequence
  Description of Artificial Sequence: Synthetic oligonucleotide
  Antisense strand to SEQ ID NO: 1279750
auauacccuggacaugggu

SEQ ID NO: 1279752 - RNA, 19 nt, Artificial Sequence
  Description of Artificial Sequence: Synthetic oligonucleotide
  Sense strand starting at position 559 of SEQ ID NO: 1241533
ccugaaccugugugaaaga

SEQ ID NO: 1279753 - RNA, 19 nt, Artificial Sequence
  Description of Artificial Sequence: Synthetic oligonucleotide
  Antisense strand to SEQ ID NO: 1279752
ucuuucacacagguucagg

SEQ ID NO: 1279754 - RNA, 19 nt, Artificial Sequence
  Description of Artificial Sequence: Synthetic oligonucleotide
  Sense strand starting at position 572 of SEQ ID NO: 1241533
gaaagaaagccuuguauua

SEQ ID NO: 1279755 - RNA, 19 nt, Artificial Sequence
  Description of Artificial Sequence: Synthetic oligonucleotide
  Antisense strand to SEQ ID NO: 1279754
uaauacaaggcuuucuuuc

SEQ ID NO: 1279756 - RNA, 19 nt, Artificial Sequence
  Description of Artificial Sequence: Synthetic oligonucleotide
  Sense strand starting at position 743 of SEQ ID NO: 1241533
aagagaaguuacuuugagu

SEQ ID NO: 1279757 - RNA, 19 nt, Artificial Sequence
  Description of Artificial Sequence: Synthetic oligonucleotide
  Antisense strand to SEQ ID NO: 1279756
acucaaaguaacuucucuu

SEQ ID NO: 1279758 - RNA, 19 nt, Artificial Sequence
  Description of Artificial Sequence: Synthetic oligonucleotide
  Sense strand starting at position 748 of SEQ ID NO: 1241533
aaguuacuuugaguaagaa

SEQ ID NO: 1279759 - RNA, 19 nt, Artificial Sequence
  Description of Artificial Sequence: Synthetic oligonucleotide
  Antisense strand to SEQ ID NO: 1279758
uucuuacucaaaguaacuu

SEQ ID NO: 1279760 - RNA, 19 nt, Artificial Sequence
  Description of Artificial Sequence: Synthetic oligonucleotide
  Sense strand starting at position 1083 of SEQ ID NO: 1241533
ccuaauauugcaggaacga

SEQ ID NO: 1279761 - RNA, 19 nt, Artificial Sequence
  Description of Artificial Sequence: Synthetic oligonucleotide
  Antisense strand to SEQ ID NO: 1279760
ucguuccugcaauauuagg

SEQ ID NO: 1279762 - RNA, 19 nt, Artificial Sequence
  Description of Artificial Sequence: Synthetic oligonucleotide
  Sense strand starting at position 1331 of SEQ ID NO: 1241533
gggugcaaacgggauucau

SEQ ID NO: 1279763 - RNA, 19 nt, Artificial Sequence
  Description of Artificial Sequence: Synthetic oligonucleotide
  Antisense strand to SEQ ID NO: 1279762
augaaucccguuugcaccc

SEQ ID NO: 1279764 - RNA, 19 nt, Artificial Sequence
  Description of Artificial Sequence: Synthetic oligonucleotide
  Sense strand starting at position 2088 of SEQ ID NO: 1241533
gcguaaaccuggguaauuu

SEQ ID NO: 1279765 - RNA, 19 nt, Artificial Sequence
  Description of Artificial Sequence: Synthetic oligonucleotide
  Antisense strand to SEQ ID NO: 1279764
aaauuacccagguuuacgc

SEQ ID NO: 1279766 - RNA, 19 nt, Artificial Sequence
  Description of Artificial Sequence: Synthetic oligonucleotide
  Sense strand starting at position 2119 of SEQ ID NO: 1241533
gcgauuguccucugauuug

SEQ ID NO: 1279767 - RNA, 19 nt, Artificial Sequence
  Description of Artificial Sequence: Synthetic oligonucleotide
  Antisense strand to SEQ ID NO: 1279766
caaaucagaggacaaucgc

SEQ ID NO: 1279768 - RNA, 19 nt, Artificial Sequence
  Description of Artificial Sequence: Synthetic oligonucleotide
  Sense strand starting at position 2125 of SEQ ID NO: 1241533
guccucugauuuguaaguu

SEQ ID NO: 1279769 - RNA, 19 nt, Artificial Sequence
  Description of Artificial Sequence: Synthetic oligonucleotide
  Antisense strand to SEQ ID NO: 1279768
aacuuacaaaucagaggac

SEQ ID NO: 1279770 - RNA, 19 nt, Artificial Sequence
  Description of Artificial Sequence: Synthetic oligonucleotide
  Sense strand starting at position 2169 of SEQ ID NO: 1241533
gcuguacuugcagaggauu

SEQ ID NO: 1279771 - RNA, 19 nt, Artificial Sequence
  Description of Artificial Sequence: Synthetic oligonucleotide
  Antisense strand to SEQ ID NO: 1279770
aauccucugcaaguacagc

SEQ ID NO: 1279772 - RNA, 19 nt, Artificial Sequence
  Description of Artificial Sequence: Synthetic oligonucleotide
  Sense strand starting at position 2194 of SEQ ID NO: 1241533
acucaaugauguucgauuc

SEQ ID NO: 1279773 - RNA, 19 nt, Artificial Sequence
  Description of Artificial Sequence: Synthetic oligonucleotide
  Antisense strand to SEQ ID NO: 1279772
gaaucgaacaucauugagu

SEQ ID NO: 1279774 - RNA, 19 nt, Artificial Sequence
  Description of Artificial Sequence: Synthetic oligonucleotide
  Sense strand starting at position 2805 of SEQ ID NO: 1241533
ugaugauaucauugagcug

SEQ ID NO: 1279775 - RNA, 19 nt, Artificial Sequence
  Description of Artificial Sequence: Synthetic oligonucleotide
  Antisense strand to SEQ ID NO: 1279774
cagcucaaugauaucauca

SEQ ID NO: 1279776 - RNA, 19 nt, Artificial Sequence
  Description of Artificial Sequence: Synthetic oligonucleotide
  Sense strand starting at position 2863 of SEQ ID NO: 1241533
guguaaguuaauuaaaggu

SEQ ID NO: 1279777 - RNA, 19 nt, Artificial Sequence
  Description of Artificial Sequence: Synthetic oligonucleotide
  Antisense strand to SEQ ID NO: 1279776
accuuuaauuaacuuacac

SEQ ID NO: 1279778 - RNA, 19 nt, Artificial Sequence
  Description of Artificial Sequence: Synthetic oligonucleotide
  Sense strand starting at position 2932 of SEQ ID NO: 1241533
ugagguggucucgauaacu

SEQ ID NO: 1279779 - RNA, 19 nt, Artificial Sequence
  Description of Artificial Sequence: Synthetic oligonucleotide
  Antisense strand to SEQ ID NO: 1279778
aguuaucgagaccaccuca

SEQ ID NO: 1279780 - RNA, 19 nt, Artificial Sequence
  Description of Artificial Sequence: Synthetic oligonucleotide
  Sense strand starting at position 2940 of SEQ ID NO: 1241533
ucucgauaacuaggucaag

SEQ ID NO: 1279781 - RNA, 19 nt, Artificial Sequence
  Description of Artificial Sequence: Synthetic oligonucleotide
  Antisense strand to SEQ ID NO: 1279780
cuugaccuaguuaucgaga

SEQ ID NO: 1279782 - RNA, 19 nt, Artificial Sequence
  Description of Artificial Sequence: Synthetic oligonucleotide
  Sense strand starting at position 2941 of SEQ ID NO: 1241533
cucgauaacuaggucaaga

SEQ ID NO: 1279783 - RNA, 19 nt, Artificial Sequence
  Description of Artificial Sequence: Synthetic oligonucleotide
  Antisense strand to SEQ ID NO: 1279782
ucuugaccuaguuaucgag

SEQ ID NO: 1279784 - RNA, 19 nt, Artificial Sequence
  Description of Artificial Sequence: Synthetic oligonucleotide
  Sense strand starting at position 3197 of SEQ ID NO: 1241533
gauuaaaggucuuuacugu

SEQ ID NO: 1279785 - RNA, 19 nt, Artificial Sequence
  Description of Artificial Sequence: Synthetic oligonucleotide
  Antisense strand to SEQ ID NO: 1279784
acaguaaagaccuuuaauc

SEQ ID NO: 1279786 - RNA, 19 nt, Artificial Sequence
  Description of Artificial Sequence: Synthetic oligonucleotide
  Sense strand starting at position 3198 of SEQ ID NO: 1241533
auuaaaggucuuuacuguu

SEQ ID NO: 1279787 - RNA, 19 nt, Artificial Sequence
  Description of Artificial Sequence: Synthetic oligonucleotide
  Antisense strand to SEQ ID NO: 1279786
aacaguaaagaccuuuaau

SEQ ID NO: 1279788 - RNA, 19 nt, Artificial Sequence
  Description of Artificial Sequence: Synthetic oligonucleotide
  Sense strand starting at position 3212 of SEQ ID NO: 1241533
cuguuuagacucuaagucu

SEQ ID NO: 1279789 - RNA, 19 nt, Artificial Sequence
  Description of Artificial Sequence: Synthetic oligonucleotide
  Antisense strand to SEQ ID NO: 1279788
agacuuagagucuaaacag

SEQ ID NO: 1279790 - RNA, 19 nt, Artificial Sequence
  Description of Artificial Sequence: Synthetic oligonucleotide
  Sense strand starting at position 3298 of SEQ ID NO: 1241533
aaagguggaguuugauuau

SEQ ID NO: 1279791 - RNA, 19 nt, Artificial Sequence
  Description of Artificial Sequence: Synthetic oligonucleotide
  Antisense strand to SEQ ID NO: 1279790
auaaucaaacuccaccuuu

SEQ ID NO: 1279792 - RNA, 19 nt, Artificial Sequence
  Description of Artificial Sequence: Synthetic oligonucleotide
  Sense strand starting at position 3305 of SEQ ID NO: 1241533
gaguuugauuauguuugaa

SEQ ID NO: 1279793 - RNA, 19 nt, Artificial Sequence
  Description of Artificial Sequence: Synthetic oligonucleotide
  Antisense strand to SEQ ID NO: 1279792
uucaaacauaaucaaacuc

SEQ ID NO: 1279794 - RNA, 19 nt, Artificial Sequence
  Description of Artificial Sequence: Synthetic oligonucleotide
  Sense strand starting at position 3428 of SEQ ID NO: 1241533
cgauuaugaauguaccuga

SEQ ID NO: 1279795 - RNA, 19 nt, Artificial Sequence
  Description of Artificial Sequence: Synthetic oligonucleotide
  Antisense strand to SEQ ID NO: 1279794
ucagguacauucauaaucg

SEQ ID NO: 1279796 - RNA, 19 nt, Artificial Sequence
  Description of Artificial Sequence: Synthetic oligonucleotide
  Sense strand starting at position 3492 of SEQ ID NO: 1241533
guaauaauuagugguauga

SEQ ID NO: 1279797 - RNA, 19 nt, Artificial Sequence
  Description of Artificial Sequence: Synthetic oligonucleotide
  Antisense strand to SEQ ID NO: 1279796
ucauaccacuaauuauuac

SEQ ID NO: 1279798 - RNA, 19 nt, Artificial Sequence
  Description of Artificial Sequence: Synthetic oligonucleotide
  Sense strand starting at position 3496 of SEQ ID NO: 1241533
uaauuagugguaugagcua

SEQ ID NO: 1279799 - RNA, 19 nt, Artificial Sequence
  Description of Artificial Sequence: Synthetic oligonucleotide
  Antisense strand to SEQ ID NO: 1279798
uagcucauaccacuaauua

SEQ ID NO: 1279800 - RNA, 19 nt, Artificial Sequence
  Description of Artificial Sequence: Synthetic oligonucleotide
  Sense strand starting at position 3501 of SEQ ID NO: 1241533
agugguaugagcuaacacu

SEQ ID NO: 1279801 - RNA, 19 nt, Artificial Sequence
  Description of Artificial Sequence: Synthetic oligonucleotide
  Antisense strand to SEQ ID NO: 1279800
aguguuagcucauaccacu

SEQ ID NO: 1279802 - RNA, 19 nt, Artificial Sequence
  Description of Artificial Sequence: Synthetic oligonucleotide
  Sense strand starting at position 3727 of SEQ ID NO: 1241533
ggaguucucuucucuugag

SEQ ID NO: 1279803 - RNA, 19 nt, Artificial Sequence
  Description of Artificial Sequence: Synthetic oligonucleotide
  Antisense strand to SEQ ID NO: 1279802
cucaagagaagagaacucc

SEQ ID NO: 1279804 - RNA, 19 nt, Artificial Sequence
  Description of Artificial Sequence: Synthetic oligonucleotide
  Sense strand starting at position 3765 of SEQ ID NO: 1241533
ugcuuuaaucaauaguaga

SEQ ID NO: 1279805 - RNA, 19 nt, Artificial Sequence
  Description of Artificial Sequence: Synthetic oligonucleotide
  Antisense strand to SEQ ID NO: 1279804
ucuacuauugauuaaagca

SEQ ID NO: 1279806 - RNA, 19 nt, Artificial Sequence
  Description of Artificial Sequence: Synthetic oligonucleotide
  Sense strand starting at position 3776 of SEQ ID NO: 1241533
auaguagaaugcguuggaa

SEQ ID NO: 1279807 - RNA, 19 nt, Artificial Sequence
  Description of Artificial Sequence: Synthetic oligonucleotide
  Antisense strand to SEQ ID NO: 1279806
uuccaacgcauucuacuau

SEQ ID NO: 1279808 - RNA, 19 nt, Artificial Sequence
  Description of Artificial Sequence: Synthetic oligonucleotide
  Sense strand starting at position 3811 of SEQ ID NO: 1241533
uugggacuaugccuuaaga

SEQ ID NO: 1279809 - RNA, 19 nt, Artificial Sequence
  Description of Artificial Sequence: Synthetic oligonucleotide
  Antisense strand to SEQ ID NO: 1279808
ucuuaaggcauagucccaa

SEQ ID NO: 1279810 - RNA, 19 nt, Artificial Sequence
  Description of Artificial Sequence: Synthetic oligonucleotide
  Sense strand starting at position 3824 of SEQ ID NO: 1241533
uuaagaaggccugauagcu

SEQ ID NO: 1279811 - RNA, 19 nt, Artificial Sequence
  Description of Artificial Sequence: Synthetic oligonucleotide
  Antisense strand to SEQ ID NO: 1279810
agcuaucaggccuucuuaa

SEQ ID NO: 1279812 - RNA, 19 nt, Artificial Sequence
  Description of Artificial Sequence: Synthetic oligonucleotide
  Sense strand starting at position 3878 of SEQ ID NO: 1241533
uuagaaguuugacuucuca

SEQ ID NO: 1279813 - RNA, 19 nt, Artificial Sequence
  Description of Artificial Sequence: Synthetic oligonucleotide
  Antisense strand to SEQ ID NO: 1279812
ugagaagucaaacuucuaa

SEQ ID NO: 1279814 - RNA, 19 nt, Artificial Sequence
  Description of Artificial Sequence: Synthetic oligonucleotide
  Sense strand starting at position 3895 of SEQ ID NO: 1241533
cagacuuacugccugugaa

SEQ ID NO: 1279815 - RNA, 19 nt, Artificial Sequence
  Description of Artificial Sequence: Synthetic oligonucleotide
  Antisense strand to SEQ ID NO: 1279814
uucacaggcaguaagucug

SEQ ID NO: 1279816 - RNA, 19 nt, Artificial Sequence
  Description of Artificial Sequence: Synthetic oligonucleotide
  Sense strand starting at position 3896 of SEQ ID NO: 1241533
agacuuacugccugugaaa

SEQ ID NO: 1279817 - RNA, 19 nt, Artificial Sequence
  Description of Artificial Sequence: Synthetic oligonucleotide
  Antisense strand to SEQ ID NO: 1279816
uuucacaggcaguaagucu

SEQ ID NO: 1279818 - RNA, 19 nt, Artificial Sequence
  Description of Artificial Sequence: Synthetic oligonucleotide
  Sense strand starting at position 121 of SEQ ID NO: 1241534
ccaugcgagggucgugaua

SEQ ID NO: 1279819 - RNA, 19 nt, Artificial Sequence
  Description of Artificial Sequence: Synthetic oligonucleotide
  Antisense strand to SEQ ID NO: 1279818
uaucacgacccucgcaugg

SEQ ID NO: 1279820 - RNA, 19 nt, Artificial Sequence
  Description of Artificial Sequence: Synthetic oligonucleotide
  Sense strand starting at position 123 of SEQ ID NO: 1241534
augcgagggucgugauaaa

SEQ ID NO: 1279821 - RNA, 19 nt, Artificial Sequence
  Description of Artificial Sequence: Synthetic oligonucleotide
  Antisense strand to SEQ ID NO: 1279820
uuuaucacgacccucgcau

SEQ ID NO: 1279822 - RNA, 19 nt, Artificial Sequence
  Description of Artificial Sequence: Synthetic oligonucleotide
  Sense strand starting at position 210 of SEQ ID NO: 1241534
uguagugaucgcugaccca

SEQ ID NO: 1279823 - RNA, 19 nt, Artificial Sequence
  Description of Artificial Sequence: Synthetic oligonucleotide
  Antisense strand to SEQ ID NO: 1279822
ugggucagcgaucacuaca

SEQ ID NO: 1279824 - RNA, 19 nt, Artificial Sequence
  Description of Artificial Sequence: Synthetic oligonucleotide
  Sense strand starting at position 2157 of SEQ ID NO: 1241534
aguguacguuugcaagaga

SEQ ID NO: 1279825 - RNA, 19 nt, Artificial Sequence
  Description of Artificial Sequence: Synthetic oligonucleotide
  Antisense strand to SEQ ID NO: 1279824
ucucuugcaaacguacacu

SEQ ID NO: 1279826 - RNA, 19 nt, Artificial Sequence
  Description of Artificial Sequence: Synthetic oligonucleotide
  Sense strand starting at position 2160 of SEQ ID NO: 1241534
guacguuugcaagagaaau

SEQ ID NO: 1279827 - RNA, 19 nt, Artificial Sequence
  Description of Artificial Sequence: Synthetic oligonucleotide
  Antisense strand to SEQ ID NO: 1279826
auuucucuugcaaacguac

SEQ ID NO: 1279828 - RNA, 19 nt, Artificial Sequence
  Description of Artificial Sequence: Synthetic oligonucleotide
  Sense strand starting at position 2193 of SEQ ID NO: 1241534
uaaccuacaguucgaaaga

SEQ ID NO: 1279829 - RNA, 19 nt, Artificial Sequence
  Description of Artificial Sequence: Synthetic oligonucleotide
  Antisense strand to SEQ ID NO: 1279828
ucuuucgaacuguagguua

SEQ ID NO: 1279830 - RNA, 19 nt, Artificial Sequence
  Description of Artificial Sequence: Synthetic oligonucleotide
  Sense strand starting at position 2194 of SEQ ID NO: 1241534
aaccuacaguucgaaagau

SEQ ID NO: 1279831 - RNA, 19 nt, Artificial Sequence
  Description of Artificial Sequence: Synthetic oligonucleotide
  Antisense strand to SEQ ID NO: 1279830
aucuuucgaacuguagguu

SEQ ID NO: 1279832 - RNA, 19 nt, Artificial Sequence
  Description of Artificial Sequence: Synthetic oligonucleotide
  Sense strand starting at position 2270 of SEQ ID NO: 1241534
agaagauccucauuagcaa

SEQ ID NO: 1279833 - RNA, 19 nt, Artificial Sequence
  Description of Artificial Sequence: Synthetic oligonucleotide
  Antisense strand to SEQ ID NO: 1279832
uugcuaaugaggaucuucu

SEQ ID NO: 1279834 - RNA, 19 nt, Artificial Sequence
  Description of Artificial Sequence: Synthetic oligonucleotide
  Sense strand starting at position 2477 of SEQ ID NO: 1241534
agcucuaaaugauugaaua

SEQ ID NO: 1279835 - RNA, 19 nt, Artificial Sequence
  Description of Artificial Sequence: Synthetic oligonucleotide
  Antisense strand to SEQ ID NO: 1279834
uauucaaucauuuagagcu

SEQ ID NO: 1279836 - RNA, 19 nt, Artificial Sequence
  Description of Artificial Sequence: Synthetic oligonucleotide
  Sense strand starting at position 2478 of SEQ ID NO: 1241534
gcucuaaaugauugaauac

SEQ ID NO: 1279837 - RNA, 19 nt, Artificial Sequence
  Description of Artificial Sequence: Synthetic oligonucleotide
  Antisense strand to SEQ ID NO: 1279836
guauucaaucauuuagagc

SEQ ID NO: 1279838 - RNA, 19 nt, Artificial Sequence
  Description of Artificial Sequence: Synthetic oligonucleotide
  Sense strand starting at position 2541 of SEQ ID NO: 1241534
uuguuaaucuuauugguac

SEQ ID NO: 1279839 - RNA, 19 nt, Artificial Sequence
  Description of Artificial Sequence: Synthetic oligonucleotide
  Antisense strand to SEQ ID NO: 1279838
guaccaauaagauuaacaa

SEQ ID NO: 1279840 - RNA, 19 nt, Artificial Sequence
  Description of Artificial Sequence: Synthetic oligonucleotide
  Sense strand starting at position 2751 of SEQ ID NO: 1241534
ugaagaaacuugccuaagu

SEQ ID NO: 1279841 - RNA, 19 nt, Artificial Sequence
  Description of Artificial Sequence: Synthetic oligonucleotide
  Antisense strand to SEQ ID NO: 1279840
acuuaggcaaguuucuuca

SEQ ID NO: 1279842 - RNA, 19 nt, Artificial Sequence
  Description of Artificial Sequence: Synthetic oligonucleotide
  Sense strand starting at position 2760 of SEQ ID NO: 1241534
uugccuaagucauuggacu

SEQ ID NO: 1279843 - RNA, 19 nt, Artificial Sequence
  Description of Artificial Sequence: Synthetic oligonucleotide
  Antisense strand to SEQ ID NO: 1279842
aguccaaugacuuaggcaa

SEQ ID NO: 1279844 - RNA, 19 nt, Artificial Sequence
  Description of Artificial Sequence: Synthetic oligonucleotide
  Sense strand starting at position 2761 of SEQ ID NO: 1241534
ugccuaagucauuggacua

SEQ ID NO: 1279845 - RNA, 19 nt, Artificial Sequence
  Description of Artificial Sequence: Synthetic oligonucleotide
  Antisense strand to SEQ ID NO: 1279844
uaguccaaugacuuaggca

SEQ ID NO: 1279846 - RNA, 19 nt, Artificial Sequence
  Description of Artificial Sequence: Synthetic oligonucleotide
  Sense strand starting at position 2987 of SEQ ID NO: 1241534
aggagaaucgccugggcaa

SEQ ID NO: 1279847 - RNA, 19 nt, Artificial Sequence
  Description of Artificial Sequence: Synthetic oligonucleotide
  Antisense strand to SEQ ID NO: 1279846
uugcccaggcgauucuccu

SEQ ID NO: 1279848 - RNA, 19 nt, Artificial Sequence
  Description of Artificial Sequence: Synthetic oligonucleotide
  Sense strand starting at position 3081 of SEQ ID NO: 1241534
uaauaaugugcagggaauu

SEQ ID NO: 1279849 - RNA, 19 nt, Artificial Sequence
  Description of Artificial Sequence: Synthetic oligonucleotide
  Antisense strand to SEQ ID NO: 1279848
aauucccugcacauuauua

SEQ ID NO: 1279850 - RNA, 19 nt, Artificial Sequence
  Description of Artificial Sequence: Synthetic oligonucleotide
  Sense strand starting at position 3258 of SEQ ID NO: 1241534
aggguuacauaguaugaca

SEQ ID NO: 1279851 - RNA, 19 nt, Artificial Sequence
  Description of Artificial Sequence: Synthetic oligonucleotide
  Antisense strand to SEQ ID NO: 1279850
ugucauacuauguaacccu

SEQ ID NO: 1279852 - RNA, 19 nt, Artificial Sequence
  Description of Artificial Sequence: Synthetic oligonucleotide
  Sense strand starting at position 3260 of SEQ ID NO: 1241534
gguuacauaguaugacaaa

SEQ ID NO: 1279853 - RNA, 19 nt, Artificial Sequence
  Description of Artificial Sequence: Synthetic oligonucleotide
  Antisense strand to SEQ ID NO: 1279852
uuugucauacuauguaacc

SEQ ID NO: 1279854 - RNA, 19 nt, Artificial Sequence
  Description of Artificial Sequence: Synthetic oligonucleotide
  Sense strand starting at position 3269 of SEQ ID NO: 1241534
guaugacaaacaugcgaaa

SEQ ID NO: 1279855 - RNA, 19 nt, Artificial Sequence
  Description of Artificial Sequence: Synthetic oligonucleotide
  Antisense strand to SEQ ID NO: 1279854
uuucgcauguuugucauac

SEQ ID NO: 1279856 - RNA, 19 nt, Artificial Sequence
  Description of Artificial Sequence: Synthetic oligonucleotide
  Sense strand starting at position 3409 of SEQ ID NO: 1241534
uucuauucuuuggcaguau

SEQ ID NO: 1279857 - RNA, 19 nt, Artificial Sequence
  Description of Artificial Sequence: Synthetic oligonucleotide
  Antisense strand to SEQ ID NO: 1279856
auacugccaaagaauagaa

SEQ ID NO: 1279858 - RNA, 19 nt, Artificial Sequence
  Description of Artificial Sequence: Synthetic oligonucleotide
  Sense strand starting at position 3410 of SEQ ID NO: 1241534
ucuauucuuuggcaguaua

SEQ ID NO: 1279859 - RNA, 19 nt, Artificial Sequence
  Description of Artificial Sequence: Synthetic oligonucleotide
  Antisense strand to SEQ ID NO: 1279858
uauacugccaaagaauaga

SEQ ID NO: 1279860 - RNA, 19 nt, Artificial Sequence
  Description of Artificial Sequence: Synthetic oligonucleotide
  Sense strand starting at position 3413 of SEQ ID NO: 1241534
auucuuuggcaguauauau

SEQ ID NO: 1279861 - RNA, 19 nt, Artificial Sequence
  Description of Artificial Sequence: Synthetic oligonucleotide
  Antisense strand to SEQ ID NO: 1279860
auauauacugccaaagaau

SEQ ID NO: 1279862 - RNA, 19 nt, Artificial Sequence
  Description of Artificial Sequence: Synthetic oligonucleotide
  Sense strand starting at position 3651 of SEQ ID NO: 1241534
gugcuacgugcacuucaga

SEQ ID NO: 1279863 - RNA, 19 nt, Artificial Sequence
  Description of Artificial Sequence: Synthetic oligonucleotide
  Antisense strand to SEQ ID NO: 1279862
ucugaagugcacguagcac

SEQ ID NO: 1279864 - RNA, 19 nt, Artificial Sequence
  Description of Artificial Sequence: Synthetic oligonucleotide
  Sense strand starting at position 3946 of SEQ ID NO: 1241534
ccaagaucgcgacacuaua

SEQ ID NO: 1279865 - RNA, 19 nt, Artificial Sequence
  Description of Artificial Sequence: Synthetic oligonucleotide
  Antisense strand to SEQ ID NO: 1279864
uauagugucgcgaucuugg

SEQ ID NO: 1279866 - RNA, 19 nt, Artificial Sequence
  Description of Artificial Sequence: Synthetic oligonucleotide
  Sense strand starting at position 2 of SEQ ID NO: 1241535
ggcugugggaccugacauu

SEQ ID NO: 1279867 - RNA, 19 nt, Artificial Sequence
  Description of Artificial Sequence: Synthetic oligonucleotide
  Antisense strand to SEQ ID NO: 1279866
aaugucaggucccacagcc

SEQ ID NO: 1279868 - RNA, 19 nt, Artificial Sequence
  Description of Artificial Sequence: Synthetic oligonucleotide
  Sense strand starting at position 536 of SEQ ID NO: 1241535
ccugcugucuauucuagaa

SEQ ID NO: 1279869 - RNA, 19 nt, Artificial Sequence
  Description of Artificial Sequence: Synthetic oligonucleotide
  Antisense strand to SEQ ID NO: 1279868
uucuagaauagacagcagg

SEQ ID NO: 1279870 - RNA, 19 nt, Artificial Sequence
  Description of Artificial Sequence: Synthetic oligonucleotide
  Sense strand starting at position 598 of SEQ ID NO: 1241535
ggagcuuccugagcaggaa

SEQ ID NO: 1279871 - RNA, 19 nt, Artificial Sequence
  Description of Artificial Sequence: Synthetic oligonucleotide
  Antisense strand to SEQ ID NO: 1279870
uuccugcucaggaagcucc

SEQ ID NO: 1279872 - RNA, 19 nt, Artificial Sequence
  Description of Artificial Sequence: Synthetic oligonucleotide
  Sense strand starting at position 706 of SEQ ID NO: 1241535
gaggguaaacccuguccaa

SEQ ID NO: 1279873 - RNA, 19 nt, Artificial Sequence
  Description of Artificial Sequence: Synthetic oligonucleotide
  Antisense strand to SEQ ID NO: 1279872
uuggacaggguuuacccuc

SEQ ID NO: 1279874 - RNA, 19 nt, Artificial Sequence
  Description of Artificial Sequence: Synthetic oligonucleotide
  Sense strand starting at position 826 of SEQ ID NO: 1241535
uggcgacgccucuaaauga

SEQ ID NO: 1279875 - RNA, 19 nt, Artificial Sequence
  Description of Artificial Sequence: Synthetic oligonucleotide
  Antisense strand to SEQ ID NO: 1279874
ucauuuagaggcgucgcca

SEQ ID NO: 1279876 - RNA, 19 nt, Artificial Sequence
  Description of Artificial Sequence: Synthetic oligonucleotide
  Sense strand starting at position 1006 of SEQ ID NO: 1241535
gcgugugguacccgagaga

SEQ ID NO: 1279877 - RNA, 19 nt, Artificial Sequence
  Description of Artificial Sequence: Synthetic oligonucleotide
  Antisense strand to SEQ ID NO: 1279876
ucucucggguaccacacgc

SEQ ID NO: 1279878 - RNA, 19 nt, Artificial Sequence
  Description of Artificial Sequence: Synthetic oligonucleotide
  Sense strand starting at position 2409 of SEQ ID NO: 1241535
cagcguugugcucaggaca

SEQ ID NO: 1279879 - RNA, 19 nt, Artificial Sequence
  Description of Artificial Sequence: Synthetic oligonucleotide
  Antisense strand to SEQ ID NO: 1279878
uguccugagcacaacgcug

SEQ ID NO: 1279880 - RNA, 19 nt, Artificial Sequence
  Description of Artificial Sequence: Synthetic oligonucleotide
  Sense strand starting at position 2693 of SEQ ID NO: 1241535
cccugugucuugucuacaa

SEQ ID NO: 1279881 - RNA, 19 nt, Artificial Sequence
  Description of Artificial Sequence: Synthetic oligonucleotide
  Antisense strand to SEQ ID NO: 1279880
uuguagacaagacacaggg

SEQ ID NO: 1279882 - RNA, 19 nt, Artificial Sequence
  Description of Artificial Sequence: Synthetic oligonucleotide
  Sense strand starting at position 2695 of SEQ ID NO: 1241535
cugugucuugucuacaagu

SEQ ID NO: 1279883 - RNA, 19 nt, Artificial Sequence
  Description of Artificial Sequence: Synthetic oligonucleotide
  Antisense strand to SEQ ID NO: 1279882
acuuguagacaagacacag

SEQ ID NO: 1279884 - RNA, 19 nt, Artificial Sequence
  Description of Artificial Sequence: Synthetic oligonucleotide
  Sense strand starting at position 2697 of SEQ ID NO: 1241535
gugucuugucuacaaguag

SEQ ID NO: 1279885 - RNA, 19 nt, Artificial Sequence
  Description of Artificial Sequence: Synthetic oligonucleotide
  Antisense strand to SEQ ID NO: 1279884
cuacuuguagacaagacac

SEQ ID NO: 1279886 - RNA, 19 nt, Artificial Sequence
  Description of Artificial Sequence: Synthetic oligonucleotide
  Sense strand starting at position 2799 of SEQ ID NO: 1241535
ccgucagcuccuucugcaa

SEQ ID NO: 1279887 - RNA, 19 nt, Artificial Sequence
  Description of Artificial Sequence: Synthetic oligonucleotide
  Antisense strand to SEQ ID NO: 1279886
uugcagaaggagcugacgg

SEQ ID NO: 1279888 - RNA, 19 nt, Artificial Sequence
  Description of Artificial Sequence: Synthetic oligonucleotide
  Sense strand starting at position 2831 of SEQ ID NO: 1241535
gcugcuuccuccguugaga

SEQ ID NO: 1279889 - RNA, 19 nt, Artificial Sequence
  Description of Artificial Sequence: Synthetic oligonucleotide
  Antisense strand to SEQ ID NO: 1279888
ucucaacggaggaagcagc

SEQ ID NO: 1279890 - RNA, 19 nt, Artificial Sequence
  Description of Artificial Sequence: Synthetic oligonucleotide
  Sense strand starting at position 2833 of SEQ ID NO: 1241535
ugcuuccuccguugagaga

SEQ ID NO: 1279891 - RNA, 19 nt, Artificial Sequence
  Description of Artificial Sequence: Synthetic oligonucleotide
  Antisense strand to SEQ ID NO: 1279890
ucucucaacggaggaagca

SEQ ID NO: 1279892 - RNA, 19 nt, Artificial Sequence
  Description of Artificial Sequence: Synthetic oligonucleotide
  Sense strand starting at position 2863 of SEQ ID NO: 1241535
agcuguaacuccuguaucu

SEQ ID NO: 1279893 - RNA, 19 nt, Artificial Sequence
  Description of Artificial Sequence: Synthetic oligonucleotide
  Antisense strand to SEQ ID NO: 1279892
agauacaggaguuacagcu

SEQ ID NO: 1279894 - RNA, 19 nt, Artificial Sequence
  Description of Artificial Sequence: Synthetic oligonucleotide
  Sense strand starting at position 2865 of SEQ ID NO: 1241535
cuguaacuccuguaucuag

SEQ ID NO: 1279895 - RNA, 19 nt, Artificial Sequence
  Description of Artificial Sequence: Synthetic oligonucleotide
  Antisense strand to SEQ ID NO: 1279894
cuagauacaggaguuacag

SEQ ID NO: 1279896 - RNA, 19 nt, Artificial Sequence
  Description of Artificial Sequence: Synthetic oligonucleotide
  Sense strand starting at position 2894 of SEQ ID NO: 1241535
agcugcgacugcuuaaagu

SEQ ID NO: 1279897 - RNA, 19 nt, Artificial Sequence
  Description of Artificial Sequence: Synthetic oligonucleotide
  Antisense strand to SEQ ID NO: 1279896
acuuuaagcagucgcagcu

SEQ ID NO: 1279898 - RNA, 19 nt, Artificial Sequence
  Description of Artificial Sequence: Synthetic oligonucleotide
  Sense strand starting at position 2916 of SEQ ID NO: 1241535
ggucccacuucggagagaa

SEQ ID NO: 1279899 - RNA, 19 nt, Artificial Sequence
  Description of Artificial Sequence: Synthetic oligonucleotide
  Antisense strand to SEQ ID NO: 1279898
uucucuccgaagugggacc

SEQ ID NO: 1279900 - RNA, 19 nt, Artificial Sequence
  Description of Artificial Sequence: Synthetic oligonucleotide
  Sense strand starting at position 3075 of SEQ ID NO: 1241535
agaagugacuauguccaga

SEQ ID NO: 1279901 - RNA, 19 nt, Artificial Sequence
  Description of Artificial Sequence: Synthetic oligonucleotide
  Antisense strand to SEQ ID NO: 1279900
ucuggacauagucacuucu

SEQ ID NO: 1279902 - RNA, 19 nt, Artificial Sequence
  Description of Artificial Sequence: Synthetic oligonucleotide
  Sense strand starting at position 3077 of SEQ ID NO: 1241535
aagugacuauguccagaga

SEQ ID NO: 1279903 - RNA, 19 nt, Artificial Sequence
  Description of Artificial Sequence: Synthetic oligonucleotide
  Antisense strand to SEQ ID NO: 1279902
ucucuggacauagucacuu

SEQ ID NO: 1279904 - RNA, 19 nt, Artificial Sequence
  Description of Artificial Sequence: Synthetic oligonucleotide
  Sense strand starting at position 3234 of SEQ ID NO: 1241535
gacacauggugccugugua

SEQ ID NO: 1279905 - RNA, 19 nt, Artificial Sequence
  Description of Artificial Sequence: Synthetic oligonucleotide
  Antisense strand to SEQ ID NO: 1279904
uacacaggcaccauguguc

SEQ ID NO: 1279906 - RNA, 19 nt, Artificial Sequence
  Description of Artificial Sequence: Synthetic oligonucleotide
  Sense strand starting at position 3235 of SEQ ID NO: 1241535
acacauggugccuguguau

SEQ ID NO: 1279907 - RNA, 19 nt, Artificial Sequence
  Description of Artificial Sequence: Synthetic oligonucleotide
  Antisense strand to SEQ ID NO: 1279906
auacacaggcaccaugugu

SEQ ID NO: 1279908 - RNA, 19 nt, Artificial Sequence
  Description of Artificial Sequence: Synthetic oligonucleotide
  Sense strand starting at position 3246 of SEQ ID NO: 1241535
cuguguaugccagcgucua

SEQ ID NO: 1279909 - RNA, 19 nt, Artificial Sequence
  Description of Artificial Sequence: Synthetic oligonucleotide
  Antisense strand to SEQ ID NO: 1279908
uagacgcuggcauacacag

SEQ ID NO: 1279910 - RNA, 19 nt, Artificial Sequence
  Description of Artificial Sequence: Synthetic oligonucleotide
  Sense strand starting at position 3247 of SEQ ID NO: 1241535
uguguaugccagcgucuaa

SEQ ID NO: 1279911 - RNA, 19 nt, Artificial Sequence
  Description of Artificial Sequence: Synthetic oligonucleotide
  Antisense strand to SEQ ID NO: 1279910
uuagacgcuggcauacaca

SEQ ID NO: 1279912 - RNA, 19 nt, Artificial Sequence
  Description of Artificial Sequence: Synthetic oligonucleotide
  Sense strand starting at position 3405 of SEQ ID NO: 1241535
cgugacaguucugucccau

SEQ ID NO: 1279913 - RNA, 19 nt, Artificial Sequence
  Description of Artificial Sequence: Synthetic oligonucleotide
  Antisense strand to SEQ ID NO: 1279912
augggacagaacugucacg

SEQ ID NO: 1279914 - RNA, 19 nt, Artificial Sequence
  Description of Artificial Sequence: Synthetic oligonucleotide
  Sense strand starting at position 3677 of SEQ ID NO: 1241535
ugucccuugggugaucaga

SEQ ID NO: 1279915 - RNA, 19 nt, Artificial Sequence
  Description of Artificial Sequence: Synthetic oligonucleotide
  Antisense strand to SEQ ID NO: 1279914
ucugaucacccaagggaca

SEQ ID NO: 1279916 - RNA, 19 nt, Artificial Sequence
  Description of Artificial Sequence: Synthetic oligonucleotide
  Sense strand starting at position 3679 of SEQ ID NO: 1241535
ucccuugggugaucagagu

SEQ ID NO: 1279917 - RNA, 19 nt, Artificial Sequence
  Description of Artificial Sequence: Synthetic oligonucleotide
  Antisense strand to SEQ ID NO: 1279916
acucugaucacccaaggga

SEQ ID NO: 1279918 - RNA, 19 nt, Artificial Sequence
  Description of Artificial Sequence: Synthetic oligonucleotide
  Sense strand starting at position 3685 of SEQ ID NO: 1241535
gggugaucagaguaacuuu

SEQ ID NO: 1279919 - RNA, 19 nt, Artificial Sequence
  Description of Artificial Sequence: Synthetic oligonucleotide
  Antisense strand to SEQ ID NO: 1279918
aaaguuacucugaucaccc

SEQ ID NO: 1279920 - RNA, 19 nt, Artificial Sequence
  Description of Artificial Sequence: Synthetic oligonucleotide
  Sense strand starting at position 3875 of SEQ ID NO: 1241535
acaggugcuuucucuggua

SEQ ID NO: 1279921 - RNA, 19 nt, Artificial Sequence
  Description of Artificial Sequence: Synthetic oligonucleotide
  Antisense strand to SEQ ID NO: 1279920
uaccagagaaagcaccugu

SEQ ID NO: 1279922 - RNA, 19 nt, Artificial Sequence
  Description of Artificial Sequence: Synthetic oligonucleotide
  Sense strand starting at position 3908 of SEQ ID NO: 1241535
gcaggaacuugguuugaga

SEQ ID NO: 1279923 - RNA, 19 nt, Artificial Sequence
  Description of Artificial Sequence: Synthetic oligonucleotide
  Antisense strand to SEQ ID NO: 1279922
ucucaaaccaaguuccugc

SEQ ID NO: 1279924 - RNA, 19 nt, Artificial Sequence
  Description of Artificial Sequence: Synthetic oligonucleotide
  Sense strand starting at position 3911 of SEQ ID NO: 1241535
ggaacuugguuugagacaa

SEQ ID NO: 1279925 - RNA, 19 nt, Artificial Sequence
  Description of Artificial Sequence: Synthetic oligonucleotide
  Antisense strand to SEQ ID NO: 1279924
uugucucaaaccaaguucc

SEQ ID NO: 1279926 - RNA, 19 nt, Artificial Sequence
  Description of Artificial Sequence: Synthetic oligonucleotide
  Sense strand starting at position 3924 of SEQ ID NO: 1241535
agacaaaccucucggauga

SEQ ID NO: 1279927 - RNA, 19 nt, Artificial Sequence
  Description of Artificial Sequence: Synthetic oligonucleotide
  Antisense strand to SEQ ID NO: 1279926
ucauccgagagguuugucu

SEQ ID NO: 1279928 - RNA, 19 nt, Artificial Sequence
  Description of Artificial Sequence: Synthetic oligonucleotide
  Sense strand starting at position 973 of SEQ ID NO: 1241536
ggcucauuccuggguaugu

SEQ ID NO: 1279929 - RNA, 19 nt, Artificial Sequence
  Description of Artificial Sequence: Synthetic oligonucleotide
  Antisense strand to SEQ ID NO: 1279928
acauacccaggaaugagcc

SEQ ID NO: 1279930 - RNA, 19 nt, Artificial Sequence
  Description of Artificial Sequence: Synthetic oligonucleotide
  Sense strand starting at position 975 of SEQ ID NO: 1241536
cucauuccuggguauguca

SEQ ID NO: 1279931 - RNA, 19 nt, Artificial Sequence
  Description of Artificial Sequence: Synthetic oligonucleotide
  Antisense strand to SEQ ID NO: 1279930
ugacauacccaggaaugag

SEQ ID NO: 1279932 - RNA, 19 nt, Artificial Sequence
  Description of Artificial Sequence: Synthetic oligonucleotide
  Sense strand starting at position 1110 of SEQ ID NO: 1241536
acgaaugacugcuagaaag

SEQ ID NO: 1279933 - RNA, 19 nt, Artificial Sequence
  Description of Artificial Sequence: Synthetic oligonucleotide
  Antisense strand to SEQ ID NO: 1279932
cuuucuagcagucauucgu

SEQ ID NO: 1279934 - RNA, 19 nt, Artificial Sequence
  Description of Artificial Sequence: Synthetic oligonucleotide
  Sense strand starting at position 1118 of SEQ ID NO: 1241536
cugcuagaaagugggaauu

SEQ ID NO: 1279935 - RNA, 19 nt, Artificial Sequence
  Description of Artificial Sequence: Synthetic oligonucleotide
  Antisense strand to SEQ ID NO: 1279934
aauucccacuuucuagcag

SEQ ID NO: 1279936 - RNA, 19 nt, Artificial Sequence
  Description of Artificial Sequence: Synthetic oligonucleotide
  Sense strand starting at position 2568 of SEQ ID NO: 1241536
cguggacuuccucgacaca

SEQ ID NO: 1279937 - RNA, 19 nt, Artificial Sequence
  Description of Artificial Sequence: Synthetic oligonucleotide
  Antisense strand to SEQ ID NO: 1279936
ugugucgaggaaguccacg

SEQ ID NO: 1279938 - RNA, 19 nt, Artificial Sequence
  Description of Artificial Sequence: Synthetic oligonucleotide
  Sense strand starting at position 2701 of SEQ ID NO: 1241536
aaugucugguacuuagaau

SEQ ID NO: 1279939 - RNA, 19 nt, Artificial Sequence
  Description of Artificial Sequence: Synthetic oligonucleotide
  Antisense strand to SEQ ID NO: 1279938
auucuaaguaccagacauu

SEQ ID NO: 1279940 - RNA, 19 nt, Artificial Sequence
  Description of Artificial Sequence: Synthetic oligonucleotide
  Sense strand starting at position 2872 of SEQ ID NO: 1241536
aguuucaggugguugugaa

SEQ ID NO: 1279941 - RNA, 19 nt, Artificial Sequence
  Description of Artificial Sequence: Synthetic oligonucleotide
  Antisense strand to SEQ ID NO: 1279940
uucacaaccaccugaaacu

SEQ ID NO: 1279942 - RNA, 19 nt, Artificial Sequence
  Description of Artificial Sequence: Synthetic oligonucleotide
  Sense strand starting at position 2873 of SEQ ID NO: 1241536
guuucaggugguugugaau

SEQ ID NO: 1279943 - RNA, 19 nt, Artificial Sequence
  Description of Artificial Sequence: Synthetic oligonucleotide
  Antisense strand to SEQ ID NO: 1279942
auucacaaccaccugaaac

SEQ ID NO: 1279944 - RNA, 19 nt, Artificial Sequence
  Description of Artificial Sequence: Synthetic oligonucleotide
  Sense strand starting at position 2876 of SEQ ID NO: 1241536
ucaggugguugugaauaga

SEQ ID NO: 1279945 - RNA, 19 nt, Artificial Sequence
  Description of Artificial Sequence: Synthetic oligonucleotide
  Antisense strand to SEQ ID NO: 1279944
ucuauucacaaccaccuga

SEQ ID NO: 1279946 - RNA, 19 nt, Artificial Sequence
  Description of Artificial Sequence: Synthetic oligonucleotide
  Sense strand starting at position 2879 of SEQ ID NO: 1241536
ggugguugugaauagagcu

SEQ ID NO: 1279947 - RNA, 19 nt, Artificial Sequence
  Description of Artificial Sequence: Synthetic oligonucleotide
  Antisense strand to SEQ ID NO: 1279946
agcucuauucacaaccacc

SEQ ID NO: 1279948 - RNA, 19 nt, Artificial Sequence
  Description of Artificial Sequence: Synthetic oligonucleotide
  Sense strand starting at position 2885 of SEQ ID NO: 1241536
ugugaauagagcugcuaaa

SEQ ID NO: 1279949 - RNA, 19 nt, Artificial Sequence
  Description of Artificial Sequence: Synthetic oligonucleotide
  Antisense strand to SEQ ID NO: 1279948
uuuagcagcucuauucaca

SEQ ID NO: 1279950 - RNA, 19 nt, Artificial Sequence
  Description of Artificial Sequence: Synthetic oligonucleotide
  Sense strand starting at position 2915 of SEQ ID NO: 1241536
gcagcucucugugugaaca

SEQ ID NO: 1279951 - RNA, 19 nt, Artificial Sequence
  Description of Artificial Sequence: Synthetic oligonucleotide
  Antisense strand to SEQ ID NO: 1279950
uguucacacagagagcugc

SEQ ID NO: 1279952 - RNA, 19 nt, Artificial Sequence
  Description of Artificial Sequence: Synthetic oligonucleotide
  Sense strand starting at position 2916 of SEQ ID NO: 1241536
cagcucucugugugaacau

SEQ ID NO: 1279953 - RNA, 19 nt, Artificial Sequence
  Description of Artificial Sequence: Synthetic oligonucleotide
  Antisense strand to SEQ ID NO: 1279952
auguucacacagagagcug

SEQ ID NO: 1279954 - RNA, 19 nt, Artificial Sequence
  Description of Artificial Sequence: Synthetic oligonucleotide
  Sense strand starting at position 2953 of SEQ ID NO: 1241536
ggaacuuagcuguaugugu

SEQ ID NO: 1279955 - RNA, 19 nt, Artificial Sequence
  Description of Artificial Sequence: Synthetic oligonucleotide
  Antisense strand to SEQ ID NO: 1279954
acacauacagcuaaguucc

SEQ ID NO: 1279956 - RNA, 19 nt, Artificial Sequence
  Description of Artificial Sequence: Synthetic oligonucleotide
  Sense strand starting at position 2955 of SEQ ID NO: 1241536
aacuuagcuguauguguaa

SEQ ID NO: 1279957 - RNA, 19 nt, Artificial Sequence
  Description of Artificial Sequence: Synthetic oligonucleotide
  Antisense strand to SEQ ID NO: 1279956
uuacacauacagcuaaguu

SEQ ID NO: 1279958 - RNA, 19 nt, Artificial Sequence
  Description of Artificial Sequence: Synthetic oligonucleotide
  Sense strand starting at position 2957 of SEQ ID NO: 1241536
cuuagcuguauguguaacu

SEQ ID NO: 1279959 - RNA, 19 nt, Artificial Sequence
  Description of Artificial Sequence: Synthetic oligonucleotide
  Antisense strand to SEQ ID NO: 1279958
aguuacacauacagcuaag

SEQ ID NO: 1279960 - RNA, 19 nt, Artificial Sequence
  Description of Artificial Sequence: Synthetic oligonucleotide
  Sense strand starting at position 2967 of SEQ ID NO: 1241536
uguguaacucuaugggaaa

SEQ ID NO: 1279961 - RNA, 19 nt, Artificial Sequence
  Description of Artificial Sequence: Synthetic oligonucleotide
  Antisense strand to SEQ ID NO: 1279960
uuucccauagaguuacaca

SEQ ID NO: 1279962 - RNA, 19 nt, Artificial Sequence
  Description of Artificial Sequence: Synthetic oligonucleotide
  Sense strand starting at position 2978 of SEQ ID NO: 1241536
augggaaacugucaugaac

SEQ ID NO: 1279963 - RNA, 19 nt, Artificial Sequence
  Description of Artificial Sequence: Synthetic oligonucleotide
  Antisense strand to SEQ ID NO: 1279962
guucaugacaguuucccau

SEQ ID NO: 1279964 - RNA, 19 nt, Artificial Sequence
  Description of Artificial Sequence: Synthetic oligonucleotide
  Sense strand starting at position 2980 of SEQ ID NO: 1241536
gggaaacugucaugaacug

SEQ ID NO: 1279965 - RNA, 19 nt, Artificial Sequence
  Description of Artificial Sequence: Synthetic oligonucleotide
  Antisense strand to SEQ ID NO: 1279964
caguucaugacaguuuccc

SEQ ID NO: 1279966 - RNA, 19 nt, Artificial Sequence
  Description of Artificial Sequence: Synthetic oligonucleotide
  Sense strand starting at position 3004 of SEQ ID NO: 1241536
ugauguggcugugccauua

SEQ ID NO: 1279967 - RNA, 19 nt, Artificial Sequence
  Description of Artificial Sequence: Synthetic oligonucleotide
  Antisense strand to SEQ ID NO: 1279966
uaauggcacagccacauca

SEQ ID NO: 1279968 - RNA, 19 nt, Artificial Sequence
  Description of Artificial Sequence: Synthetic oligonucleotide
  Sense strand starting at position 3059 of SEQ ID NO: 1241536
cuugguguugucgauguuu

SEQ ID NO: 1279969 - RNA, 19 nt, Artificial Sequence
  Description of Artificial Sequence: Synthetic oligonucleotide
  Antisense strand to SEQ ID NO: 1279968
aaacaucgacaacaccaag

SEQ ID NO: 1279970 - RNA, 19 nt, Artificial Sequence
  Description of Artificial Sequence: Synthetic oligonucleotide
  Sense strand starting at position 3079 of SEQ ID NO: 1241536
uauuucgguuguucuaaca

SEQ ID NO: 1279971 - RNA, 19 nt, Artificial Sequence
  Description of Artificial Sequence: Synthetic oligonucleotide
  Antisense strand to SEQ ID NO: 1279970
uguuagaacaaccgaaaua

SEQ ID NO: 1279972 - RNA, 19 nt, Artificial Sequence
  Description of Artificial Sequence: Synthetic oligonucleotide
  Sense strand starting at position 3102 of SEQ ID NO: 1241536
uguggcaucucaucauagu

SEQ ID NO: 1279973 - RNA, 19 nt, Artificial Sequence
  Description of Artificial Sequence: Synthetic oligonucleotide
  Antisense strand to SEQ ID NO: 1279972
acuaugaugagaugccaca

SEQ ID NO: 1279974 - RNA, 19 nt, Artificial Sequence
  Description of Artificial Sequence: Synthetic oligonucleotide
  Sense strand starting at position 3121 of SEQ ID NO: 1241536
gguauucuguauuucucua

SEQ ID NO: 1279975 - RNA, 19 nt, Artificial Sequence
  Description of Artificial Sequence: Synthetic oligonucleotide
  Antisense strand to SEQ ID NO: 1279974
uagagaaauacagaauacc

SEQ ID NO: 1279976 - RNA, 19 nt, Artificial Sequence
  Description of Artificial Sequence: Synthetic oligonucleotide
  Sense strand starting at position 3133 of SEQ ID NO: 1241536
uucucuacuggcuagugau

SEQ ID NO: 1279977 - RNA, 19 nt, Artificial Sequence
  Description of Artificial Sequence: Synthetic oligonucleotide
  Antisense strand to SEQ ID NO: 1279976
aucacuagccaguagagaa

SEQ ID NO: 1279978 - RNA, 19 nt, Artificial Sequence
  Description of Artificial Sequence: Synthetic oligonucleotide
  Sense strand starting at position 3157 of SEQ ID NO: 1241536
accuuauuagggugcuuau

SEQ ID NO: 1279979 - RNA, 19 nt, Artificial Sequence
  Description of Artificial Sequence: Synthetic oligonucleotide
  Antisense strand to SEQ ID NO: 1279978
auaagcacccuaauaaggu

SEQ ID NO: 1279980 - RNA, 19 nt, Artificial Sequence
  Description of Artificial Sequence: Synthetic oligonucleotide
  Sense strand starting at position 3170 of SEQ ID NO: 1241536
gcuuauuugccaugcccga

SEQ ID NO: 1279981 - RNA, 19 nt, Artificial Sequence
  Description of Artificial Sequence: Synthetic oligonucleotide
  Antisense strand to SEQ ID NO: 1279980
ucgggcauggcaaauaagc

SEQ ID NO: 1279982 - RNA, 19 nt, Artificial Sequence
  Description of Artificial Sequence: Synthetic oligonucleotide
  Sense strand starting at position 3184 of SEQ ID NO: 1241536
cccgaauccucuuuguuga

SEQ ID NO: 1279983 - RNA, 19 nt, Artificial Sequence
  Description of Artificial Sequence: Synthetic oligonucleotide
  Antisense strand to SEQ ID NO: 1279982
ucaacaaagaggauucggg

SEQ ID NO: 1279984 - RNA, 19 nt, Artificial Sequence
  Description of Artificial Sequence: Synthetic oligonucleotide
  Sense strand starting at position 3185 of SEQ ID NO: 1241536
ccgaauccucuuuguugaa

SEQ ID NO: 1279985 - RNA, 19 nt, Artificial Sequence
  Description of Artificial Sequence: Synthetic oligonucleotide
  Antisense strand to SEQ ID NO: 1279984
uucaacaaagaggauucgg

SEQ ID NO: 1279986 - RNA, 19 nt, Artificial Sequence
  Description of Artificial Sequence: Synthetic oligonucleotide
  Sense strand starting at position 3186 of SEQ ID NO: 1241536
cgaauccucuuuguugaaa

SEQ ID NO: 1279987 - RNA, 19 nt, Artificial Sequence
  Description of Artificial Sequence: Synthetic oligonucleotide
  Antisense strand to SEQ ID NO: 1279986
uuucaacaaagaggauucg

SEQ ID NO: 1279988 - RNA, 19 nt, Artificial Sequence
  Description of Artificial Sequence: Synthetic oligonucleotide
  Sense strand starting at position 3197 of SEQ ID NO: 1241536
uguugaaaugugugcucaa

SEQ ID NO: 1279989 - RNA, 19 nt, Artificial Sequence
  Description of Artificial Sequence: Synthetic oligonucleotide
  Antisense strand to SEQ ID NO: 1279988
uugagcacacauuucaaca

SEQ ID NO: 1279990 - RNA, 19 nt, Artificial Sequence
  Description of Artificial Sequence: Synthetic oligonucleotide
  Sense strand starting at position 3198 of SEQ ID NO: 1241536
guugaaaugugugcucaag

SEQ ID NO: 1279991 - RNA, 19 nt, Artificial Sequence
  Description of Artificial Sequence: Synthetic oligonucleotide
  Antisense strand to SEQ ID NO: 1279990
cuugagcacacauuucaac

SEQ ID NO: 1279992 - RNA, 19 nt, Artificial Sequence
  Description of Artificial Sequence: Synthetic oligonucleotide
  Sense strand starting at position 3200 of SEQ ID NO: 1241536
ugaaaugugugcucaaguc

SEQ ID NO: 1279993 - RNA, 19 nt, Artificial Sequence
  Description of Artificial Sequence: Synthetic oligonucleotide
  Antisense strand to SEQ ID NO: 1279992
gacuugagcacacauuuca

SEQ ID NO: 1279994 - RNA, 19 nt, Artificial Sequence
  Description of Artificial Sequence: Synthetic oligonucleotide
  Sense strand starting at position 3270 of SEQ ID NO: 1241536
ugugcaauggcccagucau

SEQ ID NO: 1279995 - RNA, 19 nt, Artificial Sequence
  Description of Artificial Sequence: Synthetic oligonucleotide
  Antisense strand to SEQ ID NO: 1279994
augacugggccauugcaca

SEQ ID NO: 1279996 - RNA, 19 nt, Artificial Sequence
  Description of Artificial Sequence: Synthetic oligonucleotide
  Sense strand starting at position 3369 of SEQ ID NO: 1241536
gccaccaugcugugaucau

SEQ ID NO: 1279997 - RNA, 19 nt, Artificial Sequence
  Description of Artificial Sequence: Synthetic oligonucleotide
  Antisense strand to SEQ ID NO: 1279996
augaucacagcaugguggc

SEQ ID NO: 1279998 - RNA, 19 nt, Artificial Sequence
  Description of Artificial Sequence: Synthetic oligonucleotide
  Sense strand starting at position 3562 of SEQ ID NO: 1241536
uugggaguucuuuguggau

SEQ ID NO: 1279999 - RNA, 19 nt, Artificial Sequence
  Description of Artificial Sequence: Synthetic oligonucleotide
  Antisense strand to SEQ ID NO: 1279998
auccacaaagaacucccaa

SEQ ID NO: 1280000 - RNA, 19 nt, Artificial Sequence
  Description of Artificial Sequence: Synthetic oligonucleotide
  Sense strand starting at position 3566 of SEQ ID NO: 1241536
gaguucuuuguggauugua

SEQ ID NO: 1280001 - RNA, 19 nt, Artificial Sequence
  Description of Artificial Sequence: Synthetic oligonucleotide
  Antisense strand to SEQ ID NO: 1280000
uacaauccacaaagaacuc

SEQ ID NO: 1280002 - RNA, 19 nt, Artificial Sequence
  Description of Artificial Sequence: Synthetic oligonucleotide
  Sense strand starting at position 3574 of SEQ ID NO: 1241536
uguggauuguaguuacaag

SEQ ID NO: 1280003 - RNA, 19 nt, Artificial Sequence
  Description of Artificial Sequence: Synthetic oligonucleotide
  Antisense strand to SEQ ID NO: 1280002
cuuguaacuacaauccaca

SEQ ID NO: 1280004 - RNA, 19 nt, Artificial Sequence
  Description of Artificial Sequence: Synthetic oligonucleotide
  Sense strand starting at position 3586 of SEQ ID NO: 1241536
uuacaagcccuuuguugua

SEQ ID NO: 1280005 - RNA, 19 nt, Artificial Sequence
  Description of Artificial Sequence: Synthetic oligonucleotide
  Antisense strand to SEQ ID NO: 1280004
uacaacaaagggcuuguaa

SEQ ID NO: 1280006 - RNA, 19 nt, Artificial Sequence
  Description of Artificial Sequence: Synthetic oligonucleotide
  Sense strand starting at position 3593 of SEQ ID NO: 1241536
cccuuuguuguauauguga

SEQ ID NO: 1280007 - RNA, 19 nt, Artificial Sequence
  Description of Artificial Sequence: Synthetic oligonucleotide
  Antisense strand to SEQ ID NO: 1280006
ucacauauacaacaaaggg

SEQ ID NO: 1280008 - RNA, 19 nt, Artificial Sequence
  Description of Artificial Sequence: Synthetic oligonucleotide
  Sense strand starting at position 43 of SEQ ID NO: 1241537
gaauccgaguaauuagacu

SEQ ID NO: 1280009 - RNA, 19 nt, Artificial Sequence
  Description of Artificial Sequence: Synthetic oligonucleotide
  Antisense strand to SEQ ID NO: 1280008
agucuaauuacucggauuc

SEQ ID NO: 1280010 - RNA, 19 nt, Artificial Sequence
  Description of Artificial Sequence: Synthetic oligonucleotide
  Sense strand starting at position 186 of SEQ ID NO: 1241537
uguuaauuguagcccauuu

SEQ ID NO: 1280011 - RNA, 19 nt, Artificial Sequence
  Description of Artificial Sequence: Synthetic oligonucleotide
  Antisense strand to SEQ ID NO: 1280010
aaaugggcuacaauuaaca

SEQ ID NO: 1280012 - RNA, 19 nt, Artificial Sequence
  Description of Artificial Sequence: Synthetic oligonucleotide
  Sense strand starting at position 214 of SEQ ID NO: 1241537
gccagcauuucucugcaca

SEQ ID NO: 1280013 - RNA, 19 nt, Artificial Sequence
  Description of Artificial Sequence: Synthetic oligonucleotide
  Antisense strand to SEQ ID NO: 1280012
ugugcagagaaaugcuggc

SEQ ID NO: 1280014 - RNA, 19 nt, Artificial Sequence
  Description of Artificial Sequence: Synthetic oligonucleotide
  Sense strand starting at position 309 of SEQ ID NO: 1241537
gcgugugagcccugaaagu

SEQ ID NO: 1280015 - RNA, 19 nt, Artificial Sequence
  Description of Artificial Sequence: Synthetic oligonucleotide
  Antisense strand to SEQ ID NO: 1280014
acuuucagggcucacacgc

SEQ ID NO: 1280016 - RNA, 19 nt, Artificial Sequence
  Description of Artificial Sequence: Synthetic oligonucleotide
  Sense strand starting at position 384 of SEQ ID NO: 1241537
uguggagugucugugguuu

SEQ ID NO: 1280017 - RNA, 19 nt, Artificial Sequence
  Description of Artificial Sequence: Synthetic oligonucleotide
  Antisense strand to SEQ ID NO: 1280016
aaaccacagacacuccaca

SEQ ID NO: 1280018 - RNA, 19 nt, Artificial Sequence
  Description of Artificial Sequence: Synthetic oligonucleotide
  Sense strand starting at position 388 of SEQ ID NO: 1241537
gagugucugugguuugaug

SEQ ID NO: 1280019 - RNA, 19 nt, Artificial Sequence
  Description of Artificial Sequence: Synthetic oligonucleotide
  Antisense strand to SEQ ID NO: 1280018
caucaaaccacagacacuc

SEQ ID NO: 1280020 - RNA, 19 nt, Artificial Sequence
  Description of Artificial Sequence: Synthetic oligonucleotide
  Sense strand starting at position 395 of SEQ ID NO: 1241537
ugugguuugaugugugcau

SEQ ID NO: 1280021 - RNA, 19 nt, Artificial Sequence
  Description of Artificial Sequence: Synthetic oligonucleotide
  Antisense strand to SEQ ID NO: 1280020
augcacacaucaaaccaca

SEQ ID NO: 1280022 - RNA, 19 nt, Artificial Sequence
  Description of Artificial Sequence: Synthetic oligonucleotide
  Sense strand starting at position 454 of SEQ ID NO: 1241537
ugcagucugguguguacua

SEQ ID NO: 1280023 - RNA, 19 nt, Artificial Sequence
  Description of Artificial Sequence: Synthetic oligonucleotide
  Antisense strand to SEQ ID NO: 1280022
uaguacacaccagacugca

SEQ ID NO: 1280024 - RNA, 19 nt, Artificial Sequence
  Description of Artificial Sequence: Synthetic oligonucleotide
  Sense strand starting at position 455 of SEQ ID NO: 1241537
gcagucugguguguacuau

SEQ ID NO: 1280025 - RNA, 19 nt, Artificial Sequence
  Description of Artificial Sequence: Synthetic oligonucleotide
  Antisense strand to SEQ ID NO: 1280024
auaguacacaccagacugc

SEQ ID NO: 1280026 - RNA, 19 nt, Artificial Sequence
  Description of Artificial Sequence: Synthetic oligonucleotide
  Sense strand starting at position 456 of SEQ ID NO: 1241537
cagucugguguguacuauu

SEQ ID NO: 1280027 - RNA, 19 nt, Artificial Sequence
  Description of Artificial Sequence: Synthetic oligonucleotide
  Antisense strand to SEQ ID NO: 1280026
aauaguacacaccagacug

SEQ ID NO: 1280028 - RNA, 19 nt, Artificial Sequence
  Description of Artificial Sequence: Synthetic oligonucleotide
  Sense strand starting at position 463 of SEQ ID NO: 1241537
guguguacuauuuggugca

SEQ ID NO: 1280029 - RNA, 19 nt, Artificial Sequence
  Description of Artificial Sequence: Synthetic oligonucleotide
  Antisense strand to SEQ ID NO: 1280028
ugcaccaaauaguacacac

SEQ ID NO: 1280030 - RNA, 19 nt, Artificial Sequence
  Description of Artificial Sequence: Synthetic oligonucleotide
  Sense strand starting at position 479 of SEQ ID NO: 1241537
gcagguguccagucgguau

SEQ ID NO: 1280031 - RNA, 19 nt, Artificial Sequence
  Description of Artificial Sequence: Synthetic oligonucleotide
  Antisense strand to SEQ ID NO: 1280030
auaccgacuggacaccugc

SEQ ID NO: 1280032 - RNA, 19 nt, Artificial Sequence
  Description of Artificial Sequence: Synthetic oligonucleotide
  Sense strand starting at position 508 of SEQ ID NO: 1241537
caguguguauguguacaua

SEQ ID NO: 1280033 - RNA, 19 nt, Artificial Sequence
  Description of Artificial Sequence: Synthetic oligonucleotide
  Antisense strand to SEQ ID NO: 1280032
uauguacacauacacacug

SEQ ID NO: 1280034 - RNA, 19 nt, Artificial Sequence
  Description of Artificial Sequence: Synthetic oligonucleotide
  Sense strand starting at position 529 of SEQ ID NO: 1241537
ugucgcuguaucgcagaau

SEQ ID NO: 1280035 - RNA, 19 nt, Artificial Sequence
  Description of Artificial Sequence: Synthetic oligonucleotide
  Antisense strand to SEQ ID NO: 1280034
auucugcgauacagcgaca

SEQ ID NO: 1280036 - RNA, 19 nt, Artificial Sequence
  Description of Artificial Sequence: Synthetic oligonucleotide
  Sense strand starting at position 532 of SEQ ID NO: 1241537
cgcuguaucgcagaaugac

SEQ ID NO: 1280037 - RNA, 19 nt, Artificial Sequence
  Description of Artificial Sequence: Synthetic oligonucleotide
  Antisense strand to SEQ ID NO: 1280036
gucauucugcgauacagcg

SEQ ID NO: 1280038 - RNA, 19 nt, Artificial Sequence
  Description of Artificial Sequence: Synthetic oligonucleotide
  Sense strand starting at position 535 of SEQ ID NO: 1241537
uguaucgcagaaugacaua

SEQ ID NO: 1280039 - RNA, 19 nt, Artificial Sequence
  Description of Artificial Sequence: Synthetic oligonucleotide
  Antisense strand to SEQ ID NO: 1280038
uaugucauucugcgauaca

SEQ ID NO: 1280040 - RNA, 19 nt, Artificial Sequence
  Description of Artificial Sequence: Synthetic oligonucleotide
  Sense strand starting at position 665 of SEQ ID NO: 1241537
uucugcuuacaaggauaaa

SEQ ID NO: 1280041 - RNA, 19 nt, Artificial Sequence
  Description of Artificial Sequence: Synthetic oligonucleotide
  Antisense strand to SEQ ID NO: 1280040
uuuauccuuguaagcagaa

SEQ ID NO: 1280042 - RNA, 19 nt, Artificial Sequence
  Description of Artificial Sequence: Synthetic oligonucleotide
  Sense strand starting at position 698 of SEQ ID NO: 1241537
agccaagcucagcagaaau

SEQ ID NO: 1280043 - RNA, 19 nt, Artificial Sequence
  Description of Artificial Sequence: Synthetic oligonucleotide
  Antisense strand to SEQ ID NO: 1280042
auuucugcugagcuuggcu

SEQ ID NO: 1280044 - RNA, 19 nt, Artificial Sequence
  Description of Artificial Sequence: Synthetic oligonucleotide
  Sense strand starting at position 723 of SEQ ID NO: 1241537
uggcauacugaacaaugua

SEQ ID NO: 1280045 - RNA, 19 nt, Artificial Sequence
  Description of Artificial Sequence: Synthetic oligonucleotide
  Antisense strand to SEQ ID NO: 1280044
uacauuguucaguaugcca

SEQ ID NO: 1280046 - RNA, 19 nt, Artificial Sequence
  Description of Artificial Sequence: Synthetic oligonucleotide
  Sense strand starting at position 738 of SEQ ID NO: 1241537
uguacacacucguuaauuu

SEQ ID NO: 1280047 - RNA, 19 nt, Artificial Sequence
  Description of Artificial Sequence: Synthetic oligonucleotide
  Antisense strand to SEQ ID NO: 1280046
aaauuaacgaguguguaca

SEQ ID NO: 1280048 - RNA, 19 nt, Artificial Sequence
  Description of Artificial Sequence: Synthetic oligonucleotide
  Sense strand starting at position 759 of SEQ ID NO: 1241537
cacagugagucauugaguc

SEQ ID NO: 1280049 - RNA, 19 nt, Artificial Sequence
  Description of Artificial Sequence: Synthetic oligonucleotide
  Antisense strand to SEQ ID NO: 1280048
gacucaaugacucacugug

SEQ ID NO: 1280050 - RNA, 19 nt, Artificial Sequence
  Description of Artificial Sequence: Synthetic oligonucleotide
  Sense strand starting at position 763 of SEQ ID NO: 1241537
gugagucauugagucauua

SEQ ID NO: 1280051 - RNA, 19 nt, Artificial Sequence
  Description of Artificial Sequence: Synthetic oligonucleotide
  Antisense strand to SEQ ID NO: 1280050
uaaugacucaaugacucac

SEQ ID NO: 1280052 - RNA, 19 nt, Artificial Sequence
  Description of Artificial Sequence: Synthetic oligonucleotide
  Sense strand starting at position 786 of SEQ ID NO: 1241537
cguggucaaguucgagauu

SEQ ID NO: 1280053 - RNA, 19 nt, Artificial Sequence
  Description of Artificial Sequence: Synthetic oligonucleotide
  Antisense strand to SEQ ID NO: 1280052
aaucucgaacuugaccacg

SEQ ID NO: 1280054 - RNA, 19 nt, Artificial Sequence
  Description of Artificial Sequence: Synthetic oligonucleotide
  Sense strand starting at position 789 of SEQ ID NO: 1241537
ggucaaguucgagauuccu

SEQ ID NO: 1280055 - RNA, 19 nt, Artificial Sequence
  Description of Artificial Sequence: Synthetic oligonucleotide
  Antisense strand to SEQ ID NO: 1280054
aggaaucucgaacuugacc

SEQ ID NO: 1280056 - RNA, 19 nt, Artificial Sequence
  Description of Artificial Sequence: Synthetic oligonucleotide
  Sense strand starting at position 1056 of SEQ ID NO: 1241537
gguucauuugguggcaaac

SEQ ID NO: 1280057 - RNA, 19 nt, Artificial Sequence
  Description of Artificial Sequence: Synthetic oligonucleotide
  Antisense strand to SEQ ID NO: 1280056
guuugccaccaaaugaacc

SEQ ID NO: 1280058 - RNA, 19 nt, Artificial Sequence
  Description of Artificial Sequence: Synthetic oligonucleotide
  Sense strand starting at position 1609 of SEQ ID NO: 1241537
cggcauucgccugaaggga

SEQ ID NO: 1280059 - RNA, 19 nt, Artificial Sequence
  Description of Artificial Sequence: Synthetic oligonucleotide
  Antisense strand to SEQ ID NO: 1280058
ucccuucaggcgaaugccg

SEQ ID NO: 1280060 - RNA, 19 nt, Artificial Sequence
  Description of Artificial Sequence: Synthetic oligonucleotide
  Sense strand starting at position 2364 of SEQ ID NO: 1241537
aacugaguuucuccgcaca

SEQ ID NO: 1280061 - RNA, 19 nt, Artificial Sequence
  Description of Artificial Sequence: Synthetic oligonucleotide
  Antisense strand to SEQ ID NO: 1280060
ugugcggagaaacucaguu

SEQ ID NO: 1280062 - RNA, 19 nt, Artificial Sequence
  Description of Artificial Sequence: Synthetic oligonucleotide
  Sense strand starting at position 2716 of SEQ ID NO: 1241537
gagcaauggcuagaucuug

SEQ ID NO: 1280063 - RNA, 19 nt, Artificial Sequence
  Description of Artificial Sequence: Synthetic oligonucleotide
  Antisense strand to SEQ ID NO: 1280062
caagaucuagccauugcuc

SEQ ID NO: 1280064 - RNA, 19 nt, Artificial Sequence
  Description of Artificial Sequence: Synthetic oligonucleotide
  Sense strand starting at position 2812 of SEQ ID NO: 1241537
cuguaugaugccuggcuaa

SEQ ID NO: 1280065 - RNA, 19 nt, Artificial Sequence
  Description of Artificial Sequence: Synthetic oligonucleotide
  Antisense strand to SEQ ID NO: 1280064
uuagccaggcaucauacag

SEQ ID NO: 1280066 - RNA, 19 nt, Artificial Sequence
  Description of Artificial Sequence: Synthetic oligonucleotide
  Sense strand starting at position 3157 of SEQ ID NO: 1241537
cugugauuugcucagcugu

SEQ ID NO: 1280067 - RNA, 19 nt, Artificial Sequence
  Description of Artificial Sequence: Synthetic oligonucleotide
  Antisense strand to SEQ ID NO: 1280066
acagcugagcaaaucacag

SEQ ID NO: 1280068 - RNA, 19 nt, Artificial Sequence
  Description of Artificial Sequence: Synthetic oligonucleotide
  Sense strand starting at position 3159 of SEQ ID NO: 1241537
gugauuugcucagcuguga

SEQ ID NO: 1280069 - RNA, 19 nt, Artificial Sequence
  Description of Artificial Sequence: Synthetic oligonucleotide
  Antisense strand to SEQ ID NO: 1280068
ucacagcugagcaaaucac

SEQ ID NO: 1280070 - RNA, 19 nt, Artificial Sequence
  Description of Artificial Sequence: Synthetic oligonucleotide
  Sense strand starting at position 3249 of SEQ ID NO: 1241537
gcucaacgcaugugaucaa

SEQ ID NO: 1280071 - RNA, 19 nt, Artificial Sequence
  Description of Artificial Sequence: Synthetic oligonucleotide
  Antisense strand to SEQ ID NO: 1280070
uugaucacaugcguugagc

SEQ ID NO: 1280072 - RNA, 19 nt, Artificial Sequence
  Description of Artificial Sequence: Synthetic oligonucleotide
  Sense strand starting at position 3252 of SEQ ID NO: 1241537
caacgcaugugaucaacuu

SEQ ID NO: 1280073 - RNA, 19 nt, Artificial Sequence
  Description of Artificial Sequence: Synthetic oligonucleotide
  Antisense strand to SEQ ID NO: 1280072
aaguugaucacaugcguug

SEQ ID NO: 1280074 - RNA, 19 nt, Artificial Sequence
  Description of Artificial Sequence: Synthetic oligonucleotide
  Sense strand starting at position 3625 of SEQ ID NO: 1241537
gugcauuucuuaccuauca

SEQ ID NO: 1280075 - RNA, 19 nt, Artificial Sequence
  Description of Artificial Sequence: Synthetic oligonucleotide
  Antisense strand to SEQ ID NO: 1280074
ugauagguaagaaaugcac

SEQ ID NO: 1280076 - RNA, 19 nt, Artificial Sequence
  Description of Artificial Sequence: Synthetic oligonucleotide
  Sense strand starting at position 3688 of SEQ ID NO: 1241537
uugugugaauucuuaagca

SEQ ID NO: 1280077 - RNA, 19 nt, Artificial Sequence
  Description of Artificial Sequence: Synthetic oligonucleotide
  Antisense strand to SEQ ID NO: 1280076
ugcuuaagaauucacacaa

SEQ ID NO: 1280078 - RNA, 19 nt, Artificial Sequence
  Description of Artificial Sequence: Synthetic oligonucleotide
  Sense strand starting at position 3692 of SEQ ID NO: 1241537
gugaauucuuaagcaaaga

SEQ ID NO: 1280079 - RNA, 19 nt, Artificial Sequence
  Description of Artificial Sequence: Synthetic oligonucleotide
  Antisense strand to SEQ ID NO: 1280078
ucuuugcuuaagaauucac

SEQ ID NO: 1280080 - RNA, 19 nt, Artificial Sequence
  Description of Artificial Sequence: Synthetic oligonucleotide
  Sense strand starting at position 3709 of SEQ ID NO: 1241537
gauaaagcuuggcagagaa

SEQ ID NO: 1280081 - RNA, 19 nt, Artificial Sequence
  Description of Artificial Sequence: Synthetic oligonucleotide
  Antisense strand to SEQ ID NO: 1280080
uucucugccaagcuuuauc

SEQ ID NO: 1280082 - RNA, 19 nt, Artificial Sequence
  Description of Artificial Sequence: Synthetic oligonucleotide
  Sense strand starting at position 3828 of SEQ ID NO: 1241537
ggucaaagguccucuguua

SEQ ID NO: 1280083 - RNA, 19 nt, Artificial Sequence
  Description of Artificial Sequence: Synthetic oligonucleotide
  Antisense strand to SEQ ID NO: 1280082
uaacagaggaccuuugacc

SEQ ID NO: 1280084 - RNA, 19 nt, Artificial Sequence
  Description of Artificial Sequence: Synthetic oligonucleotide
  Sense strand starting at position 3839 of SEQ ID NO: 1241537
cucuguuaagugggaggaa

SEQ ID NO: 1280085 - RNA, 19 nt, Artificial Sequence
  Description of Artificial Sequence: Synthetic oligonucleotide
  Antisense strand to SEQ ID NO: 1280084
uuccucccacuuaacagag

SEQ ID NO: 1280086 - RNA, 19 nt, Artificial Sequence
  Description of Artificial Sequence: Synthetic oligonucleotide
  Sense strand starting at position 3840 of SEQ ID NO: 1241537
ucuguuaagugggaggaaa

SEQ ID NO: 1280087 - RNA, 19 nt, Artificial Sequence
  Description of Artificial Sequence: Synthetic oligonucleotide
  Antisense strand to SEQ ID NO: 1280086
uuuccucccacuuaacaga

SEQ ID NO: 1280088 - RNA, 19 nt, Artificial Sequence
  Description of Artificial Sequence: Synthetic oligonucleotide
  Sense strand starting at position 164 of SEQ ID NO: 1241538
cugguaugauuaucagaaa

SEQ ID NO: 1280089 - RNA, 19 nt, Artificial Sequence
  Description of Artificial Sequence: Synthetic oligonucleotide
  Antisense strand to SEQ ID NO: 1280088
uuucugauaaucauaccag

SEQ ID NO: 1280090 - RNA, 19 nt, Artificial Sequence
  Description of Artificial Sequence: Synthetic oligonucleotide
  Sense strand starting at position 225 of SEQ ID NO: 1241538
cgcagucaucacgacauca

SEQ ID NO: 1280091 - RNA, 19 nt, Artificial Sequence
  Description of Artificial Sequence: Synthetic oligonucleotide
  Antisense strand to SEQ ID NO: 1280090
ugaugucgugaugacugcg

SEQ ID NO: 1280092 - RNA, 19 nt, Artificial Sequence
  Description of Artificial Sequence: Synthetic oligonucleotide
  Sense strand starting at position 235 of SEQ ID NO: 1241538
acgacaucacugcaaacau

SEQ ID NO: 1280093 - RNA, 19 nt, Artificial Sequence
  Description of Artificial Sequence: Synthetic oligonucleotide
  Antisense strand to SEQ ID NO: 1280092
auguuugcagugaugucgu

SEQ ID NO: 1280094 - RNA, 19 nt, Artificial Sequence
  Description of Artificial Sequence: Synthetic oligonucleotide
  Sense strand starting at position 311 of SEQ ID NO: 1241538
agggucucuuauucuauga

SEQ ID NO: 1280095 - RNA, 19 nt, Artificial Sequence
  Description of Artificial Sequence: Synthetic oligonucleotide
  Antisense strand to SEQ ID NO: 1280094
ucauagaauaagagacccu

SEQ ID NO: 1280096 - RNA, 19 nt, Artificial Sequence
  Description of Artificial Sequence: Synthetic oligonucleotide
  Sense strand starting at position 315 of SEQ ID NO: 1241538
ucucuuauucuaugaaagg

SEQ ID NO: 1280097 - RNA, 19 nt, Artificial Sequence
  Description of Artificial Sequence: Synthetic oligonucleotide
  Antisense strand to SEQ ID NO: 1280096
ccuuucauagaauaagaga

SEQ ID NO: 1280098 - RNA, 19 nt, Artificial Sequence
  Description of Artificial Sequence: Synthetic oligonucleotide
  Sense strand starting at position 375 of SEQ ID NO: 1241538
agaccuguauaguuaguua

SEQ ID NO: 1280099 - RNA, 19 nt, Artificial Sequence
  Description of Artificial Sequence: Synthetic oligonucleotide
  Antisense strand to SEQ ID NO: 1280098
uaacuaacuauacaggucu

SEQ ID NO: 1280100 - RNA, 19 nt, Artificial Sequence
  Description of Artificial Sequence: Synthetic oligonucleotide
  Sense strand starting at position 380 of SEQ ID NO: 1241538
uguauaguuaguuaagucu

SEQ ID NO: 1280101 - RNA, 19 nt, Artificial Sequence
  Description of Artificial Sequence: Synthetic oligonucleotide
  Antisense strand to SEQ ID NO: 1280100
agacuuaacuaacuauaca

SEQ ID NO: 1280102 - RNA, 19 nt, Artificial Sequence
  Description of Artificial Sequence: Synthetic oligonucleotide
  Sense strand starting at position 386 of SEQ ID NO: 1241538
guuaguuaagucuaacaaa

SEQ ID NO: 1280103 - RNA, 19 nt, Artificial Sequence
  Description of Artificial Sequence: Synthetic oligonucleotide
  Antisense strand to SEQ ID NO: 1280102
uuuguuagacuuaacuaac

SEQ ID NO: 1280104 - RNA, 19 nt, Artificial Sequence
  Description of Artificial Sequence: Synthetic oligonucleotide
  Sense strand starting at position 426 of SEQ ID NO: 1241538
gugauagacuucuuaauaa

SEQ ID NO: 1280105 - RNA, 19 nt, Artificial Sequence
  Description of Artificial Sequence: Synthetic oligonucleotide
  Antisense strand to SEQ ID NO: 1280104
uuauuaagaagucuaucac

SEQ ID NO: 1280106 - RNA, 19 nt, Artificial Sequence
  Description of Artificial Sequence: Synthetic oligonucleotide
  Sense strand starting at position 488 of SEQ ID NO: 1241538
cauaaauugcgauagaagu

SEQ ID NO: 1280107 - RNA, 19 nt, Artificial Sequence
  Description of Artificial Sequence: Synthetic oligonucleotide
  Antisense strand to SEQ ID NO: 1280106
acuucuaucgcaauuuaug

SEQ ID NO: 1280108 - RNA, 19 nt, Artificial Sequence
  Description of Artificial Sequence: Synthetic oligonucleotide
  Sense strand starting at position 495 of SEQ ID NO: 1241538
ugcgauagaagucauuaag

SEQ ID NO: 1280109 - RNA, 19 nt, Artificial Sequence
  Description of Artificial Sequence: Synthetic oligonucleotide
  Antisense strand to SEQ ID NO: 1280108
cuuaaugacuucuaucgca

SEQ ID NO: 1280110 - RNA, 19 nt, Artificial Sequence
  Description of Artificial Sequence: Synthetic oligonucleotide
  Sense strand starting at position 526 of SEQ ID NO: 1241538
guuagagucucaccuguaa

SEQ ID NO: 1280111 - RNA, 19 nt, Artificial Sequence
  Description of Artificial Sequence: Synthetic oligonucleotide
  Antisense strand to SEQ ID NO: 1280110
uuacaggugagacucuaac

SEQ ID NO: 1280112 - RNA, 19 nt, Artificial Sequence
  Description of Artificial Sequence: Synthetic oligonucleotide
  Sense strand starting at position 576 of SEQ ID NO: 1241538
aaacuacaaucggugauua

SEQ ID NO: 1280113 - RNA, 19 nt, Artificial Sequence
  Description of Artificial Sequence: Synthetic oligonucleotide
  Antisense strand to SEQ ID NO: 1280112
uaaucaccgauuguaguuu

SEQ ID NO: 1280114 - RNA, 19 nt, Artificial Sequence
  Description of Artificial Sequence: Synthetic oligonucleotide
  Sense strand starting at position 577 of SEQ ID NO: 1241538
aacuacaaucggugauuau

SEQ ID NO: 1280115 - RNA, 19 nt, Artificial Sequence
  Description of Artificial Sequence: Synthetic oligonucleotide
  Antisense strand to SEQ ID NO: 1280114
auaaucaccgauuguaguu

SEQ ID NO: 1280116 - RNA, 19 nt, Artificial Sequence
  Description of Artificial Sequence: Synthetic oligonucleotide
  Sense strand starting at position 578 of SEQ ID NO: 1241538
acuacaaucggugauuaug

SEQ ID NO: 1280117 - RNA, 19 nt, Artificial Sequence
  Description of Artificial Sequence: Synthetic oligonucleotide
  Antisense strand to SEQ ID NO: 1280116
cauaaucaccgauuguagu

SEQ ID NO: 1280118 - RNA, 19 nt, Artificial Sequence
  Description of Artificial Sequence: Synthetic oligonucleotide
  Sense strand starting at position 633 of SEQ ID NO: 1241538
agaccugaguuacuacauu

SEQ ID NO: 1280119 - RNA, 19 nt, Artificial Sequence
  Description of Artificial Sequence: Synthetic oligonucleotide
  Antisense strand to SEQ ID NO: 1280118
aauguaguaacucaggucu

SEQ ID NO: 1280120 - RNA, 19 nt, Artificial Sequence
  Description of Artificial Sequence: Synthetic oligonucleotide
  Sense strand starting at position 646 of SEQ ID NO: 1241538
uacauucgaugucuagaaa

SEQ ID NO: 1280121 - RNA, 19 nt, Artificial Sequence
  Description of Artificial Sequence: Synthetic oligonucleotide
  Antisense strand to SEQ ID NO: 1280120
uuucuagacaucgaaugua

SEQ ID NO: 1280122 - RNA, 19 nt, Artificial Sequence
  Description of Artificial Sequence: Synthetic oligonucleotide
  Sense strand starting at position 647 of SEQ ID NO: 1241538
acauucgaugucuagaaac

SEQ ID NO: 1280123 - RNA, 19 nt, Artificial Sequence
  Description of Artificial Sequence: Synthetic oligonucleotide
  Antisense strand to SEQ ID NO: 1280122
guuucuagacaucgaaugu

SEQ ID NO: 1280124 - RNA, 19 nt, Artificial Sequence
  Description of Artificial Sequence: Synthetic oligonucleotide
  Sense strand starting at position 649 of SEQ ID NO: 1241538
auucgaugucuagaaacca

SEQ ID NO: 1280125 - RNA, 19 nt, Artificial Sequence
  Description of Artificial Sequence: Synthetic oligonucleotide
  Antisense strand to SEQ ID NO: 1280124
ugguuucuagacaucgaau

SEQ ID NO: 1280126 - RNA, 19 nt, Artificial Sequence
  Description of Artificial Sequence: Synthetic oligonucleotide
  Sense strand starting at position 700 of SEQ ID NO: 1241538
uugagugucaauuacaugu

SEQ ID NO: 1280127 - RNA, 19 nt, Artificial Sequence
  Description of Artificial Sequence: Synthetic oligonucleotide
  Antisense strand to SEQ ID NO: 1280126
acauguaauugacacucaa

SEQ ID NO: 1280128 - RNA, 19 nt, Artificial Sequence
  Description of Artificial Sequence: Synthetic oligonucleotide
  Sense strand starting at position 835 of SEQ ID NO: 1241538
ugcuguauauuugcaggaa

SEQ ID NO: 1280129 - RNA, 19 nt, Artificial Sequence
  Description of Artificial Sequence: Synthetic oligonucleotide
  Antisense strand to SEQ ID NO: 1280128
uuccugcaaauauacagca

SEQ ID NO: 1280130 - RNA, 19 nt, Artificial Sequence
  Description of Artificial Sequence: Synthetic oligonucleotide
  Sense strand starting at position 2610 of SEQ ID NO: 1241538
uggagcuuuccgucuguuu

SEQ ID NO: 1280131 - RNA, 19 nt, Artificial Sequence
  Description of Artificial Sequence: Synthetic oligonucleotide
  Antisense strand to SEQ ID NO: 1280130
aaacagacggaaagcucca

SEQ ID NO: 1280132 - RNA, 19 nt, Artificial Sequence
  Description of Artificial Sequence: Synthetic oligonucleotide
  Sense strand starting at position 2632 of SEQ ID NO: 1241538
ccaccaguguauuccugau

SEQ ID NO: 1280133 - RNA, 19 nt, Artificial Sequence
  Description of Artificial Sequence: Synthetic oligonucleotide
  Antisense strand to SEQ ID NO: 1280132
aucaggaauacacuggugg

SEQ ID NO: 1280134 - RNA, 19 nt, Artificial Sequence
  Description of Artificial Sequence: Synthetic oligonucleotide
  Sense strand starting at position 2655 of SEQ ID NO: 1241538
gacccaggcgcugaaauau

SEQ ID NO: 1280135 - RNA, 19 nt, Artificial Sequence
  Description of Artificial Sequence: Synthetic oligonucleotide
  Antisense strand to SEQ ID NO: 1280134
auauuucagcgccuggguc

SEQ ID NO: 1280136 - RNA, 19 nt, Artificial Sequence
  Description of Artificial Sequence: Synthetic oligonucleotide
  Sense strand starting at position 2681 of SEQ ID NO: 1241538
acgaauaaauguguagguu

SEQ ID NO: 1280137 - RNA, 19 nt, Artificial Sequence
  Description of Artificial Sequence: Synthetic oligonucleotide
  Antisense strand to SEQ ID NO: 1280136
aaccuacacauuuauucgu

SEQ ID NO: 1280138 - RNA, 19 nt, Artificial Sequence
  Description of Artificial Sequence: Synthetic oligonucleotide
  Sense strand starting at position 2682 of SEQ ID NO: 1241538
cgaauaaauguguagguua

SEQ ID NO: 1280139 - RNA, 19 nt, Artificial Sequence
  Description of Artificial Sequence: Synthetic oligonucleotide
  Antisense strand to SEQ ID NO: 1280138
uaaccuacacauuuauucg

SEQ ID NO: 1280140 - RNA, 19 nt, Artificial Sequence
  Description of Artificial Sequence: Synthetic oligonucleotide
  Sense strand starting at position 2831 of SEQ ID NO: 1241538
aaagguugucuuggucaua

SEQ ID NO: 1280141 - RNA, 19 nt, Artificial Sequence
  Description of Artificial Sequence: Synthetic oligonucleotide
  Antisense strand to SEQ ID NO: 1280140
uaugaccaagacaaccuuu

SEQ ID NO: 1280142 - RNA, 19 nt, Artificial Sequence
  Description of Artificial Sequence: Synthetic oligonucleotide
  Sense strand starting at position 2832 of SEQ ID NO: 1241538
aagguugucuuggucauaa

SEQ ID NO: 1280143 - RNA, 19 nt, Artificial Sequence
  Description of Artificial Sequence: Synthetic oligonucleotide
  Antisense strand to SEQ ID NO: 1280142
uuaugaccaagacaaccuu

SEQ ID NO: 1280144 - RNA, 19 nt, Artificial Sequence
  Description of Artificial Sequence: Synthetic oligonucleotide
  Sense strand starting at position 2834 of SEQ ID NO: 1241538
gguugucuuggucauaauu

SEQ ID NO: 1280145 - RNA, 19 nt, Artificial Sequence
  Description of Artificial Sequence: Synthetic oligonucleotide
  Antisense strand to SEQ ID NO: 1280144
aauuaugaccaagacaacc

SEQ ID NO: 1280146 - RNA, 19 nt, Artificial Sequence
  Description of Artificial Sequence: Synthetic oligonucleotide
  Sense strand starting at position 2936 of SEQ ID NO: 1241538
ugagaaaguguuugaggca

SEQ ID NO: 1280147 - RNA, 19 nt, Artificial Sequence
  Description of Artificial Sequence: Synthetic oligonucleotide
  Antisense strand to SEQ ID NO: 1280146
ugccucaaacacuuucuca

SEQ ID NO: 1280148 - RNA, 19 nt, Artificial Sequence
  Description of Artificial Sequence: Synthetic oligonucleotide
  Sense strand starting at position 2983 of SEQ ID NO: 1241538
ugcgaauuagaacgaauua

SEQ ID NO: 1280149 - RNA, 19 nt, Artificial Sequence
  Description of Artificial Sequence: Synthetic oligonucleotide
  Antisense strand to SEQ ID NO: 1280148
uaauucguucuaauucgca

SEQ ID NO: 1280150 - RNA, 19 nt, Artificial Sequence
  Description of Artificial Sequence: Synthetic oligonucleotide
  Sense strand starting at position 2984 of SEQ ID NO: 1241538
gcgaauuagaacgaauuau

SEQ ID NO: 1280151 - RNA, 19 nt, Artificial Sequence
  Description of Artificial Sequence: Synthetic oligonucleotide
  Antisense strand to SEQ ID NO: 1280150
auaauucguucuaauucgc

SEQ ID NO: 1280152 - RNA, 19 nt, Artificial Sequence
  Description of Artificial Sequence: Synthetic oligonucleotide
  Sense strand starting at position 3080 of SEQ ID NO: 1241538
aguucuaaacucuaaaugu

SEQ ID NO: 1280153 - RNA, 19 nt, Artificial Sequence
  Description of Artificial Sequence: Synthetic oligonucleotide
  Antisense strand to SEQ ID NO: 1280152
acauuuagaguuuagaacu

SEQ ID NO: 1280154 - RNA, 19 nt, Artificial Sequence
  Description of Artificial Sequence: Synthetic oligonucleotide
  Sense strand starting at position 3105 of SEQ ID NO: 1241538
gugcauuugugaguccuca

SEQ ID NO: 1280155 - RNA, 19 nt, Artificial Sequence
  Description of Artificial Sequence: Synthetic oligonucleotide
  Antisense strand to SEQ ID NO: 1280154
ugaggacucacaaaugcac

SEQ ID NO: 1280156 - RNA, 19 nt, Artificial Sequence
  Description of Artificial Sequence: Synthetic oligonucleotide
  Sense strand starting at position 3174 of SEQ ID NO: 1241538
ggugacuccgaaugggaaa

SEQ ID NO: 1280157 - RNA, 19 nt, Artificial Sequence
  Description of Artificial Sequence: Synthetic oligonucleotide
  Antisense strand to SEQ ID NO: 1280156
uuucccauucggagucacc

SEQ ID NO: 1280158 - RNA, 19 nt, Artificial Sequence
  Description of Artificial Sequence: Synthetic oligonucleotide
  Sense strand starting at position 3311 of SEQ ID NO: 1241538
ggugucaguucgacgaaug

SEQ ID NO: 1280159 - RNA, 19 nt, Artificial Sequence
  Description of Artificial Sequence: Synthetic oligonucleotide
  Antisense strand to SEQ ID NO: 1280158
cauucgucgaacugacacc

SEQ ID NO: 1280160 - RNA, 19 nt, Artificial Sequence
  Description of Artificial Sequence: Synthetic oligonucleotide
  Sense strand starting at position 3316 of SEQ ID NO: 1241538
caguucgacgaaugugaaa

SEQ ID NO: 1280161 - RNA, 19 nt, Artificial Sequence
  Description of Artificial Sequence: Synthetic oligonucleotide
  Antisense strand to SEQ ID NO: 1280160
uuucacauucgucgaacug

SEQ ID NO: 1280162 - RNA, 19 nt, Artificial Sequence
  Description of Artificial Sequence: Synthetic oligonucleotide
  Sense strand starting at position 3318 of SEQ ID NO: 1241538
guucgacgaaugugaaaua

SEQ ID NO: 1280163 - RNA, 19 nt, Artificial Sequence
  Description of Artificial Sequence: Synthetic oligonucleotide
  Antisense strand to SEQ ID NO: 1280162
uauuucacauucgucgaac

SEQ ID NO: 1280164 - RNA, 19 nt, Artificial Sequence
  Description of Artificial Sequence: Synthetic oligonucleotide
  Sense strand starting at position 3420 of SEQ ID NO: 1241538
gucucacaccugugaucca

SEQ ID NO: 1280165 - RNA, 19 nt, Artificial Sequence
  Description of Artificial Sequence: Synthetic oligonucleotide
  Antisense strand to SEQ ID NO: 1280164
uggaucacaggugugagac

SEQ ID NO: 1280166 - RNA, 19 nt, Artificial Sequence
  Description of Artificial Sequence: Synthetic oligonucleotide
  Sense strand starting at position 3974 of SEQ ID NO: 1241538
guauuaaggcuauggacuu

SEQ ID NO: 1280167 - RNA, 19 nt, Artificial Sequence
  Description of Artificial Sequence: Synthetic oligonucleotide
  Antisense strand to SEQ ID NO: 1280166
aaguccauagccuuaauac

SEQ ID NO: 1280168 - RNA, 19 nt, Artificial Sequence
  Description of Artificial Sequence: Synthetic oligonucleotide
  Sense strand starting at position 148 of SEQ ID NO: 1241539
guaauuaucguauacuuac

SEQ ID NO: 1280169 - RNA, 19 nt, Artificial Sequence
  Description of Artificial Sequence: Synthetic oligonucleotide
  Antisense strand to SEQ ID NO: 1280168
guaaguauacgauaauuac

SEQ ID NO: 1280170 - RNA, 19 nt, Artificial Sequence
  Description of Artificial Sequence: Synthetic oligonucleotide
  Sense strand starting at position 468 of SEQ ID NO: 1241539
gaacuaacucgcgaagaau

SEQ ID NO: 1280171 - RNA, 19 nt, Artificial Sequence
  Description of Artificial Sequence: Synthetic oligonucleotide
  Antisense strand to SEQ ID NO: 1280170
auucuucgcgaguuaguuc

SEQ ID NO: 1280172 - RNA, 19 nt, Artificial Sequence
  Description of Artificial Sequence: Synthetic oligonucleotide
  Sense strand starting at position 653 of SEQ ID NO: 1241539
cugguaugauuaucagaaa

SEQ ID NO: 1280173 - RNA, 19 nt, Artificial Sequence
  Description of Artificial Sequence: Synthetic oligonucleotide
  Antisense strand to SEQ ID NO: 1280172
uuucugauaaucauaccag

SEQ ID NO: 1280174 - RNA, 19 nt, Artificial Sequence
  Description of Artificial Sequence: Synthetic oligonucleotide
  Sense strand starting at position 714 of SEQ ID NO: 1241539
cgcagucaucacgacauca

SEQ ID NO: 1280175 - RNA, 19 nt, Artificial Sequence
  Description of Artificial Sequence: Synthetic oligonucleotide
  Antisense strand to SEQ ID NO: 1280174
ugaugucgugaugacugcg

SEQ ID NO: 1280176 - RNA, 19 nt, Artificial Sequence
  Description of Artificial Sequence: Synthetic oligonucleotide
  Sense strand starting at position 724 of SEQ ID NO: 1241539
acgacaucacugcaaacau

SEQ ID NO: 1280177 - RNA, 19 nt, Artificial Sequence
  Description of Artificial Sequence: Synthetic oligonucleotide
  Antisense strand to SEQ ID NO: 1280176
auguuugcagugaugucgu

SEQ ID NO: 1280178 - RNA, 19 nt, Artificial Sequence
  Description of Artificial Sequence: Synthetic oligonucleotide
  Sense strand starting at position 800 of SEQ ID NO: 1241539
agggucucuuauucuauga

SEQ ID NO: 1280179 - RNA, 19 nt, Artificial Sequence
  Description of Artificial Sequence: Synthetic oligonucleotide
  Antisense strand to SEQ ID NO: 1280178
ucauagaauaagagacccu

SEQ ID NO: 1280180 - RNA, 19 nt, Artificial Sequence
  Description of Artificial Sequence: Synthetic oligonucleotide
  Sense strand starting at position 804 of SEQ ID NO: 1241539
ucucuuauucuaugaaagg

SEQ ID NO: 1280181 - RNA, 19 nt, Artificial Sequence
  Description of Artificial Sequence: Synthetic oligonucleotide
  Antisense strand to SEQ ID NO: 1280180
ccuuucauagaauaagaga

SEQ ID NO: 1280182 - RNA, 19 nt, Artificial Sequence
  Description of Artificial Sequence: Synthetic oligonucleotide
  Sense strand starting at position 864 of SEQ ID NO: 1241539
agaccuguauaguuaguua

SEQ ID NO: 1280183 - RNA, 19 nt, Artificial Sequence
  Description of Artificial Sequence: Synthetic oligonucleotide
  Antisense strand to SEQ ID NO: 1280182
uaacuaacuauacaggucu

SEQ ID NO: 1280184 - RNA, 19 nt, Artificial Sequence
  Description of Artificial Sequence: Synthetic oligonucleotide
  Sense strand starting at position 869 of SEQ ID NO: 1241539
uguauaguuaguuaagucu

SEQ ID NO: 1280185 - RNA, 19 nt, Artificial Sequence
  Description of Artificial Sequence: Synthetic oligonucleotide
  Antisense strand to SEQ ID NO: 1280184
agacuuaacuaacuauaca

SEQ ID NO: 1280186 - RNA, 19 nt, Artificial Sequence
  Description of Artificial Sequence: Synthetic oligonucleotide
  Sense strand starting at position 875 of SEQ ID NO: 1241539
guuaguuaagucuaacaaa

SEQ ID NO: 1280187 - RNA, 19 nt, Artificial Sequence
  Description of Artificial Sequence: Synthetic oligonucleotide
  Antisense strand to SEQ ID NO: 1280186
uuuguuagacuuaacuaac

SEQ ID NO: 1280188 - RNA, 19 nt, Artificial Sequence
  Description of Artificial Sequence: Synthetic oligonucleotide
  Sense strand starting at position 915 of SEQ ID NO: 1241539
gugauagacuucuuaauaa

SEQ ID NO: 1280189 - RNA, 19 nt, Artificial Sequence
  Description of Artificial Sequence: Synthetic oligonucleotide
  Antisense strand to SEQ ID NO: 1280188
uuauuaagaagucuaucac

SEQ ID NO: 1280190 - RNA, 19 nt, Artificial Sequence
  Description of Artificial Sequence: Synthetic oligonucleotide
  Sense strand starting at position 977 of SEQ ID NO: 1241539
cauaaauugcgauagaagu

SEQ ID NO: 1280191 - RNA, 19 nt, Artificial Sequence
  Description of Artificial Sequence: Synthetic oligonucleotide
  Antisense strand to SEQ ID NO: 1280190
acuucuaucgcaauuuaug

SEQ ID NO: 1280192 - RNA, 19 nt, Artificial Sequence
  Description of Artificial Sequence: Synthetic oligonucleotide
  Sense strand starting at position 984 of SEQ ID NO: 1241539
ugcgauagaagucauuaag

SEQ ID NO: 1280193 - RNA, 19 nt, Artificial Sequence
  Description of Artificial Sequence: Synthetic oligonucleotide
  Antisense strand to SEQ ID NO: 1280192
cuuaaugacuucuaucgca

SEQ ID NO: 1280194 - RNA, 19 nt, Artificial Sequence
  Description of Artificial Sequence: Synthetic oligonucleotide
  Sense strand starting at position 1015 of SEQ ID NO: 1241539
guuagagucucaccuguaa

SEQ ID NO: 1280195 - RNA, 19 nt, Artificial Sequence
  Description of Artificial Sequence: Synthetic oligonucleotide
  Antisense strand to SEQ ID NO: 1280194
uuacaggugagacucuaac

SEQ ID NO: 1280196 - RNA, 19 nt, Artificial Sequence
  Description of Artificial Sequence: Synthetic oligonucleotide
  Sense strand starting at position 1065 of SEQ ID NO: 1241539
aaacuacaaucggugauua

SEQ ID NO: 1280197 - RNA, 19 nt, Artificial Sequence
  Description of Artificial Sequence: Synthetic oligonucleotide
  Antisense strand to SEQ ID NO: 1280196
uaaucaccgauuguaguuu

SEQ ID NO: 1280198 - RNA, 19 nt, Artificial Sequence
  Description of Artificial Sequence: Synthetic oligonucleotide
  Sense strand starting at position 1066 of SEQ ID NO: 1241539
aacuacaaucggugauuau

SEQ ID NO: 1280199 - RNA, 19 nt, Artificial Sequence
  Description of Artificial Sequence: Synthetic oligonucleotide
  Antisense strand to SEQ ID NO: 1280198
auaaucaccgauuguaguu

SEQ ID NO: 1280200 - RNA, 19 nt, Artificial Sequence
  Description of Artificial Sequence: Synthetic oligonucleotide
  Sense strand starting at position 1067 of SEQ ID NO: 1241539
acuacaaucggugauuaug

SEQ ID NO: 1280201 - RNA, 19 nt, Artificial Sequence
  Description of Artificial Sequence: Synthetic oligonucleotide
  Antisense strand to SEQ ID NO: 1280200
cauaaucaccgauuguagu

SEQ ID NO: 1280202 - RNA, 19 nt, Artificial Sequence
  Description of Artificial Sequence: Synthetic oligonucleotide
  Sense strand starting at position 1122 of SEQ ID NO: 1241539
agaccugaguuacuacauu

SEQ ID NO: 1280203 - RNA, 19 nt, Artificial Sequence
  Description of Artificial Sequence: Synthetic oligonucleotide
  Antisense strand to SEQ ID NO: 1280202
aauguaguaacucaggucu

SEQ ID NO: 1280204 - RNA, 19 nt, Artificial Sequence
  Description of Artificial Sequence: Synthetic oligonucleotide
  Sense strand starting at position 1135 of SEQ ID NO: 1241539
uacauucgaugucuagaaa

SEQ ID NO: 1280205 - RNA, 19 nt, Artificial Sequence
  Description of Artificial Sequence: Synthetic oligonucleotide
  Antisense strand to SEQ ID NO: 1280204
uuucuagacaucgaaugua

SEQ ID NO: 1280206 - RNA, 19 nt, Artificial Sequence
  Description of Artificial Sequence: Synthetic oligonucleotide
  Sense strand starting at position 1136 of SEQ ID NO: 1241539
acauucgaugucuagaaac

SEQ ID NO: 1280207 - RNA, 19 nt, Artificial Sequence
  Description of Artificial Sequence: Synthetic oligonucleotide
  Antisense strand to SEQ ID NO: 1280206
guuucuagacaucgaaugu

SEQ ID NO: 1280208 - RNA, 19 nt, Artificial Sequence
  Description of Artificial Sequence: Synthetic oligonucleotide
  Sense strand starting at position 1138 of SEQ ID NO: 1241539
auucgaugucuagaaacca

SEQ ID NO: 1280209 - RNA, 19 nt, Artificial Sequence
  Description of Artificial Sequence: Synthetic oligonucleotide
  Antisense strand to SEQ ID NO: 1280208
ugguuucuagacaucgaau

SEQ ID NO: 1280210 - RNA, 19 nt, Artificial Sequence
  Description of Artificial Sequence: Synthetic oligonucleotide
  Sense strand starting at position 1189 of SEQ ID NO: 1241539
uugagugucaauuacaugu

SEQ ID NO: 1280211 - RNA, 19 nt, Artificial Sequence
  Description of Artificial Sequence: Synthetic oligonucleotide
  Antisense strand to SEQ ID NO: 1280210
acauguaauugacacucaa

SEQ ID NO: 1280212 - RNA, 19 nt, Artificial Sequence
  Description of Artificial Sequence: Synthetic oligonucleotide
  Sense strand starting at position 1324 of SEQ ID NO: 1241539
ugcuguauauuugcaggaa

SEQ ID NO: 1280213 - RNA, 19 nt, Artificial Sequence
  Description of Artificial Sequence: Synthetic oligonucleotide
  Antisense strand to SEQ ID NO: 1280212
uuccugcaaauauacagca

SEQ ID NO: 1280214 - RNA, 19 nt, Artificial Sequence
  Description of Artificial Sequence: Synthetic oligonucleotide
  Sense strand starting at position 3099 of SEQ ID NO: 1241539
uggagcuuuccgucuguuu

SEQ ID NO: 1280215 - RNA, 19 nt, Artificial Sequence
  Description of Artificial Sequence: Synthetic oligonucleotide
  Antisense strand to SEQ ID NO: 1280214
aaacagacggaaagcucca

SEQ ID NO: 1280216 - RNA, 19 nt, Artificial Sequence
  Description of Artificial Sequence: Synthetic oligonucleotide
  Sense strand starting at position 3121 of SEQ ID NO: 1241539
ccaccaguguauuccugau

SEQ ID NO: 1280217 - RNA, 19 nt, Artificial Sequence
  Description of Artificial Sequence: Synthetic oligonucleotide
  Antisense strand to SEQ ID NO: 1280216
aucaggaauacacuggugg

SEQ ID NO: 1280218 - RNA, 19 nt, Artificial Sequence
  Description of Artificial Sequence: Synthetic oligonucleotide
  Sense strand starting at position 3144 of SEQ ID NO: 1241539
gacccaggcgcugaaauau

SEQ ID NO: 1280219 - RNA, 19 nt, Artificial Sequence
  Description of Artificial Sequence: Synthetic oligonucleotide
  Antisense strand to SEQ ID NO: 1280218
auauuucagcgccuggguc

SEQ ID NO: 1280220 - RNA, 19 nt, Artificial Sequence
  Description of Artificial Sequence: Synthetic oligonucleotide
  Sense strand starting at position 3170 of SEQ ID NO: 1241539
acgaauaaauguguagguu

SEQ ID NO: 1280221 - RNA, 19 nt, Artificial Sequence
  Description of Artificial Sequence: Synthetic oligonucleotide
  Antisense strand to SEQ ID NO: 1280220
aaccuacacauuuauucgu

SEQ ID NO: 1280222 - RNA, 19 nt, Artificial Sequence
  Description of Artificial Sequence: Synthetic oligonucleotide
  Sense strand starting at position 3171 of SEQ ID NO: 1241539
cgaauaaauguguagguua

SEQ ID NO: 1280223 - RNA, 19 nt, Artificial Sequence
  Description of Artificial Sequence: Synthetic oligonucleotide
  Antisense strand to SEQ ID NO: 1280222
uaaccuacacauuuauucg

SEQ ID NO: 1280224 - RNA, 19 nt, Artificial Sequence
  Description of Artificial Sequence: Synthetic oligonucleotide
  Sense strand starting at position 3320 of SEQ ID NO: 1241539
aaagguugucuuggucaua

SEQ ID NO: 1280225 - RNA, 19 nt, Artificial Sequence
  Description of Artificial Sequence: Synthetic oligonucleotide
  Antisense strand to SEQ ID NO: 1280224
uaugaccaagacaaccuuu

SEQ ID NO: 1280226 - RNA, 19 nt, Artificial Sequence
  Description of Artificial Sequence: Synthetic oligonucleotide
  Sense strand starting at position 3321 of SEQ ID NO: 1241539
aagguugucuuggucauaa

SEQ ID NO: 1280227 - RNA, 19 nt, Artificial Sequence
  Description of Artificial Sequence: Synthetic oligonucleotide
  Antisense strand to SEQ ID NO: 1280226
uuaugaccaagacaaccuu

SEQ ID NO: 1280228 - RNA, 19 nt, Artificial Sequence
  Description of Artificial Sequence: Synthetic oligonucleotide
  Sense strand starting at position 3323 of SEQ ID NO: 1241539
gguugucuuggucauaauu

SEQ ID NO: 1280229 - RNA, 19 nt, Artificial Sequence
  Description of Artificial Sequence: Synthetic oligonucleotide
  Antisense strand to SEQ ID NO: 1280228
aauuaugaccaagacaacc

SEQ ID NO: 1280230 - RNA, 19 nt, Artificial Sequence
  Description of Artificial Sequence: Synthetic oligonucleotide
  Sense strand starting at position 3425 of SEQ ID NO: 1241539
ugagaaaguguuugaggca

SEQ ID NO: 1280231 - RNA, 19 nt, Artificial Sequence
  Description of Artificial Sequence: Synthetic oligonucleotide
  Antisense strand to SEQ ID NO: 1280230
ugccucaaacacuuucuca

SEQ ID NO: 1280232 - RNA, 19 nt, Artificial Sequence
  Description of Artificial Sequence: Synthetic oligonucleotide
  Sense strand starting at position 3472 of SEQ ID NO: 1241539
ugcgaauuagaacgaauua

SEQ ID NO: 1280233 - RNA, 19 nt, Artificial Sequence
  Description of Artificial Sequence: Synthetic oligonucleotide
  Antisense strand to SEQ ID NO: 1280232
uaauucguucuaauucgca

SEQ ID NO: 1280234 - RNA, 19 nt, Artificial Sequence
  Description of Artificial Sequence: Synthetic oligonucleotide
  Sense strand starting at position 3473 of SEQ ID NO: 1241539
gcgaauuagaacgaauuau

SEQ ID NO: 1280235 - RNA, 19 nt, Artificial Sequence
  Description of Artificial Sequence: Synthetic oligonucleotide
  Antisense strand to SEQ ID NO: 1280234
auaauucguucuaauucgc

SEQ ID NO: 1280236 - RNA, 19 nt, Artificial Sequence
  Description of Artificial Sequence: Synthetic oligonucleotide
  Sense strand starting at position 3569 of SEQ ID NO: 1241539
aguucuaaacucuaaaugu

SEQ ID NO: 1280237 - RNA, 19 nt, Artificial Sequence
  Description of Artificial Sequence: Synthetic oligonucleotide
  Antisense strand to SEQ ID NO: 1280236
acauuuagaguuuagaacu

SEQ ID NO: 1280238 - RNA, 19 nt, Artificial Sequence
  Description of Artificial Sequence: Synthetic oligonucleotide
  Sense strand starting at position 3594 of SEQ ID NO: 1241539
gugcauuugugaguccuca

SEQ ID NO: 1280239 - RNA, 19 nt, Artificial Sequence
  Description of Artificial Sequence: Synthetic oligonucleotide
  Antisense strand to SEQ ID NO: 1280238
ugaggacucacaaaugcac

SEQ ID NO: 1280240 - RNA, 19 nt, Artificial Sequence
  Description of Artificial Sequence: Synthetic oligonucleotide
  Sense strand starting at position 3663 of SEQ ID NO: 1241539
ggugacuccgaaugggaaa

SEQ ID NO: 1280241 - RNA, 19 nt, Artificial Sequence
  Description of Artificial Sequence: Synthetic oligonucleotide
  Antisense strand to SEQ ID NO: 1280240
uuucccauucggagucacc

SEQ ID NO: 1280242 - RNA, 19 nt, Artificial Sequence
  Description of Artificial Sequence: Synthetic oligonucleotide
  Sense strand starting at position 3800 of SEQ ID NO: 1241539
ggugucaguucgacgaaug

SEQ ID NO: 1280243 - RNA, 19 nt, Artificial Sequence
  Description of Artificial Sequence: Synthetic oligonucleotide
  Antisense strand to SEQ ID NO: 1280242
cauucgucgaacugacacc

SEQ ID NO: 1280244 - RNA, 19 nt, Artificial Sequence
  Description of Artificial Sequence: Synthetic oligonucleotide
  Sense strand starting at position 3805 of SEQ ID NO: 1241539
caguucgacgaaugugaaa

SEQ ID NO: 1280245 - RNA, 19 nt, Artificial Sequence
  Description of Artificial Sequence: Synthetic oligonucleotide
  Antisense strand to SEQ ID NO: 1280244
uuucacauucgucgaacug

SEQ ID NO: 1280246 - RNA, 19 nt, Artificial Sequence
  Description of Artificial Sequence: Synthetic oligonucleotide
  Sense strand starting at position 3807 of SEQ ID NO: 1241539
guucgacgaaugugaaaua

SEQ ID NO: 1280247 - RNA, 19 nt, Artificial Sequence
  Description of Artificial Sequence: Synthetic oligonucleotide
  Antisense strand to SEQ ID NO: 1280246
uauuucacauucgucgaac

SEQ ID NO: 1280248 - RNA, 19 nt, Artificial Sequence
  Description of Artificial Sequence: Synthetic oligonucleotide
  Sense strand starting at position 96 of SEQ ID NO: 1241540
aaaggaugcucucugagau

SEQ ID NO: 1280249 - RNA, 19 nt, Artificial Sequence
  Description of Artificial Sequence: Synthetic oligonucleotide
  Antisense strand to SEQ ID NO: 1280248
aucucagagagcauccuuu

SEQ ID NO: 1280250 - RNA, 19 nt, Artificial Sequence
  Description of Artificial Sequence: Synthetic oligonucleotide
  Sense strand starting at position 286 of SEQ ID NO: 1241540
acuugucaggauuaacuuu

SEQ ID NO: 1280251 - RNA, 19 nt, Artificial Sequence
  Description of Artificial Sequence: Synthetic oligonucleotide
  Antisense strand to SEQ ID NO: 1280250
aaaguuaauccugacaagu

SEQ ID NO: 1280252 - RNA, 19 nt, Artificial Sequence
  Description of Artificial Sequence: Synthetic oligonucleotide
  Sense strand starting at position 1147 of SEQ ID NO: 1241540
cuguguaauucuuccuaaa

SEQ ID NO: 1280253 - RNA, 19 nt, Artificial Sequence
  Description of Artificial Sequence: Synthetic oligonucleotide
  Antisense strand to SEQ ID NO: 1280252
uuuaggaagaauuacacag

SEQ ID NO: 1280254 - RNA, 19 nt, Artificial Sequence
  Description of Artificial Sequence: Synthetic oligonucleotide
  Sense strand starting at position 1149 of SEQ ID NO: 1241540
guguaauucuuccuaaauu

SEQ ID NO: 1280255 - RNA, 19 nt, Artificial Sequence
  Description of Artificial Sequence: Synthetic oligonucleotide
  Antisense strand to SEQ ID NO: 1280254
aauuuaggaagaauuacac

SEQ ID NO: 1280256 - RNA, 19 nt, Artificial Sequence
  Description of Artificial Sequence: Synthetic oligonucleotide
  Sense strand starting at position 1298 of SEQ ID NO: 1241540
ggccguaugggauaaaggu

SEQ ID NO: 1280257 - RNA, 19 nt, Artificial Sequence
  Description of Artificial Sequence: Synthetic oligonucleotide
  Antisense strand to SEQ ID NO: 1280256
accuuuaucccauacggcc

SEQ ID NO: 1280258 - RNA, 19 nt, Artificial Sequence
  Description of Artificial Sequence: Synthetic oligonucleotide
  Sense strand starting at position 1307 of SEQ ID NO: 1241540
ggauaaagguuaguuaagu

SEQ ID NO: 1280259 - RNA, 19 nt, Artificial Sequence
  Description of Artificial Sequence: Synthetic oligonucleotide
  Antisense strand to SEQ ID NO: 1280258
acuuaacuaaccuuuaucc

SEQ ID NO: 1280260 - RNA, 19 nt, Artificial Sequence
  Description of Artificial Sequence: Synthetic oligonucleotide
  Sense strand starting at position 1308 of SEQ ID NO: 1241540
gauaaagguuaguuaagug

SEQ ID NO: 1280261 - RNA, 19 nt, Artificial Sequence
  Description of Artificial Sequence: Synthetic oligonucleotide
  Antisense strand to SEQ ID NO: 1280260
cacuuaacuaaccuuuauc

SEQ ID NO: 1280262 - RNA, 19 nt, Artificial Sequence
  Description of Artificial Sequence: Synthetic oligonucleotide
  Sense strand starting at position 1317 of SEQ ID NO: 1241540
uaguuaagugcucaagggu

SEQ ID NO: 1280263 - RNA, 19 nt, Artificial Sequence
  Description of Artificial Sequence: Synthetic oligonucleotide
  Antisense strand to SEQ ID NO: 1280262
acccuugagcacuuaacua

SEQ ID NO: 1280264 - RNA, 19 nt, Artificial Sequence
  Description of Artificial Sequence: Synthetic oligonucleotide
  Sense strand starting at position 1330 of SEQ ID NO: 1241540
aagggucugugccuaauuu

SEQ ID NO: 1280265 - RNA, 19 nt, Artificial Sequence
  Description of Artificial Sequence: Synthetic oligonucleotide
  Antisense strand to SEQ ID NO: 1280264
aaauuaggcacagacccuu

SEQ ID NO: 1280266 - RNA, 19 nt, Artificial Sequence
  Description of Artificial Sequence: Synthetic oligonucleotide
  Sense strand starting at position 1334 of SEQ ID NO: 1241540
gucugugccuaauuuagag

SEQ ID NO: 1280267 - RNA, 19 nt, Artificial Sequence
  Description of Artificial Sequence: Synthetic oligonucleotide
  Antisense strand to SEQ ID NO: 1280266
cucuaaauuaggcacagac

SEQ ID NO: 1280268 - RNA, 19 nt, Artificial Sequence
  Description of Artificial Sequence: Synthetic oligonucleotide
  Sense strand starting at position 1385 of SEQ ID NO: 1241540
ggagaaguauuugaucucu

SEQ ID NO: 1280269 - RNA, 19 nt, Artificial Sequence
  Description of Artificial Sequence: Synthetic oligonucleotide
  Antisense strand to SEQ ID NO: 1280268
agagaucaaauacuucucc

SEQ ID NO: 1280270 - RNA, 19 nt, Artificial Sequence
  Description of Artificial Sequence: Synthetic oligonucleotide
  Sense strand starting at position 1443 of SEQ ID NO: 1241540
acuguacuucuagagaagu

SEQ ID NO: 1280271 - RNA, 19 nt, Artificial Sequence
  Description of Artificial Sequence: Synthetic oligonucleotide
  Antisense strand to SEQ ID NO: 1280270
acuucucuagaaguacagu

SEQ ID NO: 1280272 - RNA, 19 nt, Artificial Sequence
  Description of Artificial Sequence: Synthetic oligonucleotide
  Sense strand starting at position 1482 of SEQ ID NO: 1241540
gggugcaccuaugcauuua

SEQ ID NO: 1280273 - RNA, 19 nt, Artificial Sequence
  Description of Artificial Sequence: Synthetic oligonucleotide
  Antisense strand to SEQ ID NO: 1280272
uaaaugcauaggugcaccc

SEQ ID NO: 1280274 - RNA, 19 nt, Artificial Sequence
  Description of Artificial Sequence: Synthetic oligonucleotide
  Sense strand starting at position 1520 of SEQ ID NO: 1241540
accguaucucaauaggucu

SEQ ID NO: 1280275 - RNA, 19 nt, Artificial Sequence
  Description of Artificial Sequence: Synthetic oligonucleotide
  Antisense strand to SEQ ID NO: 1280274
agaccuauugagauacggu

SEQ ID NO: 1280276 - RNA, 19 nt, Artificial Sequence
  Description of Artificial Sequence: Synthetic oligonucleotide
  Sense strand starting at position 1533 of SEQ ID NO: 1241540
aggucuaagacucgcauuu

SEQ ID NO: 1280277 - RNA, 19 nt, Artificial Sequence
  Description of Artificial Sequence: Synthetic oligonucleotide
  Antisense strand to SEQ ID NO: 1280276
aaaugcgagucuuagaccu

SEQ ID NO: 1280278 - RNA, 19 nt, Artificial Sequence
  Description of Artificial Sequence: Synthetic oligonucleotide
  Sense strand starting at position 1570 of SEQ ID NO: 1241540
ugcaucuuacaauggauga

SEQ ID NO: 1280279 - RNA, 19 nt, Artificial Sequence
  Description of Artificial Sequence: Synthetic oligonucleotide
  Antisense strand to SEQ ID NO: 1280278
ucauccauuguaagaugca

SEQ ID NO: 1280280 - RNA, 19 nt, Artificial Sequence
  Description of Artificial Sequence: Synthetic oligonucleotide
  Sense strand starting at position 1586 of SEQ ID NO: 1241540
ugacauaagcagugaauca

SEQ ID NO: 1280281 - RNA, 19 nt, Artificial Sequence
  Description of Artificial Sequence: Synthetic oligonucleotide
  Antisense strand to SEQ ID NO: 1280280
ugauucacugcuuauguca

SEQ ID NO: 1280282 - RNA, 19 nt, Artificial Sequence
  Description of Artificial Sequence: Synthetic oligonucleotide
  Sense strand starting at position 1648 of SEQ ID NO: 1241540
aauggugugccuuacaauu

SEQ ID NO: 1280283 - RNA, 19 nt, Artificial Sequence
  Description of Artificial Sequence: Synthetic oligonucleotide
  Antisense strand to SEQ ID NO: 1280282
aauuguaaggcacaccauu

SEQ ID NO: 1280284 - RNA, 19 nt, Artificial Sequence
  Description of Artificial Sequence: Synthetic oligonucleotide
  Sense strand starting at position 1672 of SEQ ID NO: 1241540
uuguaaauuggaugacauu

SEQ ID NO: 1280285 - RNA, 19 nt, Artificial Sequence
  Description of Artificial Sequence: Synthetic oligonucleotide
  Antisense strand to SEQ ID NO: 1280284
aaugucauccaauuuacaa

SEQ ID NO: 1280286 - RNA, 19 nt, Artificial Sequence
  Description of Artificial Sequence: Synthetic oligonucleotide
  Sense strand starting at position 1718 of SEQ ID NO: 1241540
aguuguuacagcuccgcaa

SEQ ID NO: 1280287 - RNA, 19 nt, Artificial Sequence
  Description of Artificial Sequence: Synthetic oligonucleotide
  Antisense strand to SEQ ID NO: 1280286
uugcggagcuguaacaacu

SEQ ID NO: 1280288 - RNA, 19 nt, Artificial Sequence
  Description of Artificial Sequence: Synthetic oligonucleotide
  Sense strand starting at position 1911 of SEQ ID NO: 1241540
gauauugagcuccgaaccu

SEQ ID NO: 1280289 - RNA, 19 nt, Artificial Sequence
  Description of Artificial Sequence: Synthetic oligonucleotide
  Antisense strand to SEQ ID NO: 1280288
agguucggagcucaauauc

SEQ ID NO: 1280290 - RNA, 19 nt, Artificial Sequence
  Description of Artificial Sequence: Synthetic oligonucleotide
  Sense strand starting at position 2066 of SEQ ID NO: 1241540
ggaagauggcugugaggga

SEQ ID NO: 1280291 - RNA, 19 nt, Artificial Sequence
  Description of Artificial Sequence: Synthetic oligonucleotide
  Antisense strand to SEQ ID NO: 1280290
ucccucacagccaucuucc

SEQ ID NO: 1280292 - RNA, 19 nt, Artificial Sequence
  Description of Artificial Sequence: Synthetic oligonucleotide
  Sense strand starting at position 2137 of SEQ ID NO: 1241540
caccauaaacgugaaaugu

SEQ ID NO: 1280293 - RNA, 19 nt, Artificial Sequence
  Description of Artificial Sequence: Synthetic oligonucleotide
  Antisense strand to SEQ ID NO: 1280292
acauuucacguuuauggug

SEQ ID NO: 1280294 - RNA, 19 nt, Artificial Sequence
  Description of Artificial Sequence: Synthetic oligonucleotide
  Sense strand starting at position 2172 of SEQ ID NO: 1241540
cuuauaaguucuguaugag

SEQ ID NO: 1280295 - RNA, 19 nt, Artificial Sequence
  Description of Artificial Sequence: Synthetic oligonucleotide
  Antisense strand to SEQ ID NO: 1280294
cucauacagaacuuauaag

SEQ ID NO: 1280296 - RNA, 19 nt, Artificial Sequence
  Description of Artificial Sequence: Synthetic oligonucleotide
  Sense strand starting at position 2173 of SEQ ID NO: 1241540
uuauaaguucuguaugaga

SEQ ID NO: 1280297 - RNA, 19 nt, Artificial Sequence
  Description of Artificial Sequence: Synthetic oligonucleotide
  Antisense strand to SEQ ID NO: 1280296
ucucauacagaacuuauaa

SEQ ID NO: 1280298 - RNA, 19 nt, Artificial Sequence
  Description of Artificial Sequence: Synthetic oligonucleotide
  Sense strand starting at position 2175 of SEQ ID NO: 1241540
auaaguucuguaugagacc

SEQ ID NO: 1280299 - RNA, 19 nt, Artificial Sequence
  Description of Artificial Sequence: Synthetic oligonucleotide
  Antisense strand to SEQ ID NO: 1280298
ggucucauacagaacuuau

SEQ ID NO: 1280300 - RNA, 19 nt, Artificial Sequence
  Description of Artificial Sequence: Synthetic oligonucleotide
  Sense strand starting at position 2887 of SEQ ID NO: 1241540
aaccgaguggaaugugaaa

SEQ ID NO: 1280301 - RNA, 19 nt, Artificial Sequence
  Description of Artificial Sequence: Synthetic oligonucleotide
  Antisense strand to SEQ ID NO: 1280300
uuucacauuccacucgguu

SEQ ID NO: 1280302 - RNA, 19 nt, Artificial Sequence
  Description of Artificial Sequence: Synthetic oligonucleotide
  Sense strand starting at position 2920 of SEQ ID NO: 1241540
gcagaaacccuuugggaac

SEQ ID NO: 1280303 - RNA, 19 nt, Artificial Sequence
  Description of Artificial Sequence: Synthetic oligonucleotide
  Antisense strand to SEQ ID NO: 1280302
guucccaaaggguuucugc

SEQ ID NO: 1280304 - RNA, 19 nt, Artificial Sequence
  Description of Artificial Sequence: Synthetic oligonucleotide
  Sense strand starting at position 3031 of SEQ ID NO: 1241540
ucaugagaaucaccgagua

SEQ ID NO: 1280305 - RNA, 19 nt, Artificial Sequence
  Description of Artificial Sequence: Synthetic oligonucleotide
  Antisense strand to SEQ ID NO: 1280304
uacucggugauucucauga

SEQ ID NO: 1280306 - RNA, 19 nt, Artificial Sequence
  Description of Artificial Sequence: Synthetic oligonucleotide
  Sense strand starting at position 3175 of SEQ ID NO: 1241540
agcauaguaucuguuauag

SEQ ID NO: 1280307 - RNA, 19 nt, Artificial Sequence
  Description of Artificial Sequence: Synthetic oligonucleotide
  Antisense strand to SEQ ID NO: 1280306
cuauaacagauacuaugcu

SEQ ID NO: 1280308 - RNA, 19 nt, Artificial Sequence
  Description of Artificial Sequence: Synthetic oligonucleotide
  Sense strand starting at position 3690 of SEQ ID NO: 1241540
cauaucaaguaguuggaaa

SEQ ID NO: 1280309 - RNA, 19 nt, Artificial Sequence
  Description of Artificial Sequence: Synthetic oligonucleotide
  Antisense strand to SEQ ID NO: 1280308
uuuccaacuacuugauaug

SEQ ID NO: 1280310 - RNA, 19 nt, Artificial Sequence
  Description of Artificial Sequence: Synthetic oligonucleotide
  Sense strand starting at position 3692 of SEQ ID NO: 1241540
uaucaaguaguuggaaaua

SEQ ID NO: 1280311 - RNA, 19 nt, Artificial Sequence
  Description of Artificial Sequence: Synthetic oligonucleotide
  Antisense strand to SEQ ID NO: 1280310
uauuuccaacuacuugaua

SEQ ID NO: 1280312 - RNA, 19 nt, Artificial Sequence
  Description of Artificial Sequence: Synthetic oligonucleotide
  Sense strand starting at position 3733 of SEQ ID NO: 1241540
caauaaauguuguuggaua

SEQ ID NO: 1280313 - RNA, 19 nt, Artificial Sequence
  Description of Artificial Sequence: Synthetic oligonucleotide
  Antisense strand to SEQ ID NO: 1280312
uauccaacaacauuuauug

SEQ ID NO: 1280314 - RNA, 19 nt, Artificial Sequence
  Description of Artificial Sequence: Synthetic oligonucleotide
  Sense strand starting at position 3738 of SEQ ID NO: 1241540
aauguuguuggauaggauu

SEQ ID NO: 1280315 - RNA, 19 nt, Artificial Sequence
  Description of Artificial Sequence: Synthetic oligonucleotide
  Antisense strand to SEQ ID NO: 1280314
aauccuauccaacaacauu

SEQ ID NO: 1280316 - RNA, 19 nt, Artificial Sequence
  Description of Artificial Sequence: Synthetic oligonucleotide
  Sense strand starting at position 3744 of SEQ ID NO: 1241540
guuggauaggauugcuuaa

SEQ ID NO: 1280317 - RNA, 19 nt, Artificial Sequence
  Description of Artificial Sequence: Synthetic oligonucleotide
  Antisense strand to SEQ ID NO: 1280316
uuaagcaauccuauccaac

SEQ ID NO: 1280318 - RNA, 19 nt, Artificial Sequence
  Description of Artificial Sequence: Synthetic oligonucleotide
  Sense strand starting at position 3764 of SEQ ID NO: 1241540
cuguuucagcgguacaaag

SEQ ID NO: 1280319 - RNA, 19 nt, Artificial Sequence
  Description of Artificial Sequence: Synthetic oligonucleotide
  Antisense strand to SEQ ID NO: 1280318
cuuuguaccgcugaaacag

SEQ ID NO: 1280320 - RNA, 19 nt, Artificial Sequence
  Description of Artificial Sequence: Synthetic oligonucleotide
  Sense strand starting at position 3895 of SEQ ID NO: 1241540
agcuaauacuuaguagaac

SEQ ID NO: 1280321 - RNA, 19 nt, Artificial Sequence
  Description of Artificial Sequence: Synthetic oligonucleotide
  Antisense strand to SEQ ID NO: 1280320
guucuacuaaguauuagcu

SEQ ID NO: 1280322 - RNA, 19 nt, Artificial Sequence
  Description of Artificial Sequence: Synthetic oligonucleotide
  Sense strand starting at position 3906 of SEQ ID NO: 1241540
aguagaacuuucuugugua

SEQ ID NO: 1280323 - RNA, 19 nt, Artificial Sequence
  Description of Artificial Sequence: Synthetic oligonucleotide
  Antisense strand to SEQ ID NO: 1280322
uacacaagaaaguucuacu

SEQ ID NO: 1280324 - RNA, 19 nt, Artificial Sequence
  Description of Artificial Sequence: Synthetic oligonucleotide
  Sense strand starting at position 3910 of SEQ ID NO: 1241540
gaacuuucuuguguacuag

SEQ ID NO: 1280325 - RNA, 19 nt, Artificial Sequence
  Description of Artificial Sequence: Synthetic oligonucleotide
  Antisense strand to SEQ ID NO: 1280324
cuaguacacaagaaaguuc

SEQ ID NO: 1280326 - RNA, 19 nt, Artificial Sequence
  Description of Artificial Sequence: Synthetic oligonucleotide
  Sense strand starting at position 3922 of SEQ ID NO: 1241540
guacuagaggcugagcuaa

SEQ ID NO: 1280327 - RNA, 19 nt, Artificial Sequence
  Description of Artificial Sequence: Synthetic oligonucleotide
  Antisense strand to SEQ ID NO: 1280326
uuagcucagccucuaguac

SEQ ID NO: 1280328 - RNA, 19 nt, Artificial Sequence
  Description of Artificial Sequence: Synthetic oligonucleotide
  Sense strand starting at position 124 of SEQ ID NO: 1241541
gcgggaucccagcagaaga

SEQ ID NO: 1280329 - RNA, 19 nt, Artificial Sequence
  Description of Artificial Sequence: Synthetic oligonucleotide
  Antisense strand to SEQ ID NO: 1280328
ucuucugcugggaucccgc

SEQ ID NO: 1280330 - RNA, 19 nt, Artificial Sequence
  Description of Artificial Sequence: Synthetic oligonucleotide
  Sense strand starting at position 281 of SEQ ID NO: 1241541
cuggucagucccgaugaau

SEQ ID NO: 1280331 - RNA, 19 nt, Artificial Sequence
  Description of Artificial Sequence: Synthetic oligonucleotide
  Antisense strand to SEQ ID NO: 1280330
auucaucgggacugaccag

SEQ ID NO: 1280332 - RNA, 19 nt, Artificial Sequence
  Description of Artificial Sequence: Synthetic oligonucleotide
  Sense strand starting at position 284 of SEQ ID NO: 1241541
gucagucccgaugaaugua

SEQ ID NO: 1280333 - RNA, 19 nt, Artificial Sequence
  Description of Artificial Sequence: Synthetic oligonucleotide
  Antisense strand to SEQ ID NO: 1280332
uacauucaucgggacugac

SEQ ID NO: 1280334 - RNA, 19 nt, Artificial Sequence
  Description of Artificial Sequence: Synthetic oligonucleotide
  Sense strand starting at position 374 of SEQ ID NO: 1241541
cucagaagaucucaaagag

SEQ ID NO: 1280335 - RNA, 19 nt, Artificial Sequence
  Description of Artificial Sequence: Synthetic oligonucleotide
  Antisense strand to SEQ ID NO: 1280334
cucuuugagaucuucugag

SEQ ID NO: 1280336 - RNA, 19 nt, Artificial Sequence
  Description of Artificial Sequence: Synthetic oligonucleotide
  Sense strand starting at position 394 of SEQ ID NO: 1241541
ucggaagaauuucgacuaa

SEQ ID NO: 1280337 - RNA, 19 nt, Artificial Sequence
  Description of Artificial Sequence: Synthetic oligonucleotide
  Antisense strand to SEQ ID NO: 1280336
uuagucgaaauucuuccga

SEQ ID NO: 1280338 - RNA, 19 nt, Artificial Sequence
  Description of Artificial Sequence: Synthetic oligonucleotide
  Sense strand starting at position 524 of SEQ ID NO: 1241541
cgacucgcucucuggauaa

SEQ ID NO: 1280339 - RNA, 19 nt, Artificial Sequence
  Description of Artificial Sequence: Synthetic oligonucleotide
  Antisense strand to SEQ ID NO: 1280338
uuauccagagagcgagucg

SEQ ID NO: 1280340 - RNA, 19 nt, Artificial Sequence
  Description of Artificial Sequence: Synthetic oligonucleotide
  Sense strand starting at position 526 of SEQ ID NO: 1241541
acucgcucucuggauaaau

SEQ ID NO: 1280341 - RNA, 19 nt, Artificial Sequence
  Description of Artificial Sequence: Synthetic oligonucleotide
  Antisense strand to SEQ ID NO: 1280340
auuuauccagagagcgagu

SEQ ID NO: 1280342 - RNA, 19 nt, Artificial Sequence
  Description of Artificial Sequence: Synthetic oligonucleotide
  Sense strand starting at position 528 of SEQ ID NO: 1241541
ucgcucucuggauaaauau

SEQ ID NO: 1280343 - RNA, 19 nt, Artificial Sequence
  Description of Artificial Sequence: Synthetic oligonucleotide
  Antisense strand to SEQ ID NO: 1280342
auauuuauccagagagcga

SEQ ID NO: 1280344 - RNA, 19 nt, Artificial Sequence
  Description of Artificial Sequence: Synthetic oligonucleotide
  Sense strand starting at position 779 of SEQ ID NO: 1241541
cugugaagucuccauaaau

SEQ ID NO: 1280345 - RNA, 19 nt, Artificial Sequence
  Description of Artificial Sequence: Synthetic oligonucleotide
  Antisense strand to SEQ ID NO: 1280344
auuuauggagacuucacag

SEQ ID NO: 1280346 - RNA, 19 nt, Artificial Sequence
  Description of Artificial Sequence: Synthetic oligonucleotide
  Sense strand starting at position 1016 of SEQ ID NO: 1241541
gggucuacaggucagugau

SEQ ID NO: 1280347 - RNA, 19 nt, Artificial Sequence
  Description of Artificial Sequence: Synthetic oligonucleotide
  Antisense strand to SEQ ID NO: 1280346
aucacugaccuguagaccc

SEQ ID NO: 1280348 - RNA, 19 nt, Artificial Sequence
  Description of Artificial Sequence: Synthetic oligonucleotide
  Sense strand starting at position 1018 of SEQ ID NO: 1241541
gucuacaggucagugauga

SEQ ID NO: 1280349 - RNA, 19 nt, Artificial Sequence
  Description of Artificial Sequence: Synthetic oligonucleotide
  Antisense strand to SEQ ID NO: 1280348
ucaucacugaccuguagac

SEQ ID NO: 1280350 - RNA, 19 nt, Artificial Sequence
  Description of Artificial Sequence: Synthetic oligonucleotide
  Sense strand starting at position 1026 of SEQ ID NO: 1241541
gucagugaugacuguggau

SEQ ID NO: 1280351 - RNA, 19 nt, Artificial Sequence
  Description of Artificial Sequence: Synthetic oligonucleotide
  Antisense strand to SEQ ID NO: 1280350
auccacagucaucacugac

SEQ ID NO: 1280352 - RNA, 19 nt, Artificial Sequence
  Description of Artificial Sequence: Synthetic oligonucleotide
  Sense strand starting at position 1046 of SEQ ID NO: 1241541
ggaggauagggcgagaguu

SEQ ID NO: 1280353 - RNA, 19 nt, Artificial Sequence
  Description of Artificial Sequence: Synthetic oligonucleotide
  Antisense strand to SEQ ID NO: 1280352
aacucucgcccuauccucc

SEQ ID NO: 1280354 - RNA, 19 nt, Artificial Sequence
  Description of Artificial Sequence: Synthetic oligonucleotide
  Sense strand starting at position 1080 of SEQ ID NO: 1241541
cgggagagagguuguucua

SEQ ID NO: 1280355 - RNA, 19 nt, Artificial Sequence
  Description of Artificial Sequence: Synthetic oligonucleotide
  Antisense strand to SEQ ID NO: 1280354
uagaacaaccucucucccg

SEQ ID NO: 1280356 - RNA, 19 nt, Artificial Sequence
  Description of Artificial Sequence: Synthetic oligonucleotide
  Sense strand starting at position 1083 of SEQ ID NO: 1241541
gagagagguuguucuauuc

SEQ ID NO: 1280357 - RNA, 19 nt, Artificial Sequence
  Description of Artificial Sequence: Synthetic oligonucleotide
  Antisense strand to SEQ ID NO: 1280356
gaauagaacaaccucucuc

SEQ ID NO: 1280358 - RNA, 19 nt, Artificial Sequence
  Description of Artificial Sequence: Synthetic oligonucleotide
  Sense strand starting at position 1101 of SEQ ID NO: 1241541
ccgaguugcaguuaugaca

SEQ ID NO: 1280359 - RNA, 19 nt, Artificial Sequence
  Description of Artificial Sequence: Synthetic oligonucleotide
  Antisense strand to SEQ ID NO: 1280358
ugucauaacugcaacucgg

SEQ ID NO: 1280360 - RNA, 19 nt, Artificial Sequence
  Description of Artificial Sequence: Synthetic oligonucleotide
  Sense strand starting at position 1144 of SEQ ID NO: 1241541
ggagcugauuccuccaacu

SEQ ID NO: 1280361 - RNA, 19 nt, Artificial Sequence
  Description of Artificial Sequence: Synthetic oligonucleotide
  Antisense strand to SEQ ID NO: 1280360
aguuggaggaaucagcucc

SEQ ID NO: 1280362 - RNA, 19 nt, Artificial Sequence
  Description of Artificial Sequence: Synthetic oligonucleotide
  Sense strand starting at position 1146 of SEQ ID NO: 1241541
agcugauuccuccaacuug

SEQ ID NO: 1280363 - RNA, 19 nt, Artificial Sequence
  Description of Artificial Sequence: Synthetic oligonucleotide
  Antisense strand to SEQ ID NO: 1280362
caaguuggaggaaucagcu

SEQ ID NO: 1280364 - RNA, 19 nt, Artificial Sequence
  Description of Artificial Sequence: Synthetic oligonucleotide
  Sense strand starting at position 1238 of SEQ ID NO: 1241541
aggaguugcagggauugua

SEQ ID NO: 1280365 - RNA, 19 nt, Artificial Sequence
  Description of Artificial Sequence: Synthetic oligonucleotide
  Antisense strand to SEQ ID NO: 1280364
uacaaucccugcaacuccu

SEQ ID NO: 1280366 - RNA, 19 nt, Artificial Sequence
  Description of Artificial Sequence: Synthetic oligonucleotide
  Sense strand starting at position 1241 of SEQ ID NO: 1241541
aguugcagggauuguaaga

SEQ ID NO: 1280367 - RNA, 19 nt, Artificial Sequence
  Description of Artificial Sequence: Synthetic oligonucleotide
  Antisense strand to SEQ ID NO: 1280366
ucuuacaaucccugcaacu

SEQ ID NO: 1280368 - RNA, 19 nt, Artificial Sequence
  Description of Artificial Sequence: Synthetic oligonucleotide
  Sense strand starting at position 1452 of SEQ ID NO: 1241541
agcugaguuucccugaaac

SEQ ID NO: 1280369 - RNA, 19 nt, Artificial Sequence
  Description of Artificial Sequence: Synthetic oligonucleotide
  Antisense strand to SEQ ID NO: 1280368
guuucagggaaacucagcu

SEQ ID NO: 1280370 - RNA, 19 nt, Artificial Sequence
  Description of Artificial Sequence: Synthetic oligonucleotide
  Sense strand starting at position 1454 of SEQ ID NO: 1241541
cugaguuucccugaaacug

SEQ ID NO: 1280371 - RNA, 19 nt, Artificial Sequence
  Description of Artificial Sequence: Synthetic oligonucleotide
  Antisense strand to SEQ ID NO: 1280370
caguuucagggaaacucag

SEQ ID NO: 1280372 - RNA, 19 nt, Artificial Sequence
  Description of Artificial Sequence: Synthetic oligonucleotide
  Sense strand starting at position 2136 of SEQ ID NO: 1241541
agcgucacucaguaauugu

SEQ ID NO: 1280373 - RNA, 19 nt, Artificial Sequence
  Description of Artificial Sequence: Synthetic oligonucleotide
  Antisense strand to SEQ ID NO: 1280372
acaauuacugagugacgcu

SEQ ID NO: 1280374 - RNA, 19 nt, Artificial Sequence
  Description of Artificial Sequence: Synthetic oligonucleotide
  Sense strand starting at position 2269 of SEQ ID NO: 1241541
uaaauaacggcccgagaaa

SEQ ID NO: 1280375 - RNA, 19 nt, Artificial Sequence
  Description of Artificial Sequence: Synthetic oligonucleotide
  Antisense strand to SEQ ID NO: 1280374
uuucucgggccguuauuua

SEQ ID NO: 1280376 - RNA, 19 nt, Artificial Sequence
  Description of Artificial Sequence: Synthetic oligonucleotide
  Sense strand starting at position 2270 of SEQ ID NO: 1241541
aaauaacggcccgagaaau

SEQ ID NO: 1280377 - RNA, 19 nt, Artificial Sequence
  Description of Artificial Sequence: Synthetic oligonucleotide
  Antisense strand to SEQ ID NO: 1280376
auuucucgggccguuauuu

SEQ ID NO: 1280378 - RNA, 19 nt, Artificial Sequence
  Description of Artificial Sequence: Synthetic oligonucleotide
  Sense strand starting at position 2282 of SEQ ID NO: 1241541
gagaaauugccgugacccu

SEQ ID NO: 1280379 - RNA, 19 nt, Artificial Sequence
  Description of Artificial Sequence: Synthetic oligonucleotide
  Antisense strand to SEQ ID NO: 1280378
agggucacggcaauuucuc

SEQ ID NO: 1280380 - RNA, 19 nt, Artificial Sequence
  Description of Artificial Sequence: Synthetic oligonucleotide
  Sense strand starting at position 2283 of SEQ ID NO: 1241541
agaaauugccgugacccua

SEQ ID NO: 1280381 - RNA, 19 nt, Artificial Sequence
  Description of Artificial Sequence: Synthetic oligonucleotide
  Antisense strand to SEQ ID NO: 1280380
uagggucacggcaauuucu

SEQ ID NO: 1280382 - RNA, 19 nt, Artificial Sequence
  Description of Artificial Sequence: Synthetic oligonucleotide
  Sense strand starting at position 2373 of SEQ ID NO: 1241541
uguggagcuccaugugaua

SEQ ID NO: 1280383 - RNA, 19 nt, Artificial Sequence
  Description of Artificial Sequence: Synthetic oligonucleotide
  Antisense strand to SEQ ID NO: 1280382
uaucacauggagcuccaca

SEQ ID NO: 1280384 - RNA, 19 nt, Artificial Sequence
  Description of Artificial Sequence: Synthetic oligonucleotide
  Sense strand starting at position 2375 of SEQ ID NO: 1241541
uggagcuccaugugauaug

SEQ ID NO: 1280385 - RNA, 19 nt, Artificial Sequence
  Description of Artificial Sequence: Synthetic oligonucleotide
  Antisense strand to SEQ ID NO: 1280384
cauaucacauggagcucca

SEQ ID NO: 1280386 - RNA, 19 nt, Artificial Sequence
  Description of Artificial Sequence: Synthetic oligonucleotide
  Sense strand starting at position 2384 of SEQ ID NO: 1241541
augugauaugguuacguuu

SEQ ID NO: 1280387 - RNA, 19 nt, Artificial Sequence
  Description of Artificial Sequence: Synthetic oligonucleotide
  Antisense strand to SEQ ID NO: 1280386
aaacguaaccauaucacau

SEQ ID NO: 1280388 - RNA, 19 nt, Artificial Sequence
  Description of Artificial Sequence: Synthetic oligonucleotide
  Sense strand starting at position 2464 of SEQ ID NO: 1241541
gcgggauugcaagagcgaa

SEQ ID NO: 1280389 - RNA, 19 nt, Artificial Sequence
  Description of Artificial Sequence: Synthetic oligonucleotide
  Antisense strand to SEQ ID NO: 1280388
uucgcucuugcaaucccgc

SEQ ID NO: 1280390 - RNA, 19 nt, Artificial Sequence
  Description of Artificial Sequence: Synthetic oligonucleotide
  Sense strand starting at position 2809 of SEQ ID NO: 1241541
agaccuuauuggccuaaau

SEQ ID NO: 1280391 - RNA, 19 nt, Artificial Sequence
  Description of Artificial Sequence: Synthetic oligonucleotide
  Antisense strand to SEQ ID NO: 1280390
auuuaggccaauaaggucu

SEQ ID NO: 1280392 - RNA, 19 nt, Artificial Sequence
  Description of Artificial Sequence: Synthetic oligonucleotide
  Sense strand starting at position 2821 of SEQ ID NO: 1241541
ccuaaaugcugucuggaaa

SEQ ID NO: 1280393 - RNA, 19 nt, Artificial Sequence
  Description of Artificial Sequence: Synthetic oligonucleotide
  Antisense strand to SEQ ID NO: 1280392
uuuccagacagcauuuagg

SEQ ID NO: 1280394 - RNA, 19 nt, Artificial Sequence
  Description of Artificial Sequence: Synthetic oligonucleotide
  Sense strand starting at position 2909 of SEQ ID NO: 1241541
cccacuguggucugaguua

SEQ ID NO: 1280395 - RNA, 19 nt, Artificial Sequence
  Description of Artificial Sequence: Synthetic oligonucleotide
  Antisense strand to SEQ ID NO: 1280394
uaacucagaccacaguggg

SEQ ID NO: 1280396 - RNA, 19 nt, Artificial Sequence
  Description of Artificial Sequence: Synthetic oligonucleotide
  Sense strand starting at position 2914 of SEQ ID NO: 1241541
uguggucugaguuauguug

SEQ ID NO: 1280397 - RNA, 19 nt, Artificial Sequence
  Description of Artificial Sequence: Synthetic oligonucleotide
  Antisense strand to SEQ ID NO: 1280396
caacauaacucagaccaca

SEQ ID NO: 1280398 - RNA, 19 nt, Artificial Sequence
  Description of Artificial Sequence: Synthetic oligonucleotide
  Sense strand starting at position 2986 of SEQ ID NO: 1241541
gcuguacucugaucagagc

SEQ ID NO: 1280399 - RNA, 19 nt, Artificial Sequence
  Description of Artificial Sequence: Synthetic oligonucleotide
  Antisense strand to SEQ ID NO: 1280398
gcucugaucagaguacagc

SEQ ID NO: 1280400 - RNA, 19 nt, Artificial Sequence
  Description of Artificial Sequence: Synthetic oligonucleotide
  Sense strand starting at position 3078 of SEQ ID NO: 1241541
cccaauuucuggcuuccga

SEQ ID NO: 1280401 - RNA, 19 nt, Artificial Sequence
  Description of Artificial Sequence: Synthetic oligonucleotide
  Antisense strand to SEQ ID NO: 1280400
ucggaagccagaaauuggg

SEQ ID NO: 1280402 - RNA, 19 nt, Artificial Sequence
  Description of Artificial Sequence: Synthetic oligonucleotide
  Sense strand starting at position 3091 of SEQ ID NO: 1241541
uuccgaggagucugaauca

SEQ ID NO: 1280403 - RNA, 19 nt, Artificial Sequence
  Description of Artificial Sequence: Synthetic oligonucleotide
  Antisense strand to SEQ ID NO: 1280402
ugauucagacuccucggaa

SEQ ID NO: 1280404 - RNA, 19 nt, Artificial Sequence
  Description of Artificial Sequence: Synthetic oligonucleotide
  Sense strand starting at position 3398 of SEQ ID NO: 1241541
ccuagcuaaucccucgaaa

SEQ ID NO: 1280405 - RNA, 19 nt, Artificial Sequence
  Description of Artificial Sequence: Synthetic oligonucleotide
  Antisense strand to SEQ ID NO: 1280404
uuucgagggauuagcuagg

SEQ ID NO: 1280406 - RNA, 19 nt, Artificial Sequence
  Description of Artificial Sequence: Synthetic oligonucleotide
  Sense strand starting at position 3962 of SEQ ID NO: 1241541
guauuauucuaguucccau

SEQ ID NO: 1280407 - RNA, 19 nt, Artificial Sequence
  Description of Artificial Sequence: Synthetic oligonucleotide
  Antisense strand to SEQ ID NO: 1280406
augggaacuagaauaauac

SEQ ID NO: 1280408 - RNA, 19 nt, Artificial Sequence
  Description of Artificial Sequence: Synthetic oligonucleotide
  Sense strand starting at position 135 of SEQ ID NO: 1241542
agggcucuugcacagagaa

SEQ ID NO: 1280409 - RNA, 19 nt, Artificial Sequence
  Description of Artificial Sequence: Synthetic oligonucleotide
  Antisense strand to SEQ ID NO: 1280408
uucucugugcaagagcccu

SEQ ID NO: 1280410 - RNA, 19 nt, Artificial Sequence
  Description of Artificial Sequence: Synthetic oligonucleotide
  Sense strand starting at position 137 of SEQ ID NO: 1241542
ggcucuugcacagagaaua

SEQ ID NO: 1280411 - RNA, 19 nt, Artificial Sequence
  Description of Artificial Sequence: Synthetic oligonucleotide
  Antisense strand to SEQ ID NO: 1280410
uauucucugugcaagagcc

SEQ ID NO: 1280412 - RNA, 19 nt, Artificial Sequence
  Description of Artificial Sequence: Synthetic oligonucleotide
  Sense strand starting at position 205 of SEQ ID NO: 1241542
gaccaacaaugguugcaua

SEQ ID NO: 1280413 - RNA, 19 nt, Artificial Sequence
  Description of Artificial Sequence: Synthetic oligonucleotide
  Antisense strand to SEQ ID NO: 1280412
uaugcaaccauuguugguc

SEQ ID NO: 1280414 - RNA, 19 nt, Artificial Sequence
  Description of Artificial Sequence: Synthetic oligonucleotide
  Sense strand starting at position 239 of SEQ ID NO: 1241542
guaaguauuucugaacucu

SEQ ID NO: 1280415 - RNA, 19 nt, Artificial Sequence
  Description of Artificial Sequence: Synthetic oligonucleotide
  Antisense strand to SEQ ID NO: 1280414
agaguucagaaauacuuac

SEQ ID NO: 1280416 - RNA, 19 nt, Artificial Sequence
  Description of Artificial Sequence: Synthetic oligonucleotide
  Sense strand starting at position 344 of SEQ ID NO: 1241542
cucucauggcccugggaga

SEQ ID NO: 1280417 - RNA, 19 nt, Artificial Sequence
  Description of Artificial Sequence: Synthetic oligonucleotide
  Antisense strand to SEQ ID NO: 1280416
ucucccagggccaugagag

SEQ ID NO: 1280418 - RNA, 19 nt, Artificial Sequence
  Description of Artificial Sequence: Synthetic oligonucleotide
  Sense strand starting at position 382 of SEQ ID NO: 1241542
cugauuggccuggacucaa

SEQ ID NO: 1280419 - RNA, 19 nt, Artificial Sequence
  Description of Artificial Sequence: Synthetic oligonucleotide
  Antisense strand to SEQ ID NO: 1280418
uugaguccaggccaaucag

SEQ ID NO: 1280420 - RNA, 19 nt, Artificial Sequence
  Description of Artificial Sequence: Synthetic oligonucleotide
  Sense strand starting at position 546 of SEQ ID NO: 1241542
ccuagagagcuuugguguu

SEQ ID NO: 1280421 - RNA, 19 nt, Artificial Sequence
  Description of Artificial Sequence: Synthetic oligonucleotide
  Antisense strand to SEQ ID NO: 1280420
aacaccaaagcucucuagg

SEQ ID NO: 1280422 - RNA, 19 nt, Artificial Sequence
  Description of Artificial Sequence: Synthetic oligonucleotide
  Sense strand starting at position 692 of SEQ ID NO: 1241542
ccgcuaaagcaggauagau

SEQ ID NO: 1280423 - RNA, 19 nt, Artificial Sequence
  Description of Artificial Sequence: Synthetic oligonucleotide
  Antisense strand to SEQ ID NO: 1280422
aucuauccugcuuuagcgg

SEQ ID NO: 1280424 - RNA, 19 nt, Artificial Sequence
  Description of Artificial Sequence: Synthetic oligonucleotide
  Sense strand starting at position 701 of SEQ ID NO: 1241542
caggauagaugaucagugu

SEQ ID NO: 1280425 - RNA, 19 nt, Artificial Sequence
  Description of Artificial Sequence: Synthetic oligonucleotide
  Antisense strand to SEQ ID NO: 1280424
acacugaucaucuauccug

SEQ ID NO: 1280426 - RNA, 19 nt, Artificial Sequence
  Description of Artificial Sequence: Synthetic oligonucleotide
  Sense strand starting at position 774 of SEQ ID NO: 1241542
gagggaaguucuccgugag

SEQ ID NO: 1280427 - RNA, 19 nt, Artificial Sequence
  Description of Artificial Sequence: Synthetic oligonucleotide
  Antisense strand to SEQ ID NO: 1280426
cucacggagaacuucccuc

SEQ ID NO: 1280428 - RNA, 19 nt, Artificial Sequence
  Description of Artificial Sequence: Synthetic oligonucleotide
  Sense strand starting at position 778 of SEQ ID NO: 1241542
gaaguucuccgugagcauc

SEQ ID NO: 1280429 - RNA, 19 nt, Artificial Sequence
  Description of Artificial Sequence: Synthetic oligonucleotide
  Antisense strand to SEQ ID NO: 1280428
gaugcucacggagaacuuc

SEQ ID NO: 1280430 - RNA, 19 nt, Artificial Sequence
  Description of Artificial Sequence: Synthetic oligonucleotide
  Sense strand starting at position 896 of SEQ ID NO: 1241542
gugggacguuuccuucaga

SEQ ID NO: 1280431 - RNA, 19 nt, Artificial Sequence
  Description of Artificial Sequence: Synthetic oligonucleotide
  Antisense strand to SEQ ID NO: 1280430
ucugaaggaaacgucccac

SEQ ID NO: 1280432 - RNA, 19 nt, Artificial Sequence
  Description of Artificial Sequence: Synthetic oligonucleotide
  Sense strand starting at position 899 of SEQ ID NO: 1241542
ggacguuuccuucagagac

SEQ ID NO: 1280433 - RNA, 19 nt, Artificial Sequence
  Description of Artificial Sequence: Synthetic oligonucleotide
  Antisense strand to SEQ ID NO: 1280432
gucucugaaggaaacgucc

SEQ ID NO: 1280434 - RNA, 19 nt, Artificial Sequence
  Description of Artificial Sequence: Synthetic oligonucleotide
  Sense strand starting at position 1082 of SEQ ID NO: 1241542
agaagccagcuauguaaga

SEQ ID NO: 1280435 - RNA, 19 nt, Artificial Sequence
  Description of Artificial Sequence: Synthetic oligonucleotide
  Antisense strand to SEQ ID NO: 1280434
ucuuacauagcuggcuucu

SEQ ID NO: 1280436 - RNA, 19 nt, Artificial Sequence
  Description of Artificial Sequence: Synthetic oligonucleotide
  Sense strand starting at position 1083 of SEQ ID NO: 1241542
gaagccagcuauguaagaa

SEQ ID NO: 1280437 - RNA, 19 nt, Artificial Sequence
  Description of Artificial Sequence: Synthetic oligonucleotide
  Antisense strand to SEQ ID NO: 1280436
uucuuacauagcuggcuuc

SEQ ID NO: 1280438 - RNA, 19 nt, Artificial Sequence
  Description of Artificial Sequence: Synthetic oligonucleotide
  Sense strand starting at position 1359 of SEQ ID NO: 1241542
ggagguaucugggaaggaa

SEQ ID NO: 1280439 - RNA, 19 nt, Artificial Sequence
  Description of Artificial Sequence: Synthetic oligonucleotide
  Antisense strand to SEQ ID NO: 1280438
uuccuucccagauaccucc

SEQ ID NO: 1280440 - RNA, 19 nt, Artificial Sequence
  Description of Artificial Sequence: Synthetic oligonucleotide
  Sense strand starting at position 2182 of SEQ ID NO: 1241542
gggccagacgucuagaagu

SEQ ID NO: 1280441 - RNA, 19 nt, Artificial Sequence
  Description of Artificial Sequence: Synthetic oligonucleotide
  Antisense strand to SEQ ID NO: 1280440
acuucuagacgucuggccc

SEQ ID NO: 1280442 - RNA, 19 nt, Artificial Sequence
  Description of Artificial Sequence: Synthetic oligonucleotide
  Sense strand starting at position 2184 of SEQ ID NO: 1241542
gccagacgucuagaaguua

SEQ ID NO: 1280443 - RNA, 19 nt, Artificial Sequence
  Description of Artificial Sequence: Synthetic oligonucleotide
  Antisense strand to SEQ ID NO: 1280442
uaacuucuagacgucuggc

SEQ ID NO: 1280444 - RNA, 19 nt, Artificial Sequence
  Description of Artificial Sequence: Synthetic oligonucleotide
  Sense strand starting at position 2351 of SEQ ID NO: 1241542
ucugccuugccaugaaaug

SEQ ID NO: 1280445 - RNA, 19 nt, Artificial Sequence
  Description of Artificial Sequence: Synthetic oligonucleotide
  Antisense strand to SEQ ID NO: 1280444
cauuucauggcaaggcaga

SEQ ID NO: 1280446 - RNA, 19 nt, Artificial Sequence
  Description of Artificial Sequence: Synthetic oligonucleotide
  Sense strand starting at position 2360 of SEQ ID NO: 1241542
ccaugaaaugguggagucu

SEQ ID NO: 1280447 - RNA, 19 nt, Artificial Sequence
  Description of Artificial Sequence: Synthetic oligonucleotide
  Antisense strand to SEQ ID NO: 1280446
agacuccaccauuucaugg

SEQ ID NO: 1280448 - RNA, 19 nt, Artificial Sequence
  Description of Artificial Sequence: Synthetic oligonucleotide
  Sense strand starting at position 2402 of SEQ ID NO: 1241542
gguccucugaucuggucau

SEQ ID NO: 1280449 - RNA, 19 nt, Artificial Sequence
  Description of Artificial Sequence: Synthetic oligonucleotide
  Antisense strand to SEQ ID NO: 1280448
augaccagaucagaggacc

SEQ ID NO: 1280450 - RNA, 19 nt, Artificial Sequence
  Description of Artificial Sequence: Synthetic oligonucleotide
  Sense strand starting at position 2547 of SEQ ID NO: 1241542
ugucucaaccugcagagua

SEQ ID NO: 1280451 - RNA, 19 nt, Artificial Sequence
  Description of Artificial Sequence: Synthetic oligonucleotide
  Antisense strand to SEQ ID NO: 1280450
uacucugcagguugagaca

SEQ ID NO: 1280452 - RNA, 19 nt, Artificial Sequence
  Description of Artificial Sequence: Synthetic oligonucleotide
  Sense strand starting at position 2794 of SEQ ID NO: 1241542
ucauaaaguccucagguga

SEQ ID NO: 1280453 - RNA, 19 nt, Artificial Sequence
  Description of Artificial Sequence: Synthetic oligonucleotide
  Antisense strand to SEQ ID NO: 1280452
ucaccugaggacuuuauga

SEQ ID NO: 1280454 - RNA, 19 nt, Artificial Sequence
  Description of Artificial Sequence: Synthetic oligonucleotide
  Sense strand starting at position 2864 of SEQ ID NO: 1241542
ggauaucacccacaaugcu

SEQ ID NO: 1280455 - RNA, 19 nt, Artificial Sequence
  Description of Artificial Sequence: Synthetic oligonucleotide
  Antisense strand to SEQ ID NO: 1280454
agcauugugggugauaucc

SEQ ID NO: 1280456 - RNA, 19 nt, Artificial Sequence
  Description of Artificial Sequence: Synthetic oligonucleotide
  Sense strand starting at position 2974 of SEQ ID NO: 1241542
ggaaccaucuccucagucu

SEQ ID NO: 1280457 - RNA, 19 nt, Artificial Sequence
  Description of Artificial Sequence: Synthetic oligonucleotide
  Antisense strand to SEQ ID NO: 1280456
agacugaggagaugguucc

SEQ ID NO: 1280458 - RNA, 19 nt, Artificial Sequence
  Description of Artificial Sequence: Synthetic oligonucleotide
  Sense strand starting at position 3092 of SEQ ID NO: 1241542
caaggaugggcaugagauc

SEQ ID NO: 1280459 - RNA, 19 nt, Artificial Sequence
  Description of Artificial Sequence: Synthetic oligonucleotide
  Antisense strand to SEQ ID NO: 1280458
gaucucaugcccauccuug

SEQ ID NO: 1280460 - RNA, 19 nt, Artificial Sequence
  Description of Artificial Sequence: Synthetic oligonucleotide
  Sense strand starting at position 3146 of SEQ ID NO: 1241542
gcucucuuucugcugaguu

SEQ ID NO: 1280461 - RNA, 19 nt, Artificial Sequence
  Description of Artificial Sequence: Synthetic oligonucleotide
  Antisense strand to SEQ ID NO: 1280460
aacucagcagaaagagagc

SEQ ID NO: 1280462 - RNA, 19 nt, Artificial Sequence
  Description of Artificial Sequence: Synthetic oligonucleotide
  Sense strand starting at position 3373 of SEQ ID NO: 1241542
agucuugauucucagauuu

SEQ ID NO: 1280463 - RNA, 19 nt, Artificial Sequence
  Description of Artificial Sequence: Synthetic oligonucleotide
  Antisense strand to SEQ ID NO: 1280462
aaaucugagaaucaagacu

SEQ ID NO: 1280464 - RNA, 19 nt, Artificial Sequence
  Description of Artificial Sequence: Synthetic oligonucleotide
  Sense strand starting at position 3384 of SEQ ID NO: 1241542
ucagauuucuuggaguucu

SEQ ID NO: 1280465 - RNA, 19 nt, Artificial Sequence
  Description of Artificial Sequence: Synthetic oligonucleotide
  Antisense strand to SEQ ID NO: 1280464
agaacuccaagaaaucuga

SEQ ID NO: 1280466 - RNA, 19 nt, Artificial Sequence
  Description of Artificial Sequence: Synthetic oligonucleotide
  Sense strand starting at position 3392 of SEQ ID NO: 1241542
cuuggaguucuaugcugga

SEQ ID NO: 1280467 - RNA, 19 nt, Artificial Sequence
  Description of Artificial Sequence: Synthetic oligonucleotide
  Antisense strand to SEQ ID NO: 1280466
uccagcauagaacuccaag

SEQ ID NO: 1280468 - RNA, 19 nt, Artificial Sequence
  Description of Artificial Sequence: Synthetic oligonucleotide
  Sense strand starting at position 3396 of SEQ ID NO: 1241542
gaguucuaugcuggaacau

SEQ ID NO: 1280469 - RNA, 19 nt, Artificial Sequence
  Description of Artificial Sequence: Synthetic oligonucleotide
  Antisense strand to SEQ ID NO: 1280468
auguuccagcauagaacuc

SEQ ID NO: 1280470 - RNA, 19 nt, Artificial Sequence
  Description of Artificial Sequence: Synthetic oligonucleotide
  Sense strand starting at position 3397 of SEQ ID NO: 1241542
aguucuaugcuggaacaua

SEQ ID NO: 1280471 - RNA, 19 nt, Artificial Sequence
  Description of Artificial Sequence: Synthetic oligonucleotide
  Antisense strand to SEQ ID NO: 1280470
uauguuccagcauagaacu

SEQ ID NO: 1280472 - RNA, 19 nt, Artificial Sequence
  Description of Artificial Sequence: Synthetic oligonucleotide
  Sense strand starting at position 3636 of SEQ ID NO: 1241542
accugaaggucaucaucuu

SEQ ID NO: 1280473 - RNA, 19 nt, Artificial Sequence
  Description of Artificial Sequence: Synthetic oligonucleotide
  Antisense strand to SEQ ID NO: 1280472
aagaugaugaccuucaggu

SEQ ID NO: 1280474 - RNA, 19 nt, Artificial Sequence
  Description of Artificial Sequence: Synthetic oligonucleotide
  Sense strand starting at position 3642 of SEQ ID NO: 1241542
aggucaucaucuucuccau

SEQ ID NO: 1280475 - RNA, 19 nt, Artificial Sequence
  Description of Artificial Sequence: Synthetic oligonucleotide
  Antisense strand to SEQ ID NO: 1280474
auggagaagaugaugaccu

SEQ ID NO: 1280476 - RNA, 19 nt, Artificial Sequence
  Description of Artificial Sequence: Synthetic oligonucleotide
  Sense strand starting at position 3681 of SEQ ID NO: 1241542
gguuuccuaccucagcaaa

SEQ ID NO: 1280477 - RNA, 19 nt, Artificial Sequence
  Description of Artificial Sequence: Synthetic oligonucleotide
  Antisense strand to SEQ ID NO: 1280476
uuugcugagguaggaaacc

SEQ ID NO: 1280478 - RNA, 19 nt, Artificial Sequence
  Description of Artificial Sequence: Synthetic oligonucleotide
  Sense strand starting at position 3737 of SEQ ID NO: 1241542
agucuagacuauucuuauc

SEQ ID NO: 1280479 - RNA, 19 nt, Artificial Sequence
  Description of Artificial Sequence: Synthetic oligonucleotide
  Antisense strand to SEQ ID NO: 1280478
gauaagaauagucuagacu

SEQ ID NO: 1280480 - RNA, 19 nt, Artificial Sequence
  Description of Artificial Sequence: Synthetic oligonucleotide
  Sense strand starting at position 3756 of SEQ ID NO: 1241542
cugcauagcuaaucagaug

SEQ ID NO: 1280481 - RNA, 19 nt, Artificial Sequence
  Description of Artificial Sequence: Synthetic oligonucleotide
  Antisense strand to SEQ ID NO: 1280480
caucugauuagcuaugcag

SEQ ID NO: 1280482 - RNA, 19 nt, Artificial Sequence
  Description of Artificial Sequence: Synthetic oligonucleotide
  Sense strand starting at position 3784 of SEQ ID NO: 1241542
uuggaauuguacuucucaa

SEQ ID NO: 1280483 - RNA, 19 nt, Artificial Sequence
  Description of Artificial Sequence: Synthetic oligonucleotide
  Antisense strand to SEQ ID NO: 1280482
uugagaaguacaauuccaa

SEQ ID NO: 1280484 - RNA, 19 nt, Artificial Sequence
  Description of Artificial Sequence: Synthetic oligonucleotide
  Sense strand starting at position 3961 of SEQ ID NO: 1241542
gcaaauccacuuggaaagu

SEQ ID NO: 1280485 - RNA, 19 nt, Artificial Sequence
  Description of Artificial Sequence: Synthetic oligonucleotide
  Antisense strand to SEQ ID NO: 1280484
acuuuccaaguggauuugc

SEQ ID NO: 1280486 - RNA, 19 nt, Artificial Sequence
  Description of Artificial Sequence: Synthetic oligonucleotide
  Sense strand starting at position 3971 of SEQ ID NO: 1241542
uuggaaaguuaagagagaa

SEQ ID NO: 1280487 - RNA, 19 nt, Artificial Sequence
  Description of Artificial Sequence: Synthetic oligonucleotide
  Antisense strand to SEQ ID NO: 1280486
uucucucuuaacuuuccaa

SEQ ID NO: 1280488 - RNA, 19 nt, Artificial Sequence
  Description of Artificial Sequence: Synthetic oligonucleotide
  Sense strand starting at position 180 of SEQ ID NO: 1241543
augugaaucugcuugagaa

SEQ ID NO: 1280489 - RNA, 19 nt, Artificial Sequence
  Description of Artificial Sequence: Synthetic oligonucleotide
  Antisense strand to SEQ ID NO: 1280488
uucucaagcagauucacau

SEQ ID NO: 1280490 - RNA, 19 nt, Artificial Sequence
  Description of Artificial Sequence: Synthetic oligonucleotide
  Sense strand starting at position 181 of SEQ ID NO: 1241543
ugugaaucugcuugagaau

SEQ ID NO: 1280491 - RNA, 19 nt, Artificial Sequence
  Description of Artificial Sequence: Synthetic oligonucleotide
  Antisense strand to SEQ ID NO: 1280490
auucucaagcagauucaca

SEQ ID NO: 1280492 - RNA, 19 nt, Artificial Sequence
  Description of Artificial Sequence: Synthetic oligonucleotide
  Sense strand starting at position 182 of SEQ ID NO: 1241543
gugaaucugcuugagaaug

SEQ ID NO: 1280493 - RNA, 19 nt, Artificial Sequence
  Description of Artificial Sequence: Synthetic oligonucleotide
  Antisense strand to SEQ ID NO: 1280492
cauucucaagcagauucac

SEQ ID NO: 1280494 - RNA, 19 nt, Artificial Sequence
  Description of Artificial Sequence: Synthetic oligonucleotide
  Sense strand starting at position 262 of SEQ ID NO: 1241543
ggaagaauuggguguccuc

SEQ ID NO: 1280495 - RNA, 19 nt, Artificial Sequence
  Description of Artificial Sequence: Synthetic oligonucleotide
  Antisense strand to SEQ ID NO: 1280494
gaggacacccaauucuucc

SEQ ID NO: 1280496 - RNA, 19 nt, Artificial Sequence
  Description of Artificial Sequence: Synthetic oligonucleotide
  Sense strand starting at position 352 of SEQ ID NO: 1241543
accucaaaguuagcagaaa

SEQ ID NO: 1280497 - RNA, 19 nt, Artificial Sequence
  Description of Artificial Sequence: Synthetic oligonucleotide
  Antisense strand to SEQ ID NO: 1280496
uuucugcuaacuuugaggu

SEQ ID NO: 1280498 - RNA, 19 nt, Artificial Sequence
  Description of Artificial Sequence: Synthetic oligonucleotide
  Sense strand starting at position 455 of SEQ ID NO: 1241543
aguaacaucucuguccaca

SEQ ID NO: 1280499 - RNA, 19 nt, Artificial Sequence
  Description of Artificial Sequence: Synthetic oligonucleotide
  Antisense strand to SEQ ID NO: 1280498
uguggacagagauguuacu

SEQ ID NO: 1280500 - RNA, 19 nt, Artificial Sequence
  Description of Artificial Sequence: Synthetic oligonucleotide
  Sense strand starting at position 1208 of SEQ ID NO: 1241543
gcucgugucaccuccgaaa

SEQ ID NO: 1280501 - RNA, 19 nt, Artificial Sequence
  Description of Artificial Sequence: Synthetic oligonucleotide
  Antisense strand to SEQ ID NO: 1280500
uuucggaggugacacgagc

SEQ ID NO: 1280502 - RNA, 19 nt, Artificial Sequence
  Description of Artificial Sequence: Synthetic oligonucleotide
  Sense strand starting at position 2222 of SEQ ID NO: 1241543
ucuuucugacuccgaaacu

SEQ ID NO: 1280503 - RNA, 19 nt, Artificial Sequence
  Description of Artificial Sequence: Synthetic oligonucleotide
  Antisense strand to SEQ ID NO: 1280502
aguuucggagucagaaaga

SEQ ID NO: 1280504 - RNA, 19 nt, Artificial Sequence
  Description of Artificial Sequence: Synthetic oligonucleotide
  Sense strand starting at position 2266 of SEQ ID NO: 1241543
uccugccugucauuuauga

SEQ ID NO: 1280505 - RNA, 19 nt, Artificial Sequence
  Description of Artificial Sequence: Synthetic oligonucleotide
  Antisense strand to SEQ ID NO: 1280504
ucauaaaugacaggcagga

SEQ ID NO: 1280506 - RNA, 19 nt, Artificial Sequence
  Description of Artificial Sequence: Synthetic oligonucleotide
  Sense strand starting at position 2271 of SEQ ID NO: 1241543
ccugucauuuaugauauuu

SEQ ID NO: 1280507 - RNA, 19 nt, Artificial Sequence
  Description of Artificial Sequence: Synthetic oligonucleotide
  Antisense strand to SEQ ID NO: 1280506
aaauaucauaaaugacagg

SEQ ID NO: 1280508 - RNA, 19 nt, Artificial Sequence
  Description of Artificial Sequence: Synthetic oligonucleotide
  Sense strand starting at position 2355 of SEQ ID NO: 1241543
ggcugaugacacuguugaa

SEQ ID NO: 1280509 - RNA, 19 nt, Artificial Sequence
  Description of Artificial Sequence: Synthetic oligonucleotide
  Antisense strand to SEQ ID NO: 1280508
uucaacagugucaucagcc

SEQ ID NO: 1280510 - RNA, 19 nt, Artificial Sequence
  Description of Artificial Sequence: Synthetic oligonucleotide
  Sense strand starting at position 2521 of SEQ ID NO: 1241543
accauuuguacgcggugau

SEQ ID NO: 1280511 - RNA, 19 nt, Artificial Sequence
  Description of Artificial Sequence: Synthetic oligonucleotide
  Antisense strand to SEQ ID NO: 1280510
aucaccgcguacaaauggu

SEQ ID NO: 1280512 - RNA, 19 nt, Artificial Sequence
  Description of Artificial Sequence: Synthetic oligonucleotide
  Sense strand starting at position 2575 of SEQ ID NO: 1241543
uuauuaaugggccaaucua

SEQ ID NO: 1280513 - RNA, 19 nt, Artificial Sequence
  Description of Artificial Sequence: Synthetic oligonucleotide
  Antisense strand to SEQ ID NO: 1280512
uagauuggcccauuaauaa

SEQ ID NO: 1280514 - RNA, 19 nt, Artificial Sequence
  Description of Artificial Sequence: Synthetic oligonucleotide
  Sense strand starting at position 2714 of SEQ ID NO: 1241543
gucugaucucacugaauaa

SEQ ID NO: 1280515 - RNA, 19 nt, Artificial Sequence
  Description of Artificial Sequence: Synthetic oligonucleotide
  Antisense strand to SEQ ID NO: 1280514
uuauucagugagaucagac

SEQ ID NO: 1280516 - RNA, 19 nt, Artificial Sequence
  Description of Artificial Sequence: Synthetic oligonucleotide
  Sense strand starting at position 2797 of SEQ ID NO: 1241543
uguguauucccagauuaca

SEQ ID NO: 1280517 - RNA, 19 nt, Artificial Sequence
  Description of Artificial Sequence: Synthetic oligonucleotide
  Antisense strand to SEQ ID NO: 1280516
uguaaucugggaauacaca

SEQ ID NO: 1280518 - RNA, 19 nt, Artificial Sequence
  Description of Artificial Sequence: Synthetic oligonucleotide
  Sense strand starting at position 2808 of SEQ ID NO: 1241543
agauuacaguugcuauaau

SEQ ID NO: 1280519 - RNA, 19 nt, Artificial Sequence
  Description of Artificial Sequence: Synthetic oligonucleotide
  Antisense strand to SEQ ID NO: 1280518
auuauagcaacuguaaucu

SEQ ID NO: 1280520 - RNA, 19 nt, Artificial Sequence
  Description of Artificial Sequence: Synthetic oligonucleotide
  Sense strand starting at position 2906 of SEQ ID NO: 1241543
gccauaccacuuuauaguu

SEQ ID NO: 1280521 - RNA, 19 nt, Artificial Sequence
  Description of Artificial Sequence: Synthetic oligonucleotide
  Antisense strand to SEQ ID NO: 1280520
aacuauaaagugguauggc

SEQ ID NO: 1280522 - RNA, 19 nt, Artificial Sequence
  Description of Artificial Sequence: Synthetic oligonucleotide
  Sense strand starting at position 2916 of SEQ ID NO: 1241543
uuuauaguugcucagacac

SEQ ID NO: 1280523 - RNA, 19 nt, Artificial Sequence
  Description of Artificial Sequence: Synthetic oligonucleotide
  Antisense strand to SEQ ID NO: 1280522
gugucugagcaacuauaaa

SEQ ID NO: 1280524 - RNA, 19 nt, Artificial Sequence
  Description of Artificial Sequence: Synthetic oligonucleotide
  Sense strand starting at position 3026 of SEQ ID NO: 1241543
caaguaagugauuggccaa

SEQ ID NO: 1280525 - RNA, 19 nt, Artificial Sequence
  Description of Artificial Sequence: Synthetic oligonucleotide
  Antisense strand to SEQ ID NO: 1280524
uuggccaaucacuuacuug

SEQ ID NO: 1280526 - RNA, 19 nt, Artificial Sequence
  Description of Artificial Sequence: Synthetic oligonucleotide
  Sense strand starting at position 3029 of SEQ ID NO: 1241543
guaagugauuggccaaaug

SEQ ID NO: 1280527 - RNA, 19 nt, Artificial Sequence
  Description of Artificial Sequence: Synthetic oligonucleotide
  Antisense strand to SEQ ID NO: 1280526
cauuuggccaaucacuuac

SEQ ID NO: 1280528 - RNA, 19 nt, Artificial Sequence
  Description of Artificial Sequence: Synthetic oligonucleotide
  Sense strand starting at position 3071 of SEQ ID NO: 1241543
agcaauaagugguugagaa

SEQ ID NO: 1280529 - RNA, 19 nt, Artificial Sequence
  Description of Artificial Sequence: Synthetic oligonucleotide
  Antisense strand to SEQ ID NO: 1280528
uucucaaccacuuauugcu

SEQ ID NO: 1280530 - RNA, 19 nt, Artificial Sequence
  Description of Artificial Sequence: Synthetic oligonucleotide
  Sense strand starting at position 3072 of SEQ ID NO: 1241543
gcaauaagugguugagaac

SEQ ID NO: 1280531 - RNA, 19 nt, Artificial Sequence
  Description of Artificial Sequence: Synthetic oligonucleotide
  Antisense strand to SEQ ID NO: 1280530
guucucaaccacuuauugc

SEQ ID NO: 1280532 - RNA, 19 nt, Artificial Sequence
  Description of Artificial Sequence: Synthetic oligonucleotide
  Sense strand starting at position 3267 of SEQ ID NO: 1241543
uucuuagggcaucauucua

SEQ ID NO: 1280533 - RNA, 19 nt, Artificial Sequence
  Description of Artificial Sequence: Synthetic oligonucleotide
  Antisense strand to SEQ ID NO: 1280532
uagaaugaugcccuaagaa

SEQ ID NO: 1280534 - RNA, 19 nt, Artificial Sequence
  Description of Artificial Sequence: Synthetic oligonucleotide
  Sense strand starting at position 3274 of SEQ ID NO: 1241543
ggcaucauucuauagacac

SEQ ID NO: 1280535 - RNA, 19 nt, Artificial Sequence
  Description of Artificial Sequence: Synthetic oligonucleotide
  Antisense strand to SEQ ID NO: 1280534
gugucuauagaaugaugcc

SEQ ID NO: 1280536 - RNA, 19 nt, Artificial Sequence
  Description of Artificial Sequence: Synthetic oligonucleotide
  Sense strand starting at position 3324 of SEQ ID NO: 1241543
acaaguccuccggaggauu

SEQ ID NO: 1280537 - RNA, 19 nt, Artificial Sequence
  Description of Artificial Sequence: Synthetic oligonucleotide
  Antisense strand to SEQ ID NO: 1280536
aauccuccggaggacuugu

SEQ ID NO: 1280538 - RNA, 19 nt, Artificial Sequence
  Description of Artificial Sequence: Synthetic oligonucleotide
  Sense strand starting at position 3382 of SEQ ID NO: 1241543
agccuugauuuguuuaugu

SEQ ID NO: 1280539 - RNA, 19 nt, Artificial Sequence
  Description of Artificial Sequence: Synthetic oligonucleotide
  Antisense strand to SEQ ID NO: 1280538
acauaaacaaaucaaggcu

SEQ ID NO: 1280540 - RNA, 19 nt, Artificial Sequence
  Description of Artificial Sequence: Synthetic oligonucleotide
  Sense strand starting at position 3387 of SEQ ID NO: 1241543
ugauuuguuuauguccuua

SEQ ID NO: 1280541 - RNA, 19 nt, Artificial Sequence
  Description of Artificial Sequence: Synthetic oligonucleotide
  Antisense strand to SEQ ID NO: 1280540
uaaggacauaaacaaauca

SEQ ID NO: 1280542 - RNA, 19 nt, Artificial Sequence
  Description of Artificial Sequence: Synthetic oligonucleotide
  Sense strand starting at position 3392 of SEQ ID NO: 1241543
uguuuauguccuuauaacc

SEQ ID NO: 1280543 - RNA, 19 nt, Artificial Sequence
  Description of Artificial Sequence: Synthetic oligonucleotide
  Antisense strand to SEQ ID NO: 1280542
gguuauaaggacauaaaca

SEQ ID NO: 1280544 - RNA, 19 nt, Artificial Sequence
  Description of Artificial Sequence: Synthetic oligonucleotide
  Sense strand starting at position 3442 of SEQ ID NO: 1241543
gaaauugagagcugugagu

SEQ ID NO: 1280545 - RNA, 19 nt, Artificial Sequence
  Description of Artificial Sequence: Synthetic oligonucleotide
  Antisense strand to SEQ ID NO: 1280544
acucacagcucucaauuuc

SEQ ID NO: 1280546 - RNA, 19 nt, Artificial Sequence
  Description of Artificial Sequence: Synthetic oligonucleotide
  Sense strand starting at position 3444 of SEQ ID NO: 1241543
aauugagagcugugaguaa

SEQ ID NO: 1280547 - RNA, 19 nt, Artificial Sequence
  Description of Artificial Sequence: Synthetic oligonucleotide
  Antisense strand to SEQ ID NO: 1280546
uuacucacagcucucaauu

SEQ ID NO: 1280548 - RNA, 19 nt, Artificial Sequence
  Description of Artificial Sequence: Synthetic oligonucleotide
  Sense strand starting at position 3559 of SEQ ID NO: 1241543
gcuggugucauagauacca

SEQ ID NO: 1280549 - RNA, 19 nt, Artificial Sequence
  Description of Artificial Sequence: Synthetic oligonucleotide
  Antisense strand to SEQ ID NO: 1280548
ugguaucuaugacaccagc

SEQ ID NO: 1280550 - RNA, 19 nt, Artificial Sequence
  Description of Artificial Sequence: Synthetic oligonucleotide
  Sense strand starting at position 3616 of SEQ ID NO: 1241543
caggaaagcucucugggaa

SEQ ID NO: 1280551 - RNA, 19 nt, Artificial Sequence
  Description of Artificial Sequence: Synthetic oligonucleotide
  Antisense strand to SEQ ID NO: 1280550
uucccagagagcuuuccug

SEQ ID NO: 1280552 - RNA, 19 nt, Artificial Sequence
  Description of Artificial Sequence: Synthetic oligonucleotide
  Sense strand starting at position 3617 of SEQ ID NO: 1241543
aggaaagcucucugggaag

SEQ ID NO: 1280553 - RNA, 19 nt, Artificial Sequence
  Description of Artificial Sequence: Synthetic oligonucleotide
  Antisense strand to SEQ ID NO: 1280552
cuucccagagagcuuuccu

SEQ ID NO: 1280554 - RNA, 19 nt, Artificial Sequence
  Description of Artificial Sequence: Synthetic oligonucleotide
  Sense strand starting at position 3619 of SEQ ID NO: 1241543
gaaagcucucugggaaggu

SEQ ID NO: 1280555 - RNA, 19 nt, Artificial Sequence
  Description of Artificial Sequence: Synthetic oligonucleotide
  Antisense strand to SEQ ID NO: 1280554
accuucccagagagcuuuc

SEQ ID NO: 1280556 - RNA, 19 nt, Artificial Sequence
  Description of Artificial Sequence: Synthetic oligonucleotide
  Sense strand starting at position 3728 of SEQ ID NO: 1241543
uccgcuaugguuuaauaua

SEQ ID NO: 1280557 - RNA, 19 nt, Artificial Sequence
  Description of Artificial Sequence: Synthetic oligonucleotide
  Antisense strand to SEQ ID NO: 1280556
uauauuaaaccauagcgga

SEQ ID NO: 1280558 - RNA, 19 nt, Artificial Sequence
  Description of Artificial Sequence: Synthetic oligonucleotide
  Sense strand starting at position 3799 of SEQ ID NO: 1241543
accagauacauccguggaa

SEQ ID NO: 1280559 - RNA, 19 nt, Artificial Sequence
  Description of Artificial Sequence: Synthetic oligonucleotide
  Antisense strand to SEQ ID NO: 1280558
uuccacggauguaucuggu

SEQ ID NO: 1280560 - RNA, 19 nt, Artificial Sequence
  Description of Artificial Sequence: Synthetic oligonucleotide
  Sense strand starting at position 3800 of SEQ ID NO: 1241543
ccagauacauccguggaau

SEQ ID NO: 1280561 - RNA, 19 nt, Artificial Sequence
  Description of Artificial Sequence: Synthetic oligonucleotide
  Antisense strand to SEQ ID NO: 1280560
auuccacggauguaucugg

SEQ ID NO: 1280562 - RNA, 19 nt, Artificial Sequence
  Description of Artificial Sequence: Synthetic oligonucleotide
  Sense strand starting at position 3801 of SEQ ID NO: 1241543
cagauacauccguggaauc

SEQ ID NO: 1280563 - RNA, 19 nt, Artificial Sequence
  Description of Artificial Sequence: Synthetic oligonucleotide
  Antisense strand to SEQ ID NO: 1280562
gauuccacggauguaucug

SEQ ID NO: 1280564 - RNA, 19 nt, Artificial Sequence
  Description of Artificial Sequence: Synthetic oligonucleotide
  Sense strand starting at position 3861 of SEQ ID NO: 1241543
gcaguaucuggaggauaug

SEQ ID NO: 1280565 - RNA, 19 nt, Artificial Sequence
  Description of Artificial Sequence: Synthetic oligonucleotide
  Antisense strand to SEQ ID NO: 1280564
cauauccuccagauacugc

SEQ ID NO: 1280566 - RNA, 19 nt, Artificial Sequence
  Description of Artificial Sequence: Synthetic oligonucleotide
  Sense strand starting at position 3937 of SEQ ID NO: 1241543
gguguuguaagccaaugga

SEQ ID NO: 1280567 - RNA, 19 nt, Artificial Sequence
  Description of Artificial Sequence: Synthetic oligonucleotide
  Antisense strand to SEQ ID NO: 1280566
uccauuggcuuacaacacc

SEQ ID NO: 1280568 - RNA, 19 nt, Artificial Sequence
  Description of Artificial Sequence: Synthetic oligonucleotide
  Sense strand starting at position 100 of SEQ ID NO: 1241544
auaucuggugguuauguaa

SEQ ID NO: 1280569 - RNA, 19 nt, Artificial Sequence
  Description of Artificial Sequence: Synthetic oligonucleotide
  Antisense strand to SEQ ID NO: 1280568
uuacauaaccaccagauau

SEQ ID NO: 1280570 - RNA, 19 nt, Artificial Sequence
  Description of Artificial Sequence: Synthetic oligonucleotide
  Sense strand starting at position 121 of SEQ ID NO: 1241544
ugauacagcuccuuuggga

SEQ ID NO: 1280571 - RNA, 19 nt, Artificial Sequence
  Description of Artificial Sequence: Synthetic oligonucleotide
  Antisense strand to SEQ ID NO: 1280570
ucccaaaggagcuguauca

SEQ ID NO: 1280572 - RNA, 19 nt, Artificial Sequence
  Description of Artificial Sequence: Synthetic oligonucleotide
  Sense strand starting at position 513 of SEQ ID NO: 1241544
acagauuaguaauugcuua

SEQ ID NO: 1280573 - RNA, 19 nt, Artificial Sequence
  Description of Artificial Sequence: Synthetic oligonucleotide
  Antisense strand to SEQ ID NO: 1280572
uaagcaauuacuaaucugu

SEQ ID NO: 1280574 - RNA, 19 nt, Artificial Sequence
  Description of Artificial Sequence: Synthetic oligonucleotide
  Sense strand starting at position 617 of SEQ ID NO: 1241544
caaacuugacugugguaag

SEQ ID NO: 1280575 - RNA, 19 nt, Artificial Sequence
  Description of Artificial Sequence: Synthetic oligonucleotide
  Antisense strand to SEQ ID NO: 1280574
cuuaccacagucaaguuug

SEQ ID NO: 1280576 - RNA, 19 nt, Artificial Sequence
  Description of Artificial Sequence: Synthetic oligonucleotide
  Sense strand starting at position 646 of SEQ ID NO: 1241544
uucuauaaaugggugaauu

SEQ ID NO: 1280577 - RNA, 19 nt, Artificial Sequence
  Description of Artificial Sequence: Synthetic oligonucleotide
  Antisense strand to SEQ ID NO: 1280576
aauucacccauuuauagaa

SEQ ID NO: 1280578 - RNA, 19 nt, Artificial Sequence
  Description of Artificial Sequence: Synthetic oligonucleotide
  Sense strand starting at position 647 of SEQ ID NO: 1241544
ucuauaaaugggugaauug

SEQ ID NO: 1280579 - RNA, 19 nt, Artificial Sequence
  Description of Artificial Sequence: Synthetic oligonucleotide
  Antisense strand to SEQ ID NO: 1280578
caauucacccauuuauaga

SEQ ID NO: 1280580 - RNA, 19 nt, Artificial Sequence
  Description of Artificial Sequence: Synthetic oligonucleotide
  Sense strand starting at position 658 of SEQ ID NO: 1241544
gugaauuguauugaaugua

SEQ ID NO: 1280581 - RNA, 19 nt, Artificial Sequence
  Description of Artificial Sequence: Synthetic oligonucleotide
  Antisense strand to SEQ ID NO: 1280580
uacauucaauacaauucac

SEQ ID NO: 1280582 - RNA, 19 nt, Artificial Sequence
  Description of Artificial Sequence: Synthetic oligonucleotide
  Sense strand starting at position 865 of SEQ ID NO: 1241544
gcgugaguggcgguggaua

SEQ ID NO: 1280583 - RNA, 19 nt, Artificial Sequence
  Description of Artificial Sequence: Synthetic oligonucleotide
  Antisense strand to SEQ ID NO: 1280582
uauccaccgccacucacgc

SEQ ID NO: 1280584 - RNA, 19 nt, Artificial Sequence
  Description of Artificial Sequence: Synthetic oligonucleotide
  Sense strand starting at position 1041 of SEQ ID NO: 1241544
aguaaauucugguccugga

SEQ ID NO: 1280585 - RNA, 19 nt, Artificial Sequence
  Description of Artificial Sequence: Synthetic oligonucleotide
  Antisense strand to SEQ ID NO: 1280584
uccaggaccagaauuuacu

SEQ ID NO: 1280586 - RNA, 19 nt, Artificial Sequence
  Description of Artificial Sequence: Synthetic oligonucleotide
  Sense strand starting at position 1045 of SEQ ID NO: 1241544
aauucugguccuggagaga

SEQ ID NO: 1280587 - RNA, 19 nt, Artificial Sequence
  Description of Artificial Sequence: Synthetic oligonucleotide
  Antisense strand to SEQ ID NO: 1280586
ucucuccaggaccagaauu

SEQ ID NO: 1280588 - RNA, 19 nt, Artificial Sequence
  Description of Artificial Sequence: Synthetic oligonucleotide
  Sense strand starting at position 1078 of SEQ ID NO: 1241544
gacagaggucgagaucagu

SEQ ID NO: 1280589 - RNA, 19 nt, Artificial Sequence
  Description of Artificial Sequence: Synthetic oligonucleotide
  Antisense strand to SEQ ID NO: 1280588
acugaucucgaccucuguc

SEQ ID NO: 1280590 - RNA, 19 nt, Artificial Sequence
  Description of Artificial Sequence: Synthetic oligonucleotide
  Sense strand starting at position 1130 of SEQ ID NO: 1241544
aguugaacaauucggacaa

SEQ ID NO: 1280591 - RNA, 19 nt, Artificial Sequence
  Description of Artificial Sequence: Synthetic oligonucleotide
  Antisense strand to SEQ ID NO: 1280590
uuguccgaauuguucaacu

SEQ ID NO: 1280592 - RNA, 19 nt, Artificial Sequence
  Description of Artificial Sequence: Synthetic oligonucleotide
  Sense strand starting at position 1150 of SEQ ID NO: 1241544
agagguuuaguuggagaua

SEQ ID NO: 1280593 - RNA, 19 nt, Artificial Sequence
  Description of Artificial Sequence: Synthetic oligonucleotide
  Antisense strand to SEQ ID NO: 1280592
uaucuccaacuaaaccucu

SEQ ID NO: 1280594 - RNA, 19 nt, Artificial Sequence
  Description of Artificial Sequence: Synthetic oligonucleotide
  Sense strand starting at position 1153 of SEQ ID NO: 1241544
gguuuaguuggagauauug

SEQ ID NO: 1280595 - RNA, 19 nt, Artificial Sequence
  Description of Artificial Sequence: Synthetic oligonucleotide
  Antisense strand to SEQ ID NO: 1280594
caauaucuccaacuaaacc

SEQ ID NO: 1280596 - RNA, 19 nt, Artificial Sequence
  Description of Artificial Sequence: Synthetic oligonucleotide
  Sense strand starting at position 1163 of SEQ ID NO: 1241544
gagauauugcgagaguaca

SEQ ID NO: 1280597 - RNA, 19 nt, Artificial Sequence
  Description of Artificial Sequence: Synthetic oligonucleotide
  Antisense strand to SEQ ID NO: 1280596
uguacucucgcaauaucuc

SEQ ID NO: 1280598 - RNA, 19 nt, Artificial Sequence
  Description of Artificial Sequence: Synthetic oligonucleotide
  Sense strand starting at position 2280 of SEQ ID NO: 1241544
aucgcuaucgccucaguuu

SEQ ID NO: 1280599 - RNA, 19 nt, Artificial Sequence
  Description of Artificial Sequence: Synthetic oligonucleotide
  Antisense strand to SEQ ID NO: 1280598
aaacugaggcgauagcgau

SEQ ID NO: 1280600 - RNA, 19 nt, Artificial Sequence
  Description of Artificial Sequence: Synthetic oligonucleotide
  Sense strand starting at position 2341 of SEQ ID NO: 1241544
agaaacguguuauuaagau

SEQ ID NO: 1280601 - RNA, 19 nt, Artificial Sequence
  Description of Artificial Sequence: Synthetic oligonucleotide
  Antisense strand to SEQ ID NO: 1280600
aucuuaauaacacguuucu

SEQ ID NO: 1280602 - RNA, 19 nt, Artificial Sequence
  Description of Artificial Sequence: Synthetic oligonucleotide
  Sense strand starting at position 2377 of SEQ ID NO: 1241544
gaguuccggcguuccaauu

SEQ ID NO: 1280603 - RNA, 19 nt, Artificial Sequence
  Description of Artificial Sequence: Synthetic oligonucleotide
  Antisense strand to SEQ ID NO: 1280602
aauuggaacgccggaacuc

SEQ ID NO: 1280604 - RNA, 19 nt, Artificial Sequence
  Description of Artificial Sequence: Synthetic oligonucleotide
  Sense strand starting at position 2659 of SEQ ID NO: 1241544
cuaacuugucgguaucaag

SEQ ID NO: 1280605 - RNA, 19 nt, Artificial Sequence
  Description of Artificial Sequence: Synthetic oligonucleotide
  Antisense strand to SEQ ID NO: 1280604
cuugauaccgacaaguuag

SEQ ID NO: 1280606 - RNA, 19 nt, Artificial Sequence
  Description of Artificial Sequence: Synthetic oligonucleotide
  Sense strand starting at position 2693 of SEQ ID NO: 1241544
ccaugugauuggguagaug

SEQ ID NO: 1280607 - RNA, 19 nt, Artificial Sequence
  Description of Artificial Sequence: Synthetic oligonucleotide
  Antisense strand to SEQ ID NO: 1280606
caucuacccaaucacaugg

SEQ ID NO: 1280608 - RNA, 19 nt, Artificial Sequence
  Description of Artificial Sequence: Synthetic oligonucleotide
  Sense strand starting at position 2742 of SEQ ID NO: 1241544
agaugacuuguggacuguu

SEQ ID NO: 1280609 - RNA, 19 nt, Artificial Sequence
  Description of Artificial Sequence: Synthetic oligonucleotide
  Antisense strand to SEQ ID NO: 1280608
aacaguccacaagucaucu

SEQ ID NO: 1280610 - RNA, 19 nt, Artificial Sequence
  Description of Artificial Sequence: Synthetic oligonucleotide
  Sense strand starting at position 2942 of SEQ ID NO: 1241544
uuaagauauuguguccaga

SEQ ID NO: 1280611 - RNA, 19 nt, Artificial Sequence
  Description of Artificial Sequence: Synthetic oligonucleotide
  Antisense strand to SEQ ID NO: 1280610
ucuggacacaauaucuuaa

SEQ ID NO: 1280612 - RNA, 19 nt, Artificial Sequence
  Description of Artificial Sequence: Synthetic oligonucleotide
  Sense strand starting at position 2945 of SEQ ID NO: 1241544
agauauuguguccagagca

SEQ ID NO: 1280613 - RNA, 19 nt, Artificial Sequence
  Description of Artificial Sequence: Synthetic oligonucleotide
  Antisense strand to SEQ ID NO: 1280612
ugcucuggacacaauaucu

SEQ ID NO: 1280614 - RNA, 19 nt, Artificial Sequence
  Description of Artificial Sequence: Synthetic oligonucleotide
  Sense strand starting at position 3147 of SEQ ID NO: 1241544
agaguaccacauuaagcau

SEQ ID NO: 1280615 - RNA, 19 nt, Artificial Sequence
  Description of Artificial Sequence: Synthetic oligonucleotide
  Antisense strand to SEQ ID NO: 1280614
augcuuaaugugguacucu

SEQ ID NO: 1280616 - RNA, 19 nt, Artificial Sequence
  Description of Artificial Sequence: Synthetic oligonucleotide
  Sense strand starting at position 3231 of SEQ ID NO: 1241544
ucaggaagucuggguugaa

SEQ ID NO: 1280617 - RNA, 19 nt, Artificial Sequence
  Description of Artificial Sequence: Synthetic oligonucleotide
  Antisense strand to SEQ ID NO: 1280616
uucaacccagacuuccuga

SEQ ID NO: 1280618 - RNA, 19 nt, Artificial Sequence
  Description of Artificial Sequence: Synthetic oligonucleotide
  Sense strand starting at position 3232 of SEQ ID NO: 1241544
caggaagucuggguugaaa

SEQ ID NO: 1280619 - RNA, 19 nt, Artificial Sequence
  Description of Artificial Sequence: Synthetic oligonucleotide
  Antisense strand to SEQ ID NO: 1280618
uuucaacccagacuuccug

SEQ ID NO: 1280620 - RNA, 19 nt, Artificial Sequence
  Description of Artificial Sequence: Synthetic oligonucleotide
  Sense strand starting at position 3273 of SEQ ID NO: 1241544
uugugagaucuugagguua

SEQ ID NO: 1280621 - RNA, 19 nt, Artificial Sequence
  Description of Artificial Sequence: Synthetic oligonucleotide
  Antisense strand to SEQ ID NO: 1280620
uaaccucaagaucucacaa

SEQ ID NO: 1280622 - RNA, 19 nt, Artificial Sequence
  Description of Artificial Sequence: Synthetic oligonucleotide
  Sense strand starting at position 3362 of SEQ ID NO: 1241544
agaguuaugucauuggauu

SEQ ID NO: 1280623 - RNA, 19 nt, Artificial Sequence
  Description of Artificial Sequence: Synthetic oligonucleotide
  Antisense strand to SEQ ID NO: 1280622
aauccaaugacauaacucu

SEQ ID NO: 1280624 - RNA, 19 nt, Artificial Sequence
  Description of Artificial Sequence: Synthetic oligonucleotide
  Sense strand starting at position 3397 of SEQ ID NO: 1241544
aauugcuuagcagaguaaa

SEQ ID NO: 1280625 - RNA, 19 nt, Artificial Sequence
  Description of Artificial Sequence: Synthetic oligonucleotide
  Antisense strand to SEQ ID NO: 1280624
uuuacucugcuaagcaauu

SEQ ID NO: 1280626 - RNA, 19 nt, Artificial Sequence
  Description of Artificial Sequence: Synthetic oligonucleotide
  Sense strand starting at position 3432 of SEQ ID NO: 1241544
cuuaguaaggaugagcuau

SEQ ID NO: 1280627 - RNA, 19 nt, Artificial Sequence
  Description of Artificial Sequence: Synthetic oligonucleotide
  Antisense strand to SEQ ID NO: 1280626
auagcucauccuuacuaag

SEQ ID NO: 1280628 - RNA, 19 nt, Artificial Sequence
  Description of Artificial Sequence: Synthetic oligonucleotide
  Sense strand starting at position 3434 of SEQ ID NO: 1241544
uaguaaggaugagcuauua

SEQ ID NO: 1280629 - RNA, 19 nt, Artificial Sequence
  Description of Artificial Sequence: Synthetic oligonucleotide
  Antisense strand to SEQ ID NO: 1280628
uaauagcucauccuuacua

SEQ ID NO: 1280630 - RNA, 19 nt, Artificial Sequence
  Description of Artificial Sequence: Synthetic oligonucleotide
  Sense strand starting at position 3445 of SEQ ID NO: 1241544
agcuauuaucuuuauguag

SEQ ID NO: 1280631 - RNA, 19 nt, Artificial Sequence
  Description of Artificial Sequence: Synthetic oligonucleotide
  Antisense strand to SEQ ID NO: 1280630
cuacauaaagauaauagcu

SEQ ID NO: 1280632 - RNA, 19 nt, Artificial Sequence
  Description of Artificial Sequence: Synthetic oligonucleotide
  Sense strand starting at position 3463 of SEQ ID NO: 1241544
gagagucuguauuuaugcu

SEQ ID NO: 1280633 - RNA, 19 nt, Artificial Sequence
  Description of Artificial Sequence: Synthetic oligonucleotide
  Antisense strand to SEQ ID NO: 1280632
agcauaaauacagacucuc

SEQ ID NO: 1280634 - RNA, 19 nt, Artificial Sequence
  Description of Artificial Sequence: Synthetic oligonucleotide
  Sense strand starting at position 3488 of SEQ ID NO: 1241544
ucucaugggcauuacauau

SEQ ID NO: 1280635 - RNA, 19 nt, Artificial Sequence
  Description of Artificial Sequence: Synthetic oligonucleotide
  Antisense strand to SEQ ID NO: 1280634
auauguaaugcccaugaga

SEQ ID NO: 1280636 - RNA, 19 nt, Artificial Sequence
  Description of Artificial Sequence: Synthetic oligonucleotide
  Sense strand starting at position 3667 of SEQ ID NO: 1241544
agggaauagugguuccuau

SEQ ID NO: 1280637 - RNA, 19 nt, Artificial Sequence
  Description of Artificial Sequence: Synthetic oligonucleotide
  Antisense strand to SEQ ID NO: 1280636
auaggaaccacuauucccu

SEQ ID NO: 1280638 - RNA, 19 nt, Artificial Sequence
  Description of Artificial Sequence: Synthetic oligonucleotide
  Sense strand starting at position 3701 of SEQ ID NO: 1241544
cuaauugcugcagauauaa

SEQ ID NO: 1280639 - RNA, 19 nt, Artificial Sequence
  Description of Artificial Sequence: Synthetic oligonucleotide
  Antisense strand to SEQ ID NO: 1280638
uuauaucugcagcaauuag

SEQ ID NO: 1280640 - RNA, 19 nt, Artificial Sequence
  Description of Artificial Sequence: Synthetic oligonucleotide
  Sense strand starting at position 3795 of SEQ ID NO: 1241544
ggacaucaguaauuacagu

SEQ ID NO: 1280641 - RNA, 19 nt, Artificial Sequence
  Description of Artificial Sequence: Synthetic oligonucleotide
  Antisense strand to SEQ ID NO: 1280640
acuguaauuacugaugucc

SEQ ID NO: 1280642 - RNA, 19 nt, Artificial Sequence
  Description of Artificial Sequence: Synthetic oligonucleotide
  Sense strand starting at position 3814 of SEQ ID NO: 1241544
guaugugauaaacagguau

SEQ ID NO: 1280643 - RNA, 19 nt, Artificial Sequence
  Description of Artificial Sequence: Synthetic oligonucleotide
  Antisense strand to SEQ ID NO: 1280642
auaccuguuuaucacauac

SEQ ID NO: 1280644 - RNA, 19 nt, Artificial Sequence
  Description of Artificial Sequence: Synthetic oligonucleotide
  Sense strand starting at position 3874 of SEQ ID NO: 1241544
gaaauuaaggaugguugca

SEQ ID NO: 1280645 - RNA, 19 nt, Artificial Sequence
  Description of Artificial Sequence: Synthetic oligonucleotide
  Antisense strand to SEQ ID NO: 1280644
ugcaaccauccuuaauuuc

SEQ ID NO: 1280646 - RNA, 19 nt, Artificial Sequence
  Description of Artificial Sequence: Synthetic oligonucleotide
  Sense strand starting at position 3876 of SEQ ID NO: 1241544
aauuaaggaugguugcaau

SEQ ID NO: 1280647 - RNA, 19 nt, Artificial Sequence
  Description of Artificial Sequence: Synthetic oligonucleotide
  Antisense strand to SEQ ID NO: 1280646
auugcaaccauccuuaauu

SEQ ID NO: 1280648 - RNA, 19 nt, Artificial Sequence
  Description of Artificial Sequence: Synthetic oligonucleotide
  Sense strand starting at position 45 of SEQ ID NO: 1241545
aaaguucuggcauacguua

SEQ ID NO: 1280649 - RNA, 19 nt, Artificial Sequence
  Description of Artificial Sequence: Synthetic oligonucleotide
  Antisense strand to SEQ ID NO: 1280648
uaacguaugccagaacuuu

SEQ ID NO: 1280650 - RNA, 19 nt, Artificial Sequence
  Description of Artificial Sequence: Synthetic oligonucleotide
  Sense strand starting at position 61 of SEQ ID NO: 1241545
uuaaucuuccgcgucaagu

SEQ ID NO: 1280651 - RNA, 19 nt, Artificial Sequence
  Description of Artificial Sequence: Synthetic oligonucleotide
  Antisense strand to SEQ ID NO: 1280650
acuugacgcggaagauuaa

SEQ ID NO: 1280652 - RNA, 19 nt, Artificial Sequence
  Description of Artificial Sequence: Synthetic oligonucleotide
  Sense strand starting at position 62 of SEQ ID NO: 1241545
uaaucuuccgcgucaaguu

SEQ ID NO: 1280653 - RNA, 19 nt, Artificial Sequence
  Description of Artificial Sequence: Synthetic oligonucleotide
  Antisense strand to SEQ ID NO: 1280652
aacuugacgcggaagauua

SEQ ID NO: 1280654 - RNA, 19 nt, Artificial Sequence
  Description of Artificial Sequence: Synthetic oligonucleotide
  Sense strand starting at position 136 of SEQ ID NO: 1241545
uuagguugggcugaaguua

SEQ ID NO: 1280655 - RNA, 19 nt, Artificial Sequence
  Description of Artificial Sequence: Synthetic oligonucleotide
  Antisense strand to SEQ ID NO: 1280654
uaacuucagcccaaccuaa

SEQ ID NO: 1280656 - RNA, 19 nt, Artificial Sequence
  Description of Artificial Sequence: Synthetic oligonucleotide
  Sense strand starting at position 203 of SEQ ID NO: 1241545
uccugugaacccugauauu

SEQ ID NO: 1280657 - RNA, 19 nt, Artificial Sequence
  Description of Artificial Sequence: Synthetic oligonucleotide
  Antisense strand to SEQ ID NO: 1280656
aauaucaggguucacagga

SEQ ID NO: 1280658 - RNA, 19 nt, Artificial Sequence
  Description of Artificial Sequence: Synthetic oligonucleotide
  Sense strand starting at position 223 of SEQ ID NO: 1241545
gucuuugaagugcaauuaa

SEQ ID NO: 1280659 - RNA, 19 nt, Artificial Sequence
  Description of Artificial Sequence: Synthetic oligonucleotide
  Antisense strand to SEQ ID NO: 1280658
uuaauugcacuucaaagac

SEQ ID NO: 1280660 - RNA, 19 nt, Artificial Sequence
  Description of Artificial Sequence: Synthetic oligonucleotide
  Sense strand starting at position 234 of SEQ ID NO: 1241545
gcaauuaagauguagguga

SEQ ID NO: 1280661 - RNA, 19 nt, Artificial Sequence
  Description of Artificial Sequence: Synthetic oligonucleotide
  Antisense strand to SEQ ID NO: 1280660
ucaccuacaucuuaauugc

SEQ ID NO: 1280662 - RNA, 19 nt, Artificial Sequence
  Description of Artificial Sequence: Synthetic oligonucleotide
  Sense strand starting at position 357 of SEQ ID NO: 1241545
aguugugcggugucuggaa

SEQ ID NO: 1280663 - RNA, 19 nt, Artificial Sequence
  Description of Artificial Sequence: Synthetic oligonucleotide
  Antisense strand to SEQ ID NO: 1280662
uuccagacaccgcacaacu

SEQ ID NO: 1280664 - RNA, 19 nt, Artificial Sequence
  Description of Artificial Sequence: Synthetic oligonucleotide
  Sense strand starting at position 468 of SEQ ID NO: 1241545
ugagucuucccacagccau

SEQ ID NO: 1280665 - RNA, 19 nt, Artificial Sequence
  Description of Artificial Sequence: Synthetic oligonucleotide
  Antisense strand to SEQ ID NO: 1280664
auggcugugggaagacuca

SEQ ID NO: 1280666 - RNA, 19 nt, Artificial Sequence
  Description of Artificial Sequence: Synthetic oligonucleotide
  Sense strand starting at position 481 of SEQ ID NO: 1241545
agccaugacuccucauaug

SEQ ID NO: 1280667 - RNA, 19 nt, Artificial Sequence
  Description of Artificial Sequence: Synthetic oligonucleotide
  Antisense strand to SEQ ID NO: 1280666
cauaugaggagucauggcu

SEQ ID NO: 1280668 - RNA, 19 nt, Artificial Sequence
  Description of Artificial Sequence: Synthetic oligonucleotide
  Sense strand starting at position 527 of SEQ ID NO: 1241545
ggauguucugaauacaggu

SEQ ID NO: 1280669 - RNA, 19 nt, Artificial Sequence
  Description of Artificial Sequence: Synthetic oligonucleotide
  Antisense strand to SEQ ID NO: 1280668
accuguauucagaacaucc

SEQ ID NO: 1280670 - RNA, 19 nt, Artificial Sequence
  Description of Artificial Sequence: Synthetic oligonucleotide
  Sense strand starting at position 570 of SEQ ID NO: 1241545
gcggguucccagagcgaca

SEQ ID NO: 1280671 - RNA, 19 nt, Artificial Sequence
  Description of Artificial Sequence: Synthetic oligonucleotide
  Antisense strand to SEQ ID NO: 1280670
ugucgcucugggaacccgc

SEQ ID NO: 1280672 - RNA, 19 nt, Artificial Sequence
  Description of Artificial Sequence: Synthetic oligonucleotide
  Sense strand starting at position 726 of SEQ ID NO: 1241545
uggcuuauuaaggguaaac

SEQ ID NO: 1280673 - RNA, 19 nt, Artificial Sequence
  Description of Artificial Sequence: Synthetic oligonucleotide
  Antisense strand to SEQ ID NO: 1280672
guuuacccuuaauaagcca

SEQ ID NO: 1280674 - RNA, 19 nt, Artificial Sequence
  Description of Artificial Sequence: Synthetic oligonucleotide
  Sense strand starting at position 746 of SEQ ID NO: 1241545
auagaaaugucacaaggaa

SEQ ID NO: 1280675 - RNA, 19 nt, Artificial Sequence
  Description of Artificial Sequence: Synthetic oligonucleotide
  Antisense strand to SEQ ID NO: 1280674
uuccuugugacauuucuau

SEQ ID NO: 1280676 - RNA, 19 nt, Artificial Sequence
  Description of Artificial Sequence: Synthetic oligonucleotide
  Sense strand starting at position 785 of SEQ ID NO: 1241545
cucuaauugcugccguuua

SEQ ID NO: 1280677 - RNA, 19 nt, Artificial Sequence
  Description of Artificial Sequence: Synthetic oligonucleotide
  Antisense strand to SEQ ID NO: 1280676
uaaacggcagcaauuagag

SEQ ID NO: 1280678 - RNA, 19 nt, Artificial Sequence
  Description of Artificial Sequence: Synthetic oligonucleotide
  Sense strand starting at position 789 of SEQ ID NO: 1241545
aauugcugccguuuaacga

SEQ ID NO: 1280679 - RNA, 19 nt, Artificial Sequence
  Description of Artificial Sequence: Synthetic oligonucleotide
  Antisense strand to SEQ ID NO: 1280678
ucguuaaacggcagcaauu

SEQ ID NO: 1280680 - RNA, 19 nt, Artificial Sequence
  Description of Artificial Sequence: Synthetic oligonucleotide
  Sense strand starting at position 1382 of SEQ ID NO: 1241545
gcccgaguucuggccacuu

SEQ ID NO: 1280681 - RNA, 19 nt, Artificial Sequence
  Description of Artificial Sequence: Synthetic oligonucleotide
  Antisense strand to SEQ ID NO: 1280680
aaguggccagaacucgggc

SEQ ID NO: 1280682 - RNA, 19 nt, Artificial Sequence
  Description of Artificial Sequence: Synthetic oligonucleotide
  Sense strand starting at position 2227 of SEQ ID NO: 1241545
guguuauguaaacauagag

SEQ ID NO: 1280683 - RNA, 19 nt, Artificial Sequence
  Description of Artificial Sequence: Synthetic oligonucleotide
  Antisense strand to SEQ ID NO: 1280682
cucuauguuuacauaacac

SEQ ID NO: 1280684 - RNA, 19 nt, Artificial Sequence
  Description of Artificial Sequence: Synthetic oligonucleotide
  Sense strand starting at position 2418 of SEQ ID NO: 1241545
uggaguucgaugggauuaa

SEQ ID NO: 1280685 - RNA, 19 nt, Artificial Sequence
  Description of Artificial Sequence: Synthetic oligonucleotide
  Antisense strand to SEQ ID NO: 1280684
uuaaucccaucgaacucca

SEQ ID NO: 1280686 - RNA, 19 nt, Artificial Sequence
  Description of Artificial Sequence: Synthetic oligonucleotide
  Sense strand starting at position 2422 of SEQ ID NO: 1241545
guucgaugggauuaacuuc

SEQ ID NO: 1280687 - RNA, 19 nt, Artificial Sequence
  Description of Artificial Sequence: Synthetic oligonucleotide
  Antisense strand to SEQ ID NO: 1280686
gaaguuaaucccaucgaac

SEQ ID NO: 1280688 - RNA, 19 nt, Artificial Sequence
  Description of Artificial Sequence: Synthetic oligonucleotide
  Sense strand starting at position 2430 of SEQ ID NO: 1241545
ggauuaacuuccucuccga

SEQ ID NO: 1280689 - RNA, 19 nt, Artificial Sequence
  Description of Artificial Sequence: Synthetic oligonucleotide
  Antisense strand to SEQ ID NO: 1280688
ucggagaggaaguuaaucc

SEQ ID NO: 1280690 - RNA, 19 nt, Artificial Sequence
  Description of Artificial Sequence: Synthetic oligonucleotide
  Sense strand starting at position 2438 of SEQ ID NO: 1241545
uuccucuccgaguagaaua

SEQ ID NO: 1280691 - RNA, 19 nt, Artificial Sequence
  Description of Artificial Sequence: Synthetic oligonucleotide
  Antisense strand to SEQ ID NO: 1280690
uauucuacucggagaggaa

SEQ ID NO: 1280692 - RNA, 19 nt, Artificial Sequence
  Description of Artificial Sequence: Synthetic oligonucleotide
  Sense strand starting at position 2647 of SEQ ID NO: 1241545
ccggcuuguggucaauaga

SEQ ID NO: 1280693 - RNA, 19 nt, Artificial Sequence
  Description of Artificial Sequence: Synthetic oligonucleotide
  Antisense strand to SEQ ID NO: 1280692
ucuauugaccacaagccgg

SEQ ID NO: 1280694 - RNA, 19 nt, Artificial Sequence
  Description of Artificial Sequence: Synthetic oligonucleotide
  Sense strand starting at position 2778 of SEQ ID NO: 1241545
gaaauuaccuggguggacu

SEQ ID NO: 1280695 - RNA, 19 nt, Artificial Sequence
  Description of Artificial Sequence: Synthetic oligonucleotide
  Antisense strand to SEQ ID NO: 1280694
aguccacccagguaauuuc

SEQ ID NO: 1280696 - RNA, 19 nt, Artificial Sequence
  Description of Artificial Sequence: Synthetic oligonucleotide
  Sense strand starting at position 2804 of SEQ ID NO: 1241545
gaacguaaauguuccuuua

SEQ ID NO: 1280697 - RNA, 19 nt, Artificial Sequence
  Description of Artificial Sequence: Synthetic oligonucleotide
  Antisense strand to SEQ ID NO: 1280696
uaaaggaacauuuacguuc

SEQ ID NO: 1280698 - RNA, 19 nt, Artificial Sequence
  Description of Artificial Sequence: Synthetic oligonucleotide
  Sense strand starting at position 2894 of SEQ ID NO: 1241545
uaucguagacuguauaguu

SEQ ID NO: 1280699 - RNA, 19 nt, Artificial Sequence
  Description of Artificial Sequence: Synthetic oligonucleotide
  Antisense strand to SEQ ID NO: 1280698
aacuauacagucuacgaua

SEQ ID NO: 1280700 - RNA, 19 nt, Artificial Sequence
  Description of Artificial Sequence: Synthetic oligonucleotide
  Sense strand starting at position 3081 of SEQ ID NO: 1241545
uggcuaugacccgaagcaa

SEQ ID NO: 1280701 - RNA, 19 nt, Artificial Sequence
  Description of Artificial Sequence: Synthetic oligonucleotide
  Antisense strand to SEQ ID NO: 1280700
uugcuucgggucauagcca

SEQ ID NO: 1280702 - RNA, 19 nt, Artificial Sequence
  Description of Artificial Sequence: Synthetic oligonucleotide
  Sense strand starting at position 3160 of SEQ ID NO: 1241545
guguaacauucucugacag

SEQ ID NO: 1280703 - RNA, 19 nt, Artificial Sequence
  Description of Artificial Sequence: Synthetic oligonucleotide
  Antisense strand to SEQ ID NO: 1280702
cugucagagaauguuacac

SEQ ID NO: 1280704 - RNA, 19 nt, Artificial Sequence
  Description of Artificial Sequence: Synthetic oligonucleotide
  Sense strand starting at position 3177 of SEQ ID NO: 1241545
agguuauuacgguagugac

SEQ ID NO: 1280705 - RNA, 19 nt, Artificial Sequence
  Description of Artificial Sequence: Synthetic oligonucleotide
  Antisense strand to SEQ ID NO: 1280704
gucacuaccguaauaaccu

SEQ ID NO: 1280706 - RNA, 19 nt, Artificial Sequence
  Description of Artificial Sequence: Synthetic oligonucleotide
  Sense strand starting at position 3191 of SEQ ID NO: 1241545
gugacaugauguuucugau

SEQ ID NO: 1280707 - RNA, 19 nt, Artificial Sequence
  Description of Artificial Sequence: Synthetic oligonucleotide
  Antisense strand to SEQ ID NO: 1280706
aucagaaacaucaugucac

SEQ ID NO: 1280708 - RNA, 19 nt, Artificial Sequence
  Description of Artificial Sequence: Synthetic oligonucleotide
  Sense strand starting at position 3582 of SEQ ID NO: 1241545
cugucagaaucauucugca

SEQ ID NO: 1280709 - RNA, 19 nt, Artificial Sequence
  Description of Artificial Sequence: Synthetic oligonucleotide
  Antisense strand to SEQ ID NO: 1280708
ugcagaaugauucugacag

SEQ ID NO: 1280710 - RNA, 19 nt, Artificial Sequence
  Description of Artificial Sequence: Synthetic oligonucleotide
  Sense strand starting at position 3604 of SEQ ID NO: 1241545
gcgccgucacgauuacgau

SEQ ID NO: 1280711 - RNA, 19 nt, Artificial Sequence
  Description of Artificial Sequence: Synthetic oligonucleotide
  Antisense strand to SEQ ID NO: 1280710
aucguaaucgugacggcgc

SEQ ID NO: 1280712 - RNA, 19 nt, Artificial Sequence
  Description of Artificial Sequence: Synthetic oligonucleotide
  Sense strand starting at position 3729 of SEQ ID NO: 1241545
gugcguugcauugcauuau

SEQ ID NO: 1280713 - RNA, 19 nt, Artificial Sequence
  Description of Artificial Sequence: Synthetic oligonucleotide
  Antisense strand to SEQ ID NO: 1280712
auaaugcaaugcaacgcac

SEQ ID NO: 1280714 - RNA, 19 nt, Artificial Sequence
  Description of Artificial Sequence: Synthetic oligonucleotide
  Sense strand starting at position 3846 of SEQ ID NO: 1241545
ggcugagaguuucccauag

SEQ ID NO: 1280715 - RNA, 19 nt, Artificial Sequence
  Description of Artificial Sequence: Synthetic oligonucleotide
  Antisense strand to SEQ ID NO: 1280714
cuaugggaaacucucagcc

SEQ ID NO: 1280716 - RNA, 19 nt, Artificial Sequence
  Description of Artificial Sequence: Synthetic oligonucleotide
  Sense strand starting at position 3928 of SEQ ID NO: 1241545
agggacaugucucucuacu

SEQ ID NO: 1280717 - RNA, 19 nt, Artificial Sequence
  Description of Artificial Sequence: Synthetic oligonucleotide
  Antisense strand to SEQ ID NO: 1280716
aguagagagacaugucccu

SEQ ID NO: 1280718 - RNA, 19 nt, Artificial Sequence
  Description of Artificial Sequence: Synthetic oligonucleotide
  Sense strand starting at position 3930 of SEQ ID NO: 1241545
ggacaugucucucuacucu

SEQ ID NO: 1280719 - RNA, 19 nt, Artificial Sequence
  Description of Artificial Sequence: Synthetic oligonucleotide
  Antisense strand to SEQ ID NO: 1280718
agaguagagagacaugucc

SEQ ID NO: 1280720 - RNA, 19 nt, Artificial Sequence
  Description of Artificial Sequence: Synthetic oligonucleotide
  Sense strand starting at position 3950 of SEQ ID NO: 1241545
ccaacaugucuuugagaau

SEQ ID NO: 1280721 - RNA, 19 nt, Artificial Sequence
  Description of Artificial Sequence: Synthetic oligonucleotide
  Antisense strand to SEQ ID NO: 1280720
auucucaaagacauguugg

SEQ ID NO: 1280722 - RNA, 19 nt, Artificial Sequence
  Description of Artificial Sequence: Synthetic oligonucleotide
  Sense strand starting at position 3956 of SEQ ID NO: 1241545
ugucuuugagaauguuuau

SEQ ID NO: 1280723 - RNA, 19 nt, Artificial Sequence
  Description of Artificial Sequence: Synthetic oligonucleotide
  Antisense strand to SEQ ID NO: 1280722
auaaacauucucaaagaca

SEQ ID NO: 1280724 - RNA, 19 nt, Artificial Sequence
  Description of Artificial Sequence: Synthetic oligonucleotide
  Sense strand starting at position 3959 of SEQ ID NO: 1241545
cuuugagaauguuuauagu

SEQ ID NO: 1280725 - RNA, 19 nt, Artificial Sequence
  Description of Artificial Sequence: Synthetic oligonucleotide
  Antisense strand to SEQ ID NO: 1280724
acuauaaacauucucaaag

SEQ ID NO: 1280726 - RNA, 19 nt, Artificial Sequence
  Description of Artificial Sequence: Synthetic oligonucleotide
  Sense strand starting at position 3980 of SEQ ID NO: 1241545
uuaaucaggucugucuuua

SEQ ID NO: 1280727 - RNA, 19 nt, Artificial Sequence
  Description of Artificial Sequence: Synthetic oligonucleotide
  Antisense strand to SEQ ID NO: 1280726
uaaagacagaccugauuaa

SEQ ID NO: 1280728 - RNA, 19 nt, Artificial Sequence
  Description of Artificial Sequence: Synthetic oligonucleotide
  Sense strand starting at position 246 of SEQ ID NO: 1241546
gugugauggcaagaaggua

SEQ ID NO: 1280729 - RNA, 19 nt, Artificial Sequence
  Description of Artificial Sequence: Synthetic oligonucleotide
  Antisense strand to SEQ ID NO: 1280728
uaccuucuugccaucacac

SEQ ID NO: 1280730 - RNA, 19 nt, Artificial Sequence
  Description of Artificial Sequence: Synthetic oligonucleotide
  Sense strand starting at position 1287 of SEQ ID NO: 1241546
uguggacauccuuggaguu

SEQ ID NO: 1280731 - RNA, 19 nt, Artificial Sequence
  Description of Artificial Sequence: Synthetic oligonucleotide
  Antisense strand to SEQ ID NO: 1280730
aacuccaaggauguccaca

SEQ ID NO: 1280732 - RNA, 19 nt, Artificial Sequence
  Description of Artificial Sequence: Synthetic oligonucleotide
  Sense strand starting at position 1619 of SEQ ID NO: 1241546
guucgagcaucuucuggaa

SEQ ID NO: 1280733 - RNA, 19 nt, Artificial Sequence
  Description of Artificial Sequence: Synthetic oligonucleotide
  Antisense strand to SEQ ID NO: 1280732
uuccagaagaugcucgaac

SEQ ID NO: 1280734 - RNA, 19 nt, Artificial Sequence
  Description of Artificial Sequence: Synthetic oligonucleotide
  Sense strand starting at position 2232 of SEQ ID NO: 1241546
agggauuccuagccagguu

SEQ ID NO: 1280735 - RNA, 19 nt, Artificial Sequence
  Description of Artificial Sequence: Synthetic oligonucleotide
  Antisense strand to SEQ ID NO: 1280734
aaccuggcuaggaaucccu

SEQ ID NO: 1280736 - RNA, 19 nt, Artificial Sequence
  Description of Artificial Sequence: Synthetic oligonucleotide
  Sense strand starting at position 2233 of SEQ ID NO: 1241546
gggauuccuagccagguua

SEQ ID NO: 1280737 - RNA, 19 nt, Artificial Sequence
  Description of Artificial Sequence: Synthetic oligonucleotide
  Antisense strand to SEQ ID NO: 1280736
uaaccuggcuaggaauccc

SEQ ID NO: 1280738 - RNA, 19 nt, Artificial Sequence
  Description of Artificial Sequence: Synthetic oligonucleotide
  Sense strand starting at position 2235 of SEQ ID NO: 1241546
gauuccuagccagguuaua

SEQ ID NO: 1280739 - RNA, 19 nt, Artificial Sequence
  Description of Artificial Sequence: Synthetic oligonucleotide
  Antisense strand to SEQ ID NO: 1280738
uauaaccuggcuaggaauc

SEQ ID NO: 1280740 - RNA, 19 nt, Artificial Sequence
  Description of Artificial Sequence: Synthetic oligonucleotide
  Sense strand starting at position 2289 of SEQ ID NO: 1241546
ccugcauaugucgaaugga

SEQ ID NO: 1280741 - RNA, 19 nt, Artificial Sequence
  Description of Artificial Sequence: Synthetic oligonucleotide
  Antisense strand to SEQ ID NO: 1280740
uccauucgacauaugcagg

SEQ ID NO: 1280742 - RNA, 19 nt, Artificial Sequence
  Description of Artificial Sequence: Synthetic oligonucleotide
  Sense strand starting at position 2292 of SEQ ID NO: 1241546
gcauaugucgaauggacau

SEQ ID NO: 1280743 - RNA, 19 nt, Artificial Sequence
  Description of Artificial Sequence: Synthetic oligonucleotide
  Antisense strand to SEQ ID NO: 1280742
auguccauucgacauaugc

SEQ ID NO: 1280744 - RNA, 19 nt, Artificial Sequence
  Description of Artificial Sequence: Synthetic oligonucleotide
  Sense strand starting at position 2298 of SEQ ID NO: 1241546
gucgaauggacauaggcau

SEQ ID NO: 1280745 - RNA, 19 nt, Artificial Sequence
  Description of Artificial Sequence: Synthetic oligonucleotide
  Antisense strand to SEQ ID NO: 1280744
augccuauguccauucgac

SEQ ID NO: 1280746 - RNA, 19 nt, Artificial Sequence
  Description of Artificial Sequence: Synthetic oligonucleotide
  Sense strand starting at position 2309 of SEQ ID NO: 1241546
auaggcauucuuggaaagu

SEQ ID NO: 1280747 - RNA, 19 nt, Artificial Sequence
  Description of Artificial Sequence: Synthetic oligonucleotide
  Antisense strand to SEQ ID NO: 1280746
acuuuccaagaaugccuau

SEQ ID NO: 1280748 - RNA, 19 nt, Artificial Sequence
  Description of Artificial Sequence: Synthetic oligonucleotide
  Sense strand starting at position 2500 of SEQ ID NO: 1241546
ccuguugccuccuugggaa

SEQ ID NO: 1280749 - RNA, 19 nt, Artificial Sequence
  Description of Artificial Sequence: Synthetic oligonucleotide
  Antisense strand to SEQ ID NO: 1280748
uucccaaggaggcaacagg

SEQ ID NO: 1280750 - RNA, 19 nt, Artificial Sequence
  Description of Artificial Sequence: Synthetic oligonucleotide
  Sense strand starting at position 2558 of SEQ ID NO: 1241546
gguagagaguggucucacu

SEQ ID NO: 1280751 - RNA, 19 nt, Artificial Sequence
  Description of Artificial Sequence: Synthetic oligonucleotide
  Antisense strand to SEQ ID NO: 1280750
agugagaccacucucuacc

SEQ ID NO: 1280752 - RNA, 19 nt, Artificial Sequence
  Description of Artificial Sequence: Synthetic oligonucleotide
  Sense strand starting at position 2565 of SEQ ID NO: 1241546
aguggucucacucaggcau

SEQ ID NO: 1280753 - RNA, 19 nt, Artificial Sequence
  Description of Artificial Sequence: Synthetic oligonucleotide
  Antisense strand to SEQ ID NO: 1280752
augccugagugagaccacu

SEQ ID NO: 1280754 - RNA, 19 nt, Artificial Sequence
  Description of Artificial Sequence: Synthetic oligonucleotide
  Sense strand starting at position 2659 of SEQ ID NO: 1241546
auuugcgggucugugaaua

SEQ ID NO: 1280755 - RNA, 19 nt, Artificial Sequence
  Description of Artificial Sequence: Synthetic oligonucleotide
  Antisense strand to SEQ ID NO: 1280754
uauucacagacccgcaaau

SEQ ID NO: 1280756 - RNA, 19 nt, Artificial Sequence
  Description of Artificial Sequence: Synthetic oligonucleotide
  Sense strand starting at position 2664 of SEQ ID NO: 1241546
cgggucugugaauauccau

SEQ ID NO: 1280757 - RNA, 19 nt, Artificial Sequence
  Description of Artificial Sequence: Synthetic oligonucleotide
  Antisense strand to SEQ ID NO: 1280756
auggauauucacagacccg

SEQ ID NO: 1280758 - RNA, 19 nt, Artificial Sequence
  Description of Artificial Sequence: Synthetic oligonucleotide
  Sense strand starting at position 2671 of SEQ ID NO: 1241546
gugaauauccaugagcggu

SEQ ID NO: 1280759 - RNA, 19 nt, Artificial Sequence
  Description of Artificial Sequence: Synthetic oligonucleotide
  Antisense strand to SEQ ID NO: 1280758
accgcucauggauauucac

SEQ ID NO: 1280760 - RNA, 19 nt, Artificial Sequence
  Description of Artificial Sequence: Synthetic oligonucleotide
  Sense strand starting at position 2702 of SEQ ID NO: 1241546
cuguguggucugaguacgu

SEQ ID NO: 1280761 - RNA, 19 nt, Artificial Sequence
  Description of Artificial Sequence: Synthetic oligonucleotide
  Antisense strand to SEQ ID NO: 1280760
acguacucagaccacacag

SEQ ID NO: 1280762 - RNA, 19 nt, Artificial Sequence
  Description of Artificial Sequence: Synthetic oligonucleotide
  Sense strand starting at position 2785 of SEQ ID NO: 1241546
uugugugaucuguucgugu

SEQ ID NO: 1280763 - RNA, 19 nt, Artificial Sequence
  Description of Artificial Sequence: Synthetic oligonucleotide
  Antisense strand to SEQ ID NO: 1280762
acacgaacagaucacacaa

SEQ ID NO: 1280764 - RNA, 19 nt, Artificial Sequence
  Description of Artificial Sequence: Synthetic oligonucleotide
  Sense strand starting at position 2824 of SEQ ID NO: 1241546
uuuggaagugucugaaugu

SEQ ID NO: 1280765 - RNA, 19 nt, Artificial Sequence
  Description of Artificial Sequence: Synthetic oligonucleotide
  Antisense strand to SEQ ID NO: 1280764
acauucagacacuuccaaa

SEQ ID NO: 1280766 - RNA, 19 nt, Artificial Sequence
  Description of Artificial Sequence: Synthetic oligonucleotide
  Sense strand starting at position 2842 of SEQ ID NO: 1241546
uguaucuuucggugggacu

SEQ ID NO: 1280767 - RNA, 19 nt, Artificial Sequence
  Description of Artificial Sequence: Synthetic oligonucleotide
  Antisense strand to SEQ ID NO: 1280766
agucccaccgaaagauaca

SEQ ID NO: 1280768 - RNA, 19 nt, Artificial Sequence
  Description of Artificial Sequence: Synthetic oligonucleotide
  Sense strand starting at position 2956 of SEQ ID NO: 1241546
gguucuggaucuuucuuua

SEQ ID NO: 1280769 - RNA, 19 nt, Artificial Sequence
  Description of Artificial Sequence: Synthetic oligonucleotide
  Antisense strand to SEQ ID NO: 1280768
uaaagaaagauccagaacc

SEQ ID NO: 1280770 - RNA, 19 nt, Artificial Sequence
  Description of Artificial Sequence: Synthetic oligonucleotide
  Sense strand starting at position 3368 of SEQ ID NO: 1241546
ggcccagaaucauugugga

SEQ ID NO: 1280771 - RNA, 19 nt, Artificial Sequence
  Description of Artificial Sequence: Synthetic oligonucleotide
  Antisense strand to SEQ ID NO: 1280770
uccacaaugauucugggcc

SEQ ID NO: 1280772 - RNA, 19 nt, Artificial Sequence
  Description of Artificial Sequence: Synthetic oligonucleotide
  Sense strand starting at position 3442 of SEQ ID NO: 1241546
uuguauauguugcccauaa

SEQ ID NO: 1280773 - RNA, 19 nt, Artificial Sequence
  Description of Artificial Sequence: Synthetic oligonucleotide
  Antisense strand to SEQ ID NO: 1280772
uuaugggcaacauauacaa

SEQ ID NO: 1280774 - RNA, 19 nt, Artificial Sequence
  Description of Artificial Sequence: Synthetic oligonucleotide
  Sense strand starting at position 3443 of SEQ ID NO: 1241546
uguauauguugcccauaac

SEQ ID NO: 1280775 - RNA, 19 nt, Artificial Sequence
  Description of Artificial Sequence: Synthetic oligonucleotide
  Antisense strand to SEQ ID NO: 1280774
guuaugggcaacauauaca

SEQ ID NO: 1280776 - RNA, 19 nt, Artificial Sequence
  Description of Artificial Sequence: Synthetic oligonucleotide
  Sense strand starting at position 3444 of SEQ ID NO: 1241546
guauauguugcccauaaca

SEQ ID NO: 1280777 - RNA, 19 nt, Artificial Sequence
  Description of Artificial Sequence: Synthetic oligonucleotide
  Antisense strand to SEQ ID NO: 1280776
uguuaugggcaacauauac

SEQ ID NO: 1280778 - RNA, 19 nt, Artificial Sequence
  Description of Artificial Sequence: Synthetic oligonucleotide
  Sense strand starting at position 3493 of SEQ ID NO: 1241546
ucuuuaguuuggguaugga

SEQ ID NO: 1280779 - RNA, 19 nt, Artificial Sequence
  Description of Artificial Sequence: Synthetic oligonucleotide
  Antisense strand to SEQ ID NO: 1280778
uccauacccaaacuaaaga

SEQ ID NO: 1280780 - RNA, 19 nt, Artificial Sequence
  Description of Artificial Sequence: Synthetic oligonucleotide
  Sense strand starting at position 3509 of SEQ ID NO: 1241546
ggauuuguguaugugggca

SEQ ID NO: 1280781 - RNA, 19 nt, Artificial Sequence
  Description of Artificial Sequence: Synthetic oligonucleotide
  Antisense strand to SEQ ID NO: 1280780
ugcccacauacacaaaucc

SEQ ID NO: 1280782 - RNA, 19 nt, Artificial Sequence
  Description of Artificial Sequence: Synthetic oligonucleotide
  Sense strand starting at position 3578 of SEQ ID NO: 1241546
uguauaugcuugucuauaa

SEQ ID NO: 1280783 - RNA, 19 nt, Artificial Sequence
  Description of Artificial Sequence: Synthetic oligonucleotide
  Antisense strand to SEQ ID NO: 1280782
uuauagacaagcauauaca

SEQ ID NO: 1280784 - RNA, 19 nt, Artificial Sequence
  Description of Artificial Sequence: Synthetic oligonucleotide
  Sense strand starting at position 3579 of SEQ ID NO: 1241546
guauaugcuugucuauaac

SEQ ID NO: 1280785 - RNA, 19 nt, Artificial Sequence
  Description of Artificial Sequence: Synthetic oligonucleotide
  Antisense strand to SEQ ID NO: 1280784
guuauagacaagcauauac

SEQ ID NO: 1280786 - RNA, 19 nt, Artificial Sequence
  Description of Artificial Sequence: Synthetic oligonucleotide
  Sense strand starting at position 3587 of SEQ ID NO: 1241546
uugucuauaacugaguguu

SEQ ID NO: 1280787 - RNA, 19 nt, Artificial Sequence
  Description of Artificial Sequence: Synthetic oligonucleotide
  Antisense strand to SEQ ID NO: 1280786
aacacucaguuauagacaa

SEQ ID NO: 1280788 - RNA, 19 nt, Artificial Sequence
  Description of Artificial Sequence: Synthetic oligonucleotide
  Sense strand starting at position 3590 of SEQ ID NO: 1241546
ucuauaacugaguguuucu

SEQ ID NO: 1280789 - RNA, 19 nt, Artificial Sequence
  Description of Artificial Sequence: Synthetic oligonucleotide
  Antisense strand to SEQ ID NO: 1280788
agaaacacucaguuauaga

SEQ ID NO: 1280790 - RNA, 19 nt, Artificial Sequence
  Description of Artificial Sequence: Synthetic oligonucleotide
  Sense strand starting at position 3595 of SEQ ID NO: 1241546
aacugaguguuucuagcac

SEQ ID NO: 1280791 - RNA, 19 nt, Artificial Sequence
  Description of Artificial Sequence: Synthetic oligonucleotide
  Antisense strand to SEQ ID NO: 1280790
gugcuagaaacacucaguu

SEQ ID NO: 1280792 - RNA, 19 nt, Artificial Sequence
  Description of Artificial Sequence: Synthetic oligonucleotide
  Sense strand starting at position 3609 of SEQ ID NO: 1241546
agcacuuaugcaugggaug

SEQ ID NO: 1280793 - RNA, 19 nt, Artificial Sequence
  Description of Artificial Sequence: Synthetic oligonucleotide
  Antisense strand to SEQ ID NO: 1280792
caucccaugcauaagugcu

SEQ ID NO: 1280794 - RNA, 19 nt, Artificial Sequence
  Description of Artificial Sequence: Synthetic oligonucleotide
  Sense strand starting at position 3610 of SEQ ID NO: 1241546
gcacuuaugcaugggaugu

SEQ ID NO: 1280795 - RNA, 19 nt, Artificial Sequence
  Description of Artificial Sequence: Synthetic oligonucleotide
  Antisense strand to SEQ ID NO: 1280794
acaucccaugcauaagugc

SEQ ID NO: 1280796 - RNA, 19 nt, Artificial Sequence
  Description of Artificial Sequence: Synthetic oligonucleotide
  Sense strand starting at position 3616 of SEQ ID NO: 1241546
augcaugggaugugucuau

SEQ ID NO: 1280797 - RNA, 19 nt, Artificial Sequence
  Description of Artificial Sequence: Synthetic oligonucleotide
  Antisense strand to SEQ ID NO: 1280796
auagacacaucccaugcau

SEQ ID NO: 1280798 - RNA, 19 nt, Artificial Sequence
  Description of Artificial Sequence: Synthetic oligonucleotide
  Sense strand starting at position 3620 of SEQ ID NO: 1241546
augggaugugucuauugug

SEQ ID NO: 1280799 - RNA, 19 nt, Artificial Sequence
  Description of Artificial Sequence: Synthetic oligonucleotide
  Antisense strand to SEQ ID NO: 1280798
cacaauagacacaucccau

SEQ ID NO: 1280800 - RNA, 19 nt, Artificial Sequence
  Description of Artificial Sequence: Synthetic oligonucleotide
  Sense strand starting at position 3621 of SEQ ID NO: 1241546
ugggaugugucuauugugu

SEQ ID NO: 1280801 - RNA, 19 nt, Artificial Sequence
  Description of Artificial Sequence: Synthetic oligonucleotide
  Antisense strand to SEQ ID NO: 1280800
acacaauagacacauccca

SEQ ID NO: 1280802 - RNA, 19 nt, Artificial Sequence
  Description of Artificial Sequence: Synthetic oligonucleotide
  Sense strand starting at position 3627 of SEQ ID NO: 1241546
gugucuauuguguaugagu

SEQ ID NO: 1280803 - RNA, 19 nt, Artificial Sequence
  Description of Artificial Sequence: Synthetic oligonucleotide
  Antisense strand to SEQ ID NO: 1280802
acucauacacaauagacac

SEQ ID NO: 1280804 - RNA, 19 nt, Artificial Sequence
  Description of Artificial Sequence: Synthetic oligonucleotide
  Sense strand starting at position 3635 of SEQ ID NO: 1241546
uguguaugaguuuguauuu

SEQ ID NO: 1280805 - RNA, 19 nt, Artificial Sequence
  Description of Artificial Sequence: Synthetic oligonucleotide
  Antisense strand to SEQ ID NO: 1280804
aaauacaaacucauacaca

SEQ ID NO: 1280806 - RNA, 19 nt, Artificial Sequence
  Description of Artificial Sequence: Synthetic oligonucleotide
  Sense strand starting at position 3867 of SEQ ID NO: 1241546
ucgagaacuccuggucuca

SEQ ID NO: 1280807 - RNA, 19 nt, Artificial Sequence
  Description of Artificial Sequence: Synthetic oligonucleotide
  Antisense strand to SEQ ID NO: 1280806
ugagaccaggaguucucga

SEQ ID NO: 1280808 - RNA, 19 nt, Artificial Sequence
  Description of Artificial Sequence: Synthetic oligonucleotide
  Sense strand starting at position 75 of SEQ ID NO: 1241547
ucagcuauacaaugguaua

SEQ ID NO: 1280809 - RNA, 19 nt, Artificial Sequence
  Description of Artificial Sequence: Synthetic oligonucleotide
  Antisense strand to SEQ ID NO: 1280808
uauaccauuguauagcuga

SEQ ID NO: 1280810 - RNA, 19 nt, Artificial Sequence
  Description of Artificial Sequence: Synthetic oligonucleotide
  Sense strand starting at position 118 of SEQ ID NO: 1241547
cagaaagcccuugguuuga

SEQ ID NO: 1280811 - RNA, 19 nt, Artificial Sequence
  Description of Artificial Sequence: Synthetic oligonucleotide
  Antisense strand to SEQ ID NO: 1280810
ucaaaccaagggcuuucug

SEQ ID NO: 1280812 - RNA, 19 nt, Artificial Sequence
  Description of Artificial Sequence: Synthetic oligonucleotide
  Sense strand starting at position 148 of SEQ ID NO: 1241547
gccauuuacugcuuugaga

SEQ ID NO: 1280813 - RNA, 19 nt, Artificial Sequence
  Description of Artificial Sequence: Synthetic oligonucleotide
  Antisense strand to SEQ ID NO: 1280812
ucucaaagcaguaaauggc

SEQ ID NO: 1280814 - RNA, 19 nt, Artificial Sequence
  Description of Artificial Sequence: Synthetic oligonucleotide
  Sense strand starting at position 207 of SEQ ID NO: 1241547
ucguucuagggcuaaagua

SEQ ID NO: 1280815 - RNA, 19 nt, Artificial Sequence
  Description of Artificial Sequence: Synthetic oligonucleotide
  Antisense strand to SEQ ID NO: 1280814
uacuuuagcccuagaacga

SEQ ID NO: 1280816 - RNA, 19 nt, Artificial Sequence
  Description of Artificial Sequence: Synthetic oligonucleotide
  Sense strand starting at position 246 of SEQ ID NO: 1241547
ggcagucagugggcauuua

SEQ ID NO: 1280817 - RNA, 19 nt, Artificial Sequence
  Description of Artificial Sequence: Synthetic oligonucleotide
  Antisense strand to SEQ ID NO: 1280816
uaaaugcccacugacugcc

SEQ ID NO: 1280818 - RNA, 19 nt, Artificial Sequence
  Description of Artificial Sequence: Synthetic oligonucleotide
  Sense strand starting at position 699 of SEQ ID NO: 1241547
agugcuuugccugaacaaa

SEQ ID NO: 1280819 - RNA, 19 nt, Artificial Sequence
  Description of Artificial Sequence: Synthetic oligonucleotide
  Antisense strand to SEQ ID NO: 1280818
uuuguucaggcaaagcacu

SEQ ID NO: 1280820 - RNA, 19 nt, Artificial Sequence
  Description of Artificial Sequence: Synthetic oligonucleotide
  Sense strand starting at position 722 of SEQ ID NO: 1241547
cgguuuagauaguuagaua

SEQ ID NO: 1280821 - RNA, 19 nt, Artificial Sequence
  Description of Artificial Sequence: Synthetic oligonucleotide
  Antisense strand to SEQ ID NO: 1280820
uaucuaacuaucuaaaccg

SEQ ID NO: 1280822 - RNA, 19 nt, Artificial Sequence
  Description of Artificial Sequence: Synthetic oligonucleotide
  Sense strand starting at position 734 of SEQ ID NO: 1241547
uuagauaguuuccugcaau

SEQ ID NO: 1280823 - RNA, 19 nt, Artificial Sequence
  Description of Artificial Sequence: Synthetic oligonucleotide
  Antisense strand to SEQ ID NO: 1280822
auugcaggaaacuaucuaa

SEQ ID NO: 1280824 - RNA, 19 nt, Artificial Sequence
  Description of Artificial Sequence: Synthetic oligonucleotide
  Sense strand starting at position 737 of SEQ ID NO: 1241547
gauaguuuccugcaauuag

SEQ ID NO: 1280825 - RNA, 19 nt, Artificial Sequence
  Description of Artificial Sequence: Synthetic oligonucleotide
  Antisense strand to SEQ ID NO: 1280824
cuaauugcaggaaacuauc

SEQ ID NO: 1280826 - RNA, 19 nt, Artificial Sequence
  Description of Artificial Sequence: Synthetic oligonucleotide
  Sense strand starting at position 824 of SEQ ID NO: 1241547
agcgaauggaugcaguaau

SEQ ID NO: 1280827 - RNA, 19 nt, Artificial Sequence
  Description of Artificial Sequence: Synthetic oligonucleotide
  Antisense strand to SEQ ID NO: 1280826
auuacugcauccauucgcu

SEQ ID NO: 1280828 - RNA, 19 nt, Artificial Sequence
  Description of Artificial Sequence: Synthetic oligonucleotide
  Sense strand starting at position 885 of SEQ ID NO: 1241547
cuuagcucugauuagauca

SEQ ID NO: 1280829 - RNA, 19 nt, Artificial Sequence
  Description of Artificial Sequence: Synthetic oligonucleotide
  Antisense strand to SEQ ID NO: 1280828
ugaucuaaucagagcuaag

SEQ ID NO: 1280830 - RNA, 19 nt, Artificial Sequence
  Description of Artificial Sequence: Synthetic oligonucleotide
  Sense strand starting at position 1034 of SEQ ID NO: 1241547
ugguauggcaggcaugaau

SEQ ID NO: 1280831 - RNA, 19 nt, Artificial Sequence
  Description of Artificial Sequence: Synthetic oligonucleotide
  Antisense strand to SEQ ID NO: 1280830
auucaugccugccauacca

SEQ ID NO: 1280832 - RNA, 19 nt, Artificial Sequence
  Description of Artificial Sequence: Synthetic oligonucleotide
  Sense strand starting at position 1105 of SEQ ID NO: 1241547
ggaaauugagcacagcuau

SEQ ID NO: 1280833 - RNA, 19 nt, Artificial Sequence
  Description of Artificial Sequence: Synthetic oligonucleotide
  Antisense strand to SEQ ID NO: 1280832
auagcugugcucaauuucc

SEQ ID NO: 1280834 - RNA, 19 nt, Artificial Sequence
  Description of Artificial Sequence: Synthetic oligonucleotide
  Sense strand starting at position 1320 of SEQ ID NO: 1241547
gcaguacuacuuugaggag

SEQ ID NO: 1280835 - RNA, 19 nt, Artificial Sequence
  Description of Artificial Sequence: Synthetic oligonucleotide
  Antisense strand to SEQ ID NO: 1280834
cuccucaaaguaguacugc

SEQ ID NO: 1280836 - RNA, 19 nt, Artificial Sequence
  Description of Artificial Sequence: Synthetic oligonucleotide
  Sense strand starting at position 1365 of SEQ ID NO: 1241547
cuuaguaguuccuugaacu

SEQ ID NO: 1280837 - RNA, 19 nt, Artificial Sequence
  Description of Artificial Sequence: Synthetic oligonucleotide
  Antisense strand to SEQ ID NO: 1280836
aguucaaggaacuacuaag

SEQ ID NO: 1280838 - RNA, 19 nt, Artificial Sequence
  Description of Artificial Sequence: Synthetic oligonucleotide
  Sense strand starting at position 1393 of SEQ ID NO: 1241547
aaauuacugcgcgccuaua

SEQ ID NO: 1280839 - RNA, 19 nt, Artificial Sequence
  Description of Artificial Sequence: Synthetic oligonucleotide
  Antisense strand to SEQ ID NO: 1280838
uauaggcgcgcaguaauuu

SEQ ID NO: 1280840 - RNA, 19 nt, Artificial Sequence
  Description of Artificial Sequence: Synthetic oligonucleotide
  Sense strand starting at position 1403 of SEQ ID NO: 1241547
gcgccuauacuacauagaa

SEQ ID NO: 1280841 - RNA, 19 nt, Artificial Sequence
  Description of Artificial Sequence: Synthetic oligonucleotide
  Antisense strand to SEQ ID NO: 1280840
uucuauguaguauaggcgc

SEQ ID NO: 1280842 - RNA, 19 nt, Artificial Sequence
  Description of Artificial Sequence: Synthetic oligonucleotide
  Sense strand starting at position 1450 of SEQ ID NO: 1241547
gcgcaagaacuagauguau

SEQ ID NO: 1280843 - RNA, 19 nt, Artificial Sequence
  Description of Artificial Sequence: Synthetic oligonucleotide
  Antisense strand to SEQ ID NO: 1280842
auacaucuaguucuugcgc

SEQ ID NO: 1280844 - RNA, 19 nt, Artificial Sequence
  Description of Artificial Sequence: Synthetic oligonucleotide
  Sense strand starting at position 1512 of SEQ ID NO: 1241547
uguacuauccaggagcaca

SEQ ID NO: 1280845 - RNA, 19 nt, Artificial Sequence
  Description of Artificial Sequence: Synthetic oligonucleotide
  Antisense strand to SEQ ID NO: 1280844
ugugcuccuggauaguaca

SEQ ID NO: 1280846 - RNA, 19 nt, Artificial Sequence
  Description of Artificial Sequence: Synthetic oligonucleotide
  Sense strand starting at position 1606 of SEQ ID NO: 1241547
cuguccuaucacuguagga

SEQ ID NO: 1280847 - RNA, 19 nt, Artificial Sequence
  Description of Artificial Sequence: Synthetic oligonucleotide
  Antisense strand to SEQ ID NO: 1280846
uccuacagugauaggacag

SEQ ID NO: 1280848 - RNA, 19 nt, Artificial Sequence
  Description of Artificial Sequence: Synthetic oligonucleotide
  Sense strand starting at position 2119 of SEQ ID NO: 1241547
ggcaauaguuaaguggaaa

SEQ ID NO: 1280849 - RNA, 19 nt, Artificial Sequence
  Description of Artificial Sequence: Synthetic oligonucleotide
  Antisense strand to SEQ ID NO: 1280848
uuuccacuuaacuauugcc

SEQ ID NO: 1280850 - RNA, 19 nt, Artificial Sequence
  Description of Artificial Sequence: Synthetic oligonucleotide
  Sense strand starting at position 2120 of SEQ ID NO: 1241547
gcaauaguuaaguggaaag

SEQ ID NO: 1280851 - RNA, 19 nt, Artificial Sequence
  Description of Artificial Sequence: Synthetic oligonucleotide
  Antisense strand to SEQ ID NO: 1280850
cuuuccacuuaacuauugc

SEQ ID NO: 1280852 - RNA, 19 nt, Artificial Sequence
  Description of Artificial Sequence: Synthetic oligonucleotide
  Sense strand starting at position 2759 of SEQ ID NO: 1241547
uccuuucuaguaggagaca

SEQ ID NO: 1280853 - RNA, 19 nt, Artificial Sequence
  Description of Artificial Sequence: Synthetic oligonucleotide
  Antisense strand to SEQ ID NO: 1280852
ugucuccuacuagaaagga

SEQ ID NO: 1280854 - RNA, 19 nt, Artificial Sequence
  Description of Artificial Sequence: Synthetic oligonucleotide
  Sense strand starting at position 2788 of SEQ ID NO: 1241547
aagagaguaucguuggcaa

SEQ ID NO: 1280855 - RNA, 19 nt, Artificial Sequence
  Description of Artificial Sequence: Synthetic oligonucleotide
  Antisense strand to SEQ ID NO: 1280854
uugccaacgauacucucuu

SEQ ID NO: 1280856 - RNA, 19 nt, Artificial Sequence
  Description of Artificial Sequence: Synthetic oligonucleotide
  Sense strand starting at position 2856 of SEQ ID NO: 1241547
aggcgaagucucuaaguaa

SEQ ID NO: 1280857 - RNA, 19 nt, Artificial Sequence
  Description of Artificial Sequence: Synthetic oligonucleotide
  Antisense strand to SEQ ID NO: 1280856
uuacuuagagacuucgccu

SEQ ID NO: 1280858 - RNA, 19 nt, Artificial Sequence
  Description of Artificial Sequence: Synthetic oligonucleotide
  Sense strand starting at position 2859 of SEQ ID NO: 1241547
cgaagucucuaaguaagag

SEQ ID NO: 1280859 - RNA, 19 nt, Artificial Sequence
  Description of Artificial Sequence: Synthetic oligonucleotide
  Antisense strand to SEQ ID NO: 1280858
cucuuacuuagagacuucg

SEQ ID NO: 1280860 - RNA, 19 nt, Artificial Sequence
  Description of Artificial Sequence: Synthetic oligonucleotide
  Sense strand starting at position 2871 of SEQ ID NO: 1241547
guaagaggacacugaguua

SEQ ID NO: 1280861 - RNA, 19 nt, Artificial Sequence
  Description of Artificial Sequence: Synthetic oligonucleotide
  Antisense strand to SEQ ID NO: 1280860
uaacucaguguccucuuac

SEQ ID NO: 1280862 - RNA, 19 nt, Artificial Sequence
  Description of Artificial Sequence: Synthetic oligonucleotide
  Sense strand starting at position 2929 of SEQ ID NO: 1241547
ggaggaauuugccagaaag

SEQ ID NO: 1280863 - RNA, 19 nt, Artificial Sequence
  Description of Artificial Sequence: Synthetic oligonucleotide
  Antisense strand to SEQ ID NO: 1280862
cuuucuggcaaauuccucc

SEQ ID NO: 1280864 - RNA, 19 nt, Artificial Sequence
  Description of Artificial Sequence: Synthetic oligonucleotide
  Sense strand starting at position 2979 of SEQ ID NO: 1241547
ggaacaagcuuggcuuaau

SEQ ID NO: 1280865 - RNA, 19 nt, Artificial Sequence
  Description of Artificial Sequence: Synthetic oligonucleotide
  Antisense strand to SEQ ID NO: 1280864
auuaagccaagcuuguucc

SEQ ID NO: 1280866 - RNA, 19 nt, Artificial Sequence
  Description of Artificial Sequence: Synthetic oligonucleotide
  Sense strand starting at position 2980 of SEQ ID NO: 1241547
gaacaagcuuggcuuaaug

SEQ ID NO: 1280867 - RNA, 19 nt, Artificial Sequence
  Description of Artificial Sequence: Synthetic oligonucleotide
  Antisense strand to SEQ ID NO: 1280866
cauuaagccaagcuuguuc

SEQ ID NO: 1280868 - RNA, 19 nt, Artificial Sequence
  Description of Artificial Sequence: Synthetic oligonucleotide
  Sense strand starting at position 2982 of SEQ ID NO: 1241547
acaagcuuggcuuaaugaa

SEQ ID NO: 1280869 - RNA, 19 nt, Artificial Sequence
  Description of Artificial Sequence: Synthetic oligonucleotide
  Antisense strand to SEQ ID NO: 1280868
uucauuaagccaagcuugu

SEQ ID NO: 1280870 - RNA, 19 nt, Artificial Sequence
  Description of Artificial Sequence: Synthetic oligonucleotide
  Sense strand starting at position 3123 of SEQ ID NO: 1241547
ggaguucugucucccaaau

SEQ ID NO: 1280871 - RNA, 19 nt, Artificial Sequence
  Description of Artificial Sequence: Synthetic oligonucleotide
  Antisense strand to SEQ ID NO: 1280870
auuugggagacagaacucc

SEQ ID NO: 1280872 - RNA, 19 nt, Artificial Sequence
  Description of Artificial Sequence: Synthetic oligonucleotide
  Sense strand starting at position 3166 of SEQ ID NO: 1241547
gcaagaccuggcugggaau

SEQ ID NO: 1280873 - RNA, 19 nt, Artificial Sequence
  Description of Artificial Sequence: Synthetic oligonucleotide
  Antisense strand to SEQ ID NO: 1280872
auucccagccaggucuugc

SEQ ID NO: 1280874 - RNA, 19 nt, Artificial Sequence
  Description of Artificial Sequence: Synthetic oligonucleotide
  Sense strand starting at position 3236 of SEQ ID NO: 1241547
augaguaauaguggccuau

SEQ ID NO: 1280875 - RNA, 19 nt, Artificial Sequence
  Description of Artificial Sequence: Synthetic oligonucleotide
  Antisense strand to SEQ ID NO: 1280874
auaggccacuauuacucau

SEQ ID NO: 1280876 - RNA, 19 nt, Artificial Sequence
  Description of Artificial Sequence: Synthetic oligonucleotide
  Sense strand starting at position 3238 of SEQ ID NO: 1241547
gaguaauaguggccuauga

SEQ ID NO: 1280877 - RNA, 19 nt, Artificial Sequence
  Description of Artificial Sequence: Synthetic oligonucleotide
  Antisense strand to SEQ ID NO: 1280876
ucauaggccacuauuacuc

SEQ ID NO: 1280878 - RNA, 19 nt, Artificial Sequence
  Description of Artificial Sequence: Synthetic oligonucleotide
  Sense strand starting at position 3240 of SEQ ID NO: 1241547
guaauaguggccuaugagu

SEQ ID NO: 1280879 - RNA, 19 nt, Artificial Sequence
  Description of Artificial Sequence: Synthetic oligonucleotide
  Antisense strand to SEQ ID NO: 1280878
acucauaggccacuauuac

SEQ ID NO: 1280880 - RNA, 19 nt, Artificial Sequence
  Description of Artificial Sequence: Synthetic oligonucleotide
  Sense strand starting at position 3290 of SEQ ID NO: 1241547
ggcuauguggacugucaaa

SEQ ID NO: 1280881 - RNA, 19 nt, Artificial Sequence
  Description of Artificial Sequence: Synthetic oligonucleotide
  Antisense strand to SEQ ID NO: 1280880
uuugacaguccacauagcc

SEQ ID NO: 1280882 - RNA, 19 nt, Artificial Sequence
  Description of Artificial Sequence: Synthetic oligonucleotide
  Sense strand starting at position 3619 of SEQ ID NO: 1241547
cuuuaagucucucugauga

SEQ ID NO: 1280883 - RNA, 19 nt, Artificial Sequence
  Description of Artificial Sequence: Synthetic oligonucleotide
  Antisense strand to SEQ ID NO: 1280882
ucaucagagagacuuaaag

SEQ ID NO: 1280884 - RNA, 19 nt, Artificial Sequence
  Description of Artificial Sequence: Synthetic oligonucleotide
  Sense strand starting at position 3624 of SEQ ID NO: 1241547
agucucucugaugaaaggu

SEQ ID NO: 1280885 - RNA, 19 nt, Artificial Sequence
  Description of Artificial Sequence: Synthetic oligonucleotide
  Antisense strand to SEQ ID NO: 1280884
accuuucaucagagagacu

SEQ ID NO: 1280886 - RNA, 19 nt, Artificial Sequence
  Description of Artificial Sequence: Synthetic oligonucleotide
  Sense strand starting at position 3969 of SEQ ID NO: 1241547
gucagaucucgugagagaa

SEQ ID NO: 1280887 - RNA, 19 nt, Artificial Sequence
  Description of Artificial Sequence: Synthetic oligonucleotide
  Antisense strand to SEQ ID NO: 1280886
uucucucacgagaucugac

SEQ ID NO: 1280888 - RNA, 19 nt, Artificial Sequence
  Description of Artificial Sequence: Synthetic oligonucleotide
  Sense strand starting at position 77 of SEQ ID NO: 1241548
cucagugaguaucuaggua

SEQ ID NO: 1280889 - RNA, 19 nt, Artificial Sequence
  Description of Artificial Sequence: Synthetic oligonucleotide
  Antisense strand to SEQ ID NO: 1280888
uaccuagauacucacugag

SEQ ID NO: 1280890 - RNA, 19 nt, Artificial Sequence
  Description of Artificial Sequence: Synthetic oligonucleotide
  Sense strand starting at position 125 of SEQ ID NO: 1241548
aacugaaacugcgucugaa

SEQ ID NO: 1280891 - RNA, 19 nt, Artificial Sequence
  Description of Artificial Sequence: Synthetic oligonucleotide
  Antisense strand to SEQ ID NO: 1280890
uucagacgcaguuucaguu

SEQ ID NO: 1280892 - RNA, 19 nt, Artificial Sequence
  Description of Artificial Sequence: Synthetic oligonucleotide
  Sense strand starting at position 137 of SEQ ID NO: 1241548
gucugaaagggcuguuucu

SEQ ID NO: 1280893 - RNA, 19 nt, Artificial Sequence
  Description of Artificial Sequence: Synthetic oligonucleotide
  Antisense strand to SEQ ID NO: 1280892
agaaacagcccuuucagac

SEQ ID NO: 1280894 - RNA, 19 nt, Artificial Sequence
  Description of Artificial Sequence: Synthetic oligonucleotide
  Sense strand starting at position 162 of SEQ ID NO: 1241548
gucgcuugguccucuuauu

SEQ ID NO: 1280895 - RNA, 19 nt, Artificial Sequence
  Description of Artificial Sequence: Synthetic oligonucleotide
  Antisense strand to SEQ ID NO: 1280894
aauaagaggaccaagcgac

SEQ ID NO: 1280896 - RNA, 19 nt, Artificial Sequence
  Description of Artificial Sequence: Synthetic oligonucleotide
  Sense strand starting at position 172 of SEQ ID NO: 1241548
ccucuuauugcuggccuau

SEQ ID NO: 1280897 - RNA, 19 nt, Artificial Sequence
  Description of Artificial Sequence: Synthetic oligonucleotide
  Antisense strand to SEQ ID NO: 1280896
auaggccagcaauaagagg

SEQ ID NO: 1280898 - RNA, 19 nt, Artificial Sequence
  Description of Artificial Sequence: Synthetic oligonucleotide
  Sense strand starting at position 174 of SEQ ID NO: 1241548
ucuuauugcuggccuauaa

SEQ ID NO: 1280899 - RNA, 19 nt, Artificial Sequence
  Description of Artificial Sequence: Synthetic oligonucleotide
  Antisense strand to SEQ ID NO: 1280898
uuauaggccagcaauaaga

SEQ ID NO: 1280900 - RNA, 19 nt, Artificial Sequence
  Description of Artificial Sequence: Synthetic oligonucleotide
  Sense strand starting at position 178 of SEQ ID NO: 1241548
auugcuggccuauaaauaa

SEQ ID NO: 1280901 - RNA, 19 nt, Artificial Sequence
  Description of Artificial Sequence: Synthetic oligonucleotide
  Antisense strand to SEQ ID NO: 1280900
uuauuuauaggccagcaau

SEQ ID NO: 1280902 - RNA, 19 nt, Artificial Sequence
  Description of Artificial Sequence: Synthetic oligonucleotide
  Sense strand starting at position 380 of SEQ ID NO: 1241548
cgccuuaucuccucagagu

SEQ ID NO: 1280903 - RNA, 19 nt, Artificial Sequence
  Description of Artificial Sequence: Synthetic oligonucleotide
  Antisense strand to SEQ ID NO: 1280902
acucugaggagauaaggcg

SEQ ID NO: 1280904 - RNA, 19 nt, Artificial Sequence
  Description of Artificial Sequence: Synthetic oligonucleotide
  Sense strand starting at position 381 of SEQ ID NO: 1241548
gccuuaucuccucagagug

SEQ ID NO: 1280905 - RNA, 19 nt, Artificial Sequence
  Description of Artificial Sequence: Synthetic oligonucleotide
  Antisense strand to SEQ ID NO: 1280904
cacucugaggagauaaggc

SEQ ID NO: 1280906 - RNA, 19 nt, Artificial Sequence
  Description of Artificial Sequence: Synthetic oligonucleotide
  Sense strand starting at position 1199 of SEQ ID NO: 1241548
ggcuguggcuggucaauga

SEQ ID NO: 1280907 - RNA, 19 nt, Artificial Sequence
  Description of Artificial Sequence: Synthetic oligonucleotide
  Antisense strand to SEQ ID NO: 1280906
ucauugaccagccacagcc

SEQ ID NO: 1280908 - RNA, 19 nt, Artificial Sequence
  Description of Artificial Sequence: Synthetic oligonucleotide
  Sense strand starting at position 1206 of SEQ ID NO: 1241548
gcuggucaaugagaggaaa

SEQ ID NO: 1280909 - RNA, 19 nt, Artificial Sequence
  Description of Artificial Sequence: Synthetic oligonucleotide
  Antisense strand to SEQ ID NO: 1280908
uuuccucucauugaccagc

SEQ ID NO: 1280910 - RNA, 19 nt, Artificial Sequence
  Description of Artificial Sequence: Synthetic oligonucleotide
  Sense strand starting at position 1540 of SEQ ID NO: 1241548
caugguagauagcguaaga

SEQ ID NO: 1280911 - RNA, 19 nt, Artificial Sequence
  Description of Artificial Sequence: Synthetic oligonucleotide
  Antisense strand to SEQ ID NO: 1280910
ucuuacgcuaucuaccaug

SEQ ID NO: 1280912 - RNA, 19 nt, Artificial Sequence
  Description of Artificial Sequence: Synthetic oligonucleotide
  Sense strand starting at position 1569 of SEQ ID NO: 1241548
aucagaggucauggcugaa

SEQ ID NO: 1280913 - RNA, 19 nt, Artificial Sequence
  Description of Artificial Sequence: Synthetic oligonucleotide
  Antisense strand to SEQ ID NO: 1280912
uucagccaugaccucugau

SEQ ID NO: 1280914 - RNA, 19 nt, Artificial Sequence
  Description of Artificial Sequence: Synthetic oligonucleotide
  Sense strand starting at position 1581 of SEQ ID NO: 1241548
ggcugaaggugccagauuu

SEQ ID NO: 1280915 - RNA, 19 nt, Artificial Sequence
  Description of Artificial Sequence: Synthetic oligonucleotide
  Antisense strand to SEQ ID NO: 1280914
aaaucuggcaccuucagcc

SEQ ID NO: 1280916 - RNA, 19 nt, Artificial Sequence
  Description of Artificial Sequence: Synthetic oligonucleotide
  Sense strand starting at position 1716 of SEQ ID NO: 1241548
gagcgagucaucuacagga

SEQ ID NO: 1280917 - RNA, 19 nt, Artificial Sequence
  Description of Artificial Sequence: Synthetic oligonucleotide
  Antisense strand to SEQ ID NO: 1280916
uccuguagaugacucgcuc

SEQ ID NO: 1280918 - RNA, 19 nt, Artificial Sequence
  Description of Artificial Sequence: Synthetic oligonucleotide
  Sense strand starting at position 1718 of SEQ ID NO: 1241548
gcgagucaucuacaggacu

SEQ ID NO: 1280919 - RNA, 19 nt, Artificial Sequence
  Description of Artificial Sequence: Synthetic oligonucleotide
  Antisense strand to SEQ ID NO: 1280918
aguccuguagaugacucgc

SEQ ID NO: 1280920 - RNA, 19 nt, Artificial Sequence
  Description of Artificial Sequence: Synthetic oligonucleotide
  Sense strand starting at position 2021 of SEQ ID NO: 1241548
cuuccucuuuguccugaga

SEQ ID NO: 1280921 - RNA, 19 nt, Artificial Sequence
  Description of Artificial Sequence: Synthetic oligonucleotide
  Antisense strand to SEQ ID NO: 1280920
ucucaggacaaagaggaag

SEQ ID NO: 1280922 - RNA, 19 nt, Artificial Sequence
  Description of Artificial Sequence: Synthetic oligonucleotide
  Sense strand starting at position 2045 of SEQ ID NO: 1241548
ccucucaucugagacagaa

SEQ ID NO: 1280923 - RNA, 19 nt, Artificial Sequence
  Description of Artificial Sequence: Synthetic oligonucleotide
  Antisense strand to SEQ ID NO: 1280922
uucugucucagaugagagg

SEQ ID NO: 1280924 - RNA, 19 nt, Artificial Sequence
  Description of Artificial Sequence: Synthetic oligonucleotide
  Sense strand starting at position 2290 of SEQ ID NO: 1241548
acggccuugcuagagauga

SEQ ID NO: 1280925 - RNA, 19 nt, Artificial Sequence
  Description of Artificial Sequence: Synthetic oligonucleotide
  Antisense strand to SEQ ID NO: 1280924
ucaucucuagcaaggccgu

SEQ ID NO: 1280926 - RNA, 19 nt, Artificial Sequence
  Description of Artificial Sequence: Synthetic oligonucleotide
  Sense strand starting at position 2292 of SEQ ID NO: 1241548
ggccuugcuagagaugaug

SEQ ID NO: 1280927 - RNA, 19 nt, Artificial Sequence
  Description of Artificial Sequence: Synthetic oligonucleotide
  Antisense strand to SEQ ID NO: 1280926
caucaucucuagcaaggcc

SEQ ID NO: 1280928 - RNA, 19 nt, Artificial Sequence
  Description of Artificial Sequence: Synthetic oligonucleotide
  Sense strand starting at position 2400 of SEQ ID NO: 1241548
cagccauugccucuguguu

SEQ ID NO: 1280929 - RNA, 19 nt, Artificial Sequence
  Description of Artificial Sequence: Synthetic oligonucleotide
  Antisense strand to SEQ ID NO: 1280928
aacacagaggcaauggcug

SEQ ID NO: 1280930 - RNA, 19 nt, Artificial Sequence
  Description of Artificial Sequence: Synthetic oligonucleotide
  Sense strand starting at position 2412 of SEQ ID NO: 1241548
cuguguucuuagcagagaa

SEQ ID NO: 1280931 - RNA, 19 nt, Artificial Sequence
  Description of Artificial Sequence: Synthetic oligonucleotide
  Antisense strand to SEQ ID NO: 1280930
uucucugcuaagaacacag

SEQ ID NO: 1280932 - RNA, 19 nt, Artificial Sequence
  Description of Artificial Sequence: Synthetic oligonucleotide
  Sense strand starting at position 2414 of SEQ ID NO: 1241548
guguucuuagcagagaaua

SEQ ID NO: 1280933 - RNA, 19 nt, Artificial Sequence
  Description of Artificial Sequence: Synthetic oligonucleotide
  Antisense strand to SEQ ID NO: 1280932
uauucucugcuaagaacac

SEQ ID NO: 1280934 - RNA, 19 nt, Artificial Sequence
  Description of Artificial Sequence: Synthetic oligonucleotide
  Sense strand starting at position 2446 of SEQ ID NO: 1241548
aggagacuuccuggaaguc

SEQ ID NO: 1280935 - RNA, 19 nt, Artificial Sequence
  Description of Artificial Sequence: Synthetic oligonucleotide
  Antisense strand to SEQ ID NO: 1280934
gacuuccaggaagucuccu

SEQ ID NO: 1280936 - RNA, 19 nt, Artificial Sequence
  Description of Artificial Sequence: Synthetic oligonucleotide
  Sense strand starting at position 2477 of SEQ ID NO: 1241548
uccacuuaucugugaucug

SEQ ID NO: 1280937 - RNA, 19 nt, Artificial Sequence
  Description of Artificial Sequence: Synthetic oligonucleotide
  Antisense strand to SEQ ID NO: 1280936
cagaucacagauaagugga

SEQ ID NO: 1280938 - RNA, 19 nt, Artificial Sequence
  Description of Artificial Sequence: Synthetic oligonucleotide
  Sense strand starting at position 2480 of SEQ ID NO: 1241548
acuuaucugugaucuggaa

SEQ ID NO: 1280939 - RNA, 19 nt, Artificial Sequence
  Description of Artificial Sequence: Synthetic oligonucleotide
  Antisense strand to SEQ ID NO: 1280938
uuccagaucacagauaagu

SEQ ID NO: 1280940 - RNA, 19 nt, Artificial Sequence
  Description of Artificial Sequence: Synthetic oligonucleotide
  Sense strand starting at position 2555 of SEQ ID NO: 1241548
ggagguaacuagggucuuu

SEQ ID NO: 1280941 - RNA, 19 nt, Artificial Sequence
  Description of Artificial Sequence: Synthetic oligonucleotide
  Antisense strand to SEQ ID NO: 1280940
aaagacccuaguuaccucc

SEQ ID NO: 1280942 - RNA, 19 nt, Artificial Sequence
  Description of Artificial Sequence: Synthetic oligonucleotide
  Sense strand starting at position 2566 of SEQ ID NO: 1241548
gggucuuuaucuuggagaa

SEQ ID NO: 1280943 - RNA, 19 nt, Artificial Sequence
  Description of Artificial Sequence: Synthetic oligonucleotide
  Antisense strand to SEQ ID NO: 1280942
uucuccaagauaaagaccc

SEQ ID NO: 1280944 - RNA, 19 nt, Artificial Sequence
  Description of Artificial Sequence: Synthetic oligonucleotide
  Sense strand starting at position 2567 of SEQ ID NO: 1241548
ggucuuuaucuuggagaac

SEQ ID NO: 1280945 - RNA, 19 nt, Artificial Sequence
  Description of Artificial Sequence: Synthetic oligonucleotide
  Antisense strand to SEQ ID NO: 1280944
guucuccaagauaaagacc

SEQ ID NO: 1280946 - RNA, 19 nt, Artificial Sequence
  Description of Artificial Sequence: Synthetic oligonucleotide
  Sense strand starting at position 2568 of SEQ ID NO: 1241548
gucuuuaucuuggagaacg

SEQ ID NO: 1280947 - RNA, 19 nt, Artificial Sequence
  Description of Artificial Sequence: Synthetic oligonucleotide
  Antisense strand to SEQ ID NO: 1280946
cguucuccaagauaaagac

SEQ ID NO: 1280948 - RNA, 19 nt, Artificial Sequence
  Description of Artificial Sequence: Synthetic oligonucleotide
  Sense strand starting at position 2690 of SEQ ID NO: 1241548
gaguaaggucugggaccuu

SEQ ID NO: 1280949 - RNA, 19 nt, Artificial Sequence
  Description of Artificial Sequence: Synthetic oligonucleotide
  Antisense strand to SEQ ID NO: 1280948
aaggucccagaccuuacuc

SEQ ID NO: 1280950 - RNA, 19 nt, Artificial Sequence
  Description of Artificial Sequence: Synthetic oligonucleotide
  Sense strand starting at position 3099 of SEQ ID NO: 1241548
gaggguuacucuggguaug

SEQ ID NO: 1280951 - RNA, 19 nt, Artificial Sequence
  Description of Artificial Sequence: Synthetic oligonucleotide
  Antisense strand to SEQ ID NO: 1280950
cauacccagaguaacccuc

SEQ ID NO: 1280952 - RNA, 19 nt, Artificial Sequence
  Description of Artificial Sequence: Synthetic oligonucleotide
  Sense strand starting at position 3134 of SEQ ID NO: 1241548
uggguccugcugugacauu

SEQ ID NO: 1280953 - RNA, 19 nt, Artificial Sequence
  Description of Artificial Sequence: Synthetic oligonucleotide
  Antisense strand to SEQ ID NO: 1280952
aaugucacagcaggaccca

SEQ ID NO: 1280954 - RNA, 19 nt, Artificial Sequence
  Description of Artificial Sequence: Synthetic oligonucleotide
  Sense strand starting at position 3135 of SEQ ID NO: 1241548
ggguccugcugugacauuu

SEQ ID NO: 1280955 - RNA, 19 nt, Artificial Sequence
  Description of Artificial Sequence: Synthetic oligonucleotide
  Antisense strand to SEQ ID NO: 1280954
aaaugucacagcaggaccc

SEQ ID NO: 1280956 - RNA, 19 nt, Artificial Sequence
  Description of Artificial Sequence: Synthetic oligonucleotide
  Sense strand starting at position 3541 of SEQ ID NO: 1241548
gucucuucugucuggacaa

SEQ ID NO: 1280957 - RNA, 19 nt, Artificial Sequence
  Description of Artificial Sequence: Synthetic oligonucleotide
  Antisense strand to SEQ ID NO: 1280956
uuguccagacagaagagac

SEQ ID NO: 1280958 - RNA, 19 nt, Artificial Sequence
  Description of Artificial Sequence: Synthetic oligonucleotide
  Sense strand starting at position 3543 of SEQ ID NO: 1241548
cucuucugucuggacaaca

SEQ ID NO: 1280959 - RNA, 19 nt, Artificial Sequence
  Description of Artificial Sequence: Synthetic oligonucleotide
  Antisense strand to SEQ ID NO: 1280958
uguuguccagacagaagag

SEQ ID NO: 1280960 - RNA, 19 nt, Artificial Sequence
  Description of Artificial Sequence: Synthetic oligonucleotide
  Sense strand starting at position 3625 of SEQ ID NO: 1241548
cucagaaguccuugcagga

SEQ ID NO: 1280961 - RNA, 19 nt, Artificial Sequence
  Description of Artificial Sequence: Synthetic oligonucleotide
  Antisense strand to SEQ ID NO: 1280960
uccugcaaggacuucugag

SEQ ID NO: 1280962 - RNA, 19 nt, Artificial Sequence
  Description of Artificial Sequence: Synthetic oligonucleotide
  Sense strand starting at position 3814 of SEQ ID NO: 1241548
agcucuaccucgggaggau

SEQ ID NO: 1280963 - RNA, 19 nt, Artificial Sequence
  Description of Artificial Sequence: Synthetic oligonucleotide
  Antisense strand to SEQ ID NO: 1280962
auccucccgagguagagcu

SEQ ID NO: 1280964 - RNA, 19 nt, Artificial Sequence
  Description of Artificial Sequence: Synthetic oligonucleotide
  Sense strand starting at position 3914 of SEQ ID NO: 1241548
ggcugcuuacccuggaaga

SEQ ID NO: 1280965 - RNA, 19 nt, Artificial Sequence
  Description of Artificial Sequence: Synthetic oligonucleotide
  Antisense strand to SEQ ID NO: 1280964
ucuuccaggguaagcagcc

SEQ ID NO: 1280966 - RNA, 19 nt, Artificial Sequence
  Description of Artificial Sequence: Synthetic oligonucleotide
  Sense strand starting at position 3915 of SEQ ID NO: 1241548
gcugcuuacccuggaagaa

SEQ ID NO: 1280967 - RNA, 19 nt, Artificial Sequence
  Description of Artificial Sequence: Synthetic oligonucleotide
  Antisense strand to SEQ ID NO: 1280966
uucuuccaggguaagcagc

SEQ ID NO: 1280968 - RNA, 19 nt, Artificial Sequence
  Description of Artificial Sequence: Synthetic oligonucleotide
  Sense strand starting at position 33 of SEQ ID NO: 1241549
ucccauccuccuggugaua

SEQ ID NO: 1280969 - RNA, 19 nt, Artificial Sequence
  Description of Artificial Sequence: Synthetic oligonucleotide
  Antisense strand to SEQ ID NO: 1280968
uaucaccaggaggauggga

SEQ ID NO: 1280970 - RNA, 19 nt, Artificial Sequence
  Description of Artificial Sequence: Synthetic oligonucleotide
  Sense strand starting at position 44 of SEQ ID NO: 1241549
uggugauauccugggagcu

SEQ ID NO: 1280971 - RNA, 19 nt, Artificial Sequence
  Description of Artificial Sequence: Synthetic oligonucleotide
  Antisense strand to SEQ ID NO: 1280970
agcucccaggauaucacca

SEQ ID NO: 1280972 - RNA, 19 nt, Artificial Sequence
  Description of Artificial Sequence: Synthetic oligonucleotide
  Sense strand starting at position 45 of SEQ ID NO: 1241549
ggugauauccugggagcuc

SEQ ID NO: 1280973 - RNA, 19 nt, Artificial Sequence
  Description of Artificial Sequence: Synthetic oligonucleotide
  Antisense strand to SEQ ID NO: 1280972
gagcucccaggauaucacc

SEQ ID NO: 1280974 - RNA, 19 nt, Artificial Sequence
  Description of Artificial Sequence: Synthetic oligonucleotide
  Sense strand starting at position 180 of SEQ ID NO: 1241549
aaggaucugucuccauguu

SEQ ID NO: 1280975 - RNA, 19 nt, Artificial Sequence
  Description of Artificial Sequence: Synthetic oligonucleotide
  Antisense strand to SEQ ID NO: 1280974
aacauggagacagauccuu

SEQ ID NO: 1280976 - RNA, 19 nt, Artificial Sequence
  Description of Artificial Sequence: Synthetic oligonucleotide
  Sense strand starting at position 181 of SEQ ID NO: 1241549
aggaucugucuccauguua

SEQ ID NO: 1280977 - RNA, 19 nt, Artificial Sequence
  Description of Artificial Sequence: Synthetic oligonucleotide
  Antisense strand to SEQ ID NO: 1280976
uaacauggagacagauccu

SEQ ID NO: 1280978 - RNA, 19 nt, Artificial Sequence
  Description of Artificial Sequence: Synthetic oligonucleotide
  Sense strand starting at position 299 of SEQ ID NO: 1241549
cgcaguuaaaugugagauu

SEQ ID NO: 1280979 - RNA, 19 nt, Artificial Sequence
  Description of Artificial Sequence: Synthetic oligonucleotide
  Antisense strand to SEQ ID NO: 1280978
aaucucacauuuaacugcg

SEQ ID NO: 1280980 - RNA, 19 nt, Artificial Sequence
  Description of Artificial Sequence: Synthetic oligonucleotide
  Sense strand starting at position 329 of SEQ ID NO: 1241549
auguguagucugaggugca

SEQ ID NO: 1280981 - RNA, 19 nt, Artificial Sequence
  Description of Artificial Sequence: Synthetic oligonucleotide
  Antisense strand to SEQ ID NO: 1280980
ugcaccucagacuacacau

SEQ ID NO: 1280982 - RNA, 19 nt, Artificial Sequence
  Description of Artificial Sequence: Synthetic oligonucleotide
  Sense strand starting at position 353 of SEQ ID NO: 1241549
cuccacaugcugcgagaaa

SEQ ID NO: 1280983 - RNA, 19 nt, Artificial Sequence
  Description of Artificial Sequence: Synthetic oligonucleotide
  Antisense strand to SEQ ID NO: 1280982
uuucucgcagcauguggag

SEQ ID NO: 1280984 - RNA, 19 nt, Artificial Sequence
  Description of Artificial Sequence: Synthetic oligonucleotide
  Sense strand starting at position 366 of SEQ ID NO: 1241549
gagaaaccggccuaucagu

SEQ ID NO: 1280985 - RNA, 19 nt, Artificial Sequence
  Description of Artificial Sequence: Synthetic oligonucleotide
  Antisense strand to SEQ ID NO: 1280984
acugauaggccgguuucuc

SEQ ID NO: 1280986 - RNA, 19 nt, Artificial Sequence
  Description of Artificial Sequence: Synthetic oligonucleotide
  Sense strand starting at position 410 of SEQ ID NO: 1241549
gcgcuuuguacugcucuau

SEQ ID NO: 1280987 - RNA, 19 nt, Artificial Sequence
  Description of Artificial Sequence: Synthetic oligonucleotide
  Antisense strand to SEQ ID NO: 1280986
auagagcaguacaaagcgc

SEQ ID NO: 1280988 - RNA, 19 nt, Artificial Sequence
  Description of Artificial Sequence: Synthetic oligonucleotide
  Sense strand starting at position 494 of SEQ ID NO: 1241549
accgcucuccuguaccaaa

SEQ ID NO: 1280989 - RNA, 19 nt, Artificial Sequence
  Description of Artificial Sequence: Synthetic oligonucleotide
  Antisense strand to SEQ ID NO: 1280988
uuugguacaggagagcggu

SEQ ID NO: 1280990 - RNA, 19 nt, Artificial Sequence
  Description of Artificial Sequence: Synthetic oligonucleotide
  Sense strand starting at position 551 of SEQ ID NO: 1241549
augaaagugaugugagacu

SEQ ID NO: 1280991 - RNA, 19 nt, Artificial Sequence
  Description of Artificial Sequence: Synthetic oligonucleotide
  Antisense strand to SEQ ID NO: 1280990
agucucacaucacuuucau

SEQ ID NO: 1280992 - RNA, 19 nt, Artificial Sequence
  Description of Artificial Sequence: Synthetic oligonucleotide
  Sense strand starting at position 565 of SEQ ID NO: 1241549
agacuuuagggcugaucca

SEQ ID NO: 1280993 - RNA, 19 nt, Artificial Sequence
  Description of Artificial Sequence: Synthetic oligonucleotide
  Antisense strand to SEQ ID NO: 1280992
uggaucagcccuaaagucu

SEQ ID NO: 1280994 - RNA, 19 nt, Artificial Sequence
  Description of Artificial Sequence: Synthetic oligonucleotide
  Sense strand starting at position 697 of SEQ ID NO: 1241549
uugcuaugccaucauagca

SEQ ID NO: 1280995 - RNA, 19 nt, Artificial Sequence
  Description of Artificial Sequence: Synthetic oligonucleotide
  Antisense strand to SEQ ID NO: 1280994
ugcuaugauggcauagcaa

SEQ ID NO: 1280996 - RNA, 19 nt, Artificial Sequence
  Description of Artificial Sequence: Synthetic oligonucleotide
  Sense strand starting at position 715 of SEQ ID NO: 1241549
aguauaaaugguuaguguu

SEQ ID NO: 1280997 - RNA, 19 nt, Artificial Sequence
  Description of Artificial Sequence: Synthetic oligonucleotide
  Antisense strand to SEQ ID NO: 1280996
aacacuaaccauuuauacu

SEQ ID NO: 1280998 - RNA, 19 nt, Artificial Sequence
  Description of Artificial Sequence: Synthetic oligonucleotide
  Sense strand starting at position 813 of SEQ ID NO: 1241549
ugacuuaaacccgggaguu

SEQ ID NO: 1280999 - RNA, 19 nt, Artificial Sequence
  Description of Artificial Sequence: Synthetic oligonucleotide
  Antisense strand to SEQ ID NO: 1280998
aacucccggguuuaaguca

SEQ ID NO: 1281000 - RNA, 19 nt, Artificial Sequence
  Description of Artificial Sequence: Synthetic oligonucleotide
  Sense strand starting at position 814 of SEQ ID NO: 1241549
gacuuaaacccgggaguuc

SEQ ID NO: 1281001 - RNA, 19 nt, Artificial Sequence
  Description of Artificial Sequence: Synthetic oligonucleotide
  Antisense strand to SEQ ID NO: 1281000
gaacucccggguuuaaguc

SEQ ID NO: 1281002 - RNA, 19 nt, Artificial Sequence
  Description of Artificial Sequence: Synthetic oligonucleotide
  Sense strand starting at position 1283 of SEQ ID NO: 1241549
ccgucuguaauagagugau

SEQ ID NO: 1281003 - RNA, 19 nt, Artificial Sequence
  Description of Artificial Sequence: Synthetic oligonucleotide
  Antisense strand to SEQ ID NO: 1281002
aucacucuauuacagacgg

SEQ ID NO: 1281004 - RNA, 19 nt, Artificial Sequence
  Description of Artificial Sequence: Synthetic oligonucleotide
  Sense strand starting at position 1286 of SEQ ID NO: 1241549
ucuguaauagagugauguc

SEQ ID NO: 1281005 - RNA, 19 nt, Artificial Sequence
  Description of Artificial Sequence: Synthetic oligonucleotide
  Antisense strand to SEQ ID NO: 1281004
gacaucacucuauuacaga

SEQ ID NO: 1281006 - RNA, 19 nt, Artificial Sequence
  Description of Artificial Sequence: Synthetic oligonucleotide
  Sense strand starting at position 1287 of SEQ ID NO: 1241549
cuguaauagagugauguca

SEQ ID NO: 1281007 - RNA, 19 nt, Artificial Sequence
  Description of Artificial Sequence: Synthetic oligonucleotide
  Antisense strand to SEQ ID NO: 1281006
ugacaucacucuauuacag

SEQ ID NO: 1281008 - RNA, 19 nt, Artificial Sequence
  Description of Artificial Sequence: Synthetic oligonucleotide
  Sense strand starting at position 1295 of SEQ ID NO: 1241549
gagugaugucaguacccac

SEQ ID NO: 1281009 - RNA, 19 nt, Artificial Sequence
  Description of Artificial Sequence: Synthetic oligonucleotide
  Antisense strand to SEQ ID NO: 1281008
guggguacugacaucacuc

SEQ ID NO: 1281010 - RNA, 19 nt, Artificial Sequence
  Description of Artificial Sequence: Synthetic oligonucleotide
  Sense strand starting at position 1333 of SEQ ID NO: 1241549
gcaguaaagguuuggguca

SEQ ID NO: 1281011 - RNA, 19 nt, Artificial Sequence
  Description of Artificial Sequence: Synthetic oligonucleotide
  Antisense strand to SEQ ID NO: 1281010
ugacccaaaccuuuacugc

SEQ ID NO: 1281012 - RNA, 19 nt, Artificial Sequence
  Description of Artificial Sequence: Synthetic oligonucleotide
  Sense strand starting at position 1502 of SEQ ID NO: 1241549
aacaguaagugcuuaagac

SEQ ID NO: 1281013 - RNA, 19 nt, Artificial Sequence
  Description of Artificial Sequence: Synthetic oligonucleotide
  Antisense strand to SEQ ID NO: 1281012
gucuuaagcacuuacuguu

SEQ ID NO: 1281014 - RNA, 19 nt, Artificial Sequence
  Description of Artificial Sequence: Synthetic oligonucleotide
  Sense strand starting at position 1503 of SEQ ID NO: 1241549
acaguaagugcuuaagaca

SEQ ID NO: 1281015 - RNA, 19 nt, Artificial Sequence
  Description of Artificial Sequence: Synthetic oligonucleotide
  Antisense strand to SEQ ID NO: 1281014
ugucuuaagcacuuacugu

SEQ ID NO: 1281016 - RNA, 19 nt, Artificial Sequence
  Description of Artificial Sequence: Synthetic oligonucleotide
  Sense strand starting at position 2135 of SEQ ID NO: 1241549
ggauuucugacgugacguu

SEQ ID NO: 1281017 - RNA, 19 nt, Artificial Sequence
  Description of Artificial Sequence: Synthetic oligonucleotide
  Antisense strand to SEQ ID NO: 1281016
aacgucacgucagaaaucc

SEQ ID NO: 1281018 - RNA, 19 nt, Artificial Sequence
  Description of Artificial Sequence: Synthetic oligonucleotide
  Sense strand starting at position 2136 of SEQ ID NO: 1241549
gauuucugacgugacguuu

SEQ ID NO: 1281019 - RNA, 19 nt, Artificial Sequence
  Description of Artificial Sequence: Synthetic oligonucleotide
  Antisense strand to SEQ ID NO: 1281018
aaacgucacgucagaaauc

SEQ ID NO: 1281020 - RNA, 19 nt, Artificial Sequence
  Description of Artificial Sequence: Synthetic oligonucleotide
  Sense strand starting at position 2310 of SEQ ID NO: 1241549
gaggaacgcuuaucgaauu

SEQ ID NO: 1281021 - RNA, 19 nt, Artificial Sequence
  Description of Artificial Sequence: Synthetic oligonucleotide
  Antisense strand to SEQ ID NO: 1281020
aauucgauaagcguuccuc

SEQ ID NO: 1281022 - RNA, 19 nt, Artificial Sequence
  Description of Artificial Sequence: Synthetic oligonucleotide
  Sense strand starting at position 2357 of SEQ ID NO: 1241549
ggagccauuccugagcuca

SEQ ID NO: 1281023 - RNA, 19 nt, Artificial Sequence
  Description of Artificial Sequence: Synthetic oligonucleotide
  Antisense strand to SEQ ID NO: 1281022
ugagcucaggaauggcucc

SEQ ID NO: 1281024 - RNA, 19 nt, Artificial Sequence
  Description of Artificial Sequence: Synthetic oligonucleotide
  Sense strand starting at position 2371 of SEQ ID NO: 1241549
gcucauugcaaguaggaga

SEQ ID NO: 1281025 - RNA, 19 nt, Artificial Sequence
  Description of Artificial Sequence: Synthetic oligonucleotide
  Antisense strand to SEQ ID NO: 1281024
ucuccuacuugcaaugagc

SEQ ID NO: 1281026 - RNA, 19 nt, Artificial Sequence
  Description of Artificial Sequence: Synthetic oligonucleotide
  Sense strand starting at position 2406 of SEQ ID NO: 1241549
ccgaaacugguaugggaau

SEQ ID NO: 1281027 - RNA, 19 nt, Artificial Sequence
  Description of Artificial Sequence: Synthetic oligonucleotide
  Antisense strand to SEQ ID NO: 1281026
auucccauaccaguuucgg

SEQ ID NO: 1281028 - RNA, 19 nt, Artificial Sequence
  Description of Artificial Sequence: Synthetic oligonucleotide
  Sense strand starting at position 2735 of SEQ ID NO: 1241549
ccuuaaacucugggcuuaa

SEQ ID NO: 1281029 - RNA, 19 nt, Artificial Sequence
  Description of Artificial Sequence: Synthetic oligonucleotide
  Antisense strand to SEQ ID NO: 1281028
uuaagcccagaguuuaagg

SEQ ID NO: 1281030 - RNA, 19 nt, Artificial Sequence
  Description of Artificial Sequence: Synthetic oligonucleotide
  Sense strand starting at position 3106 of SEQ ID NO: 1241549
aguacugauucugucuaac

SEQ ID NO: 1281031 - RNA, 19 nt, Artificial Sequence
  Description of Artificial Sequence: Synthetic oligonucleotide
  Antisense strand to SEQ ID NO: 1281030
guuagacagaaucaguacu

SEQ ID NO: 1281032 - RNA, 19 nt, Artificial Sequence
  Description of Artificial Sequence: Synthetic oligonucleotide
  Sense strand starting at position 3261 of SEQ ID NO: 1241549
gauugugggcaugagucau

SEQ ID NO: 1281033 - RNA, 19 nt, Artificial Sequence
  Description of Artificial Sequence: Synthetic oligonucleotide
  Antisense strand to SEQ ID NO: 1281032
augacucaugcccacaauc

SEQ ID NO: 1281034 - RNA, 19 nt, Artificial Sequence
  Description of Artificial Sequence: Synthetic oligonucleotide
  Sense strand starting at position 3354 of SEQ ID NO: 1241549
cucagaugccuguaaggga

SEQ ID NO: 1281035 - RNA, 19 nt, Artificial Sequence
  Description of Artificial Sequence: Synthetic oligonucleotide
  Antisense strand to SEQ ID NO: 1281034
ucccuuacaggcaucugag

SEQ ID NO: 1281036 - RNA, 19 nt, Artificial Sequence
  Description of Artificial Sequence: Synthetic oligonucleotide
  Sense strand starting at position 3497 of SEQ ID NO: 1241549
ucuacaugucuguaguaga

SEQ ID NO: 1281037 - RNA, 19 nt, Artificial Sequence
  Description of Artificial Sequence: Synthetic oligonucleotide
  Antisense strand to SEQ ID NO: 1281036
ucuacuacagacauguaga

SEQ ID NO: 1281038 - RNA, 19 nt, Artificial Sequence
  Description of Artificial Sequence: Synthetic oligonucleotide
  Sense strand starting at position 3502 of SEQ ID NO: 1241549
augucuguaguagacauau

SEQ ID NO: 1281039 - RNA, 19 nt, Artificial Sequence
  Description of Artificial Sequence: Synthetic oligonucleotide
  Antisense strand to SEQ ID NO: 1281038
auaugucuacuacagacau

SEQ ID NO: 1281040 - RNA, 19 nt, Artificial Sequence
  Description of Artificial Sequence: Synthetic oligonucleotide
  Sense strand starting at position 3504 of SEQ ID NO: 1241549
gucuguaguagacauauua

SEQ ID NO: 1281041 - RNA, 19 nt, Artificial Sequence
  Description of Artificial Sequence: Synthetic oligonucleotide
  Antisense strand to SEQ ID NO: 1281040
uaauaugucuacuacagac

SEQ ID NO: 1281042 - RNA, 19 nt, Artificial Sequence
  Description of Artificial Sequence: Synthetic oligonucleotide
  Sense strand starting at position 3759 of SEQ ID NO: 1241549
ccaugagguguuuauuaug

SEQ ID NO: 1281043 - RNA, 19 nt, Artificial Sequence
  Description of Artificial Sequence: Synthetic oligonucleotide
  Antisense strand to SEQ ID NO: 1281042
cauaauaaacaccucaugg

SEQ ID NO: 1281044 - RNA, 19 nt, Artificial Sequence
  Description of Artificial Sequence: Synthetic oligonucleotide
  Sense strand starting at position 3765 of SEQ ID NO: 1241549
gguguuuauuaugucauuu

SEQ ID NO: 1281045 - RNA, 19 nt, Artificial Sequence
  Description of Artificial Sequence: Synthetic oligonucleotide
  Antisense strand to SEQ ID NO: 1281044
aaaugacauaauaaacacc

SEQ ID NO: 1281046 - RNA, 19 nt, Artificial Sequence
  Description of Artificial Sequence: Synthetic oligonucleotide
  Sense strand starting at position 3956 of SEQ ID NO: 1241549
cuaacuguggucuauccau

SEQ ID NO: 1281047 - RNA, 19 nt, Artificial Sequence
  Description of Artificial Sequence: Synthetic oligonucleotide
  Antisense strand to SEQ ID NO: 1281046
auggauagaccacaguuag

SEQ ID NO: 1281048 - RNA, 19 nt, Artificial Sequence
  Description of Artificial Sequence: Synthetic oligonucleotide
  Sense strand starting at position 72 of SEQ ID NO: 1241550
aagagaagucuugguugac

SEQ ID NO: 1281049 - RNA, 19 nt, Artificial Sequence
  Description of Artificial Sequence: Synthetic oligonucleotide
  Antisense strand to SEQ ID NO: 1281048
gucaaccaagacuucucuu

SEQ ID NO: 1281050 - RNA, 19 nt, Artificial Sequence
  Description of Artificial Sequence: Synthetic oligonucleotide
  Sense strand starting at position 73 of SEQ ID NO: 1241550
agagaagucuugguugaca

SEQ ID NO: 1281051 - RNA, 19 nt, Artificial Sequence
  Description of Artificial Sequence: Synthetic oligonucleotide
  Antisense strand to SEQ ID NO: 1281050
ugucaaccaagacuucucu

SEQ ID NO: 1281052 - RNA, 19 nt, Artificial Sequence
  Description of Artificial Sequence: Synthetic oligonucleotide
  Sense strand starting at position 176 of SEQ ID NO: 1241550
gggagauauucugcuaauu

SEQ ID NO: 1281053 - RNA, 19 nt, Artificial Sequence
  Description of Artificial Sequence: Synthetic oligonucleotide
  Antisense strand to SEQ ID NO: 1281052
aauuagcagaauaucuccc

SEQ ID NO: 1281054 - RNA, 19 nt, Artificial Sequence
  Description of Artificial Sequence: Synthetic oligonucleotide
  Sense strand starting at position 185 of SEQ ID NO: 1241550
ucugcuaauugugcuugaa

SEQ ID NO: 1281055 - RNA, 19 nt, Artificial Sequence
  Description of Artificial Sequence: Synthetic oligonucleotide
  Antisense strand to SEQ ID NO: 1281054
uucaagcacaauuagcaga

SEQ ID NO: 1281056 - RNA, 19 nt, Artificial Sequence
  Description of Artificial Sequence: Synthetic oligonucleotide
  Sense strand starting at position 187 of SEQ ID NO: 1241550
ugcuaauugugcuugaauc

SEQ ID NO: 1281057 - RNA, 19 nt, Artificial Sequence
  Description of Artificial Sequence: Synthetic oligonucleotide
  Antisense strand to SEQ ID NO: 1281056
gauucaagcacaauuagca

SEQ ID NO: 1281058 - RNA, 19 nt, Artificial Sequence
  Description of Artificial Sequence: Synthetic oligonucleotide
  Sense strand starting at position 188 of SEQ ID NO: 1241550
gcuaauugugcuugaaucu

SEQ ID NO: 1281059 - RNA, 19 nt, Artificial Sequence
  Description of Artificial Sequence: Synthetic oligonucleotide
  Antisense strand to SEQ ID NO: 1281058
agauucaagcacaauuagc

SEQ ID NO: 1281060 - RNA, 19 nt, Artificial Sequence
  Description of Artificial Sequence: Synthetic oligonucleotide
  Sense strand starting at position 189 of SEQ ID NO: 1241550
cuaauugugcuugaaucua

SEQ ID NO: 1281061 - RNA, 19 nt, Artificial Sequence
  Description of Artificial Sequence: Synthetic oligonucleotide
  Antisense strand to SEQ ID NO: 1281060
uagauucaagcacaauuag

SEQ ID NO: 1281062 - RNA, 19 nt, Artificial Sequence
  Description of Artificial Sequence: Synthetic oligonucleotide
  Sense strand starting at position 349 of SEQ ID NO: 1241550
ucaagaagccuguauccca

SEQ ID NO: 1281063 - RNA, 19 nt, Artificial Sequence
  Description of Artificial Sequence: Synthetic oligonucleotide
  Antisense strand to SEQ ID NO: 1281062
ugggauacaggcuucuuga

SEQ ID NO: 1281064 - RNA, 19 nt, Artificial Sequence
  Description of Artificial Sequence: Synthetic oligonucleotide
  Sense strand starting at position 453 of SEQ ID NO: 1241550
uuuguucugcggucuuaua

SEQ ID NO: 1281065 - RNA, 19 nt, Artificial Sequence
  Description of Artificial Sequence: Synthetic oligonucleotide
  Antisense strand to SEQ ID NO: 1281064
uauaagaccgcagaacaaa

SEQ ID NO: 1281066 - RNA, 19 nt, Artificial Sequence
  Description of Artificial Sequence: Synthetic oligonucleotide
  Sense strand starting at position 460 of SEQ ID NO: 1241550
ugcggucuuauagaaacau

SEQ ID NO: 1281067 - RNA, 19 nt, Artificial Sequence
  Description of Artificial Sequence: Synthetic oligonucleotide
  Antisense strand to SEQ ID NO: 1281066
auguuucuauaagaccgca

SEQ ID NO: 1281068 - RNA, 19 nt, Artificial Sequence
  Description of Artificial Sequence: Synthetic oligonucleotide
  Sense strand starting at position 532 of SEQ ID NO: 1241550
aucugugguccugggaaca

SEQ ID NO: 1281069 - RNA, 19 nt, Artificial Sequence
  Description of Artificial Sequence: Synthetic oligonucleotide
  Antisense strand to SEQ ID NO: 1281068
uguucccaggaccacagau

SEQ ID NO: 1281070 - RNA, 19 nt, Artificial Sequence
  Description of Artificial Sequence: Synthetic oligonucleotide
  Sense strand starting at position 618 of SEQ ID NO: 1241550
ccugguuuccuggaagggu

SEQ ID NO: 1281071 - RNA, 19 nt, Artificial Sequence
  Description of Artificial Sequence: Synthetic oligonucleotide
  Antisense strand to SEQ ID NO: 1281070
acccuuccaggaaaccagg

SEQ ID NO: 1281072 - RNA, 19 nt, Artificial Sequence
  Description of Artificial Sequence: Synthetic oligonucleotide
  Sense strand starting at position 666 of SEQ ID NO: 1241550
cugcauucuccaggccaua

SEQ ID NO: 1281073 - RNA, 19 nt, Artificial Sequence
  Description of Artificial Sequence: Synthetic oligonucleotide
  Antisense strand to SEQ ID NO: 1281072
uauggccuggagaaugcag

SEQ ID NO: 1281074 - RNA, 19 nt, Artificial Sequence
  Description of Artificial Sequence: Synthetic oligonucleotide
  Sense strand starting at position 677 of SEQ ID NO: 1241550
aggccauaccaguagugaa

SEQ ID NO: 1281075 - RNA, 19 nt, Artificial Sequence
  Description of Artificial Sequence: Synthetic oligonucleotide
  Antisense strand to SEQ ID NO: 1281074
uucacuacugguauggccu

SEQ ID NO: 1281076 - RNA, 19 nt, Artificial Sequence
  Description of Artificial Sequence: Synthetic oligonucleotide
  Sense strand starting at position 720 of SEQ ID NO: 1241550
aguggaaacuguccagaaa

SEQ ID NO: 1281077 - RNA, 19 nt, Artificial Sequence
  Description of Artificial Sequence: Synthetic oligonucleotide
  Antisense strand to SEQ ID NO: 1281076
uuucuggacaguuuccacu

SEQ ID NO: 1281078 - RNA, 19 nt, Artificial Sequence
  Description of Artificial Sequence: Synthetic oligonucleotide
  Sense strand starting at position 855 of SEQ ID NO: 1241550
cgcggagucgcgucugagu

SEQ ID NO: 1281079 - RNA, 19 nt, Artificial Sequence
  Description of Artificial Sequence: Synthetic oligonucleotide
  Antisense strand to SEQ ID NO: 1281078
acucagacgcgacuccgcg

SEQ ID NO: 1281080 - RNA, 19 nt, Artificial Sequence
  Description of Artificial Sequence: Synthetic oligonucleotide
  Sense strand starting at position 856 of SEQ ID NO: 1241550
gcggagucgcgucugaguu

SEQ ID NO: 1281081 - RNA, 19 nt, Artificial Sequence
  Description of Artificial Sequence: Synthetic oligonucleotide
  Antisense strand to SEQ ID NO: 1281080
aacucagacgcgacuccgc

SEQ ID NO: 1281082 - RNA, 19 nt, Artificial Sequence
  Description of Artificial Sequence: Synthetic oligonucleotide
  Sense strand starting at position 942 of SEQ ID NO: 1241550
aggaucaauccuuggcaga

SEQ ID NO: 1281083 - RNA, 19 nt, Artificial Sequence
  Description of Artificial Sequence: Synthetic oligonucleotide
  Antisense strand to SEQ ID NO: 1281082
ucugccaaggauugauccu

SEQ ID NO: 1281084 - RNA, 19 nt, Artificial Sequence
  Description of Artificial Sequence: Synthetic oligonucleotide
  Sense strand starting at position 943 of SEQ ID NO: 1241550
ggaucaauccuuggcagaa

SEQ ID NO: 1281085 - RNA, 19 nt, Artificial Sequence
  Description of Artificial Sequence: Synthetic oligonucleotide
  Antisense strand to SEQ ID NO: 1281084
uucugccaaggauugaucc

SEQ ID NO: 1281086 - RNA, 19 nt, Artificial Sequence
  Description of Artificial Sequence: Synthetic oligonucleotide
  Sense strand starting at position 1244 of SEQ ID NO: 1241550
uugugaagacgauggaauu

SEQ ID NO: 1281087 - RNA, 19 nt, Artificial Sequence
  Description of Artificial Sequence: Synthetic oligonucleotide
  Antisense strand to SEQ ID NO: 1281086
aauuccaucgucuucacaa

SEQ ID NO: 1281088 - RNA, 19 nt, Artificial Sequence
  Description of Artificial Sequence: Synthetic oligonucleotide
  Sense strand starting at position 1250 of SEQ ID NO: 1241550
agacgauggaauugacagu

SEQ ID NO: 1281089 - RNA, 19 nt, Artificial Sequence
  Description of Artificial Sequence: Synthetic oligonucleotide
  Antisense strand to SEQ ID NO: 1281088
acugucaauuccaucgucu

SEQ ID NO: 1281090 - RNA, 19 nt, Artificial Sequence
  Description of Artificial Sequence: Synthetic oligonucleotide
  Sense strand starting at position 1286 of SEQ ID NO: 1241550
gggcaucuuuggcuagaga

SEQ ID NO: 1281091 - RNA, 19 nt, Artificial Sequence
  Description of Artificial Sequence: Synthetic oligonucleotide
  Antisense strand to SEQ ID NO: 1281090
ucucuagccaaagaugccc

SEQ ID NO: 1281092 - RNA, 19 nt, Artificial Sequence
  Description of Artificial Sequence: Synthetic oligonucleotide
  Sense strand starting at position 1287 of SEQ ID NO: 1241550
ggcaucuuuggcuagagau

SEQ ID NO: 1281093 - RNA, 19 nt, Artificial Sequence
  Description of Artificial Sequence: Synthetic oligonucleotide
  Antisense strand to SEQ ID NO: 1281092
aucucuagccaaagaugcc

SEQ ID NO: 1281094 - RNA, 19 nt, Artificial Sequence
  Description of Artificial Sequence: Synthetic oligonucleotide
  Sense strand starting at position 2443 of SEQ ID NO: 1241550
cuggaauuccaccgcaauu

SEQ ID NO: 1281095 - RNA, 19 nt, Artificial Sequence
  Description of Artificial Sequence: Synthetic oligonucleotide
  Antisense strand to SEQ ID NO: 1281094
aauugcgguggaauuccag

SEQ ID NO: 1281096 - RNA, 19 nt, Artificial Sequence
  Description of Artificial Sequence: Synthetic oligonucleotide
  Sense strand starting at position 2738 of SEQ ID NO: 1241550
ggagcuauccgugcagugu

SEQ ID NO: 1281097 - RNA, 19 nt, Artificial Sequence
  Description of Artificial Sequence: Synthetic oligonucleotide
  Antisense strand to SEQ ID NO: 1281096
acacugcacggauagcucc

SEQ ID NO: 1281098 - RNA, 19 nt, Artificial Sequence
  Description of Artificial Sequence: Synthetic oligonucleotide
  Sense strand starting at position 2755 of SEQ ID NO: 1241550
guguguccgugauuuaucu

SEQ ID NO: 1281099 - RNA, 19 nt, Artificial Sequence
  Description of Artificial Sequence: Synthetic oligonucleotide
  Antisense strand to SEQ ID NO: 1281098
agauaaaucacggacacac

SEQ ID NO: 1281100 - RNA, 19 nt, Artificial Sequence
  Description of Artificial Sequence: Synthetic oligonucleotide
  Sense strand starting at position 3049 of SEQ ID NO: 1241550
gucggauugcaacagaagu

SEQ ID NO: 1281101 - RNA, 19 nt, Artificial Sequence
  Description of Artificial Sequence: Synthetic oligonucleotide
  Antisense strand to SEQ ID NO: 1281100
acuucuguugcaauccgac

SEQ ID NO: 1281102 - RNA, 19 nt, Artificial Sequence
  Description of Artificial Sequence: Synthetic oligonucleotide
  Sense strand starting at position 3051 of SEQ ID NO: 1241550
cggauugcaacagaaguuu

SEQ ID NO: 1281103 - RNA, 19 nt, Artificial Sequence
  Description of Artificial Sequence: Synthetic oligonucleotide
  Antisense strand to SEQ ID NO: 1281102
aaacuucuguugcaauccg

SEQ ID NO: 1281104 - RNA, 19 nt, Artificial Sequence
  Description of Artificial Sequence: Synthetic oligonucleotide
  Sense strand starting at position 3167 of SEQ ID NO: 1241550
aguuauuucuuugaugaag

SEQ ID NO: 1281105 - RNA, 19 nt, Artificial Sequence
  Description of Artificial Sequence: Synthetic oligonucleotide
  Antisense strand to SEQ ID NO: 1281104
cuucaucaaagaaauaacu

SEQ ID NO: 1281106 - RNA, 19 nt, Artificial Sequence
  Description of Artificial Sequence: Synthetic oligonucleotide
  Sense strand starting at position 3169 of SEQ ID NO: 1241550
uuauuucuuugaugaaggu

SEQ ID NO: 1281107 - RNA, 19 nt, Artificial Sequence
  Description of Artificial Sequence: Synthetic oligonucleotide
  Antisense strand to SEQ ID NO: 1281106
accuucaucaaagaaauaa

SEQ ID NO: 1281108 - RNA, 19 nt, Artificial Sequence
  Description of Artificial Sequence: Synthetic oligonucleotide
  Sense strand starting at position 3173 of SEQ ID NO: 1241550
uucuuugaugaagguauau

SEQ ID NO: 1281109 - RNA, 19 nt, Artificial Sequence
  Description of Artificial Sequence: Synthetic oligonucleotide
  Antisense strand to SEQ ID NO: 1281108
auauaccuucaucaaagaa

SEQ ID NO: 1281110 - RNA, 19 nt, Artificial Sequence
  Description of Artificial Sequence: Synthetic oligonucleotide
  Sense strand starting at position 3182 of SEQ ID NO: 1241550
gaagguauauaagauguaa

SEQ ID NO: 1281111 - RNA, 19 nt, Artificial Sequence
  Description of Artificial Sequence: Synthetic oligonucleotide
  Antisense strand to SEQ ID NO: 1281110
uuacaucuuauauaccuuc

SEQ ID NO: 1281112 - RNA, 19 nt, Artificial Sequence
  Description of Artificial Sequence: Synthetic oligonucleotide
  Sense strand starting at position 3230 of SEQ ID NO: 1241550
ccaucaccugcagaaaguu

SEQ ID NO: 1281113 - RNA, 19 nt, Artificial Sequence
  Description of Artificial Sequence: Synthetic oligonucleotide
  Antisense strand to SEQ ID NO: 1281112
aacuuucugcaggugaugg

SEQ ID NO: 1281114 - RNA, 19 nt, Artificial Sequence
  Description of Artificial Sequence: Synthetic oligonucleotide
  Sense strand starting at position 3323 of SEQ ID NO: 1241550
agacuuaagucuuugaaug

SEQ ID NO: 1281115 - RNA, 19 nt, Artificial Sequence
  Description of Artificial Sequence: Synthetic oligonucleotide
  Antisense strand to SEQ ID NO: 1281114
cauucaaagacuuaagucu

SEQ ID NO: 1281116 - RNA, 19 nt, Artificial Sequence
  Description of Artificial Sequence: Synthetic oligonucleotide
  Sense strand starting at position 3324 of SEQ ID NO: 1241550
gacuuaagucuuugaaugu

SEQ ID NO: 1281117 - RNA, 19 nt, Artificial Sequence
  Description of Artificial Sequence: Synthetic oligonucleotide
  Antisense strand to SEQ ID NO: 1281116
acauucaaagacuuaaguc

SEQ ID NO: 1281118 - RNA, 19 nt, Artificial Sequence
  Description of Artificial Sequence: Synthetic oligonucleotide
  Sense strand starting at position 3328 of SEQ ID NO: 1241550
uaagucuuugaauguaaug

SEQ ID NO: 1281119 - RNA, 19 nt, Artificial Sequence
  Description of Artificial Sequence: Synthetic oligonucleotide
  Antisense strand to SEQ ID NO: 1281118
cauuacauucaaagacuua

SEQ ID NO: 1281120 - RNA, 19 nt, Artificial Sequence
  Description of Artificial Sequence: Synthetic oligonucleotide
  Sense strand starting at position 3745 of SEQ ID NO: 1241550
uugucuauuucugacacau

SEQ ID NO: 1281121 - RNA, 19 nt, Artificial Sequence
  Description of Artificial Sequence: Synthetic oligonucleotide
  Antisense strand to SEQ ID NO: 1281120
augugucagaaauagacaa

SEQ ID NO: 1281122 - RNA, 19 nt, Artificial Sequence
  Description of Artificial Sequence: Synthetic oligonucleotide
  Sense strand starting at position 3762 of SEQ ID NO: 1241550
auggucuaaugcuuggaaa

SEQ ID NO: 1281123 - RNA, 19 nt, Artificial Sequence
  Description of Artificial Sequence: Synthetic oligonucleotide
  Antisense strand to SEQ ID NO: 1281122
uuuccaagcauuagaccau

SEQ ID NO: 1281124 - RNA, 19 nt, Artificial Sequence
  Description of Artificial Sequence: Synthetic oligonucleotide
  Sense strand starting at position 3763 of SEQ ID NO: 1241550
uggucuaaugcuuggaaau

SEQ ID NO: 1281125 - RNA, 19 nt, Artificial Sequence
  Description of Artificial Sequence: Synthetic oligonucleotide
  Antisense strand to SEQ ID NO: 1281124
auuuccaagcauuagacca

SEQ ID NO: 1281126 - RNA, 19 nt, Artificial Sequence
  Description of Artificial Sequence: Synthetic oligonucleotide
  Sense strand starting at position 3764 of SEQ ID NO: 1241550
ggucuaaugcuuggaaauc

SEQ ID NO: 1281127 - RNA, 19 nt, Artificial Sequence
  Description of Artificial Sequence: Synthetic oligonucleotide
  Antisense strand to SEQ ID NO: 1281126
gauuuccaagcauuagacc

SEQ ID NO: 1281128 - RNA, 19 nt, Artificial Sequence
  Description of Artificial Sequence: Synthetic oligonucleotide
  Sense strand starting at position 37 of SEQ ID NO: 1241551
uguggaaacugagucagaa

SEQ ID NO: 1281129 - RNA, 19 nt, Artificial Sequence
  Description of Artificial Sequence: Synthetic oligonucleotide
  Antisense strand to SEQ ID NO: 1281128
uucugacucaguuuccaca

SEQ ID NO: 1281130 - RNA, 19 nt, Artificial Sequence
  Description of Artificial Sequence: Synthetic oligonucleotide
  Sense strand starting at position 59 of SEQ ID NO: 1241551
auaagugaauuggccagau

SEQ ID NO: 1281131 - RNA, 19 nt, Artificial Sequence
  Description of Artificial Sequence: Synthetic oligonucleotide
  Antisense strand to SEQ ID NO: 1281130
aucuggccaauucacuuau

SEQ ID NO: 1281132 - RNA, 19 nt, Artificial Sequence
  Description of Artificial Sequence: Synthetic oligonucleotide
  Sense strand starting at position 63 of SEQ ID NO: 1241551
gugaauuggccagaucaug

SEQ ID NO: 1281133 - RNA, 19 nt, Artificial Sequence
  Description of Artificial Sequence: Synthetic oligonucleotide
  Antisense strand to SEQ ID NO: 1281132
caugaucuggccaauucac

SEQ ID NO: 1281134 - RNA, 19 nt, Artificial Sequence
  Description of Artificial Sequence: Synthetic oligonucleotide
  Sense strand starting at position 123 of SEQ ID NO: 1241551
ugguuucuacuuggccaau

SEQ ID NO: 1281135 - RNA, 19 nt, Artificial Sequence
  Description of Artificial Sequence: Synthetic oligonucleotide
  Antisense strand to SEQ ID NO: 1281134
auuggccaaguagaaacca

SEQ ID NO: 1281136 - RNA, 19 nt, Artificial Sequence
  Description of Artificial Sequence: Synthetic oligonucleotide
  Sense strand starting at position 124 of SEQ ID NO: 1241551
gguuucuacuuggccaaua

SEQ ID NO: 1281137 - RNA, 19 nt, Artificial Sequence
  Description of Artificial Sequence: Synthetic oligonucleotide
  Antisense strand to SEQ ID NO: 1281136
uauuggccaaguagaaacc

SEQ ID NO: 1281138 - RNA, 19 nt, Artificial Sequence
  Description of Artificial Sequence: Synthetic oligonucleotide
  Sense strand starting at position 261 of SEQ ID NO: 1241551
ucuuccaugcuaugcagaa

SEQ ID NO: 1281139 - RNA, 19 nt, Artificial Sequence
  Description of Artificial Sequence: Synthetic oligonucleotide
  Antisense strand to SEQ ID NO: 1281138
uucugcauagcauggaaga

SEQ ID NO: 1281140 - RNA, 19 nt, Artificial Sequence
  Description of Artificial Sequence: Synthetic oligonucleotide
  Sense strand starting at position 274 of SEQ ID NO: 1241551
gcagaagagccaggucuaa

SEQ ID NO: 1281141 - RNA, 19 nt, Artificial Sequence
  Description of Artificial Sequence: Synthetic oligonucleotide
  Antisense strand to SEQ ID NO: 1281140
uuagaccuggcucuucugc

SEQ ID NO: 1281142 - RNA, 19 nt, Artificial Sequence
  Description of Artificial Sequence: Synthetic oligonucleotide
  Sense strand starting at position 477 of SEQ ID NO: 1241551
caaguuacccagggagcua

SEQ ID NO: 1281143 - RNA, 19 nt, Artificial Sequence
  Description of Artificial Sequence: Synthetic oligonucleotide
  Antisense strand to SEQ ID NO: 1281142
uagcucccuggguaacuug

SEQ ID NO: 1281144 - RNA, 19 nt, Artificial Sequence
  Description of Artificial Sequence: Synthetic oligonucleotide
  Sense strand starting at position 490 of SEQ ID NO: 1241551
gagcuaauggguuguccua

SEQ ID NO: 1281145 - RNA, 19 nt, Artificial Sequence
  Description of Artificial Sequence: Synthetic oligonucleotide
  Antisense strand to SEQ ID NO: 1281144
uaggacaacccauuagcuc

SEQ ID NO: 1281146 - RNA, 19 nt, Artificial Sequence
  Description of Artificial Sequence: Synthetic oligonucleotide
  Sense strand starting at position 683 of SEQ ID NO: 1241551
ggaucccauccuuguccaa

SEQ ID NO: 1281147 - RNA, 19 nt, Artificial Sequence
  Description of Artificial Sequence: Synthetic oligonucleotide
  Antisense strand to SEQ ID NO: 1281146
uuggacaaggaugggaucc

SEQ ID NO: 1281148 - RNA, 19 nt, Artificial Sequence
  Description of Artificial Sequence: Synthetic oligonucleotide
  Sense strand starting at position 799 of SEQ ID NO: 1241551
gcuuauuauuucuugagca

SEQ ID NO: 1281149 - RNA, 19 nt, Artificial Sequence
  Description of Artificial Sequence: Synthetic oligonucleotide
  Antisense strand to SEQ ID NO: 1281148
ugcucaagaaauaauaagc

SEQ ID NO: 1281150 - RNA, 19 nt, Artificial Sequence
  Description of Artificial Sequence: Synthetic oligonucleotide
  Sense strand starting at position 968 of SEQ ID NO: 1241551
gcgagugaccucgaggauc

SEQ ID NO: 1281151 - RNA, 19 nt, Artificial Sequence
  Description of Artificial Sequence: Synthetic oligonucleotide
  Antisense strand to SEQ ID NO: 1281150
gauccucgaggucacucgc

SEQ ID NO: 1281152 - RNA, 19 nt, Artificial Sequence
  Description of Artificial Sequence: Synthetic oligonucleotide
  Sense strand starting at position 970 of SEQ ID NO: 1241551
gagugaccucgaggaucaa

SEQ ID NO: 1281153 - RNA, 19 nt, Artificial Sequence
  Description of Artificial Sequence: Synthetic oligonucleotide
  Antisense strand to SEQ ID NO: 1281152
uugauccucgaggucacuc

SEQ ID NO: 1281154 - RNA, 19 nt, Artificial Sequence
  Description of Artificial Sequence: Synthetic oligonucleotide
  Sense strand starting at position 1282 of SEQ ID NO: 1241551
cggacagguagccgagauu

SEQ ID NO: 1281155 - RNA, 19 nt, Artificial Sequence
  Description of Artificial Sequence: Synthetic oligonucleotide
  Antisense strand to SEQ ID NO: 1281154
aaucucggcuaccuguccg

SEQ ID NO: 1281156 - RNA, 19 nt, Artificial Sequence
  Description of Artificial Sequence: Synthetic oligonucleotide
  Sense strand starting at position 1454 of SEQ ID NO: 1241551
gcgggcuuccuggauuuca

SEQ ID NO: 1281157 - RNA, 19 nt, Artificial Sequence
  Description of Artificial Sequence: Synthetic oligonucleotide
  Antisense strand to SEQ ID NO: 1281156
ugaaauccaggaagcccgc

SEQ ID NO: 1281158 - RNA, 19 nt, Artificial Sequence
  Description of Artificial Sequence: Synthetic oligonucleotide
  Sense strand starting at position 1720 of SEQ ID NO: 1241551
agccuaaugcagggagaua

SEQ ID NO: 1281159 - RNA, 19 nt, Artificial Sequence
  Description of Artificial Sequence: Synthetic oligonucleotide
  Antisense strand to SEQ ID NO: 1281158
uaucucccugcauuaggcu

SEQ ID NO: 1281160 - RNA, 19 nt, Artificial Sequence
  Description of Artificial Sequence: Synthetic oligonucleotide
  Sense strand starting at position 2435 of SEQ ID NO: 1241551
ggcuuucccaagugaguga

SEQ ID NO: 1281161 - RNA, 19 nt, Artificial Sequence
  Description of Artificial Sequence: Synthetic oligonucleotide
  Antisense strand to SEQ ID NO: 1281160
ucacucacuugggaaagcc

SEQ ID NO: 1281162 - RNA, 19 nt, Artificial Sequence
  Description of Artificial Sequence: Synthetic oligonucleotide
  Sense strand starting at position 2515 of SEQ ID NO: 1241551
gucagaaaggcaugucuug

SEQ ID NO: 1281163 - RNA, 19 nt, Artificial Sequence
  Description of Artificial Sequence: Synthetic oligonucleotide
  Antisense strand to SEQ ID NO: 1281162
caagacaugccuuucugac

SEQ ID NO: 1281164 - RNA, 19 nt, Artificial Sequence
  Description of Artificial Sequence: Synthetic oligonucleotide
  Sense strand starting at position 2561 of SEQ ID NO: 1241551
gacgcuuuacagugguaaa

SEQ ID NO: 1281165 - RNA, 19 nt, Artificial Sequence
  Description of Artificial Sequence: Synthetic oligonucleotide
  Antisense strand to SEQ ID NO: 1281164
uuuaccacuguaaagcguc

SEQ ID NO: 1281166 - RNA, 19 nt, Artificial Sequence
  Description of Artificial Sequence: Synthetic oligonucleotide
  Sense strand starting at position 2578 of SEQ ID NO: 1241551
aaugcagaccucugagaag

SEQ ID NO: 1281167 - RNA, 19 nt, Artificial Sequence
  Description of Artificial Sequence: Synthetic oligonucleotide
  Antisense strand to SEQ ID NO: 1281166
cuucucagaggucugcauu

SEQ ID NO: 1281168 - RNA, 19 nt, Artificial Sequence
  Description of Artificial Sequence: Synthetic oligonucleotide
  Sense strand starting at position 2710 of SEQ ID NO: 1241551
aagagaaccguuugucuuu

SEQ ID NO: 1281169 - RNA, 19 nt, Artificial Sequence
  Description of Artificial Sequence: Synthetic oligonucleotide
  Antisense strand to SEQ ID NO: 1281168
aaagacaaacgguucucuu

SEQ ID NO: 1281170 - RNA, 19 nt, Artificial Sequence
  Description of Artificial Sequence: Synthetic oligonucleotide
  Sense strand starting at position 2711 of SEQ ID NO: 1241551
agagaaccguuugucuuua

SEQ ID NO: 1281171 - RNA, 19 nt, Artificial Sequence
  Description of Artificial Sequence: Synthetic oligonucleotide
  Antisense strand to SEQ ID NO: 1281170
uaaagacaaacgguucucu

SEQ ID NO: 1281172 - RNA, 19 nt, Artificial Sequence
  Description of Artificial Sequence: Synthetic oligonucleotide
  Sense strand starting at position 2712 of SEQ ID NO: 1241551
gagaaccguuugucuuuau

SEQ ID NO: 1281173 - RNA, 19 nt, Artificial Sequence
  Description of Artificial Sequence: Synthetic oligonucleotide
  Antisense strand to SEQ ID NO: 1281172
auaaagacaaacgguucuc

SEQ ID NO: 1281174 - RNA, 19 nt, Artificial Sequence
  Description of Artificial Sequence: Synthetic oligonucleotide
  Sense strand starting at position 2725 of SEQ ID NO: 1241551
cuuuaugucucuguauaug

SEQ ID NO: 1281175 - RNA, 19 nt, Artificial Sequence
  Description of Artificial Sequence: Synthetic oligonucleotide
  Antisense strand to SEQ ID NO: 1281174
cauauacagagacauaaag

SEQ ID NO: 1281176 - RNA, 19 nt, Artificial Sequence
  Description of Artificial Sequence: Synthetic oligonucleotide
  Sense strand starting at position 2746 of SEQ ID NO: 1241551
cguguaugcauggaaaggu

SEQ ID NO: 1281177 - RNA, 19 nt, Artificial Sequence
  Description of Artificial Sequence: Synthetic oligonucleotide
  Antisense strand to SEQ ID NO: 1281176
accuuuccaugcauacacg

SEQ ID NO: 1281178 - RNA, 19 nt, Artificial Sequence
  Description of Artificial Sequence: Synthetic oligonucleotide
  Sense strand starting at position 2949 of SEQ ID NO: 1241551
gcgcuaucacuaguuccuu

SEQ ID NO: 1281179 - RNA, 19 nt, Artificial Sequence
  Description of Artificial Sequence: Synthetic oligonucleotide
  Antisense strand to SEQ ID NO: 1281178
aaggaacuagugauagcgc

SEQ ID NO: 1281180 - RNA, 19 nt, Artificial Sequence
  Description of Artificial Sequence: Synthetic oligonucleotide
  Sense strand starting at position 2975 of SEQ ID NO: 1241551
ggaauaggacgcugauauu

SEQ ID NO: 1281181 - RNA, 19 nt, Artificial Sequence
  Description of Artificial Sequence: Synthetic oligonucleotide
  Antisense strand to SEQ ID NO: 1281180
aauaucagcguccuauucc

SEQ ID NO: 1281182 - RNA, 19 nt, Artificial Sequence
  Description of Artificial Sequence: Synthetic oligonucleotide
  Sense strand starting at position 3003 of SEQ ID NO: 1241551
ggguauauuuguuauccag

SEQ ID NO: 1281183 - RNA, 19 nt, Artificial Sequence
  Description of Artificial Sequence: Synthetic oligonucleotide
  Antisense strand to SEQ ID NO: 1281182
cuggauaacaaauauaccc

SEQ ID NO: 1281184 - RNA, 19 nt, Artificial Sequence
  Description of Artificial Sequence: Synthetic oligonucleotide
  Sense strand starting at position 3005 of SEQ ID NO: 1241551
guauauuuguuauccaggu

SEQ ID NO: 1281185 - RNA, 19 nt, Artificial Sequence
  Description of Artificial Sequence: Synthetic oligonucleotide
  Antisense strand to SEQ ID NO: 1281184
accuggauaacaaauauac

SEQ ID NO: 1281186 - RNA, 19 nt, Artificial Sequence
  Description of Artificial Sequence: Synthetic oligonucleotide
  Sense strand starting at position 3009 of SEQ ID NO: 1241551
auuuguuauccagguguac

SEQ ID NO: 1281187 - RNA, 19 nt, Artificial Sequence
  Description of Artificial Sequence: Synthetic oligonucleotide
  Antisense strand to SEQ ID NO: 1281186
guacaccuggauaacaaau

SEQ ID NO: 1281188 - RNA, 19 nt, Artificial Sequence
  Description of Artificial Sequence: Synthetic oligonucleotide
  Sense strand starting at position 3029 of SEQ ID NO: 1241551
gcaaacgauuucuagaggu

SEQ ID NO: 1281189 - RNA, 19 nt, Artificial Sequence
  Description of Artificial Sequence: Synthetic oligonucleotide
  Antisense strand to SEQ ID NO: 1281188
accucuagaaaucguuugc

SEQ ID NO: 1281190 - RNA, 19 nt, Artificial Sequence
  Description of Artificial Sequence: Synthetic oligonucleotide
  Sense strand starting at position 3099 of SEQ ID NO: 1241551
gcaagcuccaggugaucua

SEQ ID NO: 1281191 - RNA, 19 nt, Artificial Sequence
  Description of Artificial Sequence: Synthetic oligonucleotide
  Antisense strand to SEQ ID NO: 1281190
uagaucaccuggagcuugc

SEQ ID NO: 1281192 - RNA, 19 nt, Artificial Sequence
  Description of Artificial Sequence: Synthetic oligonucleotide
  Sense strand starting at position 3270 of SEQ ID NO: 1241551
ggcccacauuccuuaggga

SEQ ID NO: 1281193 - RNA, 19 nt, Artificial Sequence
  Description of Artificial Sequence: Synthetic oligonucleotide
  Antisense strand to SEQ ID NO: 1281192
ucccuaaggaaugugggcc

SEQ ID NO: 1281194 - RNA, 19 nt, Artificial Sequence
  Description of Artificial Sequence: Synthetic oligonucleotide
  Sense strand starting at position 3631 of SEQ ID NO: 1241551
guuaguggcagucauaacu

SEQ ID NO: 1281195 - RNA, 19 nt, Artificial Sequence
  Description of Artificial Sequence: Synthetic oligonucleotide
  Antisense strand to SEQ ID NO: 1281194
aguuaugacugccacuaac

SEQ ID NO: 1281196 - RNA, 19 nt, Artificial Sequence
  Description of Artificial Sequence: Synthetic oligonucleotide
  Sense strand starting at position 3642 of SEQ ID NO: 1241551
ucauaacuguccuuuagug

SEQ ID NO: 1281197 - RNA, 19 nt, Artificial Sequence
  Description of Artificial Sequence: Synthetic oligonucleotide
  Antisense strand to SEQ ID NO: 1281196
cacuaaaggacaguuauga

SEQ ID NO: 1281198 - RNA, 19 nt, Artificial Sequence
  Description of Artificial Sequence: Synthetic oligonucleotide
  Sense strand starting at position 3644 of SEQ ID NO: 1241551
auaacuguccuuuagugaa

SEQ ID NO: 1281199 - RNA, 19 nt, Artificial Sequence
  Description of Artificial Sequence: Synthetic oligonucleotide
  Antisense strand to SEQ ID NO: 1281198
uucacuaaaggacaguuau

SEQ ID NO: 1281200 - RNA, 19 nt, Artificial Sequence
  Description of Artificial Sequence: Synthetic oligonucleotide
  Sense strand starting at position 3646 of SEQ ID NO: 1241551
aacuguccuuuagugaaug

SEQ ID NO: 1281201 - RNA, 19 nt, Artificial Sequence
  Description of Artificial Sequence: Synthetic oligonucleotide
  Antisense strand to SEQ ID NO: 1281200
cauucacuaaaggacaguu

SEQ ID NO: 1281202 - RNA, 19 nt, Artificial Sequence
  Description of Artificial Sequence: Synthetic oligonucleotide
  Sense strand starting at position 3654 of SEQ ID NO: 1241551
uuuagugaaugcuuaccau

SEQ ID NO: 1281203 - RNA, 19 nt, Artificial Sequence
  Description of Artificial Sequence: Synthetic oligonucleotide
  Antisense strand to SEQ ID NO: 1281202
augguaagcauucacuaaa

SEQ ID NO: 1281204 - RNA, 19 nt, Artificial Sequence
  Description of Artificial Sequence: Synthetic oligonucleotide
  Sense strand starting at position 3657 of SEQ ID NO: 1241551
agugaaugcuuaccaugca

SEQ ID NO: 1281205 - RNA, 19 nt, Artificial Sequence
  Description of Artificial Sequence: Synthetic oligonucleotide
  Antisense strand to SEQ ID NO: 1281204
ugcaugguaagcauucacu

SEQ ID NO: 1281206 - RNA, 19 nt, Artificial Sequence
  Description of Artificial Sequence: Synthetic oligonucleotide
  Sense strand starting at position 3966 of SEQ ID NO: 1241551
gugguagaccuggaaguca

SEQ ID NO: 1281207 - RNA, 19 nt, Artificial Sequence
  Description of Artificial Sequence: Synthetic oligonucleotide
  Antisense strand to SEQ ID NO: 1281206
ugacuuccaggucuaccac

SEQ ID NO: 1281208 - RNA, 19 nt, Artificial Sequence
  Description of Artificial Sequence: Synthetic oligonucleotide
  Sense strand starting at position 7 of SEQ ID NO: 1241552
ggguauauagugcaaagua

SEQ ID NO: 1281209 - RNA, 19 nt, Artificial Sequence
  Description of Artificial Sequence: Synthetic oligonucleotide
  Antisense strand to SEQ ID NO: 1281208
uacuuugcacuauauaccc

SEQ ID NO: 1281210 - RNA, 19 nt, Artificial Sequence
  Description of Artificial Sequence: Synthetic oligonucleotide
  Sense strand starting at position 89 of SEQ ID NO: 1241552
uucuguguguucucucaga

SEQ ID NO: 1281211 - RNA, 19 nt, Artificial Sequence
  Description of Artificial Sequence: Synthetic oligonucleotide
  Antisense strand to SEQ ID NO: 1281210
ucugagagaacacacagaa

SEQ ID NO: 1281212 - RNA, 19 nt, Artificial Sequence
  Description of Artificial Sequence: Synthetic oligonucleotide
  Sense strand starting at position 248 of SEQ ID NO: 1241552
cucugcacgcuuuauaaca

SEQ ID NO: 1281213 - RNA, 19 nt, Artificial Sequence
  Description of Artificial Sequence: Synthetic oligonucleotide
  Antisense strand to SEQ ID NO: 1281212
uguuauaaagcgugcagag

SEQ ID NO: 1281214 - RNA, 19 nt, Artificial Sequence
  Description of Artificial Sequence: Synthetic oligonucleotide
  Sense strand starting at position 396 of SEQ ID NO: 1241552
ucauauacaucagaguaua

SEQ ID NO: 1281215 - RNA, 19 nt, Artificial Sequence
  Description of Artificial Sequence: Synthetic oligonucleotide
  Antisense strand to SEQ ID NO: 1281214
uauacucugauguauauga

SEQ ID NO: 1281216 - RNA, 19 nt, Artificial Sequence
  Description of Artificial Sequence: Synthetic oligonucleotide
  Sense strand starting at position 406 of SEQ ID NO: 1241552
cagaguauaucugaaggau

SEQ ID NO: 1281217 - RNA, 19 nt, Artificial Sequence
  Description of Artificial Sequence: Synthetic oligonucleotide
  Antisense strand to SEQ ID NO: 1281216
auccuucagauauacucug

SEQ ID NO: 1281218 - RNA, 19 nt, Artificial Sequence
  Description of Artificial Sequence: Synthetic oligonucleotide
  Sense strand starting at position 451 of SEQ ID NO: 1241552
guaaaugauguacacuuua

SEQ ID NO: 1281219 - RNA, 19 nt, Artificial Sequence
  Description of Artificial Sequence: Synthetic oligonucleotide
  Antisense strand to SEQ ID NO: 1281218
uaaaguguacaucauuuac

SEQ ID NO: 1281220 - RNA, 19 nt, Artificial Sequence
  Description of Artificial Sequence: Synthetic oligonucleotide
  Sense strand starting at position 685 of SEQ ID NO: 1241552
uggacugaaccauacguua

SEQ ID NO: 1281221 - RNA, 19 nt, Artificial Sequence
  Description of Artificial Sequence: Synthetic oligonucleotide
  Antisense strand to SEQ ID NO: 1281220
uaacguaugguucagucca

SEQ ID NO: 1281222 - RNA, 19 nt, Artificial Sequence
  Description of Artificial Sequence: Synthetic oligonucleotide
  Sense strand starting at position 692 of SEQ ID NO: 1241552
aaccauacguuaggaauuu

SEQ ID NO: 1281223 - RNA, 19 nt, Artificial Sequence
  Description of Artificial Sequence: Synthetic oligonucleotide
  Antisense strand to SEQ ID NO: 1281222
aaauuccuaacguaugguu

SEQ ID NO: 1281224 - RNA, 19 nt, Artificial Sequence
  Description of Artificial Sequence: Synthetic oligonucleotide
  Sense strand starting at position 693 of SEQ ID NO: 1241552
accauacguuaggaauuua

SEQ ID NO: 1281225 - RNA, 19 nt, Artificial Sequence
  Description of Artificial Sequence: Synthetic oligonucleotide
  Antisense strand to SEQ ID NO: 1281224
uaaauuccuaacguauggu

SEQ ID NO: 1281226 - RNA, 19 nt, Artificial Sequence
  Description of Artificial Sequence: Synthetic oligonucleotide
  Sense strand starting at position 727 of SEQ ID NO: 1241552
aguuauggcucuuccacuu

SEQ ID NO: 1281227 - RNA, 19 nt, Artificial Sequence
  Description of Artificial Sequence: Synthetic oligonucleotide
  Antisense strand to SEQ ID NO: 1281226
aaguggaagagccauaacu

SEQ ID NO: 1281228 - RNA, 19 nt, Artificial Sequence
  Description of Artificial Sequence: Synthetic oligonucleotide
  Sense strand starting at position 751 of SEQ ID NO: 1241552
cuaugugaccaugggcaua

SEQ ID NO: 1281229 - RNA, 19 nt, Artificial Sequence
  Description of Artificial Sequence: Synthetic oligonucleotide
  Antisense strand to SEQ ID NO: 1281228
uaugcccauggucacauag

SEQ ID NO: 1281230 - RNA, 19 nt, Artificial Sequence
  Description of Artificial Sequence: Synthetic oligonucleotide
  Sense strand starting at position 1018 of SEQ ID NO: 1241552
ccagcuuccuccuuuggaa

SEQ ID NO: 1281231 - RNA, 19 nt, Artificial Sequence
  Description of Artificial Sequence: Synthetic oligonucleotide
  Antisense strand to SEQ ID NO: 1281230
uuccaaaggaggaagcugg

SEQ ID NO: 1281232 - RNA, 19 nt, Artificial Sequence
  Description of Artificial Sequence: Synthetic oligonucleotide
  Sense strand starting at position 1043 of SEQ ID NO: 1241552
ggccaauaauaugcagaaa

SEQ ID NO: 1281233 - RNA, 19 nt, Artificial Sequence
  Description of Artificial Sequence: Synthetic oligonucleotide
  Antisense strand to SEQ ID NO: 1281232
uuucugcauauuauuggcc

SEQ ID NO: 1281234 - RNA, 19 nt, Artificial Sequence
  Description of Artificial Sequence: Synthetic oligonucleotide
  Sense strand starting at position 1110 of SEQ ID NO: 1241552
uacacagugucugucacau

SEQ ID NO: 1281235 - RNA, 19 nt, Artificial Sequence
  Description of Artificial Sequence: Synthetic oligonucleotide
  Antisense strand to SEQ ID NO: 1281234
augugacagacacugugua

SEQ ID NO: 1281236 - RNA, 19 nt, Artificial Sequence
  Description of Artificial Sequence: Synthetic oligonucleotide
  Sense strand starting at position 1116 of SEQ ID NO: 1241552
gugucugucacauagaaga

SEQ ID NO: 1281237 - RNA, 19 nt, Artificial Sequence
  Description of Artificial Sequence: Synthetic oligonucleotide
  Antisense strand to SEQ ID NO: 1281236
ucuucuaugugacagacac

SEQ ID NO: 1281238 - RNA, 19 nt, Artificial Sequence
  Description of Artificial Sequence: Synthetic oligonucleotide
  Sense strand starting at position 1137 of SEQ ID NO: 1241552
guccaaacaguuugaugaa

SEQ ID NO: 1281239 - RNA, 19 nt, Artificial Sequence
  Description of Artificial Sequence: Synthetic oligonucleotide
  Antisense strand to SEQ ID NO: 1281238
uucaucaaacuguuuggac

SEQ ID NO: 1281240 - RNA, 19 nt, Artificial Sequence
  Description of Artificial Sequence: Synthetic oligonucleotide
  Sense strand starting at position 1269 of SEQ ID NO: 1241552
aggagauauccuggcaagc

SEQ ID NO: 1281241 - RNA, 19 nt, Artificial Sequence
  Description of Artificial Sequence: Synthetic oligonucleotide
  Antisense strand to SEQ ID NO: 1281240
gcuugccaggauaucuccu

SEQ ID NO: 1281242 - RNA, 19 nt, Artificial Sequence
  Description of Artificial Sequence: Synthetic oligonucleotide
  Sense strand starting at position 1303 of SEQ ID NO: 1241552
agaggaguuuccuuccaga

SEQ ID NO: 1281243 - RNA, 19 nt, Artificial Sequence
  Description of Artificial Sequence: Synthetic oligonucleotide
  Antisense strand to SEQ ID NO: 1281242
ucuggaaggaaacuccucu

SEQ ID NO: 1281244 - RNA, 19 nt, Artificial Sequence
  Description of Artificial Sequence: Synthetic oligonucleotide
  Sense strand starting at position 1375 of SEQ ID NO: 1241552
ccgaguccucgcuaagacu

SEQ ID NO: 1281245 - RNA, 19 nt, Artificial Sequence
  Description of Artificial Sequence: Synthetic oligonucleotide
  Antisense strand to SEQ ID NO: 1281244
agucuuagcgaggacucgg

SEQ ID NO: 1281246 - RNA, 19 nt, Artificial Sequence
  Description of Artificial Sequence: Synthetic oligonucleotide
  Sense strand starting at position 1399 of SEQ ID NO: 1241552
gacacaaugcucuguguca

SEQ ID NO: 1281247 - RNA, 19 nt, Artificial Sequence
  Description of Artificial Sequence: Synthetic oligonucleotide
  Antisense strand to SEQ ID NO: 1281246
ugacacagagcauuguguc

SEQ ID NO: 1281248 - RNA, 19 nt, Artificial Sequence
  Description of Artificial Sequence: Synthetic oligonucleotide
  Sense strand starting at position 1400 of SEQ ID NO: 1241552
acacaaugcucugugucau

SEQ ID NO: 1281249 - RNA, 19 nt, Artificial Sequence
  Description of Artificial Sequence: Synthetic oligonucleotide
  Antisense strand to SEQ ID NO: 1281248
augacacagagcauugugu

SEQ ID NO: 1281250 - RNA, 19 nt, Artificial Sequence
  Description of Artificial Sequence: Synthetic oligonucleotide
  Sense strand starting at position 1518 of SEQ ID NO: 1241552
gaaauaaccugaggugaga

SEQ ID NO: 1281251 - RNA, 19 nt, Artificial Sequence
  Description of Artificial Sequence: Synthetic oligonucleotide
  Antisense strand to SEQ ID NO: 1281250
ucucaccucagguuauuuc

SEQ ID NO: 1281252 - RNA, 19 nt, Artificial Sequence
  Description of Artificial Sequence: Synthetic oligonucleotide
  Sense strand starting at position 2476 of SEQ ID NO: 1241552
aacuguaacgucuggauau

SEQ ID NO: 1281253 - RNA, 19 nt, Artificial Sequence
  Description of Artificial Sequence: Synthetic oligonucleotide
  Antisense strand to SEQ ID NO: 1281252
auauccagacguuacaguu

SEQ ID NO: 1281254 - RNA, 19 nt, Artificial Sequence
  Description of Artificial Sequence: Synthetic oligonucleotide
  Sense strand starting at position 2486 of SEQ ID NO: 1241552
ucuggauauuuggaacaga

SEQ ID NO: 1281255 - RNA, 19 nt, Artificial Sequence
  Description of Artificial Sequence: Synthetic oligonucleotide
  Antisense strand to SEQ ID NO: 1281254
ucuguuccaaauauccaga

SEQ ID NO: 1281256 - RNA, 19 nt, Artificial Sequence
  Description of Artificial Sequence: Synthetic oligonucleotide
  Sense strand starting at position 2587 of SEQ ID NO: 1241552
gagaguaacuuacuugcuu

SEQ ID NO: 1281257 - RNA, 19 nt, Artificial Sequence
  Description of Artificial Sequence: Synthetic oligonucleotide
  Antisense strand to SEQ ID NO: 1281256
aagcaaguaaguuacucuc

SEQ ID NO: 1281258 - RNA, 19 nt, Artificial Sequence
  Description of Artificial Sequence: Synthetic oligonucleotide
  Sense strand starting at position 2588 of SEQ ID NO: 1241552
agaguaacuuacuugcuua

SEQ ID NO: 1281259 - RNA, 19 nt, Artificial Sequence
  Description of Artificial Sequence: Synthetic oligonucleotide
  Antisense strand to SEQ ID NO: 1281258
uaagcaaguaaguuacucu

SEQ ID NO: 1281260 - RNA, 19 nt, Artificial Sequence
  Description of Artificial Sequence: Synthetic oligonucleotide
  Sense strand starting at position 2684 of SEQ ID NO: 1241552
ccggcuuauguauauguua

SEQ ID NO: 1281261 - RNA, 19 nt, Artificial Sequence
  Description of Artificial Sequence: Synthetic oligonucleotide
  Antisense strand to SEQ ID NO: 1281260
uaacauauacauaagccgg

SEQ ID NO: 1281262 - RNA, 19 nt, Artificial Sequence
  Description of Artificial Sequence: Synthetic oligonucleotide
  Sense strand starting at position 2770 of SEQ ID NO: 1241552
ugugcuccucguucucaga

SEQ ID NO: 1281263 - RNA, 19 nt, Artificial Sequence
  Description of Artificial Sequence: Synthetic oligonucleotide
  Antisense strand to SEQ ID NO: 1281262
ucugagaacgaggagcaca

SEQ ID NO: 1281264 - RNA, 19 nt, Artificial Sequence
  Description of Artificial Sequence: Synthetic oligonucleotide
  Sense strand starting at position 2856 of SEQ ID NO: 1241552
cuaggugagccuggaguaa

SEQ ID NO: 1281265 - RNA, 19 nt, Artificial Sequence
  Description of Artificial Sequence: Synthetic oligonucleotide
  Antisense strand to SEQ ID NO: 1281264
uuacuccaggcucaccuag

SEQ ID NO: 1281266 - RNA, 19 nt, Artificial Sequence
  Description of Artificial Sequence: Synthetic oligonucleotide
  Sense strand starting at position 3003 of SEQ ID NO: 1241552
uccaaaugguccuuggaag

SEQ ID NO: 1281267 - RNA, 19 nt, Artificial Sequence
  Description of Artificial Sequence: Synthetic oligonucleotide
  Antisense strand to SEQ ID NO: 1281266
cuuccaaggaccauuugga

SEQ ID NO: 1281268 - RNA, 19 nt, Artificial Sequence
  Description of Artificial Sequence: Synthetic oligonucleotide
  Sense strand starting at position 3004 of SEQ ID NO: 1241552
ccaaaugguccuuggaaga

SEQ ID NO: 1281269 - RNA, 19 nt, Artificial Sequence
  Description of Artificial Sequence: Synthetic oligonucleotide
  Antisense strand to SEQ ID NO: 1281268
ucuuccaaggaccauuugg

SEQ ID NO: 1281270 - RNA, 19 nt, Artificial Sequence
  Description of Artificial Sequence: Synthetic oligonucleotide
  Sense strand starting at position 3057 of SEQ ID NO: 1241552
uggguuugaaucugaaucu

SEQ ID NO: 1281271 - RNA, 19 nt, Artificial Sequence
  Description of Artificial Sequence: Synthetic oligonucleotide
  Antisense strand to SEQ ID NO: 1281270
agauucagauucaaaccca

SEQ ID NO: 1281272 - RNA, 19 nt, Artificial Sequence
  Description of Artificial Sequence: Synthetic oligonucleotide
  Sense strand starting at position 3094 of SEQ ID NO: 1241552
gccauucucacguagaagu

SEQ ID NO: 1281273 - RNA, 19 nt, Artificial Sequence
  Description of Artificial Sequence: Synthetic oligonucleotide
  Antisense strand to SEQ ID NO: 1281272
acuucuacgugagaauggc

SEQ ID NO: 1281274 - RNA, 19 nt, Artificial Sequence
  Description of Artificial Sequence: Synthetic oligonucleotide
  Sense strand starting at position 3096 of SEQ ID NO: 1241552
cauucucacguagaaguuu

SEQ ID NO: 1281275 - RNA, 19 nt, Artificial Sequence
  Description of Artificial Sequence: Synthetic oligonucleotide
  Antisense strand to SEQ ID NO: 1281274
aaacuucuacgugagaaug

SEQ ID NO: 1281276 - RNA, 19 nt, Artificial Sequence
  Description of Artificial Sequence: Synthetic oligonucleotide
  Sense strand starting at position 3150 of SEQ ID NO: 1241552
ggaggccaaacgugagaau

SEQ ID NO: 1281277 - RNA, 19 nt, Artificial Sequence
  Description of Artificial Sequence: Synthetic oligonucleotide
  Antisense strand to SEQ ID NO: 1281276
auucucacguuuggccucc

SEQ ID NO: 1281278 - RNA, 19 nt, Artificial Sequence
  Description of Artificial Sequence: Synthetic oligonucleotide
  Sense strand starting at position 3151 of SEQ ID NO: 1241552
gaggccaaacgugagaauu

SEQ ID NO: 1281279 - RNA, 19 nt, Artificial Sequence
  Description of Artificial Sequence: Synthetic oligonucleotide
  Antisense strand to SEQ ID NO: 1281278
aauucucacguuuggccuc

SEQ ID NO: 1281280 - RNA, 19 nt, Artificial Sequence
  Description of Artificial Sequence: Synthetic oligonucleotide
  Sense strand starting at position 3153 of SEQ ID NO: 1241552
ggccaaacgugagaauuua

SEQ ID NO: 1281281 - RNA, 19 nt, Artificial Sequence
  Description of Artificial Sequence: Synthetic oligonucleotide
  Antisense strand to SEQ ID NO: 1281280
uaaauucucacguuuggcc

SEQ ID NO: 1281282 - RNA, 19 nt, Artificial Sequence
  Description of Artificial Sequence: Synthetic oligonucleotide
  Sense strand starting at position 3383 of SEQ ID NO: 1241552
gacauagguucuucuuguu

SEQ ID NO: 1281283 - RNA, 19 nt, Artificial Sequence
  Description of Artificial Sequence: Synthetic oligonucleotide
  Antisense strand to SEQ ID NO: 1281282
aacaagaagaaccuauguc

SEQ ID NO: 1281284 - RNA, 19 nt, Artificial Sequence
  Description of Artificial Sequence: Synthetic oligonucleotide
  Sense strand starting at position 3935 of SEQ ID NO: 1241552
ucaguuaugucucuuccac

SEQ ID NO: 1281285 - RNA, 19 nt, Artificial Sequence
  Description of Artificial Sequence: Synthetic oligonucleotide
  Antisense strand to SEQ ID NO: 1281284
guggaagagacauaacuga

SEQ ID NO: 1281286 - RNA, 19 nt, Artificial Sequence
  Description of Artificial Sequence: Synthetic oligonucleotide
  Sense strand starting at position 3937 of SEQ ID NO: 1241552
aguuaugucucuuccacuu

SEQ ID NO: 1281287 - RNA, 19 nt, Artificial Sequence
  Description of Artificial Sequence: Synthetic oligonucleotide
  Antisense strand to SEQ ID NO: 1281286
aaguggaagagacauaacu

SEQ ID NO: 1281288 - RNA, 19 nt, Artificial Sequence
  Description of Artificial Sequence: Synthetic oligonucleotide
  Sense strand starting at position 52 of SEQ ID NO: 1241553
aggcuaagccuuuacuacu

SEQ ID NO: 1281289 - RNA, 19 nt, Artificial Sequence
  Description of Artificial Sequence: Synthetic oligonucleotide
  Antisense strand to SEQ ID NO: 1281288
aguaguaaaggcuuagccu

SEQ ID NO: 1281290 - RNA, 19 nt, Artificial Sequence
  Description of Artificial Sequence: Synthetic oligonucleotide
  Sense strand starting at position 116 of SEQ ID NO: 1241553
ugaucuaggucugcacuaa

SEQ ID NO: 1281291 - RNA, 19 nt, Artificial Sequence
  Description of Artificial Sequence: Synthetic oligonucleotide
  Antisense strand to SEQ ID NO: 1281290
uuagugcagaccuagauca

SEQ ID NO: 1281292 - RNA, 19 nt, Artificial Sequence
  Description of Artificial Sequence: Synthetic oligonucleotide
  Sense strand starting at position 117 of SEQ ID NO: 1241553
gaucuaggucugcacuaaa

SEQ ID NO: 1281293 - RNA, 19 nt, Artificial Sequence
  Description of Artificial Sequence: Synthetic oligonucleotide
  Antisense strand to SEQ ID NO: 1281292
uuuagugcagaccuagauc

SEQ ID NO: 1281294 - RNA, 19 nt, Artificial Sequence
  Description of Artificial Sequence: Synthetic oligonucleotide
  Sense strand starting at position 407 of SEQ ID NO: 1241553
gcuccagacgaaugacaua

SEQ ID NO: 1281295 - RNA, 19 nt, Artificial Sequence
  Description of Artificial Sequence: Synthetic oligonucleotide
  Antisense strand to SEQ ID NO: 1281294
uaugucauucgucuggagc

SEQ ID NO: 1281296 - RNA, 19 nt, Artificial Sequence
  Description of Artificial Sequence: Synthetic oligonucleotide
  Sense strand starting at position 445 of SEQ ID NO: 1241553
ggguucugauaaguguuca

SEQ ID NO: 1281297 - RNA, 19 nt, Artificial Sequence
  Description of Artificial Sequence: Synthetic oligonucleotide
  Antisense strand to SEQ ID NO: 1281296
ugaacacuuaucagaaccc

SEQ ID NO: 1281298 - RNA, 19 nt, Artificial Sequence
  Description of Artificial Sequence: Synthetic oligonucleotide
  Sense strand starting at position 551 of SEQ ID NO: 1241553
gguuguuggacuuaaggau

SEQ ID NO: 1281299 - RNA, 19 nt, Artificial Sequence
  Description of Artificial Sequence: Synthetic oligonucleotide
  Antisense strand to SEQ ID NO: 1281298
auccuuaaguccaacaacc

SEQ ID NO: 1281300 - RNA, 19 nt, Artificial Sequence
  Description of Artificial Sequence: Synthetic oligonucleotide
  Sense strand starting at position 557 of SEQ ID NO: 1241553
uggacuuaaggaugcgaau

SEQ ID NO: 1281301 - RNA, 19 nt, Artificial Sequence
  Description of Artificial Sequence: Synthetic oligonucleotide
  Antisense strand to SEQ ID NO: 1281300
auucgcauccuuaagucca

SEQ ID NO: 1281302 - RNA, 19 nt, Artificial Sequence
  Description of Artificial Sequence: Synthetic oligonucleotide
  Sense strand starting at position 647 of SEQ ID NO: 1241553
ccucuaggaccucauuagu

SEQ ID NO: 1281303 - RNA, 19 nt, Artificial Sequence
  Description of Artificial Sequence: Synthetic oligonucleotide
  Antisense strand to SEQ ID NO: 1281302
acuaaugagguccuagagg

SEQ ID NO: 1281304 - RNA, 19 nt, Artificial Sequence
  Description of Artificial Sequence: Synthetic oligonucleotide
  Sense strand starting at position 1003 of SEQ ID NO: 1241553
gcgccagugagcucuaaua

SEQ ID NO: 1281305 - RNA, 19 nt, Artificial Sequence
  Description of Artificial Sequence: Synthetic oligonucleotide
  Antisense strand to SEQ ID NO: 1281304
uauuagagcucacuggcgc

SEQ ID NO: 1281306 - RNA, 19 nt, Artificial Sequence
  Description of Artificial Sequence: Synthetic oligonucleotide
  Sense strand starting at position 1005 of SEQ ID NO: 1241553
gccagugagcucuaauaag

SEQ ID NO: 1281307 - RNA, 19 nt, Artificial Sequence
  Description of Artificial Sequence: Synthetic oligonucleotide
  Antisense strand to SEQ ID NO: 1281306
cuuauuagagcucacuggc

SEQ ID NO: 1281308 - RNA, 19 nt, Artificial Sequence
  Description of Artificial Sequence: Synthetic oligonucleotide
  Sense strand starting at position 1060 of SEQ ID NO: 1241553
ccaagcauucgguaggaga

SEQ ID NO: 1281309 - RNA, 19 nt, Artificial Sequence
  Description of Artificial Sequence: Synthetic oligonucleotide
  Antisense strand to SEQ ID NO: 1281308
ucuccuaccgaaugcuugg

SEQ ID NO: 1281310 - RNA, 19 nt, Artificial Sequence
  Description of Artificial Sequence: Synthetic oligonucleotide
  Sense strand starting at position 1094 of SEQ ID NO: 1241553
ccuggagggucucuucgau

SEQ ID NO: 1281311 - RNA, 19 nt, Artificial Sequence
  Description of Artificial Sequence: Synthetic oligonucleotide
  Antisense strand to SEQ ID NO: 1281310
aucgaagagacccuccagg

SEQ ID NO: 1281312 - RNA, 19 nt, Artificial Sequence
  Description of Artificial Sequence: Synthetic oligonucleotide
  Sense strand starting at position 1150 of SEQ ID NO: 1241553
aacagagcucucugggagu

SEQ ID NO: 1281313 - RNA, 19 nt, Artificial Sequence
  Description of Artificial Sequence: Synthetic oligonucleotide
  Antisense strand to SEQ ID NO: 1281312
acucccagagagcucuguu

SEQ ID NO: 1281314 - RNA, 19 nt, Artificial Sequence
  Description of Artificial Sequence: Synthetic oligonucleotide
  Sense strand starting at position 1329 of SEQ ID NO: 1241553
ugcagucacgauuaacaaa

SEQ ID NO: 1281315 - RNA, 19 nt, Artificial Sequence
  Description of Artificial Sequence: Synthetic oligonucleotide
  Antisense strand to SEQ ID NO: 1281314
uuuguuaaucgugacugca

SEQ ID NO: 1281316 - RNA, 19 nt, Artificial Sequence
  Description of Artificial Sequence: Synthetic oligonucleotide
  Sense strand starting at position 2136 of SEQ ID NO: 1241553
gggcauuuguuucucugau

SEQ ID NO: 1281317 - RNA, 19 nt, Artificial Sequence
  Description of Artificial Sequence: Synthetic oligonucleotide
  Antisense strand to SEQ ID NO: 1281316
aucagagaaacaaaugccc

SEQ ID NO: 1281318 - RNA, 19 nt, Artificial Sequence
  Description of Artificial Sequence: Synthetic oligonucleotide
  Sense strand starting at position 2137 of SEQ ID NO: 1241553
ggcauuuguuucucugaug

SEQ ID NO: 1281319 - RNA, 19 nt, Artificial Sequence
  Description of Artificial Sequence: Synthetic oligonucleotide
  Antisense strand to SEQ ID NO: 1281318
caucagagaaacaaaugcc

SEQ ID NO: 1281320 - RNA, 19 nt, Artificial Sequence
  Description of Artificial Sequence: Synthetic oligonucleotide
  Sense strand starting at position 2423 of SEQ ID NO: 1241553
gcgccauuucuguguauuu

SEQ ID NO: 1281321 - RNA, 19 nt, Artificial Sequence
  Description of Artificial Sequence: Synthetic oligonucleotide
  Antisense strand to SEQ ID NO: 1281320
aaauacacagaaauggcgc

SEQ ID NO: 1281322 - RNA, 19 nt, Artificial Sequence
  Description of Artificial Sequence: Synthetic oligonucleotide
  Sense strand starting at position 2432 of SEQ ID NO: 1241553
cuguguauuugugugagac

SEQ ID NO: 1281323 - RNA, 19 nt, Artificial Sequence
  Description of Artificial Sequence: Synthetic oligonucleotide
  Antisense strand to SEQ ID NO: 1281322
gucucacacaaauacacag

SEQ ID NO: 1281324 - RNA, 19 nt, Artificial Sequence
  Description of Artificial Sequence: Synthetic oligonucleotide
  Sense strand starting at position 2433 of SEQ ID NO: 1241553
uguguauuugugugagaca

SEQ ID NO: 1281325 - RNA, 19 nt, Artificial Sequence
  Description of Artificial Sequence: Synthetic oligonucleotide
  Antisense strand to SEQ ID NO: 1281324
ugucucacacaaauacaca

SEQ ID NO: 1281326 - RNA, 19 nt, Artificial Sequence
  Description of Artificial Sequence: Synthetic oligonucleotide
  Sense strand starting at position 2442 of SEQ ID NO: 1241553
gugugagacacugaguuua

SEQ ID NO: 1281327 - RNA, 19 nt, Artificial Sequence
  Description of Artificial Sequence: Synthetic oligonucleotide
  Antisense strand to SEQ ID NO: 1281326
uaaacucagugucucacac

SEQ ID NO: 1281328 - RNA, 19 nt, Artificial Sequence
  Description of Artificial Sequence: Synthetic oligonucleotide
  Sense strand starting at position 2444 of SEQ ID NO: 1241553
gugagacacugaguuuaga

SEQ ID NO: 1281329 - RNA, 19 nt, Artificial Sequence
  Description of Artificial Sequence: Synthetic oligonucleotide
  Antisense strand to SEQ ID NO: 1281328
ucuaaacucagugucucac

SEQ ID NO: 1281330 - RNA, 19 nt, Artificial Sequence
  Description of Artificial Sequence: Synthetic oligonucleotide
  Sense strand starting at position 2523 of SEQ ID NO: 1241553
aggcaaacauuaguguauu

SEQ ID NO: 1281331 - RNA, 19 nt, Artificial Sequence
  Description of Artificial Sequence: Synthetic oligonucleotide
  Antisense strand to SEQ ID NO: 1281330
aauacacuaauguuugccu

SEQ ID NO: 1281332 - RNA, 19 nt, Artificial Sequence
  Description of Artificial Sequence: Synthetic oligonucleotide
  Sense strand starting at position 2567 of SEQ ID NO: 1241553
uugacaauaggcugcuaaa

SEQ ID NO: 1281333 - RNA, 19 nt, Artificial Sequence
  Description of Artificial Sequence: Synthetic oligonucleotide
  Antisense strand to SEQ ID NO: 1281332
uuuagcagccuauugucaa

SEQ ID NO: 1281334 - RNA, 19 nt, Artificial Sequence
  Description of Artificial Sequence: Synthetic oligonucleotide
  Sense strand starting at position 2615 of SEQ ID NO: 1241553
guaaucucccugcaagcaa

SEQ ID NO: 1281335 - RNA, 19 nt, Artificial Sequence
  Description of Artificial Sequence: Synthetic oligonucleotide
  Antisense strand to SEQ ID NO: 1281334
uugcuugcagggagauuac

SEQ ID NO: 1281336 - RNA, 19 nt, Artificial Sequence
  Description of Artificial Sequence: Synthetic oligonucleotide
  Sense strand starting at position 2762 of SEQ ID NO: 1241553
guuacauagguacauuaca

SEQ ID NO: 1281337 - RNA, 19 nt, Artificial Sequence
  Description of Artificial Sequence: Synthetic oligonucleotide
  Antisense strand to SEQ ID NO: 1281336
uguaauguaccuauguaac

SEQ ID NO: 1281338 - RNA, 19 nt, Artificial Sequence
  Description of Artificial Sequence: Synthetic oligonucleotide
  Sense strand starting at position 2788 of SEQ ID NO: 1241553
cagcaagauucuuuagugu

SEQ ID NO: 1281339 - RNA, 19 nt, Artificial Sequence
  Description of Artificial Sequence: Synthetic oligonucleotide
  Antisense strand to SEQ ID NO: 1281338
acacuaaagaaucuugcug

SEQ ID NO: 1281340 - RNA, 19 nt, Artificial Sequence
  Description of Artificial Sequence: Synthetic oligonucleotide
  Sense strand starting at position 2958 of SEQ ID NO: 1241553
aaaggcagugucugaucau

SEQ ID NO: 1281341 - RNA, 19 nt, Artificial Sequence
  Description of Artificial Sequence: Synthetic oligonucleotide
  Antisense strand to SEQ ID NO: 1281340
augaucagacacugccuuu

SEQ ID NO: 1281342 - RNA, 19 nt, Artificial Sequence
  Description of Artificial Sequence: Synthetic oligonucleotide
  Sense strand starting at position 3201 of SEQ ID NO: 1241553
ccuguaaaccuauggaguu

SEQ ID NO: 1281343 - RNA, 19 nt, Artificial Sequence
  Description of Artificial Sequence: Synthetic oligonucleotide
  Antisense strand to SEQ ID NO: 1281342
aacuccauagguuuacagg

SEQ ID NO: 1281344 - RNA, 19 nt, Artificial Sequence
  Description of Artificial Sequence: Synthetic oligonucleotide
  Sense strand starting at position 3364 of SEQ ID NO: 1241553
ggcaguuaaauauagguga

SEQ ID NO: 1281345 - RNA, 19 nt, Artificial Sequence
  Description of Artificial Sequence: Synthetic oligonucleotide
  Antisense strand to SEQ ID NO: 1281344
ucaccuauauuuaacugcc

SEQ ID NO: 1281346 - RNA, 19 nt, Artificial Sequence
  Description of Artificial Sequence: Synthetic oligonucleotide
  Sense strand starting at position 3528 of SEQ ID NO: 1241553
ucagaaauggucugcaaca

SEQ ID NO: 1281347 - RNA, 19 nt, Artificial Sequence
  Description of Artificial Sequence: Synthetic oligonucleotide
  Antisense strand to SEQ ID NO: 1281346
uguugcagaccauuucuga

SEQ ID NO: 1281348 - RNA, 19 nt, Artificial Sequence
  Description of Artificial Sequence: Synthetic oligonucleotide
  Sense strand starting at position 3529 of SEQ ID NO: 1241553
cagaaauggucugcaacac

SEQ ID NO: 1281349 - RNA, 19 nt, Artificial Sequence
  Description of Artificial Sequence: Synthetic oligonucleotide
  Antisense strand to SEQ ID NO: 1281348
guguugcagaccauuucug

SEQ ID NO: 1281350 - RNA, 19 nt, Artificial Sequence
  Description of Artificial Sequence: Synthetic oligonucleotide
  Sense strand starting at position 3569 of SEQ ID NO: 1241553
cccuuagcugaaugcagau

SEQ ID NO: 1281351 - RNA, 19 nt, Artificial Sequence
  Description of Artificial Sequence: Synthetic oligonucleotide
  Antisense strand to SEQ ID NO: 1281350
aucugcauucagcuaaggg

SEQ ID NO: 1281352 - RNA, 19 nt, Artificial Sequence
  Description of Artificial Sequence: Synthetic oligonucleotide
  Sense strand starting at position 3589 of SEQ ID NO: 1241553
gaugcugggagauggauau

SEQ ID NO: 1281353 - RNA, 19 nt, Artificial Sequence
  Description of Artificial Sequence: Synthetic oligonucleotide
  Antisense strand to SEQ ID NO: 1281352
auauccaucucccagcauc

SEQ ID NO: 1281354 - RNA, 19 nt, Artificial Sequence
  Description of Artificial Sequence: Synthetic oligonucleotide
  Sense strand starting at position 3623 of SEQ ID NO: 1241553
ggaggauguuagaaagcug

SEQ ID NO: 1281355 - RNA, 19 nt, Artificial Sequence
  Description of Artificial Sequence: Synthetic oligonucleotide
  Antisense strand to SEQ ID NO: 1281354
cagcuuucuaacauccucc

SEQ ID NO: 1281356 - RNA, 19 nt, Artificial Sequence
  Description of Artificial Sequence: Synthetic oligonucleotide
  Sense strand starting at position 3634 of SEQ ID NO: 1241553
gaaagcuggagguguuuau

SEQ ID NO: 1281357 - RNA, 19 nt, Artificial Sequence
  Description of Artificial Sequence: Synthetic oligonucleotide
  Antisense strand to SEQ ID NO: 1281356
auaaacaccuccagcuuuc

SEQ ID NO: 1281358 - RNA, 19 nt, Artificial Sequence
  Description of Artificial Sequence: Synthetic oligonucleotide
  Sense strand starting at position 3638 of SEQ ID NO: 1241553
gcuggagguguuuaucacu

SEQ ID NO: 1281359 - RNA, 19 nt, Artificial Sequence
  Description of Artificial Sequence: Synthetic oligonucleotide
  Antisense strand to SEQ ID NO: 1281358
agugauaaacaccuccagc

SEQ ID NO: 1281360 - RNA, 19 nt, Artificial Sequence
  Description of Artificial Sequence: Synthetic oligonucleotide
  Sense strand starting at position 3643 of SEQ ID NO: 1241553
agguguuuaucacuucuca

SEQ ID NO: 1281361 - RNA, 19 nt, Artificial Sequence
  Description of Artificial Sequence: Synthetic oligonucleotide
  Antisense strand to SEQ ID NO: 1281360
ugagaagugauaaacaccu

SEQ ID NO: 1281362 - RNA, 19 nt, Artificial Sequence
  Description of Artificial Sequence: Synthetic oligonucleotide
  Sense strand starting at position 3647 of SEQ ID NO: 1241553
guuuaucacuucucaagga

SEQ ID NO: 1281363 - RNA, 19 nt, Artificial Sequence
  Description of Artificial Sequence: Synthetic oligonucleotide
  Antisense strand to SEQ ID NO: 1281362
uccuugagaagugauaaac

SEQ ID NO: 1281364 - RNA, 19 nt, Artificial Sequence
  Description of Artificial Sequence: Synthetic oligonucleotide
  Sense strand starting at position 3828 of SEQ ID NO: 1241553
ccuagacaugaaugcauaa

SEQ ID NO: 1281365 - RNA, 19 nt, Artificial Sequence
  Description of Artificial Sequence: Synthetic oligonucleotide
  Antisense strand to SEQ ID NO: 1281364
uuaugcauucaugucuagg

SEQ ID NO: 1281366 - RNA, 19 nt, Artificial Sequence
  Description of Artificial Sequence: Synthetic oligonucleotide
  Sense strand starting at position 3935 of SEQ ID NO: 1241553
agaguagaaucacuuuauu

SEQ ID NO: 1281367 - RNA, 19 nt, Artificial Sequence
  Description of Artificial Sequence: Synthetic oligonucleotide
  Antisense strand to SEQ ID NO: 1281366
aauaaagugauucuacucu

SEQ ID NO: 1281368 - RNA, 19 nt, Artificial Sequence
  Description of Artificial Sequence: Synthetic oligonucleotide
  Sense strand starting at position 92 of SEQ ID NO: 1241554
uuaaaugaccacugaggua

SEQ ID NO: 1281369 - RNA, 19 nt, Artificial Sequence
  Description of Artificial Sequence: Synthetic oligonucleotide
  Antisense strand to SEQ ID NO: 1281368
uaccucaguggucauuuaa

SEQ ID NO: 1281370 - RNA, 19 nt, Artificial Sequence
  Description of Artificial Sequence: Synthetic oligonucleotide
  Sense strand starting at position 161 of SEQ ID NO: 1241554
uccagaagcuuuguucuau

SEQ ID NO: 1281371 - RNA, 19 nt, Artificial Sequence
  Description of Artificial Sequence: Synthetic oligonucleotide
  Antisense strand to SEQ ID NO: 1281370
auagaacaaagcuucugga

SEQ ID NO: 1281372 - RNA, 19 nt, Artificial Sequence
  Description of Artificial Sequence: Synthetic oligonucleotide
  Sense strand starting at position 162 of SEQ ID NO: 1241554
ccagaagcuuuguucuauc

SEQ ID NO: 1281373 - RNA, 19 nt, Artificial Sequence
  Description of Artificial Sequence: Synthetic oligonucleotide
  Antisense strand to SEQ ID NO: 1281372
gauagaacaaagcuucugg

SEQ ID NO: 1281374 - RNA, 19 nt, Artificial Sequence
  Description of Artificial Sequence: Synthetic oligonucleotide
  Sense strand starting at position 201 of SEQ ID NO: 1241554
ucuuuccuccagcagagaa

SEQ ID NO: 1281375 - RNA, 19 nt, Artificial Sequence
  Description of Artificial Sequence: Synthetic oligonucleotide
  Antisense strand to SEQ ID NO: 1281374
uucucugcuggaggaaaga

SEQ ID NO: 1281376 - RNA, 19 nt, Artificial Sequence
  Description of Artificial Sequence: Synthetic oligonucleotide
  Sense strand starting at position 215 of SEQ ID NO: 1241554
gagaaaggauacuacaaug

SEQ ID NO: 1281377 - RNA, 19 nt, Artificial Sequence
  Description of Artificial Sequence: Synthetic oligonucleotide
  Antisense strand to SEQ ID NO: 1281376
cauuguaguauccuuucuc

SEQ ID NO: 1281378 - RNA, 19 nt, Artificial Sequence
  Description of Artificial Sequence: Synthetic oligonucleotide
  Sense strand starting at position 220 of SEQ ID NO: 1241554
aggauacuacaauguguga

SEQ ID NO: 1281379 - RNA, 19 nt, Artificial Sequence
  Description of Artificial Sequence: Synthetic oligonucleotide
  Antisense strand to SEQ ID NO: 1281378
ucacacauuguaguauccu

SEQ ID NO: 1281380 - RNA, 19 nt, Artificial Sequence
  Description of Artificial Sequence: Synthetic oligonucleotide
  Sense strand starting at position 362 of SEQ ID NO: 1241554
ugaccuuuauuuggauaaa

SEQ ID NO: 1281381 - RNA, 19 nt, Artificial Sequence
  Description of Artificial Sequence: Synthetic oligonucleotide
  Antisense strand to SEQ ID NO: 1281380
uuuauccaaauaaagguca

SEQ ID NO: 1281382 - RNA, 19 nt, Artificial Sequence
  Description of Artificial Sequence: Synthetic oligonucleotide
  Sense strand starting at position 380 of SEQ ID NO: 1241554
aauuuagguuaucaugagu

SEQ ID NO: 1281383 - RNA, 19 nt, Artificial Sequence
  Description of Artificial Sequence: Synthetic oligonucleotide
  Antisense strand to SEQ ID NO: 1281382
acucaugauaaccuaaauu

SEQ ID NO: 1281384 - RNA, 19 nt, Artificial Sequence
  Description of Artificial Sequence: Synthetic oligonucleotide
  Sense strand starting at position 383 of SEQ ID NO: 1241554
uuagguuaucaugagugca

SEQ ID NO: 1281385 - RNA, 19 nt, Artificial Sequence
  Description of Artificial Sequence: Synthetic oligonucleotide
  Antisense strand to SEQ ID NO: 1281384
ugcacucaugauaaccuaa

SEQ ID NO: 1281386 - RNA, 19 nt, Artificial Sequence
  Description of Artificial Sequence: Synthetic oligonucleotide
  Sense strand starting at position 385 of SEQ ID NO: 1241554
agguuaucaugagugcaga

SEQ ID NO: 1281387 - RNA, 19 nt, Artificial Sequence
  Description of Artificial Sequence: Synthetic oligonucleotide
  Antisense strand to SEQ ID NO: 1281386
ucugcacucaugauaaccu

SEQ ID NO: 1281388 - RNA, 19 nt, Artificial Sequence
  Description of Artificial Sequence: Synthetic oligonucleotide
  Sense strand starting at position 386 of SEQ ID NO: 1241554
gguuaucaugagugcagaa

SEQ ID NO: 1281389 - RNA, 19 nt, Artificial Sequence
  Description of Artificial Sequence: Synthetic oligonucleotide
  Antisense strand to SEQ ID NO: 1281388
uucugcacucaugauaacc

SEQ ID NO: 1281390 - RNA, 19 nt, Artificial Sequence
  Description of Artificial Sequence: Synthetic oligonucleotide
  Sense strand starting at position 388 of SEQ ID NO: 1241554
uuaucaugagugcagaacu

SEQ ID NO: 1281391 - RNA, 19 nt, Artificial Sequence
  Description of Artificial Sequence: Synthetic oligonucleotide
  Antisense strand to SEQ ID NO: 1281390
aguucugcacucaugauaa

SEQ ID NO: 1281392 - RNA, 19 nt, Artificial Sequence
  Description of Artificial Sequence: Synthetic oligonucleotide
  Sense strand starting at position 525 of SEQ ID NO: 1241554
cauuuauauuuguguggua

SEQ ID NO: 1281393 - RNA, 19 nt, Artificial Sequence
  Description of Artificial Sequence: Synthetic oligonucleotide
  Antisense strand to SEQ ID NO: 1281392
uaccacacaaauauaaaug

SEQ ID NO: 1281394 - RNA, 19 nt, Artificial Sequence
  Description of Artificial Sequence: Synthetic oligonucleotide
  Sense strand starting at position 647 of SEQ ID NO: 1241554
agaauccacgccugaaauu

SEQ ID NO: 1281395 - RNA, 19 nt, Artificial Sequence
  Description of Artificial Sequence: Synthetic oligonucleotide
  Antisense strand to SEQ ID NO: 1281394
aauuucaggcguggauucu

SEQ ID NO: 1281396 - RNA, 19 nt, Artificial Sequence
  Description of Artificial Sequence: Synthetic oligonucleotide
  Sense strand starting at position 929 of SEQ ID NO: 1241554
acgacaaacacuggguuau

SEQ ID NO: 1281397 - RNA, 19 nt, Artificial Sequence
  Description of Artificial Sequence: Synthetic oligonucleotide
  Antisense strand to SEQ ID NO: 1281396
auaacccaguguuugucgu

SEQ ID NO: 1281398 - RNA, 19 nt, Artificial Sequence
  Description of Artificial Sequence: Synthetic oligonucleotide
  Sense strand starting at position 930 of SEQ ID NO: 1241554
cgacaaacacuggguuauu

SEQ ID NO: 1281399 - RNA, 19 nt, Artificial Sequence
  Description of Artificial Sequence: Synthetic oligonucleotide
  Antisense strand to SEQ ID NO: 1281398
aauaacccaguguuugucg

SEQ ID NO: 1281400 - RNA, 19 nt, Artificial Sequence
  Description of Artificial Sequence: Synthetic oligonucleotide
  Sense strand starting at position 1023 of SEQ ID NO: 1241554
aggaaaucuuaccucagua

SEQ ID NO: 1281401 - RNA, 19 nt, Artificial Sequence
  Description of Artificial Sequence: Synthetic oligonucleotide
  Antisense strand to SEQ ID NO: 1281400
uacugagguaagauuuccu

SEQ ID NO: 1281402 - RNA, 19 nt, Artificial Sequence
  Description of Artificial Sequence: Synthetic oligonucleotide
  Sense strand starting at position 2011 of SEQ ID NO: 1241554
cguugucuuccggccucaa

SEQ ID NO: 1281403 - RNA, 19 nt, Artificial Sequence
  Description of Artificial Sequence: Synthetic oligonucleotide
  Antisense strand to SEQ ID NO: 1281402
uugaggccggaagacaacg

SEQ ID NO: 1281404 - RNA, 19 nt, Artificial Sequence
  Description of Artificial Sequence: Synthetic oligonucleotide
  Sense strand starting at position 2069 of SEQ ID NO: 1241554
gugacucugagccaaugaa

SEQ ID NO: 1281405 - RNA, 19 nt, Artificial Sequence
  Description of Artificial Sequence: Synthetic oligonucleotide
  Antisense strand to SEQ ID NO: 1281404
uucauuggcucagagucac

SEQ ID NO: 1281406 - RNA, 19 nt, Artificial Sequence
  Description of Artificial Sequence: Synthetic oligonucleotide
  Sense strand starting at position 2174 of SEQ ID NO: 1241554
aucccugaguucucggaga

SEQ ID NO: 1281407 - RNA, 19 nt, Artificial Sequence
  Description of Artificial Sequence: Synthetic oligonucleotide
  Antisense strand to SEQ ID NO: 1281406
ucuccgagaacucagggau

SEQ ID NO: 1281408 - RNA, 19 nt, Artificial Sequence
  Description of Artificial Sequence: Synthetic oligonucleotide
  Sense strand starting at position 2176 of SEQ ID NO: 1241554
cccugaguucucggagacu

SEQ ID NO: 1281409 - RNA, 19 nt, Artificial Sequence
  Description of Artificial Sequence: Synthetic oligonucleotide
  Antisense strand to SEQ ID NO: 1281408
agucuccgagaacucaggg

SEQ ID NO: 1281410 - RNA, 19 nt, Artificial Sequence
  Description of Artificial Sequence: Synthetic oligonucleotide
  Sense strand starting at position 2179 of SEQ ID NO: 1241554
ugaguucucggagacuuag

SEQ ID NO: 1281411 - RNA, 19 nt, Artificial Sequence
  Description of Artificial Sequence: Synthetic oligonucleotide
  Antisense strand to SEQ ID NO: 1281410
cuaagucuccgagaacuca

SEQ ID NO: 1281412 - RNA, 19 nt, Artificial Sequence
  Description of Artificial Sequence: Synthetic oligonucleotide
  Sense strand starting at position 2258 of SEQ ID NO: 1241554
gauguaaugugccuuacac

SEQ ID NO: 1281413 - RNA, 19 nt, Artificial Sequence
  Description of Artificial Sequence: Synthetic oligonucleotide
  Antisense strand to SEQ ID NO: 1281412
guguaaggcacauuacauc

SEQ ID NO: 1281414 - RNA, 19 nt, Artificial Sequence
  Description of Artificial Sequence: Synthetic oligonucleotide
  Sense strand starting at position 2333 of SEQ ID NO: 1241554
cccucaccuugguuaauga

SEQ ID NO: 1281415 - RNA, 19 nt, Artificial Sequence
  Description of Artificial Sequence: Synthetic oligonucleotide
  Antisense strand to SEQ ID NO: 1281414
ucauuaaccaaggugaggg

SEQ ID NO: 1281416 - RNA, 19 nt, Artificial Sequence
  Description of Artificial Sequence: Synthetic oligonucleotide
  Sense strand starting at position 2411 of SEQ ID NO: 1241554
gcgugcuuuccucuauuag

SEQ ID NO: 1281417 - RNA, 19 nt, Artificial Sequence
  Description of Artificial Sequence: Synthetic oligonucleotide
  Antisense strand to SEQ ID NO: 1281416
cuaauagaggaaagcacgc

SEQ ID NO: 1281418 - RNA, 19 nt, Artificial Sequence
  Description of Artificial Sequence: Synthetic oligonucleotide
  Sense strand starting at position 2723 of SEQ ID NO: 1241554
gccugauuagguuaaagug

SEQ ID NO: 1281419 - RNA, 19 nt, Artificial Sequence
  Description of Artificial Sequence: Synthetic oligonucleotide
  Antisense strand to SEQ ID NO: 1281418
cacuuuaaccuaaucaggc

SEQ ID NO: 1281420 - RNA, 19 nt, Artificial Sequence
  Description of Artificial Sequence: Synthetic oligonucleotide
  Sense strand starting at position 2782 of SEQ ID NO: 1241554
agucauaauggcuaacguu

SEQ ID NO: 1281421 - RNA, 19 nt, Artificial Sequence
  Description of Artificial Sequence: Synthetic oligonucleotide
  Antisense strand to SEQ ID NO: 1281420
aacguuagccauuaugacu

SEQ ID NO: 1281422 - RNA, 19 nt, Artificial Sequence
  Description of Artificial Sequence: Synthetic oligonucleotide
  Sense strand starting at position 2950 of SEQ ID NO: 1241554
gagaaucagucucugauua

SEQ ID NO: 1281423 - RNA, 19 nt, Artificial Sequence
  Description of Artificial Sequence: Synthetic oligonucleotide
  Antisense strand to SEQ ID NO: 1281422
uaaucagagacugauucuc

SEQ ID NO: 1281424 - RNA, 19 nt, Artificial Sequence
  Description of Artificial Sequence: Synthetic oligonucleotide
  Sense strand starting at position 2951 of SEQ ID NO: 1241554
agaaucagucucugauuag

SEQ ID NO: 1281425 - RNA, 19 nt, Artificial Sequence
  Description of Artificial Sequence: Synthetic oligonucleotide
  Antisense strand to SEQ ID NO: 1281424
cuaaucagagacugauucu

SEQ ID NO: 1281426 - RNA, 19 nt, Artificial Sequence
  Description of Artificial Sequence: Synthetic oligonucleotide
  Sense strand starting at position 2962 of SEQ ID NO: 1241554
cugauuagacgcugagcau

SEQ ID NO: 1281427 - RNA, 19 nt, Artificial Sequence
  Description of Artificial Sequence: Synthetic oligonucleotide
  Antisense strand to SEQ ID NO: 1281426
augcucagcgucuaaucag

SEQ ID NO: 1281428 - RNA, 19 nt, Artificial Sequence
  Description of Artificial Sequence: Synthetic oligonucleotide
  Sense strand starting at position 3563 of SEQ ID NO: 1241554
gugggcccaguguauuaau

SEQ ID NO: 1281429 - RNA, 19 nt, Artificial Sequence
  Description of Artificial Sequence: Synthetic oligonucleotide
  Antisense strand to SEQ ID NO: 1281428
auuaauacacugggcccac

SEQ ID NO: 1281430 - RNA, 19 nt, Artificial Sequence
  Description of Artificial Sequence: Synthetic oligonucleotide
  Sense strand starting at position 3629 of SEQ ID NO: 1241554
guguaucagcaguaagcua

SEQ ID NO: 1281431 - RNA, 19 nt, Artificial Sequence
  Description of Artificial Sequence: Synthetic oligonucleotide
  Antisense strand to SEQ ID NO: 1281430
uagcuuacugcugauacac

SEQ ID NO: 1281432 - RNA, 19 nt, Artificial Sequence
  Description of Artificial Sequence: Synthetic oligonucleotide
  Sense strand starting at position 3667 of SEQ ID NO: 1241554
agaacaagauaguugugau

SEQ ID NO: 1281433 - RNA, 19 nt, Artificial Sequence
  Description of Artificial Sequence: Synthetic oligonucleotide
  Antisense strand to SEQ ID NO: 1281432
aucacaacuaucuuguucu

SEQ ID NO: 1281434 - RNA, 19 nt, Artificial Sequence
  Description of Artificial Sequence: Synthetic oligonucleotide
  Sense strand starting at position 3783 of SEQ ID NO: 1241554
ggcacuuggguauaucagu

SEQ ID NO: 1281435 - RNA, 19 nt, Artificial Sequence
  Description of Artificial Sequence: Synthetic oligonucleotide
  Antisense strand to SEQ ID NO: 1281434
acugauauacccaagugcc

SEQ ID NO: 1281436 - RNA, 19 nt, Artificial Sequence
  Description of Artificial Sequence: Synthetic oligonucleotide
  Sense strand starting at position 3788 of SEQ ID NO: 1241554
uuggguauaucaguguaca

SEQ ID NO: 1281437 - RNA, 19 nt, Artificial Sequence
  Description of Artificial Sequence: Synthetic oligonucleotide
  Antisense strand to SEQ ID NO: 1281436
uguacacugauauacccaa

SEQ ID NO: 1281438 - RNA, 19 nt, Artificial Sequence
  Description of Artificial Sequence: Synthetic oligonucleotide
  Sense strand starting at position 3789 of SEQ ID NO: 1241554
uggguauaucaguguacaa

SEQ ID NO: 1281439 - RNA, 19 nt, Artificial Sequence
  Description of Artificial Sequence: Synthetic oligonucleotide
  Antisense strand to SEQ ID NO: 1281438
uuguacacugauauaccca

SEQ ID NO: 1281440 - RNA, 19 nt, Artificial Sequence
  Description of Artificial Sequence: Synthetic oligonucleotide
  Sense strand starting at position 3791 of SEQ ID NO: 1241554
gguauaucaguguacaaua

SEQ ID NO: 1281441 - RNA, 19 nt, Artificial Sequence
  Description of Artificial Sequence: Synthetic oligonucleotide
  Antisense strand to SEQ ID NO: 1281440
uauuguacacugauauacc

SEQ ID NO: 1281442 - RNA, 19 nt, Artificial Sequence
  Description of Artificial Sequence: Synthetic oligonucleotide
  Sense strand starting at position 3809 of SEQ ID NO: 1241554
aaagaucucugagcaaguc

SEQ ID NO: 1281443 - RNA, 19 nt, Artificial Sequence
  Description of Artificial Sequence: Synthetic oligonucleotide
  Antisense strand to SEQ ID NO: 1281442
gacuugcucagagaucuuu

SEQ ID NO: 1281444 - RNA, 19 nt, Artificial Sequence
  Description of Artificial Sequence: Synthetic oligonucleotide
  Sense strand starting at position 3881 of SEQ ID NO: 1241554
gcuacagcccaggaguuaa

SEQ ID NO: 1281445 - RNA, 19 nt, Artificial Sequence
  Description of Artificial Sequence: Synthetic oligonucleotide
  Antisense strand to SEQ ID NO: 1281444
uuaacuccugggcuguagc

SEQ ID NO: 1281446 - RNA, 19 nt, Artificial Sequence
  Description of Artificial Sequence: Synthetic oligonucleotide
  Sense strand starting at position 3976 of SEQ ID NO: 1241554
cgggaugauuguuugaguc

SEQ ID NO: 1281447 - RNA, 19 nt, Artificial Sequence
  Description of Artificial Sequence: Synthetic oligonucleotide
  Antisense strand to SEQ ID NO: 1281446
gacucaaacaaucaucccg

SEQ ID NO: 1281448 - RNA, 19 nt, Artificial Sequence
  Description of Artificial Sequence: Synthetic oligonucleotide
  Sense strand starting at position 393 of SEQ ID NO: 1241555
ggaagcagaauucgaccua

SEQ ID NO: 1281449 - RNA, 19 nt, Artificial Sequence
  Description of Artificial Sequence: Synthetic oligonucleotide
  Antisense strand to SEQ ID NO: 1281448
uaggucgaauucugcuucc

SEQ ID NO: 1281450 - RNA, 19 nt, Artificial Sequence
  Description of Artificial Sequence: Synthetic oligonucleotide
  Sense strand starting at position 528 of SEQ ID NO: 1241555
ugaauugaauacuugcuaa

SEQ ID NO: 1281451 - RNA, 19 nt, Artificial Sequence
  Description of Artificial Sequence: Synthetic oligonucleotide
  Antisense strand to SEQ ID NO: 1281450
uuagcaaguauucaauuca

SEQ ID NO: 1281452 - RNA, 19 nt, Artificial Sequence
  Description of Artificial Sequence: Synthetic oligonucleotide
  Sense strand starting at position 558 of SEQ ID NO: 1241555
gaccuauggcucuguuaca

SEQ ID NO: 1281453 - RNA, 19 nt, Artificial Sequence
  Description of Artificial Sequence: Synthetic oligonucleotide
  Antisense strand to SEQ ID NO: 1281452
uguaacagagccauagguc

SEQ ID NO: 1281454 - RNA, 19 nt, Artificial Sequence
  Description of Artificial Sequence: Synthetic oligonucleotide
  Sense strand starting at position 731 of SEQ ID NO: 1241555
agaaucaacccguguuacu

SEQ ID NO: 1281455 - RNA, 19 nt, Artificial Sequence
  Description of Artificial Sequence: Synthetic oligonucleotide
  Antisense strand to SEQ ID NO: 1281454
aguaacacggguugauucu

SEQ ID NO: 1281456 - RNA, 19 nt, Artificial Sequence
  Description of Artificial Sequence: Synthetic oligonucleotide
  Sense strand starting at position 815 of SEQ ID NO: 1241555
guggcaaugaggugugaca

SEQ ID NO: 1281457 - RNA, 19 nt, Artificial Sequence
  Description of Artificial Sequence: Synthetic oligonucleotide
  Antisense strand to SEQ ID NO: 1281456
ugucacaccucauugccac

SEQ ID NO: 1281458 - RNA, 19 nt, Artificial Sequence
  Description of Artificial Sequence: Synthetic oligonucleotide
  Sense strand starting at position 817 of SEQ ID NO: 1241555
ggcaaugaggugugacaga

SEQ ID NO: 1281459 - RNA, 19 nt, Artificial Sequence
  Description of Artificial Sequence: Synthetic oligonucleotide
  Antisense strand to SEQ ID NO: 1281458
ucugucacaccucauugcc

SEQ ID NO: 1281460 - RNA, 19 nt, Artificial Sequence
  Description of Artificial Sequence: Synthetic oligonucleotide
  Sense strand starting at position 898 of SEQ ID NO: 1241555
accagacaugauugcacaa

SEQ ID NO: 1281461 - RNA, 19 nt, Artificial Sequence
  Description of Artificial Sequence: Synthetic oligonucleotide
  Antisense strand to SEQ ID NO: 1281460
uugugcaaucaugucuggu

SEQ ID NO: 1281462 - RNA, 19 nt, Artificial Sequence
  Description of Artificial Sequence: Synthetic oligonucleotide
  Sense strand starting at position 1164 of SEQ ID NO: 1241555
aacugugaugccuaaugca

SEQ ID NO: 1281463 - RNA, 19 nt, Artificial Sequence
  Description of Artificial Sequence: Synthetic oligonucleotide
  Antisense strand to SEQ ID NO: 1281462
ugcauuaggcaucacaguu

SEQ ID NO: 1281464 - RNA, 19 nt, Artificial Sequence
  Description of Artificial Sequence: Synthetic oligonucleotide
  Sense strand starting at position 1183 of SEQ ID NO: 1241555
ggucacuuggacugggaua

SEQ ID NO: 1281465 - RNA, 19 nt, Artificial Sequence
  Description of Artificial Sequence: Synthetic oligonucleotide
  Antisense strand to SEQ ID NO: 1281464
uaucccaguccaagugacc

SEQ ID NO: 1281466 - RNA, 19 nt, Artificial Sequence
  Description of Artificial Sequence: Synthetic oligonucleotide
  Sense strand starting at position 1184 of SEQ ID NO: 1241555
gucacuuggacugggauau

SEQ ID NO: 1281467 - RNA, 19 nt, Artificial Sequence
  Description of Artificial Sequence: Synthetic oligonucleotide
  Antisense strand to SEQ ID NO: 1281466
auaucccaguccaagugac

SEQ ID NO: 1281468 - RNA, 19 nt, Artificial Sequence
  Description of Artificial Sequence: Synthetic oligonucleotide
  Sense strand starting at position 1271 of SEQ ID NO: 1241555
ucaguucggugacugauuu

SEQ ID NO: 1281469 - RNA, 19 nt, Artificial Sequence
  Description of Artificial Sequence: Synthetic oligonucleotide
  Antisense strand to SEQ ID NO: 1281468
aaaucagucaccgaacuga

SEQ ID NO: 1281470 - RNA, 19 nt, Artificial Sequence
  Description of Artificial Sequence: Synthetic oligonucleotide
  Sense strand starting at position 1284 of SEQ ID NO: 1241555
ugauuuccgucuccacuua

SEQ ID NO: 1281471 - RNA, 19 nt, Artificial Sequence
  Description of Artificial Sequence: Synthetic oligonucleotide
  Antisense strand to SEQ ID NO: 1281470
uaaguggagacggaaauca

SEQ ID NO: 1281472 - RNA, 19 nt, Artificial Sequence
  Description of Artificial Sequence: Synthetic oligonucleotide
  Sense strand starting at position 1375 of SEQ ID NO: 1241555
ugaguaaucuugccucuaa

SEQ ID NO: 1281473 - RNA, 19 nt, Artificial Sequence
  Description of Artificial Sequence: Synthetic oligonucleotide
  Antisense strand to SEQ ID NO: 1281472
uuagaggcaagauuacuca

SEQ ID NO: 1281474 - RNA, 19 nt, Artificial Sequence
  Description of Artificial Sequence: Synthetic oligonucleotide
  Sense strand starting at position 1444 of SEQ ID NO: 1241555
acccuagcaugggaauuua

SEQ ID NO: 1281475 - RNA, 19 nt, Artificial Sequence
  Description of Artificial Sequence: Synthetic oligonucleotide
  Antisense strand to SEQ ID NO: 1281474
uaaauucccaugcuagggu

SEQ ID NO: 1281476 - RNA, 19 nt, Artificial Sequence
  Description of Artificial Sequence: Synthetic oligonucleotide
  Sense strand starting at position 2052 of SEQ ID NO: 1241555
cccugucuccauggugaca

SEQ ID NO: 1281477 - RNA, 19 nt, Artificial Sequence
  Description of Artificial Sequence: Synthetic oligonucleotide
  Antisense strand to SEQ ID NO: 1281476
ugucaccauggagacaggg

SEQ ID NO: 1281478 - RNA, 19 nt, Artificial Sequence
  Description of Artificial Sequence: Synthetic oligonucleotide
  Sense strand starting at position 2099 of SEQ ID NO: 1241555
cuguaaaccuaaucagagu

SEQ ID NO: 1281479 - RNA, 19 nt, Artificial Sequence
  Description of Artificial Sequence: Synthetic oligonucleotide
  Antisense strand to SEQ ID NO: 1281478
acucugauuagguuuacag

SEQ ID NO: 1281480 - RNA, 19 nt, Artificial Sequence
  Description of Artificial Sequence: Synthetic oligonucleotide
  Sense strand starting at position 2238 of SEQ ID NO: 1241555
cggaaauagggcuagaagu

SEQ ID NO: 1281481 - RNA, 19 nt, Artificial Sequence
  Description of Artificial Sequence: Synthetic oligonucleotide
  Antisense strand to SEQ ID NO: 1281480
acuucuagcccuauuuccg

SEQ ID NO: 1281482 - RNA, 19 nt, Artificial Sequence
  Description of Artificial Sequence: Synthetic oligonucleotide
  Sense strand starting at position 2307 of SEQ ID NO: 1241555
aauagcaaaccgugagaga

SEQ ID NO: 1281483 - RNA, 19 nt, Artificial Sequence
  Description of Artificial Sequence: Synthetic oligonucleotide
  Antisense strand to SEQ ID NO: 1281482
ucucucacgguuugcuauu

SEQ ID NO: 1281484 - RNA, 19 nt, Artificial Sequence
  Description of Artificial Sequence: Synthetic oligonucleotide
  Sense strand starting at position 2308 of SEQ ID NO: 1241555
auagcaaaccgugagagau

SEQ ID NO: 1281485 - RNA, 19 nt, Artificial Sequence
  Description of Artificial Sequence: Synthetic oligonucleotide
  Antisense strand to SEQ ID NO: 1281484
aucucucacgguuugcuau

SEQ ID NO: 1281486 - RNA, 19 nt, Artificial Sequence
  Description of Artificial Sequence: Synthetic oligonucleotide
  Sense strand starting at position 2393 of SEQ ID NO: 1241555
cugaguugcucccuggaca

SEQ ID NO: 1281487 - RNA, 19 nt, Artificial Sequence
  Description of Artificial Sequence: Synthetic oligonucleotide
  Antisense strand to SEQ ID NO: 1281486
uguccagggagcaacucag

SEQ ID NO: 1281488 - RNA, 19 nt, Artificial Sequence
  Description of Artificial Sequence: Synthetic oligonucleotide
  Sense strand starting at position 2394 of SEQ ID NO: 1241555
ugaguugcucccuggacaa

SEQ ID NO: 1281489 - RNA, 19 nt, Artificial Sequence
  Description of Artificial Sequence: Synthetic oligonucleotide
  Antisense strand to SEQ ID NO: 1281488
uuguccagggagcaacuca

SEQ ID NO: 1281490 - RNA, 19 nt, Artificial Sequence
  Description of Artificial Sequence: Synthetic oligonucleotide
  Sense strand starting at position 2437 of SEQ ID NO: 1241555
cagugcuaacuuggaggau

SEQ ID NO: 1281491 - RNA, 19 nt, Artificial Sequence
  Description of Artificial Sequence: Synthetic oligonucleotide
  Antisense strand to SEQ ID NO: 1281490
auccuccaaguuagcacug

SEQ ID NO: 1281492 - RNA, 19 nt, Artificial Sequence
  Description of Artificial Sequence: Synthetic oligonucleotide
  Sense strand starting at position 2525 of SEQ ID NO: 1241555
guccuagaugccgacagaa

SEQ ID NO: 1281493 - RNA, 19 nt, Artificial Sequence
  Description of Artificial Sequence: Synthetic oligonucleotide
  Antisense strand to SEQ ID NO: 1281492
uucugucggcaucuaggac

SEQ ID NO: 1281494 - RNA, 19 nt, Artificial Sequence
  Description of Artificial Sequence: Synthetic oligonucleotide
  Sense strand starting at position 2584 of SEQ ID NO: 1241555
ccuugaucugcgcaauauu

SEQ ID NO: 1281495 - RNA, 19 nt, Artificial Sequence
  Description of Artificial Sequence: Synthetic oligonucleotide
  Antisense strand to SEQ ID NO: 1281494
aauauugcgcagaucaagg

SEQ ID NO: 1281496 - RNA, 19 nt, Artificial Sequence
  Description of Artificial Sequence: Synthetic oligonucleotide
  Sense strand starting at position 2587 of SEQ ID NO: 1241555
ugaucugcgcaauauugau

SEQ ID NO: 1281497 - RNA, 19 nt, Artificial Sequence
  Description of Artificial Sequence: Synthetic oligonucleotide
  Antisense strand to SEQ ID NO: 1281496
aucaauauugcgcagauca

SEQ ID NO: 1281498 - RNA, 19 nt, Artificial Sequence
  Description of Artificial Sequence: Synthetic oligonucleotide
  Sense strand starting at position 2628 of SEQ ID NO: 1241555
ggacuccucccacgaagaa

SEQ ID NO: 1281499 - RNA, 19 nt, Artificial Sequence
  Description of Artificial Sequence: Synthetic oligonucleotide
  Antisense strand to SEQ ID NO: 1281498
uucuucgugggaggagucc

SEQ ID NO: 1281500 - RNA, 19 nt, Artificial Sequence
  Description of Artificial Sequence: Synthetic oligonucleotide
  Sense strand starting at position 2694 of SEQ ID NO: 1241555
gugucuuugguagaauaca

SEQ ID NO: 1281501 - RNA, 19 nt, Artificial Sequence
  Description of Artificial Sequence: Synthetic oligonucleotide
  Antisense strand to SEQ ID NO: 1281500
uguauucuaccaaagacac

SEQ ID NO: 1281502 - RNA, 19 nt, Artificial Sequence
  Description of Artificial Sequence: Synthetic oligonucleotide
  Sense strand starting at position 3098 of SEQ ID NO: 1241555
aguagcugguuccugagaa

SEQ ID NO: 1281503 - RNA, 19 nt, Artificial Sequence
  Description of Artificial Sequence: Synthetic oligonucleotide
  Antisense strand to SEQ ID NO: 1281502
uucucaggaaccagcuacu

SEQ ID NO: 1281504 - RNA, 19 nt, Artificial Sequence
  Description of Artificial Sequence: Synthetic oligonucleotide
  Sense strand starting at position 3188 of SEQ ID NO: 1241555
aguuacuuacgggauaugu

SEQ ID NO: 1281505 - RNA, 19 nt, Artificial Sequence
  Description of Artificial Sequence: Synthetic oligonucleotide
  Antisense strand to SEQ ID NO: 1281504
acauaucccguaaguaacu

SEQ ID NO: 1281506 - RNA, 19 nt, Artificial Sequence
  Description of Artificial Sequence: Synthetic oligonucleotide
  Sense strand starting at position 3196 of SEQ ID NO: 1241555
acgggauauguacaucugu

SEQ ID NO: 1281507 - RNA, 19 nt, Artificial Sequence
  Description of Artificial Sequence: Synthetic oligonucleotide
  Antisense strand to SEQ ID NO: 1281506
acagauguacauaucccgu

SEQ ID NO: 1281508 - RNA, 19 nt, Artificial Sequence
  Description of Artificial Sequence: Synthetic oligonucleotide
  Sense strand starting at position 3210 of SEQ ID NO: 1241555
ucuguuuggcacuacucaa

SEQ ID NO: 1281509 - RNA, 19 nt, Artificial Sequence
  Description of Artificial Sequence: Synthetic oligonucleotide
  Antisense strand to SEQ ID NO: 1281508
uugaguagugccaaacaga

SEQ ID NO: 1281510 - RNA, 19 nt, Artificial Sequence
  Description of Artificial Sequence: Synthetic oligonucleotide
  Sense strand starting at position 3643 of SEQ ID NO: 1241555
agaguauaggcaugagcua

SEQ ID NO: 1281511 - RNA, 19 nt, Artificial Sequence
  Description of Artificial Sequence: Synthetic oligonucleotide
  Antisense strand to SEQ ID NO: 1281510
uagcucaugccuauacucu

SEQ ID NO: 1281512 - RNA, 19 nt, Artificial Sequence
  Description of Artificial Sequence: Synthetic oligonucleotide
  Sense strand starting at position 3711 of SEQ ID NO: 1241555
auguuccaacugugaauca

SEQ ID NO: 1281513 - RNA, 19 nt, Artificial Sequence
  Description of Artificial Sequence: Synthetic oligonucleotide
  Antisense strand to SEQ ID NO: 1281512
ugauucacaguuggaacau

SEQ ID NO: 1281514 - RNA, 19 nt, Artificial Sequence
  Description of Artificial Sequence: Synthetic oligonucleotide
  Sense strand starting at position 3721 of SEQ ID NO: 1241555
ugugaaucaccucaaguua

SEQ ID NO: 1281515 - RNA, 19 nt, Artificial Sequence
  Description of Artificial Sequence: Synthetic oligonucleotide
  Antisense strand to SEQ ID NO: 1281514
uaacuugaggugauucaca

SEQ ID NO: 1281516 - RNA, 19 nt, Artificial Sequence
  Description of Artificial Sequence: Synthetic oligonucleotide
  Sense strand starting at position 3741 of SEQ ID NO: 1241555
uaggucacacaguguuuaa

SEQ ID NO: 1281517 - RNA, 19 nt, Artificial Sequence
  Description of Artificial Sequence: Synthetic oligonucleotide
  Antisense strand to SEQ ID NO: 1281516
uuaaacacugugugaccua

SEQ ID NO: 1281518 - RNA, 19 nt, Artificial Sequence
  Description of Artificial Sequence: Synthetic oligonucleotide
  Sense strand starting at position 3744 of SEQ ID NO: 1241555
gucacacaguguuuaagaa

SEQ ID NO: 1281519 - RNA, 19 nt, Artificial Sequence
  Description of Artificial Sequence: Synthetic oligonucleotide
  Antisense strand to SEQ ID NO: 1281518
uucuuaaacacugugugac

SEQ ID NO: 1281520 - RNA, 19 nt, Artificial Sequence
  Description of Artificial Sequence: Synthetic oligonucleotide
  Sense strand starting at position 3880 of SEQ ID NO: 1241555
ccugaaucuauguagugua

SEQ ID NO: 1281521 - RNA, 19 nt, Artificial Sequence
  Description of Artificial Sequence: Synthetic oligonucleotide
  Antisense strand to SEQ ID NO: 1281520
uacacuacauagauucagg

SEQ ID NO: 1281522 - RNA, 19 nt, Artificial Sequence
  Description of Artificial Sequence: Synthetic oligonucleotide
  Sense strand starting at position 3896 of SEQ ID NO: 1241555
guaaaugaaugggcucuaa

SEQ ID NO: 1281523 - RNA, 19 nt, Artificial Sequence
  Description of Artificial Sequence: Synthetic oligonucleotide
  Antisense strand to SEQ ID NO: 1281522
uuagagcccauucauuuac

SEQ ID NO: 1281524 - RNA, 19 nt, Artificial Sequence
  Description of Artificial Sequence: Synthetic oligonucleotide
  Sense strand starting at position 3951 of SEQ ID NO: 1241555
uauuuacucgugugauucu

SEQ ID NO: 1281525 - RNA, 19 nt, Artificial Sequence
  Description of Artificial Sequence: Synthetic oligonucleotide
  Antisense strand to SEQ ID NO: 1281524
agaaucacacgaguaaaua

SEQ ID NO: 1281526 - RNA, 19 nt, Artificial Sequence
  Description of Artificial Sequence: Synthetic oligonucleotide
  Sense strand starting at position 3961 of SEQ ID NO: 1241555
ugugauucuaggcaaguaa

SEQ ID NO: 1281527 - RNA, 19 nt, Artificial Sequence
  Description of Artificial Sequence: Synthetic oligonucleotide
  Antisense strand to SEQ ID NO: 1281526
uuacuugccuagaaucaca

SEQ ID NO: 1281528 - RNA, 19 nt, Artificial Sequence
  Description of Artificial Sequence: Synthetic oligonucleotide
  Sense strand starting at position 75 of SEQ ID NO: 1241556
agcgaaugcugucuggaca

SEQ ID NO: 1281529 - RNA, 19 nt, Artificial Sequence
  Description of Artificial Sequence: Synthetic oligonucleotide
  Antisense strand to SEQ ID NO: 1281528
uguccagacagcauucgcu

SEQ ID NO: 1281530 - RNA, 19 nt, Artificial Sequence
  Description of Artificial Sequence: Synthetic oligonucleotide
  Sense strand starting at position 76 of SEQ ID NO: 1241556
gcgaaugcugucuggacaa

SEQ ID NO: 1281531 - RNA, 19 nt, Artificial Sequence
  Description of Artificial Sequence: Synthetic oligonucleotide
  Antisense strand to SEQ ID NO: 1281530
uuguccagacagcauucgc

SEQ ID NO: 1281532 - RNA, 19 nt, Artificial Sequence
  Description of Artificial Sequence: Synthetic oligonucleotide
  Sense strand starting at position 78 of SEQ ID NO: 1241556
gaaugcugucuggacaaca

SEQ ID NO: 1281533 - RNA, 19 nt, Artificial Sequence
  Description of Artificial Sequence: Synthetic oligonucleotide
  Antisense strand to SEQ ID NO: 1281532
uguuguccagacagcauuc

SEQ ID NO: 1281534 - RNA, 19 nt, Artificial Sequence
  Description of Artificial Sequence: Synthetic oligonucleotide
  Sense strand starting at position 191 of SEQ ID NO: 1241556
uugagauaauguguacugu

SEQ ID NO: 1281535 - RNA, 19 nt, Artificial Sequence
  Description of Artificial Sequence: Synthetic oligonucleotide
  Antisense strand to SEQ ID NO: 1281534
acaguacacauuaucucaa

SEQ ID NO: 1281536 - RNA, 19 nt, Artificial Sequence
  Description of Artificial Sequence: Synthetic oligonucleotide
  Sense strand starting at position 192 of SEQ ID NO: 1241556
ugagauaauguguacuguu

SEQ ID NO: 1281537 - RNA, 19 nt, Artificial Sequence
  Description of Artificial Sequence: Synthetic oligonucleotide
  Antisense strand to SEQ ID NO: 1281536
aacaguacacauuaucuca

SEQ ID NO: 1281538 - RNA, 19 nt, Artificial Sequence
  Description of Artificial Sequence: Synthetic oligonucleotide
  Sense strand starting at position 276 of SEQ ID NO: 1241556
gcucuugcucucuauugca

SEQ ID NO: 1281539 - RNA, 19 nt, Artificial Sequence
  Description of Artificial Sequence: Synthetic oligonucleotide
  Antisense strand to SEQ ID NO: 1281538
ugcaauagagagcaagagc

SEQ ID NO: 1281540 - RNA, 19 nt, Artificial Sequence
  Description of Artificial Sequence: Synthetic oligonucleotide
  Sense strand starting at position 311 of SEQ ID NO: 1241556
cggugcuuugcagcuaaca

SEQ ID NO: 1281541 - RNA, 19 nt, Artificial Sequence
  Description of Artificial Sequence: Synthetic oligonucleotide
  Antisense strand to SEQ ID NO: 1281540
uguuagcugcaaagcaccg

SEQ ID NO: 1281542 - RNA, 19 nt, Artificial Sequence
  Description of Artificial Sequence: Synthetic oligonucleotide
  Sense strand starting at position 313 of SEQ ID NO: 1241556
gugcuuugcagcuaacaga

SEQ ID NO: 1281543 - RNA, 19 nt, Artificial Sequence
  Description of Artificial Sequence: Synthetic oligonucleotide
  Antisense strand to SEQ ID NO: 1281542
ucuguuagcugcaaagcac

SEQ ID NO: 1281544 - RNA, 19 nt, Artificial Sequence
  Description of Artificial Sequence: Synthetic oligonucleotide
  Sense strand starting at position 337 of SEQ ID NO: 1241556
guauacuuaugacugaaau

SEQ ID NO: 1281545 - RNA, 19 nt, Artificial Sequence
  Description of Artificial Sequence: Synthetic oligonucleotide
  Antisense strand to SEQ ID NO: 1281544
auuucagucauaaguauac

SEQ ID NO: 1281546 - RNA, 19 nt, Artificial Sequence
  Description of Artificial Sequence: Synthetic oligonucleotide
  Sense strand starting at position 371 of SEQ ID NO: 1241556
gcuuaauauuaggucaaau

SEQ ID NO: 1281547 - RNA, 19 nt, Artificial Sequence
  Description of Artificial Sequence: Synthetic oligonucleotide
  Antisense strand to SEQ ID NO: 1281546
auuugaccuaauauuaagc

SEQ ID NO: 1281548 - RNA, 19 nt, Artificial Sequence
  Description of Artificial Sequence: Synthetic oligonucleotide
  Sense strand starting at position 412 of SEQ ID NO: 1241556
ucaucaguuccucaugcuu

SEQ ID NO: 1281549 - RNA, 19 nt, Artificial Sequence
  Description of Artificial Sequence: Synthetic oligonucleotide
  Antisense strand to SEQ ID NO: 1281548
aagcaugaggaacugauga

SEQ ID NO: 1281550 - RNA, 19 nt, Artificial Sequence
  Description of Artificial Sequence: Synthetic oligonucleotide
  Sense strand starting at position 824 of SEQ ID NO: 1241556
gcaguaagucaaguucgca

SEQ ID NO: 1281551 - RNA, 19 nt, Artificial Sequence
  Description of Artificial Sequence: Synthetic oligonucleotide
  Antisense strand to SEQ ID NO: 1281550
ugcgaacuugacuuacugc

SEQ ID NO: 1281552 - RNA, 19 nt, Artificial Sequence
  Description of Artificial Sequence: Synthetic oligonucleotide
  Sense strand starting at position 997 of SEQ ID NO: 1241556
gagaaaucuugggaagguu

SEQ ID NO: 1281553 - RNA, 19 nt, Artificial Sequence
  Description of Artificial Sequence: Synthetic oligonucleotide
  Antisense strand to SEQ ID NO: 1281552
aaccuucccaagauuucuc

SEQ ID NO: 1281554 - RNA, 19 nt, Artificial Sequence
  Description of Artificial Sequence: Synthetic oligonucleotide
  Sense strand starting at position 1151 of SEQ ID NO: 1241556
gagagcuguccaggucaca

SEQ ID NO: 1281555 - RNA, 19 nt, Artificial Sequence
  Description of Artificial Sequence: Synthetic oligonucleotide
  Antisense strand to SEQ ID NO: 1281554
ugugaccuggacagcucuc

SEQ ID NO: 1281556 - RNA, 19 nt, Artificial Sequence
  Description of Artificial Sequence: Synthetic oligonucleotide
  Sense strand starting at position 1173 of SEQ ID NO: 1241556
uugauaaccggcugccaua

SEQ ID NO: 1281557 - RNA, 19 nt, Artificial Sequence
  Description of Artificial Sequence: Synthetic oligonucleotide
  Antisense strand to SEQ ID NO: 1281556
uauggcagccgguuaucaa

SEQ ID NO: 1281558 - RNA, 19 nt, Artificial Sequence
  Description of Artificial Sequence: Synthetic oligonucleotide
  Sense strand starting at position 1217 of SEQ ID NO: 1241556
guuugacaugugcagaaga

SEQ ID NO: 1281559 - RNA, 19 nt, Artificial Sequence
  Description of Artificial Sequence: Synthetic oligonucleotide
  Antisense strand to SEQ ID NO: 1281558
ucuucugcacaugucaaac

SEQ ID NO: 1281560 - RNA, 19 nt, Artificial Sequence
  Description of Artificial Sequence: Synthetic oligonucleotide
  Sense strand starting at position 1257 of SEQ ID NO: 1241556
acauuaaacuccucgcaug

SEQ ID NO: 1281561 - RNA, 19 nt, Artificial Sequence
  Description of Artificial Sequence: Synthetic oligonucleotide
  Antisense strand to SEQ ID NO: 1281560
caugcgaggaguuuaaugu

SEQ ID NO: 1281562 - RNA, 19 nt, Artificial Sequence
  Description of Artificial Sequence: Synthetic oligonucleotide
  Sense strand starting at position 1370 of SEQ ID NO: 1241556
aguagaguggcacgauauc

SEQ ID NO: 1281563 - RNA, 19 nt, Artificial Sequence
  Description of Artificial Sequence: Synthetic oligonucleotide
  Antisense strand to SEQ ID NO: 1281562
gauaucgugccacucuacu

SEQ ID NO: 1281564 - RNA, 19 nt, Artificial Sequence
  Description of Artificial Sequence: Synthetic oligonucleotide
  Sense strand starting at position 1907 of SEQ ID NO: 1241556
ggcgcuaaacccuguuaag

SEQ ID NO: 1281565 - RNA, 19 nt, Artificial Sequence
  Description of Artificial Sequence: Synthetic oligonucleotide
  Antisense strand to SEQ ID NO: 1281564
cuuaacaggguuuagcgcc

SEQ ID NO: 1281566 - RNA, 19 nt, Artificial Sequence
  Description of Artificial Sequence: Synthetic oligonucleotide
  Sense strand starting at position 1988 of SEQ ID NO: 1241556
gaccgaguaggcugaaagu

SEQ ID NO: 1281567 - RNA, 19 nt, Artificial Sequence
  Description of Artificial Sequence: Synthetic oligonucleotide
  Antisense strand to SEQ ID NO: 1281566
acuuucagccuacucgguc

SEQ ID NO: 1281568 - RNA, 19 nt, Artificial Sequence
  Description of Artificial Sequence: Synthetic oligonucleotide
  Sense strand starting at position 2194 of SEQ ID NO: 1241556
ucgcacaagcucuggaaau

SEQ ID NO: 1281569 - RNA, 19 nt, Artificial Sequence
  Description of Artificial Sequence: Synthetic oligonucleotide
  Antisense strand to SEQ ID NO: 1281568
auuuccagagcuugugcga

SEQ ID NO: 1281570 - RNA, 19 nt, Artificial Sequence
  Description of Artificial Sequence: Synthetic oligonucleotide
  Sense strand starting at position 2208 of SEQ ID NO: 1241556
gaaauacugugccucgaca

SEQ ID NO: 1281571 - RNA, 19 nt, Artificial Sequence
  Description of Artificial Sequence: Synthetic oligonucleotide
  Antisense strand to SEQ ID NO: 1281570
ugucgaggcacaguauuuc

SEQ ID NO: 1281572 - RNA, 19 nt, Artificial Sequence
  Description of Artificial Sequence: Synthetic oligonucleotide
  Sense strand starting at position 2210 of SEQ ID NO: 1241556
aauacugugccucgacauu

SEQ ID NO: 1281573 - RNA, 19 nt, Artificial Sequence
  Description of Artificial Sequence: Synthetic oligonucleotide
  Antisense strand to SEQ ID NO: 1281572
aaugucgaggcacaguauu

SEQ ID NO: 1281574 - RNA, 19 nt, Artificial Sequence
  Description of Artificial Sequence: Synthetic oligonucleotide
  Sense strand starting at position 2221 of SEQ ID NO: 1241556
ucgacauuuaccggaagcu

SEQ ID NO: 1281575 - RNA, 19 nt, Artificial Sequence
  Description of Artificial Sequence: Synthetic oligonucleotide
  Antisense strand to SEQ ID NO: 1281574
agcuuccgguaaaugucga

SEQ ID NO: 1281576 - RNA, 19 nt, Artificial Sequence
  Description of Artificial Sequence: Synthetic oligonucleotide
  Sense strand starting at position 2240 of SEQ ID NO: 1241556
guuauaaaucuccaucgcu

SEQ ID NO: 1281577 - RNA, 19 nt, Artificial Sequence
  Description of Artificial Sequence: Synthetic oligonucleotide
  Antisense strand to SEQ ID NO: 1281576
agcgauggagauuuauaac

SEQ ID NO: 1281578 - RNA, 19 nt, Artificial Sequence
  Description of Artificial Sequence: Synthetic oligonucleotide
  Sense strand starting at position 2300 of SEQ ID NO: 1241556
gcgccaugcacugucauaa

SEQ ID NO: 1281579 - RNA, 19 nt, Artificial Sequence
  Description of Artificial Sequence: Synthetic oligonucleotide
  Antisense strand to SEQ ID NO: 1281578
uuaugacagugcauggcgc

SEQ ID NO: 1281580 - RNA, 19 nt, Artificial Sequence
  Description of Artificial Sequence: Synthetic oligonucleotide
  Sense strand starting at position 2321 of SEQ ID NO: 1241556
acuuuaaaugugugaauuc

SEQ ID NO: 1281581 - RNA, 19 nt, Artificial Sequence
  Description of Artificial Sequence: Synthetic oligonucleotide
  Antisense strand to SEQ ID NO: 1281580
gaauucacacauuuaaagu

SEQ ID NO: 1281582 - RNA, 19 nt, Artificial Sequence
  Description of Artificial Sequence: Synthetic oligonucleotide
  Sense strand starting at position 2338 of SEQ ID NO: 1241556
ucauguguugcucaugaca

SEQ ID NO: 1281583 - RNA, 19 nt, Artificial Sequence
  Description of Artificial Sequence: Synthetic oligonucleotide
  Antisense strand to SEQ ID NO: 1281582
ugucaugagcaacacauga

SEQ ID NO: 1281584 - RNA, 19 nt, Artificial Sequence
  Description of Artificial Sequence: Synthetic oligonucleotide
  Sense strand starting at position 2428 of SEQ ID NO: 1241556
ugguaaaggacuugcucaa

SEQ ID NO: 1281585 - RNA, 19 nt, Artificial Sequence
  Description of Artificial Sequence: Synthetic oligonucleotide
  Antisense strand to SEQ ID NO: 1281584
uugagcaaguccuuuacca

SEQ ID NO: 1281586 - RNA, 19 nt, Artificial Sequence
  Description of Artificial Sequence: Synthetic oligonucleotide
  Sense strand starting at position 2454 of SEQ ID NO: 1241556
cgacgaguuaaauggugua

SEQ ID NO: 1281587 - RNA, 19 nt, Artificial Sequence
  Description of Artificial Sequence: Synthetic oligonucleotide
  Antisense strand to SEQ ID NO: 1281586
uacaccauuuaacucgucg

SEQ ID NO: 1281588 - RNA, 19 nt, Artificial Sequence
  Description of Artificial Sequence: Synthetic oligonucleotide
  Sense strand starting at position 2482 of SEQ ID NO: 1241556
ugaacucaguuauucugau

SEQ ID NO: 1281589 - RNA, 19 nt, Artificial Sequence
  Description of Artificial Sequence: Synthetic oligonucleotide
  Antisense strand to SEQ ID NO: 1281588
aucagaauaacugaguuca

SEQ ID NO: 1281590 - RNA, 19 nt, Artificial Sequence
  Description of Artificial Sequence: Synthetic oligonucleotide
  Sense strand starting at position 2536 of SEQ ID NO: 1241556
gcuugcuccaaugaguuga

SEQ ID NO: 1281591 - RNA, 19 nt, Artificial Sequence
  Description of Artificial Sequence: Synthetic oligonucleotide
  Antisense strand to SEQ ID NO: 1281590
ucaacucauuggagcaagc

SEQ ID NO: 1281592 - RNA, 19 nt, Artificial Sequence
  Description of Artificial Sequence: Synthetic oligonucleotide
  Sense strand starting at position 2565 of SEQ ID NO: 1241556
gagugcuuauaaguaaaca

SEQ ID NO: 1281593 - RNA, 19 nt, Artificial Sequence
  Description of Artificial Sequence: Synthetic oligonucleotide
  Antisense strand to SEQ ID NO: 1281592
uguuuacuuauaagcacuc

SEQ ID NO: 1281594 - RNA, 19 nt, Artificial Sequence
  Description of Artificial Sequence: Synthetic oligonucleotide
  Sense strand starting at position 2600 of SEQ ID NO: 1241556
ggaggaugauuucacagua

SEQ ID NO: 1281595 - RNA, 19 nt, Artificial Sequence
  Description of Artificial Sequence: Synthetic oligonucleotide
  Antisense strand to SEQ ID NO: 1281594
uacugugaaaucauccucc

SEQ ID NO: 1281596 - RNA, 19 nt, Artificial Sequence
  Description of Artificial Sequence: Synthetic oligonucleotide
  Sense strand starting at position 2625 of SEQ ID NO: 1241556
uaaagugaccuccaacgua

SEQ ID NO: 1281597 - RNA, 19 nt, Artificial Sequence
  Description of Artificial Sequence: Synthetic oligonucleotide
  Antisense strand to SEQ ID NO: 1281596
uacguuggaggucacuuua

SEQ ID NO: 1281598 - RNA, 19 nt, Artificial Sequence
  Description of Artificial Sequence: Synthetic oligonucleotide
  Sense strand starting at position 3362 of SEQ ID NO: 1241556
aagguuaaaucagagacca

SEQ ID NO: 1281599 - RNA, 19 nt, Artificial Sequence
  Description of Artificial Sequence: Synthetic oligonucleotide
  Antisense strand to SEQ ID NO: 1281598
uggucucugauuuaaccuu

SEQ ID NO: 1281600 - RNA, 19 nt, Artificial Sequence
  Description of Artificial Sequence: Synthetic oligonucleotide
  Sense strand starting at position 3431 of SEQ ID NO: 1241556
cuuucuuuacagugagacu

SEQ ID NO: 1281601 - RNA, 19 nt, Artificial Sequence
  Description of Artificial Sequence: Synthetic oligonucleotide
  Antisense strand to SEQ ID NO: 1281600
agucucacuguaaagaaag

SEQ ID NO: 1281602 - RNA, 19 nt, Artificial Sequence
  Description of Artificial Sequence: Synthetic oligonucleotide
  Sense strand starting at position 3690 of SEQ ID NO: 1241556
aguuaauucucauuacugu

SEQ ID NO: 1281603 - RNA, 19 nt, Artificial Sequence
  Description of Artificial Sequence: Synthetic oligonucleotide
  Antisense strand to SEQ ID NO: 1281602
acaguaaugagaauuaacu

SEQ ID NO: 1281604 - RNA, 19 nt, Artificial Sequence
  Description of Artificial Sequence: Synthetic oligonucleotide
  Sense strand starting at position 3691 of SEQ ID NO: 1241556
guuaauucucauuacugua

SEQ ID NO: 1281605 - RNA, 19 nt, Artificial Sequence
  Description of Artificial Sequence: Synthetic oligonucleotide
  Antisense strand to SEQ ID NO: 1281604
uacaguaaugagaauuaac

SEQ ID NO: 1281606 - RNA, 19 nt, Artificial Sequence
  Description of Artificial Sequence: Synthetic oligonucleotide
  Sense strand starting at position 3699 of SEQ ID NO: 1241556
ucauuacuguaccugugau

SEQ ID NO: 1281607 - RNA, 19 nt, Artificial Sequence
  Description of Artificial Sequence: Synthetic oligonucleotide
  Antisense strand to SEQ ID NO: 1281606
aucacagguacaguaauga

SEQ ID NO: 1281608 - RNA, 19 nt, Artificial Sequence
  Description of Artificial Sequence: Synthetic oligonucleotide
  Sense strand starting at position 144 of SEQ ID NO: 1241557
gcgcccagccugguaauua

SEQ ID NO: 1281609 - RNA, 19 nt, Artificial Sequence
  Description of Artificial Sequence: Synthetic oligonucleotide
  Antisense strand to SEQ ID NO: 1281608
uaauuaccaggcugggcgc

SEQ ID NO: 1281610 - RNA, 19 nt, Artificial Sequence
  Description of Artificial Sequence: Synthetic oligonucleotide
  Sense strand starting at position 185 of SEQ ID NO: 1241557
aggguagugggcuauugua

SEQ ID NO: 1281611 - RNA, 19 nt, Artificial Sequence
  Description of Artificial Sequence: Synthetic oligonucleotide
  Antisense strand to SEQ ID NO: 1281610
uacaauagcccacuacccu

SEQ ID NO: 1281612 - RNA, 19 nt, Artificial Sequence
  Description of Artificial Sequence: Synthetic oligonucleotide
  Sense strand starting at position 253 of SEQ ID NO: 1241557
acaggucacagugguuaau

SEQ ID NO: 1281613 - RNA, 19 nt, Artificial Sequence
  Description of Artificial Sequence: Synthetic oligonucleotide
  Antisense strand to SEQ ID NO: 1281612
auuaaccacugugaccugu

SEQ ID NO: 1281614 - RNA, 19 nt, Artificial Sequence
  Description of Artificial Sequence: Synthetic oligonucleotide
  Sense strand starting at position 256 of SEQ ID NO: 1241557
ggucacagugguuaauaga

SEQ ID NO: 1281615 - RNA, 19 nt, Artificial Sequence
  Description of Artificial Sequence: Synthetic oligonucleotide
  Antisense strand to SEQ ID NO: 1281614
ucuauuaaccacugugacc

SEQ ID NO: 1281616 - RNA, 19 nt, Artificial Sequence
  Description of Artificial Sequence: Synthetic oligonucleotide
  Sense strand starting at position 264 of SEQ ID NO: 1241557
ugguuaauagacuggucuu

SEQ ID NO: 1281617 - RNA, 19 nt, Artificial Sequence
  Description of Artificial Sequence: Synthetic oligonucleotide
  Antisense strand to SEQ ID NO: 1281616
aagaccagucuauuaacca

SEQ ID NO: 1281618 - RNA, 19 nt, Artificial Sequence
  Description of Artificial Sequence: Synthetic oligonucleotide
  Sense strand starting at position 265 of SEQ ID NO: 1241557
gguuaauagacuggucuua

SEQ ID NO: 1281619 - RNA, 19 nt, Artificial Sequence
  Description of Artificial Sequence: Synthetic oligonucleotide
  Antisense strand to SEQ ID NO: 1281618
uaagaccagucuauuaacc

SEQ ID NO: 1281620 - RNA, 19 nt, Artificial Sequence
  Description of Artificial Sequence: Synthetic oligonucleotide
  Sense strand starting at position 267 of SEQ ID NO: 1241557
uuaauagacuggucuuaga

SEQ ID NO: 1281621 - RNA, 19 nt, Artificial Sequence
  Description of Artificial Sequence: Synthetic oligonucleotide
  Antisense strand to SEQ ID NO: 1281620
ucuaagaccagucuauuaa

SEQ ID NO: 1281622 - RNA, 19 nt, Artificial Sequence
  Description of Artificial Sequence: Synthetic oligonucleotide
  Sense strand starting at position 289 of SEQ ID NO: 1241557
cagcccagaugucugaaau

SEQ ID NO: 1281623 - RNA, 19 nt, Artificial Sequence
  Description of Artificial Sequence: Synthetic oligonucleotide
  Antisense strand to SEQ ID NO: 1281622
auuucagacaucugggcug

SEQ ID NO: 1281624 - RNA, 19 nt, Artificial Sequence
  Description of Artificial Sequence: Synthetic oligonucleotide
  Sense strand starting at position 290 of SEQ ID NO: 1241557
agcccagaugucugaaaua

SEQ ID NO: 1281625 - RNA, 19 nt, Artificial Sequence
  Description of Artificial Sequence: Synthetic oligonucleotide
  Antisense strand to SEQ ID NO: 1281624
uauuucagacaucugggcu

SEQ ID NO: 1281626 - RNA, 19 nt, Artificial Sequence
  Description of Artificial Sequence: Synthetic oligonucleotide
  Sense strand starting at position 371 of SEQ ID NO: 1241557
gguugagguaaauacugua

SEQ ID NO: 1281627 - RNA, 19 nt, Artificial Sequence
  Description of Artificial Sequence: Synthetic oligonucleotide
  Antisense strand to SEQ ID NO: 1281626
uacaguauuuaccucaacc

SEQ ID NO: 1281628 - RNA, 19 nt, Artificial Sequence
  Description of Artificial Sequence: Synthetic oligonucleotide
  Sense strand starting at position 481 of SEQ ID NO: 1241557
ggaguuguauauucaugug

SEQ ID NO: 1281629 - RNA, 19 nt, Artificial Sequence
  Description of Artificial Sequence: Synthetic oligonucleotide
  Antisense strand to SEQ ID NO: 1281628
cacaugaauauacaacucc

SEQ ID NO: 1281630 - RNA, 19 nt, Artificial Sequence
  Description of Artificial Sequence: Synthetic oligonucleotide
  Sense strand starting at position 550 of SEQ ID NO: 1241557
cagauugcucgugccucua

SEQ ID NO: 1281631 - RNA, 19 nt, Artificial Sequence
  Description of Artificial Sequence: Synthetic oligonucleotide
  Antisense strand to SEQ ID NO: 1281630
uagaggcacgagcaaucug

SEQ ID NO: 1281632 - RNA, 19 nt, Artificial Sequence
  Description of Artificial Sequence: Synthetic oligonucleotide
  Sense strand starting at position 700 of SEQ ID NO: 1241557
cugcguacugccuucuaua

SEQ ID NO: 1281633 - RNA, 19 nt, Artificial Sequence
  Description of Artificial Sequence: Synthetic oligonucleotide
  Antisense strand to SEQ ID NO: 1281632
uauagaaggcaguacgcag

SEQ ID NO: 1281634 - RNA, 19 nt, Artificial Sequence
  Description of Artificial Sequence: Synthetic oligonucleotide
  Sense strand starting at position 1012 of SEQ ID NO: 1241557
ccaguaucuggauaguaca

SEQ ID NO: 1281635 - RNA, 19 nt, Artificial Sequence
  Description of Artificial Sequence: Synthetic oligonucleotide
  Antisense strand to SEQ ID NO: 1281634
uguacuauccagauacugg

SEQ ID NO: 1281636 - RNA, 19 nt, Artificial Sequence
  Description of Artificial Sequence: Synthetic oligonucleotide
  Sense strand starting at position 1119 of SEQ ID NO: 1241557
cuguccuugcccuauagga

SEQ ID NO: 1281637 - RNA, 19 nt, Artificial Sequence
  Description of Artificial Sequence: Synthetic oligonucleotide
  Antisense strand to SEQ ID NO: 1281636
uccuauagggcaaggacag

SEQ ID NO: 1281638 - RNA, 19 nt, Artificial Sequence
  Description of Artificial Sequence: Synthetic oligonucleotide
  Sense strand starting at position 1121 of SEQ ID NO: 1241557
guccuugcccuauaggaua

SEQ ID NO: 1281639 - RNA, 19 nt, Artificial Sequence
  Description of Artificial Sequence: Synthetic oligonucleotide
  Antisense strand to SEQ ID NO: 1281638
uauccuauagggcaaggac

SEQ ID NO: 1281640 - RNA, 19 nt, Artificial Sequence
  Description of Artificial Sequence: Synthetic oligonucleotide
  Sense strand starting at position 1234 of SEQ ID NO: 1241557
ugcaauucucuuuggaaag

SEQ ID NO: 1281641 - RNA, 19 nt, Artificial Sequence
  Description of Artificial Sequence: Synthetic oligonucleotide
  Antisense strand to SEQ ID NO: 1281640
cuuuccaaagagaauugca

SEQ ID NO: 1281642 - RNA, 19 nt, Artificial Sequence
  Description of Artificial Sequence: Synthetic oligonucleotide
  Sense strand starting at position 1289 of SEQ ID NO: 1241557
ggugaugcacuguagcaua

SEQ ID NO: 1281643 - RNA, 19 nt, Artificial Sequence
  Description of Artificial Sequence: Synthetic oligonucleotide
  Antisense strand to SEQ ID NO: 1281642
uaugcuacagugcaucacc

SEQ ID NO: 1281644 - RNA, 19 nt, Artificial Sequence
  Description of Artificial Sequence: Synthetic oligonucleotide
  Sense strand starting at position 1299 of SEQ ID NO: 1241557
uguagcauaaccuggaaga

SEQ ID NO: 1281645 - RNA, 19 nt, Artificial Sequence
  Description of Artificial Sequence: Synthetic oligonucleotide
  Antisense strand to SEQ ID NO: 1281644
ucuuccagguuaugcuaca

SEQ ID NO: 1281646 - RNA, 19 nt, Artificial Sequence
  Description of Artificial Sequence: Synthetic oligonucleotide
  Sense strand starting at position 1321 of SEQ ID NO: 1241557
gagggcugcuuccucagau

SEQ ID NO: 1281647 - RNA, 19 nt, Artificial Sequence
  Description of Artificial Sequence: Synthetic oligonucleotide
  Antisense strand to SEQ ID NO: 1281646
aucugaggaagcagcccuc

SEQ ID NO: 1281648 - RNA, 19 nt, Artificial Sequence
  Description of Artificial Sequence: Synthetic oligonucleotide
  Sense strand starting at position 1322 of SEQ ID NO: 1241557
agggcugcuuccucagaua

SEQ ID NO: 1281649 - RNA, 19 nt, Artificial Sequence
  Description of Artificial Sequence: Synthetic oligonucleotide
  Antisense strand to SEQ ID NO: 1281648
uaucugaggaagcagcccu

SEQ ID NO: 1281650 - RNA, 19 nt, Artificial Sequence
  Description of Artificial Sequence: Synthetic oligonucleotide
  Sense strand starting at position 2324 of SEQ ID NO: 1241557
gagggaagcugguuagaca

SEQ ID NO: 1281651 - RNA, 19 nt, Artificial Sequence
  Description of Artificial Sequence: Synthetic oligonucleotide
  Antisense strand to SEQ ID NO: 1281650
ugucuaaccagcuucccuc

SEQ ID NO: 1281652 - RNA, 19 nt, Artificial Sequence
  Description of Artificial Sequence: Synthetic oligonucleotide
  Sense strand starting at position 2682 of SEQ ID NO: 1241557
gugaccuuccaguaauguu

SEQ ID NO: 1281653 - RNA, 19 nt, Artificial Sequence
  Description of Artificial Sequence: Synthetic oligonucleotide
  Antisense strand to SEQ ID NO: 1281652
aacauuacuggaaggucac

SEQ ID NO: 1281654 - RNA, 19 nt, Artificial Sequence
  Description of Artificial Sequence: Synthetic oligonucleotide
  Sense strand starting at position 2689 of SEQ ID NO: 1241557
uccaguaauguuuguauuu

SEQ ID NO: 1281655 - RNA, 19 nt, Artificial Sequence
  Description of Artificial Sequence: Synthetic oligonucleotide
  Antisense strand to SEQ ID NO: 1281654
aaauacaaacauuacugga

SEQ ID NO: 1281656 - RNA, 19 nt, Artificial Sequence
  Description of Artificial Sequence: Synthetic oligonucleotide
  Sense strand starting at position 3120 of SEQ ID NO: 1241557
guggaacgggcucgagaau

SEQ ID NO: 1281657 - RNA, 19 nt, Artificial Sequence
  Description of Artificial Sequence: Synthetic oligonucleotide
  Antisense strand to SEQ ID NO: 1281656
auucucgagcccguuccac

SEQ ID NO: 1281658 - RNA, 19 nt, Artificial Sequence
  Description of Artificial Sequence: Synthetic oligonucleotide
  Sense strand starting at position 3156 of SEQ ID NO: 1241557
cggucuagaugguucuuaa

SEQ ID NO: 1281659 - RNA, 19 nt, Artificial Sequence
  Description of Artificial Sequence: Synthetic oligonucleotide
  Antisense strand to SEQ ID NO: 1281658
uuaagaaccaucuagaccg

SEQ ID NO: 1281660 - RNA, 19 nt, Artificial Sequence
  Description of Artificial Sequence: Synthetic oligonucleotide
  Sense strand starting at position 3177 of SEQ ID NO: 1241557
ugccaugaaguuugagaac

SEQ ID NO: 1281661 - RNA, 19 nt, Artificial Sequence
  Description of Artificial Sequence: Synthetic oligonucleotide
  Antisense strand to SEQ ID NO: 1281660
guucucaaacuucauggca

SEQ ID NO: 1281662 - RNA, 19 nt, Artificial Sequence
  Description of Artificial Sequence: Synthetic oligonucleotide
  Sense strand starting at position 3221 of SEQ ID NO: 1241557
gcacguuagaugggacuuu

SEQ ID NO: 1281663 - RNA, 19 nt, Artificial Sequence
  Description of Artificial Sequence: Synthetic oligonucleotide
  Antisense strand to SEQ ID NO: 1281662
aaagucccaucuaacgugc

SEQ ID NO: 1281664 - RNA, 19 nt, Artificial Sequence
  Description of Artificial Sequence: Synthetic oligonucleotide
  Sense strand starting at position 3231 of SEQ ID NO: 1241557
ugggacuuugcgucacguu

SEQ ID NO: 1281665 - RNA, 19 nt, Artificial Sequence
  Description of Artificial Sequence: Synthetic oligonucleotide
  Antisense strand to SEQ ID NO: 1281664
aacgugacgcaaaguccca

SEQ ID NO: 1281666 - RNA, 19 nt, Artificial Sequence
  Description of Artificial Sequence: Synthetic oligonucleotide
  Sense strand starting at position 3299 of SEQ ID NO: 1241557
cucaaaucauguguaagac

SEQ ID NO: 1281667 - RNA, 19 nt, Artificial Sequence
  Description of Artificial Sequence: Synthetic oligonucleotide
  Antisense strand to SEQ ID NO: 1281666
gucuuacacaugauuugag

SEQ ID NO: 1281668 - RNA, 19 nt, Artificial Sequence
  Description of Artificial Sequence: Synthetic oligonucleotide
  Sense strand starting at position 3305 of SEQ ID NO: 1241557
ucauguguaagacaugguu

SEQ ID NO: 1281669 - RNA, 19 nt, Artificial Sequence
  Description of Artificial Sequence: Synthetic oligonucleotide
  Antisense strand to SEQ ID NO: 1281668
aaccaugucuuacacauga

SEQ ID NO: 1281670 - RNA, 19 nt, Artificial Sequence
  Description of Artificial Sequence: Synthetic oligonucleotide
  Sense strand starting at position 3307 of SEQ ID NO: 1241557
auguguaagacaugguuua

SEQ ID NO: 1281671 - RNA, 19 nt, Artificial Sequence
  Description of Artificial Sequence: Synthetic oligonucleotide
  Antisense strand to SEQ ID NO: 1281670
uaaaccaugucuuacacau

SEQ ID NO: 1281672 - RNA, 19 nt, Artificial Sequence
  Description of Artificial Sequence: Synthetic oligonucleotide
  Sense strand starting at position 3336 of SEQ ID NO: 1241557
cugcuaaaguaaucagaau

SEQ ID NO: 1281673 - RNA, 19 nt, Artificial Sequence
  Description of Artificial Sequence: Synthetic oligonucleotide
  Antisense strand to SEQ ID NO: 1281672
auucugauuacuuuagcag

SEQ ID NO: 1281674 - RNA, 19 nt, Artificial Sequence
  Description of Artificial Sequence: Synthetic oligonucleotide
  Sense strand starting at position 3390 of SEQ ID NO: 1241557
ugcugaugagauggauacu

SEQ ID NO: 1281675 - RNA, 19 nt, Artificial Sequence
  Description of Artificial Sequence: Synthetic oligonucleotide
  Antisense strand to SEQ ID NO: 1281674
aguauccaucucaucagca

SEQ ID NO: 1281676 - RNA, 19 nt, Artificial Sequence
  Description of Artificial Sequence: Synthetic oligonucleotide
  Sense strand starting at position 3400 of SEQ ID NO: 1241557
auggauacuugggcuuaaa

SEQ ID NO: 1281677 - RNA, 19 nt, Artificial Sequence
  Description of Artificial Sequence: Synthetic oligonucleotide
  Antisense strand to SEQ ID NO: 1281676
uuuaagcccaaguauccau

SEQ ID NO: 1281678 - RNA, 19 nt, Artificial Sequence
  Description of Artificial Sequence: Synthetic oligonucleotide
  Sense strand starting at position 3403 of SEQ ID NO: 1241557
gauacuugggcuuaaaguu

SEQ ID NO: 1281679 - RNA, 19 nt, Artificial Sequence
  Description of Artificial Sequence: Synthetic oligonucleotide
  Antisense strand to SEQ ID NO: 1281678
aacuuuaagcccaaguauc

SEQ ID NO: 1281680 - RNA, 19 nt, Artificial Sequence
  Description of Artificial Sequence: Synthetic oligonucleotide
  Sense strand starting at position 3413 of SEQ ID NO: 1241557
cuuaaaguuuaguucuaca

SEQ ID NO: 1281681 - RNA, 19 nt, Artificial Sequence
  Description of Artificial Sequence: Synthetic oligonucleotide
  Antisense strand to SEQ ID NO: 1281680
uguagaacuaaacuuuaag

SEQ ID NO: 1281682 - RNA, 19 nt, Artificial Sequence
  Description of Artificial Sequence: Synthetic oligonucleotide
  Sense strand starting at position 3460 of SEQ ID NO: 1241557
cauaguuaucacugguaag

SEQ ID NO: 1281683 - RNA, 19 nt, Artificial Sequence
  Description of Artificial Sequence: Synthetic oligonucleotide
  Antisense strand to SEQ ID NO: 1281682
cuuaccagugauaacuaug

SEQ ID NO: 1281684 - RNA, 19 nt, Artificial Sequence
  Description of Artificial Sequence: Synthetic oligonucleotide
  Sense strand starting at position 3483 of SEQ ID NO: 1241557
ggcagaaauugccuaagag

SEQ ID NO: 1281685 - RNA, 19 nt, Artificial Sequence
  Description of Artificial Sequence: Synthetic oligonucleotide
  Antisense strand to SEQ ID NO: 1281684
cucuuaggcaauuucugcc

SEQ ID NO: 1281686 - RNA, 19 nt, Artificial Sequence
  Description of Artificial Sequence: Synthetic oligonucleotide
  Sense strand starting at position 3974 of SEQ ID NO: 1241557
cagagagcagcuuaauaug

SEQ ID NO: 1281687 - RNA, 19 nt, Artificial Sequence
  Description of Artificial Sequence: Synthetic oligonucleotide
  Antisense strand to SEQ ID NO: 1281686
cauauuaagcugcucucug

SEQ ID NO: 1281688 - RNA, 19 nt, Artificial Sequence
  Description of Artificial Sequence: Synthetic oligonucleotide
  Sense strand starting at position 325 of SEQ ID NO: 1241558
agcgcuaaauuccuacaua

SEQ ID NO: 1281689 - RNA, 19 nt, Artificial Sequence
  Description of Artificial Sequence: Synthetic oligonucleotide
  Antisense strand to SEQ ID NO: 1281688
uauguaggaauuuagcgcu

SEQ ID NO: 1281690 - RNA, 19 nt, Artificial Sequence
  Description of Artificial Sequence: Synthetic oligonucleotide
  Sense strand starting at position 326 of SEQ ID NO: 1241558
gcgcuaaauuccuacauau

SEQ ID NO: 1281691 - RNA, 19 nt, Artificial Sequence
  Description of Artificial Sequence: Synthetic oligonucleotide
  Antisense strand to SEQ ID NO: 1281690
auauguaggaauuuagcgc

SEQ ID NO: 1281692 - RNA, 19 nt, Artificial Sequence
  Description of Artificial Sequence: Synthetic oligonucleotide
  Sense strand starting at position 337 of SEQ ID NO: 1241558
cuacauauauuucgguauu

SEQ ID NO: 1281693 - RNA, 19 nt, Artificial Sequence
  Description of Artificial Sequence: Synthetic oligonucleotide
  Antisense strand to SEQ ID NO: 1281692
aauaccgaaauauauguag

SEQ ID NO: 1281694 - RNA, 19 nt, Artificial Sequence
  Description of Artificial Sequence: Synthetic oligonucleotide
  Sense strand starting at position 1161 of SEQ ID NO: 1241558
cgacaauguugcgaguuaa

SEQ ID NO: 1281695 - RNA, 19 nt, Artificial Sequence
  Description of Artificial Sequence: Synthetic oligonucleotide
  Antisense strand to SEQ ID NO: 1281694
uuaacucgcaacauugucg

SEQ ID NO: 1281696 - RNA, 19 nt, Artificial Sequence
  Description of Artificial Sequence: Synthetic oligonucleotide
  Sense strand starting at position 1194 of SEQ ID NO: 1241558
gucuauuaguguucuagga

SEQ ID NO: 1281697 - RNA, 19 nt, Artificial Sequence
  Description of Artificial Sequence: Synthetic oligonucleotide
  Antisense strand to SEQ ID NO: 1281696
uccuagaacacuaauagac

SEQ ID NO: 1281698 - RNA, 19 nt, Artificial Sequence
  Description of Artificial Sequence: Synthetic oligonucleotide
  Sense strand starting at position 1196 of SEQ ID NO: 1241558
cuauuaguguucuaggagg

SEQ ID NO: 1281699 - RNA, 19 nt, Artificial Sequence
  Description of Artificial Sequence: Synthetic oligonucleotide
  Antisense strand to SEQ ID NO: 1281698
ccuccuagaacacuaauag

SEQ ID NO: 1281700 - RNA, 19 nt, Artificial Sequence
  Description of Artificial Sequence: Synthetic oligonucleotide
  Sense strand starting at position 1198 of SEQ ID NO: 1241558
auuaguguucuaggaggga

SEQ ID NO: 1281701 - RNA, 19 nt, Artificial Sequence
  Description of Artificial Sequence: Synthetic oligonucleotide
  Antisense strand to SEQ ID NO: 1281700
ucccuccuagaacacuaau

SEQ ID NO: 1281702 - RNA, 19 nt, Artificial Sequence
  Description of Artificial Sequence: Synthetic oligonucleotide
  Sense strand starting at position 1201 of SEQ ID NO: 1241558
aguguucuaggagggaaau

SEQ ID NO: 1281703 - RNA, 19 nt, Artificial Sequence
  Description of Artificial Sequence: Synthetic oligonucleotide
  Antisense strand to SEQ ID NO: 1281702
auuucccuccuagaacacu

SEQ ID NO: 1281704 - RNA, 19 nt, Artificial Sequence
  Description of Artificial Sequence: Synthetic oligonucleotide
  Sense strand starting at position 1202 of SEQ ID NO: 1241558
guguucuaggagggaaauu

SEQ ID NO: 1281705 - RNA, 19 nt, Artificial Sequence
  Description of Artificial Sequence: Synthetic oligonucleotide
  Antisense strand to SEQ ID NO: 1281704
aauuucccuccuagaacac

SEQ ID NO: 1281706 - RNA, 19 nt, Artificial Sequence
  Description of Artificial Sequence: Synthetic oligonucleotide
  Sense strand starting at position 1255 of SEQ ID NO: 1241558
uuguguugcugcucauaaa

SEQ ID NO: 1281707 - RNA, 19 nt, Artificial Sequence
  Description of Artificial Sequence: Synthetic oligonucleotide
  Antisense strand to SEQ ID NO: 1281706
uuuaugagcagcaacacaa

SEQ ID NO: 1281708 - RNA, 19 nt, Artificial Sequence
  Description of Artificial Sequence: Synthetic oligonucleotide
  Sense strand starting at position 1284 of SEQ ID NO: 1241558
cccugaacucucugagguu

SEQ ID NO: 1281709 - RNA, 19 nt, Artificial Sequence
  Description of Artificial Sequence: Synthetic oligonucleotide
  Antisense strand to SEQ ID NO: 1281708
aaccucagagaguucaggg

SEQ ID NO: 1281710 - RNA, 19 nt, Artificial Sequence
  Description of Artificial Sequence: Synthetic oligonucleotide
  Sense strand starting at position 1285 of SEQ ID NO: 1241558
ccugaacucucugagguuu

SEQ ID NO: 1281711 - RNA, 19 nt, Artificial Sequence
  Description of Artificial Sequence: Synthetic oligonucleotide
  Antisense strand to SEQ ID NO: 1281710
aaaccucagagaguucagg

SEQ ID NO: 1281712 - RNA, 19 nt, Artificial Sequence
  Description of Artificial Sequence: Synthetic oligonucleotide
  Sense strand starting at position 1452 of SEQ ID NO: 1241558
augucaguguccuugagca

SEQ ID NO: 1281713 - RNA, 19 nt, Artificial Sequence
  Description of Artificial Sequence: Synthetic oligonucleotide
  Antisense strand to SEQ ID NO: 1281712
ugcucaaggacacugacau

SEQ ID NO: 1281714 - RNA, 19 nt, Artificial Sequence
  Description of Artificial Sequence: Synthetic oligonucleotide
  Sense strand starting at position 1454 of SEQ ID NO: 1241558
gucaguguccuugagcaug

SEQ ID NO: 1281715 - RNA, 19 nt, Artificial Sequence
  Description of Artificial Sequence: Synthetic oligonucleotide
  Antisense strand to SEQ ID NO: 1281714
caugcucaaggacacugac

SEQ ID NO: 1281716 - RNA, 19 nt, Artificial Sequence
  Description of Artificial Sequence: Synthetic oligonucleotide
  Sense strand starting at position 1550 of SEQ ID NO: 1241558
guaccucggcuccaugaaa

SEQ ID NO: 1281717 - RNA, 19 nt, Artificial Sequence
  Description of Artificial Sequence: Synthetic oligonucleotide
  Antisense strand to SEQ ID NO: 1281716
uuucauggagccgagguac

SEQ ID NO: 1281718 - RNA, 19 nt, Artificial Sequence
  Description of Artificial Sequence: Synthetic oligonucleotide
  Sense strand starting at position 1790 of SEQ ID NO: 1241558
agcagaaucgucguggucu

SEQ ID NO: 1281719 - RNA, 19 nt, Artificial Sequence
  Description of Artificial Sequence: Synthetic oligonucleotide
  Antisense strand to SEQ ID NO: 1281718
agaccacgacgauucugcu

SEQ ID NO: 1281720 - RNA, 19 nt, Artificial Sequence
  Description of Artificial Sequence: Synthetic oligonucleotide
  Sense strand starting at position 1879 of SEQ ID NO: 1241558
ucuugcuucugagaccaaa

SEQ ID NO: 1281721 - RNA, 19 nt, Artificial Sequence
  Description of Artificial Sequence: Synthetic oligonucleotide
  Antisense strand to SEQ ID NO: 1281720
uuuggucucagaagcaaga

SEQ ID NO: 1281722 - RNA, 19 nt, Artificial Sequence
  Description of Artificial Sequence: Synthetic oligonucleotide
  Sense strand starting at position 2018 of SEQ ID NO: 1241558
agcagauaacuccggguuu

SEQ ID NO: 1281723 - RNA, 19 nt, Artificial Sequence
  Description of Artificial Sequence: Synthetic oligonucleotide
  Antisense strand to SEQ ID NO: 1281722
aaacccggaguuaucugcu

SEQ ID NO: 1281724 - RNA, 19 nt, Artificial Sequence
  Description of Artificial Sequence: Synthetic oligonucleotide
  Sense strand starting at position 2020 of SEQ ID NO: 1241558
cagauaacuccggguuucu

SEQ ID NO: 1281725 - RNA, 19 nt, Artificial Sequence
  Description of Artificial Sequence: Synthetic oligonucleotide
  Antisense strand to SEQ ID NO: 1281724
agaaacccggaguuaucug

SEQ ID NO: 1281726 - RNA, 19 nt, Artificial Sequence
  Description of Artificial Sequence: Synthetic oligonucleotide
  Sense strand starting at position 2029 of SEQ ID NO: 1241558
ccggguuucuaaucuguuu

SEQ ID NO: 1281727 - RNA, 19 nt, Artificial Sequence
  Description of Artificial Sequence: Synthetic oligonucleotide
  Antisense strand to SEQ ID NO: 1281726
aaacagauuagaaacccgg

SEQ ID NO: 1281728 - RNA, 19 nt, Artificial Sequence
  Description of Artificial Sequence: Synthetic oligonucleotide
  Sense strand starting at position 2031 of SEQ ID NO: 1241558
ggguuucuaaucuguuuga

SEQ ID NO: 1281729 - RNA, 19 nt, Artificial Sequence
  Description of Artificial Sequence: Synthetic oligonucleotide
  Antisense strand to SEQ ID NO: 1281728
ucaaacagauuagaaaccc

SEQ ID NO: 1281730 - RNA, 19 nt, Artificial Sequence
  Description of Artificial Sequence: Synthetic oligonucleotide
  Sense strand starting at position 2032 of SEQ ID NO: 1241558
gguuucuaaucuguuugaa

SEQ ID NO: 1281731 - RNA, 19 nt, Artificial Sequence
  Description of Artificial Sequence: Synthetic oligonucleotide
  Antisense strand to SEQ ID NO: 1281730
uucaaacagauuagaaacc

SEQ ID NO: 1281732 - RNA, 19 nt, Artificial Sequence
  Description of Artificial Sequence: Synthetic oligonucleotide
  Sense strand starting at position 2034 of SEQ ID NO: 1241558
uuucuaaucuguuugaaga

SEQ ID NO: 1281733 - RNA, 19 nt, Artificial Sequence
  Description of Artificial Sequence: Synthetic oligonucleotide
  Antisense strand to SEQ ID NO: 1281732
ucuucaaacagauuagaaa

SEQ ID NO: 1281734 - RNA, 19 nt, Artificial Sequence
  Description of Artificial Sequence: Synthetic oligonucleotide
  Sense strand starting at position 2035 of SEQ ID NO: 1241558
uucuaaucuguuugaagag

SEQ ID NO: 1281735 - RNA, 19 nt, Artificial Sequence
  Description of Artificial Sequence: Synthetic oligonucleotide
  Antisense strand to SEQ ID NO: 1281734
cucuucaaacagauuagaa

SEQ ID NO: 1281736 - RNA, 19 nt, Artificial Sequence
  Description of Artificial Sequence: Synthetic oligonucleotide
  Sense strand starting at position 2036 of SEQ ID NO: 1241558
ucuaaucuguuugaagaga

SEQ ID NO: 1281737 - RNA, 19 nt, Artificial Sequence
  Description of Artificial Sequence: Synthetic oligonucleotide
  Antisense strand to SEQ ID NO: 1281736
ucucuucaaacagauuaga

SEQ ID NO: 1281738 - RNA, 19 nt, Artificial Sequence
  Description of Artificial Sequence: Synthetic oligonucleotide
  Sense strand starting at position 2246 of SEQ ID NO: 1241558
ggucaaguccagcaaagua

SEQ ID NO: 1281739 - RNA, 19 nt, Artificial Sequence
  Description of Artificial Sequence: Synthetic oligonucleotide
  Antisense strand to SEQ ID NO: 1281738
uacuuugcuggacuugacc

SEQ ID NO: 1281740 - RNA, 19 nt, Artificial Sequence
  Description of Artificial Sequence: Synthetic oligonucleotide
  Sense strand starting at position 2256 of SEQ ID NO: 1241558
agcaaaguaacgugacaga

SEQ ID NO: 1281741 - RNA, 19 nt, Artificial Sequence
  Description of Artificial Sequence: Synthetic oligonucleotide
  Antisense strand to SEQ ID NO: 1281740
ucugucacguuacuuugcu

SEQ ID NO: 1281742 - RNA, 19 nt, Artificial Sequence
  Description of Artificial Sequence: Synthetic oligonucleotide
  Sense strand starting at position 2279 of SEQ ID NO: 1241558
acgucaguccaaggaagaa

SEQ ID NO: 1281743 - RNA, 19 nt, Artificial Sequence
  Description of Artificial Sequence: Synthetic oligonucleotide
  Antisense strand to SEQ ID NO: 1281742
uucuuccuuggacugacgu

SEQ ID NO: 1281744 - RNA, 19 nt, Artificial Sequence
  Description of Artificial Sequence: Synthetic oligonucleotide
  Sense strand starting at position 2392 of SEQ ID NO: 1241558
gcgcaugccgacuguuaca

SEQ ID NO: 1281745 - RNA, 19 nt, Artificial Sequence
  Description of Artificial Sequence: Synthetic oligonucleotide
  Antisense strand to SEQ ID NO: 1281744
uguaacagucggcaugcgc

SEQ ID NO: 1281746 - RNA, 19 nt, Artificial Sequence
  Description of Artificial Sequence: Synthetic oligonucleotide
  Sense strand starting at position 2826 of SEQ ID NO: 1241558
gguguuucccggcaaacuu

SEQ ID NO: 1281747 - RNA, 19 nt, Artificial Sequence
  Description of Artificial Sequence: Synthetic oligonucleotide
  Antisense strand to SEQ ID NO: 1281746
aaguuugccgggaaacacc

SEQ ID NO: 1281748 - RNA, 19 nt, Artificial Sequence
  Description of Artificial Sequence: Synthetic oligonucleotide
  Sense strand starting at position 2835 of SEQ ID NO: 1241558
cggcaaacuuccugggagu

SEQ ID NO: 1281749 - RNA, 19 nt, Artificial Sequence
  Description of Artificial Sequence: Synthetic oligonucleotide
  Antisense strand to SEQ ID NO: 1281748
acucccaggaaguuugccg

SEQ ID NO: 1281750 - RNA, 19 nt, Artificial Sequence
  Description of Artificial Sequence: Synthetic oligonucleotide
  Sense strand starting at position 2837 of SEQ ID NO: 1241558
gcaaacuuccugggaguca

SEQ ID NO: 1281751 - RNA, 19 nt, Artificial Sequence
  Description of Artificial Sequence: Synthetic oligonucleotide
  Antisense strand to SEQ ID NO: 1281750
ugacucccaggaaguuugc

SEQ ID NO: 1281752 - RNA, 19 nt, Artificial Sequence
  Description of Artificial Sequence: Synthetic oligonucleotide
  Sense strand starting at position 2876 of SEQ ID NO: 1241558
agaagccucuggugaaaga

SEQ ID NO: 1281753 - RNA, 19 nt, Artificial Sequence
  Description of Artificial Sequence: Synthetic oligonucleotide
  Antisense strand to SEQ ID NO: 1281752
ucuuucaccagaggcuucu

SEQ ID NO: 1281754 - RNA, 19 nt, Artificial Sequence
  Description of Artificial Sequence: Synthetic oligonucleotide
  Sense strand starting at position 3063 of SEQ ID NO: 1241558
cggagcauguucucacuca

SEQ ID NO: 1281755 - RNA, 19 nt, Artificial Sequence
  Description of Artificial Sequence: Synthetic oligonucleotide
  Antisense strand to SEQ ID NO: 1281754
ugagugagaacaugcuccg

SEQ ID NO: 1281756 - RNA, 19 nt, Artificial Sequence
  Description of Artificial Sequence: Synthetic oligonucleotide
  Sense strand starting at position 3634 of SEQ ID NO: 1241558
cgugcagauccugagaaca

SEQ ID NO: 1281757 - RNA, 19 nt, Artificial Sequence
  Description of Artificial Sequence: Synthetic oligonucleotide
  Antisense strand to SEQ ID NO: 1281756
uguucucaggaucugcacg

SEQ ID NO: 1281758 - RNA, 19 nt, Artificial Sequence
  Description of Artificial Sequence: Synthetic oligonucleotide
  Sense strand starting at position 3804 of SEQ ID NO: 1241558
aauggauucugagccugga

SEQ ID NO: 1281759 - RNA, 19 nt, Artificial Sequence
  Description of Artificial Sequence: Synthetic oligonucleotide
  Antisense strand to SEQ ID NO: 1281758
uccaggcucagaauccauu

SEQ ID NO: 1281760 - RNA, 19 nt, Artificial Sequence
  Description of Artificial Sequence: Synthetic oligonucleotide
  Sense strand starting at position 3901 of SEQ ID NO: 1241558
acugaaaucuugccugaua

SEQ ID NO: 1281761 - RNA, 19 nt, Artificial Sequence
  Description of Artificial Sequence: Synthetic oligonucleotide
  Antisense strand to SEQ ID NO: 1281760
uaucaggcaagauuucagu

SEQ ID NO: 1281762 - RNA, 19 nt, Artificial Sequence
  Description of Artificial Sequence: Synthetic oligonucleotide
  Sense strand starting at position 3902 of SEQ ID NO: 1241558
cugaaaucuugccugauau

SEQ ID NO: 1281763 - RNA, 19 nt, Artificial Sequence
  Description of Artificial Sequence: Synthetic oligonucleotide
  Antisense strand to SEQ ID NO: 1281762
auaucaggcaagauuucag

SEQ ID NO: 1281764 - RNA, 19 nt, Artificial Sequence
  Description of Artificial Sequence: Synthetic oligonucleotide
  Sense strand starting at position 3912 of SEQ ID NO: 1241558
gccugauaugcaggguuaa

SEQ ID NO: 1281765 - RNA, 19 nt, Artificial Sequence
  Description of Artificial Sequence: Synthetic oligonucleotide
  Antisense strand to SEQ ID NO: 1281764
uuaacccugcauaucaggc

SEQ ID NO: 1281766 - RNA, 19 nt, Artificial Sequence
  Description of Artificial Sequence: Synthetic oligonucleotide
  Sense strand starting at position 3913 of SEQ ID NO: 1241558
ccugauaugcaggguuaag

SEQ ID NO: 1281767 - RNA, 19 nt, Artificial Sequence
  Description of Artificial Sequence: Synthetic oligonucleotide
  Antisense strand to SEQ ID NO: 1281766
cuuaacccugcauaucagg

SEQ ID NO: 1281768 - RNA, 19 nt, Artificial Sequence
  Description of Artificial Sequence: Synthetic oligonucleotide
  Sense strand starting at position 1161 of SEQ ID NO: 1241559
ucgacaauguugcgaguua

SEQ ID NO: 1281769 - RNA, 19 nt, Artificial Sequence
  Description of Artificial Sequence: Synthetic oligonucleotide
  Antisense strand to SEQ ID NO: 1281768
uaacucgcaacauugucga

SEQ ID NO: 1281770 - RNA, 19 nt, Artificial Sequence
  Description of Artificial Sequence: Synthetic oligonucleotide
  Sense strand starting at position 1162 of SEQ ID NO: 1241559
cgacaauguugcgaguuaa

SEQ ID NO: 1281771 - RNA, 19 nt, Artificial Sequence
  Description of Artificial Sequence: Synthetic oligonucleotide
  Antisense strand to SEQ ID NO: 1281770
uuaacucgcaacauugucg

SEQ ID NO: 1281772 - RNA, 19 nt, Artificial Sequence
  Description of Artificial Sequence: Synthetic oligonucleotide
  Sense strand starting at position 1195 of SEQ ID NO: 1241559
gucuauuaguguucuagga

SEQ ID NO: 1281773 - RNA, 19 nt, Artificial Sequence
  Description of Artificial Sequence: Synthetic oligonucleotide
  Antisense strand to SEQ ID NO: 1281772
uccuagaacacuaauagac

SEQ ID NO: 1281774 - RNA, 19 nt, Artificial Sequence
  Description of Artificial Sequence: Synthetic oligonucleotide
  Sense strand starting at position 1197 of SEQ ID NO: 1241559
cuauuaguguucuaggagg

SEQ ID NO: 1281775 - RNA, 19 nt, Artificial Sequence
  Description of Artificial Sequence: Synthetic oligonucleotide
  Antisense strand to SEQ ID NO: 1281774
ccuccuagaacacuaauag

SEQ ID NO: 1281776 - RNA, 19 nt, Artificial Sequence
  Description of Artificial Sequence: Synthetic oligonucleotide
  Sense strand starting at position 1199 of SEQ ID NO: 1241559
auuaguguucuaggaggga

SEQ ID NO: 1281777 - RNA, 19 nt, Artificial Sequence
  Description of Artificial Sequence: Synthetic oligonucleotide
  Antisense strand to SEQ ID NO: 1281776
ucccuccuagaacacuaau

SEQ ID NO: 1281778 - RNA, 19 nt, Artificial Sequence
  Description of Artificial Sequence: Synthetic oligonucleotide
  Sense strand starting at position 1202 of SEQ ID NO: 1241559
aguguucuaggagggaaau

SEQ ID NO: 1281779 - RNA, 19 nt, Artificial Sequence
  Description of Artificial Sequence: Synthetic oligonucleotide
  Antisense strand to SEQ ID NO: 1281778
auuucccuccuagaacacu

SEQ ID NO: 1281780 - RNA, 19 nt, Artificial Sequence
  Description of Artificial Sequence: Synthetic oligonucleotide
  Sense strand starting at position 1203 of SEQ ID NO: 1241559
guguucuaggagggaaauu

SEQ ID NO: 1281781 - RNA, 19 nt, Artificial Sequence
  Description of Artificial Sequence: Synthetic oligonucleotide
  Antisense strand to SEQ ID NO: 1281780
aauuucccuccuagaacac

SEQ ID NO: 1281782 - RNA, 19 nt, Artificial Sequence
  Description of Artificial Sequence: Synthetic oligonucleotide
  Sense strand starting at position 2247 of SEQ ID NO: 1241559
ggucaaguccagcggagua

SEQ ID NO: 1281783 - RNA, 19 nt, Artificial Sequence
  Description of Artificial Sequence: Synthetic oligonucleotide
  Antisense strand to SEQ ID NO: 1281782
uacuccgcuggacuugacc

SEQ ID NO: 1281784 - RNA, 19 nt, Artificial Sequence
  Description of Artificial Sequence: Synthetic oligonucleotide
  Sense strand starting at position 2257 of SEQ ID NO: 1241559
agcggaguaacgugacaga

SEQ ID NO: 1281785 - RNA, 19 nt, Artificial Sequence
  Description of Artificial Sequence: Synthetic oligonucleotide
  Antisense strand to SEQ ID NO: 1281784
ucugucacguuacuccgcu

SEQ ID NO: 1281786 - RNA, 19 nt, Artificial Sequence
  Description of Artificial Sequence: Synthetic oligonucleotide
  Sense strand starting at position 2297 of SEQ ID NO: 1241559
gaaugucuaucccagcagu

SEQ ID NO: 1281787 - RNA, 19 nt, Artificial Sequence
  Description of Artificial Sequence: Synthetic oligonucleotide
  Antisense strand to SEQ ID NO: 1281786
acugcugggauagacauuc

SEQ ID NO: 1281788 - RNA, 19 nt, Artificial Sequence
  Description of Artificial Sequence: Synthetic oligonucleotide
  Sense strand starting at position 2394 of SEQ ID NO: 1241559
gugcgcaugccgaguguua

SEQ ID NO: 1281789 - RNA, 19 nt, Artificial Sequence
  Description of Artificial Sequence: Synthetic oligonucleotide
  Antisense strand to SEQ ID NO: 1281788
uaacacucggcaugcgcac

SEQ ID NO: 1281790 - RNA, 19 nt, Artificial Sequence
  Description of Artificial Sequence: Synthetic oligonucleotide
  Sense strand starting at position 2396 of SEQ ID NO: 1241559
gcgcaugccgaguguuaca

SEQ ID NO: 1281791 - RNA, 19 nt, Artificial Sequence
  Description of Artificial Sequence: Synthetic oligonucleotide
  Antisense strand to SEQ ID NO: 1281790
uguaacacucggcaugcgc

SEQ ID NO: 1281792 - RNA, 19 nt, Artificial Sequence
  Description of Artificial Sequence: Synthetic oligonucleotide
  Sense strand starting at position 2815 of SEQ ID NO: 1241559
ccugguguuucccggcaaa

SEQ ID NO: 1281793 - RNA, 19 nt, Artificial Sequence
  Description of Artificial Sequence: Synthetic oligonucleotide
  Antisense strand to SEQ ID NO: 1281792
uuugccgggaaacaccagg

SEQ ID NO: 1281794 - RNA, 19 nt, Artificial Sequence
  Description of Artificial Sequence: Synthetic oligonucleotide
  Sense strand starting at position 2818 of SEQ ID NO: 1241559
gguguuucccggcaaacuu

SEQ ID NO: 1281795 - RNA, 19 nt, Artificial Sequence
  Description of Artificial Sequence: Synthetic oligonucleotide
  Antisense strand to SEQ ID NO: 1281794
aaguuugccgggaaacacc

SEQ ID NO: 1281796 - RNA, 19 nt, Artificial Sequence
  Description of Artificial Sequence: Synthetic oligonucleotide
  Sense strand starting at position 3624 of SEQ ID NO: 1241559
cgugcagauccugagaaca

SEQ ID NO: 1281797 - RNA, 19 nt, Artificial Sequence
  Description of Artificial Sequence: Synthetic oligonucleotide
  Antisense strand to SEQ ID NO: 1281796
uguucucaggaucugcacg

SEQ ID NO: 1281798 - RNA, 19 nt, Artificial Sequence
  Description of Artificial Sequence: Synthetic oligonucleotide
  Sense strand starting at position 3892 of SEQ ID NO: 1241559
acugaaaucuugccugaua

SEQ ID NO: 1281799 - RNA, 19 nt, Artificial Sequence
  Description of Artificial Sequence: Synthetic oligonucleotide
  Antisense strand to SEQ ID NO: 1281798
uaucaggcaagauuucagu

SEQ ID NO: 1281800 - RNA, 19 nt, Artificial Sequence
  Description of Artificial Sequence: Synthetic oligonucleotide
  Sense strand starting at position 3893 of SEQ ID NO: 1241559
cugaaaucuugccugauau

SEQ ID NO: 1281801 - RNA, 19 nt, Artificial Sequence
  Description of Artificial Sequence: Synthetic oligonucleotide
  Antisense strand to SEQ ID NO: 1281800
auaucaggcaagauuucag

SEQ ID NO: 1281802 - RNA, 19 nt, Artificial Sequence
  Description of Artificial Sequence: Synthetic oligonucleotide
  Sense strand starting at position 69 of SEQ ID NO: 1241560
gugguacugcuguaaacuu

SEQ ID NO: 1281803 - RNA, 19 nt, Artificial Sequence
  Description of Artificial Sequence: Synthetic oligonucleotide
  Antisense strand to SEQ ID NO: 1281802
aaguuuacagcaguaccac

SEQ ID NO: 1281804 - RNA, 19 nt, Artificial Sequence
  Description of Artificial Sequence: Synthetic oligonucleotide
  Sense strand starting at position 106 of SEQ ID NO: 1241560
uccuuacaugacugaaagu

SEQ ID NO: 1281805 - RNA, 19 nt, Artificial Sequence
  Description of Artificial Sequence: Synthetic oligonucleotide
  Antisense strand to SEQ ID NO: 1281804
acuuucagucauguaagga

SEQ ID NO: 1281806 - RNA, 19 nt, Artificial Sequence
  Description of Artificial Sequence: Synthetic oligonucleotide
  Sense strand starting at position 165 of SEQ ID NO: 1241560
cuauaacacuaggaaaugu

SEQ ID NO: 1281807 - RNA, 19 nt, Artificial Sequence
  Description of Artificial Sequence: Synthetic oligonucleotide
  Antisense strand to SEQ ID NO: 1281806
acauuuccuaguguuauag

SEQ ID NO: 1281808 - RNA, 19 nt, Artificial Sequence
  Description of Artificial Sequence: Synthetic oligonucleotide
  Sense strand starting at position 235 of SEQ ID NO: 1241560
agcagcaucuaagaauaga

SEQ ID NO: 1281809 - RNA, 19 nt, Artificial Sequence
  Description of Artificial Sequence: Synthetic oligonucleotide
  Antisense strand to SEQ ID NO: 1281808
ucuauucuuagaugcugcu

SEQ ID NO: 1281810 - RNA, 19 nt, Artificial Sequence
  Description of Artificial Sequence: Synthetic oligonucleotide
  Sense strand starting at position 323 of SEQ ID NO: 1241560
cccaauauguagcaagaua

SEQ ID NO: 1281811 - RNA, 19 nt, Artificial Sequence
  Description of Artificial Sequence: Synthetic oligonucleotide
  Antisense strand to SEQ ID NO: 1281810
uaucuugcuacauauuggg

SEQ ID NO: 1281812 - RNA, 19 nt, Artificial Sequence
  Description of Artificial Sequence: Synthetic oligonucleotide
  Sense strand starting at position 376 of SEQ ID NO: 1241560
gggaccaagcuaugcuaaa

SEQ ID NO: 1281813 - RNA, 19 nt, Artificial Sequence
  Description of Artificial Sequence: Synthetic oligonucleotide
  Antisense strand to SEQ ID NO: 1281812
uuuagcauagcuugguccc

SEQ ID NO: 1281814 - RNA, 19 nt, Artificial Sequence
  Description of Artificial Sequence: Synthetic oligonucleotide
  Sense strand starting at position 377 of SEQ ID NO: 1241560
ggaccaagcuaugcuaaau

SEQ ID NO: 1281815 - RNA, 19 nt, Artificial Sequence
  Description of Artificial Sequence: Synthetic oligonucleotide
  Antisense strand to SEQ ID NO: 1281814
auuuagcauagcuuggucc

SEQ ID NO: 1281816 - RNA, 19 nt, Artificial Sequence
  Description of Artificial Sequence: Synthetic oligonucleotide
  Sense strand starting at position 413 of SEQ ID NO: 1241560
cccuaagucucagcagagu

SEQ ID NO: 1281817 - RNA, 19 nt, Artificial Sequence
  Description of Artificial Sequence: Synthetic oligonucleotide
  Antisense strand to SEQ ID NO: 1281816
acucugcugagacuuaggg

SEQ ID NO: 1281818 - RNA, 19 nt, Artificial Sequence
  Description of Artificial Sequence: Synthetic oligonucleotide
  Sense strand starting at position 416 of SEQ ID NO: 1241560
uaagucucagcagaguagu

SEQ ID NO: 1281819 - RNA, 19 nt, Artificial Sequence
  Description of Artificial Sequence: Synthetic oligonucleotide
  Antisense strand to SEQ ID NO: 1281818
acuacucugcugagacuua

SEQ ID NO: 1281820 - RNA, 19 nt, Artificial Sequence
  Description of Artificial Sequence: Synthetic oligonucleotide
  Sense strand starting at position 419 of SEQ ID NO: 1241560
gucucagcagaguaguguu

SEQ ID NO: 1281821 - RNA, 19 nt, Artificial Sequence
  Description of Artificial Sequence: Synthetic oligonucleotide
  Antisense strand to SEQ ID NO: 1281820
aacacuacucugcugagac

SEQ ID NO: 1281822 - RNA, 19 nt, Artificial Sequence
  Description of Artificial Sequence: Synthetic oligonucleotide
  Sense strand starting at position 471 of SEQ ID NO: 1241560
cauguaaagugguuguguu

SEQ ID NO: 1281823 - RNA, 19 nt, Artificial Sequence
  Description of Artificial Sequence: Synthetic oligonucleotide
  Antisense strand to SEQ ID NO: 1281822
aacacaaccacuuuacaug

SEQ ID NO: 1281824 - RNA, 19 nt, Artificial Sequence
  Description of Artificial Sequence: Synthetic oligonucleotide
  Sense strand starting at position 472 of SEQ ID NO: 1241560
auguaaagugguuguguuu

SEQ ID NO: 1281825 - RNA, 19 nt, Artificial Sequence
  Description of Artificial Sequence: Synthetic oligonucleotide
  Antisense strand to SEQ ID NO: 1281824
aaacacaaccacuuuacau

SEQ ID NO: 1281826 - RNA, 19 nt, Artificial Sequence
  Description of Artificial Sequence: Synthetic oligonucleotide
  Sense strand starting at position 475 of SEQ ID NO: 1241560
uaaagugguuguguuuaaa

SEQ ID NO: 1281827 - RNA, 19 nt, Artificial Sequence
  Description of Artificial Sequence: Synthetic oligonucleotide
  Antisense strand to SEQ ID NO: 1281826
uuuaaacacaaccacuuua

SEQ ID NO: 1281828 - RNA, 19 nt, Artificial Sequence
  Description of Artificial Sequence: Synthetic oligonucleotide
  Sense strand starting at position 637 of SEQ ID NO: 1241560
agcucauuauuccaaugag

SEQ ID NO: 1281829 - RNA, 19 nt, Artificial Sequence
  Description of Artificial Sequence: Synthetic oligonucleotide
  Antisense strand to SEQ ID NO: 1281828
cucauuggaauaaugagcu

SEQ ID NO: 1281830 - RNA, 19 nt, Artificial Sequence
  Description of Artificial Sequence: Synthetic oligonucleotide
  Sense strand starting at position 640 of SEQ ID NO: 1241560
ucauuauuccaaugagcag

SEQ ID NO: 1281831 - RNA, 19 nt, Artificial Sequence
  Description of Artificial Sequence: Synthetic oligonucleotide
  Antisense strand to SEQ ID NO: 1281830
cugcucauuggaauaauga

SEQ ID NO: 1281832 - RNA, 19 nt, Artificial Sequence
  Description of Artificial Sequence: Synthetic oligonucleotide
  Sense strand starting at position 969 of SEQ ID NO: 1241560
auggauuuguucgaugccu

SEQ ID NO: 1281833 - RNA, 19 nt, Artificial Sequence
  Description of Artificial Sequence: Synthetic oligonucleotide
  Antisense strand to SEQ ID NO: 1281832
aggcaucgaacaaauccau

SEQ ID NO: 1281834 - RNA, 19 nt, Artificial Sequence
  Description of Artificial Sequence: Synthetic oligonucleotide
  Sense strand starting at position 971 of SEQ ID NO: 1241560
ggauuuguucgaugccuua

SEQ ID NO: 1281835 - RNA, 19 nt, Artificial Sequence
  Description of Artificial Sequence: Synthetic oligonucleotide
  Antisense strand to SEQ ID NO: 1281834
uaaggcaucgaacaaaucc

SEQ ID NO: 1281836 - RNA, 19 nt, Artificial Sequence
  Description of Artificial Sequence: Synthetic oligonucleotide
  Sense strand starting at position 974 of SEQ ID NO: 1241560
uuuguucgaugccuuaaua

SEQ ID NO: 1281837 - RNA, 19 nt, Artificial Sequence
  Description of Artificial Sequence: Synthetic oligonucleotide
  Antisense strand to SEQ ID NO: 1281836
uauuaaggcaucgaacaaa

SEQ ID NO: 1281838 - RNA, 19 nt, Artificial Sequence
  Description of Artificial Sequence: Synthetic oligonucleotide
  Sense strand starting at position 982 of SEQ ID NO: 1241560
augccuuaauaaugaauga

SEQ ID NO: 1281839 - RNA, 19 nt, Artificial Sequence
  Description of Artificial Sequence: Synthetic oligonucleotide
  Antisense strand to SEQ ID NO: 1281838
ucauucauuauuaaggcau

SEQ ID NO: 1281840 - RNA, 19 nt, Artificial Sequence
  Description of Artificial Sequence: Synthetic oligonucleotide
  Sense strand starting at position 1023 of SEQ ID NO: 1241560
uugaguucugaaggagucu

SEQ ID NO: 1281841 - RNA, 19 nt, Artificial Sequence
  Description of Artificial Sequence: Synthetic oligonucleotide
  Antisense strand to SEQ ID NO: 1281840
agacuccuucagaacucaa

SEQ ID NO: 1281842 - RNA, 19 nt, Artificial Sequence
  Description of Artificial Sequence: Synthetic oligonucleotide
  Sense strand starting at position 2207 of SEQ ID NO: 1241560
agaugacgucacugccuua

SEQ ID NO: 1281843 - RNA, 19 nt, Artificial Sequence
  Description of Artificial Sequence: Synthetic oligonucleotide
  Antisense strand to SEQ ID NO: 1281842
uaaggcagugacgucaucu

SEQ ID NO: 1281844 - RNA, 19 nt, Artificial Sequence
  Description of Artificial Sequence: Synthetic oligonucleotide
  Sense strand starting at position 2378 of SEQ ID NO: 1241560
cuauuaggugcccaguaga

SEQ ID NO: 1281845 - RNA, 19 nt, Artificial Sequence
  Description of Artificial Sequence: Synthetic oligonucleotide
  Antisense strand to SEQ ID NO: 1281844
ucuacugggcaccuaauag

SEQ ID NO: 1281846 - RNA, 19 nt, Artificial Sequence
  Description of Artificial Sequence: Synthetic oligonucleotide
  Sense strand starting at position 2794 of SEQ ID NO: 1241560
gggcacaugcucugaguuu

SEQ ID NO: 1281847 - RNA, 19 nt, Artificial Sequence
  Description of Artificial Sequence: Synthetic oligonucleotide
  Antisense strand to SEQ ID NO: 1281846
aaacucagagcaugugccc

SEQ ID NO: 1281848 - RNA, 19 nt, Artificial Sequence
  Description of Artificial Sequence: Synthetic oligonucleotide
  Sense strand starting at position 2859 of SEQ ID NO: 1241560
auuugcacauguuagauaa

SEQ ID NO: 1281849 - RNA, 19 nt, Artificial Sequence
  Description of Artificial Sequence: Synthetic oligonucleotide
  Antisense strand to SEQ ID NO: 1281848
uuaucuaacaugugcaaau

SEQ ID NO: 1281850 - RNA, 19 nt, Artificial Sequence
  Description of Artificial Sequence: Synthetic oligonucleotide
  Sense strand starting at position 2911 of SEQ ID NO: 1241560
ccuccaaugagguagguua

SEQ ID NO: 1281851 - RNA, 19 nt, Artificial Sequence
  Description of Artificial Sequence: Synthetic oligonucleotide
  Antisense strand to SEQ ID NO: 1281850
uaaccuaccucauuggagg

SEQ ID NO: 1281852 - RNA, 19 nt, Artificial Sequence
  Description of Artificial Sequence: Synthetic oligonucleotide
  Sense strand starting at position 2954 of SEQ ID NO: 1241560
ggagaauaaucagaaacau

SEQ ID NO: 1281853 - RNA, 19 nt, Artificial Sequence
  Description of Artificial Sequence: Synthetic oligonucleotide
  Antisense strand to SEQ ID NO: 1281852
auguuucugauuauucucc

SEQ ID NO: 1281854 - RNA, 19 nt, Artificial Sequence
  Description of Artificial Sequence: Synthetic oligonucleotide
  Sense strand starting at position 2981 of SEQ ID NO: 1241560
cuucuauuaagagguagag

SEQ ID NO: 1281855 - RNA, 19 nt, Artificial Sequence
  Description of Artificial Sequence: Synthetic oligonucleotide
  Antisense strand to SEQ ID NO: 1281854
cucuaccucuuaauagaag

SEQ ID NO: 1281856 - RNA, 19 nt, Artificial Sequence
  Description of Artificial Sequence: Synthetic oligonucleotide
  Sense strand starting at position 3045 of SEQ ID NO: 1241560
caguuuagcuagcuggaaa

SEQ ID NO: 1281857 - RNA, 19 nt, Artificial Sequence
  Description of Artificial Sequence: Synthetic oligonucleotide
  Antisense strand to SEQ ID NO: 1281856
uuuccagcuagcuaaacug

SEQ ID NO: 1281858 - RNA, 19 nt, Artificial Sequence
  Description of Artificial Sequence: Synthetic oligonucleotide
  Sense strand starting at position 3186 of SEQ ID NO: 1241560
ucucuugucagcggcuuaa

SEQ ID NO: 1281859 - RNA, 19 nt, Artificial Sequence
  Description of Artificial Sequence: Synthetic oligonucleotide
  Antisense strand to SEQ ID NO: 1281858
uuaagccgcugacaagaga

SEQ ID NO: 1281860 - RNA, 19 nt, Artificial Sequence
  Description of Artificial Sequence: Synthetic oligonucleotide
  Sense strand starting at position 3225 of SEQ ID NO: 1241560
acaccacauucgcaggaaa

SEQ ID NO: 1281861 - RNA, 19 nt, Artificial Sequence
  Description of Artificial Sequence: Synthetic oligonucleotide
  Antisense strand to SEQ ID NO: 1281860
uuuccugcgaauguggugu

SEQ ID NO: 1281862 - RNA, 19 nt, Artificial Sequence
  Description of Artificial Sequence: Synthetic oligonucleotide
  Sense strand starting at position 3341 of SEQ ID NO: 1241560
uugaguucuggccaguaaa

SEQ ID NO: 1281863 - RNA, 19 nt, Artificial Sequence
  Description of Artificial Sequence: Synthetic oligonucleotide
  Antisense strand to SEQ ID NO: 1281862
uuuacuggccagaacucaa

SEQ ID NO: 1281864 - RNA, 19 nt, Artificial Sequence
  Description of Artificial Sequence: Synthetic oligonucleotide
  Sense strand starting at position 3397 of SEQ ID NO: 1241560
ugaggagcucacuauagca

SEQ ID NO: 1281865 - RNA, 19 nt, Artificial Sequence
  Description of Artificial Sequence: Synthetic oligonucleotide
  Antisense strand to SEQ ID NO: 1281864
ugcuauagugagcuccuca

SEQ ID NO: 1281866 - RNA, 19 nt, Artificial Sequence
  Description of Artificial Sequence: Synthetic oligonucleotide
  Sense strand starting at position 3399 of SEQ ID NO: 1241560
aggagcucacuauagcaau

SEQ ID NO: 1281867 - RNA, 19 nt, Artificial Sequence
  Description of Artificial Sequence: Synthetic oligonucleotide
  Antisense strand to SEQ ID NO: 1281866
auugcuauagugagcuccu

SEQ ID NO: 1281868 - RNA, 19 nt, Artificial Sequence
  Description of Artificial Sequence: Synthetic oligonucleotide
  Sense strand starting at position 3897 of SEQ ID NO: 1241560
cggccagaauuccuuagaa

SEQ ID NO: 1281869 - RNA, 19 nt, Artificial Sequence
  Description of Artificial Sequence: Synthetic oligonucleotide
  Antisense strand to SEQ ID NO: 1281868
uucuaaggaauucuggccg

SEQ ID NO: 1281870 - RNA, 19 nt, Artificial Sequence
  Description of Artificial Sequence: Synthetic oligonucleotide
  Sense strand starting at position 3910 of SEQ ID NO: 1241560
uuagaagaugaucguggau

SEQ ID NO: 1281871 - RNA, 19 nt, Artificial Sequence
  Description of Artificial Sequence: Synthetic oligonucleotide
  Antisense strand to SEQ ID NO: 1281870
auccacgaucaucuucuaa

SEQ ID NO: 1281872 - RNA, 19 nt, Artificial Sequence
  Description of Artificial Sequence: Synthetic oligonucleotide
  Sense strand starting at position 3913 of SEQ ID NO: 1241560
gaagaugaucguggaucau

SEQ ID NO: 1281873 - RNA, 19 nt, Artificial Sequence
  Description of Artificial Sequence: Synthetic oligonucleotide
  Antisense strand to SEQ ID NO: 1281872
augauccacgaucaucuuc

SEQ ID NO: 1281874 - RNA, 19 nt, Artificial Sequence
  Description of Artificial Sequence: Synthetic oligonucleotide
  Sense strand starting at position 3923 of SEQ ID NO: 1241560
guggaucauuuccacauau

SEQ ID NO: 1281875 - RNA, 19 nt, Artificial Sequence
  Description of Artificial Sequence: Synthetic oligonucleotide
  Antisense strand to SEQ ID NO: 1281874
auauguggaaaugauccac

SEQ ID NO: 1281876 - RNA, 19 nt, Artificial Sequence
  Description of Artificial Sequence: Synthetic oligonucleotide
  Sense strand starting at position 3963 of SEQ ID NO: 1241560
cuaugcauuuggucucagu

SEQ ID NO: 1281877 - RNA, 19 nt, Artificial Sequence
  Description of Artificial Sequence: Synthetic oligonucleotide
  Antisense strand to SEQ ID NO: 1281876
acugagaccaaaugcauag

SEQ ID NO: 1281878 - RNA, 19 nt, Artificial Sequence
  Description of Artificial Sequence: Synthetic oligonucleotide
  Sense strand starting at position 3966 of SEQ ID NO: 1241560
ugcauuuggucucaguauc

SEQ ID NO: 1281879 - RNA, 19 nt, Artificial Sequence
  Description of Artificial Sequence: Synthetic oligonucleotide
  Antisense strand to SEQ ID NO: 1281878
gauacugagaccaaaugca

SEQ ID NO: 1281880 - RNA, 19 nt, Artificial Sequence
  Description of Artificial Sequence: Synthetic oligonucleotide
  Sense strand starting at position 3979 of SEQ ID NO: 1241560
aguaucaucugaggauaca

SEQ ID NO: 1281881 - RNA, 19 nt, Artificial Sequence
  Description of Artificial Sequence: Synthetic oligonucleotide
  Antisense strand to SEQ ID NO: 1281880
uguauccucagaugauacu

SEQ ID NO: 1281882 - RNA, 19 nt, Artificial Sequence
  Description of Artificial Sequence: Synthetic oligonucleotide
  Sense strand starting at position 401 of SEQ ID NO: 1241561
cggccagaauuccuuagaa

SEQ ID NO: 1281883 - RNA, 19 nt, Artificial Sequence
  Description of Artificial Sequence: Synthetic oligonucleotide
  Antisense strand to SEQ ID NO: 1281882
uucuaaggaauucuggccg

SEQ ID NO: 1281884 - RNA, 19 nt, Artificial Sequence
  Description of Artificial Sequence: Synthetic oligonucleotide
  Sense strand starting at position 414 of SEQ ID NO: 1241561
uuagaagaugaucguggau

SEQ ID NO: 1281885 - RNA, 19 nt, Artificial Sequence
  Description of Artificial Sequence: Synthetic oligonucleotide
  Antisense strand to SEQ ID NO: 1281884
auccacgaucaucuucuaa

SEQ ID NO: 1281886 - RNA, 19 nt, Artificial Sequence
  Description of Artificial Sequence: Synthetic oligonucleotide
  Sense strand starting at position 417 of SEQ ID NO: 1241561
gaagaugaucguggaucau

SEQ ID NO: 1281887 - RNA, 19 nt, Artificial Sequence
  Description of Artificial Sequence: Synthetic oligonucleotide
  Antisense strand to SEQ ID NO: 1281886
augauccacgaucaucuuc

SEQ ID NO: 1281888 - RNA, 19 nt, Artificial Sequence
  Description of Artificial Sequence: Synthetic oligonucleotide
  Sense strand starting at position 427 of SEQ ID NO: 1241561
guggaucauuuccacauau

SEQ ID NO: 1281889 - RNA, 19 nt, Artificial Sequence
  Description of Artificial Sequence: Synthetic oligonucleotide
  Antisense strand to SEQ ID NO: 1281888
auauguggaaaugauccac

SEQ ID NO: 1281890 - RNA, 19 nt, Artificial Sequence
  Description of Artificial Sequence: Synthetic oligonucleotide
  Sense strand starting at position 467 of SEQ ID NO: 1241561
cuaugcauuuggucucagu

SEQ ID NO: 1281891 - RNA, 19 nt, Artificial Sequence
  Description of Artificial Sequence: Synthetic oligonucleotide
  Antisense strand to SEQ ID NO: 1281890
acugagaccaaaugcauag

SEQ ID NO: 1281892 - RNA, 19 nt, Artificial Sequence
  Description of Artificial Sequence: Synthetic oligonucleotide
  Sense strand starting at position 551 of SEQ ID NO: 1241561
aucagagaucuuugaaacg

SEQ ID NO: 1281893 - RNA, 19 nt, Artificial Sequence
  Description of Artificial Sequence: Synthetic oligonucleotide
  Antisense strand to SEQ ID NO: 1281892
cguuucaaagaucucugau

SEQ ID NO: 1281894 - RNA, 19 nt, Artificial Sequence
  Description of Artificial Sequence: Synthetic oligonucleotide
  Sense strand starting at position 586 of SEQ ID NO: 1241561
cuuaauacuccaggcaagu

SEQ ID NO: 1281895 - RNA, 19 nt, Artificial Sequence
  Description of Artificial Sequence: Synthetic oligonucleotide
  Antisense strand to SEQ ID NO: 1281894
acuugccuggaguauuaag

SEQ ID NO: 1281896 - RNA, 19 nt, Artificial Sequence
  Description of Artificial Sequence: Synthetic oligonucleotide
  Sense strand starting at position 732 of SEQ ID NO: 1241561
acgguaguggaccauagaa

SEQ ID NO: 1281897 - RNA, 19 nt, Artificial Sequence
  Description of Artificial Sequence: Synthetic oligonucleotide
  Antisense strand to SEQ ID NO: 1281896
uucuaugguccacuaccgu

SEQ ID NO: 1281898 - RNA, 19 nt, Artificial Sequence
  Description of Artificial Sequence: Synthetic oligonucleotide
  Sense strand starting at position 825 of SEQ ID NO: 1241561
uggagaaucugggucaauu

SEQ ID NO: 1281899 - RNA, 19 nt, Artificial Sequence
  Description of Artificial Sequence: Synthetic oligonucleotide
  Antisense strand to SEQ ID NO: 1281898
aauugacccagauucucca

SEQ ID NO: 1281900 - RNA, 19 nt, Artificial Sequence
  Description of Artificial Sequence: Synthetic oligonucleotide
  Sense strand starting at position 827 of SEQ ID NO: 1241561
gagaaucugggucaauugu

SEQ ID NO: 1281901 - RNA, 19 nt, Artificial Sequence
  Description of Artificial Sequence: Synthetic oligonucleotide
  Antisense strand to SEQ ID NO: 1281900
acaauugacccagauucuc

SEQ ID NO: 1281902 - RNA, 19 nt, Artificial Sequence
  Description of Artificial Sequence: Synthetic oligonucleotide
  Sense strand starting at position 986 of SEQ ID NO: 1241561
uaggaaacucauggguuau

SEQ ID NO: 1281903 - RNA, 19 nt, Artificial Sequence
  Description of Artificial Sequence: Synthetic oligonucleotide
  Antisense strand to SEQ ID NO: 1281902
auaacccaugaguuuccua

SEQ ID NO: 1281904 - RNA, 19 nt, Artificial Sequence
  Description of Artificial Sequence: Synthetic oligonucleotide
  Sense strand starting at position 1148 of SEQ ID NO: 1241561
ucuucugaacuguaagacu

SEQ ID NO: 1281905 - RNA, 19 nt, Artificial Sequence
  Description of Artificial Sequence: Synthetic oligonucleotide
  Antisense strand to SEQ ID NO: 1281904
agucuuacaguucagaaga

SEQ ID NO: 1281906 - RNA, 19 nt, Artificial Sequence
  Description of Artificial Sequence: Synthetic oligonucleotide
  Sense strand starting at position 1215 of SEQ ID NO: 1241561
gggaauauauugccaugau

SEQ ID NO: 1281907 - RNA, 19 nt, Artificial Sequence
  Description of Artificial Sequence: Synthetic oligonucleotide
  Antisense strand to SEQ ID NO: 1281906
aucauggcaauauauuccc

SEQ ID NO: 1281908 - RNA, 19 nt, Artificial Sequence
  Description of Artificial Sequence: Synthetic oligonucleotide
  Sense strand starting at position 1329 of SEQ ID NO: 1241561
ucuacaagauuggcuuuaa

SEQ ID NO: 1281909 - RNA, 19 nt, Artificial Sequence
  Description of Artificial Sequence: Synthetic oligonucleotide
  Antisense strand to SEQ ID NO: 1281908
uuaaagccaaucuuguaga

SEQ ID NO: 1281910 - RNA, 19 nt, Artificial Sequence
  Description of Artificial Sequence: Synthetic oligonucleotide
  Sense strand starting at position 1330 of SEQ ID NO: 1241561
cuacaagauuggcuuuaaa

SEQ ID NO: 1281911 - RNA, 19 nt, Artificial Sequence
  Description of Artificial Sequence: Synthetic oligonucleotide
  Antisense strand to SEQ ID NO: 1281910
uuuaaagccaaucuuguag

SEQ ID NO: 1281912 - RNA, 19 nt, Artificial Sequence
  Description of Artificial Sequence: Synthetic oligonucleotide
  Sense strand starting at position 1333 of SEQ ID NO: 1241561
caagauuggcuuuaaaguc

SEQ ID NO: 1281913 - RNA, 19 nt, Artificial Sequence
  Description of Artificial Sequence: Synthetic oligonucleotide
  Antisense strand to SEQ ID NO: 1281912
gacuuuaaagccaaucuug

SEQ ID NO: 1281914 - RNA, 19 nt, Artificial Sequence
  Description of Artificial Sequence: Synthetic oligonucleotide
  Sense strand starting at position 1428 of SEQ ID NO: 1241561
agcuuaaucugaucagcaa

SEQ ID NO: 1281915 - RNA, 19 nt, Artificial Sequence
  Description of Artificial Sequence: Synthetic oligonucleotide
  Antisense strand to SEQ ID NO: 1281914
uugcugaucagauuaagcu

SEQ ID NO: 1281916 - RNA, 19 nt, Artificial Sequence
  Description of Artificial Sequence: Synthetic oligonucleotide
  Sense strand starting at position 1429 of SEQ ID NO: 1241561
gcuuaaucugaucagcaau

SEQ ID NO: 1281917 - RNA, 19 nt, Artificial Sequence
  Description of Artificial Sequence: Synthetic oligonucleotide
  Antisense strand to SEQ ID NO: 1281916
auugcugaucagauuaagc

SEQ ID NO: 1281918 - RNA, 19 nt, Artificial Sequence
  Description of Artificial Sequence: Synthetic oligonucleotide
  Sense strand starting at position 1508 of SEQ ID NO: 1241561
aauuacucuccaggagagu

SEQ ID NO: 1281919 - RNA, 19 nt, Artificial Sequence
  Description of Artificial Sequence: Synthetic oligonucleotide
  Antisense strand to SEQ ID NO: 1281918
acucuccuggagaguaauu

SEQ ID NO: 1281920 - RNA, 19 nt, Artificial Sequence
  Description of Artificial Sequence: Synthetic oligonucleotide
  Sense strand starting at position 1521 of SEQ ID NO: 1241561
gagagucacccuugaggca

SEQ ID NO: 1281921 - RNA, 19 nt, Artificial Sequence
  Description of Artificial Sequence: Synthetic oligonucleotide
  Antisense strand to SEQ ID NO: 1281920
ugccucaagggugacucuc

SEQ ID NO: 1281922 - RNA, 19 nt, Artificial Sequence
  Description of Artificial Sequence: Synthetic oligonucleotide
  Sense strand starting at position 1585 of SEQ ID NO: 1241561
cccucaggaggcuaguauu

SEQ ID NO: 1281923 - RNA, 19 nt, Artificial Sequence
  Description of Artificial Sequence: Synthetic oligonucleotide
  Antisense strand to SEQ ID NO: 1281922
aauacuagccuccugaggg

SEQ ID NO: 1281924 - RNA, 19 nt, Artificial Sequence
  Description of Artificial Sequence: Synthetic oligonucleotide
  Sense strand starting at position 1593 of SEQ ID NO: 1241561
aggcuaguauuugagaaua

SEQ ID NO: 1281925 - RNA, 19 nt, Artificial Sequence
  Description of Artificial Sequence: Synthetic oligonucleotide
  Antisense strand to SEQ ID NO: 1281924
uauucucaaauacuagccu

SEQ ID NO: 1281926 - RNA, 19 nt, Artificial Sequence
  Description of Artificial Sequence: Synthetic oligonucleotide
  Sense strand starting at position 1641 of SEQ ID NO: 1241561
gucacuacucaagaguuag

SEQ ID NO: 1281927 - RNA, 19 nt, Artificial Sequence
  Description of Artificial Sequence: Synthetic oligonucleotide
  Antisense strand to SEQ ID NO: 1281926
cuaacucuugaguagugac

SEQ ID NO: 1281928 - RNA, 19 nt, Artificial Sequence
  Description of Artificial Sequence: Synthetic oligonucleotide
  Sense strand starting at position 2002 of SEQ ID NO: 1241561
augagaaacuuagcugcuu

SEQ ID NO: 1281929 - RNA, 19 nt, Artificial Sequence
  Description of Artificial Sequence: Synthetic oligonucleotide
  Antisense strand to SEQ ID NO: 1281928
aagcagcuaaguuucucau

SEQ ID NO: 1281930 - RNA, 19 nt, Artificial Sequence
  Description of Artificial Sequence: Synthetic oligonucleotide
  Sense strand starting at position 2003 of SEQ ID NO: 1241561
ugagaaacuuagcugcuua

SEQ ID NO: 1281931 - RNA, 19 nt, Artificial Sequence
  Description of Artificial Sequence: Synthetic oligonucleotide
  Antisense strand to SEQ ID NO: 1281930
uaagcagcuaaguuucuca

SEQ ID NO: 1281932 - RNA, 19 nt, Artificial Sequence
  Description of Artificial Sequence: Synthetic oligonucleotide
  Sense strand starting at position 2016 of SEQ ID NO: 1241561
ugcuuagaggacuguuaca

SEQ ID NO: 1281933 - RNA, 19 nt, Artificial Sequence
  Description of Artificial Sequence: Synthetic oligonucleotide
  Antisense strand to SEQ ID NO: 1281932
uguaacaguccucuaagca

SEQ ID NO: 1281934 - RNA, 19 nt, Artificial Sequence
  Description of Artificial Sequence: Synthetic oligonucleotide
  Sense strand starting at position 2183 of SEQ ID NO: 1241561
aggccaaguccuggacagu

SEQ ID NO: 1281935 - RNA, 19 nt, Artificial Sequence
  Description of Artificial Sequence: Synthetic oligonucleotide
  Antisense strand to SEQ ID NO: 1281934
acuguccaggacuuggccu

SEQ ID NO: 1281936 - RNA, 19 nt, Artificial Sequence
  Description of Artificial Sequence: Synthetic oligonucleotide
  Sense strand starting at position 2193 of SEQ ID NO: 1241561
cuggacagucuuuagggua

SEQ ID NO: 1281937 - RNA, 19 nt, Artificial Sequence
  Description of Artificial Sequence: Synthetic oligonucleotide
  Antisense strand to SEQ ID NO: 1281936
uacccuaaagacuguccag

SEQ ID NO: 1281938 - RNA, 19 nt, Artificial Sequence
  Description of Artificial Sequence: Synthetic oligonucleotide
  Sense strand starting at position 2238 of SEQ ID NO: 1241561
uggccacagccuuacaaua

SEQ ID NO: 1281939 - RNA, 19 nt, Artificial Sequence
  Description of Artificial Sequence: Synthetic oligonucleotide
  Antisense strand to SEQ ID NO: 1281938
uauuguaaggcuguggcca

SEQ ID NO: 1281940 - RNA, 19 nt, Artificial Sequence
  Description of Artificial Sequence: Synthetic oligonucleotide
  Sense strand starting at position 2290 of SEQ ID NO: 1241561
ucaugagauagcuauugug

SEQ ID NO: 1281941 - RNA, 19 nt, Artificial Sequence
  Description of Artificial Sequence: Synthetic oligonucleotide
  Antisense strand to SEQ ID NO: 1281940
cacaauagcuaucucauga

SEQ ID NO: 1281942 - RNA, 19 nt, Artificial Sequence
  Description of Artificial Sequence: Synthetic oligonucleotide
  Sense strand starting at position 2401 of SEQ ID NO: 1241561
acaaauaagucagcagaua

SEQ ID NO: 1281943 - RNA, 19 nt, Artificial Sequence
  Description of Artificial Sequence: Synthetic oligonucleotide
  Antisense strand to SEQ ID NO: 1281942
uaucugcugacuuauuugu

SEQ ID NO: 1281944 - RNA, 19 nt, Artificial Sequence
  Description of Artificial Sequence: Synthetic oligonucleotide
  Sense strand starting at position 2422 of SEQ ID NO: 1241561
aaggaaauugcauacuguu

SEQ ID NO: 1281945 - RNA, 19 nt, Artificial Sequence
  Description of Artificial Sequence: Synthetic oligonucleotide
  Antisense strand to SEQ ID NO: 1281944
aacaguaugcaauuuccuu

SEQ ID NO: 1281946 - RNA, 19 nt, Artificial Sequence
  Description of Artificial Sequence: Synthetic oligonucleotide
  Sense strand starting at position 2439 of SEQ ID NO: 1241561
uuauccaugcugugaagaa

SEQ ID NO: 1281947 - RNA, 19 nt, Artificial Sequence
  Description of Artificial Sequence: Synthetic oligonucleotide
  Antisense strand to SEQ ID NO: 1281946
uucuucacagcauggauaa

SEQ ID NO: 1281948 - RNA, 19 nt, Artificial Sequence
  Description of Artificial Sequence: Synthetic oligonucleotide
  Sense strand starting at position 3189 of SEQ ID NO: 1241561
ccaggaaagacccgucaga

SEQ ID NO: 1281949 - RNA, 19 nt, Artificial Sequence
  Description of Artificial Sequence: Synthetic oligonucleotide
  Antisense strand to SEQ ID NO: 1281948
ucugacgggucuuuccugg

SEQ ID NO: 1281950 - RNA, 19 nt, Artificial Sequence
  Description of Artificial Sequence: Synthetic oligonucleotide
  Sense strand starting at position 3275 of SEQ ID NO: 1241561
guaccuauuugugcuaagu

SEQ ID NO: 1281951 - RNA, 19 nt, Artificial Sequence
  Description of Artificial Sequence: Synthetic oligonucleotide
  Antisense strand to SEQ ID NO: 1281950
acuuagcacaaauagguac

SEQ ID NO: 1281952 - RNA, 19 nt, Artificial Sequence
  Description of Artificial Sequence: Synthetic oligonucleotide
  Sense strand starting at position 3351 of SEQ ID NO: 1241561
gucuauccugggcauuaca

SEQ ID NO: 1281953 - RNA, 19 nt, Artificial Sequence
  Description of Artificial Sequence: Synthetic oligonucleotide
  Antisense strand to SEQ ID NO: 1281952
uguaaugcccaggauagac

SEQ ID NO: 1281954 - RNA, 19 nt, Artificial Sequence
  Description of Artificial Sequence: Synthetic oligonucleotide
  Sense strand starting at position 3669 of SEQ ID NO: 1241561
guacgauacugagcaucau

SEQ ID NO: 1281955 - RNA, 19 nt, Artificial Sequence
  Description of Artificial Sequence: Synthetic oligonucleotide
  Antisense strand to SEQ ID NO: 1281954
augaugcucaguaucguac

SEQ ID NO: 1281956 - RNA, 19 nt, Artificial Sequence
  Description of Artificial Sequence: Synthetic oligonucleotide
  Sense strand starting at position 3670 of SEQ ID NO: 1241561
uacgauacugagcaucauu

SEQ ID NO: 1281957 - RNA, 19 nt, Artificial Sequence
  Description of Artificial Sequence: Synthetic oligonucleotide
  Antisense strand to SEQ ID NO: 1281956
aaugaugcucaguaucgua

SEQ ID NO: 1281958 - RNA, 19 nt, Artificial Sequence
  Description of Artificial Sequence: Synthetic oligonucleotide
  Sense strand starting at position 3769 of SEQ ID NO: 1241561
ccuauacuggcucaugaca

SEQ ID NO: 1281959 - RNA, 19 nt, Artificial Sequence
  Description of Artificial Sequence: Synthetic oligonucleotide
  Antisense strand to SEQ ID NO: 1281958
ugucaugagccaguauagg

SEQ ID NO: 1281960 - RNA, 19 nt, Artificial Sequence
  Description of Artificial Sequence: Synthetic oligonucleotide
  Sense strand starting at position 3777 of SEQ ID NO: 1241561
ggcucaugacagcagauua

SEQ ID NO: 1281961 - RNA, 19 nt, Artificial Sequence
  Description of Artificial Sequence: Synthetic oligonucleotide
  Antisense strand to SEQ ID NO: 1281960
uaaucugcugucaugagcc

SEQ ID NO: 1281962 - RNA, 19 nt, Artificial Sequence
  Description of Artificial Sequence: Synthetic oligonucleotide
  Sense strand starting at position 7 of SEQ ID NO: 1241562
gagguaagaugucugaaug

SEQ ID NO: 1281963 - RNA, 19 nt, Artificial Sequence
  Description of Artificial Sequence: Synthetic oligonucleotide
  Antisense strand to SEQ ID NO: 1281962
cauucagacaucuuaccuc

SEQ ID NO: 1281964 - RNA, 19 nt, Artificial Sequence
  Description of Artificial Sequence: Synthetic oligonucleotide
  Sense strand starting at position 8 of SEQ ID NO: 1241562
agguaagaugucugaauga

SEQ ID NO: 1281965 - RNA, 19 nt, Artificial Sequence
  Description of Artificial Sequence: Synthetic oligonucleotide
  Antisense strand to SEQ ID NO: 1281964
ucauucagacaucuuaccu

SEQ ID NO: 1281966 - RNA, 19 nt, Artificial Sequence
  Description of Artificial Sequence: Synthetic oligonucleotide
  Sense strand starting at position 19 of SEQ ID NO: 1241562
cugaaugaaucauauggaa

SEQ ID NO: 1281967 - RNA, 19 nt, Artificial Sequence
  Description of Artificial Sequence: Synthetic oligonucleotide
  Antisense strand to SEQ ID NO: 1281966
uuccauaugauucauucag

SEQ ID NO: 1281968 - RNA, 19 nt, Artificial Sequence
  Description of Artificial Sequence: Synthetic oligonucleotide
  Sense strand starting at position 46 of SEQ ID NO: 1241562
ccaaguuucuuagcaggau

SEQ ID NO: 1281969 - RNA, 19 nt, Artificial Sequence
  Description of Artificial Sequence: Synthetic oligonucleotide
  Antisense strand to SEQ ID NO: 1281968
auccugcuaagaaacuugg

SEQ ID NO: 1281970 - RNA, 19 nt, Artificial Sequence
  Description of Artificial Sequence: Synthetic oligonucleotide
  Sense strand starting at position 125 of SEQ ID NO: 1241562
augccaccacaguaugaau

SEQ ID NO: 1281971 - RNA, 19 nt, Artificial Sequence
  Description of Artificial Sequence: Synthetic oligonucleotide
  Antisense strand to SEQ ID NO: 1281970
auucauacugugguggcau

SEQ ID NO: 1281972 - RNA, 19 nt, Artificial Sequence
  Description of Artificial Sequence: Synthetic oligonucleotide
  Sense strand starting at position 136 of SEQ ID NO: 1241562
guaugaaugcaucaaucaa

SEQ ID NO: 1281973 - RNA, 19 nt, Artificial Sequence
  Description of Artificial Sequence: Synthetic oligonucleotide
  Antisense strand to SEQ ID NO: 1281972
uugauugaugcauucauac

SEQ ID NO: 1281974 - RNA, 19 nt, Artificial Sequence
  Description of Artificial Sequence: Synthetic oligonucleotide
  Sense strand starting at position 371 of SEQ ID NO: 1241562
caggacagcgcucagauau

SEQ ID NO: 1281975 - RNA, 19 nt, Artificial Sequence
  Description of Artificial Sequence: Synthetic oligonucleotide
  Antisense strand to SEQ ID NO: 1281974
auaucugagcgcuguccug

SEQ ID NO: 1281976 - RNA, 19 nt, Artificial Sequence
  Description of Artificial Sequence: Synthetic oligonucleotide
  Sense strand starting at position 379 of SEQ ID NO: 1241562
cgcucagauauugguacau

SEQ ID NO: 1281977 - RNA, 19 nt, Artificial Sequence
  Description of Artificial Sequence: Synthetic oligonucleotide
  Antisense strand to SEQ ID NO: 1281976
auguaccaauaucugagcg

SEQ ID NO: 1281978 - RNA, 19 nt, Artificial Sequence
  Description of Artificial Sequence: Synthetic oligonucleotide
  Sense strand starting at position 381 of SEQ ID NO: 1241562
cucagauauugguacauuu

SEQ ID NO: 1281979 - RNA, 19 nt, Artificial Sequence
  Description of Artificial Sequence: Synthetic oligonucleotide
  Antisense strand to SEQ ID NO: 1281978
aaauguaccaauaucugag

SEQ ID NO: 1281980 - RNA, 19 nt, Artificial Sequence
  Description of Artificial Sequence: Synthetic oligonucleotide
  Sense strand starting at position 402 of SEQ ID NO: 1241562
aucccuacuuuagagguaa

SEQ ID NO: 1281981 - RNA, 19 nt, Artificial Sequence
  Description of Artificial Sequence: Synthetic oligonucleotide
  Antisense strand to SEQ ID NO: 1281980
uuaccucuaaaguagggau

SEQ ID NO: 1281982 - RNA, 19 nt, Artificial Sequence
  Description of Artificial Sequence: Synthetic oligonucleotide
  Sense strand starting at position 414 of SEQ ID NO: 1241562
gagguaauuccaggcucaa

SEQ ID NO: 1281983 - RNA, 19 nt, Artificial Sequence
  Description of Artificial Sequence: Synthetic oligonucleotide
  Antisense strand to SEQ ID NO: 1281982
uugagccuggaauuaccuc

SEQ ID NO: 1281984 - RNA, 19 nt, Artificial Sequence
  Description of Artificial Sequence: Synthetic oligonucleotide
  Sense strand starting at position 427 of SEQ ID NO: 1241562
gcucaaagaccuugacuuc

SEQ ID NO: 1281985 - RNA, 19 nt, Artificial Sequence
  Description of Artificial Sequence: Synthetic oligonucleotide
  Antisense strand to SEQ ID NO: 1281984
gaagucaaggucuuugagc

SEQ ID NO: 1281986 - RNA, 19 nt, Artificial Sequence
  Description of Artificial Sequence: Synthetic oligonucleotide
  Sense strand starting at position 678 of SEQ ID NO: 1241562
agaagagauuaucaagaga

SEQ ID NO: 1281987 - RNA, 19 nt, Artificial Sequence
  Description of Artificial Sequence: Synthetic oligonucleotide
  Antisense strand to SEQ ID NO: 1281986
ucucuugauaaucucuucu

SEQ ID NO: 1281988 - RNA, 19 nt, Artificial Sequence
  Description of Artificial Sequence: Synthetic oligonucleotide
  Sense strand starting at position 792 of SEQ ID NO: 1241562
ugcacuuuccugugaaaug

SEQ ID NO: 1281989 - RNA, 19 nt, Artificial Sequence
  Description of Artificial Sequence: Synthetic oligonucleotide
  Antisense strand to SEQ ID NO: 1281988
cauuucacaggaaagugca

SEQ ID NO: 1281990 - RNA, 19 nt, Artificial Sequence
  Description of Artificial Sequence: Synthetic oligonucleotide
  Sense strand starting at position 821 of SEQ ID NO: 1241562
cguaguauuguagguuaaa

SEQ ID NO: 1281991 - RNA, 19 nt, Artificial Sequence
  Description of Artificial Sequence: Synthetic oligonucleotide
  Antisense strand to SEQ ID NO: 1281990
uuuaaccuacaauacuacg

SEQ ID NO: 1281992 - RNA, 19 nt, Artificial Sequence
  Description of Artificial Sequence: Synthetic oligonucleotide
  Sense strand starting at position 851 of SEQ ID NO: 1241562
guuacuuuacuauaaacgu

SEQ ID NO: 1281993 - RNA, 19 nt, Artificial Sequence
  Description of Artificial Sequence: Synthetic oligonucleotide
  Antisense strand to SEQ ID NO: 1281992
acguuuauaguaaaguaac

SEQ ID NO: 1281994 - RNA, 19 nt, Artificial Sequence
  Description of Artificial Sequence: Synthetic oligonucleotide
  Sense strand starting at position 860 of SEQ ID NO: 1241562
cuauaaacguguuugagaa

SEQ ID NO: 1281995 - RNA, 19 nt, Artificial Sequence
  Description of Artificial Sequence: Synthetic oligonucleotide
  Antisense strand to SEQ ID NO: 1281994
uucucaaacacguuuauag

SEQ ID NO: 1281996 - RNA, 19 nt, Artificial Sequence
  Description of Artificial Sequence: Synthetic oligonucleotide
  Sense strand starting at position 861 of SEQ ID NO: 1241562
uauaaacguguuugagaau

SEQ ID NO: 1281997 - RNA, 19 nt, Artificial Sequence
  Description of Artificial Sequence: Synthetic oligonucleotide
  Antisense strand to SEQ ID NO: 1281996
auucucaaacacguuuaua

SEQ ID NO: 1281998 - RNA, 19 nt, Artificial Sequence
  Description of Artificial Sequence: Synthetic oligonucleotide
  Sense strand starting at position 1071 of SEQ ID NO: 1241562
aaugucuuucuaggcgaaa

SEQ ID NO: 1281999 - RNA, 19 nt, Artificial Sequence
  Description of Artificial Sequence: Synthetic oligonucleotide
  Antisense strand to SEQ ID NO: 1281998
uuucgccuagaaagacauu

SEQ ID NO: 1282000 - RNA, 19 nt, Artificial Sequence
  Description of Artificial Sequence: Synthetic oligonucleotide
  Sense strand starting at position 1072 of SEQ ID NO: 1241562
augucuuucuaggcgaaag

SEQ ID NO: 1282001 - RNA, 19 nt, Artificial Sequence
  Description of Artificial Sequence: Synthetic oligonucleotide
  Antisense strand to SEQ ID NO: 1282000
cuuucgccuagaaagacau

SEQ ID NO: 1282002 - RNA, 19 nt, Artificial Sequence
  Description of Artificial Sequence: Synthetic oligonucleotide
  Sense strand starting at position 1074 of SEQ ID NO: 1241562
gucuuucuaggcgaaagca

SEQ ID NO: 1282003 - RNA, 19 nt, Artificial Sequence
  Description of Artificial Sequence: Synthetic oligonucleotide
  Antisense strand to SEQ ID NO: 1282002
ugcuuucgccuagaaagac

SEQ ID NO: 1282004 - RNA, 19 nt, Artificial Sequence
  Description of Artificial Sequence: Synthetic oligonucleotide
  Sense strand starting at position 1207 of SEQ ID NO: 1241562
gggaauuccuaagauggcu

SEQ ID NO: 1282005 - RNA, 19 nt, Artificial Sequence
  Description of Artificial Sequence: Synthetic oligonucleotide
  Antisense strand to SEQ ID NO: 1282004
agccaucuuaggaauuccc

SEQ ID NO: 1282006 - RNA, 19 nt, Artificial Sequence
  Description of Artificial Sequence: Synthetic oligonucleotide
  Sense strand starting at position 1244 of SEQ ID NO: 1241562
ggcaccuuuccucaguaca

SEQ ID NO: 1282007 - RNA, 19 nt, Artificial Sequence
  Description of Artificial Sequence: Synthetic oligonucleotide
  Antisense strand to SEQ ID NO: 1282006
uguacugaggaaaggugcc

SEQ ID NO: 1282008 - RNA, 19 nt, Artificial Sequence
  Description of Artificial Sequence: Synthetic oligonucleotide
  Sense strand starting at position 2835 of SEQ ID NO: 1241562
ugagcagacccucaguaaa

SEQ ID NO: 1282009 - RNA, 19 nt, Artificial Sequence
  Description of Artificial Sequence: Synthetic oligonucleotide
  Antisense strand to SEQ ID NO: 1282008
uuuacugagggucugcuca

SEQ ID NO: 1282010 - RNA, 19 nt, Artificial Sequence
  Description of Artificial Sequence: Synthetic oligonucleotide
  Sense strand starting at position 3084 of SEQ ID NO: 1241562
ccugucugguucucggaga

SEQ ID NO: 1282011 - RNA, 19 nt, Artificial Sequence
  Description of Artificial Sequence: Synthetic oligonucleotide
  Antisense strand to SEQ ID NO: 1282010
ucuccgagaaccagacagg

SEQ ID NO: 1282012 - RNA, 19 nt, Artificial Sequence
  Description of Artificial Sequence: Synthetic oligonucleotide
  Sense strand starting at position 3209 of SEQ ID NO: 1241562
ucguguuugcgagugugga

SEQ ID NO: 1282013 - RNA, 19 nt, Artificial Sequence
  Description of Artificial Sequence: Synthetic oligonucleotide
  Antisense strand to SEQ ID NO: 1282012
uccacacucgcaaacacga

SEQ ID NO: 1282014 - RNA, 19 nt, Artificial Sequence
  Description of Artificial Sequence: Synthetic oligonucleotide
  Sense strand starting at position 3297 of SEQ ID NO: 1241562
gcaucuucucugcaucgua

SEQ ID NO: 1282015 - RNA, 19 nt, Artificial Sequence
  Description of Artificial Sequence: Synthetic oligonucleotide
  Antisense strand to SEQ ID NO: 1282014
uacgaugcagagaagaugc

SEQ ID NO: 1282016 - RNA, 19 nt, Artificial Sequence
  Description of Artificial Sequence: Synthetic oligonucleotide
  Sense strand starting at position 3324 of SEQ ID NO: 1241562
gucucugugaugggagagu

SEQ ID NO: 1282017 - RNA, 19 nt, Artificial Sequence
  Description of Artificial Sequence: Synthetic oligonucleotide
  Antisense strand to SEQ ID NO: 1282016
acucucccaucacagagac

SEQ ID NO: 1282018 - RNA, 19 nt, Artificial Sequence
  Description of Artificial Sequence: Synthetic oligonucleotide
  Sense strand starting at position 3412 of SEQ ID NO: 1241562
caauuuguggcacguggua

SEQ ID NO: 1282019 - RNA, 19 nt, Artificial Sequence
  Description of Artificial Sequence: Synthetic oligonucleotide
  Antisense strand to SEQ ID NO: 1282018
uaccacgugccacaaauug

SEQ ID NO: 1282020 - RNA, 19 nt, Artificial Sequence
  Description of Artificial Sequence: Synthetic oligonucleotide
  Sense strand starting at position 3424 of SEQ ID NO: 1241562
cgugguagcuguuccauaa

SEQ ID NO: 1282021 - RNA, 19 nt, Artificial Sequence
  Description of Artificial Sequence: Synthetic oligonucleotide
  Antisense strand to SEQ ID NO: 1282020
uuauggaacagcuaccacg

SEQ ID NO: 1282022 - RNA, 19 nt, Artificial Sequence
  Description of Artificial Sequence: Synthetic oligonucleotide
  Sense strand starting at position 3428 of SEQ ID NO: 1241562
guagcuguuccauaaauag

SEQ ID NO: 1282023 - RNA, 19 nt, Artificial Sequence
  Description of Artificial Sequence: Synthetic oligonucleotide
  Antisense strand to SEQ ID NO: 1282022
cuauuuauggaacagcuac

SEQ ID NO: 1282024 - RNA, 19 nt, Artificial Sequence
  Description of Artificial Sequence: Synthetic oligonucleotide
  Sense strand starting at position 3453 of SEQ ID NO: 1241562
guaguugggccgugauuag

SEQ ID NO: 1282025 - RNA, 19 nt, Artificial Sequence
  Description of Artificial Sequence: Synthetic oligonucleotide
  Antisense strand to SEQ ID NO: 1282024
cuaaucacggcccaacuac

SEQ ID NO: 1282026 - RNA, 19 nt, Artificial Sequence
  Description of Artificial Sequence: Synthetic oligonucleotide
  Sense strand starting at position 3487 of SEQ ID NO: 1241562
uacagacgucccugggauu

SEQ ID NO: 1282027 - RNA, 19 nt, Artificial Sequence
  Description of Artificial Sequence: Synthetic oligonucleotide
  Antisense strand to SEQ ID NO: 1282026
aaucccagggacgucugua

SEQ ID NO: 1282028 - RNA, 19 nt, Artificial Sequence
  Description of Artificial Sequence: Synthetic oligonucleotide
  Sense strand starting at position 3559 of SEQ ID NO: 1241562
agcagaguuuggagagaag

SEQ ID NO: 1282029 - RNA, 19 nt, Artificial Sequence
  Description of Artificial Sequence: Synthetic oligonucleotide
  Antisense strand to SEQ ID NO: 1282028
cuucucuccaaacucugcu

SEQ ID NO: 1282030 - RNA, 19 nt, Artificial Sequence
  Description of Artificial Sequence: Synthetic oligonucleotide
  Sense strand starting at position 3583 of SEQ ID NO: 1241562
gcucuagauaaugagugau

SEQ ID NO: 1282031 - RNA, 19 nt, Artificial Sequence
  Description of Artificial Sequence: Synthetic oligonucleotide
  Antisense strand to SEQ ID NO: 1282030
aucacucauuaucuagagc

SEQ ID NO: 1282032 - RNA, 19 nt, Artificial Sequence
  Description of Artificial Sequence: Synthetic oligonucleotide
  Sense strand starting at position 3586 of SEQ ID NO: 1241562
cuagauaaugagugauccu

SEQ ID NO: 1282033 - RNA, 19 nt, Artificial Sequence
  Description of Artificial Sequence: Synthetic oligonucleotide
  Antisense strand to SEQ ID NO: 1282032
aggaucacucauuaucuag

SEQ ID NO: 1282034 - RNA, 19 nt, Artificial Sequence
  Description of Artificial Sequence: Synthetic oligonucleotide
  Sense strand starting at position 3595 of SEQ ID NO: 1241562
gagugauccuaggcugaaa

SEQ ID NO: 1282035 - RNA, 19 nt, Artificial Sequence
  Description of Artificial Sequence: Synthetic oligonucleotide
  Antisense strand to SEQ ID NO: 1282034
uuucagccuaggaucacuc

SEQ ID NO: 1282036 - RNA, 19 nt, Artificial Sequence
  Description of Artificial Sequence: Synthetic oligonucleotide
  Sense strand starting at position 3597 of SEQ ID NO: 1241562
gugauccuaggcugaaagu

SEQ ID NO: 1282037 - RNA, 19 nt, Artificial Sequence
  Description of Artificial Sequence: Synthetic oligonucleotide
  Antisense strand to SEQ ID NO: 1282036
acuuucagccuaggaucac

SEQ ID NO: 1282038 - RNA, 19 nt, Artificial Sequence
  Description of Artificial Sequence: Synthetic oligonucleotide
  Sense strand starting at position 3722 of SEQ ID NO: 1241562
agcugaugucccugaguca

SEQ ID NO: 1282039 - RNA, 19 nt, Artificial Sequence
  Description of Artificial Sequence: Synthetic oligonucleotide
  Antisense strand to SEQ ID NO: 1282038
ugacucagggacaucagcu

SEQ ID NO: 1282040 - RNA, 19 nt, Artificial Sequence
  Description of Artificial Sequence: Synthetic oligonucleotide
  Sense strand starting at position 3821 of SEQ ID NO: 1241562
aggugauccaaaugagccu

SEQ ID NO: 1282041 - RNA, 19 nt, Artificial Sequence
  Description of Artificial Sequence: Synthetic oligonucleotide
  Antisense strand to SEQ ID NO: 1282040
aggcucauuuggaucaccu

SEQ ID NO: 1282042 - RNA, 19 nt, Artificial Sequence
  Description of Artificial Sequence: Synthetic oligonucleotide
  Sense strand starting at position 5 of SEQ ID NO: 1241563
uugaaucuagcagauucuu

SEQ ID NO: 1282043 - RNA, 19 nt, Artificial Sequence
  Description of Artificial Sequence: Synthetic oligonucleotide
  Antisense strand to SEQ ID NO: 1282042
aagaaucugcuagauucaa

SEQ ID NO: 1282044 - RNA, 19 nt, Artificial Sequence
  Description of Artificial Sequence: Synthetic oligonucleotide
  Sense strand starting at position 11 of SEQ ID NO: 1241563
cuagcagauucuuugaaca

SEQ ID NO: 1282045 - RNA, 19 nt, Artificial Sequence
  Description of Artificial Sequence: Synthetic oligonucleotide
  Antisense strand to SEQ ID NO: 1282044
uguucaaagaaucugcuag

SEQ ID NO: 1282046 - RNA, 19 nt, Artificial Sequence
  Description of Artificial Sequence: Synthetic oligonucleotide
  Sense strand starting at position 78 of SEQ ID NO: 1241563
gcuccagagaccugaggau

SEQ ID NO: 1282047 - RNA, 19 nt, Artificial Sequence
  Description of Artificial Sequence: Synthetic oligonucleotide
  Antisense strand to SEQ ID NO: 1282046
auccucaggucucuggagc

SEQ ID NO: 1282048 - RNA, 19 nt, Artificial Sequence
  Description of Artificial Sequence: Synthetic oligonucleotide
  Sense strand starting at position 130 of SEQ ID NO: 1241563
ugucuaguugagggagaca

SEQ ID NO: 1282049 - RNA, 19 nt, Artificial Sequence
  Description of Artificial Sequence: Synthetic oligonucleotide
  Antisense strand to SEQ ID NO: 1282048
ugucucccucaacuagaca

SEQ ID NO: 1282050 - RNA, 19 nt, Artificial Sequence
  Description of Artificial Sequence: Synthetic oligonucleotide
  Sense strand starting at position 164 of SEQ ID NO: 1241563
gggcuuuagcauuagacaa

SEQ ID NO: 1282051 - RNA, 19 nt, Artificial Sequence
  Description of Artificial Sequence: Synthetic oligonucleotide
  Antisense strand to SEQ ID NO: 1282050
uugucuaaugcuaaagccc

SEQ ID NO: 1282052 - RNA, 19 nt, Artificial Sequence
  Description of Artificial Sequence: Synthetic oligonucleotide
  Sense strand starting at position 359 of SEQ ID NO: 1241563
acagauagugucuaguauu

SEQ ID NO: 1282053 - RNA, 19 nt, Artificial Sequence
  Description of Artificial Sequence: Synthetic oligonucleotide
  Antisense strand to SEQ ID NO: 1282052
aauacuagacacuaucugu

SEQ ID NO: 1282054 - RNA, 19 nt, Artificial Sequence
  Description of Artificial Sequence: Synthetic oligonucleotide
  Sense strand starting at position 474 of SEQ ID NO: 1241563
ucuauugcagcagauauaa

SEQ ID NO: 1282055 - RNA, 19 nt, Artificial Sequence
  Description of Artificial Sequence: Synthetic oligonucleotide
  Antisense strand to SEQ ID NO: 1282054
uuauaucugcugcaauaga

SEQ ID NO: 1282056 - RNA, 19 nt, Artificial Sequence
  Description of Artificial Sequence: Synthetic oligonucleotide
  Sense strand starting at position 492 of SEQ ID NO: 1241563
auauguucccauuaauguu

SEQ ID NO: 1282057 - RNA, 19 nt, Artificial Sequence
  Description of Artificial Sequence: Synthetic oligonucleotide
  Antisense strand to SEQ ID NO: 1282056
aacauuaaugggaacauau

SEQ ID NO: 1282058 - RNA, 19 nt, Artificial Sequence
  Description of Artificial Sequence: Synthetic oligonucleotide
  Sense strand starting at position 679 of SEQ ID NO: 1241563
aucuguaaauugguuaaca

SEQ ID NO: 1282059 - RNA, 19 nt, Artificial Sequence
  Description of Artificial Sequence: Synthetic oligonucleotide
  Antisense strand to SEQ ID NO: 1282058
uguuaaccaauuuacagau

SEQ ID NO: 1282060 - RNA, 19 nt, Artificial Sequence
  Description of Artificial Sequence: Synthetic oligonucleotide
  Sense strand starting at position 680 of SEQ ID NO: 1241563
ucuguaaauugguuaacau

SEQ ID NO: 1282061 - RNA, 19 nt, Artificial Sequence
  Description of Artificial Sequence: Synthetic oligonucleotide
  Antisense strand to SEQ ID NO: 1282060
auguuaaccaauuuacaga

SEQ ID NO: 1282062 - RNA, 19 nt, Artificial Sequence
  Description of Artificial Sequence: Synthetic oligonucleotide
  Sense strand starting at position 681 of SEQ ID NO: 1241563
cuguaaauugguuaacaug

SEQ ID NO: 1282063 - RNA, 19 nt, Artificial Sequence
  Description of Artificial Sequence: Synthetic oligonucleotide
  Antisense strand to SEQ ID NO: 1282062
cauguuaaccaauuuacag

SEQ ID NO: 1282064 - RNA, 19 nt, Artificial Sequence
  Description of Artificial Sequence: Synthetic oligonucleotide
  Sense strand starting at position 715 of SEQ ID NO: 1241563
guugguaaacauuagcaca

SEQ ID NO: 1282065 - RNA, 19 nt, Artificial Sequence
  Description of Artificial Sequence: Synthetic oligonucleotide
  Antisense strand to SEQ ID NO: 1282064
ugugcuaauguuuaccaac

SEQ ID NO: 1282066 - RNA, 19 nt, Artificial Sequence
  Description of Artificial Sequence: Synthetic oligonucleotide
  Sense strand starting at position 790 of SEQ ID NO: 1241563
augauuguuuccuuccaga

SEQ ID NO: 1282067 - RNA, 19 nt, Artificial Sequence
  Description of Artificial Sequence: Synthetic oligonucleotide
  Antisense strand to SEQ ID NO: 1282066
ucuggaaggaaacaaucau

SEQ ID NO: 1282068 - RNA, 19 nt, Artificial Sequence
  Description of Artificial Sequence: Synthetic oligonucleotide
  Sense strand starting at position 1143 of SEQ ID NO: 1241563
ucaguaagaguguagaauc

SEQ ID NO: 1282069 - RNA, 19 nt, Artificial Sequence
  Description of Artificial Sequence: Synthetic oligonucleotide
  Antisense strand to SEQ ID NO: 1282068
gauucuacacucuuacuga

SEQ ID NO: 1282070 - RNA, 19 nt, Artificial Sequence
  Description of Artificial Sequence: Synthetic oligonucleotide
  Sense strand starting at position 1159 of SEQ ID NO: 1241563
auccuaaagcguuaaacuu

SEQ ID NO: 1282071 - RNA, 19 nt, Artificial Sequence
  Description of Artificial Sequence: Synthetic oligonucleotide
  Antisense strand to SEQ ID NO: 1282070
aaguuuaacgcuuuaggau

SEQ ID NO: 1282072 - RNA, 19 nt, Artificial Sequence
  Description of Artificial Sequence: Synthetic oligonucleotide
  Sense strand starting at position 1651 of SEQ ID NO: 1241563
ugucaaauacaccagaguu

SEQ ID NO: 1282073 - RNA, 19 nt, Artificial Sequence
  Description of Artificial Sequence: Synthetic oligonucleotide
  Antisense strand to SEQ ID NO: 1282072
aacucugguguauuugaca

SEQ ID NO: 1282074 - RNA, 19 nt, Artificial Sequence
  Description of Artificial Sequence: Synthetic oligonucleotide
  Sense strand starting at position 2036 of SEQ ID NO: 1241563
aggcuucuccagcgauuuc

SEQ ID NO: 1282075 - RNA, 19 nt, Artificial Sequence
  Description of Artificial Sequence: Synthetic oligonucleotide
  Antisense strand to SEQ ID NO: 1282074
gaaaucgcuggagaagccu

SEQ ID NO: 1282076 - RNA, 19 nt, Artificial Sequence
  Description of Artificial Sequence: Synthetic oligonucleotide
  Sense strand starting at position 2037 of SEQ ID NO: 1241563
ggcuucuccagcgauuucu

SEQ ID NO: 1282077 - RNA, 19 nt, Artificial Sequence
  Description of Artificial Sequence: Synthetic oligonucleotide
  Antisense strand to SEQ ID NO: 1282076
agaaaucgcuggagaagcc

SEQ ID NO: 1282078 - RNA, 19 nt, Artificial Sequence
  Description of Artificial Sequence: Synthetic oligonucleotide
  Sense strand starting at position 2531 of SEQ ID NO: 1241563
caaagaaacuugcuuagug

SEQ ID NO: 1282079 - RNA, 19 nt, Artificial Sequence
  Description of Artificial Sequence: Synthetic oligonucleotide
  Antisense strand to SEQ ID NO: 1282078
cacuaagcaaguuucuuug

SEQ ID NO: 1282080 - RNA, 19 nt, Artificial Sequence
  Description of Artificial Sequence: Synthetic oligonucleotide
  Sense strand starting at position 2634 of SEQ ID NO: 1241563
ugcugauucuggcugauuu

SEQ ID NO: 1282081 - RNA, 19 nt, Artificial Sequence
  Description of Artificial Sequence: Synthetic oligonucleotide
  Antisense strand to SEQ ID NO: 1282080
aaaucagccagaaucagca

SEQ ID NO: 1282082 - RNA, 19 nt, Artificial Sequence
  Description of Artificial Sequence: Synthetic oligonucleotide
  Sense strand starting at position 2672 of SEQ ID NO: 1241563
ugagcaaugcuagaugaug

SEQ ID NO: 1282083 - RNA, 19 nt, Artificial Sequence
  Description of Artificial Sequence: Synthetic oligonucleotide
  Antisense strand to SEQ ID NO: 1282082
caucaucuagcauugcuca

SEQ ID NO: 1282084 - RNA, 19 nt, Artificial Sequence
  Description of Artificial Sequence: Synthetic oligonucleotide
  Sense strand starting at position 2688 of SEQ ID NO: 1241563
augcaacaugauugggaau

SEQ ID NO: 1282085 - RNA, 19 nt, Artificial Sequence
  Description of Artificial Sequence: Synthetic oligonucleotide
  Antisense strand to SEQ ID NO: 1282084
auucccaaucauguugcau

SEQ ID NO: 1282086 - RNA, 19 nt, Artificial Sequence
  Description of Artificial Sequence: Synthetic oligonucleotide
  Sense strand starting at position 2721 of SEQ ID NO: 1241563
uuuguaucaccacagcuua

SEQ ID NO: 1282087 - RNA, 19 nt, Artificial Sequence
  Description of Artificial Sequence: Synthetic oligonucleotide
  Antisense strand to SEQ ID NO: 1282086
uaagcuguggugauacaaa

SEQ ID NO: 1282088 - RNA, 19 nt, Artificial Sequence
  Description of Artificial Sequence: Synthetic oligonucleotide
  Sense strand starting at position 2735 of SEQ ID NO: 1241563
gcuuaauugguaugagagg

SEQ ID NO: 1282089 - RNA, 19 nt, Artificial Sequence
  Description of Artificial Sequence: Synthetic oligonucleotide
  Antisense strand to SEQ ID NO: 1282088
ccucucauaccaauuaagc

SEQ ID NO: 1282090 - RNA, 19 nt, Artificial Sequence
  Description of Artificial Sequence: Synthetic oligonucleotide
  Sense strand starting at position 2740 of SEQ ID NO: 1241563
auugguaugagaggcucau

SEQ ID NO: 1282091 - RNA, 19 nt, Artificial Sequence
  Description of Artificial Sequence: Synthetic oligonucleotide
  Antisense strand to SEQ ID NO: 1282090
augagccucucauaccaau

SEQ ID NO: 1282092 - RNA, 19 nt, Artificial Sequence
  Description of Artificial Sequence: Synthetic oligonucleotide
  Sense strand starting at position 2744 of SEQ ID NO: 1241563
guaugagaggcucauaagu

SEQ ID NO: 1282093 - RNA, 19 nt, Artificial Sequence
  Description of Artificial Sequence: Synthetic oligonucleotide
  Antisense strand to SEQ ID NO: 1282092
acuuaugagccucucauac

SEQ ID NO: 1282094 - RNA, 19 nt, Artificial Sequence
  Description of Artificial Sequence: Synthetic oligonucleotide
  Sense strand starting at position 2764 of SEQ ID NO: 1241563
guggauauauacucccauu

SEQ ID NO: 1282095 - RNA, 19 nt, Artificial Sequence
  Description of Artificial Sequence: Synthetic oligonucleotide
  Antisense strand to SEQ ID NO: 1282094
aaugggaguauauauccac

SEQ ID NO: 1282096 - RNA, 19 nt, Artificial Sequence
  Description of Artificial Sequence: Synthetic oligonucleotide
  Sense strand starting at position 2867 of SEQ ID NO: 1241563
uggcuacagugauuaaaua

SEQ ID NO: 1282097 - RNA, 19 nt, Artificial Sequence
  Description of Artificial Sequence: Synthetic oligonucleotide
  Antisense strand to SEQ ID NO: 1282096
uauuuaaucacuguagcca

SEQ ID NO: 1282098 - RNA, 19 nt, Artificial Sequence
  Description of Artificial Sequence: Synthetic oligonucleotide
  Sense strand starting at position 2988 of SEQ ID NO: 1241563
gcuuucuuacuacaagaug

SEQ ID NO: 1282099 - RNA, 19 nt, Artificial Sequence
  Description of Artificial Sequence: Synthetic oligonucleotide
  Antisense strand to SEQ ID NO: 1282098
caucuuguaguaagaaagc

SEQ ID NO: 1282100 - RNA, 19 nt, Artificial Sequence
  Description of Artificial Sequence: Synthetic oligonucleotide
  Sense strand starting at position 3159 of SEQ ID NO: 1241563
uaaucauuaccgggaagac

SEQ ID NO: 1282101 - RNA, 19 nt, Artificial Sequence
  Description of Artificial Sequence: Synthetic oligonucleotide
  Antisense strand to SEQ ID NO: 1282100
gucuucccgguaaugauua

SEQ ID NO: 1282102 - RNA, 19 nt, Artificial Sequence
  Description of Artificial Sequence: Synthetic oligonucleotide
  Sense strand starting at position 3178 of SEQ ID NO: 1241563
cacacuaguggucaguaaa

SEQ ID NO: 1282103 - RNA, 19 nt, Artificial Sequence
  Description of Artificial Sequence: Synthetic oligonucleotide
  Antisense strand to SEQ ID NO: 1282102
uuuacugaccacuagugug

SEQ ID NO: 1282104 - RNA, 19 nt, Artificial Sequence
  Description of Artificial Sequence: Synthetic oligonucleotide
  Sense strand starting at position 3181 of SEQ ID NO: 1241563
acuaguggucaguaaaccu

SEQ ID NO: 1282105 - RNA, 19 nt, Artificial Sequence
  Description of Artificial Sequence: Synthetic oligonucleotide
  Antisense strand to SEQ ID NO: 1282104
agguuuacugaccacuagu

SEQ ID NO: 1282106 - RNA, 19 nt, Artificial Sequence
  Description of Artificial Sequence: Synthetic oligonucleotide
  Sense strand starting at position 3210 of SEQ ID NO: 1241563
ucccaauaauguguggaga

SEQ ID NO: 1282107 - RNA, 19 nt, Artificial Sequence
  Description of Artificial Sequence: Synthetic oligonucleotide
  Antisense strand to SEQ ID NO: 1282106
ucuccacacauuauuggga

SEQ ID NO: 1282108 - RNA, 19 nt, Artificial Sequence
  Description of Artificial Sequence: Synthetic oligonucleotide
  Sense strand starting at position 3211 of SEQ ID NO: 1241563
cccaauaauguguggagaa

SEQ ID NO: 1282109 - RNA, 19 nt, Artificial Sequence
  Description of Artificial Sequence: Synthetic oligonucleotide
  Antisense strand to SEQ ID NO: 1282108
uucuccacacauuauuggg

SEQ ID NO: 1282110 - RNA, 19 nt, Artificial Sequence
  Description of Artificial Sequence: Synthetic oligonucleotide
  Sense strand starting at position 3213 of SEQ ID NO: 1241563
caauaauguguggagaagu

SEQ ID NO: 1282111 - RNA, 19 nt, Artificial Sequence
  Description of Artificial Sequence: Synthetic oligonucleotide
  Antisense strand to SEQ ID NO: 1282110
acuucuccacacauuauug

SEQ ID NO: 1282112 - RNA, 19 nt, Artificial Sequence
  Description of Artificial Sequence: Synthetic oligonucleotide
  Sense strand starting at position 3358 of SEQ ID NO: 1241563
aguuauuucgcaugugaua

SEQ ID NO: 1282113 - RNA, 19 nt, Artificial Sequence
  Description of Artificial Sequence: Synthetic oligonucleotide
  Antisense strand to SEQ ID NO: 1282112
uaucacaugcgaaauaacu

SEQ ID NO: 1282114 - RNA, 19 nt, Artificial Sequence
  Description of Artificial Sequence: Synthetic oligonucleotide
  Sense strand starting at position 3360 of SEQ ID NO: 1241563
uuauuucgcaugugauaga

SEQ ID NO: 1282115 - RNA, 19 nt, Artificial Sequence
  Description of Artificial Sequence: Synthetic oligonucleotide
  Antisense strand to SEQ ID NO: 1282114
ucuaucacaugcgaaauaa

SEQ ID NO: 1282116 - RNA, 19 nt, Artificial Sequence
  Description of Artificial Sequence: Synthetic oligonucleotide
  Sense strand starting at position 3597 of SEQ ID NO: 1241563
uggaaauaugauugucccu

SEQ ID NO: 1282117 - RNA, 19 nt, Artificial Sequence
  Description of Artificial Sequence: Synthetic oligonucleotide
  Antisense strand to SEQ ID NO: 1282116
agggacaaucauauuucca

SEQ ID NO: 1282118 - RNA, 19 nt, Artificial Sequence
  Description of Artificial Sequence: Synthetic oligonucleotide
  Sense strand starting at position 3602 of SEQ ID NO: 1241563
auaugauugucccuguaaa

SEQ ID NO: 1282119 - RNA, 19 nt, Artificial Sequence
  Description of Artificial Sequence: Synthetic oligonucleotide
  Antisense strand to SEQ ID NO: 1282118
uuuacagggacaaucauau

SEQ ID NO: 1282120 - RNA, 19 nt, Artificial Sequence
  Description of Artificial Sequence: Synthetic oligonucleotide
  Sense strand starting at position 3638 of SEQ ID NO: 1241563
gaugauauuuaguagggau

SEQ ID NO: 1282121 - RNA, 19 nt, Artificial Sequence
  Description of Artificial Sequence: Synthetic oligonucleotide
  Antisense strand to SEQ ID NO: 1282120
aucccuacuaaauaucauc

SEQ ID NO: 1282122 - RNA, 19 nt, Artificial Sequence
  Description of Artificial Sequence: Synthetic oligonucleotide
  Sense strand starting at position 12 of SEQ ID NO: 1241564
gguuccugggauuaagcaa

SEQ ID NO: 1282123 - RNA, 19 nt, Artificial Sequence
  Description of Artificial Sequence: Synthetic oligonucleotide
  Antisense strand to SEQ ID NO: 1282122
uugcuuaaucccaggaacc

SEQ ID NO: 1282124 - RNA, 19 nt, Artificial Sequence
  Description of Artificial Sequence: Synthetic oligonucleotide
  Sense strand starting at position 19 of SEQ ID NO: 1241564
gggauuaagcaaggcaauu

SEQ ID NO: 1282125 - RNA, 19 nt, Artificial Sequence
  Description of Artificial Sequence: Synthetic oligonucleotide
  Antisense strand to SEQ ID NO: 1282124
aauugccuugcuuaauccc

SEQ ID NO: 1282126 - RNA, 19 nt, Artificial Sequence
  Description of Artificial Sequence: Synthetic oligonucleotide
  Sense strand starting at position 30 of SEQ ID NO: 1241564
aggcaauuauggcugaguu

SEQ ID NO: 1282127 - RNA, 19 nt, Artificial Sequence
  Description of Artificial Sequence: Synthetic oligonucleotide
  Antisense strand to SEQ ID NO: 1282126
aacucagccauaauugccu

SEQ ID NO: 1282128 - RNA, 19 nt, Artificial Sequence
  Description of Artificial Sequence: Synthetic oligonucleotide
  Sense strand starting at position 31 of SEQ ID NO: 1241564
ggcaauuauggcugaguua

SEQ ID NO: 1282129 - RNA, 19 nt, Artificial Sequence
  Description of Artificial Sequence: Synthetic oligonucleotide
  Antisense strand to SEQ ID NO: 1282128
uaacucagccauaauugcc

SEQ ID NO: 1282130 - RNA, 19 nt, Artificial Sequence
  Description of Artificial Sequence: Synthetic oligonucleotide
  Sense strand starting at position 32 of SEQ ID NO: 1241564
gcaauuauggcugaguuaa

SEQ ID NO: 1282131 - RNA, 19 nt, Artificial Sequence
  Description of Artificial Sequence: Synthetic oligonucleotide
  Antisense strand to SEQ ID NO: 1282130
uuaacucagccauaauugc

SEQ ID NO: 1282132 - RNA, 19 nt, Artificial Sequence
  Description of Artificial Sequence: Synthetic oligonucleotide
  Sense strand starting at position 34 of SEQ ID NO: 1241564
aauuauggcugaguuaaag

SEQ ID NO: 1282133 - RNA, 19 nt, Artificial Sequence
  Description of Artificial Sequence: Synthetic oligonucleotide
  Antisense strand to SEQ ID NO: 1282132
cuuuaacucagccauaauu

SEQ ID NO: 1282134 - RNA, 19 nt, Artificial Sequence
  Description of Artificial Sequence: Synthetic oligonucleotide
  Sense strand starting at position 102 of SEQ ID NO: 1241564
gagggaaugcgccagcaau

SEQ ID NO: 1282135 - RNA, 19 nt, Artificial Sequence
  Description of Artificial Sequence: Synthetic oligonucleotide
  Antisense strand to SEQ ID NO: 1282134
auugcuggcgcauucccuc

SEQ ID NO: 1282136 - RNA, 19 nt, Artificial Sequence
  Description of Artificial Sequence: Synthetic oligonucleotide
  Sense strand starting at position 308 of SEQ ID NO: 1241564
gggucuccuuccuccuaua

SEQ ID NO: 1282137 - RNA, 19 nt, Artificial Sequence
  Description of Artificial Sequence: Synthetic oligonucleotide
  Antisense strand to SEQ ID NO: 1282136
uauaggaggaaggagaccc

SEQ ID NO: 1282138 - RNA, 19 nt, Artificial Sequence
  Description of Artificial Sequence: Synthetic oligonucleotide
  Sense strand starting at position 321 of SEQ ID NO: 1241564
ccuauauucugaguuccuu

SEQ ID NO: 1282139 - RNA, 19 nt, Artificial Sequence
  Description of Artificial Sequence: Synthetic oligonucleotide
  Antisense strand to SEQ ID NO: 1282138
aaggaacucagaauauagg

SEQ ID NO: 1282140 - RNA, 19 nt, Artificial Sequence
  Description of Artificial Sequence: Synthetic oligonucleotide
  Sense strand starting at position 576 of SEQ ID NO: 1241564
aggcgccucgucucagaua

SEQ ID NO: 1282141 - RNA, 19 nt, Artificial Sequence
  Description of Artificial Sequence: Synthetic oligonucleotide
  Antisense strand to SEQ ID NO: 1282140
uaucugagacgaggcgccu

SEQ ID NO: 1282142 - RNA, 19 nt, Artificial Sequence
  Description of Artificial Sequence: Synthetic oligonucleotide
  Sense strand starting at position 581 of SEQ ID NO: 1241564
ccucgucucagauaaagug

SEQ ID NO: 1282143 - RNA, 19 nt, Artificial Sequence
  Description of Artificial Sequence: Synthetic oligonucleotide
  Antisense strand to SEQ ID NO: 1282142
cacuuuaucugagacgagg

SEQ ID NO: 1282144 - RNA, 19 nt, Artificial Sequence
  Description of Artificial Sequence: Synthetic oligonucleotide
  Sense strand starting at position 1223 of SEQ ID NO: 1241564
augggugcucuuuggcaaa

SEQ ID NO: 1282145 - RNA, 19 nt, Artificial Sequence
  Description of Artificial Sequence: Synthetic oligonucleotide
  Antisense strand to SEQ ID NO: 1282144
uuugccaaagagcacccau

SEQ ID NO: 1282146 - RNA, 19 nt, Artificial Sequence
  Description of Artificial Sequence: Synthetic oligonucleotide
  Sense strand starting at position 1938 of SEQ ID NO: 1241564
gucagcuuccagggucuua

SEQ ID NO: 1282147 - RNA, 19 nt, Artificial Sequence
  Description of Artificial Sequence: Synthetic oligonucleotide
  Antisense strand to SEQ ID NO: 1282146
uaagacccuggaagcugac

SEQ ID NO: 1282148 - RNA, 19 nt, Artificial Sequence
  Description of Artificial Sequence: Synthetic oligonucleotide
  Sense strand starting at position 2133 of SEQ ID NO: 1241564
gagugaagcuacucaaccu

SEQ ID NO: 1282149 - RNA, 19 nt, Artificial Sequence
  Description of Artificial Sequence: Synthetic oligonucleotide
  Antisense strand to SEQ ID NO: 1282148
agguugaguagcuucacuc

SEQ ID NO: 1282150 - RNA, 19 nt, Artificial Sequence
  Description of Artificial Sequence: Synthetic oligonucleotide
  Sense strand starting at position 2348 of SEQ ID NO: 1241564
aagguuaacgccgggaaga

SEQ ID NO: 1282151 - RNA, 19 nt, Artificial Sequence
  Description of Artificial Sequence: Synthetic oligonucleotide
  Antisense strand to SEQ ID NO: 1282150
ucuucccggcguuaaccuu

SEQ ID NO: 1282152 - RNA, 19 nt, Artificial Sequence
  Description of Artificial Sequence: Synthetic oligonucleotide
  Sense strand starting at position 2349 of SEQ ID NO: 1241564
agguuaacgccgggaagaa

SEQ ID NO: 1282153 - RNA, 19 nt, Artificial Sequence
  Description of Artificial Sequence: Synthetic oligonucleotide
  Antisense strand to SEQ ID NO: 1282152
uucuucccggcguuaaccu

SEQ ID NO: 1282154 - RNA, 19 nt, Artificial Sequence
  Description of Artificial Sequence: Synthetic oligonucleotide
  Sense strand starting at position 2350 of SEQ ID NO: 1241564
gguuaacgccgggaagaaa

SEQ ID NO: 1282155 - RNA, 19 nt, Artificial Sequence
  Description of Artificial Sequence: Synthetic oligonucleotide
  Antisense strand to SEQ ID NO: 1282154
uuucuucccggcguuaacc

SEQ ID NO: 1282156 - RNA, 19 nt, Artificial Sequence
  Description of Artificial Sequence: Synthetic oligonucleotide
  Sense strand starting at position 2510 of SEQ ID NO: 1241564
caugaaagcuagguagagu

SEQ ID NO: 1282157 - RNA, 19 nt, Artificial Sequence
  Description of Artificial Sequence: Synthetic oligonucleotide
  Antisense strand to SEQ ID NO: 1282156
acucuaccuagcuuucaug

SEQ ID NO: 1282158 - RNA, 19 nt, Artificial Sequence
  Description of Artificial Sequence: Synthetic oligonucleotide
  Sense strand starting at position 2610 of SEQ ID NO: 1241564
ggcauaacuucucuggagu

SEQ ID NO: 1282159 - RNA, 19 nt, Artificial Sequence
  Description of Artificial Sequence: Synthetic oligonucleotide
  Antisense strand to SEQ ID NO: 1282158
acuccagagaaguuaugcc

SEQ ID NO: 1282160 - RNA, 19 nt, Artificial Sequence
  Description of Artificial Sequence: Synthetic oligonucleotide
  Sense strand starting at position 2611 of SEQ ID NO: 1241564
gcauaacuucucuggaguc

SEQ ID NO: 1282161 - RNA, 19 nt, Artificial Sequence
  Description of Artificial Sequence: Synthetic oligonucleotide
  Antisense strand to SEQ ID NO: 1282160
gacuccagagaaguuaugc

SEQ ID NO: 1282162 - RNA, 19 nt, Artificial Sequence
  Description of Artificial Sequence: Synthetic oligonucleotide
  Sense strand starting at position 2966 of SEQ ID NO: 1241564
ugaacucaguguucuuauc

SEQ ID NO: 1282163 - RNA, 19 nt, Artificial Sequence
  Description of Artificial Sequence: Synthetic oligonucleotide
  Antisense strand to SEQ ID NO: 1282162
gauaagaacacugaguuca

SEQ ID NO: 1282164 - RNA, 19 nt, Artificial Sequence
  Description of Artificial Sequence: Synthetic oligonucleotide
  Sense strand starting at position 3123 of SEQ ID NO: 1241564
uggaguugggacuguggaa

SEQ ID NO: 1282165 - RNA, 19 nt, Artificial Sequence
  Description of Artificial Sequence: Synthetic oligonucleotide
  Antisense strand to SEQ ID NO: 1282164
uuccacagucccaacucca

SEQ ID NO: 1282166 - RNA, 19 nt, Artificial Sequence
  Description of Artificial Sequence: Synthetic oligonucleotide
  Sense strand starting at position 3136 of SEQ ID NO: 1241564
guggaauuauagguccagu

SEQ ID NO: 1282167 - RNA, 19 nt, Artificial Sequence
  Description of Artificial Sequence: Synthetic oligonucleotide
  Antisense strand to SEQ ID NO: 1282166
acuggaccuauaauuccac

SEQ ID NO: 1282168 - RNA, 19 nt, Artificial Sequence
  Description of Artificial Sequence: Synthetic oligonucleotide
  Sense strand starting at position 3294 of SEQ ID NO: 1241564
gguacuguuguaaggguuu

SEQ ID NO: 1282169 - RNA, 19 nt, Artificial Sequence
  Description of Artificial Sequence: Synthetic oligonucleotide
  Antisense strand to SEQ ID NO: 1282168
aaacccuuacaacaguacc

SEQ ID NO: 1282170 - RNA, 19 nt, Artificial Sequence
  Description of Artificial Sequence: Synthetic oligonucleotide
  Sense strand starting at position 3333 of SEQ ID NO: 1241564
auacaaccaucagaggaau

SEQ ID NO: 1282171 - RNA, 19 nt, Artificial Sequence
  Description of Artificial Sequence: Synthetic oligonucleotide
  Antisense strand to SEQ ID NO: 1282170
auuccucugaugguuguau

SEQ ID NO: 1282172 - RNA, 19 nt, Artificial Sequence
  Description of Artificial Sequence: Synthetic oligonucleotide
  Sense strand starting at position 3352 of SEQ ID NO: 1241564
agagacuauuaugucuagu

SEQ ID NO: 1282173 - RNA, 19 nt, Artificial Sequence
  Description of Artificial Sequence: Synthetic oligonucleotide
  Antisense strand to SEQ ID NO: 1282172
acuagacauaauagucucu

SEQ ID NO: 1282174 - RNA, 19 nt, Artificial Sequence
  Description of Artificial Sequence: Synthetic oligonucleotide
  Sense strand starting at position 3354 of SEQ ID NO: 1241564
agacuauuaugucuaguuu

SEQ ID NO: 1282175 - RNA, 19 nt, Artificial Sequence
  Description of Artificial Sequence: Synthetic oligonucleotide
  Antisense strand to SEQ ID NO: 1282174
aaacuagacauaauagucu

SEQ ID NO: 1282176 - RNA, 19 nt, Artificial Sequence
  Description of Artificial Sequence: Synthetic oligonucleotide
  Sense strand starting at position 3461 of SEQ ID NO: 1241564
acaguuuagcucuagaguc

SEQ ID NO: 1282177 - RNA, 19 nt, Artificial Sequence
  Description of Artificial Sequence: Synthetic oligonucleotide
  Antisense strand to SEQ ID NO: 1282176
gacucuagagcuaaacugu

SEQ ID NO: 1282178 - RNA, 19 nt, Artificial Sequence
  Description of Artificial Sequence: Synthetic oligonucleotide
  Sense strand starting at position 3483 of SEQ ID NO: 1241564
gcucuuacccgcuugguua

SEQ ID NO: 1282179 - RNA, 19 nt, Artificial Sequence
  Description of Artificial Sequence: Synthetic oligonucleotide
  Antisense strand to SEQ ID NO: 1282178
uaaccaagcggguaagagc

SEQ ID NO: 1282180 - RNA, 19 nt, Artificial Sequence
  Description of Artificial Sequence: Synthetic oligonucleotide
  Sense strand starting at position 3534 of SEQ ID NO: 1241564
acauccucagaguguuaaa

SEQ ID NO: 1282181 - RNA, 19 nt, Artificial Sequence
  Description of Artificial Sequence: Synthetic oligonucleotide
  Antisense strand to SEQ ID NO: 1282180
uuuaacacucugaggaugu

SEQ ID NO: 1282182 - RNA, 19 nt, Artificial Sequence
  Description of Artificial Sequence: Synthetic oligonucleotide
  Sense strand starting at position 3554 of SEQ ID NO: 1241564
gagggaauauuagaguaga

SEQ ID NO: 1282183 - RNA, 19 nt, Artificial Sequence
  Description of Artificial Sequence: Synthetic oligonucleotide
  Antisense strand to SEQ ID NO: 1282182
ucuacucuaauauucccuc

SEQ ID NO: 1282184 - RNA, 19 nt, Artificial Sequence
  Description of Artificial Sequence: Synthetic oligonucleotide
  Sense strand starting at position 3594 of SEQ ID NO: 1241564
gcagcaggauaguuuaacu

SEQ ID NO: 1282185 - RNA, 19 nt, Artificial Sequence
  Description of Artificial Sequence: Synthetic oligonucleotide
  Antisense strand to SEQ ID NO: 1282184
aguuaaacuauccugcugc

SEQ ID NO: 1282186 - RNA, 19 nt, Artificial Sequence
  Description of Artificial Sequence: Synthetic oligonucleotide
  Sense strand starting at position 3599 of SEQ ID NO: 1241564
aggauaguuuaacuguaaa

SEQ ID NO: 1282187 - RNA, 19 nt, Artificial Sequence
  Description of Artificial Sequence: Synthetic oligonucleotide
  Antisense strand to SEQ ID NO: 1282186
uuuacaguuaaacuauccu

SEQ ID NO: 1282188 - RNA, 19 nt, Artificial Sequence
  Description of Artificial Sequence: Synthetic oligonucleotide
  Sense strand starting at position 3650 of SEQ ID NO: 1241564
agacacauguuaucuuauu

SEQ ID NO: 1282189 - RNA, 19 nt, Artificial Sequence
  Description of Artificial Sequence: Synthetic oligonucleotide
  Antisense strand to SEQ ID NO: 1282188
aauaagauaacaugugucu

SEQ ID NO: 1282190 - RNA, 19 nt, Artificial Sequence
  Description of Artificial Sequence: Synthetic oligonucleotide
  Sense strand starting at position 3693 of SEQ ID NO: 1241564
augcauucgcacuaguauu

SEQ ID NO: 1282191 - RNA, 19 nt, Artificial Sequence
  Description of Artificial Sequence: Synthetic oligonucleotide
  Antisense strand to SEQ ID NO: 1282190
aauacuagugcgaaugcau

SEQ ID NO: 1282192 - RNA, 19 nt, Artificial Sequence
  Description of Artificial Sequence: Synthetic oligonucleotide
  Sense strand starting at position 3703 of SEQ ID NO: 1241564
acuaguauugacuguagca

SEQ ID NO: 1282193 - RNA, 19 nt, Artificial Sequence
  Description of Artificial Sequence: Synthetic oligonucleotide
  Antisense strand to SEQ ID NO: 1282192
ugcuacagucaauacuagu

SEQ ID NO: 1282194 - RNA, 19 nt, Artificial Sequence
  Description of Artificial Sequence: Synthetic oligonucleotide
  Sense strand starting at position 3705 of SEQ ID NO: 1241564
uaguauugacuguagcaau

SEQ ID NO: 1282195 - RNA, 19 nt, Artificial Sequence
  Description of Artificial Sequence: Synthetic oligonucleotide
  Antisense strand to SEQ ID NO: 1282194
auugcuacagucaauacua

SEQ ID NO: 1282196 - RNA, 19 nt, Artificial Sequence
  Description of Artificial Sequence: Synthetic oligonucleotide
  Sense strand starting at position 3724 of SEQ ID NO: 1241564
acuaguuagcuaggacuca

SEQ ID NO: 1282197 - RNA, 19 nt, Artificial Sequence
  Description of Artificial Sequence: Synthetic oligonucleotide
  Antisense strand to SEQ ID NO: 1282196
ugaguccuagcuaacuagu

SEQ ID NO: 1282198 - RNA, 19 nt, Artificial Sequence
  Description of Artificial Sequence: Synthetic oligonucleotide
  Sense strand starting at position 3781 of SEQ ID NO: 1241564
uauagaaugcauggaugua

SEQ ID NO: 1282199 - RNA, 19 nt, Artificial Sequence
  Description of Artificial Sequence: Synthetic oligonucleotide
  Antisense strand to SEQ ID NO: 1282198
uacauccaugcauucuaua

SEQ ID NO: 1282200 - RNA, 19 nt, Artificial Sequence
  Description of Artificial Sequence: Synthetic oligonucleotide
  Sense strand starting at position 3808 of SEQ ID NO: 1241564
guaucauuauaugugauac

SEQ ID NO: 1282201 - RNA, 19 nt, Artificial Sequence
  Description of Artificial Sequence: Synthetic oligonucleotide
  Antisense strand to SEQ ID NO: 1282200
guaucacauauaaugauac

SEQ ID NO: 1282202 - RNA, 19 nt, Artificial Sequence
  Description of Artificial Sequence: Synthetic oligonucleotide
  Sense strand starting at position 82 of SEQ ID NO: 1241565
ccaccacuaccggguaauu

SEQ ID NO: 1282203 - RNA, 19 nt, Artificial Sequence
  Description of Artificial Sequence: Synthetic oligonucleotide
  Antisense strand to SEQ ID NO: 1282202
aauuacccgguaguggugg

SEQ ID NO: 1282204 - RNA, 19 nt, Artificial Sequence
  Description of Artificial Sequence: Synthetic oligonucleotide
  Sense strand starting at position 738 of SEQ ID NO: 1241565
acaccuucuuuagauuagu

SEQ ID NO: 1282205 - RNA, 19 nt, Artificial Sequence
  Description of Artificial Sequence: Synthetic oligonucleotide
  Antisense strand to SEQ ID NO: 1282204
acuaaucuaaagaaggugu

SEQ ID NO: 1282206 - RNA, 19 nt, Artificial Sequence
  Description of Artificial Sequence: Synthetic oligonucleotide
  Sense strand starting at position 741 of SEQ ID NO: 1241565
ccuucuuuagauuagugga

SEQ ID NO: 1282207 - RNA, 19 nt, Artificial Sequence
  Description of Artificial Sequence: Synthetic oligonucleotide
  Antisense strand to SEQ ID NO: 1282206
uccacuaaucuaaagaagg

SEQ ID NO: 1282208 - RNA, 19 nt, Artificial Sequence
  Description of Artificial Sequence: Synthetic oligonucleotide
  Sense strand starting at position 744 of SEQ ID NO: 1241565
ucuuuagauuaguggacuu

SEQ ID NO: 1282209 - RNA, 19 nt, Artificial Sequence
  Description of Artificial Sequence: Synthetic oligonucleotide
  Antisense strand to SEQ ID NO: 1282208
aaguccacuaaucuaaaga

SEQ ID NO: 1282210 - RNA, 19 nt, Artificial Sequence
  Description of Artificial Sequence: Synthetic oligonucleotide
  Sense strand starting at position 1136 of SEQ ID NO: 1241565
gcggguguggaauaggaaa

SEQ ID NO: 1282211 - RNA, 19 nt, Artificial Sequence
  Description of Artificial Sequence: Synthetic oligonucleotide
  Antisense strand to SEQ ID NO: 1282210
uuuccuauuccacacccgc

SEQ ID NO: 1282212 - RNA, 19 nt, Artificial Sequence
  Description of Artificial Sequence: Synthetic oligonucleotide
  Sense strand starting at position 1163 of SEQ ID NO: 1241565
uaacgagguuaguuaauaa

SEQ ID NO: 1282213 - RNA, 19 nt, Artificial Sequence
  Description of Artificial Sequence: Synthetic oligonucleotide
  Antisense strand to SEQ ID NO: 1282212
uuauuaacuaaccucguua

SEQ ID NO: 1282214 - RNA, 19 nt, Artificial Sequence
  Description of Artificial Sequence: Synthetic oligonucleotide
  Sense strand starting at position 1167 of SEQ ID NO: 1241565
gagguuaguuaauaagcaa

SEQ ID NO: 1282215 - RNA, 19 nt, Artificial Sequence
  Description of Artificial Sequence: Synthetic oligonucleotide
  Antisense strand to SEQ ID NO: 1282214
uugcuuauuaacuaaccuc

SEQ ID NO: 1282216 - RNA, 19 nt, Artificial Sequence
  Description of Artificial Sequence: Synthetic oligonucleotide
  Sense strand starting at position 1170 of SEQ ID NO: 1241565
guuaguuaauaagcaaugu

SEQ ID NO: 1282217 - RNA, 19 nt, Artificial Sequence
  Description of Artificial Sequence: Synthetic oligonucleotide
  Antisense strand to SEQ ID NO: 1282216
acauugcuuauuaacuaac

SEQ ID NO: 1282218 - RNA, 19 nt, Artificial Sequence
  Description of Artificial Sequence: Synthetic oligonucleotide
  Sense strand starting at position 1174 of SEQ ID NO: 1241565
guuaauaagcaaugugaag

SEQ ID NO: 1282219 - RNA, 19 nt, Artificial Sequence
  Description of Artificial Sequence: Synthetic oligonucleotide
  Antisense strand to SEQ ID NO: 1282218
cuucacauugcuuauuaac

SEQ ID NO: 1282220 - RNA, 19 nt, Artificial Sequence
  Description of Artificial Sequence: Synthetic oligonucleotide
  Sense strand starting at position 1357 of SEQ ID NO: 1241565
cauggaagucagugacuaa

SEQ ID NO: 1282221 - RNA, 19 nt, Artificial Sequence
  Description of Artificial Sequence: Synthetic oligonucleotide
  Antisense strand to SEQ ID NO: 1282220
uuagucacugacuuccaug

SEQ ID NO: 1282222 - RNA, 19 nt, Artificial Sequence
  Description of Artificial Sequence: Synthetic oligonucleotide
  Sense strand starting at position 1361 of SEQ ID NO: 1241565
gaagucagugacuaaagcu

SEQ ID NO: 1282223 - RNA, 19 nt, Artificial Sequence
  Description of Artificial Sequence: Synthetic oligonucleotide
  Antisense strand to SEQ ID NO: 1282222
agcuuuagucacugacuuc

SEQ ID NO: 1282224 - RNA, 19 nt, Artificial Sequence
  Description of Artificial Sequence: Synthetic oligonucleotide
  Sense strand starting at position 1407 of SEQ ID NO: 1241565
ccaggaaaguuugggucaa

SEQ ID NO: 1282225 - RNA, 19 nt, Artificial Sequence
  Description of Artificial Sequence: Synthetic oligonucleotide
  Antisense strand to SEQ ID NO: 1282224
uugacccaaacuuuccugg

SEQ ID NO: 1282226 - RNA, 19 nt, Artificial Sequence
  Description of Artificial Sequence: Synthetic oligonucleotide
  Sense strand starting at position 1408 of SEQ ID NO: 1241565
caggaaaguuugggucaaa

SEQ ID NO: 1282227 - RNA, 19 nt, Artificial Sequence
  Description of Artificial Sequence: Synthetic oligonucleotide
  Antisense strand to SEQ ID NO: 1282226
uuugacccaaacuuuccug

SEQ ID NO: 1282228 - RNA, 19 nt, Artificial Sequence
  Description of Artificial Sequence: Synthetic oligonucleotide
  Sense strand starting at position 1409 of SEQ ID NO: 1241565
aggaaaguuugggucaaac

SEQ ID NO: 1282229 - RNA, 19 nt, Artificial Sequence
  Description of Artificial Sequence: Synthetic oligonucleotide
  Antisense strand to SEQ ID NO: 1282228
guuugacccaaacuuuccu

SEQ ID NO: 1282230 - RNA, 19 nt, Artificial Sequence
  Description of Artificial Sequence: Synthetic oligonucleotide
  Sense strand starting at position 1420 of SEQ ID NO: 1241565
ggucaaaccuaucgggauc

SEQ ID NO: 1282231 - RNA, 19 nt, Artificial Sequence
  Description of Artificial Sequence: Synthetic oligonucleotide
  Antisense strand to SEQ ID NO: 1282230
gaucccgauagguuugacc

SEQ ID NO: 1282232 - RNA, 19 nt, Artificial Sequence
  Description of Artificial Sequence: Synthetic oligonucleotide
  Sense strand starting at position 1460 of SEQ ID NO: 1241565
ccuccuuugucgggagguu

SEQ ID NO: 1282233 - RNA, 19 nt, Artificial Sequence
  Description of Artificial Sequence: Synthetic oligonucleotide
  Antisense strand to SEQ ID NO: 1282232
aaccucccgacaaaggagg

SEQ ID NO: 1282234 - RNA, 19 nt, Artificial Sequence
  Description of Artificial Sequence: Synthetic oligonucleotide
  Sense strand starting at position 1461 of SEQ ID NO: 1241565
cuccuuugucgggagguuu

SEQ ID NO: 1282235 - RNA, 19 nt, Artificial Sequence
  Description of Artificial Sequence: Synthetic oligonucleotide
  Antisense strand to SEQ ID NO: 1282234
aaaccucccgacaaaggag

SEQ ID NO: 1282236 - RNA, 19 nt, Artificial Sequence
  Description of Artificial Sequence: Synthetic oligonucleotide
  Sense strand starting at position 1624 of SEQ ID NO: 1241565
cgaagaacuucuuuccagu

SEQ ID NO: 1282237 - RNA, 19 nt, Artificial Sequence
  Description of Artificial Sequence: Synthetic oligonucleotide
  Antisense strand to SEQ ID NO: 1282236
acuggaaagaaguucuucg

SEQ ID NO: 1282238 - RNA, 19 nt, Artificial Sequence
  Description of Artificial Sequence: Synthetic oligonucleotide
  Sense strand starting at position 1775 of SEQ ID NO: 1241565
ggcggaagucuuggcuaaa

SEQ ID NO: 1282239 - RNA, 19 nt, Artificial Sequence
  Description of Artificial Sequence: Synthetic oligonucleotide
  Antisense strand to SEQ ID NO: 1282238
uuuagccaagacuuccgcc

SEQ ID NO: 1282240 - RNA, 19 nt, Artificial Sequence
  Description of Artificial Sequence: Synthetic oligonucleotide
  Sense strand starting at position 1776 of SEQ ID NO: 1241565
gcggaagucuuggcuaaag

SEQ ID NO: 1282241 - RNA, 19 nt, Artificial Sequence
  Description of Artificial Sequence: Synthetic oligonucleotide
  Antisense strand to SEQ ID NO: 1282240
cuuuagccaagacuuccgc

SEQ ID NO: 1282242 - RNA, 19 nt, Artificial Sequence
  Description of Artificial Sequence: Synthetic oligonucleotide
  Sense strand starting at position 1812 of SEQ ID NO: 1241565
gucacugccgcggagaaua

SEQ ID NO: 1282243 - RNA, 19 nt, Artificial Sequence
  Description of Artificial Sequence: Synthetic oligonucleotide
  Antisense strand to SEQ ID NO: 1282242
uauucuccgcggcagugac

SEQ ID NO: 1282244 - RNA, 19 nt, Artificial Sequence
  Description of Artificial Sequence: Synthetic oligonucleotide
  Sense strand starting at position 1946 of SEQ ID NO: 1241565
uccuuuaucgugugccuuu

SEQ ID NO: 1282245 - RNA, 19 nt, Artificial Sequence
  Description of Artificial Sequence: Synthetic oligonucleotide
  Antisense strand to SEQ ID NO: 1282244
aaaggcacacgauaaagga

SEQ ID NO: 1282246 - RNA, 19 nt, Artificial Sequence
  Description of Artificial Sequence: Synthetic oligonucleotide
  Sense strand starting at position 2585 of SEQ ID NO: 1241565
agcugugauccacgugagu

SEQ ID NO: 1282247 - RNA, 19 nt, Artificial Sequence
  Description of Artificial Sequence: Synthetic oligonucleotide
  Antisense strand to SEQ ID NO: 1282246
acucacguggaucacagcu

SEQ ID NO: 1282248 - RNA, 19 nt, Artificial Sequence
  Description of Artificial Sequence: Synthetic oligonucleotide
  Sense strand starting at position 2587 of SEQ ID NO: 1241565
cugugauccacgugaguaa

SEQ ID NO: 1282249 - RNA, 19 nt, Artificial Sequence
  Description of Artificial Sequence: Synthetic oligonucleotide
  Antisense strand to SEQ ID NO: 1282248
uuacucacguggaucacag

SEQ ID NO: 1282250 - RNA, 19 nt, Artificial Sequence
  Description of Artificial Sequence: Synthetic oligonucleotide
  Sense strand starting at position 2588 of SEQ ID NO: 1241565
ugugauccacgugaguaaa

SEQ ID NO: 1282251 - RNA, 19 nt, Artificial Sequence
  Description of Artificial Sequence: Synthetic oligonucleotide
  Antisense strand to SEQ ID NO: 1282250
uuuacucacguggaucaca

SEQ ID NO: 1282252 - RNA, 19 nt, Artificial Sequence
  Description of Artificial Sequence: Synthetic oligonucleotide
  Sense strand starting at position 3906 of SEQ ID NO: 1241565
caugguuugagagguaauu

SEQ ID NO: 1282253 - RNA, 19 nt, Artificial Sequence
  Description of Artificial Sequence: Synthetic oligonucleotide
  Antisense strand to SEQ ID NO: 1282252
aauuaccucucaaaccaug

SEQ ID NO: 1282254 - RNA, 19 nt, Artificial Sequence
  Description of Artificial Sequence: Synthetic oligonucleotide
  Sense strand starting at position 75 of SEQ ID NO: 1241566
cuggguuugagguguggga

SEQ ID NO: 1282255 - RNA, 19 nt, Artificial Sequence
  Description of Artificial Sequence: Synthetic oligonucleotide
  Antisense strand to SEQ ID NO: 1282254
ucccacaccucaaacccag

SEQ ID NO: 1282256 - RNA, 19 nt, Artificial Sequence
  Description of Artificial Sequence: Synthetic oligonucleotide
  Sense strand starting at position 77 of SEQ ID NO: 1241566
ggguuugaggugugggaaa

SEQ ID NO: 1282257 - RNA, 19 nt, Artificial Sequence
  Description of Artificial Sequence: Synthetic oligonucleotide
  Antisense strand to SEQ ID NO: 1282256
uuucccacaccucaaaccc

SEQ ID NO: 1282258 - RNA, 19 nt, Artificial Sequence
  Description of Artificial Sequence: Synthetic oligonucleotide
  Sense strand starting at position 79 of SEQ ID NO: 1241566
guuugaggugugggaaaug

SEQ ID NO: 1282259 - RNA, 19 nt, Artificial Sequence
  Description of Artificial Sequence: Synthetic oligonucleotide
  Antisense strand to SEQ ID NO: 1282258
cauuucccacaccucaaac

SEQ ID NO: 1282260 - RNA, 19 nt, Artificial Sequence
  Description of Artificial Sequence: Synthetic oligonucleotide
  Sense strand starting at position 84 of SEQ ID NO: 1241566
aggugugggaaaugaacuu

SEQ ID NO: 1282261 - RNA, 19 nt, Artificial Sequence
  Description of Artificial Sequence: Synthetic oligonucleotide
  Antisense strand to SEQ ID NO: 1282260
aaguucauuucccacaccu

SEQ ID NO: 1282262 - RNA, 19 nt, Artificial Sequence
  Description of Artificial Sequence: Synthetic oligonucleotide
  Sense strand starting at position 739 of SEQ ID NO: 1241566
agaagauucuaggcuuuau

SEQ ID NO: 1282263 - RNA, 19 nt, Artificial Sequence
  Description of Artificial Sequence: Synthetic oligonucleotide
  Antisense strand to SEQ ID NO: 1282262
auaaagccuagaaucuucu

SEQ ID NO: 1282264 - RNA, 19 nt, Artificial Sequence
  Description of Artificial Sequence: Synthetic oligonucleotide
  Sense strand starting at position 807 of SEQ ID NO: 1241566
gucaauauuugaugacagu

SEQ ID NO: 1282265 - RNA, 19 nt, Artificial Sequence
  Description of Artificial Sequence: Synthetic oligonucleotide
  Antisense strand to SEQ ID NO: 1282264
acugucaucaaauauugac

SEQ ID NO: 1282266 - RNA, 19 nt, Artificial Sequence
  Description of Artificial Sequence: Synthetic oligonucleotide
  Sense strand starting at position 817 of SEQ ID NO: 1241566
gaugacaguuaccucugau

SEQ ID NO: 1282267 - RNA, 19 nt, Artificial Sequence
  Description of Artificial Sequence: Synthetic oligonucleotide
  Antisense strand to SEQ ID NO: 1282266
aucagagguaacugucauc

SEQ ID NO: 1282268 - RNA, 19 nt, Artificial Sequence
  Description of Artificial Sequence: Synthetic oligonucleotide
  Sense strand starting at position 894 of SEQ ID NO: 1241566
ccugguaaacaucaagcaa

SEQ ID NO: 1282269 - RNA, 19 nt, Artificial Sequence
  Description of Artificial Sequence: Synthetic oligonucleotide
  Antisense strand to SEQ ID NO: 1282268
uugcuugauguuuaccagg

SEQ ID NO: 1282270 - RNA, 19 nt, Artificial Sequence
  Description of Artificial Sequence: Synthetic oligonucleotide
  Sense strand starting at position 914 of SEQ ID NO: 1241566
gucaauuagucuucucacu

SEQ ID NO: 1282271 - RNA, 19 nt, Artificial Sequence
  Description of Artificial Sequence: Synthetic oligonucleotide
  Antisense strand to SEQ ID NO: 1282270
agugagaagacuaauugac

SEQ ID NO: 1282272 - RNA, 19 nt, Artificial Sequence
  Description of Artificial Sequence: Synthetic oligonucleotide
  Sense strand starting at position 1034 of SEQ ID NO: 1241566
uaucauaccguuuaggauu

SEQ ID NO: 1282273 - RNA, 19 nt, Artificial Sequence
  Description of Artificial Sequence: Synthetic oligonucleotide
  Antisense strand to SEQ ID NO: 1282272
aauccuaaacgguaugaua

SEQ ID NO: 1282274 - RNA, 19 nt, Artificial Sequence
  Description of Artificial Sequence: Synthetic oligonucleotide
  Sense strand starting at position 1045 of SEQ ID NO: 1241566
uuaggauuccaacagugca

SEQ ID NO: 1282275 - RNA, 19 nt, Artificial Sequence
  Description of Artificial Sequence: Synthetic oligonucleotide
  Antisense strand to SEQ ID NO: 1282274
ugcacuguuggaauccuaa

SEQ ID NO: 1282276 - RNA, 19 nt, Artificial Sequence
  Description of Artificial Sequence: Synthetic oligonucleotide
  Sense strand starting at position 1100 of SEQ ID NO: 1241566
aucugcauuugagguugaa

SEQ ID NO: 1282277 - RNA, 19 nt, Artificial Sequence
  Description of Artificial Sequence: Synthetic oligonucleotide
  Antisense strand to SEQ ID NO: 1282276
uucaaccucaaaugcagau

SEQ ID NO: 1282278 - RNA, 19 nt, Artificial Sequence
  Description of Artificial Sequence: Synthetic oligonucleotide
  Sense strand starting at position 1206 of SEQ ID NO: 1241566
cccuaaacccuaugaguga

SEQ ID NO: 1282279 - RNA, 19 nt, Artificial Sequence
  Description of Artificial Sequence: Synthetic oligonucleotide
  Antisense strand to SEQ ID NO: 1282278
ucacucauaggguuuaggg

SEQ ID NO: 1282280 - RNA, 19 nt, Artificial Sequence
  Description of Artificial Sequence: Synthetic oligonucleotide
  Sense strand starting at position 1236 of SEQ ID NO: 1241566
gugauaaugaaacgcuaca

SEQ ID NO: 1282281 - RNA, 19 nt, Artificial Sequence
  Description of Artificial Sequence: Synthetic oligonucleotide
  Antisense strand to SEQ ID NO: 1282280
uguagcguuucauuaucac

SEQ ID NO: 1282282 - RNA, 19 nt, Artificial Sequence
  Description of Artificial Sequence: Synthetic oligonucleotide
  Sense strand starting at position 1339 of SEQ ID NO: 1241566
ccaggauaauaauaguguu

SEQ ID NO: 1282283 - RNA, 19 nt, Artificial Sequence
  Description of Artificial Sequence: Synthetic oligonucleotide
  Antisense strand to SEQ ID NO: 1282282
aacacuauuauuauccugg

SEQ ID NO: 1282284 - RNA, 19 nt, Artificial Sequence
  Description of Artificial Sequence: Synthetic oligonucleotide
  Sense strand starting at position 1345 of SEQ ID NO: 1241566
uaauaauaguguucgagag

SEQ ID NO: 1282285 - RNA, 19 nt, Artificial Sequence
  Description of Artificial Sequence: Synthetic oligonucleotide
  Antisense strand to SEQ ID NO: 1282284
cucucgaacacuauuauua

SEQ ID NO: 1282286 - RNA, 19 nt, Artificial Sequence
  Description of Artificial Sequence: Synthetic oligonucleotide
  Sense strand starting at position 1386 of SEQ ID NO: 1241566
ggcagagaauuccuuacca

SEQ ID NO: 1282287 - RNA, 19 nt, Artificial Sequence
  Description of Artificial Sequence: Synthetic oligonucleotide
  Antisense strand to SEQ ID NO: 1282286
ugguaaggaauucucugcc

SEQ ID NO: 1282288 - RNA, 19 nt, Artificial Sequence
  Description of Artificial Sequence: Synthetic oligonucleotide
  Sense strand starting at position 2020 of SEQ ID NO: 1241566
gggacugagucuuucgcuu

SEQ ID NO: 1282289 - RNA, 19 nt, Artificial Sequence
  Description of Artificial Sequence: Synthetic oligonucleotide
  Antisense strand to SEQ ID NO: 1282288
aagcgaaagacucaguccc

SEQ ID NO: 1282290 - RNA, 19 nt, Artificial Sequence
  Description of Artificial Sequence: Synthetic oligonucleotide
  Sense strand starting at position 2487 of SEQ ID NO: 1241566
gagcgugagacguaggaaa

SEQ ID NO: 1282291 - RNA, 19 nt, Artificial Sequence
  Description of Artificial Sequence: Synthetic oligonucleotide
  Antisense strand to SEQ ID NO: 1282290
uuuccuacgucucacgcuc

SEQ ID NO: 1282292 - RNA, 19 nt, Artificial Sequence
  Description of Artificial Sequence: Synthetic oligonucleotide
  Sense strand starting at position 2489 of SEQ ID NO: 1241566
gcgugagacguaggaaaug

SEQ ID NO: 1282293 - RNA, 19 nt, Artificial Sequence
  Description of Artificial Sequence: Synthetic oligonucleotide
  Antisense strand to SEQ ID NO: 1282292
cauuuccuacgucucacgc

SEQ ID NO: 1282294 - RNA, 19 nt, Artificial Sequence
  Description of Artificial Sequence: Synthetic oligonucleotide
  Sense strand starting at position 2591 of SEQ ID NO: 1241566
gcucucguugcagucaaga

SEQ ID NO: 1282295 - RNA, 19 nt, Artificial Sequence
  Description of Artificial Sequence: Synthetic oligonucleotide
  Antisense strand to SEQ ID NO: 1282294
ucuugacugcaacgagagc

SEQ ID NO: 1282296 - RNA, 19 nt, Artificial Sequence
  Description of Artificial Sequence: Synthetic oligonucleotide
  Sense strand starting at position 2593 of SEQ ID NO: 1241566
ucucguugcagucaagagu

SEQ ID NO: 1282297 - RNA, 19 nt, Artificial Sequence
  Description of Artificial Sequence: Synthetic oligonucleotide
  Antisense strand to SEQ ID NO: 1282296
acucuugacugcaacgaga

SEQ ID NO: 1282298 - RNA, 19 nt, Artificial Sequence
  Description of Artificial Sequence: Synthetic oligonucleotide
  Sense strand starting at position 3152 of SEQ ID NO: 1241566
gcaguuucucccgcaaggu

SEQ ID NO: 1282299 - RNA, 19 nt, Artificial Sequence
  Description of Artificial Sequence: Synthetic oligonucleotide
  Antisense strand to SEQ ID NO: 1282298
accuugcgggagaaacugc

SEQ ID NO: 1282300 - RNA, 19 nt, Artificial Sequence
  Description of Artificial Sequence: Synthetic oligonucleotide
  Sense strand starting at position 3421 of SEQ ID NO: 1241566
gaucauaaauggugaggaa

SEQ ID NO: 1282301 - RNA, 19 nt, Artificial Sequence
  Description of Artificial Sequence: Synthetic oligonucleotide
  Antisense strand to SEQ ID NO: 1282300
uuccucaccauuuaugauc

SEQ ID NO: 1282302 - RNA, 19 nt, Artificial Sequence
  Description of Artificial Sequence: Synthetic oligonucleotide
  Sense strand starting at position 3433 of SEQ ID NO: 1241566
ugaggaaaccucugcauga

SEQ ID NO: 1282303 - RNA, 19 nt, Artificial Sequence
  Description of Artificial Sequence: Synthetic oligonucleotide
  Antisense strand to SEQ ID NO: 1282302
ucaugcagagguuuccuca

SEQ ID NO: 1282304 - RNA, 19 nt, Artificial Sequence
  Description of Artificial Sequence: Synthetic oligonucleotide
  Sense strand starting at position 3434 of SEQ ID NO: 1241566
gaggaaaccucugcaugac

SEQ ID NO: 1282305 - RNA, 19 nt, Artificial Sequence
  Description of Artificial Sequence: Synthetic oligonucleotide
  Antisense strand to SEQ ID NO: 1282304
gucaugcagagguuuccuc

SEQ ID NO: 1282306 - RNA, 19 nt, Artificial Sequence
  Description of Artificial Sequence: Synthetic oligonucleotide
  Sense strand starting at position 3464 of SEQ ID NO: 1241566
ugauuucucucagcuuguu

SEQ ID NO: 1282307 - RNA, 19 nt, Artificial Sequence
  Description of Artificial Sequence: Synthetic oligonucleotide
  Antisense strand to SEQ ID NO: 1282306
aacaagcugagagaaauca

SEQ ID NO: 1282308 - RNA, 19 nt, Artificial Sequence
  Description of Artificial Sequence: Synthetic oligonucleotide
  Sense strand starting at position 3479 of SEQ ID NO: 1241566
uguuaauagcugugaggag

SEQ ID NO: 1282309 - RNA, 19 nt, Artificial Sequence
  Description of Artificial Sequence: Synthetic oligonucleotide
  Antisense strand to SEQ ID NO: 1282308
cuccucacagcuauuaaca

SEQ ID NO: 1282310 - RNA, 19 nt, Artificial Sequence
  Description of Artificial Sequence: Synthetic oligonucleotide
  Sense strand starting at position 3599 of SEQ ID NO: 1241566
gcagaaaugcauuagguag

SEQ ID NO: 1282311 - RNA, 19 nt, Artificial Sequence
  Description of Artificial Sequence: Synthetic oligonucleotide
  Antisense strand to SEQ ID NO: 1282310
cuaccuaaugcauuucugc

SEQ ID NO: 1282312 - RNA, 19 nt, Artificial Sequence
  Description of Artificial Sequence: Synthetic oligonucleotide
  Sense strand starting at position 3635 of SEQ ID NO: 1241566
acggauuucacgugcgaga

SEQ ID NO: 1282313 - RNA, 19 nt, Artificial Sequence
  Description of Artificial Sequence: Synthetic oligonucleotide
  Antisense strand to SEQ ID NO: 1282312
ucucgcacgugaaauccgu

SEQ ID NO: 1282314 - RNA, 19 nt, Artificial Sequence
  Description of Artificial Sequence: Synthetic oligonucleotide
  Sense strand starting at position 3773 of SEQ ID NO: 1241566
ccauuauucucagcaguuc

SEQ ID NO: 1282315 - RNA, 19 nt, Artificial Sequence
  Description of Artificial Sequence: Synthetic oligonucleotide
  Antisense strand to SEQ ID NO: 1282314
gaacugcugagaauaaugg

SEQ ID NO: 1282316 - RNA, 19 nt, Artificial Sequence
  Description of Artificial Sequence: Synthetic oligonucleotide
  Sense strand starting at position 3781 of SEQ ID NO: 1241566
cucagcaguucugcaauga

SEQ ID NO: 1282317 - RNA, 19 nt, Artificial Sequence
  Description of Artificial Sequence: Synthetic oligonucleotide
  Antisense strand to SEQ ID NO: 1282316
ucauugcagaacugcugag

SEQ ID NO: 1282318 - RNA, 19 nt, Artificial Sequence
  Description of Artificial Sequence: Synthetic oligonucleotide
  Sense strand starting at position 3785 of SEQ ID NO: 1241566
gcaguucugcaaugagaaa

SEQ ID NO: 1282319 - RNA, 19 nt, Artificial Sequence
  Description of Artificial Sequence: Synthetic oligonucleotide
  Antisense strand to SEQ ID NO: 1282318
uuucucauugcagaacugc

SEQ ID NO: 1282320 - RNA, 19 nt, Artificial Sequence
  Description of Artificial Sequence: Synthetic oligonucleotide
  Sense strand starting at position 3867 of SEQ ID NO: 1241566
uaaguucugucugcgggua

SEQ ID NO: 1282321 - RNA, 19 nt, Artificial Sequence
  Description of Artificial Sequence: Synthetic oligonucleotide
  Antisense strand to SEQ ID NO: 1282320
uacccgcagacagaacuua

SEQ ID NO: 1282322 - RNA, 19 nt, Artificial Sequence
  Description of Artificial Sequence: Synthetic oligonucleotide
  Sense strand starting at position 3898 of SEQ ID NO: 1241566
ccggcucuuagacgaauau

SEQ ID NO: 1282323 - RNA, 19 nt, Artificial Sequence
  Description of Artificial Sequence: Synthetic oligonucleotide
  Antisense strand to SEQ ID NO: 1282322
auauucgucuaagagccgg

SEQ ID NO: 1282324 - RNA, 19 nt, Artificial Sequence
  Description of Artificial Sequence: Synthetic oligonucleotide
  Sense strand starting at position 3907 of SEQ ID NO: 1241566
agacgaauaucuguaggua

SEQ ID NO: 1282325 - RNA, 19 nt, Artificial Sequence
  Description of Artificial Sequence: Synthetic oligonucleotide
  Antisense strand to SEQ ID NO: 1282324
uaccuacagauauucgucu

SEQ ID NO: 1282326 - RNA, 19 nt, Artificial Sequence
  Description of Artificial Sequence: Synthetic oligonucleotide
  Sense strand starting at position 3908 of SEQ ID NO: 1241566
gacgaauaucuguagguaa

SEQ ID NO: 1282327 - RNA, 19 nt, Artificial Sequence
  Description of Artificial Sequence: Synthetic oligonucleotide
  Antisense strand to SEQ ID NO: 1282326
uuaccuacagauauucguc

SEQ ID NO: 1282328 - RNA, 19 nt, Artificial Sequence
  Description of Artificial Sequence: Synthetic oligonucleotide
  Sense strand starting at position 3911 of SEQ ID NO: 1241566
gaauaucuguagguaagca

SEQ ID NO: 1282329 - RNA, 19 nt, Artificial Sequence
  Description of Artificial Sequence: Synthetic oligonucleotide
  Antisense strand to SEQ ID NO: 1282328
ugcuuaccuacagauauuc

SEQ ID NO: 1282330 - RNA, 19 nt, Artificial Sequence
  Description of Artificial Sequence: Synthetic oligonucleotide
  Sense strand starting at position 3938 of SEQ ID NO: 1241566
ucaacuauuugugcggaau

SEQ ID NO: 1282331 - RNA, 19 nt, Artificial Sequence
  Description of Artificial Sequence: Synthetic oligonucleotide
  Antisense strand to SEQ ID NO: 1282330
auuccgcacaaauaguuga

SEQ ID NO: 1282332 - RNA, 19 nt, Artificial Sequence
  Description of Artificial Sequence: Synthetic oligonucleotide
  Sense strand starting at position 3940 of SEQ ID NO: 1241566
aacuauuugugcggaauaa

SEQ ID NO: 1282333 - RNA, 19 nt, Artificial Sequence
  Description of Artificial Sequence: Synthetic oligonucleotide
  Antisense strand to SEQ ID NO: 1282332
uuauuccgcacaaauaguu

SEQ ID NO: 1282334 - RNA, 19 nt, Artificial Sequence
  Description of Artificial Sequence: Synthetic oligonucleotide
  Sense strand starting at position 152 of SEQ ID NO: 1241567
gaacuaacuuggccaggua

SEQ ID NO: 1282335 - RNA, 19 nt, Artificial Sequence
  Description of Artificial Sequence: Synthetic oligonucleotide
  Antisense strand to SEQ ID NO: 1282334
uaccuggccaaguuaguuc

SEQ ID NO: 1282336 - RNA, 19 nt, Artificial Sequence
  Description of Artificial Sequence: Synthetic oligonucleotide
  Sense strand starting at position 533 of SEQ ID NO: 1241567
gaauguuaccuguaggcaa

SEQ ID NO: 1282337 - RNA, 19 nt, Artificial Sequence
  Description of Artificial Sequence: Synthetic oligonucleotide
  Antisense strand to SEQ ID NO: 1282336
uugccuacagguaacauuc

SEQ ID NO: 1282338 - RNA, 19 nt, Artificial Sequence
  Description of Artificial Sequence: Synthetic oligonucleotide
  Sense strand starting at position 752 of SEQ ID NO: 1241567
agagauuauuagucaccua

SEQ ID NO: 1282339 - RNA, 19 nt, Artificial Sequence
  Description of Artificial Sequence: Synthetic oligonucleotide
  Antisense strand to SEQ ID NO: 1282338
uaggugacuaauaaucucu

SEQ ID NO: 1282340 - RNA, 19 nt, Artificial Sequence
  Description of Artificial Sequence: Synthetic oligonucleotide
  Sense strand starting at position 846 of SEQ ID NO: 1241567
auucuaaagugaucugaug

SEQ ID NO: 1282341 - RNA, 19 nt, Artificial Sequence
  Description of Artificial Sequence: Synthetic oligonucleotide
  Antisense strand to SEQ ID NO: 1282340
caucagaucacuuuagaau

SEQ ID NO: 1282342 - RNA, 19 nt, Artificial Sequence
  Description of Artificial Sequence: Synthetic oligonucleotide
  Sense strand starting at position 852 of SEQ ID NO: 1241567
aagugaucugaugaagcuu

SEQ ID NO: 1282343 - RNA, 19 nt, Artificial Sequence
  Description of Artificial Sequence: Synthetic oligonucleotide
  Antisense strand to SEQ ID NO: 1282342
aagcuucaucagaucacuu

SEQ ID NO: 1282344 - RNA, 19 nt, Artificial Sequence
  Description of Artificial Sequence: Synthetic oligonucleotide
  Sense strand starting at position 984 of SEQ ID NO: 1241567
uaauuacuagaguaguugu

SEQ ID NO: 1282345 - RNA, 19 nt, Artificial Sequence
  Description of Artificial Sequence: Synthetic oligonucleotide
  Antisense strand to SEQ ID NO: 1282344
acaacuacucuaguaauua

SEQ ID NO: 1282346 - RNA, 19 nt, Artificial Sequence
  Description of Artificial Sequence: Synthetic oligonucleotide
  Sense strand starting at position 1335 of SEQ ID NO: 1241567
ugagauguguccucgacaa

SEQ ID NO: 1282347 - RNA, 19 nt, Artificial Sequence
  Description of Artificial Sequence: Synthetic oligonucleotide
  Antisense strand to SEQ ID NO: 1282346
uugucgaggacacaucuca

SEQ ID NO: 1282348 - RNA, 19 nt, Artificial Sequence
  Description of Artificial Sequence: Synthetic oligonucleotide
  Sense strand starting at position 1577 of SEQ ID NO: 1241567
ccucaaauucuguaaguag

SEQ ID NO: 1282349 - RNA, 19 nt, Artificial Sequence
  Description of Artificial Sequence: Synthetic oligonucleotide
  Antisense strand to SEQ ID NO: 1282348
cuacuuacagaauuugagg

SEQ ID NO: 1282350 - RNA, 19 nt, Artificial Sequence
  Description of Artificial Sequence: Synthetic oligonucleotide
  Sense strand starting at position 2073 of SEQ ID NO: 1241567
gcugucagugugccuuaaa

SEQ ID NO: 1282351 - RNA, 19 nt, Artificial Sequence
  Description of Artificial Sequence: Synthetic oligonucleotide
  Antisense strand to SEQ ID NO: 1282350
uuuaaggcacacugacagc

SEQ ID NO: 1282352 - RNA, 19 nt, Artificial Sequence
  Description of Artificial Sequence: Synthetic oligonucleotide
  Sense strand starting at position 2201 of SEQ ID NO: 1241567
aacaaaugauuucgaggga

SEQ ID NO: 1282353 - RNA, 19 nt, Artificial Sequence
  Description of Artificial Sequence: Synthetic oligonucleotide
  Antisense strand to SEQ ID NO: 1282352
ucccucgaaaucauuuguu

SEQ ID NO: 1282354 - RNA, 19 nt, Artificial Sequence
  Description of Artificial Sequence: Synthetic oligonucleotide
  Sense strand starting at position 2266 of SEQ ID NO: 1241567
cugugugaacuuuagcauu

SEQ ID NO: 1282355 - RNA, 19 nt, Artificial Sequence
  Description of Artificial Sequence: Synthetic oligonucleotide
  Antisense strand to SEQ ID NO: 1282354
aaugcuaaaguucacacag

SEQ ID NO: 1282356 - RNA, 19 nt, Artificial Sequence
  Description of Artificial Sequence: Synthetic oligonucleotide
  Sense strand starting at position 2268 of SEQ ID NO: 1241567
gugugaacuuuagcauuuc

SEQ ID NO: 1282357 - RNA, 19 nt, Artificial Sequence
  Description of Artificial Sequence: Synthetic oligonucleotide
  Antisense strand to SEQ ID NO: 1282356
gaaaugcuaaaguucacac

SEQ ID NO: 1282358 - RNA, 19 nt, Artificial Sequence
  Description of Artificial Sequence: Synthetic oligonucleotide
  Sense strand starting at position 2355 of SEQ ID NO: 1241567
ucugcaucuuagguaggau

SEQ ID NO: 1282359 - RNA, 19 nt, Artificial Sequence
  Description of Artificial Sequence: Synthetic oligonucleotide
  Antisense strand to SEQ ID NO: 1282358
auccuaccuaagaugcaga

SEQ ID NO: 1282360 - RNA, 19 nt, Artificial Sequence
  Description of Artificial Sequence: Synthetic oligonucleotide
  Sense strand starting at position 2356 of SEQ ID NO: 1241567
cugcaucuuagguaggauu

SEQ ID NO: 1282361 - RNA, 19 nt, Artificial Sequence
  Description of Artificial Sequence: Synthetic oligonucleotide
  Antisense strand to SEQ ID NO: 1282360
aauccuaccuaagaugcag

SEQ ID NO: 1282362 - RNA, 19 nt, Artificial Sequence
  Description of Artificial Sequence: Synthetic oligonucleotide
  Sense strand starting at position 2358 of SEQ ID NO: 1241567
gcaucuuagguaggauucu

SEQ ID NO: 1282363 - RNA, 19 nt, Artificial Sequence
  Description of Artificial Sequence: Synthetic oligonucleotide
  Antisense strand to SEQ ID NO: 1282362
agaauccuaccuaagaugc

SEQ ID NO: 1282364 - RNA, 19 nt, Artificial Sequence
  Description of Artificial Sequence: Synthetic oligonucleotide
  Sense strand starting at position 2413 of SEQ ID NO: 1241567
acaaaugguuaagcaaaua

SEQ ID NO: 1282365 - RNA, 19 nt, Artificial Sequence
  Description of Artificial Sequence: Synthetic oligonucleotide
  Antisense strand to SEQ ID NO: 1282364
uauuugcuuaaccauuugu

SEQ ID NO: 1282366 - RNA, 19 nt, Artificial Sequence
  Description of Artificial Sequence: Synthetic oligonucleotide
  Sense strand starting at position 2477 of SEQ ID NO: 1241567
uuaccaauaggaugaguua

SEQ ID NO: 1282367 - RNA, 19 nt, Artificial Sequence
  Description of Artificial Sequence: Synthetic oligonucleotide
  Antisense strand to SEQ ID NO: 1282366
uaacucauccuauugguaa

SEQ ID NO: 1282368 - RNA, 19 nt, Artificial Sequence
  Description of Artificial Sequence: Synthetic oligonucleotide
  Sense strand starting at position 2480 of SEQ ID NO: 1241567
ccaauaggaugaguuauua

SEQ ID NO: 1282369 - RNA, 19 nt, Artificial Sequence
  Description of Artificial Sequence: Synthetic oligonucleotide
  Antisense strand to SEQ ID NO: 1282368
uaauaacucauccuauugg

SEQ ID NO: 1282370 - RNA, 19 nt, Artificial Sequence
  Description of Artificial Sequence: Synthetic oligonucleotide
  Sense strand starting at position 2484 of SEQ ID NO: 1241567
uaggaugaguuauuaacuu

SEQ ID NO: 1282371 - RNA, 19 nt, Artificial Sequence
  Description of Artificial Sequence: Synthetic oligonucleotide
  Antisense strand to SEQ ID NO: 1282370
aaguuaauaacucauccua

SEQ ID NO: 1282372 - RNA, 19 nt, Artificial Sequence
  Description of Artificial Sequence: Synthetic oligonucleotide
  Sense strand starting at position 2589 of SEQ ID NO: 1241567
uuauaaauucgauagcuag

SEQ ID NO: 1282373 - RNA, 19 nt, Artificial Sequence
  Description of Artificial Sequence: Synthetic oligonucleotide
  Antisense strand to SEQ ID NO: 1282372
cuagcuaucgaauuuauaa

SEQ ID NO: 1282374 - RNA, 19 nt, Artificial Sequence
  Description of Artificial Sequence: Synthetic oligonucleotide
  Sense strand starting at position 2595 of SEQ ID NO: 1241567
auucgauagcuagaaagug

SEQ ID NO: 1282375 - RNA, 19 nt, Artificial Sequence
  Description of Artificial Sequence: Synthetic oligonucleotide
  Antisense strand to SEQ ID NO: 1282374
cacuuucuagcuaucgaau

SEQ ID NO: 1282376 - RNA, 19 nt, Artificial Sequence
  Description of Artificial Sequence: Synthetic oligonucleotide
  Sense strand starting at position 2668 of SEQ ID NO: 1241567
ugaaauggagcauguuuau

SEQ ID NO: 1282377 - RNA, 19 nt, Artificial Sequence
  Description of Artificial Sequence: Synthetic oligonucleotide
  Antisense strand to SEQ ID NO: 1282376
auaaacaugcuccauuuca

SEQ ID NO: 1282378 - RNA, 19 nt, Artificial Sequence
  Description of Artificial Sequence: Synthetic oligonucleotide
  Sense strand starting at position 2695 of SEQ ID NO: 1241567
ugcaaauaugcugacauau

SEQ ID NO: 1282379 - RNA, 19 nt, Artificial Sequence
  Description of Artificial Sequence: Synthetic oligonucleotide
  Antisense strand to SEQ ID NO: 1282378
auaugucagcauauuugca

SEQ ID NO: 1282380 - RNA, 19 nt, Artificial Sequence
  Description of Artificial Sequence: Synthetic oligonucleotide
  Sense strand starting at position 2871 of SEQ ID NO: 1241567
uucugaauuggauggagua

SEQ ID NO: 1282381 - RNA, 19 nt, Artificial Sequence
  Description of Artificial Sequence: Synthetic oligonucleotide
  Antisense strand to SEQ ID NO: 1282380
uacuccauccaauucagaa

SEQ ID NO: 1282382 - RNA, 19 nt, Artificial Sequence
  Description of Artificial Sequence: Synthetic oligonucleotide
  Sense strand starting at position 2872 of SEQ ID NO: 1241567
ucugaauuggauggaguau

SEQ ID NO: 1282383 - RNA, 19 nt, Artificial Sequence
  Description of Artificial Sequence: Synthetic oligonucleotide
  Antisense strand to SEQ ID NO: 1282382
auacuccauccaauucaga

SEQ ID NO: 1282384 - RNA, 19 nt, Artificial Sequence
  Description of Artificial Sequence: Synthetic oligonucleotide
  Sense strand starting at position 2884 of SEQ ID NO: 1241567
ggaguauugcaggauccca

SEQ ID NO: 1282385 - RNA, 19 nt, Artificial Sequence
  Description of Artificial Sequence: Synthetic oligonucleotide
  Antisense strand to SEQ ID NO: 1282384
ugggauccugcaauacucc

SEQ ID NO: 1282386 - RNA, 19 nt, Artificial Sequence
  Description of Artificial Sequence: Synthetic oligonucleotide
  Sense strand starting at position 2915 of SEQ ID NO: 1241567
gugagaugauucccuacaa

SEQ ID NO: 1282387 - RNA, 19 nt, Artificial Sequence
  Description of Artificial Sequence: Synthetic oligonucleotide
  Antisense strand to SEQ ID NO: 1282386
uuguagggaaucaucucac

SEQ ID NO: 1282388 - RNA, 19 nt, Artificial Sequence
  Description of Artificial Sequence: Synthetic oligonucleotide
  Sense strand starting at position 2934 of SEQ ID NO: 1241567
aaaugaguguuauuaguag

SEQ ID NO: 1282389 - RNA, 19 nt, Artificial Sequence
  Description of Artificial Sequence: Synthetic oligonucleotide
  Antisense strand to SEQ ID NO: 1282388
cuacuaauaacacucauuu

SEQ ID NO: 1282390 - RNA, 19 nt, Artificial Sequence
  Description of Artificial Sequence: Synthetic oligonucleotide
  Sense strand starting at position 3031 of SEQ ID NO: 1241567
caaggaaguuuguccaaac

SEQ ID NO: 1282391 - RNA, 19 nt, Artificial Sequence
  Description of Artificial Sequence: Synthetic oligonucleotide
  Antisense strand to SEQ ID NO: 1282390
guuuggacaaacuuccuug

SEQ ID NO: 1282392 - RNA, 19 nt, Artificial Sequence
  Description of Artificial Sequence: Synthetic oligonucleotide
  Sense strand starting at position 3102 of SEQ ID NO: 1241567
cccacuugugaaggauaca

SEQ ID NO: 1282393 - RNA, 19 nt, Artificial Sequence
  Description of Artificial Sequence: Synthetic oligonucleotide
  Antisense strand to SEQ ID NO: 1282392
uguauccuucacaaguggg

SEQ ID NO: 1282394 - RNA, 19 nt, Artificial Sequence
  Description of Artificial Sequence: Synthetic oligonucleotide
  Sense strand starting at position 3404 of SEQ ID NO: 1241567
aggagaugaugugauuucu

SEQ ID NO: 1282395 - RNA, 19 nt, Artificial Sequence
  Description of Artificial Sequence: Synthetic oligonucleotide
  Antisense strand to SEQ ID NO: 1282394
agaaaucacaucaucuccu

SEQ ID NO: 1282396 - RNA, 19 nt, Artificial Sequence
  Description of Artificial Sequence: Synthetic oligonucleotide
  Sense strand starting at position 3410 of SEQ ID NO: 1241567
ugaugugauuucuaacaca

SEQ ID NO: 1282397 - RNA, 19 nt, Artificial Sequence
  Description of Artificial Sequence: Synthetic oligonucleotide
  Antisense strand to SEQ ID NO: 1282396
uguguuagaaaucacauca

SEQ ID NO: 1282398 - RNA, 19 nt, Artificial Sequence
  Description of Artificial Sequence: Synthetic oligonucleotide
  Sense strand starting at position 3490 of SEQ ID NO: 1241567
cugcuaucugaacagcaga

SEQ ID NO: 1282399 - RNA, 19 nt, Artificial Sequence
  Description of Artificial Sequence: Synthetic oligonucleotide
  Antisense strand to SEQ ID NO: 1282398
ucugcuguucagauagcag

SEQ ID NO: 1282400 - RNA, 19 nt, Artificial Sequence
  Description of Artificial Sequence: Synthetic oligonucleotide
  Sense strand starting at position 3653 of SEQ ID NO: 1241567
ggaagcaguguugaugacu

SEQ ID NO: 1282401 - RNA, 19 nt, Artificial Sequence
  Description of Artificial Sequence: Synthetic oligonucleotide
  Antisense strand to SEQ ID NO: 1282400
agucaucaacacugcuucc

SEQ ID NO: 1282402 - RNA, 19 nt, Artificial Sequence
  Description of Artificial Sequence: Synthetic oligonucleotide
  Sense strand starting at position 3780 of SEQ ID NO: 1241567
aggagcagaugcuuauuga

SEQ ID NO: 1282403 - RNA, 19 nt, Artificial Sequence
  Description of Artificial Sequence: Synthetic oligonucleotide
  Antisense strand to SEQ ID NO: 1282402
ucaauaagcaucugcuccu

SEQ ID NO: 1282404 - RNA, 19 nt, Artificial Sequence
  Description of Artificial Sequence: Synthetic oligonucleotide
  Sense strand starting at position 3781 of SEQ ID NO: 1241567
ggagcagaugcuuauugaa

SEQ ID NO: 1282405 - RNA, 19 nt, Artificial Sequence
  Description of Artificial Sequence: Synthetic oligonucleotide
  Antisense strand to SEQ ID NO: 1282404
uucaauaagcaucugcucc

SEQ ID NO: 1282406 - RNA, 19 nt, Artificial Sequence
  Description of Artificial Sequence: Synthetic oligonucleotide
  Sense strand starting at position 3783 of SEQ ID NO: 1241567
agcagaugcuuauugaaga

SEQ ID NO: 1282407 - RNA, 19 nt, Artificial Sequence
  Description of Artificial Sequence: Synthetic oligonucleotide
  Antisense strand to SEQ ID NO: 1282406
ucuucaauaagcaucugcu

SEQ ID NO: 1282408 - RNA, 19 nt, Artificial Sequence
  Description of Artificial Sequence: Synthetic oligonucleotide
  Sense strand starting at position 3794 of SEQ ID NO: 1241567
auugaagaucugggcuuua

SEQ ID NO: 1282409 - RNA, 19 nt, Artificial Sequence
  Description of Artificial Sequence: Synthetic oligonucleotide
  Antisense strand to SEQ ID NO: 1282408
uaaagcccagaucuucaau

SEQ ID NO: 1282410 - RNA, 19 nt, Artificial Sequence
  Description of Artificial Sequence: Synthetic oligonucleotide
  Sense strand starting at position 3822 of SEQ ID NO: 1241567
agaccugcccuccaaugau

SEQ ID NO: 1282411 - RNA, 19 nt, Artificial Sequence
  Description of Artificial Sequence: Synthetic oligonucleotide
  Antisense strand to SEQ ID NO: 1282410
aucauuggagggcaggucu

SEQ ID NO: 1282412 - RNA, 19 nt, Artificial Sequence
  Description of Artificial Sequence: Synthetic oligonucleotide
  Sense strand starting at position 3889 of SEQ ID NO: 1241567
ugugcugaugagugggaau

SEQ ID NO: 1282413 - RNA, 19 nt, Artificial Sequence
  Description of Artificial Sequence: Synthetic oligonucleotide
  Antisense strand to SEQ ID NO: 1282412
auucccacucaucagcaca

SEQ ID NO: 1282414 - RNA, 19 nt, Artificial Sequence
  Description of Artificial Sequence: Synthetic oligonucleotide
  Sense strand starting at position 77 of SEQ ID NO: 1241568
uuuaacccucucgaguuau

SEQ ID NO: 1282415 - RNA, 19 nt, Artificial Sequence
  Description of Artificial Sequence: Synthetic oligonucleotide
  Antisense strand to SEQ ID NO: 1282414
auaacucgagaggguuaaa

SEQ ID NO: 1282416 - RNA, 19 nt, Artificial Sequence
  Description of Artificial Sequence: Synthetic oligonucleotide
  Sense strand starting at position 607 of SEQ ID NO: 1241568
aucuuauuuguacguugua

SEQ ID NO: 1282417 - RNA, 19 nt, Artificial Sequence
  Description of Artificial Sequence: Synthetic oligonucleotide
  Antisense strand to SEQ ID NO: 1282416
uacaacguacaaauaagau

SEQ ID NO: 1282418 - RNA, 19 nt, Artificial Sequence
  Description of Artificial Sequence: Synthetic oligonucleotide
  Sense strand starting at position 608 of SEQ ID NO: 1241568
ucuuauuuguacguuguaa

SEQ ID NO: 1282419 - RNA, 19 nt, Artificial Sequence
  Description of Artificial Sequence: Synthetic oligonucleotide
  Antisense strand to SEQ ID NO: 1282418
uuacaacguacaaauaaga

SEQ ID NO: 1282420 - RNA, 19 nt, Artificial Sequence
  Description of Artificial Sequence: Synthetic oligonucleotide
  Sense strand starting at position 641 of SEQ ID NO: 1241568
uuuccauucggguauguga

SEQ ID NO: 1282421 - RNA, 19 nt, Artificial Sequence
  Description of Artificial Sequence: Synthetic oligonucleotide
  Antisense strand to SEQ ID NO: 1282420
ucacauacccgaauggaaa

SEQ ID NO: 1282422 - RNA, 19 nt, Artificial Sequence
  Description of Artificial Sequence: Synthetic oligonucleotide
  Sense strand starting at position 766 of SEQ ID NO: 1241568
acgauauauagguagcuuu

SEQ ID NO: 1282423 - RNA, 19 nt, Artificial Sequence
  Description of Artificial Sequence: Synthetic oligonucleotide
  Antisense strand to SEQ ID NO: 1282422
aaagcuaccuauauaucgu

SEQ ID NO: 1282424 - RNA, 19 nt, Artificial Sequence
  Description of Artificial Sequence: Synthetic oligonucleotide
  Sense strand starting at position 808 of SEQ ID NO: 1241568
gcccgaggcccagaauaaa

SEQ ID NO: 1282425 - RNA, 19 nt, Artificial Sequence
  Description of Artificial Sequence: Synthetic oligonucleotide
  Antisense strand to SEQ ID NO: 1282424
uuuauucugggccucgggc

SEQ ID NO: 1282426 - RNA, 19 nt, Artificial Sequence
  Description of Artificial Sequence: Synthetic oligonucleotide
  Sense strand starting at position 1216 of SEQ ID NO: 1241568
gagugaaugagagguauca

SEQ ID NO: 1282427 - RNA, 19 nt, Artificial Sequence
  Description of Artificial Sequence: Synthetic oligonucleotide
  Antisense strand to SEQ ID NO: 1282426
ugauaccucucauucacuc

SEQ ID NO: 1282428 - RNA, 19 nt, Artificial Sequence
  Description of Artificial Sequence: Synthetic oligonucleotide
  Sense strand starting at position 1405 of SEQ ID NO: 1241568
gggacuaaguuaccuugaa

SEQ ID NO: 1282429 - RNA, 19 nt, Artificial Sequence
  Description of Artificial Sequence: Synthetic oligonucleotide
  Antisense strand to SEQ ID NO: 1282428
uucaagguaacuuaguccc

SEQ ID NO: 1282430 - RNA, 19 nt, Artificial Sequence
  Description of Artificial Sequence: Synthetic oligonucleotide
  Sense strand starting at position 1406 of SEQ ID NO: 1241568
ggacuaaguuaccuugaag

SEQ ID NO: 1282431 - RNA, 19 nt, Artificial Sequence
  Description of Artificial Sequence: Synthetic oligonucleotide
  Antisense strand to SEQ ID NO: 1282430
cuucaagguaacuuagucc

SEQ ID NO: 1282432 - RNA, 19 nt, Artificial Sequence
  Description of Artificial Sequence: Synthetic oligonucleotide
  Sense strand starting at position 1409 of SEQ ID NO: 1241568
cuaaguuaccuugaagcuu

SEQ ID NO: 1282433 - RNA, 19 nt, Artificial Sequence
  Description of Artificial Sequence: Synthetic oligonucleotide
  Antisense strand to SEQ ID NO: 1282432
aagcuucaagguaacuuag

SEQ ID NO: 1282434 - RNA, 19 nt, Artificial Sequence
  Description of Artificial Sequence: Synthetic oligonucleotide
  Sense strand starting at position 1441 of SEQ ID NO: 1241568
caaagaugaucuguggcuu

SEQ ID NO: 1282435 - RNA, 19 nt, Artificial Sequence
  Description of Artificial Sequence: Synthetic oligonucleotide
  Antisense strand to SEQ ID NO: 1282434
aagccacagaucaucuuug

SEQ ID NO: 1282436 - RNA, 19 nt, Artificial Sequence
  Description of Artificial Sequence: Synthetic oligonucleotide
  Sense strand starting at position 2169 of SEQ ID NO: 1241568
gagagaaggucgaggauug

SEQ ID NO: 1282437 - RNA, 19 nt, Artificial Sequence
  Description of Artificial Sequence: Synthetic oligonucleotide
  Antisense strand to SEQ ID NO: 1282436
caauccucgaccuucucuc

SEQ ID NO: 1282438 - RNA, 19 nt, Artificial Sequence
  Description of Artificial Sequence: Synthetic oligonucleotide
  Sense strand starting at position 2180 of SEQ ID NO: 1241568
gaggauugggccgaagcuu

SEQ ID NO: 1282439 - RNA, 19 nt, Artificial Sequence
  Description of Artificial Sequence: Synthetic oligonucleotide
  Antisense strand to SEQ ID NO: 1282438
aagcuucggcccaauccuc

SEQ ID NO: 1282440 - RNA, 19 nt, Artificial Sequence
  Description of Artificial Sequence: Synthetic oligonucleotide
  Sense strand starting at position 2299 of SEQ ID NO: 1241568
ucuuuaauuccgggaggug

SEQ ID NO: 1282441 - RNA, 19 nt, Artificial Sequence
  Description of Artificial Sequence: Synthetic oligonucleotide
  Antisense strand to SEQ ID NO: 1282440
caccucccggaauuaaaga

SEQ ID NO: 1282442 - RNA, 19 nt, Artificial Sequence
  Description of Artificial Sequence: Synthetic oligonucleotide
  Sense strand starting at position 2300 of SEQ ID NO: 1241568
cuuuaauuccgggaggugu

SEQ ID NO: 1282443 - RNA, 19 nt, Artificial Sequence
  Description of Artificial Sequence: Synthetic oligonucleotide
  Antisense strand to SEQ ID NO: 1282442
acaccucccggaauuaaag

SEQ ID NO: 1282444 - RNA, 19 nt, Artificial Sequence
  Description of Artificial Sequence: Synthetic oligonucleotide
  Sense strand starting at position 2377 of SEQ ID NO: 1241568
cgucuuggaccggaggauu

SEQ ID NO: 1282445 - RNA, 19 nt, Artificial Sequence
  Description of Artificial Sequence: Synthetic oligonucleotide
  Antisense strand to SEQ ID NO: 1282444
aauccuccgguccaagacg

SEQ ID NO: 1282446 - RNA, 19 nt, Artificial Sequence
  Description of Artificial Sequence: Synthetic oligonucleotide
  Sense strand starting at position 2545 of SEQ ID NO: 1241568
gugccacugcuuguguaaa

SEQ ID NO: 1282447 - RNA, 19 nt, Artificial Sequence
  Description of Artificial Sequence: Synthetic oligonucleotide
  Antisense strand to SEQ ID NO: 1282446
uuuacacaagcaguggcac

SEQ ID NO: 1282448 - RNA, 19 nt, Artificial Sequence
  Description of Artificial Sequence: Synthetic oligonucleotide
  Sense strand starting at position 2679 of SEQ ID NO: 1241568
aagccagcgcucguuuaau

SEQ ID NO: 1282449 - RNA, 19 nt, Artificial Sequence
  Description of Artificial Sequence: Synthetic oligonucleotide
  Antisense strand to SEQ ID NO: 1282448
auuaaacgagcgcuggcuu

SEQ ID NO: 1282450 - RNA, 19 nt, Artificial Sequence
  Description of Artificial Sequence: Synthetic oligonucleotide
  Sense strand starting at position 2681 of SEQ ID NO: 1241568
gccagcgcucguuuaauua

SEQ ID NO: 1282451 - RNA, 19 nt, Artificial Sequence
  Description of Artificial Sequence: Synthetic oligonucleotide
  Antisense strand to SEQ ID NO: 1282450
uaauuaaacgagcgcuggc

SEQ ID NO: 1282452 - RNA, 19 nt, Artificial Sequence
  Description of Artificial Sequence: Synthetic oligonucleotide
  Sense strand starting at position 2693 of SEQ ID NO: 1241568
uuaauuaaugcagguggga

SEQ ID NO: 1282453 - RNA, 19 nt, Artificial Sequence
  Description of Artificial Sequence: Synthetic oligonucleotide
  Antisense strand to SEQ ID NO: 1282452
ucccaccugcauuaauuaa

SEQ ID NO: 1282454 - RNA, 19 nt, Artificial Sequence
  Description of Artificial Sequence: Synthetic oligonucleotide
  Sense strand starting at position 2824 of SEQ ID NO: 1241568
gcaaguuggacccgaaaga

SEQ ID NO: 1282455 - RNA, 19 nt, Artificial Sequence
  Description of Artificial Sequence: Synthetic oligonucleotide
  Antisense strand to SEQ ID NO: 1282454
ucuuucggguccaacuugc

SEQ ID NO: 1282456 - RNA, 19 nt, Artificial Sequence
  Description of Artificial Sequence: Synthetic oligonucleotide
  Sense strand starting at position 2883 of SEQ ID NO: 1241568
augagauauuuggagaugu

SEQ ID NO: 1282457 - RNA, 19 nt, Artificial Sequence
  Description of Artificial Sequence: Synthetic oligonucleotide
  Antisense strand to SEQ ID NO: 1282456
acaucuccaaauaucucau

SEQ ID NO: 1282458 - RNA, 19 nt, Artificial Sequence
  Description of Artificial Sequence: Synthetic oligonucleotide
  Sense strand starting at position 2933 of SEQ ID NO: 1241568
augguacauuuccagauaa

SEQ ID NO: 1282459 - RNA, 19 nt, Artificial Sequence
  Description of Artificial Sequence: Synthetic oligonucleotide
  Antisense strand to SEQ ID NO: 1282458
uuaucuggaaauguaccau

SEQ ID NO: 1282460 - RNA, 19 nt, Artificial Sequence
  Description of Artificial Sequence: Synthetic oligonucleotide
  Sense strand starting at position 3032 of SEQ ID NO: 1241568
aacuacaaacgucagagua

SEQ ID NO: 1282461 - RNA, 19 nt, Artificial Sequence
  Description of Artificial Sequence: Synthetic oligonucleotide
  Antisense strand to SEQ ID NO: 1282460
uacucugacguuuguaguu

SEQ ID NO: 1282462 - RNA, 19 nt, Artificial Sequence
  Description of Artificial Sequence: Synthetic oligonucleotide
  Sense strand starting at position 3229 of SEQ ID NO: 1241568
uuucgauacgguuagggaa

SEQ ID NO: 1282463 - RNA, 19 nt, Artificial Sequence
  Description of Artificial Sequence: Synthetic oligonucleotide
  Antisense strand to SEQ ID NO: 1282462
uucccuaaccguaucgaaa

SEQ ID NO: 1282464 - RNA, 19 nt, Artificial Sequence
  Description of Artificial Sequence: Synthetic oligonucleotide
  Sense strand starting at position 3275 of SEQ ID NO: 1241568
guaccauauguacaaguga

SEQ ID NO: 1282465 - RNA, 19 nt, Artificial Sequence
  Description of Artificial Sequence: Synthetic oligonucleotide
  Antisense strand to SEQ ID NO: 1282464
ucacuuguacauaugguac

SEQ ID NO: 1282466 - RNA, 19 nt, Artificial Sequence
  Description of Artificial Sequence: Synthetic oligonucleotide
  Sense strand starting at position 3325 of SEQ ID NO: 1241568
uguguuguuaaacacuaga

SEQ ID NO: 1282467 - RNA, 19 nt, Artificial Sequence
  Description of Artificial Sequence: Synthetic oligonucleotide
  Antisense strand to SEQ ID NO: 1282466
ucuaguguuuaacaacaca

SEQ ID NO: 1282468 - RNA, 19 nt, Artificial Sequence
  Description of Artificial Sequence: Synthetic oligonucleotide
  Sense strand starting at position 3328 of SEQ ID NO: 1241568
guuguuaaacacuagaguu

SEQ ID NO: 1282469 - RNA, 19 nt, Artificial Sequence
  Description of Artificial Sequence: Synthetic oligonucleotide
  Antisense strand to SEQ ID NO: 1282468
aacucuaguguuuaacaac

SEQ ID NO: 1282470 - RNA, 19 nt, Artificial Sequence
  Description of Artificial Sequence: Synthetic oligonucleotide
  Sense strand starting at position 3374 of SEQ ID NO: 1241568
aauggcucuugaguggaaa

SEQ ID NO: 1282471 - RNA, 19 nt, Artificial Sequence
  Description of Artificial Sequence: Synthetic oligonucleotide
  Antisense strand to SEQ ID NO: 1282470
uuuccacucaagagccauu

SEQ ID NO: 1282472 - RNA, 19 nt, Artificial Sequence
  Description of Artificial Sequence: Synthetic oligonucleotide
  Sense strand starting at position 3566 of SEQ ID NO: 1241568
auagaauaccagcagucua

SEQ ID NO: 1282473 - RNA, 19 nt, Artificial Sequence
  Description of Artificial Sequence: Synthetic oligonucleotide
  Antisense strand to SEQ ID NO: 1282472
uagacugcugguauucuau

SEQ ID NO: 1282474 - RNA, 19 nt, Artificial Sequence
  Description of Artificial Sequence: Synthetic oligonucleotide
  Sense strand starting at position 3678 of SEQ ID NO: 1241568
ucaaucuuugauugagggu

SEQ ID NO: 1282475 - RNA, 19 nt, Artificial Sequence
  Description of Artificial Sequence: Synthetic oligonucleotide
  Antisense strand to SEQ ID NO: 1282474
acccucaaucaaagauuga

SEQ ID NO: 1282476 - RNA, 19 nt, Artificial Sequence
  Description of Artificial Sequence: Synthetic oligonucleotide
  Sense strand starting at position 3794 of SEQ ID NO: 1241568
acagcuguugcuuagaaca

SEQ ID NO: 1282477 - RNA, 19 nt, Artificial Sequence
  Description of Artificial Sequence: Synthetic oligonucleotide
  Antisense strand to SEQ ID NO: 1282476
uguucuaagcaacagcugu

SEQ ID NO: 1282478 - RNA, 19 nt, Artificial Sequence
  Description of Artificial Sequence: Synthetic oligonucleotide
  Sense strand starting at position 3930 of SEQ ID NO: 1241568
auggaaacauccuugccua

SEQ ID NO: 1282479 - RNA, 19 nt, Artificial Sequence
  Description of Artificial Sequence: Synthetic oligonucleotide
  Antisense strand to SEQ ID NO: 1282478
uaggcaaggauguuuccau

SEQ ID NO: 1282480 - RNA, 19 nt, Artificial Sequence
  Description of Artificial Sequence: Synthetic oligonucleotide
  Sense strand starting at position 3931 of SEQ ID NO: 1241568
uggaaacauccuugccuau

SEQ ID NO: 1282481 - RNA, 19 nt, Artificial Sequence
  Description of Artificial Sequence: Synthetic oligonucleotide
  Antisense strand to SEQ ID NO: 1282480
auaggcaaggauguuucca

SEQ ID NO: 1282482 - RNA, 19 nt, Artificial Sequence
  Description of Artificial Sequence: Synthetic oligonucleotide
  Sense strand starting at position 3938 of SEQ ID NO: 1241568
auccuugccuaugugagaa

SEQ ID NO: 1282483 - RNA, 19 nt, Artificial Sequence
  Description of Artificial Sequence: Synthetic oligonucleotide
  Antisense strand to SEQ ID NO: 1282482
uucucacauaggcaaggau

SEQ ID NO: 1282484 - RNA, 19 nt, Artificial Sequence
  Description of Artificial Sequence: Synthetic oligonucleotide
  Sense strand starting at position 3950 of SEQ ID NO: 1241568
gugagaaauuguucucugg

SEQ ID NO: 1282485 - RNA, 19 nt, Artificial Sequence
  Description of Artificial Sequence: Synthetic oligonucleotide
  Antisense strand to SEQ ID NO: 1282484
ccagagaacaauuucucac

SEQ ID NO: 1282486 - RNA, 19 nt, Artificial Sequence
  Description of Artificial Sequence: Synthetic oligonucleotide
  Sense strand starting at position 3952 of SEQ ID NO: 1241568
gagaaauuguucucuggac

SEQ ID NO: 1282487 - RNA, 19 nt, Artificial Sequence
  Description of Artificial Sequence: Synthetic oligonucleotide
  Antisense strand to SEQ ID NO: 1282486
guccagagaacaauuucuc

SEQ ID NO: 1282488 - RNA, 19 nt, Artificial Sequence
  Description of Artificial Sequence: Synthetic oligonucleotide
  Sense strand starting at position 3954 of SEQ ID NO: 1241568
gaaauuguucucuggacca

SEQ ID NO: 1282489 - RNA, 19 nt, Artificial Sequence
  Description of Artificial Sequence: Synthetic oligonucleotide
  Antisense strand to SEQ ID NO: 1282488
ugguccagagaacaauuuc

SEQ ID NO: 1282490 - RNA, 19 nt, Artificial Sequence
  Description of Artificial Sequence: Synthetic oligonucleotide
  Sense strand starting at position 3956 of SEQ ID NO: 1241568
aauuguucucuggaccagu

SEQ ID NO: 1282491 - RNA, 19 nt, Artificial Sequence
  Description of Artificial Sequence: Synthetic oligonucleotide
  Antisense strand to SEQ ID NO: 1282490
acugguccagagaacaauu

SEQ ID NO: 1282492 - RNA, 19 nt, Artificial Sequence
  Description of Artificial Sequence: Synthetic oligonucleotide
  Sense strand starting at position 3959 of SEQ ID NO: 1241568
uguucucuggaccaguaau

SEQ ID NO: 1282493 - RNA, 19 nt, Artificial Sequence
  Description of Artificial Sequence: Synthetic oligonucleotide
  Antisense strand to SEQ ID NO: 1282492
auuacugguccagagaaca

SEQ ID NO: 1282494 - RNA, 19 nt, Artificial Sequence
  Description of Artificial Sequence: Synthetic oligonucleotide
  Sense strand starting at position 404 of SEQ ID NO: 1241569
uaauacguguuggcaaaga

SEQ ID NO: 1282495 - RNA, 19 nt, Artificial Sequence
  Description of Artificial Sequence: Synthetic oligonucleotide
  Antisense strand to SEQ ID NO: 1282494
ucuuugccaacacguauua

SEQ ID NO: 1282496 - RNA, 19 nt, Artificial Sequence
  Description of Artificial Sequence: Synthetic oligonucleotide
  Sense strand starting at position 489 of SEQ ID NO: 1241569
acaguuuggcaauaucuca

SEQ ID NO: 1282497 - RNA, 19 nt, Artificial Sequence
  Description of Artificial Sequence: Synthetic oligonucleotide
  Antisense strand to SEQ ID NO: 1282496
ugagauauugccaaacugu

SEQ ID NO: 1282498 - RNA, 19 nt, Artificial Sequence
  Description of Artificial Sequence: Synthetic oligonucleotide
  Sense strand starting at position 577 of SEQ ID NO: 1241569
cugaaaguauguccacuaa

SEQ ID NO: 1282499 - RNA, 19 nt, Artificial Sequence
  Description of Artificial Sequence: Synthetic oligonucleotide
  Antisense strand to SEQ ID NO: 1282498
uuaguggacauacuuucag

SEQ ID NO: 1282500 - RNA, 19 nt, Artificial Sequence
  Description of Artificial Sequence: Synthetic oligonucleotide
  Sense strand starting at position 763 of SEQ ID NO: 1241569
uugagaaucuggccucaag

SEQ ID NO: 1282501 - RNA, 19 nt, Artificial Sequence
  Description of Artificial Sequence: Synthetic oligonucleotide
  Antisense strand to SEQ ID NO: 1282500
cuugaggccagauucucaa

SEQ ID NO: 1282502 - RNA, 19 nt, Artificial Sequence
  Description of Artificial Sequence: Synthetic oligonucleotide
  Sense strand starting at position 766 of SEQ ID NO: 1241569
agaaucuggccucaaguga

SEQ ID NO: 1282503 - RNA, 19 nt, Artificial Sequence
  Description of Artificial Sequence: Synthetic oligonucleotide
  Antisense strand to SEQ ID NO: 1282502
ucacuugaggccagauucu

SEQ ID NO: 1282504 - RNA, 19 nt, Artificial Sequence
  Description of Artificial Sequence: Synthetic oligonucleotide
  Sense strand starting at position 914 of SEQ ID NO: 1241569
aucucaguagccuggguaa

SEQ ID NO: 1282505 - RNA, 19 nt, Artificial Sequence
  Description of Artificial Sequence: Synthetic oligonucleotide
  Antisense strand to SEQ ID NO: 1282504
uuacccaggcuacugagau

SEQ ID NO: 1282506 - RNA, 19 nt, Artificial Sequence
  Description of Artificial Sequence: Synthetic oligonucleotide
  Sense strand starting at position 916 of SEQ ID NO: 1241569
cucaguagccuggguaagu

SEQ ID NO: 1282507 - RNA, 19 nt, Artificial Sequence
  Description of Artificial Sequence: Synthetic oligonucleotide
  Antisense strand to SEQ ID NO: 1282506
acuuacccaggcuacugag

SEQ ID NO: 1282508 - RNA, 19 nt, Artificial Sequence
  Description of Artificial Sequence: Synthetic oligonucleotide
  Sense strand starting at position 917 of SEQ ID NO: 1241569
ucaguagccuggguaagua

SEQ ID NO: 1282509 - RNA, 19 nt, Artificial Sequence
  Description of Artificial Sequence: Synthetic oligonucleotide
  Antisense strand to SEQ ID NO: 1282508
uacuuacccaggcuacuga

SEQ ID NO: 1282510 - RNA, 19 nt, Artificial Sequence
  Description of Artificial Sequence: Synthetic oligonucleotide
  Sense strand starting at position 929 of SEQ ID NO: 1241569
guaaguagugagcacuaaa

SEQ ID NO: 1282511 - RNA, 19 nt, Artificial Sequence
  Description of Artificial Sequence: Synthetic oligonucleotide
  Antisense strand to SEQ ID NO: 1282510
uuuagugcucacuacuuac

SEQ ID NO: 1282512 - RNA, 19 nt, Artificial Sequence
  Description of Artificial Sequence: Synthetic oligonucleotide
  Sense strand starting at position 1129 of SEQ ID NO: 1241569
cuggauuaaucucagaagg

SEQ ID NO: 1282513 - RNA, 19 nt, Artificial Sequence
  Description of Artificial Sequence: Synthetic oligonucleotide
  Antisense strand to SEQ ID NO: 1282512
ccuucugagauuaauccag

SEQ ID NO: 1282514 - RNA, 19 nt, Artificial Sequence
  Description of Artificial Sequence: Synthetic oligonucleotide
  Sense strand starting at position 1185 of SEQ ID NO: 1241569
uggcacuucucccuuggua

SEQ ID NO: 1282515 - RNA, 19 nt, Artificial Sequence
  Description of Artificial Sequence: Synthetic oligonucleotide
  Antisense strand to SEQ ID NO: 1282514
uaccaagggagaagugcca

SEQ ID NO: 1282516 - RNA, 19 nt, Artificial Sequence
  Description of Artificial Sequence: Synthetic oligonucleotide
  Sense strand starting at position 1192 of SEQ ID NO: 1241569
ucucccuugguacgauuaa

SEQ ID NO: 1282517 - RNA, 19 nt, Artificial Sequence
  Description of Artificial Sequence: Synthetic oligonucleotide
  Antisense strand to SEQ ID NO: 1282516
uuaaucguaccaagggaga

SEQ ID NO: 1282518 - RNA, 19 nt, Artificial Sequence
  Description of Artificial Sequence: Synthetic oligonucleotide
  Sense strand starting at position 1695 of SEQ ID NO: 1241569
gccugacccuagggauuua

SEQ ID NO: 1282519 - RNA, 19 nt, Artificial Sequence
  Description of Artificial Sequence: Synthetic oligonucleotide
  Antisense strand to SEQ ID NO: 1282518
uaaaucccuagggucaggc

SEQ ID NO: 1282520 - RNA, 19 nt, Artificial Sequence
  Description of Artificial Sequence: Synthetic oligonucleotide
  Sense strand starting at position 1742 of SEQ ID NO: 1241569
ggagccucaguuuguauga

SEQ ID NO: 1282521 - RNA, 19 nt, Artificial Sequence
  Description of Artificial Sequence: Synthetic oligonucleotide
  Antisense strand to SEQ ID NO: 1282520
ucauacaaacugaggcucc

SEQ ID NO: 1282522 - RNA, 19 nt, Artificial Sequence
  Description of Artificial Sequence: Synthetic oligonucleotide
  Sense strand starting at position 1792 of SEQ ID NO: 1241569
accuaaugccuuugggauc

SEQ ID NO: 1282523 - RNA, 19 nt, Artificial Sequence
  Description of Artificial Sequence: Synthetic oligonucleotide
  Antisense strand to SEQ ID NO: 1282522
gaucccaaaggcauuaggu

SEQ ID NO: 1282524 - RNA, 19 nt, Artificial Sequence
  Description of Artificial Sequence: Synthetic oligonucleotide
  Sense strand starting at position 1799 of SEQ ID NO: 1241569
gccuuugggauccaaugua

SEQ ID NO: 1282525 - RNA, 19 nt, Artificial Sequence
  Description of Artificial Sequence: Synthetic oligonucleotide
  Antisense strand to SEQ ID NO: 1282524
uacauuggaucccaaaggc

SEQ ID NO: 1282526 - RNA, 19 nt, Artificial Sequence
  Description of Artificial Sequence: Synthetic oligonucleotide
  Sense strand starting at position 1813 of SEQ ID NO: 1241569
auguaauagccugauccaa

SEQ ID NO: 1282527 - RNA, 19 nt, Artificial Sequence
  Description of Artificial Sequence: Synthetic oligonucleotide
  Antisense strand to SEQ ID NO: 1282526
uuggaucaggcuauuacau

SEQ ID NO: 1282528 - RNA, 19 nt, Artificial Sequence
  Description of Artificial Sequence: Synthetic oligonucleotide
  Sense strand starting at position 1885 of SEQ ID NO: 1241569
acacgaguguucucuucca

SEQ ID NO: 1282529 - RNA, 19 nt, Artificial Sequence
  Description of Artificial Sequence: Synthetic oligonucleotide
  Antisense strand to SEQ ID NO: 1282528
uggaagagaacacucgugu

SEQ ID NO: 1282530 - RNA, 19 nt, Artificial Sequence
  Description of Artificial Sequence: Synthetic oligonucleotide
  Sense strand starting at position 2614 of SEQ ID NO: 1241569
agacaucuccagugaaagu

SEQ ID NO: 1282531 - RNA, 19 nt, Artificial Sequence
  Description of Artificial Sequence: Synthetic oligonucleotide
  Antisense strand to SEQ ID NO: 1282530
acuuucacuggagaugucu

SEQ ID NO: 1282532 - RNA, 19 nt, Artificial Sequence
  Description of Artificial Sequence: Synthetic oligonucleotide
  Sense strand starting at position 2623 of SEQ ID NO: 1241569
cagugaaaguuaccuuaag

SEQ ID NO: 1282533 - RNA, 19 nt, Artificial Sequence
  Description of Artificial Sequence: Synthetic oligonucleotide
  Antisense strand to SEQ ID NO: 1282532
cuuaagguaacuuucacug

SEQ ID NO: 1282534 - RNA, 19 nt, Artificial Sequence
  Description of Artificial Sequence: Synthetic oligonucleotide
  Sense strand starting at position 2709 of SEQ ID NO: 1241569
cuugaagaauaugauucua

SEQ ID NO: 1282535 - RNA, 19 nt, Artificial Sequence
  Description of Artificial Sequence: Synthetic oligonucleotide
  Antisense strand to SEQ ID NO: 1282534
uagaaucauauucuucaag

SEQ ID NO: 1282536 - RNA, 19 nt, Artificial Sequence
  Description of Artificial Sequence: Synthetic oligonucleotide
  Sense strand starting at position 2908 of SEQ ID NO: 1241569
cuguguagacugcaaauau

SEQ ID NO: 1282537 - RNA, 19 nt, Artificial Sequence
  Description of Artificial Sequence: Synthetic oligonucleotide
  Antisense strand to SEQ ID NO: 1282536
auauuugcagucuacacag

SEQ ID NO: 1282538 - RNA, 19 nt, Artificial Sequence
  Description of Artificial Sequence: Synthetic oligonucleotide
  Sense strand starting at position 2960 of SEQ ID NO: 1241569
aguuguaucuuagucuaug

SEQ ID NO: 1282539 - RNA, 19 nt, Artificial Sequence
  Description of Artificial Sequence: Synthetic oligonucleotide
  Antisense strand to SEQ ID NO: 1282538
cauagacuaagauacaacu

SEQ ID NO: 1282540 - RNA, 19 nt, Artificial Sequence
  Description of Artificial Sequence: Synthetic oligonucleotide
  Sense strand starting at position 2961 of SEQ ID NO: 1241569
guuguaucuuagucuauga

SEQ ID NO: 1282541 - RNA, 19 nt, Artificial Sequence
  Description of Artificial Sequence: Synthetic oligonucleotide
  Antisense strand to SEQ ID NO: 1282540
ucauagacuaagauacaac

SEQ ID NO: 1282542 - RNA, 19 nt, Artificial Sequence
  Description of Artificial Sequence: Synthetic oligonucleotide
  Sense strand starting at position 2963 of SEQ ID NO: 1241569
uguaucuuagucuaugaca

SEQ ID NO: 1282543 - RNA, 19 nt, Artificial Sequence
  Description of Artificial Sequence: Synthetic oligonucleotide
  Antisense strand to SEQ ID NO: 1282542
ugucauagacuaagauaca

SEQ ID NO: 1282544 - RNA, 19 nt, Artificial Sequence
  Description of Artificial Sequence: Synthetic oligonucleotide
  Sense strand starting at position 3306 of SEQ ID NO: 1241569
gauuacaggccucgugagu

SEQ ID NO: 1282545 - RNA, 19 nt, Artificial Sequence
  Description of Artificial Sequence: Synthetic oligonucleotide
  Antisense strand to SEQ ID NO: 1282544
acucacgaggccuguaauc

SEQ ID NO: 1282546 - RNA, 19 nt, Artificial Sequence
  Description of Artificial Sequence: Synthetic oligonucleotide
  Sense strand starting at position 3325 of SEQ ID NO: 1241569
cgcugugccaggccuaauu

SEQ ID NO: 1282547 - RNA, 19 nt, Artificial Sequence
  Description of Artificial Sequence: Synthetic oligonucleotide
  Antisense strand to SEQ ID NO: 1282546
aauuaggccuggcacagcg

SEQ ID NO: 1282548 - RNA, 19 nt, Artificial Sequence
  Description of Artificial Sequence: Synthetic oligonucleotide
  Sense strand starting at position 3422 of SEQ ID NO: 1241569
ccaaauguuagagguuuga

SEQ ID NO: 1282549 - RNA, 19 nt, Artificial Sequence
  Description of Artificial Sequence: Synthetic oligonucleotide
  Antisense strand to SEQ ID NO: 1282548
ucaaaccucuaacauuugg

SEQ ID NO: 1282550 - RNA, 19 nt, Artificial Sequence
  Description of Artificial Sequence: Synthetic oligonucleotide
  Sense strand starting at position 3426 of SEQ ID NO: 1241569
auguuagagguuugacuau

SEQ ID NO: 1282551 - RNA, 19 nt, Artificial Sequence
  Description of Artificial Sequence: Synthetic oligonucleotide
  Antisense strand to SEQ ID NO: 1282550
auagucaaaccucuaacau

SEQ ID NO: 1282552 - RNA, 19 nt, Artificial Sequence
  Description of Artificial Sequence: Synthetic oligonucleotide
  Sense strand starting at position 3432 of SEQ ID NO: 1241569
gagguuugacuauauguua

SEQ ID NO: 1282553 - RNA, 19 nt, Artificial Sequence
  Description of Artificial Sequence: Synthetic oligonucleotide
  Antisense strand to SEQ ID NO: 1282552
uaacauauagucaaaccuc

SEQ ID NO: 1282554 - RNA, 19 nt, Artificial Sequence
  Description of Artificial Sequence: Synthetic oligonucleotide
  Sense strand starting at position 3435 of SEQ ID NO: 1241569
guuugacuauauguuacaa

SEQ ID NO: 1282555 - RNA, 19 nt, Artificial Sequence
  Description of Artificial Sequence: Synthetic oligonucleotide
  Antisense strand to SEQ ID NO: 1282554
uuguaacauauagucaaac

SEQ ID NO: 1282556 - RNA, 19 nt, Artificial Sequence
  Description of Artificial Sequence: Synthetic oligonucleotide
  Sense strand starting at position 3472 of SEQ ID NO: 1241569
agucaaugccuguggacua

SEQ ID NO: 1282557 - RNA, 19 nt, Artificial Sequence
  Description of Artificial Sequence: Synthetic oligonucleotide
  Antisense strand to SEQ ID NO: 1282556
uaguccacaggcauugacu

SEQ ID NO: 1282558 - RNA, 19 nt, Artificial Sequence
  Description of Artificial Sequence: Synthetic oligonucleotide
  Sense strand starting at position 3565 of SEQ ID NO: 1241569
gcaacucuaucccugaguu

SEQ ID NO: 1282559 - RNA, 19 nt, Artificial Sequence
  Description of Artificial Sequence: Synthetic oligonucleotide
  Antisense strand to SEQ ID NO: 1282558
aacucagggauagaguugc

SEQ ID NO: 1282560 - RNA, 19 nt, Artificial Sequence
  Description of Artificial Sequence: Synthetic oligonucleotide
  Sense strand starting at position 3575 of SEQ ID NO: 1241569
cccugaguuagcuaacgcu

SEQ ID NO: 1282561 - RNA, 19 nt, Artificial Sequence
  Description of Artificial Sequence: Synthetic oligonucleotide
  Antisense strand to SEQ ID NO: 1282560
agcguuagcuaacucaggg

SEQ ID NO: 1282562 - RNA, 19 nt, Artificial Sequence
  Description of Artificial Sequence: Synthetic oligonucleotide
  Sense strand starting at position 3622 of SEQ ID NO: 1241569
agcaauuugguacguagau

SEQ ID NO: 1282563 - RNA, 19 nt, Artificial Sequence
  Description of Artificial Sequence: Synthetic oligonucleotide
  Antisense strand to SEQ ID NO: 1282562
aucuacguaccaaauugcu

SEQ ID NO: 1282564 - RNA, 19 nt, Artificial Sequence
  Description of Artificial Sequence: Synthetic oligonucleotide
  Sense strand starting at position 3623 of SEQ ID NO: 1241569
gcaauuugguacguagauc

SEQ ID NO: 1282565 - RNA, 19 nt, Artificial Sequence
  Description of Artificial Sequence: Synthetic oligonucleotide
  Antisense strand to SEQ ID NO: 1282564
gaucuacguaccaaauugc

SEQ ID NO: 1282566 - RNA, 19 nt, Artificial Sequence
  Description of Artificial Sequence: Synthetic oligonucleotide
  Sense strand starting at position 3634 of SEQ ID NO: 1241569
cguagaucugaguauaaua

SEQ ID NO: 1282567 - RNA, 19 nt, Artificial Sequence
  Description of Artificial Sequence: Synthetic oligonucleotide
  Antisense strand to SEQ ID NO: 1282566
uauuauacucagaucuacg

SEQ ID NO: 1282568 - RNA, 19 nt, Artificial Sequence
  Description of Artificial Sequence: Synthetic oligonucleotide
  Sense strand starting at position 3713 of SEQ ID NO: 1241569
gagcauccaugccuaagua

SEQ ID NO: 1282569 - RNA, 19 nt, Artificial Sequence
  Description of Artificial Sequence: Synthetic oligonucleotide
  Antisense strand to SEQ ID NO: 1282568
uacuuaggcauggaugcuc

SEQ ID NO: 1282570 - RNA, 19 nt, Artificial Sequence
  Description of Artificial Sequence: Synthetic oligonucleotide
  Sense strand starting at position 3714 of SEQ ID NO: 1241569
agcauccaugccuaaguaa

SEQ ID NO: 1282571 - RNA, 19 nt, Artificial Sequence
  Description of Artificial Sequence: Synthetic oligonucleotide
  Antisense strand to SEQ ID NO: 1282570
uuacuuaggcauggaugcu

SEQ ID NO: 1282572 - RNA, 19 nt, Artificial Sequence
  Description of Artificial Sequence: Synthetic oligonucleotide
  Sense strand starting at position 3829 of SEQ ID NO: 1241569
auccaugaagauggguauu

SEQ ID NO: 1282573 - RNA, 19 nt, Artificial Sequence
  Description of Artificial Sequence: Synthetic oligonucleotide
  Antisense strand to SEQ ID NO: 1282572
aauacccaucuucauggau

SEQ ID NO: 1282574 - RNA, 19 nt, Artificial Sequence
  Description of Artificial Sequence: Synthetic oligonucleotide
  Sense strand starting at position 8 of SEQ ID NO: 1241570
gucauaaguccauagccaa

SEQ ID NO: 1282575 - RNA, 19 nt, Artificial Sequence
  Description of Artificial Sequence: Synthetic oligonucleotide
  Antisense strand to SEQ ID NO: 1282574
uuggcuauggacuuaugac

SEQ ID NO: 1282576 - RNA, 19 nt, Artificial Sequence
  Description of Artificial Sequence: Synthetic oligonucleotide
  Sense strand starting at position 94 of SEQ ID NO: 1241570
ugaacauaacgcgaacaua

SEQ ID NO: 1282577 - RNA, 19 nt, Artificial Sequence
  Description of Artificial Sequence: Synthetic oligonucleotide
  Antisense strand to SEQ ID NO: 1282576
uauguucgcguuauguuca

SEQ ID NO: 1282578 - RNA, 19 nt, Artificial Sequence
  Description of Artificial Sequence: Synthetic oligonucleotide
  Sense strand starting at position 254 of SEQ ID NO: 1241570
cggugucugucaaggguaa

SEQ ID NO: 1282579 - RNA, 19 nt, Artificial Sequence
  Description of Artificial Sequence: Synthetic oligonucleotide
  Antisense strand to SEQ ID NO: 1282578
uuacccuugacagacaccg

SEQ ID NO: 1282580 - RNA, 19 nt, Artificial Sequence
  Description of Artificial Sequence: Synthetic oligonucleotide
  Sense strand starting at position 255 of SEQ ID NO: 1241570
ggugucugucaaggguaaa

SEQ ID NO: 1282581 - RNA, 19 nt, Artificial Sequence
  Description of Artificial Sequence: Synthetic oligonucleotide
  Antisense strand to SEQ ID NO: 1282580
uuuacccuugacagacacc

SEQ ID NO: 1282582 - RNA, 19 nt, Artificial Sequence
  Description of Artificial Sequence: Synthetic oligonucleotide
  Sense strand starting at position 327 of SEQ ID NO: 1241570
gugacccucuaugaggaua

SEQ ID NO: 1282583 - RNA, 19 nt, Artificial Sequence
  Description of Artificial Sequence: Synthetic oligonucleotide
  Antisense strand to SEQ ID NO: 1282582
uauccucauagagggucac

SEQ ID NO: 1282584 - RNA, 19 nt, Artificial Sequence
  Description of Artificial Sequence: Synthetic oligonucleotide
  Sense strand starting at position 405 of SEQ ID NO: 1241570
gauaccaggcgacaucaau

SEQ ID NO: 1282585 - RNA, 19 nt, Artificial Sequence
  Description of Artificial Sequence: Synthetic oligonucleotide
  Antisense strand to SEQ ID NO: 1282584
auugaugucgccugguauc

SEQ ID NO: 1282586 - RNA, 19 nt, Artificial Sequence
  Description of Artificial Sequence: Synthetic oligonucleotide
  Sense strand starting at position 532 of SEQ ID NO: 1241570
ucagaaccuuggcugaaau

SEQ ID NO: 1282587 - RNA, 19 nt, Artificial Sequence
  Description of Artificial Sequence: Synthetic oligonucleotide
  Antisense strand to SEQ ID NO: 1282586
auuucagccaagguucuga

SEQ ID NO: 1282588 - RNA, 19 nt, Artificial Sequence
  Description of Artificial Sequence: Synthetic oligonucleotide
  Sense strand starting at position 820 of SEQ ID NO: 1241570
ggguccgguccguaaacua

SEQ ID NO: 1282589 - RNA, 19 nt, Artificial Sequence
  Description of Artificial Sequence: Synthetic oligonucleotide
  Antisense strand to SEQ ID NO: 1282588
uaguuuacggaccggaccc

SEQ ID NO: 1282590 - RNA, 19 nt, Artificial Sequence
  Description of Artificial Sequence: Synthetic oligonucleotide
  Sense strand starting at position 836 of SEQ ID NO: 1241570
cuagguuugcuggcgcuaa

SEQ ID NO: 1282591 - RNA, 19 nt, Artificial Sequence
  Description of Artificial Sequence: Synthetic oligonucleotide
  Antisense strand to SEQ ID NO: 1282590
uuagcgccagcaaaccuag

SEQ ID NO: 1282592 - RNA, 19 nt, Artificial Sequence
  Description of Artificial Sequence: Synthetic oligonucleotide
  Sense strand starting at position 1168 of SEQ ID NO: 1241570
ggguggugucuccgggaga

SEQ ID NO: 1282593 - RNA, 19 nt, Artificial Sequence
  Description of Artificial Sequence: Synthetic oligonucleotide
  Antisense strand to SEQ ID NO: 1282592
ucucccggagacaccaccc

SEQ ID NO: 1282594 - RNA, 19 nt, Artificial Sequence
  Description of Artificial Sequence: Synthetic oligonucleotide
  Sense strand starting at position 2403 of SEQ ID NO: 1241570
gcuguaccugcugacuuaa

SEQ ID NO: 1282595 - RNA, 19 nt, Artificial Sequence
  Description of Artificial Sequence: Synthetic oligonucleotide
  Antisense strand to SEQ ID NO: 1282594
uuaagucagcagguacagc

SEQ ID NO: 1282596 - RNA, 19 nt, Artificial Sequence
  Description of Artificial Sequence: Synthetic oligonucleotide
  Sense strand starting at position 2414 of SEQ ID NO: 1241570
ugacuuaacuguccaguua

SEQ ID NO: 1282597 - RNA, 19 nt, Artificial Sequence
  Description of Artificial Sequence: Synthetic oligonucleotide
  Antisense strand to SEQ ID NO: 1282596
uaacuggacaguuaaguca

SEQ ID NO: 1282598 - RNA, 19 nt, Artificial Sequence
  Description of Artificial Sequence: Synthetic oligonucleotide
  Sense strand starting at position 2653 of SEQ ID NO: 1241570
cugaaucuuagcgaccgau

SEQ ID NO: 1282599 - RNA, 19 nt, Artificial Sequence
  Description of Artificial Sequence: Synthetic oligonucleotide
  Antisense strand to SEQ ID NO: 1282598
aucggucgcuaagauucag

SEQ ID NO: 1282600 - RNA, 19 nt, Artificial Sequence
  Description of Artificial Sequence: Synthetic oligonucleotide
  Sense strand starting at position 2656 of SEQ ID NO: 1241570
aaucuuagcgaccgauaag

SEQ ID NO: 1282601 - RNA, 19 nt, Artificial Sequence
  Description of Artificial Sequence: Synthetic oligonucleotide
  Antisense strand to SEQ ID NO: 1282600
cuuaucggucgcuaagauu

SEQ ID NO: 1282602 - RNA, 19 nt, Artificial Sequence
  Description of Artificial Sequence: Synthetic oligonucleotide
  Sense strand starting at position 2668 of SEQ ID NO: 1241570
cgauaaggcuuucccaaga

SEQ ID NO: 1282603 - RNA, 19 nt, Artificial Sequence
  Description of Artificial Sequence: Synthetic oligonucleotide
  Antisense strand to SEQ ID NO: 1282602
ucuugggaaagccuuaucg

SEQ ID NO: 1282604 - RNA, 19 nt, Artificial Sequence
  Description of Artificial Sequence: Synthetic oligonucleotide
  Sense strand starting at position 2728 of SEQ ID NO: 1241570
guguuugguuguguuugaa

SEQ ID NO: 1282605 - RNA, 19 nt, Artificial Sequence
  Description of Artificial Sequence: Synthetic oligonucleotide
  Antisense strand to SEQ ID NO: 1282604
uucaaacacaaccaaacac

SEQ ID NO: 1282606 - RNA, 19 nt, Artificial Sequence
  Description of Artificial Sequence: Synthetic oligonucleotide
  Sense strand starting at position 2813 of SEQ ID NO: 1241570
ggaccuagguccuugauga

SEQ ID NO: 1282607 - RNA, 19 nt, Artificial Sequence
  Description of Artificial Sequence: Synthetic oligonucleotide
  Antisense strand to SEQ ID NO: 1282606
ucaucaaggaccuaggucc

SEQ ID NO: 1282608 - RNA, 19 nt, Artificial Sequence
  Description of Artificial Sequence: Synthetic oligonucleotide
  Sense strand starting at position 2814 of SEQ ID NO: 1241570
gaccuagguccuugaugaa

SEQ ID NO: 1282609 - RNA, 19 nt, Artificial Sequence
  Description of Artificial Sequence: Synthetic oligonucleotide
  Antisense strand to SEQ ID NO: 1282608
uucaucaaggaccuagguc

SEQ ID NO: 1282610 - RNA, 19 nt, Artificial Sequence
  Description of Artificial Sequence: Synthetic oligonucleotide
  Sense strand starting at position 2817 of SEQ ID NO: 1241570
cuagguccuugaugaagaa

SEQ ID NO: 1282611 - RNA, 19 nt, Artificial Sequence
  Description of Artificial Sequence: Synthetic oligonucleotide
  Antisense strand to SEQ ID NO: 1282610
uucuucaucaaggaccuag

SEQ ID NO: 1282612 - RNA, 19 nt, Artificial Sequence
  Description of Artificial Sequence: Synthetic oligonucleotide
  Sense strand starting at position 2870 of SEQ ID NO: 1241570
gcacuugguucuguuaaga

SEQ ID NO: 1282613 - RNA, 19 nt, Artificial Sequence
  Description of Artificial Sequence: Synthetic oligonucleotide
  Antisense strand to SEQ ID NO: 1282612
ucuuaacagaaccaagugc

SEQ ID NO: 1282614 - RNA, 19 nt, Artificial Sequence
  Description of Artificial Sequence: Synthetic oligonucleotide
  Sense strand starting at position 3134 of SEQ ID NO: 1241570
cggcauugugaugagaacu

SEQ ID NO: 1282615 - RNA, 19 nt, Artificial Sequence
  Description of Artificial Sequence: Synthetic oligonucleotide
  Antisense strand to SEQ ID NO: 1282614
aguucucaucacaaugccg

SEQ ID NO: 1282616 - RNA, 19 nt, Artificial Sequence
  Description of Artificial Sequence: Synthetic oligonucleotide
  Sense strand starting at position 3186 of SEQ ID NO: 1241570
gagaucuauccaugugaca

SEQ ID NO: 1282617 - RNA, 19 nt, Artificial Sequence
  Description of Artificial Sequence: Synthetic oligonucleotide
  Antisense strand to SEQ ID NO: 1282616
ugucacauggauagaucuc

SEQ ID NO: 1282618 - RNA, 19 nt, Artificial Sequence
  Description of Artificial Sequence: Synthetic oligonucleotide
  Sense strand starting at position 3191 of SEQ ID NO: 1241570
cuauccaugugacacuaua

SEQ ID NO: 1282619 - RNA, 19 nt, Artificial Sequence
  Description of Artificial Sequence: Synthetic oligonucleotide
  Antisense strand to SEQ ID NO: 1282618
uauagugucacauggauag

SEQ ID NO: 1282620 - RNA, 19 nt, Artificial Sequence
  Description of Artificial Sequence: Synthetic oligonucleotide
  Sense strand starting at position 3242 of SEQ ID NO: 1241570
auauuugauuugugugucu

SEQ ID NO: 1282621 - RNA, 19 nt, Artificial Sequence
  Description of Artificial Sequence: Synthetic oligonucleotide
  Antisense strand to SEQ ID NO: 1282620
agacacacaaaucaaauau

SEQ ID NO: 1282622 - RNA, 19 nt, Artificial Sequence
  Description of Artificial Sequence: Synthetic oligonucleotide
  Sense strand starting at position 3245 of SEQ ID NO: 1241570
uuugauuugugugucuauc

SEQ ID NO: 1282623 - RNA, 19 nt, Artificial Sequence
  Description of Artificial Sequence: Synthetic oligonucleotide
  Antisense strand to SEQ ID NO: 1282622
gauagacacacaaaucaaa

SEQ ID NO: 1282624 - RNA, 19 nt, Artificial Sequence
  Description of Artificial Sequence: Synthetic oligonucleotide
  Sense strand starting at position 3247 of SEQ ID NO: 1241570
ugauuugugugucuaucau

SEQ ID NO: 1282625 - RNA, 19 nt, Artificial Sequence
  Description of Artificial Sequence: Synthetic oligonucleotide
  Antisense strand to SEQ ID NO: 1282624
augauagacacacaaauca

SEQ ID NO: 1282626 - RNA, 19 nt, Artificial Sequence
  Description of Artificial Sequence: Synthetic oligonucleotide
  Sense strand starting at position 3343 of SEQ ID NO: 1241570
ggauguuagacgugucccu

SEQ ID NO: 1282627 - RNA, 19 nt, Artificial Sequence
  Description of Artificial Sequence: Synthetic oligonucleotide
  Antisense strand to SEQ ID NO: 1282626
agggacacgucuaacaucc

SEQ ID NO: 1282628 - RNA, 19 nt, Artificial Sequence
  Description of Artificial Sequence: Synthetic oligonucleotide
  Sense strand starting at position 3350 of SEQ ID NO: 1241570
agacgugucccuuacagaa

SEQ ID NO: 1282629 - RNA, 19 nt, Artificial Sequence
  Description of Artificial Sequence: Synthetic oligonucleotide
  Antisense strand to SEQ ID NO: 1282628
uucuguaagggacacgucu

SEQ ID NO: 1282630 - RNA, 19 nt, Artificial Sequence
  Description of Artificial Sequence: Synthetic oligonucleotide
  Sense strand starting at position 3376 of SEQ ID NO: 1241570
aauugagucgcugggucau

SEQ ID NO: 1282631 - RNA, 19 nt, Artificial Sequence
  Description of Artificial Sequence: Synthetic oligonucleotide
  Antisense strand to SEQ ID NO: 1282630
augacccagcgacucaauu

SEQ ID NO: 1282632 - RNA, 19 nt, Artificial Sequence
  Description of Artificial Sequence: Synthetic oligonucleotide
  Sense strand starting at position 3434 of SEQ ID NO: 1241570
uccagauggcuuugccauu

SEQ ID NO: 1282633 - RNA, 19 nt, Artificial Sequence
  Description of Artificial Sequence: Synthetic oligonucleotide
  Antisense strand to SEQ ID NO: 1282632
aauggcaaagccaucugga

SEQ ID NO: 1282634 - RNA, 19 nt, Artificial Sequence
  Description of Artificial Sequence: Synthetic oligonucleotide
  Sense strand starting at position 3505 of SEQ ID NO: 1241570
augcuaacauuugguauua

SEQ ID NO: 1282635 - RNA, 19 nt, Artificial Sequence
  Description of Artificial Sequence: Synthetic oligonucleotide
  Antisense strand to SEQ ID NO: 1282634
uaauaccaaauguuagcau

SEQ ID NO: 1282636 - RNA, 19 nt, Artificial Sequence
  Description of Artificial Sequence: Synthetic oligonucleotide
  Sense strand starting at position 3507 of SEQ ID NO: 1241570
gcuaacauuugguauuauc

SEQ ID NO: 1282637 - RNA, 19 nt, Artificial Sequence
  Description of Artificial Sequence: Synthetic oligonucleotide
  Antisense strand to SEQ ID NO: 1282636
gauaauaccaaauguuagc

SEQ ID NO: 1282638 - RNA, 19 nt, Artificial Sequence
  Description of Artificial Sequence: Synthetic oligonucleotide
  Sense strand starting at position 3517 of SEQ ID NO: 1241570
gguauuauccgauguccua

SEQ ID NO: 1282639 - RNA, 19 nt, Artificial Sequence
  Description of Artificial Sequence: Synthetic oligonucleotide
  Antisense strand to SEQ ID NO: 1282638
uaggacaucggauaauacc

SEQ ID NO: 1282640 - RNA, 19 nt, Artificial Sequence
  Description of Artificial Sequence: Synthetic oligonucleotide
  Sense strand starting at position 3529 of SEQ ID NO: 1241570
uguccuaauuuaugucaau

SEQ ID NO: 1282641 - RNA, 19 nt, Artificial Sequence
  Description of Artificial Sequence: Synthetic oligonucleotide
  Antisense strand to SEQ ID NO: 1282640
auugacauaaauuaggaca

SEQ ID NO: 1282642 - RNA, 19 nt, Artificial Sequence
  Description of Artificial Sequence: Synthetic oligonucleotide
  Sense strand starting at position 3554 of SEQ ID NO: 1241570
ucaguaaaguaguaucaca

SEQ ID NO: 1282643 - RNA, 19 nt, Artificial Sequence
  Description of Artificial Sequence: Synthetic oligonucleotide
  Antisense strand to SEQ ID NO: 1282642
ugugauacuacuuuacuga

SEQ ID NO: 1282644 - RNA, 19 nt, Artificial Sequence
  Description of Artificial Sequence: Synthetic oligonucleotide
  Sense strand starting at position 3562 of SEQ ID NO: 1241570
guaguaucacauuguaauu

SEQ ID NO: 1282645 - RNA, 19 nt, Artificial Sequence
  Description of Artificial Sequence: Synthetic oligonucleotide
  Antisense strand to SEQ ID NO: 1282644
aauuacaaugugauacuac

SEQ ID NO: 1282646 - RNA, 19 nt, Artificial Sequence
  Description of Artificial Sequence: Synthetic oligonucleotide
  Sense strand starting at position 3571 of SEQ ID NO: 1241570
cauuguaauuucgauuugu

SEQ ID NO: 1282647 - RNA, 19 nt, Artificial Sequence
  Description of Artificial Sequence: Synthetic oligonucleotide
  Antisense strand to SEQ ID NO: 1282646
acaaaucgaaauuacaaug

SEQ ID NO: 1282648 - RNA, 19 nt, Artificial Sequence
  Description of Artificial Sequence: Synthetic oligonucleotide
  Sense strand starting at position 3818 of SEQ ID NO: 1241570
guuugcuuggucuuugcua

SEQ ID NO: 1282649 - RNA, 19 nt, Artificial Sequence
  Description of Artificial Sequence: Synthetic oligonucleotide
  Antisense strand to SEQ ID NO: 1282648
uagcaaagaccaagcaaac

SEQ ID NO: 1282650 - RNA, 19 nt, Artificial Sequence
  Description of Artificial Sequence: Synthetic oligonucleotide
  Sense strand starting at position 3819 of SEQ ID NO: 1241570
uuugcuuggucuuugcuau

SEQ ID NO: 1282651 - RNA, 19 nt, Artificial Sequence
  Description of Artificial Sequence: Synthetic oligonucleotide
  Antisense strand to SEQ ID NO: 1282650
auagcaaagaccaagcaaa

SEQ ID NO: 1282652 - RNA, 19 nt, Artificial Sequence
  Description of Artificial Sequence: Synthetic oligonucleotide
  Sense strand starting at position 3826 of SEQ ID NO: 1241570
ggucuuugcuaugcugcaa

SEQ ID NO: 1282653 - RNA, 19 nt, Artificial Sequence
  Description of Artificial Sequence: Synthetic oligonucleotide
  Antisense strand to SEQ ID NO: 1282652
uugcagcauagcaaagacc

SEQ ID NO: 1282654 - RNA, 19 nt, Artificial Sequence
  Description of Artificial Sequence: Synthetic oligonucleotide
  Sense strand starting at position 191 of SEQ ID NO: 1241571
agcacaugaggcuacaaau

SEQ ID NO: 1282655 - RNA, 19 nt, Artificial Sequence
  Description of Artificial Sequence: Synthetic oligonucleotide
  Antisense strand to SEQ ID NO: 1282654
auuuguagccucaugugcu

SEQ ID NO: 1282656 - RNA, 19 nt, Artificial Sequence
  Description of Artificial Sequence: Synthetic oligonucleotide
  Sense strand starting at position 280 of SEQ ID NO: 1241571
cagaccacgcagugauaaa

SEQ ID NO: 1282657 - RNA, 19 nt, Artificial Sequence
  Description of Artificial Sequence: Synthetic oligonucleotide
  Antisense strand to SEQ ID NO: 1282656
uuuaucacugcguggucug

SEQ ID NO: 1282658 - RNA, 19 nt, Artificial Sequence
  Description of Artificial Sequence: Synthetic oligonucleotide
  Sense strand starting at position 287 of SEQ ID NO: 1241571
cgcagugauaaacagagua

SEQ ID NO: 1282659 - RNA, 19 nt, Artificial Sequence
  Description of Artificial Sequence: Synthetic oligonucleotide
  Antisense strand to SEQ ID NO: 1282658
uacucuguuuaucacugcg

SEQ ID NO: 1282660 - RNA, 19 nt, Artificial Sequence
  Description of Artificial Sequence: Synthetic oligonucleotide
  Sense strand starting at position 481 of SEQ ID NO: 1241571
ggguaaguggguugccuaa

SEQ ID NO: 1282661 - RNA, 19 nt, Artificial Sequence
  Description of Artificial Sequence: Synthetic oligonucleotide
  Antisense strand to SEQ ID NO: 1282660
uuaggcaacccacuuaccc

SEQ ID NO: 1282662 - RNA, 19 nt, Artificial Sequence
  Description of Artificial Sequence: Synthetic oligonucleotide
  Sense strand starting at position 531 of SEQ ID NO: 1241571
gcucaaauuccagagcuga

SEQ ID NO: 1282663 - RNA, 19 nt, Artificial Sequence
  Description of Artificial Sequence: Synthetic oligonucleotide
  Antisense strand to SEQ ID NO: 1282662
ucagcucuggaauuugagc

SEQ ID NO: 1282664 - RNA, 19 nt, Artificial Sequence
  Description of Artificial Sequence: Synthetic oligonucleotide
  Sense strand starting at position 676 of SEQ ID NO: 1241571
gccucugcccugggauuua

SEQ ID NO: 1282665 - RNA, 19 nt, Artificial Sequence
  Description of Artificial Sequence: Synthetic oligonucleotide
  Antisense strand to SEQ ID NO: 1282664
uaaaucccagggcagaggc

SEQ ID NO: 1282666 - RNA, 19 nt, Artificial Sequence
  Description of Artificial Sequence: Synthetic oligonucleotide
  Sense strand starting at position 721 of SEQ ID NO: 1241571
cugggcaguccugacagau

SEQ ID NO: 1282667 - RNA, 19 nt, Artificial Sequence
  Description of Artificial Sequence: Synthetic oligonucleotide
  Antisense strand to SEQ ID NO: 1282666
aucugucaggacugcccag

SEQ ID NO: 1282668 - RNA, 19 nt, Artificial Sequence
  Description of Artificial Sequence: Synthetic oligonucleotide
  Sense strand starting at position 749 of SEQ ID NO: 1241571
ugcauuaucugucuacauc

SEQ ID NO: 1282669 - RNA, 19 nt, Artificial Sequence
  Description of Artificial Sequence: Synthetic oligonucleotide
  Antisense strand to SEQ ID NO: 1282668
gauguagacagauaaugca

SEQ ID NO: 1282670 - RNA, 19 nt, Artificial Sequence
  Description of Artificial Sequence: Synthetic oligonucleotide
  Sense strand starting at position 796 of SEQ ID NO: 1241571
gcugccuuccguguugaaa

SEQ ID NO: 1282671 - RNA, 19 nt, Artificial Sequence
  Description of Artificial Sequence: Synthetic oligonucleotide
  Antisense strand to SEQ ID NO: 1282670
uuucaacacggaaggcagc

SEQ ID NO: 1282672 - RNA, 19 nt, Artificial Sequence
  Description of Artificial Sequence: Synthetic oligonucleotide
  Sense strand starting at position 847 of SEQ ID NO: 1241571
agugguucuggugagaaag

SEQ ID NO: 1282673 - RNA, 19 nt, Artificial Sequence
  Description of Artificial Sequence: Synthetic oligonucleotide
  Antisense strand to SEQ ID NO: 1282672
cuuucucaccagaaccacu

SEQ ID NO: 1282674 - RNA, 19 nt, Artificial Sequence
  Description of Artificial Sequence: Synthetic oligonucleotide
  Sense strand starting at position 901 of SEQ ID NO: 1241571
aaguuuguuucuuugcuga

SEQ ID NO: 1282675 - RNA, 19 nt, Artificial Sequence
  Description of Artificial Sequence: Synthetic oligonucleotide
  Antisense strand to SEQ ID NO: 1282674
ucagcaaagaaacaaacuu

SEQ ID NO: 1282676 - RNA, 19 nt, Artificial Sequence
  Description of Artificial Sequence: Synthetic oligonucleotide
  Sense strand starting at position 904 of SEQ ID NO: 1241571
uuuguuucuuugcugaauu

SEQ ID NO: 1282677 - RNA, 19 nt, Artificial Sequence
  Description of Artificial Sequence: Synthetic oligonucleotide
  Antisense strand to SEQ ID NO: 1282676
aauucagcaaagaaacaaa

SEQ ID NO: 1282678 - RNA, 19 nt, Artificial Sequence
  Description of Artificial Sequence: Synthetic oligonucleotide
  Sense strand starting at position 942 of SEQ ID NO: 1241571
auuggaagguauucucuga

SEQ ID NO: 1282679 - RNA, 19 nt, Artificial Sequence
  Description of Artificial Sequence: Synthetic oligonucleotide
  Antisense strand to SEQ ID NO: 1282678
ucagagaauaccuuccaau

SEQ ID NO: 1282680 - RNA, 19 nt, Artificial Sequence
  Description of Artificial Sequence: Synthetic oligonucleotide
  Sense strand starting at position 984 of SEQ ID NO: 1241571
cccgguccugcaggauuua

SEQ ID NO: 1282681 - RNA, 19 nt, Artificial Sequence
  Description of Artificial Sequence: Synthetic oligonucleotide
  Antisense strand to SEQ ID NO: 1282680
uaaauccugcaggaccggg

SEQ ID NO: 1282682 - RNA, 19 nt, Artificial Sequence
  Description of Artificial Sequence: Synthetic oligonucleotide
  Sense strand starting at position 1013 of SEQ ID NO: 1241571
gaagccucucuuuggaguu

SEQ ID NO: 1282683 - RNA, 19 nt, Artificial Sequence
  Description of Artificial Sequence: Synthetic oligonucleotide
  Antisense strand to SEQ ID NO: 1282682
aacuccaaagagaggcuuc

SEQ ID NO: 1282684 - RNA, 19 nt, Artificial Sequence
  Description of Artificial Sequence: Synthetic oligonucleotide
  Sense strand starting at position 1563 of SEQ ID NO: 1241571
cgcgcacagcuccagaaua

SEQ ID NO: 1282685 - RNA, 19 nt, Artificial Sequence
  Description of Artificial Sequence: Synthetic oligonucleotide
  Antisense strand to SEQ ID NO: 1282684
uauucuggagcugugcgcg

SEQ ID NO: 1282686 - RNA, 19 nt, Artificial Sequence
  Description of Artificial Sequence: Synthetic oligonucleotide
  Sense strand starting at position 1565 of SEQ ID NO: 1241571
cgcacagcuccagaauacu

SEQ ID NO: 1282687 - RNA, 19 nt, Artificial Sequence
  Description of Artificial Sequence: Synthetic oligonucleotide
  Antisense strand to SEQ ID NO: 1282686
aguauucuggagcugugcg

SEQ ID NO: 1282688 - RNA, 19 nt, Artificial Sequence
  Description of Artificial Sequence: Synthetic oligonucleotide
  Sense strand starting at position 1574 of SEQ ID NO: 1241571
ccagaauacugcgugcaua

SEQ ID NO: 1282689 - RNA, 19 nt, Artificial Sequence
  Description of Artificial Sequence: Synthetic oligonucleotide
  Antisense strand to SEQ ID NO: 1282688
uaugcacgcaguauucugg

SEQ ID NO: 1282690 - RNA, 19 nt, Artificial Sequence
  Description of Artificial Sequence: Synthetic oligonucleotide
  Sense strand starting at position 1575 of SEQ ID NO: 1241571
cagaauacugcgugcauac

SEQ ID NO: 1282691 - RNA, 19 nt, Artificial Sequence
  Description of Artificial Sequence: Synthetic oligonucleotide
  Antisense strand to SEQ ID NO: 1282690
guaugcacgcaguauucug

SEQ ID NO: 1282692 - RNA, 19 nt, Artificial Sequence
  Description of Artificial Sequence: Synthetic oligonucleotide
  Sense strand starting at position 2494 of SEQ ID NO: 1241571
gugcccgagcucucuacua

SEQ ID NO: 1282693 - RNA, 19 nt, Artificial Sequence
  Description of Artificial Sequence: Synthetic oligonucleotide
  Antisense strand to SEQ ID NO: 1282692
uaguagagagcucgggcac

SEQ ID NO: 1282694 - RNA, 19 nt, Artificial Sequence
  Description of Artificial Sequence: Synthetic oligonucleotide
  Sense strand starting at position 2704 of SEQ ID NO: 1241571
agugauuccucgucuccau

SEQ ID NO: 1282695 - RNA, 19 nt, Artificial Sequence
  Description of Artificial Sequence: Synthetic oligonucleotide
  Antisense strand to SEQ ID NO: 1282694
auggagacgaggaaucacu

SEQ ID NO: 1282696 - RNA, 19 nt, Artificial Sequence
  Description of Artificial Sequence: Synthetic oligonucleotide
  Sense strand starting at position 2736 of SEQ ID NO: 1241571
uguguauugggcgcuuaau

SEQ ID NO: 1282697 - RNA, 19 nt, Artificial Sequence
  Description of Artificial Sequence: Synthetic oligonucleotide
  Antisense strand to SEQ ID NO: 1282696
auuaagcgcccaauacaca

SEQ ID NO: 1282698 - RNA, 19 nt, Artificial Sequence
  Description of Artificial Sequence: Synthetic oligonucleotide
  Sense strand starting at position 2737 of SEQ ID NO: 1241571
guguauugggcgcuuaauu

SEQ ID NO: 1282699 - RNA, 19 nt, Artificial Sequence
  Description of Artificial Sequence: Synthetic oligonucleotide
  Antisense strand to SEQ ID NO: 1282698
aauuaagcgcccaauacac

SEQ ID NO: 1282700 - RNA, 19 nt, Artificial Sequence
  Description of Artificial Sequence: Synthetic oligonucleotide
  Sense strand starting at position 3003 of SEQ ID NO: 1241571
agcagaaacucucuugcaa

SEQ ID NO: 1282701 - RNA, 19 nt, Artificial Sequence
  Description of Artificial Sequence: Synthetic oligonucleotide
  Antisense strand to SEQ ID NO: 1282700
uugcaagagaguuucugcu

SEQ ID NO: 1282702 - RNA, 19 nt, Artificial Sequence
  Description of Artificial Sequence: Synthetic oligonucleotide
  Sense strand starting at position 3061 of SEQ ID NO: 1241571
ggagaacauuucuaccacu

SEQ ID NO: 1282703 - RNA, 19 nt, Artificial Sequence
  Description of Artificial Sequence: Synthetic oligonucleotide
  Antisense strand to SEQ ID NO: 1282702
agugguagaaauguucucc

SEQ ID NO: 1282704 - RNA, 19 nt, Artificial Sequence
  Description of Artificial Sequence: Synthetic oligonucleotide
  Sense strand starting at position 3097 of SEQ ID NO: 1241571
ugcaaacuccucuguuuga

SEQ ID NO: 1282705 - RNA, 19 nt, Artificial Sequence
  Description of Artificial Sequence: Synthetic oligonucleotide
  Antisense strand to SEQ ID NO: 1282704
ucaaacagaggaguuugca

SEQ ID NO: 1282706 - RNA, 19 nt, Artificial Sequence
  Description of Artificial Sequence: Synthetic oligonucleotide
  Sense strand starting at position 3106 of SEQ ID NO: 1241571
cucuguuugaggcaagauu

SEQ ID NO: 1282707 - RNA, 19 nt, Artificial Sequence
  Description of Artificial Sequence: Synthetic oligonucleotide
  Antisense strand to SEQ ID NO: 1282706
aaucuugccucaaacagag

SEQ ID NO: 1282708 - RNA, 19 nt, Artificial Sequence
  Description of Artificial Sequence: Synthetic oligonucleotide
  Sense strand starting at position 3115 of SEQ ID NO: 1241571
aggcaagauuaucaacaag

SEQ ID NO: 1282709 - RNA, 19 nt, Artificial Sequence
  Description of Artificial Sequence: Synthetic oligonucleotide
  Antisense strand to SEQ ID NO: 1282708
cuuguugauaaucuugccu

SEQ ID NO: 1282710 - RNA, 19 nt, Artificial Sequence
  Description of Artificial Sequence: Synthetic oligonucleotide
  Sense strand starting at position 3359 of SEQ ID NO: 1241571
agugcaugcauggaagaaa

SEQ ID NO: 1282711 - RNA, 19 nt, Artificial Sequence
  Description of Artificial Sequence: Synthetic oligonucleotide
  Antisense strand to SEQ ID NO: 1282710
uuucuuccaugcaugcacu

SEQ ID NO: 1282712 - RNA, 19 nt, Artificial Sequence
  Description of Artificial Sequence: Synthetic oligonucleotide
  Sense strand starting at position 3449 of SEQ ID NO: 1241571
ugguuugcagaguauaaac

SEQ ID NO: 1282713 - RNA, 19 nt, Artificial Sequence
  Description of Artificial Sequence: Synthetic oligonucleotide
  Antisense strand to SEQ ID NO: 1282712
guuuauacucugcaaacca

SEQ ID NO: 1282714 - RNA, 19 nt, Artificial Sequence
  Description of Artificial Sequence: Synthetic oligonucleotide
  Sense strand starting at position 3451 of SEQ ID NO: 1241571
guuugcagaguauaaacua

SEQ ID NO: 1282715 - RNA, 19 nt, Artificial Sequence
  Description of Artificial Sequence: Synthetic oligonucleotide
  Antisense strand to SEQ ID NO: 1282714
uaguuuauacucugcaaac

SEQ ID NO: 1282716 - RNA, 19 nt, Artificial Sequence
  Description of Artificial Sequence: Synthetic oligonucleotide
  Sense strand starting at position 3736 of SEQ ID NO: 1241571
gggugacuuccugggagua

SEQ ID NO: 1282717 - RNA, 19 nt, Artificial Sequence
  Description of Artificial Sequence: Synthetic oligonucleotide
  Antisense strand to SEQ ID NO: 1282716
uacucccaggaagucaccc

SEQ ID NO: 1282718 - RNA, 19 nt, Artificial Sequence
  Description of Artificial Sequence: Synthetic oligonucleotide
  Sense strand starting at position 3771 of SEQ ID NO: 1241571
auugguaacucuuugugca

SEQ ID NO: 1282719 - RNA, 19 nt, Artificial Sequence
  Description of Artificial Sequence: Synthetic oligonucleotide
  Antisense strand to SEQ ID NO: 1282718
ugcacaaagaguuaccaau

SEQ ID NO: 1282720 - RNA, 19 nt, Artificial Sequence
  Description of Artificial Sequence: Synthetic oligonucleotide
  Sense strand starting at position 3772 of SEQ ID NO: 1241571
uugguaacucuuugugcaa

SEQ ID NO: 1282721 - RNA, 19 nt, Artificial Sequence
  Description of Artificial Sequence: Synthetic oligonucleotide
  Antisense strand to SEQ ID NO: 1282720
uugcacaaagaguuaccaa

SEQ ID NO: 1282722 - RNA, 19 nt, Artificial Sequence
  Description of Artificial Sequence: Synthetic oligonucleotide
  Sense strand starting at position 3773 of SEQ ID NO: 1241571
ugguaacucuuugugcaaa

SEQ ID NO: 1282723 - RNA, 19 nt, Artificial Sequence
  Description of Artificial Sequence: Synthetic oligonucleotide
  Antisense strand to SEQ ID NO: 1282722
uuugcacaaagaguuacca

SEQ ID NO: 1282724 - RNA, 19 nt, Artificial Sequence
  Description of Artificial Sequence: Synthetic oligonucleotide
  Sense strand starting at position 3775 of SEQ ID NO: 1241571
guaacucuuugugcaaaga

SEQ ID NO: 1282725 - RNA, 19 nt, Artificial Sequence
  Description of Artificial Sequence: Synthetic oligonucleotide
  Antisense strand to SEQ ID NO: 1282724
ucuuugcacaaagaguuac

SEQ ID NO: 1282726 - RNA, 19 nt, Artificial Sequence
  Description of Artificial Sequence: Synthetic oligonucleotide
  Sense strand starting at position 3962 of SEQ ID NO: 1241571
agggacuuccuaggugacu

SEQ ID NO: 1282727 - RNA, 19 nt, Artificial Sequence
  Description of Artificial Sequence: Synthetic oligonucleotide
  Antisense strand to SEQ ID NO: 1282726
agucaccuaggaagucccu

SEQ ID NO: 1282728 - RNA, 19 nt, Artificial Sequence
  Description of Artificial Sequence: Synthetic oligonucleotide
  Sense strand starting at position 3964 of SEQ ID NO: 1241571
ggacuuccuaggugacuca

SEQ ID NO: 1282729 - RNA, 19 nt, Artificial Sequence
  Description of Artificial Sequence: Synthetic oligonucleotide
  Antisense strand to SEQ ID NO: 1282728
ugagucaccuaggaagucc

SEQ ID NO: 1282730 - RNA, 19 nt, Artificial Sequence
  Description of Artificial Sequence: Synthetic oligonucleotide
  Sense strand starting at position 3971 of SEQ ID NO: 1241571
cuaggugacucaucuacag

SEQ ID NO: 1282731 - RNA, 19 nt, Artificial Sequence
  Description of Artificial Sequence: Synthetic oligonucleotide
  Antisense strand to SEQ ID NO: 1282730
cuguagaugagucaccuag

SEQ ID NO: 1282732 - RNA, 19 nt, Artificial Sequence
  Description of Artificial Sequence: Synthetic oligonucleotide
  Sense strand starting at position 3980 of SEQ ID NO: 1241571
ucaucuacaguuuggagaa

SEQ ID NO: 1282733 - RNA, 19 nt, Artificial Sequence
  Description of Artificial Sequence: Synthetic oligonucleotide
  Antisense strand to SEQ ID NO: 1282732
uucuccaaacuguagauga

SEQ ID NO: 1282734 - RNA, 19 nt, Artificial Sequence
  Description of Artificial Sequence: Synthetic oligonucleotide
  Sense strand starting at position 82 of SEQ ID NO: 1241572
caaagacagugugaggauu

SEQ ID NO: 1282735 - RNA, 19 nt, Artificial Sequence
  Description of Artificial Sequence: Synthetic oligonucleotide
  Antisense strand to SEQ ID NO: 1282734
aauccucacacugucuuug

SEQ ID NO: 1282736 - RNA, 19 nt, Artificial Sequence
  Description of Artificial Sequence: Synthetic oligonucleotide
  Sense strand starting at position 123 of SEQ ID NO: 1241572
ccguguagagcgcucuaga

SEQ ID NO: 1282737 - RNA, 19 nt, Artificial Sequence
  Description of Artificial Sequence: Synthetic oligonucleotide
  Antisense strand to SEQ ID NO: 1282736
ucuagagcgcucuacacgg

SEQ ID NO: 1282738 - RNA, 19 nt, Artificial Sequence
  Description of Artificial Sequence: Synthetic oligonucleotide
  Sense strand starting at position 124 of SEQ ID NO: 1241572
cguguagagcgcucuagaa

SEQ ID NO: 1282739 - RNA, 19 nt, Artificial Sequence
  Description of Artificial Sequence: Synthetic oligonucleotide
  Antisense strand to SEQ ID NO: 1282738
uucuagagcgcucuacacg

SEQ ID NO: 1282740 - RNA, 19 nt, Artificial Sequence
  Description of Artificial Sequence: Synthetic oligonucleotide
  Sense strand starting at position 126 of SEQ ID NO: 1241572
uguagagcgcucuagaagu

SEQ ID NO: 1282741 - RNA, 19 nt, Artificial Sequence
  Description of Artificial Sequence: Synthetic oligonucleotide
  Antisense strand to SEQ ID NO: 1282740
acuucuagagcgcucuaca

SEQ ID NO: 1282742 - RNA, 19 nt, Artificial Sequence
  Description of Artificial Sequence: Synthetic oligonucleotide
  Sense strand starting at position 128 of SEQ ID NO: 1241572
uagagcgcucuagaaguuu

SEQ ID NO: 1282743 - RNA, 19 nt, Artificial Sequence
  Description of Artificial Sequence: Synthetic oligonucleotide
  Antisense strand to SEQ ID NO: 1282742
aaacuucuagagcgcucua

SEQ ID NO: 1282744 - RNA, 19 nt, Artificial Sequence
  Description of Artificial Sequence: Synthetic oligonucleotide
  Sense strand starting at position 146 of SEQ ID NO: 1241572
uuaauugauuuacagcaga

SEQ ID NO: 1282745 - RNA, 19 nt, Artificial Sequence
  Description of Artificial Sequence: Synthetic oligonucleotide
  Antisense strand to SEQ ID NO: 1282744
ucugcuguaaaucaauuaa

SEQ ID NO: 1282746 - RNA, 19 nt, Artificial Sequence
  Description of Artificial Sequence: Synthetic oligonucleotide
  Sense strand starting at position 167 of SEQ ID NO: 1241572
uuaugccuccugggaacua

SEQ ID NO: 1282747 - RNA, 19 nt, Artificial Sequence
  Description of Artificial Sequence: Synthetic oligonucleotide
  Antisense strand to SEQ ID NO: 1282746
uaguucccaggaggcauaa

SEQ ID NO: 1282748 - RNA, 19 nt, Artificial Sequence
  Description of Artificial Sequence: Synthetic oligonucleotide
  Sense strand starting at position 215 of SEQ ID NO: 1241572
cggguagcuacacgucaau

SEQ ID NO: 1282749 - RNA, 19 nt, Artificial Sequence
  Description of Artificial Sequence: Synthetic oligonucleotide
  Antisense strand to SEQ ID NO: 1282748
auugacguguagcuacccg

SEQ ID NO: 1282750 - RNA, 19 nt, Artificial Sequence
  Description of Artificial Sequence: Synthetic oligonucleotide
  Sense strand starting at position 365 of SEQ ID NO: 1241572
guuacuugcaaguauaugu

SEQ ID NO: 1282751 - RNA, 19 nt, Artificial Sequence
  Description of Artificial Sequence: Synthetic oligonucleotide
  Antisense strand to SEQ ID NO: 1282750
acauauacuugcaaguaac

SEQ ID NO: 1282752 - RNA, 19 nt, Artificial Sequence
  Description of Artificial Sequence: Synthetic oligonucleotide
  Sense strand starting at position 442 of SEQ ID NO: 1241572
cgcucauuucccugccagu

SEQ ID NO: 1282753 - RNA, 19 nt, Artificial Sequence
  Description of Artificial Sequence: Synthetic oligonucleotide
  Antisense strand to SEQ ID NO: 1282752
acuggcagggaaaugagcg

SEQ ID NO: 1282754 - RNA, 19 nt, Artificial Sequence
  Description of Artificial Sequence: Synthetic oligonucleotide
  Sense strand starting at position 470 of SEQ ID NO: 1241572
guaccucugggaugugcaa

SEQ ID NO: 1282755 - RNA, 19 nt, Artificial Sequence
  Description of Artificial Sequence: Synthetic oligonucleotide
  Antisense strand to SEQ ID NO: 1282754
uugcacaucccagagguac

SEQ ID NO: 1282756 - RNA, 19 nt, Artificial Sequence
  Description of Artificial Sequence: Synthetic oligonucleotide
  Sense strand starting at position 544 of SEQ ID NO: 1241572
augaauaauacucgcgaga

SEQ ID NO: 1282757 - RNA, 19 nt, Artificial Sequence
  Description of Artificial Sequence: Synthetic oligonucleotide
  Antisense strand to SEQ ID NO: 1282756
ucucgcgaguauuauucau

SEQ ID NO: 1282758 - RNA, 19 nt, Artificial Sequence
  Description of Artificial Sequence: Synthetic oligonucleotide
  Sense strand starting at position 547 of SEQ ID NO: 1241572
aauaauacucgcgagaaug

SEQ ID NO: 1282759 - RNA, 19 nt, Artificial Sequence
  Description of Artificial Sequence: Synthetic oligonucleotide
  Antisense strand to SEQ ID NO: 1282758
cauucucgcgaguauuauu

SEQ ID NO: 1282760 - RNA, 19 nt, Artificial Sequence
  Description of Artificial Sequence: Synthetic oligonucleotide
  Sense strand starting at position 549 of SEQ ID NO: 1241572
uaauacucgcgagaaugua

SEQ ID NO: 1282761 - RNA, 19 nt, Artificial Sequence
  Description of Artificial Sequence: Synthetic oligonucleotide
  Antisense strand to SEQ ID NO: 1282760
uacauucucgcgaguauua

SEQ ID NO: 1282762 - RNA, 19 nt, Artificial Sequence
  Description of Artificial Sequence: Synthetic oligonucleotide
  Sense strand starting at position 652 of SEQ ID NO: 1241572
cacucucgugcugaaaguu

SEQ ID NO: 1282763 - RNA, 19 nt, Artificial Sequence
  Description of Artificial Sequence: Synthetic oligonucleotide
  Antisense strand to SEQ ID NO: 1282762
aacuuucagcacgagagug

SEQ ID NO: 1282764 - RNA, 19 nt, Artificial Sequence
  Description of Artificial Sequence: Synthetic oligonucleotide
  Sense strand starting at position 668 of SEQ ID NO: 1241572
guuggagcuccuuacccaa

SEQ ID NO: 1282765 - RNA, 19 nt, Artificial Sequence
  Description of Artificial Sequence: Synthetic oligonucleotide
  Antisense strand to SEQ ID NO: 1282764
uuggguaaggagcuccaac

SEQ ID NO: 1282766 - RNA, 19 nt, Artificial Sequence
  Description of Artificial Sequence: Synthetic oligonucleotide
  Sense strand starting at position 671 of SEQ ID NO: 1241572
ggagcuccuuacccaaaga

SEQ ID NO: 1282767 - RNA, 19 nt, Artificial Sequence
  Description of Artificial Sequence: Synthetic oligonucleotide
  Antisense strand to SEQ ID NO: 1282766
ucuuuggguaaggagcucc

SEQ ID NO: 1282768 - RNA, 19 nt, Artificial Sequence
  Description of Artificial Sequence: Synthetic oligonucleotide
  Sense strand starting at position 868 of SEQ ID NO: 1241572
ggaauucccucagccacaa

SEQ ID NO: 1282769 - RNA, 19 nt, Artificial Sequence
  Description of Artificial Sequence: Synthetic oligonucleotide
  Antisense strand to SEQ ID NO: 1282768
uuguggcugagggaauucc

SEQ ID NO: 1282770 - RNA, 19 nt, Artificial Sequence
  Description of Artificial Sequence: Synthetic oligonucleotide
  Sense strand starting at position 880 of SEQ ID NO: 1241572
gccacaaagcgaugggaaa

SEQ ID NO: 1282771 - RNA, 19 nt, Artificial Sequence
  Description of Artificial Sequence: Synthetic oligonucleotide
  Antisense strand to SEQ ID NO: 1282770
uuucccaucgcuuuguggc

SEQ ID NO: 1282772 - RNA, 19 nt, Artificial Sequence
  Description of Artificial Sequence: Synthetic oligonucleotide
  Sense strand starting at position 2295 of SEQ ID NO: 1241572
uccuaauauuuacagggau

SEQ ID NO: 1282773 - RNA, 19 nt, Artificial Sequence
  Description of Artificial Sequence: Synthetic oligonucleotide
  Antisense strand to SEQ ID NO: 1282772
aucccuguaaauauuagga

SEQ ID NO: 1282774 - RNA, 19 nt, Artificial Sequence
  Description of Artificial Sequence: Synthetic oligonucleotide
  Sense strand starting at position 2331 of SEQ ID NO: 1241572
gcucgaacgcauccuguuu

SEQ ID NO: 1282775 - RNA, 19 nt, Artificial Sequence
  Description of Artificial Sequence: Synthetic oligonucleotide
  Antisense strand to SEQ ID NO: 1282774
aaacaggaugcguucgagc

SEQ ID NO: 1282776 - RNA, 19 nt, Artificial Sequence
  Description of Artificial Sequence: Synthetic oligonucleotide
  Sense strand starting at position 2401 of SEQ ID NO: 1241572
uuaauagggcaguaguaau

SEQ ID NO: 1282777 - RNA, 19 nt, Artificial Sequence
  Description of Artificial Sequence: Synthetic oligonucleotide
  Antisense strand to SEQ ID NO: 1282776
auuacuacugcccuauuaa

SEQ ID NO: 1282778 - RNA, 19 nt, Artificial Sequence
  Description of Artificial Sequence: Synthetic oligonucleotide
  Sense strand starting at position 2408 of SEQ ID NO: 1241572
ggcaguaguaaugauggaa

SEQ ID NO: 1282779 - RNA, 19 nt, Artificial Sequence
  Description of Artificial Sequence: Synthetic oligonucleotide
  Antisense strand to SEQ ID NO: 1282778
uuccaucauuacuacugcc

SEQ ID NO: 1282780 - RNA, 19 nt, Artificial Sequence
  Description of Artificial Sequence: Synthetic oligonucleotide
  Sense strand starting at position 2411 of SEQ ID NO: 1241572
aguaguaaugauggaaauc

SEQ ID NO: 1282781 - RNA, 19 nt, Artificial Sequence
  Description of Artificial Sequence: Synthetic oligonucleotide
  Antisense strand to SEQ ID NO: 1282780
gauuuccaucauuacuacu

SEQ ID NO: 1282782 - RNA, 19 nt, Artificial Sequence
  Description of Artificial Sequence: Synthetic oligonucleotide
  Sense strand starting at position 2453 of SEQ ID NO: 1241572
gugugucuuguugcacaua

SEQ ID NO: 1282783 - RNA, 19 nt, Artificial Sequence
  Description of Artificial Sequence: Synthetic oligonucleotide
  Antisense strand to SEQ ID NO: 1282782
uaugugcaacaagacacac

SEQ ID NO: 1282784 - RNA, 19 nt, Artificial Sequence
  Description of Artificial Sequence: Synthetic oligonucleotide
  Sense strand starting at position 2474 of SEQ ID NO: 1241572
gcaggaaaggucgguucuu

SEQ ID NO: 1282785 - RNA, 19 nt, Artificial Sequence
  Description of Artificial Sequence: Synthetic oligonucleotide
  Antisense strand to SEQ ID NO: 1282784
aagaaccgaccuuuccugc

SEQ ID NO: 1282786 - RNA, 19 nt, Artificial Sequence
  Description of Artificial Sequence: Synthetic oligonucleotide
  Sense strand starting at position 2617 of SEQ ID NO: 1241572
ggaagaaauugccucuucu

SEQ ID NO: 1282787 - RNA, 19 nt, Artificial Sequence
  Description of Artificial Sequence: Synthetic oligonucleotide
  Antisense strand to SEQ ID NO: 1282786
agaagaggcaauuucuucc

SEQ ID NO: 1282788 - RNA, 19 nt, Artificial Sequence
  Description of Artificial Sequence: Synthetic oligonucleotide
  Sense strand starting at position 3154 of SEQ ID NO: 1241572
auuacauucugucuugcua

SEQ ID NO: 1282789 - RNA, 19 nt, Artificial Sequence
  Description of Artificial Sequence: Synthetic oligonucleotide
  Antisense strand to SEQ ID NO: 1282788
uagcaagacagaauguaau

SEQ ID NO: 1282790 - RNA, 19 nt, Artificial Sequence
  Description of Artificial Sequence: Synthetic oligonucleotide
  Sense strand starting at position 3188 of SEQ ID NO: 1241572
agcagauucggcuugcuuu

SEQ ID NO: 1282791 - RNA, 19 nt, Artificial Sequence
  Description of Artificial Sequence: Synthetic oligonucleotide
  Antisense strand to SEQ ID NO: 1282790
aaagcaagccgaaucugcu

SEQ ID NO: 1282792 - RNA, 19 nt, Artificial Sequence
  Description of Artificial Sequence: Synthetic oligonucleotide
  Sense strand starting at position 3447 of SEQ ID NO: 1241572
cuuucuaauugaguagguu

SEQ ID NO: 1282793 - RNA, 19 nt, Artificial Sequence
  Description of Artificial Sequence: Synthetic oligonucleotide
  Antisense strand to SEQ ID NO: 1282792
aaccuacucaauuagaaag

SEQ ID NO: 1282794 - RNA, 19 nt, Artificial Sequence
  Description of Artificial Sequence: Synthetic oligonucleotide
  Sense strand starting at position 3455 of SEQ ID NO: 1241572
uugaguagguucucaacga

SEQ ID NO: 1282795 - RNA, 19 nt, Artificial Sequence
  Description of Artificial Sequence: Synthetic oligonucleotide
  Antisense strand to SEQ ID NO: 1282794
ucguugagaaccuacucaa

SEQ ID NO: 1282796 - RNA, 19 nt, Artificial Sequence
  Description of Artificial Sequence: Synthetic oligonucleotide
  Sense strand starting at position 3459 of SEQ ID NO: 1241572
guagguucucaacgauuuc

SEQ ID NO: 1282797 - RNA, 19 nt, Artificial Sequence
  Description of Artificial Sequence: Synthetic oligonucleotide
  Antisense strand to SEQ ID NO: 1282796
gaaaucguugagaaccuac

SEQ ID NO: 1282798 - RNA, 19 nt, Artificial Sequence
  Description of Artificial Sequence: Synthetic oligonucleotide
  Sense strand starting at position 3490 of SEQ ID NO: 1241572
ggaggccugacccguaaua

SEQ ID NO: 1282799 - RNA, 19 nt, Artificial Sequence
  Description of Artificial Sequence: Synthetic oligonucleotide
  Antisense strand to SEQ ID NO: 1282798
uauuacgggucaggccucc

SEQ ID NO: 1282800 - RNA, 19 nt, Artificial Sequence
  Description of Artificial Sequence: Synthetic oligonucleotide
  Sense strand starting at position 3492 of SEQ ID NO: 1241572
aggccugacccguaauaac

SEQ ID NO: 1282801 - RNA, 19 nt, Artificial Sequence
  Description of Artificial Sequence: Synthetic oligonucleotide
  Antisense strand to SEQ ID NO: 1282800
guuauuacgggucaggccu

SEQ ID NO: 1282802 - RNA, 19 nt, Artificial Sequence
  Description of Artificial Sequence: Synthetic oligonucleotide
  Sense strand starting at position 3501 of SEQ ID NO: 1241572
ccguaauaacagcacuaua

SEQ ID NO: 1282803 - RNA, 19 nt, Artificial Sequence
  Description of Artificial Sequence: Synthetic oligonucleotide
  Antisense strand to SEQ ID NO: 1282802
uauagugcuguuauuacgg

SEQ ID NO: 1282804 - RNA, 19 nt, Artificial Sequence
  Description of Artificial Sequence: Synthetic oligonucleotide
  Sense strand starting at position 3577 of SEQ ID NO: 1241572
accaaagcuuccuuagaga

SEQ ID NO: 1282805 - RNA, 19 nt, Artificial Sequence
  Description of Artificial Sequence: Synthetic oligonucleotide
  Antisense strand to SEQ ID NO: 1282804
ucucuaaggaagcuuuggu

SEQ ID NO: 1282806 - RNA, 19 nt, Artificial Sequence
  Description of Artificial Sequence: Synthetic oligonucleotide
  Sense strand starting at position 3651 of SEQ ID NO: 1241572
uguaaagccugcucccaaa

SEQ ID NO: 1282807 - RNA, 19 nt, Artificial Sequence
  Description of Artificial Sequence: Synthetic oligonucleotide
  Antisense strand to SEQ ID NO: 1282806
uuugggagcaggcuuuaca

SEQ ID NO: 1282808 - RNA, 19 nt, Artificial Sequence
  Description of Artificial Sequence: Synthetic oligonucleotide
  Sense strand starting at position 3761 of SEQ ID NO: 1241572
gcugaacucuagcuuuaag

SEQ ID NO: 1282809 - RNA, 19 nt, Artificial Sequence
  Description of Artificial Sequence: Synthetic oligonucleotide
  Antisense strand to SEQ ID NO: 1282808
cuuaaagcuagaguucagc

SEQ ID NO: 1282810 - RNA, 19 nt, Artificial Sequence
  Description of Artificial Sequence: Synthetic oligonucleotide
  Sense strand starting at position 3974 of SEQ ID NO: 1241572
accuaucaggauuggcaau

SEQ ID NO: 1282811 - RNA, 19 nt, Artificial Sequence
  Description of Artificial Sequence: Synthetic oligonucleotide
  Antisense strand to SEQ ID NO: 1282810
auugccaauccugauaggu

SEQ ID NO: 1282812 - RNA, 19 nt, Artificial Sequence
  Description of Artificial Sequence: Synthetic oligonucleotide
  Sense strand starting at position 3981 of SEQ ID NO: 1241572
aggauuggcaauggugaca

SEQ ID NO: 1282813 - RNA, 19 nt, Artificial Sequence
  Description of Artificial Sequence: Synthetic oligonucleotide
  Antisense strand to SEQ ID NO: 1282812
ugucaccauugccaauccu

SEQ ID NO: 1282814 - RNA, 19 nt, Artificial Sequence
  Description of Artificial Sequence: Synthetic oligonucleotide
  Sense strand starting at position 115 of SEQ ID NO: 1241573
uguauacgugcuuaugaag

SEQ ID NO: 1282815 - RNA, 19 nt, Artificial Sequence
  Description of Artificial Sequence: Synthetic oligonucleotide
  Antisense strand to SEQ ID NO: 1282814
cuucauaagcacguauaca

SEQ ID NO: 1282816 - RNA, 19 nt, Artificial Sequence
  Description of Artificial Sequence: Synthetic oligonucleotide
  Sense strand starting at position 147 of SEQ ID NO: 1241573
uuaacuggucugcauccaa

SEQ ID NO: 1282817 - RNA, 19 nt, Artificial Sequence
  Description of Artificial Sequence: Synthetic oligonucleotide
  Antisense strand to SEQ ID NO: 1282816
uuggaugcagaccaguuaa

SEQ ID NO: 1282818 - RNA, 19 nt, Artificial Sequence
  Description of Artificial Sequence: Synthetic oligonucleotide
  Sense strand starting at position 254 of SEQ ID NO: 1241573
aggagcaugauaugacuua

SEQ ID NO: 1282819 - RNA, 19 nt, Artificial Sequence
  Description of Artificial Sequence: Synthetic oligonucleotide
  Antisense strand to SEQ ID NO: 1282818
uaagucauaucaugcuccu

SEQ ID NO: 1282820 - RNA, 19 nt, Artificial Sequence
  Description of Artificial Sequence: Synthetic oligonucleotide
  Sense strand starting at position 305 of SEQ ID NO: 1241573
ggaaguugcaaacaguuga

SEQ ID NO: 1282821 - RNA, 19 nt, Artificial Sequence
  Description of Artificial Sequence: Synthetic oligonucleotide
  Antisense strand to SEQ ID NO: 1282820
ucaacuguuugcaacuucc

SEQ ID NO: 1282822 - RNA, 19 nt, Artificial Sequence
  Description of Artificial Sequence: Synthetic oligonucleotide
  Sense strand starting at position 310 of SEQ ID NO: 1241573
uugcaaacaguugacauua

SEQ ID NO: 1282823 - RNA, 19 nt, Artificial Sequence
  Description of Artificial Sequence: Synthetic oligonucleotide
  Antisense strand to SEQ ID NO: 1282822
uaaugucaacuguuugcaa

SEQ ID NO: 1282824 - RNA, 19 nt, Artificial Sequence
  Description of Artificial Sequence: Synthetic oligonucleotide
  Sense strand starting at position 321 of SEQ ID NO: 1241573
ugacauuacccguaauaua

SEQ ID NO: 1282825 - RNA, 19 nt, Artificial Sequence
  Description of Artificial Sequence: Synthetic oligonucleotide
  Antisense strand to SEQ ID NO: 1282824
uauauuacggguaauguca

SEQ ID NO: 1282826 - RNA, 19 nt, Artificial Sequence
  Description of Artificial Sequence: Synthetic oligonucleotide
  Sense strand starting at position 375 of SEQ ID NO: 1241573
uuguuaccuuagucuagaa

SEQ ID NO: 1282827 - RNA, 19 nt, Artificial Sequence
  Description of Artificial Sequence: Synthetic oligonucleotide
  Antisense strand to SEQ ID NO: 1282826
uucuagacuaagguaacaa

SEQ ID NO: 1282828 - RNA, 19 nt, Artificial Sequence
  Description of Artificial Sequence: Synthetic oligonucleotide
  Sense strand starting at position 377 of SEQ ID NO: 1241573
guuaccuuagucuagaacu

SEQ ID NO: 1282829 - RNA, 19 nt, Artificial Sequence
  Description of Artificial Sequence: Synthetic oligonucleotide
  Antisense strand to SEQ ID NO: 1282828
aguucuagacuaagguaac

SEQ ID NO: 1282830 - RNA, 19 nt, Artificial Sequence
  Description of Artificial Sequence: Synthetic oligonucleotide
  Sense strand starting at position 629 of SEQ ID NO: 1241573
ggcuguuuacacuaagaag

SEQ ID NO: 1282831 - RNA, 19 nt, Artificial Sequence
  Description of Artificial Sequence: Synthetic oligonucleotide
  Antisense strand to SEQ ID NO: 1282830
cuucuuaguguaaacagcc

SEQ ID NO: 1282832 - RNA, 19 nt, Artificial Sequence
  Description of Artificial Sequence: Synthetic oligonucleotide
  Sense strand starting at position 924 of SEQ ID NO: 1241573
ucagcaucccgggaaugaa

SEQ ID NO: 1282833 - RNA, 19 nt, Artificial Sequence
  Description of Artificial Sequence: Synthetic oligonucleotide
  Antisense strand to SEQ ID NO: 1282832
uucauucccgggaugcuga

SEQ ID NO: 1282834 - RNA, 19 nt, Artificial Sequence
  Description of Artificial Sequence: Synthetic oligonucleotide
  Sense strand starting at position 1061 of SEQ ID NO: 1241573
ugacaacuggccgagucaa

SEQ ID NO: 1282835 - RNA, 19 nt, Artificial Sequence
  Description of Artificial Sequence: Synthetic oligonucleotide
  Antisense strand to SEQ ID NO: 1282834
uugacucggccaguuguca

SEQ ID NO: 1282836 - RNA, 19 nt, Artificial Sequence
  Description of Artificial Sequence: Synthetic oligonucleotide
  Sense strand starting at position 1096 of SEQ ID NO: 1241573
gcuuaucugacaggugaga

SEQ ID NO: 1282837 - RNA, 19 nt, Artificial Sequence
  Description of Artificial Sequence: Synthetic oligonucleotide
  Antisense strand to SEQ ID NO: 1282836
ucucaccugucagauaagc

SEQ ID NO: 1282838 - RNA, 19 nt, Artificial Sequence
  Description of Artificial Sequence: Synthetic oligonucleotide
  Sense strand starting at position 1109 of SEQ ID NO: 1241573
gugagaaauuccuugucuc

SEQ ID NO: 1282839 - RNA, 19 nt, Artificial Sequence
  Description of Artificial Sequence: Synthetic oligonucleotide
  Antisense strand to SEQ ID NO: 1282838
gagacaaggaauuucucac

SEQ ID NO: 1282840 - RNA, 19 nt, Artificial Sequence
  Description of Artificial Sequence: Synthetic oligonucleotide
  Sense strand starting at position 1110 of SEQ ID NO: 1241573
ugagaaauuccuugucucc

SEQ ID NO: 1282841 - RNA, 19 nt, Artificial Sequence
  Description of Artificial Sequence: Synthetic oligonucleotide
  Antisense strand to SEQ ID NO: 1282840
ggagacaaggaauuucuca

SEQ ID NO: 1282842 - RNA, 19 nt, Artificial Sequence
  Description of Artificial Sequence: Synthetic oligonucleotide
  Sense strand starting at position 1320 of SEQ ID NO: 1241573
uggagagaaaucggugaau

SEQ ID NO: 1282843 - RNA, 19 nt, Artificial Sequence
  Description of Artificial Sequence: Synthetic oligonucleotide
  Antisense strand to SEQ ID NO: 1282842
auucaccgauuucucucca

SEQ ID NO: 1282844 - RNA, 19 nt, Artificial Sequence
  Description of Artificial Sequence: Synthetic oligonucleotide
  Sense strand starting at position 1651 of SEQ ID NO: 1241573
ggccgaucugcagauggaa

SEQ ID NO: 1282845 - RNA, 19 nt, Artificial Sequence
  Description of Artificial Sequence: Synthetic oligonucleotide
  Antisense strand to SEQ ID NO: 1282844
uuccaucugcagaucggcc

SEQ ID NO: 1282846 - RNA, 19 nt, Artificial Sequence
  Description of Artificial Sequence: Synthetic oligonucleotide
  Sense strand starting at position 2572 of SEQ ID NO: 1241573
cuacaagugaggugacuuu

SEQ ID NO: 1282847 - RNA, 19 nt, Artificial Sequence
  Description of Artificial Sequence: Synthetic oligonucleotide
  Antisense strand to SEQ ID NO: 1282846
aaagucaccucacuuguag

SEQ ID NO: 1282848 - RNA, 19 nt, Artificial Sequence
  Description of Artificial Sequence: Synthetic oligonucleotide
  Sense strand starting at position 2823 of SEQ ID NO: 1241573
uccuaaggcaccggauaua

SEQ ID NO: 1282849 - RNA, 19 nt, Artificial Sequence
  Description of Artificial Sequence: Synthetic oligonucleotide
  Antisense strand to SEQ ID NO: 1282848
uauauccggugccuuagga

SEQ ID NO: 1282850 - RNA, 19 nt, Artificial Sequence
  Description of Artificial Sequence: Synthetic oligonucleotide
  Sense strand starting at position 2835 of SEQ ID NO: 1241573
ggauauacacagugaucua

SEQ ID NO: 1282851 - RNA, 19 nt, Artificial Sequence
  Description of Artificial Sequence: Synthetic oligonucleotide
  Antisense strand to SEQ ID NO: 1282850
uagaucacuguguauaucc

SEQ ID NO: 1282852 - RNA, 19 nt, Artificial Sequence
  Description of Artificial Sequence: Synthetic oligonucleotide
  Sense strand starting at position 2915 of SEQ ID NO: 1241573
ugcggucuccuuuccuuua

SEQ ID NO: 1282853 - RNA, 19 nt, Artificial Sequence
  Description of Artificial Sequence: Synthetic oligonucleotide
  Antisense strand to SEQ ID NO: 1282852
uaaaggaaaggagaccgca

SEQ ID NO: 1282854 - RNA, 19 nt, Artificial Sequence
  Description of Artificial Sequence: Synthetic oligonucleotide
  Sense strand starting at position 2937 of SEQ ID NO: 1241573
uauucuuugcgccugaagu

SEQ ID NO: 1282855 - RNA, 19 nt, Artificial Sequence
  Description of Artificial Sequence: Synthetic oligonucleotide
  Antisense strand to SEQ ID NO: 1282854
acuucaggcgcaaagaaua

SEQ ID NO: 1282856 - RNA, 19 nt, Artificial Sequence
  Description of Artificial Sequence: Synthetic oligonucleotide
  Sense strand starting at position 2945 of SEQ ID NO: 1241573
gcgccugaaguuucuacuu

SEQ ID NO: 1282857 - RNA, 19 nt, Artificial Sequence
  Description of Artificial Sequence: Synthetic oligonucleotide
  Antisense strand to SEQ ID NO: 1282856
aaguagaaacuucaggcgc

SEQ ID NO: 1282858 - RNA, 19 nt, Artificial Sequence
  Description of Artificial Sequence: Synthetic oligonucleotide
  Sense strand starting at position 3098 of SEQ ID NO: 1241573
uaauuuggaucgccguuua

SEQ ID NO: 1282859 - RNA, 19 nt, Artificial Sequence
  Description of Artificial Sequence: Synthetic oligonucleotide
  Antisense strand to SEQ ID NO: 1282858
uaaacggcgauccaaauua

SEQ ID NO: 1282860 - RNA, 19 nt, Artificial Sequence
  Description of Artificial Sequence: Synthetic oligonucleotide
  Sense strand starting at position 3150 of SEQ ID NO: 1241573
uuuacauucgcuggagaug

SEQ ID NO: 1282861 - RNA, 19 nt, Artificial Sequence
  Description of Artificial Sequence: Synthetic oligonucleotide
  Antisense strand to SEQ ID NO: 1282860
caucuccagcgaauguaaa

SEQ ID NO: 1282862 - RNA, 19 nt, Artificial Sequence
  Description of Artificial Sequence: Synthetic oligonucleotide
  Sense strand starting at position 3151 of SEQ ID NO: 1241573
uuacauucgcuggagauga

SEQ ID NO: 1282863 - RNA, 19 nt, Artificial Sequence
  Description of Artificial Sequence: Synthetic oligonucleotide
  Antisense strand to SEQ ID NO: 1282862
ucaucuccagcgaauguaa

SEQ ID NO: 1282864 - RNA, 19 nt, Artificial Sequence
  Description of Artificial Sequence: Synthetic oligonucleotide
  Sense strand starting at position 3153 of SEQ ID NO: 1241573
acauucgcuggagaugaau

SEQ ID NO: 1282865 - RNA, 19 nt, Artificial Sequence
  Description of Artificial Sequence: Synthetic oligonucleotide
  Antisense strand to SEQ ID NO: 1282864
auucaucuccagcgaaugu

SEQ ID NO: 1282866 - RNA, 19 nt, Artificial Sequence
  Description of Artificial Sequence: Synthetic oligonucleotide
  Sense strand starting at position 3155 of SEQ ID NO: 1241573
auucgcuggagaugaauua

SEQ ID NO: 1282867 - RNA, 19 nt, Artificial Sequence
  Description of Artificial Sequence: Synthetic oligonucleotide
  Antisense strand to SEQ ID NO: 1282866
uaauucaucuccagcgaau

SEQ ID NO: 1282868 - RNA, 19 nt, Artificial Sequence
  Description of Artificial Sequence: Synthetic oligonucleotide
  Sense strand starting at position 3255 of SEQ ID NO: 1241573
uugguuuaauauucuggga

SEQ ID NO: 1282869 - RNA, 19 nt, Artificial Sequence
  Description of Artificial Sequence: Synthetic oligonucleotide
  Antisense strand to SEQ ID NO: 1282868
ucccagaauauuaaaccaa

SEQ ID NO: 1282870 - RNA, 19 nt, Artificial Sequence
  Description of Artificial Sequence: Synthetic oligonucleotide
  Sense strand starting at position 3259 of SEQ ID NO: 1241573
uuuaauauucugggacaau

SEQ ID NO: 1282871 - RNA, 19 nt, Artificial Sequence
  Description of Artificial Sequence: Synthetic oligonucleotide
  Antisense strand to SEQ ID NO: 1282870
auugucccagaauauuaaa

SEQ ID NO: 1282872 - RNA, 19 nt, Artificial Sequence
  Description of Artificial Sequence: Synthetic oligonucleotide
  Sense strand starting at position 3534 of SEQ ID NO: 1241573
cugguuguggcccaagaua

SEQ ID NO: 1282873 - RNA, 19 nt, Artificial Sequence
  Description of Artificial Sequence: Synthetic oligonucleotide
  Antisense strand to SEQ ID NO: 1282872
uaucuugggccacaaccag

SEQ ID NO: 1282874 - RNA, 19 nt, Artificial Sequence
  Description of Artificial Sequence: Synthetic oligonucleotide
  Sense strand starting at position 3547 of SEQ ID NO: 1241573
aagauauugcaagguagcu

SEQ ID NO: 1282875 - RNA, 19 nt, Artificial Sequence
  Description of Artificial Sequence: Synthetic oligonucleotide
  Antisense strand to SEQ ID NO: 1282874
agcuaccuugcaauaucuu

SEQ ID NO: 1282876 - RNA, 19 nt, Artificial Sequence
  Description of Artificial Sequence: Synthetic oligonucleotide
  Sense strand starting at position 3557 of SEQ ID NO: 1241573
aagguagcuuccuuuagaa

SEQ ID NO: 1282877 - RNA, 19 nt, Artificial Sequence
  Description of Artificial Sequence: Synthetic oligonucleotide
  Antisense strand to SEQ ID NO: 1282876
uucuaaaggaagcuaccuu

SEQ ID NO: 1282878 - RNA, 19 nt, Artificial Sequence
  Description of Artificial Sequence: Synthetic oligonucleotide
  Sense strand starting at position 3648 of SEQ ID NO: 1241573
uuauucucugaaugugaug

SEQ ID NO: 1282879 - RNA, 19 nt, Artificial Sequence
  Description of Artificial Sequence: Synthetic oligonucleotide
  Antisense strand to SEQ ID NO: 1282878
caucacauucagagaauaa

SEQ ID NO: 1282880 - RNA, 19 nt, Artificial Sequence
  Description of Artificial Sequence: Synthetic oligonucleotide
  Sense strand starting at position 3654 of SEQ ID NO: 1241573
ucugaaugugaugguuuga

SEQ ID NO: 1282881 - RNA, 19 nt, Artificial Sequence
  Description of Artificial Sequence: Synthetic oligonucleotide
  Antisense strand to SEQ ID NO: 1282880
ucaaaccaucacauucaga

SEQ ID NO: 1282882 - RNA, 19 nt, Artificial Sequence
  Description of Artificial Sequence: Synthetic oligonucleotide
  Sense strand starting at position 3699 of SEQ ID NO: 1241573
ccugcauaguuacuuauga

SEQ ID NO: 1282883 - RNA, 19 nt, Artificial Sequence
  Description of Artificial Sequence: Synthetic oligonucleotide
  Antisense strand to SEQ ID NO: 1282882
ucauaaguaacuaugcagg

SEQ ID NO: 1282884 - RNA, 19 nt, Artificial Sequence
  Description of Artificial Sequence: Synthetic oligonucleotide
  Sense strand starting at position 3735 of SEQ ID NO: 1241573
cugauacagguagguaauu

SEQ ID NO: 1282885 - RNA, 19 nt, Artificial Sequence
  Description of Artificial Sequence: Synthetic oligonucleotide
  Antisense strand to SEQ ID NO: 1282884
aauuaccuaccuguaucag

SEQ ID NO: 1282886 - RNA, 19 nt, Artificial Sequence
  Description of Artificial Sequence: Synthetic oligonucleotide
  Sense strand starting at position 3762 of SEQ ID NO: 1241573
guucuagacucagcuaauc

SEQ ID NO: 1282887 - RNA, 19 nt, Artificial Sequence
  Description of Artificial Sequence: Synthetic oligonucleotide
  Antisense strand to SEQ ID NO: 1282886
gauuagcugagucuagaac

SEQ ID NO: 1282888 - RNA, 19 nt, Artificial Sequence
  Description of Artificial Sequence: Synthetic oligonucleotide
  Sense strand starting at position 3807 of SEQ ID NO: 1241573
ugaaaugccuuucugaauu

SEQ ID NO: 1282889 - RNA, 19 nt, Artificial Sequence
  Description of Artificial Sequence: Synthetic oligonucleotide
  Antisense strand to SEQ ID NO: 1282888
aauucagaaaggcauuuca

SEQ ID NO: 1282890 - RNA, 19 nt, Artificial Sequence
  Description of Artificial Sequence: Synthetic oligonucleotide
  Sense strand starting at position 3819 of SEQ ID NO: 1241573
cugaauucugaaggagguu

SEQ ID NO: 1282891 - RNA, 19 nt, Artificial Sequence
  Description of Artificial Sequence: Synthetic oligonucleotide
  Antisense strand to SEQ ID NO: 1282890
aaccuccuucagaauucag

SEQ ID NO: 1282892 - RNA, 19 nt, Artificial Sequence
  Description of Artificial Sequence: Synthetic oligonucleotide
  Sense strand starting at position 3935 of SEQ ID NO: 1241573
gucaguuuacaagagacuu

SEQ ID NO: 1282893 - RNA, 19 nt, Artificial Sequence
  Description of Artificial Sequence: Synthetic oligonucleotide
  Antisense strand to SEQ ID NO: 1282892
aagucucuuguaaacugac

SEQ ID NO: 1282894 - RNA, 19 nt, Artificial Sequence
  Description of Artificial Sequence: Synthetic oligonucleotide
  Sense strand starting at position 493 of SEQ ID NO: 1241574
cacccagcuugguuagaaa

SEQ ID NO: 1282895 - RNA, 19 nt, Artificial Sequence
  Description of Artificial Sequence: Synthetic oligonucleotide
  Antisense strand to SEQ ID NO: 1282894
uuucuaaccaagcugggug

SEQ ID NO: 1282896 - RNA, 19 nt, Artificial Sequence
  Description of Artificial Sequence: Synthetic oligonucleotide
  Sense strand starting at position 554 of SEQ ID NO: 1241574
cugcgaaucuucuccacuu

SEQ ID NO: 1282897 - RNA, 19 nt, Artificial Sequence
  Description of Artificial Sequence: Synthetic oligonucleotide
  Antisense strand to SEQ ID NO: 1282896
aaguggagaagauucgcag

SEQ ID NO: 1282898 - RNA, 19 nt, Artificial Sequence
  Description of Artificial Sequence: Synthetic oligonucleotide
  Sense strand starting at position 555 of SEQ ID NO: 1241574
ugcgaaucuucuccacuuu

SEQ ID NO: 1282899 - RNA, 19 nt, Artificial Sequence
  Description of Artificial Sequence: Synthetic oligonucleotide
  Antisense strand to SEQ ID NO: 1282898
aaaguggagaagauucgca

SEQ ID NO: 1282900 - RNA, 19 nt, Artificial Sequence
  Description of Artificial Sequence: Synthetic oligonucleotide
  Sense strand starting at position 593 of SEQ ID NO: 1241574
ggagaaagcuuucccacaa

SEQ ID NO: 1282901 - RNA, 19 nt, Artificial Sequence
  Description of Artificial Sequence: Synthetic oligonucleotide
  Antisense strand to SEQ ID NO: 1282900
uugugggaaagcuuucucc

SEQ ID NO: 1282902 - RNA, 19 nt, Artificial Sequence
  Description of Artificial Sequence: Synthetic oligonucleotide
  Sense strand starting at position 606 of SEQ ID NO: 1241574
ccacaauuagcguauucca

SEQ ID NO: 1282903 - RNA, 19 nt, Artificial Sequence
  Description of Artificial Sequence: Synthetic oligonucleotide
  Antisense strand to SEQ ID NO: 1282902
uggaauacgcuaauugugg

SEQ ID NO: 1282904 - RNA, 19 nt, Artificial Sequence
  Description of Artificial Sequence: Synthetic oligonucleotide
  Sense strand starting at position 613 of SEQ ID NO: 1241574
uagcguauuccagucugca

SEQ ID NO: 1282905 - RNA, 19 nt, Artificial Sequence
  Description of Artificial Sequence: Synthetic oligonucleotide
  Antisense strand to SEQ ID NO: 1282904
ugcagacuggaauacgcua

SEQ ID NO: 1282906 - RNA, 19 nt, Artificial Sequence
  Description of Artificial Sequence: Synthetic oligonucleotide
  Sense strand starting at position 615 of SEQ ID NO: 1241574
gcguauuccagucugcacu

SEQ ID NO: 1282907 - RNA, 19 nt, Artificial Sequence
  Description of Artificial Sequence: Synthetic oligonucleotide
  Antisense strand to SEQ ID NO: 1282906
agugcagacuggaauacgc

SEQ ID NO: 1282908 - RNA, 19 nt, Artificial Sequence
  Description of Artificial Sequence: Synthetic oligonucleotide
  Sense strand starting at position 752 of SEQ ID NO: 1241574
uagccugaugcagaauaga

SEQ ID NO: 1282909 - RNA, 19 nt, Artificial Sequence
  Description of Artificial Sequence: Synthetic oligonucleotide
  Antisense strand to SEQ ID NO: 1282908
ucuauucugcaucaggcua

SEQ ID NO: 1282910 - RNA, 19 nt, Artificial Sequence
  Description of Artificial Sequence: Synthetic oligonucleotide
  Sense strand starting at position 792 of SEQ ID NO: 1241574
aucuauaucccagggacua

SEQ ID NO: 1282911 - RNA, 19 nt, Artificial Sequence
  Description of Artificial Sequence: Synthetic oligonucleotide
  Antisense strand to SEQ ID NO: 1282910
uagucccugggauauagau

SEQ ID NO: 1282912 - RNA, 19 nt, Artificial Sequence
  Description of Artificial Sequence: Synthetic oligonucleotide
  Sense strand starting at position 793 of SEQ ID NO: 1241574
ucuauaucccagggacuaa

SEQ ID NO: 1282913 - RNA, 19 nt, Artificial Sequence
  Description of Artificial Sequence: Synthetic oligonucleotide
  Antisense strand to SEQ ID NO: 1282912
uuagucccugggauauaga

SEQ ID NO: 1282914 - RNA, 19 nt, Artificial Sequence
  Description of Artificial Sequence: Synthetic oligonucleotide
  Sense strand starting at position 864 of SEQ ID NO: 1241574
aguuguuauugccucuaau

SEQ ID NO: 1282915 - RNA, 19 nt, Artificial Sequence
  Description of Artificial Sequence: Synthetic oligonucleotide
  Antisense strand to SEQ ID NO: 1282914
auuagaggcaauaacaacu

SEQ ID NO: 1282916 - RNA, 19 nt, Artificial Sequence
  Description of Artificial Sequence: Synthetic oligonucleotide
  Sense strand starting at position 1039 of SEQ ID NO: 1241574
gcgacagacccagaaucau

SEQ ID NO: 1282917 - RNA, 19 nt, Artificial Sequence
  Description of Artificial Sequence: Synthetic oligonucleotide
  Antisense strand to SEQ ID NO: 1282916
augauucugggucugucgc

SEQ ID NO: 1282918 - RNA, 19 nt, Artificial Sequence
  Description of Artificial Sequence: Synthetic oligonucleotide
  Sense strand starting at position 1179 of SEQ ID NO: 1241574
ggauaucaacucugcugua

SEQ ID NO: 1282919 - RNA, 19 nt, Artificial Sequence
  Description of Artificial Sequence: Synthetic oligonucleotide
  Antisense strand to SEQ ID NO: 1282918
uacagcagaguugauaucc

SEQ ID NO: 1282920 - RNA, 19 nt, Artificial Sequence
  Description of Artificial Sequence: Synthetic oligonucleotide
  Sense strand starting at position 1191 of SEQ ID NO: 1241574
ugcuguacugugccucaau

SEQ ID NO: 1282921 - RNA, 19 nt, Artificial Sequence
  Description of Artificial Sequence: Synthetic oligonucleotide
  Antisense strand to SEQ ID NO: 1282920
auugaggcacaguacagca

SEQ ID NO: 1282922 - RNA, 19 nt, Artificial Sequence
  Description of Artificial Sequence: Synthetic oligonucleotide
  Sense strand starting at position 1291 of SEQ ID NO: 1241574
gugucaguauguuuccaag

SEQ ID NO: 1282923 - RNA, 19 nt, Artificial Sequence
  Description of Artificial Sequence: Synthetic oligonucleotide
  Antisense strand to SEQ ID NO: 1282922
cuuggaaacauacugacac

SEQ ID NO: 1282924 - RNA, 19 nt, Artificial Sequence
  Description of Artificial Sequence: Synthetic oligonucleotide
  Sense strand starting at position 1293 of SEQ ID NO: 1241574
gucaguauguuuccaagac

SEQ ID NO: 1282925 - RNA, 19 nt, Artificial Sequence
  Description of Artificial Sequence: Synthetic oligonucleotide
  Antisense strand to SEQ ID NO: 1282924
gucuuggaaacauacugac

SEQ ID NO: 1282926 - RNA, 19 nt, Artificial Sequence
  Description of Artificial Sequence: Synthetic oligonucleotide
  Sense strand starting at position 1297 of SEQ ID NO: 1241574
guauguuuccaagaccauc

SEQ ID NO: 1282927 - RNA, 19 nt, Artificial Sequence
  Description of Artificial Sequence: Synthetic oligonucleotide
  Antisense strand to SEQ ID NO: 1282926
gauggucuuggaaacauac

SEQ ID NO: 1282928 - RNA, 19 nt, Artificial Sequence
  Description of Artificial Sequence: Synthetic oligonucleotide
  Sense strand starting at position 1584 of SEQ ID NO: 1241574
cugcuucuccgggaugacu

SEQ ID NO: 1282929 - RNA, 19 nt, Artificial Sequence
  Description of Artificial Sequence: Synthetic oligonucleotide
  Antisense strand to SEQ ID NO: 1282928
agucaucccggagaagcag

SEQ ID NO: 1282930 - RNA, 19 nt, Artificial Sequence
  Description of Artificial Sequence: Synthetic oligonucleotide
  Sense strand starting at position 1595 of SEQ ID NO: 1241574
ggaugacuagucugcccuu

SEQ ID NO: 1282931 - RNA, 19 nt, Artificial Sequence
  Description of Artificial Sequence: Synthetic oligonucleotide
  Antisense strand to SEQ ID NO: 1282930
aagggcagacuagucaucc

SEQ ID NO: 1282932 - RNA, 19 nt, Artificial Sequence
  Description of Artificial Sequence: Synthetic oligonucleotide
  Sense strand starting at position 1685 of SEQ ID NO: 1241574
ccuagugugucagcuauuu

SEQ ID NO: 1282933 - RNA, 19 nt, Artificial Sequence
  Description of Artificial Sequence: Synthetic oligonucleotide
  Antisense strand to SEQ ID NO: 1282932
aaauagcugacacacuagg

SEQ ID NO: 1282934 - RNA, 19 nt, Artificial Sequence
  Description of Artificial Sequence: Synthetic oligonucleotide
  Sense strand starting at position 1799 of SEQ ID NO: 1241574
ccgggauuccuugauacua

SEQ ID NO: 1282935 - RNA, 19 nt, Artificial Sequence
  Description of Artificial Sequence: Synthetic oligonucleotide
  Antisense strand to SEQ ID NO: 1282934
uaguaucaaggaaucccgg

SEQ ID NO: 1282936 - RNA, 19 nt, Artificial Sequence
  Description of Artificial Sequence: Synthetic oligonucleotide
  Sense strand starting at position 1956 of SEQ ID NO: 1241574
acggcauggauccaccaau

SEQ ID NO: 1282937 - RNA, 19 nt, Artificial Sequence
  Description of Artificial Sequence: Synthetic oligonucleotide
  Antisense strand to SEQ ID NO: 1282936
auugguggauccaugccgu

SEQ ID NO: 1282938 - RNA, 19 nt, Artificial Sequence
  Description of Artificial Sequence: Synthetic oligonucleotide
  Sense strand starting at position 2008 of SEQ ID NO: 1241574
ccagaaugcuuagucuauc

SEQ ID NO: 1282939 - RNA, 19 nt, Artificial Sequence
  Description of Artificial Sequence: Synthetic oligonucleotide
  Antisense strand to SEQ ID NO: 1282938
gauagacuaagcauucugg

SEQ ID NO: 1282940 - RNA, 19 nt, Artificial Sequence
  Description of Artificial Sequence: Synthetic oligonucleotide
  Sense strand starting at position 2011 of SEQ ID NO: 1241574
gaaugcuuagucuaucuga

SEQ ID NO: 1282941 - RNA, 19 nt, Artificial Sequence
  Description of Artificial Sequence: Synthetic oligonucleotide
  Antisense strand to SEQ ID NO: 1282940
ucagauagacuaagcauuc

SEQ ID NO: 1282942 - RNA, 19 nt, Artificial Sequence
  Description of Artificial Sequence: Synthetic oligonucleotide
  Sense strand starting at position 2014 of SEQ ID NO: 1241574
ugcuuagucuaucugaaga

SEQ ID NO: 1282943 - RNA, 19 nt, Artificial Sequence
  Description of Artificial Sequence: Synthetic oligonucleotide
  Antisense strand to SEQ ID NO: 1282942
ucuucagauagacuaagca

SEQ ID NO: 1282944 - RNA, 19 nt, Artificial Sequence
  Description of Artificial Sequence: Synthetic oligonucleotide
  Sense strand starting at position 2247 of SEQ ID NO: 1241574
gcuugaugcuucuuuauua

SEQ ID NO: 1282945 - RNA, 19 nt, Artificial Sequence
  Description of Artificial Sequence: Synthetic oligonucleotide
  Antisense strand to SEQ ID NO: 1282944
uaauaaagaagcaucaagc

SEQ ID NO: 1282946 - RNA, 19 nt, Artificial Sequence
  Description of Artificial Sequence: Synthetic oligonucleotide
  Sense strand starting at position 2301 of SEQ ID NO: 1241574
ggguuaugcagccauguaa

SEQ ID NO: 1282947 - RNA, 19 nt, Artificial Sequence
  Description of Artificial Sequence: Synthetic oligonucleotide
  Antisense strand to SEQ ID NO: 1282946
uuacauggcugcauaaccc

SEQ ID NO: 1282948 - RNA, 19 nt, Artificial Sequence
  Description of Artificial Sequence: Synthetic oligonucleotide
  Sense strand starting at position 2363 of SEQ ID NO: 1241574
gucauuauuuacguccaua

SEQ ID NO: 1282949 - RNA, 19 nt, Artificial Sequence
  Description of Artificial Sequence: Synthetic oligonucleotide
  Antisense strand to SEQ ID NO: 1282948
uauggacguaaauaaugac

SEQ ID NO: 1282950 - RNA, 19 nt, Artificial Sequence
  Description of Artificial Sequence: Synthetic oligonucleotide
  Sense strand starting at position 2424 of SEQ ID NO: 1241574
ugagcuuugucaccuuacu

SEQ ID NO: 1282951 - RNA, 19 nt, Artificial Sequence
  Description of Artificial Sequence: Synthetic oligonucleotide
  Antisense strand to SEQ ID NO: 1282950
aguaaggugacaaagcuca

SEQ ID NO: 1282952 - RNA, 19 nt, Artificial Sequence
  Description of Artificial Sequence: Synthetic oligonucleotide
  Sense strand starting at position 2432 of SEQ ID NO: 1241574
gucaccuuacuauguuaca

SEQ ID NO: 1282953 - RNA, 19 nt, Artificial Sequence
  Description of Artificial Sequence: Synthetic oligonucleotide
  Antisense strand to SEQ ID NO: 1282952
uguaacauaguaaggugac

SEQ ID NO: 1282954 - RNA, 19 nt, Artificial Sequence
  Description of Artificial Sequence: Synthetic oligonucleotide
  Sense strand starting at position 2528 of SEQ ID NO: 1241574
gguguaaauaaacgccuaa

SEQ ID NO: 1282955 - RNA, 19 nt, Artificial Sequence
  Description of Artificial Sequence: Synthetic oligonucleotide
  Antisense strand to SEQ ID NO: 1282954
uuaggcguuuauuuacacc

SEQ ID NO: 1282956 - RNA, 19 nt, Artificial Sequence
  Description of Artificial Sequence: Synthetic oligonucleotide
  Sense strand starting at position 2594 of SEQ ID NO: 1241574
gugggcagcagucaugaaa

SEQ ID NO: 1282957 - RNA, 19 nt, Artificial Sequence
  Description of Artificial Sequence: Synthetic oligonucleotide
  Antisense strand to SEQ ID NO: 1282956
uuucaugacugcugcccac

SEQ ID NO: 1282958 - RNA, 19 nt, Artificial Sequence
  Description of Artificial Sequence: Synthetic oligonucleotide
  Sense strand starting at position 2597 of SEQ ID NO: 1241574
ggcagcagucaugaaauug

SEQ ID NO: 1282959 - RNA, 19 nt, Artificial Sequence
  Description of Artificial Sequence: Synthetic oligonucleotide
  Antisense strand to SEQ ID NO: 1282958
caauuucaugacugcugcc

SEQ ID NO: 1282960 - RNA, 19 nt, Artificial Sequence
  Description of Artificial Sequence: Synthetic oligonucleotide
  Sense strand starting at position 2605 of SEQ ID NO: 1241574
ucaugaaauuggcuggcau

SEQ ID NO: 1282961 - RNA, 19 nt, Artificial Sequence
  Description of Artificial Sequence: Synthetic oligonucleotide
  Antisense strand to SEQ ID NO: 1282960
augccagccaauuucauga

SEQ ID NO: 1282962 - RNA, 19 nt, Artificial Sequence
  Description of Artificial Sequence: Synthetic oligonucleotide
  Sense strand starting at position 2859 of SEQ ID NO: 1241574
gggugaugccuaggauucu

SEQ ID NO: 1282963 - RNA, 19 nt, Artificial Sequence
  Description of Artificial Sequence: Synthetic oligonucleotide
  Antisense strand to SEQ ID NO: 1282962
agaauccuaggcaucaccc

SEQ ID NO: 1282964 - RNA, 19 nt, Artificial Sequence
  Description of Artificial Sequence: Synthetic oligonucleotide
  Sense strand starting at position 2868 of SEQ ID NO: 1241574
cuaggauucuguccaugca

SEQ ID NO: 1282965 - RNA, 19 nt, Artificial Sequence
  Description of Artificial Sequence: Synthetic oligonucleotide
  Antisense strand to SEQ ID NO: 1282964
ugcauggacagaauccuag

SEQ ID NO: 1282966 - RNA, 19 nt, Artificial Sequence
  Description of Artificial Sequence: Synthetic oligonucleotide
  Sense strand starting at position 2933 of SEQ ID NO: 1241574
uuuggucaugcugaauuga

SEQ ID NO: 1282967 - RNA, 19 nt, Artificial Sequence
  Description of Artificial Sequence: Synthetic oligonucleotide
  Antisense strand to SEQ ID NO: 1282966
ucaauucagcaugaccaaa

SEQ ID NO: 1282968 - RNA, 19 nt, Artificial Sequence
  Description of Artificial Sequence: Synthetic oligonucleotide
  Sense strand starting at position 2964 of SEQ ID NO: 1241574
cgcuguguaauagaaaguu

SEQ ID NO: 1282969 - RNA, 19 nt, Artificial Sequence
  Description of Artificial Sequence: Synthetic oligonucleotide
  Antisense strand to SEQ ID NO: 1282968
aacuuucuauuacacagcg

SEQ ID NO: 1282970 - RNA, 19 nt, Artificial Sequence
  Description of Artificial Sequence: Synthetic oligonucleotide
  Sense strand starting at position 2984 of SEQ ID NO: 1241574
gauggaggucgcuagaaga

SEQ ID NO: 1282971 - RNA, 19 nt, Artificial Sequence
  Description of Artificial Sequence: Synthetic oligonucleotide
  Antisense strand to SEQ ID NO: 1282970
ucuucuagcgaccuccauc

SEQ ID NO: 1282972 - RNA, 19 nt, Artificial Sequence
  Description of Artificial Sequence: Synthetic oligonucleotide
  Sense strand starting at position 3018 of SEQ ID NO: 1241574
ugcgacugagaucaccaua

SEQ ID NO: 1282973 - RNA, 19 nt, Artificial Sequence
  Description of Artificial Sequence: Synthetic oligonucleotide
  Antisense strand to SEQ ID NO: 1282972
uauggugaucucagucgca

SEQ ID NO: 1282974 - RNA, 19 nt, Artificial Sequence
  Description of Artificial Sequence: Synthetic oligonucleotide
  Sense strand starting at position 41 of SEQ ID NO: 1241575
acgucauuccuuugacccu

SEQ ID NO: 1282975 - RNA, 19 nt, Artificial Sequence
  Description of Artificial Sequence: Synthetic oligonucleotide
  Antisense strand to SEQ ID NO: 1282974
agggucaaaggaaugacgu

SEQ ID NO: 1282976 - RNA, 19 nt, Artificial Sequence
  Description of Artificial Sequence: Synthetic oligonucleotide
  Sense strand starting at position 67 of SEQ ID NO: 1241575
uaaguuuauggguggcuga

SEQ ID NO: 1282977 - RNA, 19 nt, Artificial Sequence
  Description of Artificial Sequence: Synthetic oligonucleotide
  Antisense strand to SEQ ID NO: 1282976
ucagccacccauaaacuua

SEQ ID NO: 1282978 - RNA, 19 nt, Artificial Sequence
  Description of Artificial Sequence: Synthetic oligonucleotide
  Sense strand starting at position 70 of SEQ ID NO: 1241575
guuuauggguggcugacaa

SEQ ID NO: 1282979 - RNA, 19 nt, Artificial Sequence
  Description of Artificial Sequence: Synthetic oligonucleotide
  Antisense strand to SEQ ID NO: 1282978
uugucagccacccauaaac

SEQ ID NO: 1282980 - RNA, 19 nt, Artificial Sequence
  Description of Artificial Sequence: Synthetic oligonucleotide
  Sense strand starting at position 101 of SEQ ID NO: 1241575
uucuuucuuccuuagggua

SEQ ID NO: 1282981 - RNA, 19 nt, Artificial Sequence
  Description of Artificial Sequence: Synthetic oligonucleotide
  Antisense strand to SEQ ID NO: 1282980
uacccuaaggaagaaagaa

SEQ ID NO: 1282982 - RNA, 19 nt, Artificial Sequence
  Description of Artificial Sequence: Synthetic oligonucleotide
  Sense strand starting at position 248 of SEQ ID NO: 1241575
ccagaauguggucaccacu

SEQ ID NO: 1282983 - RNA, 19 nt, Artificial Sequence
  Description of Artificial Sequence: Synthetic oligonucleotide
  Antisense strand to SEQ ID NO: 1282982
aguggugaccacauucugg

SEQ ID NO: 1282984 - RNA, 19 nt, Artificial Sequence
  Description of Artificial Sequence: Synthetic oligonucleotide
  Sense strand starting at position 251 of SEQ ID NO: 1241575
gaauguggucaccacuaua

SEQ ID NO: 1282985 - RNA, 19 nt, Artificial Sequence
  Description of Artificial Sequence: Synthetic oligonucleotide
  Antisense strand to SEQ ID NO: 1282984
uauaguggugaccacauuc

SEQ ID NO: 1282986 - RNA, 19 nt, Artificial Sequence
  Description of Artificial Sequence: Synthetic oligonucleotide
  Sense strand starting at position 294 of SEQ ID NO: 1241575
agaagacccugagugaucu

SEQ ID NO: 1282987 - RNA, 19 nt, Artificial Sequence
  Description of Artificial Sequence: Synthetic oligonucleotide
  Antisense strand to SEQ ID NO: 1282986
agaucacucagggucuucu

SEQ ID NO: 1282988 - RNA, 19 nt, Artificial Sequence
  Description of Artificial Sequence: Synthetic oligonucleotide
  Sense strand starting at position 510 of SEQ ID NO: 1241575
ugggccaucaugugcagau

SEQ ID NO: 1282989 - RNA, 19 nt, Artificial Sequence
  Description of Artificial Sequence: Synthetic oligonucleotide
  Antisense strand to SEQ ID NO: 1282988
aucugcacaugauggccca

SEQ ID NO: 1282990 - RNA, 19 nt, Artificial Sequence
  Description of Artificial Sequence: Synthetic oligonucleotide
  Sense strand starting at position 511 of SEQ ID NO: 1241575
gggccaucaugugcagaua

SEQ ID NO: 1282991 - RNA, 19 nt, Artificial Sequence
  Description of Artificial Sequence: Synthetic oligonucleotide
  Antisense strand to SEQ ID NO: 1282990
uaucugcacaugauggccc

SEQ ID NO: 1282992 - RNA, 19 nt, Artificial Sequence
  Description of Artificial Sequence: Synthetic oligonucleotide
  Sense strand starting at position 512 of SEQ ID NO: 1241575
ggccaucaugugcagauaa

SEQ ID NO: 1282993 - RNA, 19 nt, Artificial Sequence
  Description of Artificial Sequence: Synthetic oligonucleotide
  Antisense strand to SEQ ID NO: 1282992
uuaucugcacaugauggcc

SEQ ID NO: 1282994 - RNA, 19 nt, Artificial Sequence
  Description of Artificial Sequence: Synthetic oligonucleotide
  Sense strand starting at position 514 of SEQ ID NO: 1241575
ccaucaugugcagauaauu

SEQ ID NO: 1282995 - RNA, 19 nt, Artificial Sequence
  Description of Artificial Sequence: Synthetic oligonucleotide
  Antisense strand to SEQ ID NO: 1282994
aauuaucugcacaugaugg

SEQ ID NO: 1282996 - RNA, 19 nt, Artificial Sequence
  Description of Artificial Sequence: Synthetic oligonucleotide
  Sense strand starting at position 843 of SEQ ID NO: 1241575
cuuaguaguucuccaaggu

SEQ ID NO: 1282997 - RNA, 19 nt, Artificial Sequence
  Description of Artificial Sequence: Synthetic oligonucleotide
  Antisense strand to SEQ ID NO: 1282996
accuuggagaacuacuaag

SEQ ID NO: 1282998 - RNA, 19 nt, Artificial Sequence
  Description of Artificial Sequence: Synthetic oligonucleotide
  Sense strand starting at position 937 of SEQ ID NO: 1241575
uuguaucuaugacccagua

SEQ ID NO: 1282999 - RNA, 19 nt, Artificial Sequence
  Description of Artificial Sequence: Synthetic oligonucleotide
  Antisense strand to SEQ ID NO: 1282998
uacugggucauagauacaa

SEQ ID NO: 1283000 - RNA, 19 nt, Artificial Sequence
  Description of Artificial Sequence: Synthetic oligonucleotide
  Sense strand starting at position 949 of SEQ ID NO: 1241575
cccaguagcuggcuaagaa

SEQ ID NO: 1283001 - RNA, 19 nt, Artificial Sequence
  Description of Artificial Sequence: Synthetic oligonucleotide
  Antisense strand to SEQ ID NO: 1283000
uucuuagccagcuacuggg

SEQ ID NO: 1283002 - RNA, 19 nt, Artificial Sequence
  Description of Artificial Sequence: Synthetic oligonucleotide
  Sense strand starting at position 950 of SEQ ID NO: 1241575
ccaguagcuggcuaagaau

SEQ ID NO: 1283003 - RNA, 19 nt, Artificial Sequence
  Description of Artificial Sequence: Synthetic oligonucleotide
  Antisense strand to SEQ ID NO: 1283002
auucuuagccagcuacugg

SEQ ID NO: 1283004 - RNA, 19 nt, Artificial Sequence
  Description of Artificial Sequence: Synthetic oligonucleotide
  Sense strand starting at position 1039 of SEQ ID NO: 1241575
gucauucuuggagggauag

SEQ ID NO: 1283005 - RNA, 19 nt, Artificial Sequence
  Description of Artificial Sequence: Synthetic oligonucleotide
  Antisense strand to SEQ ID NO: 1283004
cuaucccuccaagaaugac

SEQ ID NO: 1283006 - RNA, 19 nt, Artificial Sequence
  Description of Artificial Sequence: Synthetic oligonucleotide
  Sense strand starting at position 1077 of SEQ ID NO: 1241575
acgcuuggccagugauaaa

SEQ ID NO: 1283007 - RNA, 19 nt, Artificial Sequence
  Description of Artificial Sequence: Synthetic oligonucleotide
  Antisense strand to SEQ ID NO: 1283006
uuuaucacuggccaagcgu

SEQ ID NO: 1283008 - RNA, 19 nt, Artificial Sequence
  Description of Artificial Sequence: Synthetic oligonucleotide
  Sense strand starting at position 1080 of SEQ ID NO: 1241575
cuuggccagugauaaauuu

SEQ ID NO: 1283009 - RNA, 19 nt, Artificial Sequence
  Description of Artificial Sequence: Synthetic oligonucleotide
  Antisense strand to SEQ ID NO: 1283008
aaauuuaucacuggccaag

SEQ ID NO: 1283010 - RNA, 19 nt, Artificial Sequence
  Description of Artificial Sequence: Synthetic oligonucleotide
  Sense strand starting at position 1309 of SEQ ID NO: 1241575
gucagcucuuuccucagaa

SEQ ID NO: 1283011 - RNA, 19 nt, Artificial Sequence
  Description of Artificial Sequence: Synthetic oligonucleotide
  Antisense strand to SEQ ID NO: 1283010
uucugaggaaagagcugac

SEQ ID NO: 1283012 - RNA, 19 nt, Artificial Sequence
  Description of Artificial Sequence: Synthetic oligonucleotide
  Sense strand starting at position 1319 of SEQ ID NO: 1241575
uccucagaaucucuaguga

SEQ ID NO: 1283013 - RNA, 19 nt, Artificial Sequence
  Description of Artificial Sequence: Synthetic oligonucleotide
  Antisense strand to SEQ ID NO: 1283012
ucacuagagauucugagga

SEQ ID NO: 1283014 - RNA, 19 nt, Artificial Sequence
  Description of Artificial Sequence: Synthetic oligonucleotide
  Sense strand starting at position 1397 of SEQ ID NO: 1241575
cagagagguccuugcuggu

SEQ ID NO: 1283015 - RNA, 19 nt, Artificial Sequence
  Description of Artificial Sequence: Synthetic oligonucleotide
  Antisense strand to SEQ ID NO: 1283014
accagcaaggaccucucug

SEQ ID NO: 1283016 - RNA, 19 nt, Artificial Sequence
  Description of Artificial Sequence: Synthetic oligonucleotide
  Sense strand starting at position 1588 of SEQ ID NO: 1241575
agaugaaguuguucucuca

SEQ ID NO: 1283017 - RNA, 19 nt, Artificial Sequence
  Description of Artificial Sequence: Synthetic oligonucleotide
  Antisense strand to SEQ ID NO: 1283016
ugagagaacaacuucaucu

SEQ ID NO: 1283018 - RNA, 19 nt, Artificial Sequence
  Description of Artificial Sequence: Synthetic oligonucleotide
  Sense strand starting at position 1771 of SEQ ID NO: 1241575
agacacaugccucggacaa

SEQ ID NO: 1283019 - RNA, 19 nt, Artificial Sequence
  Description of Artificial Sequence: Synthetic oligonucleotide
  Antisense strand to SEQ ID NO: 1283018
uuguccgaggcaugugucu

SEQ ID NO: 1283020 - RNA, 19 nt, Artificial Sequence
  Description of Artificial Sequence: Synthetic oligonucleotide
  Sense strand starting at position 1772 of SEQ ID NO: 1241575
gacacaugccucggacaau

SEQ ID NO: 1283021 - RNA, 19 nt, Artificial Sequence
  Description of Artificial Sequence: Synthetic oligonucleotide
  Antisense strand to SEQ ID NO: 1283020
auuguccgaggcauguguc

SEQ ID NO: 1283022 - RNA, 19 nt, Artificial Sequence
  Description of Artificial Sequence: Synthetic oligonucleotide
  Sense strand starting at position 1784 of SEQ ID NO: 1241575
ggacaauggucuccacucu

SEQ ID NO: 1283023 - RNA, 19 nt, Artificial Sequence
  Description of Artificial Sequence: Synthetic oligonucleotide
  Antisense strand to SEQ ID NO: 1283022
agaguggagaccauugucc

SEQ ID NO: 1283024 - RNA, 19 nt, Artificial Sequence
  Description of Artificial Sequence: Synthetic oligonucleotide
  Sense strand starting at position 1817 of SEQ ID NO: 1241575
ggaugugcucaucaccaaa

SEQ ID NO: 1283025 - RNA, 19 nt, Artificial Sequence
  Description of Artificial Sequence: Synthetic oligonucleotide
  Antisense strand to SEQ ID NO: 1283024
uuuggugaugagcacaucc

SEQ ID NO: 1283026 - RNA, 19 nt, Artificial Sequence
  Description of Artificial Sequence: Synthetic oligonucleotide
  Sense strand starting at position 2107 of SEQ ID NO: 1241575
agccacugucacugaggaa

SEQ ID NO: 1283027 - RNA, 19 nt, Artificial Sequence
  Description of Artificial Sequence: Synthetic oligonucleotide
  Antisense strand to SEQ ID NO: 1283026
uuccucagugacaguggcu

SEQ ID NO: 1283028 - RNA, 19 nt, Artificial Sequence
  Description of Artificial Sequence: Synthetic oligonucleotide
  Sense strand starting at position 2199 of SEQ ID NO: 1241575
gaguacgugugacuuugaa

SEQ ID NO: 1283029 - RNA, 19 nt, Artificial Sequence
  Description of Artificial Sequence: Synthetic oligonucleotide
  Antisense strand to SEQ ID NO: 1283028
uucaaagucacacguacuc

SEQ ID NO: 1283030 - RNA, 19 nt, Artificial Sequence
  Description of Artificial Sequence: Synthetic oligonucleotide
  Sense strand starting at position 2229 of SEQ ID NO: 1241575
aaaugugaaugugcaaaca

SEQ ID NO: 1283031 - RNA, 19 nt, Artificial Sequence
  Description of Artificial Sequence: Synthetic oligonucleotide
  Antisense strand to SEQ ID NO: 1283030
uguuugcacauucacauuu

SEQ ID NO: 1283032 - RNA, 19 nt, Artificial Sequence
  Description of Artificial Sequence: Synthetic oligonucleotide
  Sense strand starting at position 2253 of SEQ ID NO: 1241575
cgcggucucguuaaagugu

SEQ ID NO: 1283033 - RNA, 19 nt, Artificial Sequence
  Description of Artificial Sequence: Synthetic oligonucleotide
  Antisense strand to SEQ ID NO: 1283032
acacuuuaacgagaccgcg

SEQ ID NO: 1283034 - RNA, 19 nt, Artificial Sequence
  Description of Artificial Sequence: Synthetic oligonucleotide
  Sense strand starting at position 2376 of SEQ ID NO: 1241575
cuccgagagugaucuuaca

SEQ ID NO: 1283035 - RNA, 19 nt, Artificial Sequence
  Description of Artificial Sequence: Synthetic oligonucleotide
  Antisense strand to SEQ ID NO: 1283034
uguaagaucacucucggag

SEQ ID NO: 1283036 - RNA, 19 nt, Artificial Sequence
  Description of Artificial Sequence: Synthetic oligonucleotide
  Sense strand starting at position 2526 of SEQ ID NO: 1241575
auaacagcuccaugagaau

SEQ ID NO: 1283037 - RNA, 19 nt, Artificial Sequence
  Description of Artificial Sequence: Synthetic oligonucleotide
  Antisense strand to SEQ ID NO: 1283036
auucucauggagcuguuau

SEQ ID NO: 1283038 - RNA, 19 nt, Artificial Sequence
  Description of Artificial Sequence: Synthetic oligonucleotide
  Sense strand starting at position 2538 of SEQ ID NO: 1241575
ugagaauguggucaugccu

SEQ ID NO: 1283039 - RNA, 19 nt, Artificial Sequence
  Description of Artificial Sequence: Synthetic oligonucleotide
  Antisense strand to SEQ ID NO: 1283038
aggcaugaccacauucuca

SEQ ID NO: 1283040 - RNA, 19 nt, Artificial Sequence
  Description of Artificial Sequence: Synthetic oligonucleotide
  Sense strand starting at position 2553 of SEQ ID NO: 1241575
gccuauugucuacagauaa

SEQ ID NO: 1283041 - RNA, 19 nt, Artificial Sequence
  Description of Artificial Sequence: Synthetic oligonucleotide
  Antisense strand to SEQ ID NO: 1283040
uuaucuguagacaauaggc

SEQ ID NO: 1283042 - RNA, 19 nt, Artificial Sequence
  Description of Artificial Sequence: Synthetic oligonucleotide
  Sense strand starting at position 2593 of SEQ ID NO: 1241575
gcuacuucccuauggucau

SEQ ID NO: 1283043 - RNA, 19 nt, Artificial Sequence
  Description of Artificial Sequence: Synthetic oligonucleotide
  Antisense strand to SEQ ID NO: 1283042
augaccauagggaaguagc

SEQ ID NO: 1283044 - RNA, 19 nt, Artificial Sequence
  Description of Artificial Sequence: Synthetic oligonucleotide
  Sense strand starting at position 2612 of SEQ ID NO: 1241575
gcagcucguaagugacaga

SEQ ID NO: 1283045 - RNA, 19 nt, Artificial Sequence
  Description of Artificial Sequence: Synthetic oligonucleotide
  Antisense strand to SEQ ID NO: 1283044
ucugucacuuacgagcugc

SEQ ID NO: 1283046 - RNA, 19 nt, Artificial Sequence
  Description of Artificial Sequence: Synthetic oligonucleotide
  Sense strand starting at position 2640 of SEQ ID NO: 1241575
aaccaagcguugucugauu

SEQ ID NO: 1283047 - RNA, 19 nt, Artificial Sequence
  Description of Artificial Sequence: Synthetic oligonucleotide
  Antisense strand to SEQ ID NO: 1283046
aaucagacaacgcuugguu

SEQ ID NO: 1283048 - RNA, 19 nt, Artificial Sequence
  Description of Artificial Sequence: Synthetic oligonucleotide
  Sense strand starting at position 2646 of SEQ ID NO: 1241575
gcguugucugauucggagu

SEQ ID NO: 1283049 - RNA, 19 nt, Artificial Sequence
  Description of Artificial Sequence: Synthetic oligonucleotide
  Antisense strand to SEQ ID NO: 1283048
acuccgaaucagacaacgc

SEQ ID NO: 1283050 - RNA, 19 nt, Artificial Sequence
  Description of Artificial Sequence: Synthetic oligonucleotide
  Sense strand starting at position 2652 of SEQ ID NO: 1241575
ucugauucggagugacuuu

SEQ ID NO: 1283051 - RNA, 19 nt, Artificial Sequence
  Description of Artificial Sequence: Synthetic oligonucleotide
  Antisense strand to SEQ ID NO: 1283050
aaagucacuccgaaucaga

SEQ ID NO: 1283052 - RNA, 19 nt, Artificial Sequence
  Description of Artificial Sequence: Synthetic oligonucleotide
  Sense strand starting at position 3458 of SEQ ID NO: 1241575
ugagcaagaucagcauagu

SEQ ID NO: 1283053 - RNA, 19 nt, Artificial Sequence
  Description of Artificial Sequence: Synthetic oligonucleotide
  Antisense strand to SEQ ID NO: 1283052
acuaugcugaucuugcuca

SEQ ID NO: 1283054 - RNA, 19 nt, Artificial Sequence
  Description of Artificial Sequence: Synthetic oligonucleotide
  Sense strand starting at position 172 of SEQ ID NO: 1241576
cucuuauuccuguagaggu

SEQ ID NO: 1283055 - RNA, 19 nt, Artificial Sequence
  Description of Artificial Sequence: Synthetic oligonucleotide
  Antisense strand to SEQ ID NO: 1283054
accucuacaggaauaagag

SEQ ID NO: 1283056 - RNA, 19 nt, Artificial Sequence
  Description of Artificial Sequence: Synthetic oligonucleotide
  Sense strand starting at position 293 of SEQ ID NO: 1241576
acaaguagcuuugcaauaa

SEQ ID NO: 1283057 - RNA, 19 nt, Artificial Sequence
  Description of Artificial Sequence: Synthetic oligonucleotide
  Antisense strand to SEQ ID NO: 1283056
uuauugcaaagcuacuugu

SEQ ID NO: 1283058 - RNA, 19 nt, Artificial Sequence
  Description of Artificial Sequence: Synthetic oligonucleotide
  Sense strand starting at position 297 of SEQ ID NO: 1241576
guagcuuugcaauaagcaa

SEQ ID NO: 1283059 - RNA, 19 nt, Artificial Sequence
  Description of Artificial Sequence: Synthetic oligonucleotide
  Antisense strand to SEQ ID NO: 1283058
uugcuuauugcaaagcuac

SEQ ID NO: 1283060 - RNA, 19 nt, Artificial Sequence
  Description of Artificial Sequence: Synthetic oligonucleotide
  Sense strand starting at position 334 of SEQ ID NO: 1241576
ucuggagauuugggaugua

SEQ ID NO: 1283061 - RNA, 19 nt, Artificial Sequence
  Description of Artificial Sequence: Synthetic oligonucleotide
  Antisense strand to SEQ ID NO: 1283060
uacaucccaaaucuccaga

SEQ ID NO: 1283062 - RNA, 19 nt, Artificial Sequence
  Description of Artificial Sequence: Synthetic oligonucleotide
  Sense strand starting at position 588 of SEQ ID NO: 1241576
uccuaucuuccauguagau

SEQ ID NO: 1283063 - RNA, 19 nt, Artificial Sequence
  Description of Artificial Sequence: Synthetic oligonucleotide
  Antisense strand to SEQ ID NO: 1283062
aucuacauggaagauagga

SEQ ID NO: 1283064 - RNA, 19 nt, Artificial Sequence
  Description of Artificial Sequence: Synthetic oligonucleotide
  Sense strand starting at position 739 of SEQ ID NO: 1241576
augagccaucuaugcucaa

SEQ ID NO: 1283065 - RNA, 19 nt, Artificial Sequence
  Description of Artificial Sequence: Synthetic oligonucleotide
  Antisense strand to SEQ ID NO: 1283064
uugagcauagauggcucau

SEQ ID NO: 1283066 - RNA, 19 nt, Artificial Sequence
  Description of Artificial Sequence: Synthetic oligonucleotide
  Sense strand starting at position 863 of SEQ ID NO: 1241576
gcaacucuagaaugagguu

SEQ ID NO: 1283067 - RNA, 19 nt, Artificial Sequence
  Description of Artificial Sequence: Synthetic oligonucleotide
  Antisense strand to SEQ ID NO: 1283066
aaccucauucuagaguugc

SEQ ID NO: 1283068 - RNA, 19 nt, Artificial Sequence
  Description of Artificial Sequence: Synthetic oligonucleotide
  Sense strand starting at position 1156 of SEQ ID NO: 1241576
guauuauggcaucauuacu

SEQ ID NO: 1283069 - RNA, 19 nt, Artificial Sequence
  Description of Artificial Sequence: Synthetic oligonucleotide
  Antisense strand to SEQ ID NO: 1283068
aguaaugaugccauaauac

SEQ ID NO: 1283070 - RNA, 19 nt, Artificial Sequence
  Description of Artificial Sequence: Synthetic oligonucleotide
  Sense strand starting at position 1173 of SEQ ID NO: 1241576
cuaauacacugagcaguau

SEQ ID NO: 1283071 - RNA, 19 nt, Artificial Sequence
  Description of Artificial Sequence: Synthetic oligonucleotide
  Antisense strand to SEQ ID NO: 1283070
auacugcucaguguauuag

SEQ ID NO: 1283072 - RNA, 19 nt, Artificial Sequence
  Description of Artificial Sequence: Synthetic oligonucleotide
  Sense strand starting at position 1252 of SEQ ID NO: 1241576
gguggucucugauuaccaa

SEQ ID NO: 1283073 - RNA, 19 nt, Artificial Sequence
  Description of Artificial Sequence: Synthetic oligonucleotide
  Antisense strand to SEQ ID NO: 1283072
uugguaaucagagaccacc

SEQ ID NO: 1283074 - RNA, 19 nt, Artificial Sequence
  Description of Artificial Sequence: Synthetic oligonucleotide
  Sense strand starting at position 1253 of SEQ ID NO: 1241576
guggucucugauuaccaaa

SEQ ID NO: 1283075 - RNA, 19 nt, Artificial Sequence
  Description of Artificial Sequence: Synthetic oligonucleotide
  Antisense strand to SEQ ID NO: 1283074
uuugguaaucagagaccac

SEQ ID NO: 1283076 - RNA, 19 nt, Artificial Sequence
  Description of Artificial Sequence: Synthetic oligonucleotide
  Sense strand starting at position 1255 of SEQ ID NO: 1241576
ggucucugauuaccaaagu

SEQ ID NO: 1283077 - RNA, 19 nt, Artificial Sequence
  Description of Artificial Sequence: Synthetic oligonucleotide
  Antisense strand to SEQ ID NO: 1283076
acuuugguaaucagagacc

SEQ ID NO: 1283078 - RNA, 19 nt, Artificial Sequence
  Description of Artificial Sequence: Synthetic oligonucleotide
  Sense strand starting at position 1391 of SEQ ID NO: 1241576
uugcuuauguagucagaag

SEQ ID NO: 1283079 - RNA, 19 nt, Artificial Sequence
  Description of Artificial Sequence: Synthetic oligonucleotide
  Antisense strand to SEQ ID NO: 1283078
cuucugacuacauaagcaa

SEQ ID NO: 1283080 - RNA, 19 nt, Artificial Sequence
  Description of Artificial Sequence: Synthetic oligonucleotide
  Sense strand starting at position 1392 of SEQ ID NO: 1241576
ugcuuauguagucagaaga

SEQ ID NO: 1283081 - RNA, 19 nt, Artificial Sequence
  Description of Artificial Sequence: Synthetic oligonucleotide
  Antisense strand to SEQ ID NO: 1283080
ucuucugacuacauaagca

SEQ ID NO: 1283082 - RNA, 19 nt, Artificial Sequence
  Description of Artificial Sequence: Synthetic oligonucleotide
  Sense strand starting at position 1431 of SEQ ID NO: 1241576
gcucacaugccuuaguaau

SEQ ID NO: 1283083 - RNA, 19 nt, Artificial Sequence
  Description of Artificial Sequence: Synthetic oligonucleotide
  Antisense strand to SEQ ID NO: 1283082
auuacuaaggcaugugagc

SEQ ID NO: 1283084 - RNA, 19 nt, Artificial Sequence
  Description of Artificial Sequence: Synthetic oligonucleotide
  Sense strand starting at position 1433 of SEQ ID NO: 1241576
ucacaugccuuaguaauag

SEQ ID NO: 1283085 - RNA, 19 nt, Artificial Sequence
  Description of Artificial Sequence: Synthetic oligonucleotide
  Antisense strand to SEQ ID NO: 1283084
cuauuacuaaggcauguga

SEQ ID NO: 1283086 - RNA, 19 nt, Artificial Sequence
  Description of Artificial Sequence: Synthetic oligonucleotide
  Sense strand starting at position 1439 of SEQ ID NO: 1241576
gccuuaguaauagaacgua

SEQ ID NO: 1283087 - RNA, 19 nt, Artificial Sequence
  Description of Artificial Sequence: Synthetic oligonucleotide
  Antisense strand to SEQ ID NO: 1283086
uacguucuauuacuaaggc

SEQ ID NO: 1283088 - RNA, 19 nt, Artificial Sequence
  Description of Artificial Sequence: Synthetic oligonucleotide
  Sense strand starting at position 1539 of SEQ ID NO: 1241576
aagcaagggcuuuagaauu

SEQ ID NO: 1283089 - RNA, 19 nt, Artificial Sequence
  Description of Artificial Sequence: Synthetic oligonucleotide
  Antisense strand to SEQ ID NO: 1283088
aauucuaaagcccuugcuu

SEQ ID NO: 1283090 - RNA, 19 nt, Artificial Sequence
  Description of Artificial Sequence: Synthetic oligonucleotide
  Sense strand starting at position 1628 of SEQ ID NO: 1241576
aagugaaacguuuggucua

SEQ ID NO: 1283091 - RNA, 19 nt, Artificial Sequence
  Description of Artificial Sequence: Synthetic oligonucleotide
  Antisense strand to SEQ ID NO: 1283090
uagaccaaacguuucacuu

SEQ ID NO: 1283092 - RNA, 19 nt, Artificial Sequence
  Description of Artificial Sequence: Synthetic oligonucleotide
  Sense strand starting at position 1630 of SEQ ID NO: 1241576
gugaaacguuuggucuaag

SEQ ID NO: 1283093 - RNA, 19 nt, Artificial Sequence
  Description of Artificial Sequence: Synthetic oligonucleotide
  Antisense strand to SEQ ID NO: 1283092
cuuagaccaaacguuucac

SEQ ID NO: 1283094 - RNA, 19 nt, Artificial Sequence
  Description of Artificial Sequence: Synthetic oligonucleotide
  Sense strand starting at position 1631 of SEQ ID NO: 1241576
ugaaacguuuggucuaaga

SEQ ID NO: 1283095 - RNA, 19 nt, Artificial Sequence
  Description of Artificial Sequence: Synthetic oligonucleotide
  Antisense strand to SEQ ID NO: 1283094
ucuuagaccaaacguuuca

SEQ ID NO: 1283096 - RNA, 19 nt, Artificial Sequence
  Description of Artificial Sequence: Synthetic oligonucleotide
  Sense strand starting at position 1633 of SEQ ID NO: 1241576
aaacguuuggucuaagaaa

SEQ ID NO: 1283097 - RNA, 19 nt, Artificial Sequence
  Description of Artificial Sequence: Synthetic oligonucleotide
  Antisense strand to SEQ ID NO: 1283096
uuucuuagaccaaacguuu

SEQ ID NO: 1283098 - RNA, 19 nt, Artificial Sequence
  Description of Artificial Sequence: Synthetic oligonucleotide
  Sense strand starting at position 2201 of SEQ ID NO: 1241576
ucacacgccugaucuuaaa

SEQ ID NO: 1283099 - RNA, 19 nt, Artificial Sequence
  Description of Artificial Sequence: Synthetic oligonucleotide
  Antisense strand to SEQ ID NO: 1283098
uuuaagaucaggcguguga

SEQ ID NO: 1283100 - RNA, 19 nt, Artificial Sequence
  Description of Artificial Sequence: Synthetic oligonucleotide
  Sense strand starting at position 2357 of SEQ ID NO: 1241576
cacaaaucucacgauggua

SEQ ID NO: 1283101 - RNA, 19 nt, Artificial Sequence
  Description of Artificial Sequence: Synthetic oligonucleotide
  Antisense strand to SEQ ID NO: 1283100
uaccaucgugagauuugug

SEQ ID NO: 1283102 - RNA, 19 nt, Artificial Sequence
  Description of Artificial Sequence: Synthetic oligonucleotide
  Sense strand starting at position 2359 of SEQ ID NO: 1241576
caaaucucacgaugguaua

SEQ ID NO: 1283103 - RNA, 19 nt, Artificial Sequence
  Description of Artificial Sequence: Synthetic oligonucleotide
  Antisense strand to SEQ ID NO: 1283102
uauaccaucgugagauuug

SEQ ID NO: 1283104 - RNA, 19 nt, Artificial Sequence
  Description of Artificial Sequence: Synthetic oligonucleotide
  Sense strand starting at position 2388 of SEQ ID NO: 1241576
ccacucagguuuccugaaa

SEQ ID NO: 1283105 - RNA, 19 nt, Artificial Sequence
  Description of Artificial Sequence: Synthetic oligonucleotide
  Antisense strand to SEQ ID NO: 1283104
uuucaggaaaccugagugg

SEQ ID NO: 1283106 - RNA, 19 nt, Artificial Sequence
  Description of Artificial Sequence: Synthetic oligonucleotide
  Sense strand starting at position 2433 of SEQ ID NO: 1241576
uggagaacgggcuauuguu

SEQ ID NO: 1283107 - RNA, 19 nt, Artificial Sequence
  Description of Artificial Sequence: Synthetic oligonucleotide
  Antisense strand to SEQ ID NO: 1283106
aacaauagcccguucucca

SEQ ID NO: 1283108 - RNA, 19 nt, Artificial Sequence
  Description of Artificial Sequence: Synthetic oligonucleotide
  Sense strand starting at position 2507 of SEQ ID NO: 1241576
ggaccaucgcaacagguau

SEQ ID NO: 1283109 - RNA, 19 nt, Artificial Sequence
  Description of Artificial Sequence: Synthetic oligonucleotide
  Antisense strand to SEQ ID NO: 1283108
auaccuguugcgauggucc

SEQ ID NO: 1283110 - RNA, 19 nt, Artificial Sequence
  Description of Artificial Sequence: Synthetic oligonucleotide
  Sense strand starting at position 2563 of SEQ ID NO: 1241576
aagagauauugggcucaac

SEQ ID NO: 1283111 - RNA, 19 nt, Artificial Sequence
  Description of Artificial Sequence: Synthetic oligonucleotide
  Antisense strand to SEQ ID NO: 1283110
guugagcccaauaucucuu

SEQ ID NO: 1283112 - RNA, 19 nt, Artificial Sequence
  Description of Artificial Sequence: Synthetic oligonucleotide
  Sense strand starting at position 2573 of SEQ ID NO: 1241576
gggcucaacuccucauaca

SEQ ID NO: 1283113 - RNA, 19 nt, Artificial Sequence
  Description of Artificial Sequence: Synthetic oligonucleotide
  Antisense strand to SEQ ID NO: 1283112
uguaugaggaguugagccc

SEQ ID NO: 1283114 - RNA, 19 nt, Artificial Sequence
  Description of Artificial Sequence: Synthetic oligonucleotide
  Sense strand starting at position 2776 of SEQ ID NO: 1241576
ugaggaugaucagcuauca

SEQ ID NO: 1283115 - RNA, 19 nt, Artificial Sequence
  Description of Artificial Sequence: Synthetic oligonucleotide
  Antisense strand to SEQ ID NO: 1283114
ugauagcugaucauccuca

SEQ ID NO: 1283116 - RNA, 19 nt, Artificial Sequence
  Description of Artificial Sequence: Synthetic oligonucleotide
  Sense strand starting at position 2804 of SEQ ID NO: 1241576
guuuauugcuaaucugacu

SEQ ID NO: 1283117 - RNA, 19 nt, Artificial Sequence
  Description of Artificial Sequence: Synthetic oligonucleotide
  Antisense strand to SEQ ID NO: 1283116
agucagauuagcaauaaac

SEQ ID NO: 1283118 - RNA, 19 nt, Artificial Sequence
  Description of Artificial Sequence: Synthetic oligonucleotide
  Sense strand starting at position 2809 of SEQ ID NO: 1241576
uugcuaaucugacuuagca

SEQ ID NO: 1283119 - RNA, 19 nt, Artificial Sequence
  Description of Artificial Sequence: Synthetic oligonucleotide
  Antisense strand to SEQ ID NO: 1283118
ugcuaagucagauuagcaa

SEQ ID NO: 1283120 - RNA, 19 nt, Artificial Sequence
  Description of Artificial Sequence: Synthetic oligonucleotide
  Sense strand starting at position 2929 of SEQ ID NO: 1241576
uuuguaucugaagggauau

SEQ ID NO: 1283121 - RNA, 19 nt, Artificial Sequence
  Description of Artificial Sequence: Synthetic oligonucleotide
  Antisense strand to SEQ ID NO: 1283120
auaucccuucagauacaaa

SEQ ID NO: 1283122 - RNA, 19 nt, Artificial Sequence
  Description of Artificial Sequence: Synthetic oligonucleotide
  Sense strand starting at position 2930 of SEQ ID NO: 1241576
uuguaucugaagggauaug

SEQ ID NO: 1283123 - RNA, 19 nt, Artificial Sequence
  Description of Artificial Sequence: Synthetic oligonucleotide
  Antisense strand to SEQ ID NO: 1283122
cauaucccuucagauacaa

SEQ ID NO: 1283124 - RNA, 19 nt, Artificial Sequence
  Description of Artificial Sequence: Synthetic oligonucleotide
  Sense strand starting at position 2935 of SEQ ID NO: 1241576
ucugaagggauauguuauc

SEQ ID NO: 1283125 - RNA, 19 nt, Artificial Sequence
  Description of Artificial Sequence: Synthetic oligonucleotide
  Antisense strand to SEQ ID NO: 1283124
gauaacauaucccuucaga

SEQ ID NO: 1283126 - RNA, 19 nt, Artificial Sequence
  Description of Artificial Sequence: Synthetic oligonucleotide
  Sense strand starting at position 2947 of SEQ ID NO: 1241576
uguuauccucuggacaaau

SEQ ID NO: 1283127 - RNA, 19 nt, Artificial Sequence
  Description of Artificial Sequence: Synthetic oligonucleotide
  Antisense strand to SEQ ID NO: 1283126
auuuguccagaggauaaca

SEQ ID NO: 1283128 - RNA, 19 nt, Artificial Sequence
  Description of Artificial Sequence: Synthetic oligonucleotide
  Sense strand starting at position 2971 of SEQ ID NO: 1241576
gggacugugcguuaacaau

SEQ ID NO: 1283129 - RNA, 19 nt, Artificial Sequence
  Description of Artificial Sequence: Synthetic oligonucleotide
  Antisense strand to SEQ ID NO: 1283128
auuguuaacgcacaguccc

SEQ ID NO: 1283130 - RNA, 19 nt, Artificial Sequence
  Description of Artificial Sequence: Synthetic oligonucleotide
  Sense strand starting at position 3105 of SEQ ID NO: 1241576
ugucacuuaccauguaauc

SEQ ID NO: 1283131 - RNA, 19 nt, Artificial Sequence
  Description of Artificial Sequence: Synthetic oligonucleotide
  Antisense strand to SEQ ID NO: 1283130
gauuacaugguaagugaca

SEQ ID NO: 1283132 - RNA, 19 nt, Artificial Sequence
  Description of Artificial Sequence: Synthetic oligonucleotide
  Sense strand starting at position 3444 of SEQ ID NO: 1241576
auguuuacugugggaagaa

SEQ ID NO: 1283133 - RNA, 19 nt, Artificial Sequence
  Description of Artificial Sequence: Synthetic oligonucleotide
  Antisense strand to SEQ ID NO: 1283132
uucuucccacaguaaacau

SEQ ID NO: 1283134 - RNA, 19 nt, Artificial Sequence
  Description of Artificial Sequence: Synthetic oligonucleotide
  Sense strand starting at position 274 of SEQ ID NO: 1241577
ggauaaucaccuugugguu

SEQ ID NO: 1283135 - RNA, 19 nt, Artificial Sequence
  Description of Artificial Sequence: Synthetic oligonucleotide
  Antisense strand to SEQ ID NO: 1283134
aaccacaaggugauuaucc

SEQ ID NO: 1283136 - RNA, 19 nt, Artificial Sequence
  Description of Artificial Sequence: Synthetic oligonucleotide
  Sense strand starting at position 541 of SEQ ID NO: 1241577
ccguguugucuggucucga

SEQ ID NO: 1283137 - RNA, 19 nt, Artificial Sequence
  Description of Artificial Sequence: Synthetic oligonucleotide
  Antisense strand to SEQ ID NO: 1283136
ucgagaccagacaacacgg

SEQ ID NO: 1283138 - RNA, 19 nt, Artificial Sequence
  Description of Artificial Sequence: Synthetic oligonucleotide
  Sense strand starting at position 652 of SEQ ID NO: 1241577
uggcuagcgcugcucuaaa

SEQ ID NO: 1283139 - RNA, 19 nt, Artificial Sequence
  Description of Artificial Sequence: Synthetic oligonucleotide
  Antisense strand to SEQ ID NO: 1283138
uuuagagcagcgcuagcca

SEQ ID NO: 1283140 - RNA, 19 nt, Artificial Sequence
  Description of Artificial Sequence: Synthetic oligonucleotide
  Sense strand starting at position 839 of SEQ ID NO: 1241577
uugcaaguguuccuaagug

SEQ ID NO: 1283141 - RNA, 19 nt, Artificial Sequence
  Description of Artificial Sequence: Synthetic oligonucleotide
  Antisense strand to SEQ ID NO: 1283140
cacuuaggaacacuugcaa

SEQ ID NO: 1283142 - RNA, 19 nt, Artificial Sequence
  Description of Artificial Sequence: Synthetic oligonucleotide
  Sense strand starting at position 918 of SEQ ID NO: 1241577
cuggaaaucuauggaauug

SEQ ID NO: 1283143 - RNA, 19 nt, Artificial Sequence
  Description of Artificial Sequence: Synthetic oligonucleotide
  Antisense strand to SEQ ID NO: 1283142
caauuccauagauuuccag

SEQ ID NO: 1283144 - RNA, 19 nt, Artificial Sequence
  Description of Artificial Sequence: Synthetic oligonucleotide
  Sense strand starting at position 1055 of SEQ ID NO: 1241577
uuccuuauuucugagaaug

SEQ ID NO: 1283145 - RNA, 19 nt, Artificial Sequence
  Description of Artificial Sequence: Synthetic oligonucleotide
  Antisense strand to SEQ ID NO: 1283144
cauucucagaaauaaggaa

SEQ ID NO: 1283146 - RNA, 19 nt, Artificial Sequence
  Description of Artificial Sequence: Synthetic oligonucleotide
  Sense strand starting at position 1057 of SEQ ID NO: 1241577
ccuuauuucugagaauguc

SEQ ID NO: 1283147 - RNA, 19 nt, Artificial Sequence
  Description of Artificial Sequence: Synthetic oligonucleotide
  Antisense strand to SEQ ID NO: 1283146
gacauucucagaaauaagg

SEQ ID NO: 1283148 - RNA, 19 nt, Artificial Sequence
  Description of Artificial Sequence: Synthetic oligonucleotide
  Sense strand starting at position 1065 of SEQ ID NO: 1241577
cugagaaugucucugccau

SEQ ID NO: 1283149 - RNA, 19 nt, Artificial Sequence
  Description of Artificial Sequence: Synthetic oligonucleotide
  Antisense strand to SEQ ID NO: 1283148
auggcagagacauucucag

SEQ ID NO: 1283150 - RNA, 19 nt, Artificial Sequence
  Description of Artificial Sequence: Synthetic oligonucleotide
  Sense strand starting at position 1066 of SEQ ID NO: 1241577
ugagaaugucucugccaug

SEQ ID NO: 1283151 - RNA, 19 nt, Artificial Sequence
  Description of Artificial Sequence: Synthetic oligonucleotide
  Antisense strand to SEQ ID NO: 1283150
cauggcagagacauucuca

SEQ ID NO: 1283152 - RNA, 19 nt, Artificial Sequence
  Description of Artificial Sequence: Synthetic oligonucleotide
  Sense strand starting at position 1067 of SEQ ID NO: 1241577
gagaaugucucugccaugu

SEQ ID NO: 1283153 - RNA, 19 nt, Artificial Sequence
  Description of Artificial Sequence: Synthetic oligonucleotide
  Antisense strand to SEQ ID NO: 1283152
acauggcagagacauucuc

SEQ ID NO: 1283154 - RNA, 19 nt, Artificial Sequence
  Description of Artificial Sequence: Synthetic oligonucleotide
  Sense strand starting at position 1071 of SEQ ID NO: 1241577
augucucugccauguucua

SEQ ID NO: 1283155 - RNA, 19 nt, Artificial Sequence
  Description of Artificial Sequence: Synthetic oligonucleotide
  Antisense strand to SEQ ID NO: 1283154
uagaacauggcagagacau

SEQ ID NO: 1283156 - RNA, 19 nt, Artificial Sequence
  Description of Artificial Sequence: Synthetic oligonucleotide
  Sense strand starting at position 1151 of SEQ ID NO: 1241577
cccguuaguguuucuugua

SEQ ID NO: 1283157 - RNA, 19 nt, Artificial Sequence
  Description of Artificial Sequence: Synthetic oligonucleotide
  Antisense strand to SEQ ID NO: 1283156
uacaagaaacacuaacggg

SEQ ID NO: 1283158 - RNA, 19 nt, Artificial Sequence
  Description of Artificial Sequence: Synthetic oligonucleotide
  Sense strand starting at position 1152 of SEQ ID NO: 1241577
ccguuaguguuucuuguaa

SEQ ID NO: 1283159 - RNA, 19 nt, Artificial Sequence
  Description of Artificial Sequence: Synthetic oligonucleotide
  Antisense strand to SEQ ID NO: 1283158
uuacaagaaacacuaacgg

SEQ ID NO: 1283160 - RNA, 19 nt, Artificial Sequence
  Description of Artificial Sequence: Synthetic oligonucleotide
  Sense strand starting at position 1264 of SEQ ID NO: 1241577
auggauuaauaugccuaaa

SEQ ID NO: 1283161 - RNA, 19 nt, Artificial Sequence
  Description of Artificial Sequence: Synthetic oligonucleotide
  Antisense strand to SEQ ID NO: 1283160
uuuaggcauauuaauccau

SEQ ID NO: 1283162 - RNA, 19 nt, Artificial Sequence
  Description of Artificial Sequence: Synthetic oligonucleotide
  Sense strand starting at position 1266 of SEQ ID NO: 1241577
ggauuaauaugccuaaagc

SEQ ID NO: 1283163 - RNA, 19 nt, Artificial Sequence
  Description of Artificial Sequence: Synthetic oligonucleotide
  Antisense strand to SEQ ID NO: 1283162
gcuuuaggcauauuaaucc

SEQ ID NO: 1283164 - RNA, 19 nt, Artificial Sequence
  Description of Artificial Sequence: Synthetic oligonucleotide
  Sense strand starting at position 1293 of SEQ ID NO: 1241577
ccacaacggugagaagaau

SEQ ID NO: 1283165 - RNA, 19 nt, Artificial Sequence
  Description of Artificial Sequence: Synthetic oligonucleotide
  Antisense strand to SEQ ID NO: 1283164
auucuucucaccguugugg

SEQ ID NO: 1283166 - RNA, 19 nt, Artificial Sequence
  Description of Artificial Sequence: Synthetic oligonucleotide
  Sense strand starting at position 1304 of SEQ ID NO: 1241577
agaagaaucugagagggaa

SEQ ID NO: 1283167 - RNA, 19 nt, Artificial Sequence
  Description of Artificial Sequence: Synthetic oligonucleotide
  Antisense strand to SEQ ID NO: 1283166
uucccucucagauucuucu

SEQ ID NO: 1283168 - RNA, 19 nt, Artificial Sequence
  Description of Artificial Sequence: Synthetic oligonucleotide
  Sense strand starting at position 1349 of SEQ ID NO: 1241577
acaugcaugccucgagaca

SEQ ID NO: 1283169 - RNA, 19 nt, Artificial Sequence
  Description of Artificial Sequence: Synthetic oligonucleotide
  Antisense strand to SEQ ID NO: 1283168
ugucucgaggcaugcaugu

SEQ ID NO: 1283170 - RNA, 19 nt, Artificial Sequence
  Description of Artificial Sequence: Synthetic oligonucleotide
  Sense strand starting at position 1396 of SEQ ID NO: 1241577
ccgucuuccgccucgaaca

SEQ ID NO: 1283171 - RNA, 19 nt, Artificial Sequence
  Description of Artificial Sequence: Synthetic oligonucleotide
  Antisense strand to SEQ ID NO: 1283170
uguucgaggcggaagacgg

SEQ ID NO: 1283172 - RNA, 19 nt, Artificial Sequence
  Description of Artificial Sequence: Synthetic oligonucleotide
  Sense strand starting at position 1425 of SEQ ID NO: 1241577
ggacuucgcccagaaugcu

SEQ ID NO: 1283173 - RNA, 19 nt, Artificial Sequence
  Description of Artificial Sequence: Synthetic oligonucleotide
  Antisense strand to SEQ ID NO: 1283172
agcauucugggcgaagucc

SEQ ID NO: 1283174 - RNA, 19 nt, Artificial Sequence
  Description of Artificial Sequence: Synthetic oligonucleotide
  Sense strand starting at position 1586 of SEQ ID NO: 1241577
cgcccugagacgucuucga

SEQ ID NO: 1283175 - RNA, 19 nt, Artificial Sequence
  Description of Artificial Sequence: Synthetic oligonucleotide
  Antisense strand to SEQ ID NO: 1283174
ucgaagacgucucagggcg

SEQ ID NO: 1283176 - RNA, 19 nt, Artificial Sequence
  Description of Artificial Sequence: Synthetic oligonucleotide
  Sense strand starting at position 1590 of SEQ ID NO: 1241577
cugagacgucuucgagcaa

SEQ ID NO: 1283177 - RNA, 19 nt, Artificial Sequence
  Description of Artificial Sequence: Synthetic oligonucleotide
  Antisense strand to SEQ ID NO: 1283176
uugcucgaagacgucucag

SEQ ID NO: 1283178 - RNA, 19 nt, Artificial Sequence
  Description of Artificial Sequence: Synthetic oligonucleotide
  Sense strand starting at position 2223 of SEQ ID NO: 1241577
gugcuucucccggcauaca

SEQ ID NO: 1283179 - RNA, 19 nt, Artificial Sequence
  Description of Artificial Sequence: Synthetic oligonucleotide
  Antisense strand to SEQ ID NO: 1283178
uguaugccgggagaagcac

SEQ ID NO: 1283180 - RNA, 19 nt, Artificial Sequence
  Description of Artificial Sequence: Synthetic oligonucleotide
  Sense strand starting at position 2224 of SEQ ID NO: 1241577
ugcuucucccggcauacaa

SEQ ID NO: 1283181 - RNA, 19 nt, Artificial Sequence
  Description of Artificial Sequence: Synthetic oligonucleotide
  Antisense strand to SEQ ID NO: 1283180
uuguaugccgggagaagca

SEQ ID NO: 1283182 - RNA, 19 nt, Artificial Sequence
  Description of Artificial Sequence: Synthetic oligonucleotide
  Sense strand starting at position 2267 of SEQ ID NO: 1241577
ccugucauuucuuuagggu

SEQ ID NO: 1283183 - RNA, 19 nt, Artificial Sequence
  Description of Artificial Sequence: Synthetic oligonucleotide
  Antisense strand to SEQ ID NO: 1283182
acccuaaagaaaugacagg

SEQ ID NO: 1283184 - RNA, 19 nt, Artificial Sequence
  Description of Artificial Sequence: Synthetic oligonucleotide
  Sense strand starting at position 2283 of SEQ ID NO: 1241577
gguaccuauuugcgaacca

SEQ ID NO: 1283185 - RNA, 19 nt, Artificial Sequence
  Description of Artificial Sequence: Synthetic oligonucleotide
  Antisense strand to SEQ ID NO: 1283184
ugguucgcaaauagguacc

SEQ ID NO: 1283186 - RNA, 19 nt, Artificial Sequence
  Description of Artificial Sequence: Synthetic oligonucleotide
  Sense strand starting at position 2413 of SEQ ID NO: 1241577
uuaaacauccuccgcgauu

SEQ ID NO: 1283187 - RNA, 19 nt, Artificial Sequence
  Description of Artificial Sequence: Synthetic oligonucleotide
  Antisense strand to SEQ ID NO: 1283186
aaucgcggaggauguuuaa

SEQ ID NO: 1283188 - RNA, 19 nt, Artificial Sequence
  Description of Artificial Sequence: Synthetic oligonucleotide
  Sense strand starting at position 2454 of SEQ ID NO: 1241577
cagucuuucuagguggcaa

SEQ ID NO: 1283189 - RNA, 19 nt, Artificial Sequence
  Description of Artificial Sequence: Synthetic oligonucleotide
  Antisense strand to SEQ ID NO: 1283188
uugccaccuagaaagacug

SEQ ID NO: 1283190 - RNA, 19 nt, Artificial Sequence
  Description of Artificial Sequence: Synthetic oligonucleotide
  Sense strand starting at position 2708 of SEQ ID NO: 1241577
guacaugguaucugggcaa

SEQ ID NO: 1283191 - RNA, 19 nt, Artificial Sequence
  Description of Artificial Sequence: Synthetic oligonucleotide
  Antisense strand to SEQ ID NO: 1283190
uugcccagauaccauguac

SEQ ID NO: 1283192 - RNA, 19 nt, Artificial Sequence
  Description of Artificial Sequence: Synthetic oligonucleotide
  Sense strand starting at position 2711 of SEQ ID NO: 1241577
caugguaucugggcaaguu

SEQ ID NO: 1283193 - RNA, 19 nt, Artificial Sequence
  Description of Artificial Sequence: Synthetic oligonucleotide
  Antisense strand to SEQ ID NO: 1283192
aacuugcccagauaccaug

SEQ ID NO: 1283194 - RNA, 19 nt, Artificial Sequence
  Description of Artificial Sequence: Synthetic oligonucleotide
  Sense strand starting at position 2712 of SEQ ID NO: 1241577
augguaucugggcaaguua

SEQ ID NO: 1283195 - RNA, 19 nt, Artificial Sequence
  Description of Artificial Sequence: Synthetic oligonucleotide
  Antisense strand to SEQ ID NO: 1283194
uaacuugcccagauaccau

SEQ ID NO: 1283196 - RNA, 19 nt, Artificial Sequence
  Description of Artificial Sequence: Synthetic oligonucleotide
  Sense strand starting at position 3224 of SEQ ID NO: 1241577
aaagauaaguugugggaga

SEQ ID NO: 1283197 - RNA, 19 nt, Artificial Sequence
  Description of Artificial Sequence: Synthetic oligonucleotide
  Antisense strand to SEQ ID NO: 1283196
ucucccacaacuuaucuuu

SEQ ID NO: 1283198 - RNA, 19 nt, Artificial Sequence
  Description of Artificial Sequence: Synthetic oligonucleotide
  Sense strand starting at position 3225 of SEQ ID NO: 1241577
aagauaaguugugggagaa

SEQ ID NO: 1283199 - RNA, 19 nt, Artificial Sequence
  Description of Artificial Sequence: Synthetic oligonucleotide
  Antisense strand to SEQ ID NO: 1283198
uucucccacaacuuaucuu

SEQ ID NO: 1283200 - RNA, 19 nt, Artificial Sequence
  Description of Artificial Sequence: Synthetic oligonucleotide
  Sense strand starting at position 3229 of SEQ ID NO: 1241577
uaaguugugggagaagguu

SEQ ID NO: 1283201 - RNA, 19 nt, Artificial Sequence
  Description of Artificial Sequence: Synthetic oligonucleotide
  Antisense strand to SEQ ID NO: 1283200
aaccuucucccacaacuua

SEQ ID NO: 1283202 - RNA, 19 nt, Artificial Sequence
  Description of Artificial Sequence: Synthetic oligonucleotide
  Sense strand starting at position 3335 of SEQ ID NO: 1241577
gcuugucagcagcacauau

SEQ ID NO: 1283203 - RNA, 19 nt, Artificial Sequence
  Description of Artificial Sequence: Synthetic oligonucleotide
  Antisense strand to SEQ ID NO: 1283202
auaugugcugcugacaagc

SEQ ID NO: 1283204 - RNA, 19 nt, Artificial Sequence
  Description of Artificial Sequence: Synthetic oligonucleotide
  Sense strand starting at position 3358 of SEQ ID NO: 1241577
uuuacaagugcugagaaca

SEQ ID NO: 1283205 - RNA, 19 nt, Artificial Sequence
  Description of Artificial Sequence: Synthetic oligonucleotide
  Antisense strand to SEQ ID NO: 1283204
uguucucagcacuuguaaa

SEQ ID NO: 1283206 - RNA, 19 nt, Artificial Sequence
  Description of Artificial Sequence: Synthetic oligonucleotide
  Sense strand starting at position 3370 of SEQ ID NO: 1241577
gagaacagugccugauaca

SEQ ID NO: 1283207 - RNA, 19 nt, Artificial Sequence
  Description of Artificial Sequence: Synthetic oligonucleotide
  Antisense strand to SEQ ID NO: 1283206
uguaucaggcacuguucuc

SEQ ID NO: 1283208 - RNA, 19 nt, Artificial Sequence
  Description of Artificial Sequence: Synthetic oligonucleotide
  Sense strand starting at position 3468 of SEQ ID NO: 1241577
cugauugcaguccgcuaau

SEQ ID NO: 1283209 - RNA, 19 nt, Artificial Sequence
  Description of Artificial Sequence: Synthetic oligonucleotide
  Antisense strand to SEQ ID NO: 1283208
auuagcggacugcaaucag

SEQ ID NO: 1283210 - RNA, 19 nt, Artificial Sequence
  Description of Artificial Sequence: Synthetic oligonucleotide
  Sense strand starting at position 3471 of SEQ ID NO: 1241577
auugcaguccgcuaauauu

SEQ ID NO: 1283211 - RNA, 19 nt, Artificial Sequence
  Description of Artificial Sequence: Synthetic oligonucleotide
  Antisense strand to SEQ ID NO: 1283210
aauauuagcggacugcaau

SEQ ID NO: 1283212 - RNA, 19 nt, Artificial Sequence
  Description of Artificial Sequence: Synthetic oligonucleotide
  Sense strand starting at position 3977 of SEQ ID NO: 1241577
cucacagaaugucaugaaa

SEQ ID NO: 1283213 - RNA, 19 nt, Artificial Sequence
  Description of Artificial Sequence: Synthetic oligonucleotide
  Antisense strand to SEQ ID NO: 1283212
uuucaugacauucugugag

SEQ ID NO: 1283214 - RNA, 19 nt, Artificial Sequence
  Description of Artificial Sequence: Synthetic oligonucleotide
  Sense strand starting at position 428 of SEQ ID NO: 1241578
ugguucugggaguaaagua

SEQ ID NO: 1283215 - RNA, 19 nt, Artificial Sequence
  Description of Artificial Sequence: Synthetic oligonucleotide
  Antisense strand to SEQ ID NO: 1283214
uacuuuacucccagaacca

SEQ ID NO: 1283216 - RNA, 19 nt, Artificial Sequence
  Description of Artificial Sequence: Synthetic oligonucleotide
  Sense strand starting at position 498 of SEQ ID NO: 1241578
agcugaagacuguaguaga

SEQ ID NO: 1283217 - RNA, 19 nt, Artificial Sequence
  Description of Artificial Sequence: Synthetic oligonucleotide
  Antisense strand to SEQ ID NO: 1283216
ucuacuacagucuucagcu

SEQ ID NO: 1283218 - RNA, 19 nt, Artificial Sequence
  Description of Artificial Sequence: Synthetic oligonucleotide
  Sense strand starting at position 564 of SEQ ID NO: 1241578
gcaguacgaaaugacuauu

SEQ ID NO: 1283219 - RNA, 19 nt, Artificial Sequence
  Description of Artificial Sequence: Synthetic oligonucleotide
  Antisense strand to SEQ ID NO: 1283218
aauagucauuucguacugc

SEQ ID NO: 1283220 - RNA, 19 nt, Artificial Sequence
  Description of Artificial Sequence: Synthetic oligonucleotide
  Sense strand starting at position 592 of SEQ ID NO: 1241578
agugaacagacaugucaag

SEQ ID NO: 1283221 - RNA, 19 nt, Artificial Sequence
  Description of Artificial Sequence: Synthetic oligonucleotide
  Antisense strand to SEQ ID NO: 1283220
cuugacaugucuguucacu

SEQ ID NO: 1283222 - RNA, 19 nt, Artificial Sequence
  Description of Artificial Sequence: Synthetic oligonucleotide
  Sense strand starting at position 631 of SEQ ID NO: 1241578
ucuggaguucuugggagaa

SEQ ID NO: 1283223 - RNA, 19 nt, Artificial Sequence
  Description of Artificial Sequence: Synthetic oligonucleotide
  Antisense strand to SEQ ID NO: 1283222
uucucccaagaacuccaga

SEQ ID NO: 1283224 - RNA, 19 nt, Artificial Sequence
  Description of Artificial Sequence: Synthetic oligonucleotide
  Sense strand starting at position 782 of SEQ ID NO: 1241578
agguuuguagaaugaaaua

SEQ ID NO: 1283225 - RNA, 19 nt, Artificial Sequence
  Description of Artificial Sequence: Synthetic oligonucleotide
  Antisense strand to SEQ ID NO: 1283224
uauuucauucuacaaaccu

SEQ ID NO: 1283226 - RNA, 19 nt, Artificial Sequence
  Description of Artificial Sequence: Synthetic oligonucleotide
  Sense strand starting at position 887 of SEQ ID NO: 1241578
auggcagaacuuuagcauu

SEQ ID NO: 1283227 - RNA, 19 nt, Artificial Sequence
  Description of Artificial Sequence: Synthetic oligonucleotide
  Antisense strand to SEQ ID NO: 1283226
aaugcuaaaguucugccau

SEQ ID NO: 1283228 - RNA, 19 nt, Artificial Sequence
  Description of Artificial Sequence: Synthetic oligonucleotide
  Sense strand starting at position 932 of SEQ ID NO: 1241578
agacauaaguugccuauua

SEQ ID NO: 1283229 - RNA, 19 nt, Artificial Sequence
  Description of Artificial Sequence: Synthetic oligonucleotide
  Antisense strand to SEQ ID NO: 1283228
uaauaggcaacuuaugucu

SEQ ID NO: 1283230 - RNA, 19 nt, Artificial Sequence
  Description of Artificial Sequence: Synthetic oligonucleotide
  Sense strand starting at position 979 of SEQ ID NO: 1241578
uaaggcugagcaugagaau

SEQ ID NO: 1283231 - RNA, 19 nt, Artificial Sequence
  Description of Artificial Sequence: Synthetic oligonucleotide
  Antisense strand to SEQ ID NO: 1283230
auucucaugcucagccuua

SEQ ID NO: 1283232 - RNA, 19 nt, Artificial Sequence
  Description of Artificial Sequence: Synthetic oligonucleotide
  Sense strand starting at position 1112 of SEQ ID NO: 1241578
ggaguaaacugacugcaca

SEQ ID NO: 1283233 - RNA, 19 nt, Artificial Sequence
  Description of Artificial Sequence: Synthetic oligonucleotide
  Antisense strand to SEQ ID NO: 1283232
ugugcagucaguuuacucc

SEQ ID NO: 1283234 - RNA, 19 nt, Artificial Sequence
  Description of Artificial Sequence: Synthetic oligonucleotide
  Sense strand starting at position 1113 of SEQ ID NO: 1241578
gaguaaacugacugcacau

SEQ ID NO: 1283235 - RNA, 19 nt, Artificial Sequence
  Description of Artificial Sequence: Synthetic oligonucleotide
  Antisense strand to SEQ ID NO: 1283234
augugcagucaguuuacuc

SEQ ID NO: 1283236 - RNA, 19 nt, Artificial Sequence
  Description of Artificial Sequence: Synthetic oligonucleotide
  Sense strand starting at position 1115 of SEQ ID NO: 1241578
guaaacugacugcacauau

SEQ ID NO: 1283237 - RNA, 19 nt, Artificial Sequence
  Description of Artificial Sequence: Synthetic oligonucleotide
  Antisense strand to SEQ ID NO: 1283236
auaugugcagucaguuuac

SEQ ID NO: 1283238 - RNA, 19 nt, Artificial Sequence
  Description of Artificial Sequence: Synthetic oligonucleotide
  Sense strand starting at position 1132 of SEQ ID NO: 1241578
augcaauacguuuaacaaa

SEQ ID NO: 1283239 - RNA, 19 nt, Artificial Sequence
  Description of Artificial Sequence: Synthetic oligonucleotide
  Antisense strand to SEQ ID NO: 1283238
uuuguuaaacguauugcau

SEQ ID NO: 1283240 - RNA, 19 nt, Artificial Sequence
  Description of Artificial Sequence: Synthetic oligonucleotide
  Sense strand starting at position 1269 of SEQ ID NO: 1241578
gcuguuagguaauuuguau

SEQ ID NO: 1283241 - RNA, 19 nt, Artificial Sequence
  Description of Artificial Sequence: Synthetic oligonucleotide
  Antisense strand to SEQ ID NO: 1283240
auacaaauuaccuaacagc

SEQ ID NO: 1283242 - RNA, 19 nt, Artificial Sequence
  Description of Artificial Sequence: Synthetic oligonucleotide
  Sense strand starting at position 1393 of SEQ ID NO: 1241578
gucaaugaucugcacacuu

SEQ ID NO: 1283243 - RNA, 19 nt, Artificial Sequence
  Description of Artificial Sequence: Synthetic oligonucleotide
  Antisense strand to SEQ ID NO: 1283242
aagugugcagaucauugac

SEQ ID NO: 1283244 - RNA, 19 nt, Artificial Sequence
  Description of Artificial Sequence: Synthetic oligonucleotide
  Sense strand starting at position 1418 of SEQ ID NO: 1241578
agagaaggccugugaauca

SEQ ID NO: 1283245 - RNA, 19 nt, Artificial Sequence
  Description of Artificial Sequence: Synthetic oligonucleotide
  Antisense strand to SEQ ID NO: 1283244
ugauucacaggccuucucu

SEQ ID NO: 1283246 - RNA, 19 nt, Artificial Sequence
  Description of Artificial Sequence: Synthetic oligonucleotide
  Sense strand starting at position 1570 of SEQ ID NO: 1241578
ucccuaaguggcugaagaa

SEQ ID NO: 1283247 - RNA, 19 nt, Artificial Sequence
  Description of Artificial Sequence: Synthetic oligonucleotide
  Antisense strand to SEQ ID NO: 1283246
uucuucagccacuuaggga

SEQ ID NO: 1283248 - RNA, 19 nt, Artificial Sequence
  Description of Artificial Sequence: Synthetic oligonucleotide
  Sense strand starting at position 1790 of SEQ ID NO: 1241578
ccauguggucuguccgagu

SEQ ID NO: 1283249 - RNA, 19 nt, Artificial Sequence
  Description of Artificial Sequence: Synthetic oligonucleotide
  Antisense strand to SEQ ID NO: 1283248
acucggacagaccacaugg

SEQ ID NO: 1283250 - RNA, 19 nt, Artificial Sequence
  Description of Artificial Sequence: Synthetic oligonucleotide
  Sense strand starting at position 2166 of SEQ ID NO: 1241578
ggcgucgugguaucugaga

SEQ ID NO: 1283251 - RNA, 19 nt, Artificial Sequence
  Description of Artificial Sequence: Synthetic oligonucleotide
  Antisense strand to SEQ ID NO: 1283250
ucucagauaccacgacgcc

SEQ ID NO: 1283252 - RNA, 19 nt, Artificial Sequence
  Description of Artificial Sequence: Synthetic oligonucleotide
  Sense strand starting at position 2269 of SEQ ID NO: 1241578
gggagagaugcugguauac

SEQ ID NO: 1283253 - RNA, 19 nt, Artificial Sequence
  Description of Artificial Sequence: Synthetic oligonucleotide
  Antisense strand to SEQ ID NO: 1283252
guauaccagcaucucuccc

SEQ ID NO: 1283254 - RNA, 19 nt, Artificial Sequence
  Description of Artificial Sequence: Synthetic oligonucleotide
  Sense strand starting at position 2315 of SEQ ID NO: 1241578
gcgcgaaguaaccugucuu

SEQ ID NO: 1283255 - RNA, 19 nt, Artificial Sequence
  Description of Artificial Sequence: Synthetic oligonucleotide
  Antisense strand to SEQ ID NO: 1283254
aagacagguuacuucgcgc

SEQ ID NO: 1283256 - RNA, 19 nt, Artificial Sequence
  Description of Artificial Sequence: Synthetic oligonucleotide
  Sense strand starting at position 2388 of SEQ ID NO: 1241578
gugcucaggcucucgugaa

SEQ ID NO: 1283257 - RNA, 19 nt, Artificial Sequence
  Description of Artificial Sequence: Synthetic oligonucleotide
  Antisense strand to SEQ ID NO: 1283256
uucacgagagccugagcac

SEQ ID NO: 1283258 - RNA, 19 nt, Artificial Sequence
  Description of Artificial Sequence: Synthetic oligonucleotide
  Sense strand starting at position 2498 of SEQ ID NO: 1241578
aguuaaagauaagucugau

SEQ ID NO: 1283259 - RNA, 19 nt, Artificial Sequence
  Description of Artificial Sequence: Synthetic oligonucleotide
  Antisense strand to SEQ ID NO: 1283258
aucagacuuaucuuuaacu

SEQ ID NO: 1283260 - RNA, 19 nt, Artificial Sequence
  Description of Artificial Sequence: Synthetic oligonucleotide
  Sense strand starting at position 2691 of SEQ ID NO: 1241578
ggcagugugcucagggaau

SEQ ID NO: 1283261 - RNA, 19 nt, Artificial Sequence
  Description of Artificial Sequence: Synthetic oligonucleotide
  Antisense strand to SEQ ID NO: 1283260
auucccugagcacacugcc

SEQ ID NO: 1283262 - RNA, 19 nt, Artificial Sequence
  Description of Artificial Sequence: Synthetic oligonucleotide
  Sense strand starting at position 2704 of SEQ ID NO: 1241578
gggaaugacuuucugagug

SEQ ID NO: 1283263 - RNA, 19 nt, Artificial Sequence
  Description of Artificial Sequence: Synthetic oligonucleotide
  Antisense strand to SEQ ID NO: 1283262
cacucagaaagucauuccc

SEQ ID NO: 1283264 - RNA, 19 nt, Artificial Sequence
  Description of Artificial Sequence: Synthetic oligonucleotide
  Sense strand starting at position 2708 of SEQ ID NO: 1241578
augacuuucugagugagug

SEQ ID NO: 1283265 - RNA, 19 nt, Artificial Sequence
  Description of Artificial Sequence: Synthetic oligonucleotide
  Antisense strand to SEQ ID NO: 1283264
cacucacucagaaagucau

SEQ ID NO: 1283266 - RNA, 19 nt, Artificial Sequence
  Description of Artificial Sequence: Synthetic oligonucleotide
  Sense strand starting at position 2709 of SEQ ID NO: 1241578
ugacuuucugagugaguga

SEQ ID NO: 1283267 - RNA, 19 nt, Artificial Sequence
  Description of Artificial Sequence: Synthetic oligonucleotide
  Antisense strand to SEQ ID NO: 1283266
ucacucacucagaaaguca

SEQ ID NO: 1283268 - RNA, 19 nt, Artificial Sequence
  Description of Artificial Sequence: Synthetic oligonucleotide
  Sense strand starting at position 2710 of SEQ ID NO: 1241578
gacuuucugagugagugau

SEQ ID NO: 1283269 - RNA, 19 nt, Artificial Sequence
  Description of Artificial Sequence: Synthetic oligonucleotide
  Antisense strand to SEQ ID NO: 1283268
aucacucacucagaaaguc

SEQ ID NO: 1283270 - RNA, 19 nt, Artificial Sequence
  Description of Artificial Sequence: Synthetic oligonucleotide
  Sense strand starting at position 2997 of SEQ ID NO: 1241578
gacacaguauuauugugaa

SEQ ID NO: 1283271 - RNA, 19 nt, Artificial Sequence
  Description of Artificial Sequence: Synthetic oligonucleotide
  Antisense strand to SEQ ID NO: 1283270
uucacaauaauacuguguc

SEQ ID NO: 1283272 - RNA, 19 nt, Artificial Sequence
  Description of Artificial Sequence: Synthetic oligonucleotide
  Sense strand starting at position 3071 of SEQ ID NO: 1241578
uuugguaaauggcccaaua

SEQ ID NO: 1283273 - RNA, 19 nt, Artificial Sequence
  Description of Artificial Sequence: Synthetic oligonucleotide
  Antisense strand to SEQ ID NO: 1283272
uauugggccauuuaccaaa

SEQ ID NO: 1283274 - RNA, 19 nt, Artificial Sequence
  Description of Artificial Sequence: Synthetic oligonucleotide
  Sense strand starting at position 3073 of SEQ ID NO: 1241578
ugguaaauggcccaauaau

SEQ ID NO: 1283275 - RNA, 19 nt, Artificial Sequence
  Description of Artificial Sequence: Synthetic oligonucleotide
  Antisense strand to SEQ ID NO: 1283274
auuauugggccauuuacca

SEQ ID NO: 1283276 - RNA, 19 nt, Artificial Sequence
  Description of Artificial Sequence: Synthetic oligonucleotide
  Sense strand starting at position 3335 of SEQ ID NO: 1241578
augucagagcauuacauua

SEQ ID NO: 1283277 - RNA, 19 nt, Artificial Sequence
  Description of Artificial Sequence: Synthetic oligonucleotide
  Antisense strand to SEQ ID NO: 1283276
uaauguaaugcucugacau

SEQ ID NO: 1283278 - RNA, 19 nt, Artificial Sequence
  Description of Artificial Sequence: Synthetic oligonucleotide
  Sense strand starting at position 3399 of SEQ ID NO: 1241578
ugaucacuugcugaagauu

SEQ ID NO: 1283279 - RNA, 19 nt, Artificial Sequence
  Description of Artificial Sequence: Synthetic oligonucleotide
  Antisense strand to SEQ ID NO: 1283278
aaucuucagcaagugauca

SEQ ID NO: 1283280 - RNA, 19 nt, Artificial Sequence
  Description of Artificial Sequence: Synthetic oligonucleotide
  Sense strand starting at position 3473 of SEQ ID NO: 1241578
cuuugagaauauguacaca

SEQ ID NO: 1283281 - RNA, 19 nt, Artificial Sequence
  Description of Artificial Sequence: Synthetic oligonucleotide
  Antisense strand to SEQ ID NO: 1283280
uguguacauauucucaaag

SEQ ID NO: 1283282 - RNA, 19 nt, Artificial Sequence
  Description of Artificial Sequence: Synthetic oligonucleotide
  Sense strand starting at position 3559 of SEQ ID NO: 1241578
uuacaaugguugccaaaug

SEQ ID NO: 1283283 - RNA, 19 nt, Artificial Sequence
  Description of Artificial Sequence: Synthetic oligonucleotide
  Antisense strand to SEQ ID NO: 1283282
cauuuggcaaccauuguaa

SEQ ID NO: 1283284 - RNA, 19 nt, Artificial Sequence
  Description of Artificial Sequence: Synthetic oligonucleotide
  Sense strand starting at position 3741 of SEQ ID NO: 1241578
gggauacuaguuggaaagu

SEQ ID NO: 1283285 - RNA, 19 nt, Artificial Sequence
  Description of Artificial Sequence: Synthetic oligonucleotide
  Antisense strand to SEQ ID NO: 1283284
acuuuccaacuaguauccc

SEQ ID NO: 1283286 - RNA, 19 nt, Artificial Sequence
  Description of Artificial Sequence: Synthetic oligonucleotide
  Sense strand starting at position 3772 of SEQ ID NO: 1241578
gugagcuagcaguaaugga

SEQ ID NO: 1283287 - RNA, 19 nt, Artificial Sequence
  Description of Artificial Sequence: Synthetic oligonucleotide
  Antisense strand to SEQ ID NO: 1283286
uccauuacugcuagcucac

SEQ ID NO: 1283288 - RNA, 19 nt, Artificial Sequence
  Description of Artificial Sequence: Synthetic oligonucleotide
  Sense strand starting at position 3779 of SEQ ID NO: 1241578
agcaguaauggagagugau

SEQ ID NO: 1283289 - RNA, 19 nt, Artificial Sequence
  Description of Artificial Sequence: Synthetic oligonucleotide
  Antisense strand to SEQ ID NO: 1283288
aucacucuccauuacugcu

SEQ ID NO: 1283290 - RNA, 19 nt, Artificial Sequence
  Description of Artificial Sequence: Synthetic oligonucleotide
  Sense strand starting at position 3789 of SEQ ID NO: 1241578
gagagugauuuggacuaaa

SEQ ID NO: 1283291 - RNA, 19 nt, Artificial Sequence
  Description of Artificial Sequence: Synthetic oligonucleotide
  Antisense strand to SEQ ID NO: 1283290
uuuaguccaaaucacucuc

SEQ ID NO: 1283292 - RNA, 19 nt, Artificial Sequence
  Description of Artificial Sequence: Synthetic oligonucleotide
  Sense strand starting at position 3958 of SEQ ID NO: 1241578
gggcacuauggaugaauga

SEQ ID NO: 1283293 - RNA, 19 nt, Artificial Sequence
  Description of Artificial Sequence: Synthetic oligonucleotide
  Antisense strand to SEQ ID NO: 1283292
ucauucauccauagugccc

SEQ ID NO: 1283294 - RNA, 19 nt, Artificial Sequence
  Description of Artificial Sequence: Synthetic oligonucleotide
  Sense strand starting at position 281 of SEQ ID NO: 1241579
ucauucugucuagauaaug

SEQ ID NO: 1283295 - RNA, 19 nt, Artificial Sequence
  Description of Artificial Sequence: Synthetic oligonucleotide
  Antisense strand to SEQ ID NO: 1283294
cauuaucuagacagaauga

SEQ ID NO: 1283296 - RNA, 19 nt, Artificial Sequence
  Description of Artificial Sequence: Synthetic oligonucleotide
  Sense strand starting at position 375 of SEQ ID NO: 1241579
ucaccaaaucugggaagca

SEQ ID NO: 1283297 - RNA, 19 nt, Artificial Sequence
  Description of Artificial Sequence: Synthetic oligonucleotide
  Antisense strand to SEQ ID NO: 1283296
ugcuucccagauuugguga

SEQ ID NO: 1283298 - RNA, 19 nt, Artificial Sequence
  Description of Artificial Sequence: Synthetic oligonucleotide
  Sense strand starting at position 390 of SEQ ID NO: 1241579
agcauuaacgauuaugcuu

SEQ ID NO: 1283299 - RNA, 19 nt, Artificial Sequence
  Description of Artificial Sequence: Synthetic oligonucleotide
  Antisense strand to SEQ ID NO: 1283298
aagcauaaucguuaaugcu

SEQ ID NO: 1283300 - RNA, 19 nt, Artificial Sequence
  Description of Artificial Sequence: Synthetic oligonucleotide
  Sense strand starting at position 449 of SEQ ID NO: 1241579
aaggucucagagugacuuu

SEQ ID NO: 1283301 - RNA, 19 nt, Artificial Sequence
  Description of Artificial Sequence: Synthetic oligonucleotide
  Antisense strand to SEQ ID NO: 1283300
aaagucacucugagaccuu

SEQ ID NO: 1283302 - RNA, 19 nt, Artificial Sequence
  Description of Artificial Sequence: Synthetic oligonucleotide
  Sense strand starting at position 575 of SEQ ID NO: 1241579
aggauacaguuaucucuuu

SEQ ID NO: 1283303 - RNA, 19 nt, Artificial Sequence
  Description of Artificial Sequence: Synthetic oligonucleotide
  Antisense strand to SEQ ID NO: 1283302
aaagagauaacuguauccu

SEQ ID NO: 1283304 - RNA, 19 nt, Artificial Sequence
  Description of Artificial Sequence: Synthetic oligonucleotide
  Sense strand starting at position 661 of SEQ ID NO: 1241579
uguuucuugcuacauuaua

SEQ ID NO: 1283305 - RNA, 19 nt, Artificial Sequence
  Description of Artificial Sequence: Synthetic oligonucleotide
  Antisense strand to SEQ ID NO: 1283304
uauaauguagcaagaaaca

SEQ ID NO: 1283306 - RNA, 19 nt, Artificial Sequence
  Description of Artificial Sequence: Synthetic oligonucleotide
  Sense strand starting at position 806 of SEQ ID NO: 1241579
auuauauuacugugcaaga

SEQ ID NO: 1283307 - RNA, 19 nt, Artificial Sequence
  Description of Artificial Sequence: Synthetic oligonucleotide
  Antisense strand to SEQ ID NO: 1283306
ucuugcacaguaauauaau

SEQ ID NO: 1283308 - RNA, 19 nt, Artificial Sequence
  Description of Artificial Sequence: Synthetic oligonucleotide
  Sense strand starting at position 807 of SEQ ID NO: 1241579
uuauauuacugugcaagac

SEQ ID NO: 1283309 - RNA, 19 nt, Artificial Sequence
  Description of Artificial Sequence: Synthetic oligonucleotide
  Antisense strand to SEQ ID NO: 1283308
gucuugcacaguaauauaa

SEQ ID NO: 1283310 - RNA, 19 nt, Artificial Sequence
  Description of Artificial Sequence: Synthetic oligonucleotide
  Sense strand starting at position 894 of SEQ ID NO: 1241579
cuaaauucucuaugguaag

SEQ ID NO: 1283311 - RNA, 19 nt, Artificial Sequence
  Description of Artificial Sequence: Synthetic oligonucleotide
  Antisense strand to SEQ ID NO: 1283310
cuuaccauagagaauuuag

SEQ ID NO: 1283312 - RNA, 19 nt, Artificial Sequence
  Description of Artificial Sequence: Synthetic oligonucleotide
  Sense strand starting at position 913 of SEQ ID NO: 1241579
agaucaagggucuggcuua

SEQ ID NO: 1283313 - RNA, 19 nt, Artificial Sequence
  Description of Artificial Sequence: Synthetic oligonucleotide
  Antisense strand to SEQ ID NO: 1283312
uaagccagacccuugaucu

SEQ ID NO: 1283314 - RNA, 19 nt, Artificial Sequence
  Description of Artificial Sequence: Synthetic oligonucleotide
  Sense strand starting at position 918 of SEQ ID NO: 1241579
aagggucuggcuuauaauc

SEQ ID NO: 1283315 - RNA, 19 nt, Artificial Sequence
  Description of Artificial Sequence: Synthetic oligonucleotide
  Antisense strand to SEQ ID NO: 1283314
gauuauaagccagacccuu

SEQ ID NO: 1283316 - RNA, 19 nt, Artificial Sequence
  Description of Artificial Sequence: Synthetic oligonucleotide
  Sense strand starting at position 962 of SEQ ID NO: 1241579
agcgcaauacauuacuauu

SEQ ID NO: 1283317 - RNA, 19 nt, Artificial Sequence
  Description of Artificial Sequence: Synthetic oligonucleotide
  Antisense strand to SEQ ID NO: 1283316
aauaguaauguauugcgcu

SEQ ID NO: 1283318 - RNA, 19 nt, Artificial Sequence
  Description of Artificial Sequence: Synthetic oligonucleotide
  Sense strand starting at position 968 of SEQ ID NO: 1241579
auacauuacuauuccgagu

SEQ ID NO: 1283319 - RNA, 19 nt, Artificial Sequence
  Description of Artificial Sequence: Synthetic oligonucleotide
  Antisense strand to SEQ ID NO: 1283318
acucggaauaguaauguau

SEQ ID NO: 1283320 - RNA, 19 nt, Artificial Sequence
  Description of Artificial Sequence: Synthetic oligonucleotide
  Sense strand starting at position 974 of SEQ ID NO: 1241579
uacuauuccgaguaacuga

SEQ ID NO: 1283321 - RNA, 19 nt, Artificial Sequence
  Description of Artificial Sequence: Synthetic oligonucleotide
  Antisense strand to SEQ ID NO: 1283320
ucaguuacucggaauagua

SEQ ID NO: 1283322 - RNA, 19 nt, Artificial Sequence
  Description of Artificial Sequence: Synthetic oligonucleotide
  Sense strand starting at position 979 of SEQ ID NO: 1241579
uuccgaguaacugauaguu

SEQ ID NO: 1283323 - RNA, 19 nt, Artificial Sequence
  Description of Artificial Sequence: Synthetic oligonucleotide
  Antisense strand to SEQ ID NO: 1283322
aacuaucaguuacucggaa

SEQ ID NO: 1283324 - RNA, 19 nt, Artificial Sequence
  Description of Artificial Sequence: Synthetic oligonucleotide
  Sense strand starting at position 995 of SEQ ID NO: 1241579
guuucuuuccacuacaggu

SEQ ID NO: 1283325 - RNA, 19 nt, Artificial Sequence
  Description of Artificial Sequence: Synthetic oligonucleotide
  Antisense strand to SEQ ID NO: 1283324
accuguaguggaaagaaac

SEQ ID NO: 1283326 - RNA, 19 nt, Artificial Sequence
  Description of Artificial Sequence: Synthetic oligonucleotide
  Sense strand starting at position 1120 of SEQ ID NO: 1241579
agagcagcucuagaauuga

SEQ ID NO: 1283327 - RNA, 19 nt, Artificial Sequence
  Description of Artificial Sequence: Synthetic oligonucleotide
  Antisense strand to SEQ ID NO: 1283326
ucaauucuagagcugcucu

SEQ ID NO: 1283328 - RNA, 19 nt, Artificial Sequence
  Description of Artificial Sequence: Synthetic oligonucleotide
  Sense strand starting at position 1131 of SEQ ID NO: 1241579
agaauugagucacucauuc

SEQ ID NO: 1283329 - RNA, 19 nt, Artificial Sequence
  Description of Artificial Sequence: Synthetic oligonucleotide
  Antisense strand to SEQ ID NO: 1283328
gaaugagugacucaauucu

SEQ ID NO: 1283330 - RNA, 19 nt, Artificial Sequence
  Description of Artificial Sequence: Synthetic oligonucleotide
  Sense strand starting at position 1135 of SEQ ID NO: 1241579
uugagucacucauucuauc

SEQ ID NO: 1283331 - RNA, 19 nt, Artificial Sequence
  Description of Artificial Sequence: Synthetic oligonucleotide
  Antisense strand to SEQ ID NO: 1283330
gauagaaugagugacucaa

SEQ ID NO: 1283332 - RNA, 19 nt, Artificial Sequence
  Description of Artificial Sequence: Synthetic oligonucleotide
  Sense strand starting at position 1158 of SEQ ID NO: 1241579
ucccaaagaugucuugaac

SEQ ID NO: 1283333 - RNA, 19 nt, Artificial Sequence
  Description of Artificial Sequence: Synthetic oligonucleotide
  Antisense strand to SEQ ID NO: 1283332
guucaagacaucuuuggga

SEQ ID NO: 1283334 - RNA, 19 nt, Artificial Sequence
  Description of Artificial Sequence: Synthetic oligonucleotide
  Sense strand starting at position 1169 of SEQ ID NO: 1241579
ucuugaacucuguagauau

SEQ ID NO: 1283335 - RNA, 19 nt, Artificial Sequence
  Description of Artificial Sequence: Synthetic oligonucleotide
  Antisense strand to SEQ ID NO: 1283334
auaucuacagaguucaaga

SEQ ID NO: 1283336 - RNA, 19 nt, Artificial Sequence
  Description of Artificial Sequence: Synthetic oligonucleotide
  Sense strand starting at position 1714 of SEQ ID NO: 1241579
guaccaugacagggcaauu

SEQ ID NO: 1283337 - RNA, 19 nt, Artificial Sequence
  Description of Artificial Sequence: Synthetic oligonucleotide
  Antisense strand to SEQ ID NO: 1283336
aauugcccugucaugguac

SEQ ID NO: 1283338 - RNA, 19 nt, Artificial Sequence
  Description of Artificial Sequence: Synthetic oligonucleotide
  Sense strand starting at position 2082 of SEQ ID NO: 1241579
caggccucuugaguggaua

SEQ ID NO: 1283339 - RNA, 19 nt, Artificial Sequence
  Description of Artificial Sequence: Synthetic oligonucleotide
  Antisense strand to SEQ ID NO: 1283338
uauccacucaagaggccug

SEQ ID NO: 1283340 - RNA, 19 nt, Artificial Sequence
  Description of Artificial Sequence: Synthetic oligonucleotide
  Sense strand starting at position 2084 of SEQ ID NO: 1241579
ggccucuugaguggauaga

SEQ ID NO: 1283341 - RNA, 19 nt, Artificial Sequence
  Description of Artificial Sequence: Synthetic oligonucleotide
  Antisense strand to SEQ ID NO: 1283340
ucuauccacucaagaggcc

SEQ ID NO: 1283342 - RNA, 19 nt, Artificial Sequence
  Description of Artificial Sequence: Synthetic oligonucleotide
  Sense strand starting at position 2093 of SEQ ID NO: 1241579
aguggauagacgugaaacu

SEQ ID NO: 1283343 - RNA, 19 nt, Artificial Sequence
  Description of Artificial Sequence: Synthetic oligonucleotide
  Antisense strand to SEQ ID NO: 1283342
aguuucacgucuauccacu

SEQ ID NO: 1283344 - RNA, 19 nt, Artificial Sequence
  Description of Artificial Sequence: Synthetic oligonucleotide
  Sense strand starting at position 2094 of SEQ ID NO: 1241579
guggauagacgugaaacuu

SEQ ID NO: 1283345 - RNA, 19 nt, Artificial Sequence
  Description of Artificial Sequence: Synthetic oligonucleotide
  Antisense strand to SEQ ID NO: 1283344
aaguuucacgucuauccac

SEQ ID NO: 1283346 - RNA, 19 nt, Artificial Sequence
  Description of Artificial Sequence: Synthetic oligonucleotide
  Sense strand starting at position 2189 of SEQ ID NO: 1241579
agaauagcgauuugccuau

SEQ ID NO: 1283347 - RNA, 19 nt, Artificial Sequence
  Description of Artificial Sequence: Synthetic oligonucleotide
  Antisense strand to SEQ ID NO: 1283346
auaggcaaaucgcuauucu

SEQ ID NO: 1283348 - RNA, 19 nt, Artificial Sequence
  Description of Artificial Sequence: Synthetic oligonucleotide
  Sense strand starting at position 2193 of SEQ ID NO: 1241579
uagcgauuugccuaucagu

SEQ ID NO: 1283349 - RNA, 19 nt, Artificial Sequence
  Description of Artificial Sequence: Synthetic oligonucleotide
  Antisense strand to SEQ ID NO: 1283348
acugauaggcaaaucgcua

SEQ ID NO: 1283350 - RNA, 19 nt, Artificial Sequence
  Description of Artificial Sequence: Synthetic oligonucleotide
  Sense strand starting at position 2204 of SEQ ID NO: 1241579
cuaucagugugaccuaaau

SEQ ID NO: 1283351 - RNA, 19 nt, Artificial Sequence
  Description of Artificial Sequence: Synthetic oligonucleotide
  Antisense strand to SEQ ID NO: 1283350
auuuaggucacacugauag

SEQ ID NO: 1283352 - RNA, 19 nt, Artificial Sequence
  Description of Artificial Sequence: Synthetic oligonucleotide
  Sense strand starting at position 2215 of SEQ ID NO: 1241579
accuaaauagaacguguaa

SEQ ID NO: 1283353 - RNA, 19 nt, Artificial Sequence
  Description of Artificial Sequence: Synthetic oligonucleotide
  Antisense strand to SEQ ID NO: 1283352
uuacacguucuauuuaggu

SEQ ID NO: 1283354 - RNA, 19 nt, Artificial Sequence
  Description of Artificial Sequence: Synthetic oligonucleotide
  Sense strand starting at position 2222 of SEQ ID NO: 1241579
uagaacguguaauuaacaa

SEQ ID NO: 1283355 - RNA, 19 nt, Artificial Sequence
  Description of Artificial Sequence: Synthetic oligonucleotide
  Antisense strand to SEQ ID NO: 1283354
uuguuaauuacacguucua

SEQ ID NO: 1283356 - RNA, 19 nt, Artificial Sequence
  Description of Artificial Sequence: Synthetic oligonucleotide
  Sense strand starting at position 2347 of SEQ ID NO: 1241579
gcagcugcagccguuaaau

SEQ ID NO: 1283357 - RNA, 19 nt, Artificial Sequence
  Description of Artificial Sequence: Synthetic oligonucleotide
  Antisense strand to SEQ ID NO: 1283356
auuuaacggcugcagcugc

SEQ ID NO: 1283358 - RNA, 19 nt, Artificial Sequence
  Description of Artificial Sequence: Synthetic oligonucleotide
  Sense strand starting at position 2349 of SEQ ID NO: 1241579
agcugcagccguuaaauuu

SEQ ID NO: 1283359 - RNA, 19 nt, Artificial Sequence
  Description of Artificial Sequence: Synthetic oligonucleotide
  Antisense strand to SEQ ID NO: 1283358
aaauuuaacggcugcagcu

SEQ ID NO: 1283360 - RNA, 19 nt, Artificial Sequence
  Description of Artificial Sequence: Synthetic oligonucleotide
  Sense strand starting at position 3333 of SEQ ID NO: 1241579
gagguugaaauacgaguaa

SEQ ID NO: 1283361 - RNA, 19 nt, Artificial Sequence
  Description of Artificial Sequence: Synthetic oligonucleotide
  Antisense strand to SEQ ID NO: 1283360
uuacucguauuucaaccuc

SEQ ID NO: 1283362 - RNA, 19 nt, Artificial Sequence
  Description of Artificial Sequence: Synthetic oligonucleotide
  Sense strand starting at position 3496 of SEQ ID NO: 1241579
ucgcaaauuugugccuauu

SEQ ID NO: 1283363 - RNA, 19 nt, Artificial Sequence
  Description of Artificial Sequence: Synthetic oligonucleotide
  Antisense strand to SEQ ID NO: 1283362
aauaggcacaaauuugcga

SEQ ID NO: 1283364 - RNA, 19 nt, Artificial Sequence
  Description of Artificial Sequence: Synthetic oligonucleotide
  Sense strand starting at position 3594 of SEQ ID NO: 1241579
agauaaagaugguuugugu

SEQ ID NO: 1283365 - RNA, 19 nt, Artificial Sequence
  Description of Artificial Sequence: Synthetic oligonucleotide
  Antisense strand to SEQ ID NO: 1283364
acacaaaccaucuuuaucu

SEQ ID NO: 1283366 - RNA, 19 nt, Artificial Sequence
  Description of Artificial Sequence: Synthetic oligonucleotide
  Sense strand starting at position 3597 of SEQ ID NO: 1241579
uaaagaugguuuguguaca

SEQ ID NO: 1283367 - RNA, 19 nt, Artificial Sequence
  Description of Artificial Sequence: Synthetic oligonucleotide
  Antisense strand to SEQ ID NO: 1283366
uguacacaaaccaucuuua

SEQ ID NO: 1283368 - RNA, 19 nt, Artificial Sequence
  Description of Artificial Sequence: Synthetic oligonucleotide
  Sense strand starting at position 3602 of SEQ ID NO: 1241579
augguuuguguacaaggaa

SEQ ID NO: 1283369 - RNA, 19 nt, Artificial Sequence
  Description of Artificial Sequence: Synthetic oligonucleotide
  Antisense strand to SEQ ID NO: 1283368
uuccuuguacacaaaccau

SEQ ID NO: 1283370 - RNA, 19 nt, Artificial Sequence
  Description of Artificial Sequence: Synthetic oligonucleotide
  Sense strand starting at position 3674 of SEQ ID NO: 1241579
agggauucuuacuccuuua

SEQ ID NO: 1283371 - RNA, 19 nt, Artificial Sequence
  Description of Artificial Sequence: Synthetic oligonucleotide
  Antisense strand to SEQ ID NO: 1283370
uaaaggaguaagaaucccu

SEQ ID NO: 1283372 - RNA, 19 nt, Artificial Sequence
  Description of Artificial Sequence: Synthetic oligonucleotide
  Sense strand starting at position 3893 of SEQ ID NO: 1241579
ucccaaguggacugauaaa

SEQ ID NO: 1283373 - RNA, 19 nt, Artificial Sequence
  Description of Artificial Sequence: Synthetic oligonucleotide
  Antisense strand to SEQ ID NO: 1283372
uuuaucaguccacuuggga

SEQ ID NO: 1283374 - RNA, 19 nt, Artificial Sequence
  Description of Artificial Sequence: Synthetic oligonucleotide
  Sense strand starting at position 778 of SEQ ID NO: 1241580
gaaacuucccuuggugugu

SEQ ID NO: 1283375 - RNA, 19 nt, Artificial Sequence
  Description of Artificial Sequence: Synthetic oligonucleotide
  Antisense strand to SEQ ID NO: 1283374
acacaccaagggaaguuuc

SEQ ID NO: 1283376 - RNA, 19 nt, Artificial Sequence
  Description of Artificial Sequence: Synthetic oligonucleotide
  Sense strand starting at position 789 of SEQ ID NO: 1241580
ugguguguugaugaacaaa

SEQ ID NO: 1283377 - RNA, 19 nt, Artificial Sequence
  Description of Artificial Sequence: Synthetic oligonucleotide
  Antisense strand to SEQ ID NO: 1283376
uuuguucaucaacacacca

SEQ ID NO: 1283378 - RNA, 19 nt, Artificial Sequence
  Description of Artificial Sequence: Synthetic oligonucleotide
  Sense strand starting at position 838 of SEQ ID NO: 1241580
agcucuuuaucuguguaaa

SEQ ID NO: 1283379 - RNA, 19 nt, Artificial Sequence
  Description of Artificial Sequence: Synthetic oligonucleotide
  Antisense strand to SEQ ID NO: 1283378
uuuacacagauaaagagcu

SEQ ID NO: 1283380 - RNA, 19 nt, Artificial Sequence
  Description of Artificial Sequence: Synthetic oligonucleotide
  Sense strand starting at position 841 of SEQ ID NO: 1241580
ucuuuaucuguguaaagca

SEQ ID NO: 1283381 - RNA, 19 nt, Artificial Sequence
  Description of Artificial Sequence: Synthetic oligonucleotide
  Antisense strand to SEQ ID NO: 1283380
ugcuuuacacagauaaaga

SEQ ID NO: 1283382 - RNA, 19 nt, Artificial Sequence
  Description of Artificial Sequence: Synthetic oligonucleotide
  Sense strand starting at position 860 of SEQ ID NO: 1241580
gcaauuguuccuuagacgu

SEQ ID NO: 1283383 - RNA, 19 nt, Artificial Sequence
  Description of Artificial Sequence: Synthetic oligonucleotide
  Antisense strand to SEQ ID NO: 1283382
acgucuaaggaacaauugc

SEQ ID NO: 1283384 - RNA, 19 nt, Artificial Sequence
  Description of Artificial Sequence: Synthetic oligonucleotide
  Sense strand starting at position 912 of SEQ ID NO: 1241580
uucuuuaggaguuggagau

SEQ ID NO: 1283385 - RNA, 19 nt, Artificial Sequence
  Description of Artificial Sequence: Synthetic oligonucleotide
  Antisense strand to SEQ ID NO: 1283384
aucuccaacuccuaaagaa

SEQ ID NO: 1283386 - RNA, 19 nt, Artificial Sequence
  Description of Artificial Sequence: Synthetic oligonucleotide
  Sense strand starting at position 1050 of SEQ ID NO: 1241580
agcuucugugaacacagau

SEQ ID NO: 1283387 - RNA, 19 nt, Artificial Sequence
  Description of Artificial Sequence: Synthetic oligonucleotide
  Antisense strand to SEQ ID NO: 1283386
aucuguguucacagaagcu

SEQ ID NO: 1283388 - RNA, 19 nt, Artificial Sequence
  Description of Artificial Sequence: Synthetic oligonucleotide
  Sense strand starting at position 1097 of SEQ ID NO: 1241580
agcaguuugugaguauaca

SEQ ID NO: 1283389 - RNA, 19 nt, Artificial Sequence
  Description of Artificial Sequence: Synthetic oligonucleotide
  Antisense strand to SEQ ID NO: 1283388
uguauacucacaaacugcu

SEQ ID NO: 1283390 - RNA, 19 nt, Artificial Sequence
  Description of Artificial Sequence: Synthetic oligonucleotide
  Sense strand starting at position 1098 of SEQ ID NO: 1241580
gcaguuugugaguauacag

SEQ ID NO: 1283391 - RNA, 19 nt, Artificial Sequence
  Description of Artificial Sequence: Synthetic oligonucleotide
  Antisense strand to SEQ ID NO: 1283390
cuguauacucacaaacugc

SEQ ID NO: 1283392 - RNA, 19 nt, Artificial Sequence
  Description of Artificial Sequence: Synthetic oligonucleotide
  Sense strand starting at position 1108 of SEQ ID NO: 1241580
aguauacagcuaugcaaau

SEQ ID NO: 1283393 - RNA, 19 nt, Artificial Sequence
  Description of Artificial Sequence: Synthetic oligonucleotide
  Antisense strand to SEQ ID NO: 1283392
auuugcauagcuguauacu

SEQ ID NO: 1283394 - RNA, 19 nt, Artificial Sequence
  Description of Artificial Sequence: Synthetic oligonucleotide
  Sense strand starting at position 1109 of SEQ ID NO: 1241580
guauacagcuaugcaaaua

SEQ ID NO: 1283395 - RNA, 19 nt, Artificial Sequence
  Description of Artificial Sequence: Synthetic oligonucleotide
  Antisense strand to SEQ ID NO: 1283394
uauuugcauagcuguauac

SEQ ID NO: 1283396 - RNA, 19 nt, Artificial Sequence
  Description of Artificial Sequence: Synthetic oligonucleotide
  Sense strand starting at position 1142 of SEQ ID NO: 1241580
ccagcaaugcuguaguuua

SEQ ID NO: 1283397 - RNA, 19 nt, Artificial Sequence
  Description of Artificial Sequence: Synthetic oligonucleotide
  Antisense strand to SEQ ID NO: 1283396
uaaacuacagcauugcugg

SEQ ID NO: 1283398 - RNA, 19 nt, Artificial Sequence
  Description of Artificial Sequence: Synthetic oligonucleotide
  Sense strand starting at position 1511 of SEQ ID NO: 1241580
aagaauacaugaggaagaa

SEQ ID NO: 1283399 - RNA, 19 nt, Artificial Sequence
  Description of Artificial Sequence: Synthetic oligonucleotide
  Antisense strand to SEQ ID NO: 1283398
uucuuccucauguauucuu

SEQ ID NO: 1283400 - RNA, 19 nt, Artificial Sequence
  Description of Artificial Sequence: Synthetic oligonucleotide
  Sense strand starting at position 1586 of SEQ ID NO: 1241580
acgaaagaguuccuagaga

SEQ ID NO: 1283401 - RNA, 19 nt, Artificial Sequence
  Description of Artificial Sequence: Synthetic oligonucleotide
  Antisense strand to SEQ ID NO: 1283400
ucucuaggaacucuuucgu

SEQ ID NO: 1283402 - RNA, 19 nt, Artificial Sequence
  Description of Artificial Sequence: Synthetic oligonucleotide
  Sense strand starting at position 1634 of SEQ ID NO: 1241580
augaguauauaugcauaga

SEQ ID NO: 1283403 - RNA, 19 nt, Artificial Sequence
  Description of Artificial Sequence: Synthetic oligonucleotide
  Antisense strand to SEQ ID NO: 1283402
ucuaugcauauauacucau

SEQ ID NO: 1283404 - RNA, 19 nt, Artificial Sequence
  Description of Artificial Sequence: Synthetic oligonucleotide
  Sense strand starting at position 1680 of SEQ ID NO: 1241580
gcaauagacugcucagcca

SEQ ID NO: 1283405 - RNA, 19 nt, Artificial Sequence
  Description of Artificial Sequence: Synthetic oligonucleotide
  Antisense strand to SEQ ID NO: 1283404
uggcugagcagucuauugc

SEQ ID NO: 1283406 - RNA, 19 nt, Artificial Sequence
  Description of Artificial Sequence: Synthetic oligonucleotide
  Sense strand starting at position 1732 of SEQ ID NO: 1241580
auucuagagcaaggucauu

SEQ ID NO: 1283407 - RNA, 19 nt, Artificial Sequence
  Description of Artificial Sequence: Synthetic oligonucleotide
  Antisense strand to SEQ ID NO: 1283406
aaugaccuugcucuagaau

SEQ ID NO: 1283408 - RNA, 19 nt, Artificial Sequence
  Description of Artificial Sequence: Synthetic oligonucleotide
  Sense strand starting at position 1737 of SEQ ID NO: 1241580
agagcaaggucauuguaaa

SEQ ID NO: 1283409 - RNA, 19 nt, Artificial Sequence
  Description of Artificial Sequence: Synthetic oligonucleotide
  Antisense strand to SEQ ID NO: 1283408
uuuacaaugaccuugcucu

SEQ ID NO: 1283410 - RNA, 19 nt, Artificial Sequence
  Description of Artificial Sequence: Synthetic oligonucleotide
  Sense strand starting at position 1738 of SEQ ID NO: 1241580
gagcaaggucauuguaaag

SEQ ID NO: 1283411 - RNA, 19 nt, Artificial Sequence
  Description of Artificial Sequence: Synthetic oligonucleotide
  Antisense strand to SEQ ID NO: 1283410
cuuuacaaugaccuugcuc

SEQ ID NO: 1283412 - RNA, 19 nt, Artificial Sequence
  Description of Artificial Sequence: Synthetic oligonucleotide
  Sense strand starting at position 1833 of SEQ ID NO: 1241580
ggacuuaccucuccgaaga

SEQ ID NO: 1283413 - RNA, 19 nt, Artificial Sequence
  Description of Artificial Sequence: Synthetic oligonucleotide
  Antisense strand to SEQ ID NO: 1283412
ucuucggagagguaagucc

SEQ ID NO: 1283414 - RNA, 19 nt, Artificial Sequence
  Description of Artificial Sequence: Synthetic oligonucleotide
  Sense strand starting at position 1992 of SEQ ID NO: 1241580
cugacauucucuguucuga

SEQ ID NO: 1283415 - RNA, 19 nt, Artificial Sequence
  Description of Artificial Sequence: Synthetic oligonucleotide
  Antisense strand to SEQ ID NO: 1283414
ucagaacagagaaugucag

SEQ ID NO: 1283416 - RNA, 19 nt, Artificial Sequence
  Description of Artificial Sequence: Synthetic oligonucleotide
  Sense strand starting at position 1994 of SEQ ID NO: 1241580
gacauucucuguucugaug

SEQ ID NO: 1283417 - RNA, 19 nt, Artificial Sequence
  Description of Artificial Sequence: Synthetic oligonucleotide
  Antisense strand to SEQ ID NO: 1283416
caucagaacagagaauguc

SEQ ID NO: 1283418 - RNA, 19 nt, Artificial Sequence
  Description of Artificial Sequence: Synthetic oligonucleotide
  Sense strand starting at position 2371 of SEQ ID NO: 1241580
auauuuagaugugaacuga

SEQ ID NO: 1283419 - RNA, 19 nt, Artificial Sequence
  Description of Artificial Sequence: Synthetic oligonucleotide
  Antisense strand to SEQ ID NO: 1283418
ucaguucacaucuaaauau

SEQ ID NO: 1283420 - RNA, 19 nt, Artificial Sequence
  Description of Artificial Sequence: Synthetic oligonucleotide
  Sense strand starting at position 2387 of SEQ ID NO: 1241580
ugaacuugguaucuauaua

SEQ ID NO: 1283421 - RNA, 19 nt, Artificial Sequence
  Description of Artificial Sequence: Synthetic oligonucleotide
  Antisense strand to SEQ ID NO: 1283420
uauauagauaccaaguuca

SEQ ID NO: 1283422 - RNA, 19 nt, Artificial Sequence
  Description of Artificial Sequence: Synthetic oligonucleotide
  Sense strand starting at position 2570 of SEQ ID NO: 1241580
uuuaaugugcucgaaauua

SEQ ID NO: 1283423 - RNA, 19 nt, Artificial Sequence
  Description of Artificial Sequence: Synthetic oligonucleotide
  Antisense strand to SEQ ID NO: 1283422
uaauuucgagcacauuaaa

SEQ ID NO: 1283424 - RNA, 19 nt, Artificial Sequence
  Description of Artificial Sequence: Synthetic oligonucleotide
  Sense strand starting at position 2578 of SEQ ID NO: 1241580
gcucgaaauuaacucucua

SEQ ID NO: 1283425 - RNA, 19 nt, Artificial Sequence
  Description of Artificial Sequence: Synthetic oligonucleotide
  Antisense strand to SEQ ID NO: 1283424
uagagaguuaauuucgagc

SEQ ID NO: 1283426 - RNA, 19 nt, Artificial Sequence
  Description of Artificial Sequence: Synthetic oligonucleotide
  Sense strand starting at position 2742 of SEQ ID NO: 1241580
ugccaucagugacuagaua

SEQ ID NO: 1283427 - RNA, 19 nt, Artificial Sequence
  Description of Artificial Sequence: Synthetic oligonucleotide
  Antisense strand to SEQ ID NO: 1283426
uaucuagucacugauggca

SEQ ID NO: 1283428 - RNA, 19 nt, Artificial Sequence
  Description of Artificial Sequence: Synthetic oligonucleotide
  Sense strand starting at position 2743 of SEQ ID NO: 1241580
gccaucagugacuagauaa

SEQ ID NO: 1283429 - RNA, 19 nt, Artificial Sequence
  Description of Artificial Sequence: Synthetic oligonucleotide
  Antisense strand to SEQ ID NO: 1283428
uuaucuagucacugauggc

SEQ ID NO: 1283430 - RNA, 19 nt, Artificial Sequence
  Description of Artificial Sequence: Synthetic oligonucleotide
  Sense strand starting at position 2756 of SEQ ID NO: 1241580
agauaauugucuuccuguu

SEQ ID NO: 1283431 - RNA, 19 nt, Artificial Sequence
  Description of Artificial Sequence: Synthetic oligonucleotide
  Antisense strand to SEQ ID NO: 1283430
aacaggaagacaauuaucu

SEQ ID NO: 1283432 - RNA, 19 nt, Artificial Sequence
  Description of Artificial Sequence: Synthetic oligonucleotide
  Sense strand starting at position 2758 of SEQ ID NO: 1241580
auaauugucuuccuguuua

SEQ ID NO: 1283433 - RNA, 19 nt, Artificial Sequence
  Description of Artificial Sequence: Synthetic oligonucleotide
  Antisense strand to SEQ ID NO: 1283432
uaaacaggaagacaauuau

SEQ ID NO: 1283434 - RNA, 19 nt, Artificial Sequence
  Description of Artificial Sequence: Synthetic oligonucleotide
  Sense strand starting at position 2794 of SEQ ID NO: 1241580
aagcaaguuguguauguag

SEQ ID NO: 1283435 - RNA, 19 nt, Artificial Sequence
  Description of Artificial Sequence: Synthetic oligonucleotide
  Antisense strand to SEQ ID NO: 1283434
cuacauacacaacuugcuu

SEQ ID NO: 1283436 - RNA, 19 nt, Artificial Sequence
  Description of Artificial Sequence: Synthetic oligonucleotide
  Sense strand starting at position 2820 of SEQ ID NO: 1241580
ucuggaagcacucgucaga

SEQ ID NO: 1283437 - RNA, 19 nt, Artificial Sequence
  Description of Artificial Sequence: Synthetic oligonucleotide
  Antisense strand to SEQ ID NO: 1283436
ucugacgagugcuuccaga

SEQ ID NO: 1283438 - RNA, 19 nt, Artificial Sequence
  Description of Artificial Sequence: Synthetic oligonucleotide
  Sense strand starting at position 2823 of SEQ ID NO: 1241580
ggaagcacucgucagauca

SEQ ID NO: 1283439 - RNA, 19 nt, Artificial Sequence
  Description of Artificial Sequence: Synthetic oligonucleotide
  Antisense strand to SEQ ID NO: 1283438
ugaucugacgagugcuucc

SEQ ID NO: 1283440 - RNA, 19 nt, Artificial Sequence
  Description of Artificial Sequence: Synthetic oligonucleotide
  Sense strand starting at position 2975 of SEQ ID NO: 1241580
uguguuccugucucuugua

SEQ ID NO: 1283441 - RNA, 19 nt, Artificial Sequence
  Description of Artificial Sequence: Synthetic oligonucleotide
  Antisense strand to SEQ ID NO: 1283440
uacaagagacaggaacaca

SEQ ID NO: 1283442 - RNA, 19 nt, Artificial Sequence
  Description of Artificial Sequence: Synthetic oligonucleotide
  Sense strand starting at position 3003 of SEQ ID NO: 1241580
uguuaauuucuauggcuuc

SEQ ID NO: 1283443 - RNA, 19 nt, Artificial Sequence
  Description of Artificial Sequence: Synthetic oligonucleotide
  Antisense strand to SEQ ID NO: 1283442
gaagccauagaaauuaaca

SEQ ID NO: 1283444 - RNA, 19 nt, Artificial Sequence
  Description of Artificial Sequence: Synthetic oligonucleotide
  Sense strand starting at position 3041 of SEQ ID NO: 1241580
uggaacuuccuuuguuuau

SEQ ID NO: 1283445 - RNA, 19 nt, Artificial Sequence
  Description of Artificial Sequence: Synthetic oligonucleotide
  Antisense strand to SEQ ID NO: 1283444
auaaacaaaggaaguucca

SEQ ID NO: 1283446 - RNA, 19 nt, Artificial Sequence
  Description of Artificial Sequence: Synthetic oligonucleotide
  Sense strand starting at position 3042 of SEQ ID NO: 1241580
ggaacuuccuuuguuuauu

SEQ ID NO: 1283447 - RNA, 19 nt, Artificial Sequence
  Description of Artificial Sequence: Synthetic oligonucleotide
  Antisense strand to SEQ ID NO: 1283446
aauaaacaaaggaaguucc

SEQ ID NO: 1283448 - RNA, 19 nt, Artificial Sequence
  Description of Artificial Sequence: Synthetic oligonucleotide
  Sense strand starting at position 3580 of SEQ ID NO: 1241580
uuaagugcauacuugagaa

SEQ ID NO: 1283449 - RNA, 19 nt, Artificial Sequence
  Description of Artificial Sequence: Synthetic oligonucleotide
  Antisense strand to SEQ ID NO: 1283448
uucucaaguaugcacuuaa

SEQ ID NO: 1283450 - RNA, 19 nt, Artificial Sequence
  Description of Artificial Sequence: Synthetic oligonucleotide
  Sense strand starting at position 3672 of SEQ ID NO: 1241580
ucagccuucuuccuugaga

SEQ ID NO: 1283451 - RNA, 19 nt, Artificial Sequence
  Description of Artificial Sequence: Synthetic oligonucleotide
  Antisense strand to SEQ ID NO: 1283450
ucucaaggaagaaggcuga

SEQ ID NO: 1283452 - RNA, 19 nt, Artificial Sequence
  Description of Artificial Sequence: Synthetic oligonucleotide
  Sense strand starting at position 3674 of SEQ ID NO: 1241580
agccuucuuccuugagauu

SEQ ID NO: 1283453 - RNA, 19 nt, Artificial Sequence
  Description of Artificial Sequence: Synthetic oligonucleotide
  Antisense strand to SEQ ID NO: 1283452
aaucucaaggaagaaggcu

SEQ ID NO: 1283454 - RNA, 19 nt, Artificial Sequence
  Description of Artificial Sequence: Synthetic oligonucleotide
  Sense strand starting at position 3 of SEQ ID NO: 1241581
gacaguucccacuggcaca

SEQ ID NO: 1283455 - RNA, 19 nt, Artificial Sequence
  Description of Artificial Sequence: Synthetic oligonucleotide
  Antisense strand to SEQ ID NO: 1283454
ugugccagugggaacuguc

SEQ ID NO: 1283456 - RNA, 19 nt, Artificial Sequence
  Description of Artificial Sequence: Synthetic oligonucleotide
  Sense strand starting at position 2059 of SEQ ID NO: 1241581
gugugagcugacgcuucau

SEQ ID NO: 1283457 - RNA, 19 nt, Artificial Sequence
  Description of Artificial Sequence: Synthetic oligonucleotide
  Antisense strand to SEQ ID NO: 1283456
augaagcgucagcucacac

SEQ ID NO: 1283458 - RNA, 19 nt, Artificial Sequence
  Description of Artificial Sequence: Synthetic oligonucleotide
  Sense strand starting at position 2231 of SEQ ID NO: 1241581
ccaugacgcaucugagagu

SEQ ID NO: 1283459 - RNA, 19 nt, Artificial Sequence
  Description of Artificial Sequence: Synthetic oligonucleotide
  Antisense strand to SEQ ID NO: 1283458
acucucagaugcgucaugg

SEQ ID NO: 1283460 - RNA, 19 nt, Artificial Sequence
  Description of Artificial Sequence: Synthetic oligonucleotide
  Sense strand starting at position 2254 of SEQ ID NO: 1241581
caaagagucuccugucugu

SEQ ID NO: 1283461 - RNA, 19 nt, Artificial Sequence
  Description of Artificial Sequence: Synthetic oligonucleotide
  Antisense strand to SEQ ID NO: 1283460
acagacaggagacucuuug

SEQ ID NO: 1283462 - RNA, 19 nt, Artificial Sequence
  Description of Artificial Sequence: Synthetic oligonucleotide
  Sense strand starting at position 2458 of SEQ ID NO: 1241581
guggacugauguggucaga

SEQ ID NO: 1283463 - RNA, 19 nt, Artificial Sequence
  Description of Artificial Sequence: Synthetic oligonucleotide
  Antisense strand to SEQ ID NO: 1283462
ucugaccacaucaguccac

SEQ ID NO: 1283464 - RNA, 19 nt, Artificial Sequence
  Description of Artificial Sequence: Synthetic oligonucleotide
  Sense strand starting at position 2471 of SEQ ID NO: 1241581
gucagaauacagcgcugua

SEQ ID NO: 1283465 - RNA, 19 nt, Artificial Sequence
  Description of Artificial Sequence: Synthetic oligonucleotide
  Antisense strand to SEQ ID NO: 1283464
uacagcgcuguauucugac

SEQ ID NO: 1283466 - RNA, 19 nt, Artificial Sequence
  Description of Artificial Sequence: Synthetic oligonucleotide
  Sense strand starting at position 3368 of SEQ ID NO: 1241581
ggugguggaugucugcaau

SEQ ID NO: 1283467 - RNA, 19 nt, Artificial Sequence
  Description of Artificial Sequence: Synthetic oligonucleotide
  Antisense strand to SEQ ID NO: 1283466
auugcagacauccaccacc

SEQ ID NO: 1283468 - RNA, 19 nt, Artificial Sequence
  Description of Artificial Sequence: Synthetic oligonucleotide
  Sense strand starting at position 3371 of SEQ ID NO: 1241581
gguggaugucugcaauccu

SEQ ID NO: 1283469 - RNA, 19 nt, Artificial Sequence
  Description of Artificial Sequence: Synthetic oligonucleotide
  Antisense strand to SEQ ID NO: 1283468
aggauugcagacauccacc

SEQ ID NO: 1283470 - RNA, 19 nt, Artificial Sequence
  Description of Artificial Sequence: Synthetic oligonucleotide
  Sense strand starting at position 3558 of SEQ ID NO: 1241581
gcaagagaacuuuguaaca

SEQ ID NO: 1283471 - RNA, 19 nt, Artificial Sequence
  Description of Artificial Sequence: Synthetic oligonucleotide
  Antisense strand to SEQ ID NO: 1283470
uguuacaaaguucucuugc

SEQ ID NO: 1283472 - RNA, 19 nt, Artificial Sequence
  Description of Artificial Sequence: Synthetic oligonucleotide
  Sense strand starting at position 3612 of SEQ ID NO: 1241581
aaggcagauugcugaggaa

SEQ ID NO: 1283473 - RNA, 19 nt, Artificial Sequence
  Description of Artificial Sequence: Synthetic oligonucleotide
  Antisense strand to SEQ ID NO: 1283472
uuccucagcaaucugccuu

SEQ ID NO: 1283474 - RNA, 19 nt, Artificial Sequence
  Description of Artificial Sequence: Synthetic oligonucleotide
  Sense strand starting at position 3615 of SEQ ID NO: 1241581
gcagauugcugaggaauga

SEQ ID NO: 1283475 - RNA, 19 nt, Artificial Sequence
  Description of Artificial Sequence: Synthetic oligonucleotide
  Antisense strand to SEQ ID NO: 1283474
ucauuccucagcaaucugc

SEQ ID NO: 1283476 - RNA, 19 nt, Artificial Sequence
  Description of Artificial Sequence: Synthetic oligonucleotide
  Sense strand starting at position 3660 of SEQ ID NO: 1241581
ucucccuugcuuuagagau

SEQ ID NO: 1283477 - RNA, 19 nt, Artificial Sequence
  Description of Artificial Sequence: Synthetic oligonucleotide
  Antisense strand to SEQ ID NO: 1283476
aucucuaaagcaagggaga

SEQ ID NO: 1283478 - RNA, 19 nt, Artificial Sequence
  Description of Artificial Sequence: Synthetic oligonucleotide
  Sense strand starting at position 3662 of SEQ ID NO: 1241581
ucccuugcuuuagagauaa

SEQ ID NO: 1283479 - RNA, 19 nt, Artificial Sequence
  Description of Artificial Sequence: Synthetic oligonucleotide
  Antisense strand to SEQ ID NO: 1283478
uuaucucuaaagcaaggga

SEQ ID NO: 1283480 - RNA, 19 nt, Artificial Sequence
  Description of Artificial Sequence: Synthetic oligonucleotide
  Sense strand starting at position 3683 of SEQ ID NO: 1241581
auguccuucuaucuguaua

SEQ ID NO: 1283481 - RNA, 19 nt, Artificial Sequence
  Description of Artificial Sequence: Synthetic oligonucleotide
  Antisense strand to SEQ ID NO: 1283480
uauacagauagaaggacau

SEQ ID NO: 1283482 - RNA, 19 nt, Artificial Sequence
  Description of Artificial Sequence: Synthetic oligonucleotide
  Sense strand starting at position 3685 of SEQ ID NO: 1241581
guccuucuaucuguauaca

SEQ ID NO: 1283483 - RNA, 19 nt, Artificial Sequence
  Description of Artificial Sequence: Synthetic oligonucleotide
  Antisense strand to SEQ ID NO: 1283482
uguauacagauagaaggac

SEQ ID NO: 1283484 - RNA, 19 nt, Artificial Sequence
  Description of Artificial Sequence: Synthetic oligonucleotide
  Sense strand starting at position 3706 of SEQ ID NO: 1241581
gaaggcauuccugacaguu

SEQ ID NO: 1283485 - RNA, 19 nt, Artificial Sequence
  Description of Artificial Sequence: Synthetic oligonucleotide
  Antisense strand to SEQ ID NO: 1283484
aacugucaggaaugccuuc

SEQ ID NO: 1283486 - RNA, 19 nt, Artificial Sequence
  Description of Artificial Sequence: Synthetic oligonucleotide
  Sense strand starting at position 3708 of SEQ ID NO: 1241581
aggcauuccugacaguucu

SEQ ID NO: 1283487 - RNA, 19 nt, Artificial Sequence
  Description of Artificial Sequence: Synthetic oligonucleotide
  Antisense strand to SEQ ID NO: 1283486
agaacugucaggaaugccu

SEQ ID NO: 1283488 - RNA, 19 nt, Artificial Sequence
  Description of Artificial Sequence: Synthetic oligonucleotide
  Sense strand starting at position 3716 of SEQ ID NO: 1241581
cugacaguucucuggcagu

SEQ ID NO: 1283489 - RNA, 19 nt, Artificial Sequence
  Description of Artificial Sequence: Synthetic oligonucleotide
  Antisense strand to SEQ ID NO: 1283488
acugccagagaacugucag

SEQ ID NO: 1283490 - RNA, 19 nt, Artificial Sequence
  Description of Artificial Sequence: Synthetic oligonucleotide
  Sense strand starting at position 3730 of SEQ ID NO: 1241581
gcaguaugccuuugacuug

SEQ ID NO: 1283491 - RNA, 19 nt, Artificial Sequence
  Description of Artificial Sequence: Synthetic oligonucleotide
  Antisense strand to SEQ ID NO: 1283490
caagucaaaggcauacugc

SEQ ID NO: 1283492 - RNA, 19 nt, Artificial Sequence
  Description of Artificial Sequence: Synthetic oligonucleotide
  Sense strand starting at position 3737 of SEQ ID NO: 1241581
gccuuugacuuguguugaa

SEQ ID NO: 1283493 - RNA, 19 nt, Artificial Sequence
  Description of Artificial Sequence: Synthetic oligonucleotide
  Antisense strand to SEQ ID NO: 1283492
uucaacacaagucaaaggc

SEQ ID NO: 1283494 - RNA, 19 nt, Artificial Sequence
  Description of Artificial Sequence: Synthetic oligonucleotide
  Sense strand starting at position 3817 of SEQ ID NO: 1241581
gcaacagaguggcuuguaa

SEQ ID NO: 1283495 - RNA, 19 nt, Artificial Sequence
  Description of Artificial Sequence: Synthetic oligonucleotide
  Antisense strand to SEQ ID NO: 1283494
uuacaagccacucuguugc

SEQ ID NO: 1283496 - RNA, 19 nt, Artificial Sequence
  Description of Artificial Sequence: Synthetic oligonucleotide
  Sense strand starting at position 3819 of SEQ ID NO: 1241581
aacagaguggcuuguaauu

SEQ ID NO: 1283497 - RNA, 19 nt, Artificial Sequence
  Description of Artificial Sequence: Synthetic oligonucleotide
  Antisense strand to SEQ ID NO: 1283496
aauuacaagccacucuguu

SEQ ID NO: 1283498 - RNA, 19 nt, Artificial Sequence
  Description of Artificial Sequence: Synthetic oligonucleotide
  Sense strand starting at position 3830 of SEQ ID NO: 1241581
uuguaauuccagggcagga

SEQ ID NO: 1283499 - RNA, 19 nt, Artificial Sequence
  Description of Artificial Sequence: Synthetic oligonucleotide
  Antisense strand to SEQ ID NO: 1283498
uccugcccuggaauuacaa

SEQ ID NO: 1283500 - RNA, 19 nt, Artificial Sequence
  Description of Artificial Sequence: Synthetic oligonucleotide
  Sense strand starting at position 3866 of SEQ ID NO: 1241581
cuccauaauguugagucua

SEQ ID NO: 1283501 - RNA, 19 nt, Artificial Sequence
  Description of Artificial Sequence: Synthetic oligonucleotide
  Antisense strand to SEQ ID NO: 1283500
uagacucaacauuauggag

SEQ ID NO: 1283502 - RNA, 19 nt, Artificial Sequence
  Description of Artificial Sequence: Synthetic oligonucleotide
  Sense strand starting at position 3868 of SEQ ID NO: 1241581
ccauaauguugagucuaua

SEQ ID NO: 1283503 - RNA, 19 nt, Artificial Sequence
  Description of Artificial Sequence: Synthetic oligonucleotide
  Antisense strand to SEQ ID NO: 1283502
uauagacucaacauuaugg

SEQ ID NO: 1283504 - RNA, 19 nt, Artificial Sequence
  Description of Artificial Sequence: Synthetic oligonucleotide
  Sense strand starting at position 3871 of SEQ ID NO: 1241581
uaauguugagucuauaagu

SEQ ID NO: 1283505 - RNA, 19 nt, Artificial Sequence
  Description of Artificial Sequence: Synthetic oligonucleotide
  Antisense strand to SEQ ID NO: 1283504
acuuauagacucaacauua

SEQ ID NO: 1283506 - RNA, 19 nt, Artificial Sequence
  Description of Artificial Sequence: Synthetic oligonucleotide
  Sense strand starting at position 3880 of SEQ ID NO: 1241581
gucuauaagucuuagacca

SEQ ID NO: 1283507 - RNA, 19 nt, Artificial Sequence
  Description of Artificial Sequence: Synthetic oligonucleotide
  Antisense strand to SEQ ID NO: 1283506
uggucuaagacuuauagac

SEQ ID NO: 1283508 - RNA, 19 nt, Artificial Sequence
  Description of Artificial Sequence: Synthetic oligonucleotide
  Sense strand starting at position 109 of SEQ ID NO: 1241582
gugucagcccaaggaucau

SEQ ID NO: 1283509 - RNA, 19 nt, Artificial Sequence
  Description of Artificial Sequence: Synthetic oligonucleotide
  Antisense strand to SEQ ID NO: 1283508
augauccuugggcugacac

SEQ ID NO: 1283510 - RNA, 19 nt, Artificial Sequence
  Description of Artificial Sequence: Synthetic oligonucleotide
  Sense strand starting at position 251 of SEQ ID NO: 1241582
agagaugcguuccuuauuu

SEQ ID NO: 1283511 - RNA, 19 nt, Artificial Sequence
  Description of Artificial Sequence: Synthetic oligonucleotide
  Antisense strand to SEQ ID NO: 1283510
aaauaaggaacgcaucucu

SEQ ID NO: 1283512 - RNA, 19 nt, Artificial Sequence
  Description of Artificial Sequence: Synthetic oligonucleotide
  Sense strand starting at position 255 of SEQ ID NO: 1241582
augcguuccuuauuucgaa

SEQ ID NO: 1283513 - RNA, 19 nt, Artificial Sequence
  Description of Artificial Sequence: Synthetic oligonucleotide
  Antisense strand to SEQ ID NO: 1283512
uucgaaauaaggaacgcau

SEQ ID NO: 1283514 - RNA, 19 nt, Artificial Sequence
  Description of Artificial Sequence: Synthetic oligonucleotide
  Sense strand starting at position 421 of SEQ ID NO: 1241582
uggagucagcugcaacuau

SEQ ID NO: 1283515 - RNA, 19 nt, Artificial Sequence
  Description of Artificial Sequence: Synthetic oligonucleotide
  Antisense strand to SEQ ID NO: 1283514
auaguugcagcugacucca

SEQ ID NO: 1283516 - RNA, 19 nt, Artificial Sequence
  Description of Artificial Sequence: Synthetic oligonucleotide
  Sense strand starting at position 455 of SEQ ID NO: 1241582
cuguuaagaucagaggaaa

SEQ ID NO: 1283517 - RNA, 19 nt, Artificial Sequence
  Description of Artificial Sequence: Synthetic oligonucleotide
  Antisense strand to SEQ ID NO: 1283516
uuuccucugaucuuaacag

SEQ ID NO: 1283518 - RNA, 19 nt, Artificial Sequence
  Description of Artificial Sequence: Synthetic oligonucleotide
  Sense strand starting at position 627 of SEQ ID NO: 1241582
aucccuugacauggauaua

SEQ ID NO: 1283519 - RNA, 19 nt, Artificial Sequence
  Description of Artificial Sequence: Synthetic oligonucleotide
  Antisense strand to SEQ ID NO: 1283518
uauauccaugucaagggau

SEQ ID NO: 1283520 - RNA, 19 nt, Artificial Sequence
  Description of Artificial Sequence: Synthetic oligonucleotide
  Sense strand starting at position 689 of SEQ ID NO: 1241582
uccuguaacccaggcauuu

SEQ ID NO: 1283521 - RNA, 19 nt, Artificial Sequence
  Description of Artificial Sequence: Synthetic oligonucleotide
  Antisense strand to SEQ ID NO: 1283520
aaaugccuggguuacagga

SEQ ID NO: 1283522 - RNA, 19 nt, Artificial Sequence
  Description of Artificial Sequence: Synthetic oligonucleotide
  Sense strand starting at position 978 of SEQ ID NO: 1241582
uagagcuaguuauugcaga

SEQ ID NO: 1283523 - RNA, 19 nt, Artificial Sequence
  Description of Artificial Sequence: Synthetic oligonucleotide
  Antisense strand to SEQ ID NO: 1283522
ucugcaauaacuagcucua

SEQ ID NO: 1283524 - RNA, 19 nt, Artificial Sequence
  Description of Artificial Sequence: Synthetic oligonucleotide
  Sense strand starting at position 1018 of SEQ ID NO: 1241582
gucugauucuuaguacaau

SEQ ID NO: 1283525 - RNA, 19 nt, Artificial Sequence
  Description of Artificial Sequence: Synthetic oligonucleotide
  Antisense strand to SEQ ID NO: 1283524
auuguacuaagaaucagac

SEQ ID NO: 1283526 - RNA, 19 nt, Artificial Sequence
  Description of Artificial Sequence: Synthetic oligonucleotide
  Sense strand starting at position 1114 of SEQ ID NO: 1241582
uugguaaacguuuacaaua

SEQ ID NO: 1283527 - RNA, 19 nt, Artificial Sequence
  Description of Artificial Sequence: Synthetic oligonucleotide
  Antisense strand to SEQ ID NO: 1283526
uauuguaaacguuuaccaa

SEQ ID NO: 1283528 - RNA, 19 nt, Artificial Sequence
  Description of Artificial Sequence: Synthetic oligonucleotide
  Sense strand starting at position 1477 of SEQ ID NO: 1241582
gugguuguuccaugaagca

SEQ ID NO: 1283529 - RNA, 19 nt, Artificial Sequence
  Description of Artificial Sequence: Synthetic oligonucleotide
  Antisense strand to SEQ ID NO: 1283528
ugcuucauggaacaaccac

SEQ ID NO: 1283530 - RNA, 19 nt, Artificial Sequence
  Description of Artificial Sequence: Synthetic oligonucleotide
  Sense strand starting at position 1555 of SEQ ID NO: 1241582
cugagacucccuggaccua

SEQ ID NO: 1283531 - RNA, 19 nt, Artificial Sequence
  Description of Artificial Sequence: Synthetic oligonucleotide
  Antisense strand to SEQ ID NO: 1283530
uagguccagggagucucag

SEQ ID NO: 1283532 - RNA, 19 nt, Artificial Sequence
  Description of Artificial Sequence: Synthetic oligonucleotide
  Sense strand starting at position 1661 of SEQ ID NO: 1241582
ugucuagugugggcagaaa

SEQ ID NO: 1283533 - RNA, 19 nt, Artificial Sequence
  Description of Artificial Sequence: Synthetic oligonucleotide
  Antisense strand to SEQ ID NO: 1283532
uuucugcccacacuagaca

SEQ ID NO: 1283534 - RNA, 19 nt, Artificial Sequence
  Description of Artificial Sequence: Synthetic oligonucleotide
  Sense strand starting at position 1899 of SEQ ID NO: 1241582
cuuggcuuuggucaugcaa

SEQ ID NO: 1283535 - RNA, 19 nt, Artificial Sequence
  Description of Artificial Sequence: Synthetic oligonucleotide
  Antisense strand to SEQ ID NO: 1283534
uugcaugaccaaagccaag

SEQ ID NO: 1283536 - RNA, 19 nt, Artificial Sequence
  Description of Artificial Sequence: Synthetic oligonucleotide
  Sense strand starting at position 1914 of SEQ ID NO: 1241582
gcaaguaguccuggaucag

SEQ ID NO: 1283537 - RNA, 19 nt, Artificial Sequence
  Description of Artificial Sequence: Synthetic oligonucleotide
  Antisense strand to SEQ ID NO: 1283536
cugauccaggacuacuugc

SEQ ID NO: 1283538 - RNA, 19 nt, Artificial Sequence
  Description of Artificial Sequence: Synthetic oligonucleotide
  Sense strand starting at position 1967 of SEQ ID NO: 1241582
guccauguugcguaaggga

SEQ ID NO: 1283539 - RNA, 19 nt, Artificial Sequence
  Description of Artificial Sequence: Synthetic oligonucleotide
  Antisense strand to SEQ ID NO: 1283538
ucccuuacgcaacauggac

SEQ ID NO: 1283540 - RNA, 19 nt, Artificial Sequence
  Description of Artificial Sequence: Synthetic oligonucleotide
  Sense strand starting at position 2250 of SEQ ID NO: 1241582
gugcuauaccucuuguugu

SEQ ID NO: 1283541 - RNA, 19 nt, Artificial Sequence
  Description of Artificial Sequence: Synthetic oligonucleotide
  Antisense strand to SEQ ID NO: 1283540
acaacaagagguauagcac

SEQ ID NO: 1283542 - RNA, 19 nt, Artificial Sequence
  Description of Artificial Sequence: Synthetic oligonucleotide
  Sense strand starting at position 2296 of SEQ ID NO: 1241582
acaguaaccgguuauuaau

SEQ ID NO: 1283543 - RNA, 19 nt, Artificial Sequence
  Description of Artificial Sequence: Synthetic oligonucleotide
  Antisense strand to SEQ ID NO: 1283542
auuaauaaccgguuacugu

SEQ ID NO: 1283544 - RNA, 19 nt, Artificial Sequence
  Description of Artificial Sequence: Synthetic oligonucleotide
  Sense strand starting at position 2298 of SEQ ID NO: 1241582
aguaaccgguuauuaauau

SEQ ID NO: 1283545 - RNA, 19 nt, Artificial Sequence
  Description of Artificial Sequence: Synthetic oligonucleotide
  Antisense strand to SEQ ID NO: 1283544
auauuaauaaccgguuacu

SEQ ID NO: 1283546 - RNA, 19 nt, Artificial Sequence
  Description of Artificial Sequence: Synthetic oligonucleotide
  Sense strand starting at position 2339 of SEQ ID NO: 1241582
cuaccuucugguggaaauu

SEQ ID NO: 1283547 - RNA, 19 nt, Artificial Sequence
  Description of Artificial Sequence: Synthetic oligonucleotide
  Antisense strand to SEQ ID NO: 1283546
aauuuccaccagaagguag

SEQ ID NO: 1283548 - RNA, 19 nt, Artificial Sequence
  Description of Artificial Sequence: Synthetic oligonucleotide
  Sense strand starting at position 2401 of SEQ ID NO: 1241582
aagcaaaggguccaguuaa

SEQ ID NO: 1283549 - RNA, 19 nt, Artificial Sequence
  Description of Artificial Sequence: Synthetic oligonucleotide
  Antisense strand to SEQ ID NO: 1283548
uuaacuggacccuuugcuu

SEQ ID NO: 1283550 - RNA, 19 nt, Artificial Sequence
  Description of Artificial Sequence: Synthetic oligonucleotide
  Sense strand starting at position 2449 of SEQ ID NO: 1241582
gaauaagugucaguaguaa

SEQ ID NO: 1283551 - RNA, 19 nt, Artificial Sequence
  Description of Artificial Sequence: Synthetic oligonucleotide
  Antisense strand to SEQ ID NO: 1283550
uuacuacugacacuuauuc

SEQ ID NO: 1283552 - RNA, 19 nt, Artificial Sequence
  Description of Artificial Sequence: Synthetic oligonucleotide
  Sense strand starting at position 2453 of SEQ ID NO: 1241582
aagugucaguaguaauuua

SEQ ID NO: 1283553 - RNA, 19 nt, Artificial Sequence
  Description of Artificial Sequence: Synthetic oligonucleotide
  Antisense strand to SEQ ID NO: 1283552
uaaauuacuacugacacuu

SEQ ID NO: 1283554 - RNA, 19 nt, Artificial Sequence
  Description of Artificial Sequence: Synthetic oligonucleotide
  Sense strand starting at position 2461 of SEQ ID NO: 1241582
guaguaauuuaccaucuca

SEQ ID NO: 1283555 - RNA, 19 nt, Artificial Sequence
  Description of Artificial Sequence: Synthetic oligonucleotide
  Antisense strand to SEQ ID NO: 1283554
ugagaugguaaauuacuac

SEQ ID NO: 1283556 - RNA, 19 nt, Artificial Sequence
  Description of Artificial Sequence: Synthetic oligonucleotide
  Sense strand starting at position 2490 of SEQ ID NO: 1241582
gacgguugagacugcauaa

SEQ ID NO: 1283557 - RNA, 19 nt, Artificial Sequence
  Description of Artificial Sequence: Synthetic oligonucleotide
  Antisense strand to SEQ ID NO: 1283556
uuaugcagucucaaccguc

SEQ ID NO: 1283558 - RNA, 19 nt, Artificial Sequence
  Description of Artificial Sequence: Synthetic oligonucleotide
  Sense strand starting at position 2505 of SEQ ID NO: 1241582
auaaauauguaccaagaga

SEQ ID NO: 1283559 - RNA, 19 nt, Artificial Sequence
  Description of Artificial Sequence: Synthetic oligonucleotide
  Antisense strand to SEQ ID NO: 1283558
ucucuugguacauauuuau

SEQ ID NO: 1283560 - RNA, 19 nt, Artificial Sequence
  Description of Artificial Sequence: Synthetic oligonucleotide
  Sense strand starting at position 2641 of SEQ ID NO: 1241582
ccgggaagugugcauaugu

SEQ ID NO: 1283561 - RNA, 19 nt, Artificial Sequence
  Description of Artificial Sequence: Synthetic oligonucleotide
  Antisense strand to SEQ ID NO: 1283560
acauaugcacacuucccgg

SEQ ID NO: 1283562 - RNA, 19 nt, Artificial Sequence
  Description of Artificial Sequence: Synthetic oligonucleotide
  Sense strand starting at position 2642 of SEQ ID NO: 1241582
cgggaagugugcauaugua

SEQ ID NO: 1283563 - RNA, 19 nt, Artificial Sequence
  Description of Artificial Sequence: Synthetic oligonucleotide
  Antisense strand to SEQ ID NO: 1283562
uacauaugcacacuucccg

SEQ ID NO: 1283564 - RNA, 19 nt, Artificial Sequence
  Description of Artificial Sequence: Synthetic oligonucleotide
  Sense strand starting at position 2646 of SEQ ID NO: 1241582
aagugugcauauguaugaa

SEQ ID NO: 1283565 - RNA, 19 nt, Artificial Sequence
  Description of Artificial Sequence: Synthetic oligonucleotide
  Antisense strand to SEQ ID NO: 1283564
uucauacauaugcacacuu

SEQ ID NO: 1283566 - RNA, 19 nt, Artificial Sequence
  Description of Artificial Sequence: Synthetic oligonucleotide
  Sense strand starting at position 2649 of SEQ ID NO: 1241582
ugugcauauguaugaaaug

SEQ ID NO: 1283567 - RNA, 19 nt, Artificial Sequence
  Description of Artificial Sequence: Synthetic oligonucleotide
  Antisense strand to SEQ ID NO: 1283566
cauuucauacauaugcaca

SEQ ID NO: 1283568 - RNA, 19 nt, Artificial Sequence
  Description of Artificial Sequence: Synthetic oligonucleotide
  Sense strand starting at position 2704 of SEQ ID NO: 1241582
uggccuuccuuguuggauu

SEQ ID NO: 1283569 - RNA, 19 nt, Artificial Sequence
  Description of Artificial Sequence: Synthetic oligonucleotide
  Antisense strand to SEQ ID NO: 1283568
aauccaacaaggaaggcca

SEQ ID NO: 1283570 - RNA, 19 nt, Artificial Sequence
  Description of Artificial Sequence: Synthetic oligonucleotide
  Sense strand starting at position 2802 of SEQ ID NO: 1241582
cugcauaugcuguauuguu

SEQ ID NO: 1283571 - RNA, 19 nt, Artificial Sequence
  Description of Artificial Sequence: Synthetic oligonucleotide
  Antisense strand to SEQ ID NO: 1283570
aacaauacagcauaugcag

SEQ ID NO: 1283572 - RNA, 19 nt, Artificial Sequence
  Description of Artificial Sequence: Synthetic oligonucleotide
  Sense strand starting at position 3567 of SEQ ID NO: 1241582
acaggagaucuuuguguuu

SEQ ID NO: 1283573 - RNA, 19 nt, Artificial Sequence
  Description of Artificial Sequence: Synthetic oligonucleotide
  Antisense strand to SEQ ID NO: 1283572
aaacacaaagaucuccugu

SEQ ID NO: 1283574 - RNA, 19 nt, Artificial Sequence
  Description of Artificial Sequence: Synthetic oligonucleotide
  Sense strand starting at position 3608 of SEQ ID NO: 1241582
ugcggagugcgucuguuua

SEQ ID NO: 1283575 - RNA, 19 nt, Artificial Sequence
  Description of Artificial Sequence: Synthetic oligonucleotide
  Antisense strand to SEQ ID NO: 1283574
uaaacagacgcacuccgca

SEQ ID NO: 1283576 - RNA, 19 nt, Artificial Sequence
  Description of Artificial Sequence: Synthetic oligonucleotide
  Sense strand starting at position 3619 of SEQ ID NO: 1241582
ucuguuuacugagcauaua

SEQ ID NO: 1283577 - RNA, 19 nt, Artificial Sequence
  Description of Artificial Sequence: Synthetic oligonucleotide
  Antisense strand to SEQ ID NO: 1283576
uauaugcucaguaaacaga

SEQ ID NO: 1283578 - RNA, 19 nt, Artificial Sequence
  Description of Artificial Sequence: Synthetic oligonucleotide
  Sense strand starting at position 3620 of SEQ ID NO: 1241582
cuguuuacugagcauauau

SEQ ID NO: 1283579 - RNA, 19 nt, Artificial Sequence
  Description of Artificial Sequence: Synthetic oligonucleotide
  Antisense strand to SEQ ID NO: 1283578
auauaugcucaguaaacag

SEQ ID NO: 1283580 - RNA, 19 nt, Artificial Sequence
  Description of Artificial Sequence: Synthetic oligonucleotide
  Sense strand starting at position 3622 of SEQ ID NO: 1241582
guuuacugagcauauauua

SEQ ID NO: 1283581 - RNA, 19 nt, Artificial Sequence
  Description of Artificial Sequence: Synthetic oligonucleotide
  Antisense strand to SEQ ID NO: 1283580
uaauauaugcucaguaaac

SEQ ID NO: 1283582 - RNA, 19 nt, Artificial Sequence
  Description of Artificial Sequence: Synthetic oligonucleotide
  Sense strand starting at position 3763 of SEQ ID NO: 1241582
acauuuaucuccuaccgga

SEQ ID NO: 1283583 - RNA, 19 nt, Artificial Sequence
  Description of Artificial Sequence: Synthetic oligonucleotide
  Antisense strand to SEQ ID NO: 1283582
uccgguaggagauaaaugu

SEQ ID NO: 1283584 - RNA, 19 nt, Artificial Sequence
  Description of Artificial Sequence: Synthetic oligonucleotide
  Sense strand starting at position 3868 of SEQ ID NO: 1241582
gaaugacagcaguggucuu

SEQ ID NO: 1283585 - RNA, 19 nt, Artificial Sequence
  Description of Artificial Sequence: Synthetic oligonucleotide
  Antisense strand to SEQ ID NO: 1283584
aagaccacugcugucauuc

SEQ ID NO: 1283586 - RNA, 19 nt, Artificial Sequence
  Description of Artificial Sequence: Synthetic oligonucleotide
  Sense strand starting at position 3958 of SEQ ID NO: 1241582
caugguccuguugauuauu

SEQ ID NO: 1283587 - RNA, 19 nt, Artificial Sequence
  Description of Artificial Sequence: Synthetic oligonucleotide
  Antisense strand to SEQ ID NO: 1283586
aauaaucaacaggaccaug

SEQ ID NO: 1283588 - RNA, 19 nt, Artificial Sequence
  Description of Artificial Sequence: Synthetic oligonucleotide
  Sense strand starting at position 184 of SEQ ID NO: 1241583
gugucagcccaaggaucau

SEQ ID NO: 1283589 - RNA, 19 nt, Artificial Sequence
  Description of Artificial Sequence: Synthetic oligonucleotide
  Antisense strand to SEQ ID NO: 1283588
augauccuugggcugacac

SEQ ID NO: 1283590 - RNA, 19 nt, Artificial Sequence
  Description of Artificial Sequence: Synthetic oligonucleotide
  Sense strand starting at position 326 of SEQ ID NO: 1241583
agagaugcguuccuuauuu

SEQ ID NO: 1283591 - RNA, 19 nt, Artificial Sequence
  Description of Artificial Sequence: Synthetic oligonucleotide
  Antisense strand to SEQ ID NO: 1283590
aaauaaggaacgcaucucu

SEQ ID NO: 1283592 - RNA, 19 nt, Artificial Sequence
  Description of Artificial Sequence: Synthetic oligonucleotide
  Sense strand starting at position 330 of SEQ ID NO: 1241583
augcguuccuuauuucgaa

SEQ ID NO: 1283593 - RNA, 19 nt, Artificial Sequence
  Description of Artificial Sequence: Synthetic oligonucleotide
  Antisense strand to SEQ ID NO: 1283592
uucgaaauaaggaacgcau

SEQ ID NO: 1283594 - RNA, 19 nt, Artificial Sequence
  Description of Artificial Sequence: Synthetic oligonucleotide
  Sense strand starting at position 496 of SEQ ID NO: 1241583
uggagucagcugcaacuau

SEQ ID NO: 1283595 - RNA, 19 nt, Artificial Sequence
  Description of Artificial Sequence: Synthetic oligonucleotide
  Antisense strand to SEQ ID NO: 1283594
auaguugcagcugacucca

SEQ ID NO: 1283596 - RNA, 19 nt, Artificial Sequence
  Description of Artificial Sequence: Synthetic oligonucleotide
  Sense strand starting at position 530 of SEQ ID NO: 1241583
cuguuaagaucagaggaaa

SEQ ID NO: 1283597 - RNA, 19 nt, Artificial Sequence
  Description of Artificial Sequence: Synthetic oligonucleotide
  Antisense strand to SEQ ID NO: 1283596
uuuccucugaucuuaacag

SEQ ID NO: 1283598 - RNA, 19 nt, Artificial Sequence
  Description of Artificial Sequence: Synthetic oligonucleotide
  Sense strand starting at position 702 of SEQ ID NO: 1241583
aucccuugacauggauaua

SEQ ID NO: 1283599 - RNA, 19 nt, Artificial Sequence
  Description of Artificial Sequence: Synthetic oligonucleotide
  Antisense strand to SEQ ID NO: 1283598
uauauccaugucaagggau

SEQ ID NO: 1283600 - RNA, 19 nt, Artificial Sequence
  Description of Artificial Sequence: Synthetic oligonucleotide
  Sense strand starting at position 764 of SEQ ID NO: 1241583
uccuguaacccaggcauuu

SEQ ID NO: 1283601 - RNA, 19 nt, Artificial Sequence
  Description of Artificial Sequence: Synthetic oligonucleotide
  Antisense strand to SEQ ID NO: 1283600
aaaugccuggguuacagga

SEQ ID NO: 1283602 - RNA, 19 nt, Artificial Sequence
  Description of Artificial Sequence: Synthetic oligonucleotide
  Sense strand starting at position 1053 of SEQ ID NO: 1241583
uagagcuaguuauugcaga

SEQ ID NO: 1283603 - RNA, 19 nt, Artificial Sequence
  Description of Artificial Sequence: Synthetic oligonucleotide
  Antisense strand to SEQ ID NO: 1283602
ucugcaauaacuagcucua

SEQ ID NO: 1283604 - RNA, 19 nt, Artificial Sequence
  Description of Artificial Sequence: Synthetic oligonucleotide
  Sense strand starting at position 1093 of SEQ ID NO: 1241583
gucugauucuuaguacaau

SEQ ID NO: 1283605 - RNA, 19 nt, Artificial Sequence
  Description of Artificial Sequence: Synthetic oligonucleotide
  Antisense strand to SEQ ID NO: 1283604
auuguacuaagaaucagac

SEQ ID NO: 1283606 - RNA, 19 nt, Artificial Sequence
  Description of Artificial Sequence: Synthetic oligonucleotide
  Sense strand starting at position 1189 of SEQ ID NO: 1241583
uugguaaacguuuacaaua

SEQ ID NO: 1283607 - RNA, 19 nt, Artificial Sequence
  Description of Artificial Sequence: Synthetic oligonucleotide
  Antisense strand to SEQ ID NO: 1283606
uauuguaaacguuuaccaa

SEQ ID NO: 1283608 - RNA, 19 nt, Artificial Sequence
  Description of Artificial Sequence: Synthetic oligonucleotide
  Sense strand starting at position 1552 of SEQ ID NO: 1241583
gugguuguuccaugaagca

SEQ ID NO: 1283609 - RNA, 19 nt, Artificial Sequence
  Description of Artificial Sequence: Synthetic oligonucleotide
  Antisense strand to SEQ ID NO: 1283608
ugcuucauggaacaaccac

SEQ ID NO: 1283610 - RNA, 19 nt, Artificial Sequence
  Description of Artificial Sequence: Synthetic oligonucleotide
  Sense strand starting at position 1630 of SEQ ID NO: 1241583
cugagacucccuggaccua

SEQ ID NO: 1283611 - RNA, 19 nt, Artificial Sequence
  Description of Artificial Sequence: Synthetic oligonucleotide
  Antisense strand to SEQ ID NO: 1283610
uagguccagggagucucag

SEQ ID NO: 1283612 - RNA, 19 nt, Artificial Sequence
  Description of Artificial Sequence: Synthetic oligonucleotide
  Sense strand starting at position 1736 of SEQ ID NO: 1241583
ugucuagugugggcagaaa

SEQ ID NO: 1283613 - RNA, 19 nt, Artificial Sequence
  Description of Artificial Sequence: Synthetic oligonucleotide
  Antisense strand to SEQ ID NO: 1283612
uuucugcccacacuagaca

SEQ ID NO: 1283614 - RNA, 19 nt, Artificial Sequence
  Description of Artificial Sequence: Synthetic oligonucleotide
  Sense strand starting at position 1974 of SEQ ID NO: 1241583
cuuggcuuuggucaugcaa

SEQ ID NO: 1283615 - RNA, 19 nt, Artificial Sequence
  Description of Artificial Sequence: Synthetic oligonucleotide
  Antisense strand to SEQ ID NO: 1283614
uugcaugaccaaagccaag

SEQ ID NO: 1283616 - RNA, 19 nt, Artificial Sequence
  Description of Artificial Sequence: Synthetic oligonucleotide
  Sense strand starting at position 1989 of SEQ ID NO: 1241583
gcaaguaguccuggaucag

SEQ ID NO: 1283617 - RNA, 19 nt, Artificial Sequence
  Description of Artificial Sequence: Synthetic oligonucleotide
  Antisense strand to SEQ ID NO: 1283616
cugauccaggacuacuugc

SEQ ID NO: 1283618 - RNA, 19 nt, Artificial Sequence
  Description of Artificial Sequence: Synthetic oligonucleotide
  Sense strand starting at position 2042 of SEQ ID NO: 1241583
guccauguugcguaaggga

SEQ ID NO: 1283619 - RNA, 19 nt, Artificial Sequence
  Description of Artificial Sequence: Synthetic oligonucleotide
  Antisense strand to SEQ ID NO: 1283618
ucccuuacgcaacauggac

SEQ ID NO: 1283620 - RNA, 19 nt, Artificial Sequence
  Description of Artificial Sequence: Synthetic oligonucleotide
  Sense strand starting at position 2325 of SEQ ID NO: 1241583
gugcuauaccucuuguugu

SEQ ID NO: 1283621 - RNA, 19 nt, Artificial Sequence
  Description of Artificial Sequence: Synthetic oligonucleotide
  Antisense strand to SEQ ID NO: 1283620
acaacaagagguauagcac

SEQ ID NO: 1283622 - RNA, 19 nt, Artificial Sequence
  Description of Artificial Sequence: Synthetic oligonucleotide
  Sense strand starting at position 2371 of SEQ ID NO: 1241583
acaguaaccgguuauuaau

SEQ ID NO: 1283623 - RNA, 19 nt, Artificial Sequence
  Description of Artificial Sequence: Synthetic oligonucleotide
  Antisense strand to SEQ ID NO: 1283622
auuaauaaccgguuacugu

SEQ ID NO: 1283624 - RNA, 19 nt, Artificial Sequence
  Description of Artificial Sequence: Synthetic oligonucleotide
  Sense strand starting at position 2373 of SEQ ID NO: 1241583
aguaaccgguuauuaauau

SEQ ID NO: 1283625 - RNA, 19 nt, Artificial Sequence
  Description of Artificial Sequence: Synthetic oligonucleotide
  Antisense strand to SEQ ID NO: 1283624
auauuaauaaccgguuacu

SEQ ID NO: 1283626 - RNA, 19 nt, Artificial Sequence
  Description of Artificial Sequence: Synthetic oligonucleotide
  Sense strand starting at position 2414 of SEQ ID NO: 1241583
cuaccuucugguggaaauu

SEQ ID NO: 1283627 - RNA, 19 nt, Artificial Sequence
  Description of Artificial Sequence: Synthetic oligonucleotide
  Antisense strand to SEQ ID NO: 1283626
aauuuccaccagaagguag

SEQ ID NO: 1283628 - RNA, 19 nt, Artificial Sequence
  Description of Artificial Sequence: Synthetic oligonucleotide
  Sense strand starting at position 2476 of SEQ ID NO: 1241583
aagcaaaggguccaguuaa

SEQ ID NO: 1283629 - RNA, 19 nt, Artificial Sequence
  Description of Artificial Sequence: Synthetic oligonucleotide
  Antisense strand to SEQ ID NO: 1283628
uuaacuggacccuuugcuu

SEQ ID NO: 1283630 - RNA, 19 nt, Artificial Sequence
  Description of Artificial Sequence: Synthetic oligonucleotide
  Sense strand starting at position 2524 of SEQ ID NO: 1241583
gaauaagugucaguaguaa

SEQ ID NO: 1283631 - RNA, 19 nt, Artificial Sequence
  Description of Artificial Sequence: Synthetic oligonucleotide
  Antisense strand to SEQ ID NO: 1283630
uuacuacugacacuuauuc

SEQ ID NO: 1283632 - RNA, 19 nt, Artificial Sequence
  Description of Artificial Sequence: Synthetic oligonucleotide
  Sense strand starting at position 2528 of SEQ ID NO: 1241583
aagugucaguaguaauuua

SEQ ID NO: 1283633 - RNA, 19 nt, Artificial Sequence
  Description of Artificial Sequence: Synthetic oligonucleotide
  Antisense strand to SEQ ID NO: 1283632
uaaauuacuacugacacuu

SEQ ID NO: 1283634 - RNA, 19 nt, Artificial Sequence
  Description of Artificial Sequence: Synthetic oligonucleotide
  Sense strand starting at position 2536 of SEQ ID NO: 1241583
guaguaauuuaccaucuca

SEQ ID NO: 1283635 - RNA, 19 nt, Artificial Sequence
  Description of Artificial Sequence: Synthetic oligonucleotide
  Antisense strand to SEQ ID NO: 1283634
ugagaugguaaauuacuac

SEQ ID NO: 1283636 - RNA, 19 nt, Artificial Sequence
  Description of Artificial Sequence: Synthetic oligonucleotide
  Sense strand starting at position 2565 of SEQ ID NO: 1241583
gacgguugagacugcauaa

SEQ ID NO: 1283637 - RNA, 19 nt, Artificial Sequence
  Description of Artificial Sequence: Synthetic oligonucleotide
  Antisense strand to SEQ ID NO: 1283636
uuaugcagucucaaccguc

SEQ ID NO: 1283638 - RNA, 19 nt, Artificial Sequence
  Description of Artificial Sequence: Synthetic oligonucleotide
  Sense strand starting at position 2580 of SEQ ID NO: 1241583
auaaauauguaccaagaga

SEQ ID NO: 1283639 - RNA, 19 nt, Artificial Sequence
  Description of Artificial Sequence: Synthetic oligonucleotide
  Antisense strand to SEQ ID NO: 1283638
ucucuugguacauauuuau

SEQ ID NO: 1283640 - RNA, 19 nt, Artificial Sequence
  Description of Artificial Sequence: Synthetic oligonucleotide
  Sense strand starting at position 2716 of SEQ ID NO: 1241583
ccgggaagugugcauaugu

SEQ ID NO: 1283641 - RNA, 19 nt, Artificial Sequence
  Description of Artificial Sequence: Synthetic oligonucleotide
  Antisense strand to SEQ ID NO: 1283640
acauaugcacacuucccgg

SEQ ID NO: 1283642 - RNA, 19 nt, Artificial Sequence
  Description of Artificial Sequence: Synthetic oligonucleotide
  Sense strand starting at position 2717 of SEQ ID NO: 1241583
cgggaagugugcauaugua

SEQ ID NO: 1283643 - RNA, 19 nt, Artificial Sequence
  Description of Artificial Sequence: Synthetic oligonucleotide
  Antisense strand to SEQ ID NO: 1283642
uacauaugcacacuucccg

SEQ ID NO: 1283644 - RNA, 19 nt, Artificial Sequence
  Description of Artificial Sequence: Synthetic oligonucleotide
  Sense strand starting at position 2721 of SEQ ID NO: 1241583
aagugugcauauguaugaa

SEQ ID NO: 1283645 - RNA, 19 nt, Artificial Sequence
  Description of Artificial Sequence: Synthetic oligonucleotide
  Antisense strand to SEQ ID NO: 1283644
uucauacauaugcacacuu

SEQ ID NO: 1283646 - RNA, 19 nt, Artificial Sequence
  Description of Artificial Sequence: Synthetic oligonucleotide
  Sense strand starting at position 2724 of SEQ ID NO: 1241583
ugugcauauguaugaaaug

SEQ ID NO: 1283647 - RNA, 19 nt, Artificial Sequence
  Description of Artificial Sequence: Synthetic oligonucleotide
  Antisense strand to SEQ ID NO: 1283646
cauuucauacauaugcaca

SEQ ID NO: 1283648 - RNA, 19 nt, Artificial Sequence
  Description of Artificial Sequence: Synthetic oligonucleotide
  Sense strand starting at position 2779 of SEQ ID NO: 1241583
uggccuuccuuguuggauu

SEQ ID NO: 1283649 - RNA, 19 nt, Artificial Sequence
  Description of Artificial Sequence: Synthetic oligonucleotide
  Antisense strand to SEQ ID NO: 1283648
aauccaacaaggaaggcca

SEQ ID NO: 1283650 - RNA, 19 nt, Artificial Sequence
  Description of Artificial Sequence: Synthetic oligonucleotide
  Sense strand starting at position 2877 of SEQ ID NO: 1241583
cugcauaugcuguauuguu

SEQ ID NO: 1283651 - RNA, 19 nt, Artificial Sequence
  Description of Artificial Sequence: Synthetic oligonucleotide
  Antisense strand to SEQ ID NO: 1283650
aacaauacagcauaugcag

SEQ ID NO: 1283652 - RNA, 19 nt, Artificial Sequence
  Description of Artificial Sequence: Synthetic oligonucleotide
  Sense strand starting at position 3618 of SEQ ID NO: 1241583
gcccaaucaucagaauaga

SEQ ID NO: 1283653 - RNA, 19 nt, Artificial Sequence
  Description of Artificial Sequence: Synthetic oligonucleotide
  Antisense strand to SEQ ID NO: 1283652
ucuauucugaugauugggc

SEQ ID NO: 1283654 - RNA, 19 nt, Artificial Sequence
  Description of Artificial Sequence: Synthetic oligonucleotide
  Sense strand starting at position 3642 of SEQ ID NO: 1241583
acaggagaucuuuguguuu

SEQ ID NO: 1283655 - RNA, 19 nt, Artificial Sequence
  Description of Artificial Sequence: Synthetic oligonucleotide
  Antisense strand to SEQ ID NO: 1283654
aaacacaaagaucuccugu

SEQ ID NO: 1283656 - RNA, 19 nt, Artificial Sequence
  Description of Artificial Sequence: Synthetic oligonucleotide
  Sense strand starting at position 3683 of SEQ ID NO: 1241583
ugcggagugcgucuguuua

SEQ ID NO: 1283657 - RNA, 19 nt, Artificial Sequence
  Description of Artificial Sequence: Synthetic oligonucleotide
  Antisense strand to SEQ ID NO: 1283656
uaaacagacgcacuccgca

SEQ ID NO: 1283658 - RNA, 19 nt, Artificial Sequence
  Description of Artificial Sequence: Synthetic oligonucleotide
  Sense strand starting at position 3694 of SEQ ID NO: 1241583
ucuguuuacugagcauaua

SEQ ID NO: 1283659 - RNA, 19 nt, Artificial Sequence
  Description of Artificial Sequence: Synthetic oligonucleotide
  Antisense strand to SEQ ID NO: 1283658
uauaugcucaguaaacaga

SEQ ID NO: 1283660 - RNA, 19 nt, Artificial Sequence
  Description of Artificial Sequence: Synthetic oligonucleotide
  Sense strand starting at position 3695 of SEQ ID NO: 1241583
cuguuuacugagcauauau

SEQ ID NO: 1283661 - RNA, 19 nt, Artificial Sequence
  Description of Artificial Sequence: Synthetic oligonucleotide
  Antisense strand to SEQ ID NO: 1283660
auauaugcucaguaaacag

SEQ ID NO: 1283662 - RNA, 19 nt, Artificial Sequence
  Description of Artificial Sequence: Synthetic oligonucleotide
  Sense strand starting at position 3697 of SEQ ID NO: 1241583
guuuacugagcauauauua

SEQ ID NO: 1283663 - RNA, 19 nt, Artificial Sequence
  Description of Artificial Sequence: Synthetic oligonucleotide
  Antisense strand to SEQ ID NO: 1283662
uaauauaugcucaguaaac

SEQ ID NO: 1283664 - RNA, 19 nt, Artificial Sequence
  Description of Artificial Sequence: Synthetic oligonucleotide
  Sense strand starting at position 3838 of SEQ ID NO: 1241583
acauuuaucuccuaccgga

SEQ ID NO: 1283665 - RNA, 19 nt, Artificial Sequence
  Description of Artificial Sequence: Synthetic oligonucleotide
  Antisense strand to SEQ ID NO: 1283664
uccgguaggagauaaaugu

SEQ ID NO: 1283666 - RNA, 19 nt, Artificial Sequence
  Description of Artificial Sequence: Synthetic oligonucleotide
  Sense strand starting at position 3943 of SEQ ID NO: 1241583
gaaugacagcaguggucuu

SEQ ID NO: 1283667 - RNA, 19 nt, Artificial Sequence
  Description of Artificial Sequence: Synthetic oligonucleotide
  Antisense strand to SEQ ID NO: 1283666
aagaccacugcugucauuc

SEQ ID NO: 1283668 - RNA, 19 nt, Artificial Sequence
  Description of Artificial Sequence: Synthetic oligonucleotide
  Sense strand starting at position 34 of SEQ ID NO: 1241584
guuauaggacaaugcuuaa

SEQ ID NO: 1283669 - RNA, 19 nt, Artificial Sequence
  Description of Artificial Sequence: Synthetic oligonucleotide
  Antisense strand to SEQ ID NO: 1283668
uuaagcauuguccuauaac

SEQ ID NO: 1283670 - RNA, 19 nt, Artificial Sequence
  Description of Artificial Sequence: Synthetic oligonucleotide
  Sense strand starting at position 203 of SEQ ID NO: 1241584
acauguuucucagucuuaa

SEQ ID NO: 1283671 - RNA, 19 nt, Artificial Sequence
  Description of Artificial Sequence: Synthetic oligonucleotide
  Antisense strand to SEQ ID NO: 1283670
uuaagacugagaaacaugu

SEQ ID NO: 1283672 - RNA, 19 nt, Artificial Sequence
  Description of Artificial Sequence: Synthetic oligonucleotide
  Sense strand starting at position 396 of SEQ ID NO: 1241584
ucacaaagcuugucagaga

SEQ ID NO: 1283673 - RNA, 19 nt, Artificial Sequence
  Description of Artificial Sequence: Synthetic oligonucleotide
  Antisense strand to SEQ ID NO: 1283672
ucucugacaagcuuuguga

SEQ ID NO: 1283674 - RNA, 19 nt, Artificial Sequence
  Description of Artificial Sequence: Synthetic oligonucleotide
  Sense strand starting at position 557 of SEQ ID NO: 1241584
uaguaauuaccucgaggga

SEQ ID NO: 1283675 - RNA, 19 nt, Artificial Sequence
  Description of Artificial Sequence: Synthetic oligonucleotide
  Antisense strand to SEQ ID NO: 1283674
ucccucgagguaauuacua

SEQ ID NO: 1283676 - RNA, 19 nt, Artificial Sequence
  Description of Artificial Sequence: Synthetic oligonucleotide
  Sense strand starting at position 560 of SEQ ID NO: 1241584
uaauuaccucgagggaacu

SEQ ID NO: 1283677 - RNA, 19 nt, Artificial Sequence
  Description of Artificial Sequence: Synthetic oligonucleotide
  Antisense strand to SEQ ID NO: 1283676
aguucccucgagguaauua

SEQ ID NO: 1283678 - RNA, 19 nt, Artificial Sequence
  Description of Artificial Sequence: Synthetic oligonucleotide
  Sense strand starting at position 566 of SEQ ID NO: 1241584
ccucgagggaacuguugua

SEQ ID NO: 1283679 - RNA, 19 nt, Artificial Sequence
  Description of Artificial Sequence: Synthetic oligonucleotide
  Antisense strand to SEQ ID NO: 1283678
uacaacaguucccucgagg

SEQ ID NO: 1283680 - RNA, 19 nt, Artificial Sequence
  Description of Artificial Sequence: Synthetic oligonucleotide
  Sense strand starting at position 611 of SEQ ID NO: 1241584
cuugguacaugcuuagaau

SEQ ID NO: 1283681 - RNA, 19 nt, Artificial Sequence
  Description of Artificial Sequence: Synthetic oligonucleotide
  Antisense strand to SEQ ID NO: 1283680
auucuaagcauguaccaag

SEQ ID NO: 1283682 - RNA, 19 nt, Artificial Sequence
  Description of Artificial Sequence: Synthetic oligonucleotide
  Sense strand starting at position 612 of SEQ ID NO: 1241584
uugguacaugcuuagaaua

SEQ ID NO: 1283683 - RNA, 19 nt, Artificial Sequence
  Description of Artificial Sequence: Synthetic oligonucleotide
  Antisense strand to SEQ ID NO: 1283682
uauucuaagcauguaccaa

SEQ ID NO: 1283684 - RNA, 19 nt, Artificial Sequence
  Description of Artificial Sequence: Synthetic oligonucleotide
  Sense strand starting at position 1086 of SEQ ID NO: 1241584
ucaauuucgguccgcucaa

SEQ ID NO: 1283685 - RNA, 19 nt, Artificial Sequence
  Description of Artificial Sequence: Synthetic oligonucleotide
  Antisense strand to SEQ ID NO: 1283684
uugagcggaccgaaauuga

SEQ ID NO: 1283686 - RNA, 19 nt, Artificial Sequence
  Description of Artificial Sequence: Synthetic oligonucleotide
  Sense strand starting at position 1087 of SEQ ID NO: 1241584
caauuucgguccgcucaaa

SEQ ID NO: 1283687 - RNA, 19 nt, Artificial Sequence
  Description of Artificial Sequence: Synthetic oligonucleotide
  Antisense strand to SEQ ID NO: 1283686
uuugagcggaccgaaauug

SEQ ID NO: 1283688 - RNA, 19 nt, Artificial Sequence
  Description of Artificial Sequence: Synthetic oligonucleotide
  Sense strand starting at position 1242 of SEQ ID NO: 1241584
ugccuucugcucuagaaug

SEQ ID NO: 1283689 - RNA, 19 nt, Artificial Sequence
  Description of Artificial Sequence: Synthetic oligonucleotide
  Antisense strand to SEQ ID NO: 1283688
cauucuagagcagaaggca

SEQ ID NO: 1283690 - RNA, 19 nt, Artificial Sequence
  Description of Artificial Sequence: Synthetic oligonucleotide
  Sense strand starting at position 1244 of SEQ ID NO: 1241584
ccuucugcucuagaaugua

SEQ ID NO: 1283691 - RNA, 19 nt, Artificial Sequence
  Description of Artificial Sequence: Synthetic oligonucleotide
  Antisense strand to SEQ ID NO: 1283690
uacauucuagagcagaagg

SEQ ID NO: 1283692 - RNA, 19 nt, Artificial Sequence
  Description of Artificial Sequence: Synthetic oligonucleotide
  Sense strand starting at position 1256 of SEQ ID NO: 1241584
gaauguacgcacuaugaag

SEQ ID NO: 1283693 - RNA, 19 nt, Artificial Sequence
  Description of Artificial Sequence: Synthetic oligonucleotide
  Antisense strand to SEQ ID NO: 1283692
cuucauagugcguacauuc

SEQ ID NO: 1283694 - RNA, 19 nt, Artificial Sequence
  Description of Artificial Sequence: Synthetic oligonucleotide
  Sense strand starting at position 1346 of SEQ ID NO: 1241584
ccaagugcucaguaaauac

SEQ ID NO: 1283695 - RNA, 19 nt, Artificial Sequence
  Description of Artificial Sequence: Synthetic oligonucleotide
  Antisense strand to SEQ ID NO: 1283694
guauuuacugagcacuugg

SEQ ID NO: 1283696 - RNA, 19 nt, Artificial Sequence
  Description of Artificial Sequence: Synthetic oligonucleotide
  Sense strand starting at position 1356 of SEQ ID NO: 1241584
aguaaauacuuguuuagug

SEQ ID NO: 1283697 - RNA, 19 nt, Artificial Sequence
  Description of Artificial Sequence: Synthetic oligonucleotide
  Antisense strand to SEQ ID NO: 1283696
cacuaaacaaguauuuacu

SEQ ID NO: 1283698 - RNA, 19 nt, Artificial Sequence
  Description of Artificial Sequence: Synthetic oligonucleotide
  Sense strand starting at position 1357 of SEQ ID NO: 1241584
guaaauacuuguuuaguga

SEQ ID NO: 1283699 - RNA, 19 nt, Artificial Sequence
  Description of Artificial Sequence: Synthetic oligonucleotide
  Antisense strand to SEQ ID NO: 1283698
ucacuaaacaaguauuuac

SEQ ID NO: 1283700 - RNA, 19 nt, Artificial Sequence
  Description of Artificial Sequence: Synthetic oligonucleotide
  Sense strand starting at position 2115 of SEQ ID NO: 1241584
agcaguuuauaagcauaaa

SEQ ID NO: 1283701 - RNA, 19 nt, Artificial Sequence
  Description of Artificial Sequence: Synthetic oligonucleotide
  Antisense strand to SEQ ID NO: 1283700
uuuaugcuuauaaacugcu

SEQ ID NO: 1283702 - RNA, 19 nt, Artificial Sequence
  Description of Artificial Sequence: Synthetic oligonucleotide
  Sense strand starting at position 2118 of SEQ ID NO: 1241584
aguuuauaagcauaaagug

SEQ ID NO: 1283703 - RNA, 19 nt, Artificial Sequence
  Description of Artificial Sequence: Synthetic oligonucleotide
  Antisense strand to SEQ ID NO: 1283702
cacuuuaugcuuauaaacu

SEQ ID NO: 1283704 - RNA, 19 nt, Artificial Sequence
  Description of Artificial Sequence: Synthetic oligonucleotide
  Sense strand starting at position 2287 of SEQ ID NO: 1241584
agaacuuuaugguucuaaa

SEQ ID NO: 1283705 - RNA, 19 nt, Artificial Sequence
  Description of Artificial Sequence: Synthetic oligonucleotide
  Antisense strand to SEQ ID NO: 1283704
uuuagaaccauaaaguucu

SEQ ID NO: 1283706 - RNA, 19 nt, Artificial Sequence
  Description of Artificial Sequence: Synthetic oligonucleotide
  Sense strand starting at position 2389 of SEQ ID NO: 1241584
ccugcacaucugggaguau

SEQ ID NO: 1283707 - RNA, 19 nt, Artificial Sequence
  Description of Artificial Sequence: Synthetic oligonucleotide
  Antisense strand to SEQ ID NO: 1283706
auacucccagaugugcagg

SEQ ID NO: 1283708 - RNA, 19 nt, Artificial Sequence
  Description of Artificial Sequence: Synthetic oligonucleotide
  Sense strand starting at position 2401 of SEQ ID NO: 1241584
ggaguauguguguaacgag

SEQ ID NO: 1283709 - RNA, 19 nt, Artificial Sequence
  Description of Artificial Sequence: Synthetic oligonucleotide
  Antisense strand to SEQ ID NO: 1283708
cucguuacacacauacucc

SEQ ID NO: 1283710 - RNA, 19 nt, Artificial Sequence
  Description of Artificial Sequence: Synthetic oligonucleotide
  Sense strand starting at position 2411 of SEQ ID NO: 1241584
uguaacgagucuucuaaac

SEQ ID NO: 1283711 - RNA, 19 nt, Artificial Sequence
  Description of Artificial Sequence: Synthetic oligonucleotide
  Antisense strand to SEQ ID NO: 1283710
guuuagaagacucguuaca

SEQ ID NO: 1283712 - RNA, 19 nt, Artificial Sequence
  Description of Artificial Sequence: Synthetic oligonucleotide
  Sense strand starting at position 2444 of SEQ ID NO: 1241584
ugaccugugacuugugaug

SEQ ID NO: 1283713 - RNA, 19 nt, Artificial Sequence
  Description of Artificial Sequence: Synthetic oligonucleotide
  Antisense strand to SEQ ID NO: 1283712
caucacaagucacagguca

SEQ ID NO: 1283714 - RNA, 19 nt, Artificial Sequence
  Description of Artificial Sequence: Synthetic oligonucleotide
  Sense strand starting at position 2487 of SEQ ID NO: 1241584
ucuugaagcugauugguaa

SEQ ID NO: 1283715 - RNA, 19 nt, Artificial Sequence
  Description of Artificial Sequence: Synthetic oligonucleotide
  Antisense strand to SEQ ID NO: 1283714
uuaccaaucagcuucaaga

SEQ ID NO: 1283716 - RNA, 19 nt, Artificial Sequence
  Description of Artificial Sequence: Synthetic oligonucleotide
  Sense strand starting at position 2488 of SEQ ID NO: 1241584
cuugaagcugauugguaaa

SEQ ID NO: 1283717 - RNA, 19 nt, Artificial Sequence
  Description of Artificial Sequence: Synthetic oligonucleotide
  Antisense strand to SEQ ID NO: 1283716
uuuaccaaucagcuucaag

SEQ ID NO: 1283718 - RNA, 19 nt, Artificial Sequence
  Description of Artificial Sequence: Synthetic oligonucleotide
  Sense strand starting at position 2490 of SEQ ID NO: 1241584
ugaagcugauugguaaagu

SEQ ID NO: 1283719 - RNA, 19 nt, Artificial Sequence
  Description of Artificial Sequence: Synthetic oligonucleotide
  Antisense strand to SEQ ID NO: 1283718
acuuuaccaaucagcuuca

SEQ ID NO: 1283720 - RNA, 19 nt, Artificial Sequence
  Description of Artificial Sequence: Synthetic oligonucleotide
  Sense strand starting at position 2554 of SEQ ID NO: 1241584
ucccuucuguuucuggaaa

SEQ ID NO: 1283721 - RNA, 19 nt, Artificial Sequence
  Description of Artificial Sequence: Synthetic oligonucleotide
  Antisense strand to SEQ ID NO: 1283720
uuuccagaaacagaaggga

SEQ ID NO: 1283722 - RNA, 19 nt, Artificial Sequence
  Description of Artificial Sequence: Synthetic oligonucleotide
  Sense strand starting at position 2785 of SEQ ID NO: 1241584
gcaucuaguguacaugaca

SEQ ID NO: 1283723 - RNA, 19 nt, Artificial Sequence
  Description of Artificial Sequence: Synthetic oligonucleotide
  Antisense strand to SEQ ID NO: 1283722
ugucauguacacuagaugc

SEQ ID NO: 1283724 - RNA, 19 nt, Artificial Sequence
  Description of Artificial Sequence: Synthetic oligonucleotide
  Sense strand starting at position 2788 of SEQ ID NO: 1241584
ucuaguguacaugacacau

SEQ ID NO: 1283725 - RNA, 19 nt, Artificial Sequence
  Description of Artificial Sequence: Synthetic oligonucleotide
  Antisense strand to SEQ ID NO: 1283724
augugucauguacacuaga

SEQ ID NO: 1283726 - RNA, 19 nt, Artificial Sequence
  Description of Artificial Sequence: Synthetic oligonucleotide
  Sense strand starting at position 2879 of SEQ ID NO: 1241584
aaauuagucgggcaucauc

SEQ ID NO: 1283727 - RNA, 19 nt, Artificial Sequence
  Description of Artificial Sequence: Synthetic oligonucleotide
  Antisense strand to SEQ ID NO: 1283726
gaugaugcccgacuaauuu

SEQ ID NO: 1283728 - RNA, 19 nt, Artificial Sequence
  Description of Artificial Sequence: Synthetic oligonucleotide
  Sense strand starting at position 2935 of SEQ ID NO: 1241584
ucaugagaaucucucgaac

SEQ ID NO: 1283729 - RNA, 19 nt, Artificial Sequence
  Description of Artificial Sequence: Synthetic oligonucleotide
  Antisense strand to SEQ ID NO: 1283728
guucgagagauucucauga

SEQ ID NO: 1283730 - RNA, 19 nt, Artificial Sequence
  Description of Artificial Sequence: Synthetic oligonucleotide
  Sense strand starting at position 2963 of SEQ ID NO: 1241584
gacgguugcagugagauca

SEQ ID NO: 1283731 - RNA, 19 nt, Artificial Sequence
  Description of Artificial Sequence: Synthetic oligonucleotide
  Antisense strand to SEQ ID NO: 1283730
ugaucucacugcaaccguc

SEQ ID NO: 1283732 - RNA, 19 nt, Artificial Sequence
  Description of Artificial Sequence: Synthetic oligonucleotide
  Sense strand starting at position 3210 of SEQ ID NO: 1241584
cuuuaaauuggaugauacu

SEQ ID NO: 1283733 - RNA, 19 nt, Artificial Sequence
  Description of Artificial Sequence: Synthetic oligonucleotide
  Antisense strand to SEQ ID NO: 1283732
aguaucauccaauuuaaag

SEQ ID NO: 1283734 - RNA, 19 nt, Artificial Sequence
  Description of Artificial Sequence: Synthetic oligonucleotide
  Sense strand starting at position 3217 of SEQ ID NO: 1241584
uuggaugauacuugagcaa

SEQ ID NO: 1283735 - RNA, 19 nt, Artificial Sequence
  Description of Artificial Sequence: Synthetic oligonucleotide
  Antisense strand to SEQ ID NO: 1283734
uugcucaaguaucauccaa

SEQ ID NO: 1283736 - RNA, 19 nt, Artificial Sequence
  Description of Artificial Sequence: Synthetic oligonucleotide
  Sense strand starting at position 3410 of SEQ ID NO: 1241584
cgguuaaaggcgagucaau

SEQ ID NO: 1283737 - RNA, 19 nt, Artificial Sequence
  Description of Artificial Sequence: Synthetic oligonucleotide
  Antisense strand to SEQ ID NO: 1283736
auugacucgccuuuaaccg

SEQ ID NO: 1283738 - RNA, 19 nt, Artificial Sequence
  Description of Artificial Sequence: Synthetic oligonucleotide
  Sense strand starting at position 3454 of SEQ ID NO: 1241584
caacguuggcaucagacuu

SEQ ID NO: 1283739 - RNA, 19 nt, Artificial Sequence
  Description of Artificial Sequence: Synthetic oligonucleotide
  Antisense strand to SEQ ID NO: 1283738
aagucugaugccaacguug

SEQ ID NO: 1283740 - RNA, 19 nt, Artificial Sequence
  Description of Artificial Sequence: Synthetic oligonucleotide
  Sense strand starting at position 3462 of SEQ ID NO: 1241584
gcaucagacuuuccuauug

SEQ ID NO: 1283741 - RNA, 19 nt, Artificial Sequence
  Description of Artificial Sequence: Synthetic oligonucleotide
  Antisense strand to SEQ ID NO: 1283740
caauaggaaagucugaugc

SEQ ID NO: 1283742 - RNA, 19 nt, Artificial Sequence
  Description of Artificial Sequence: Synthetic oligonucleotide
  Sense strand starting at position 3482 of SEQ ID NO: 1241584
ggcuguaggaagugacaua

SEQ ID NO: 1283743 - RNA, 19 nt, Artificial Sequence
  Description of Artificial Sequence: Synthetic oligonucleotide
  Antisense strand to SEQ ID NO: 1283742
uaugucacuuccuacagcc

SEQ ID NO: 1283744 - RNA, 19 nt, Artificial Sequence
  Description of Artificial Sequence: Synthetic oligonucleotide
  Sense strand starting at position 3483 of SEQ ID NO: 1241584
gcuguaggaagugacauaa

SEQ ID NO: 1283745 - RNA, 19 nt, Artificial Sequence
  Description of Artificial Sequence: Synthetic oligonucleotide
  Antisense strand to SEQ ID NO: 1283744
uuaugucacuuccuacagc

SEQ ID NO: 1283746 - RNA, 19 nt, Artificial Sequence
  Description of Artificial Sequence: Synthetic oligonucleotide
  Sense strand starting at position 3632 of SEQ ID NO: 1241584
ugcagagaugacugucaac

SEQ ID NO: 1283747 - RNA, 19 nt, Artificial Sequence
  Description of Artificial Sequence: Synthetic oligonucleotide
  Antisense strand to SEQ ID NO: 1283746
guugacagucaucucugca

SEQ ID NO: 1283748 - RNA, 19 nt, Artificial Sequence
  Description of Artificial Sequence: Synthetic oligonucleotide
  Sense strand starting at position 5 of SEQ ID NO: 1241585
aguucugaaugucuaaaua

SEQ ID NO: 1283749 - RNA, 19 nt, Artificial Sequence
  Description of Artificial Sequence: Synthetic oligonucleotide
  Antisense strand to SEQ ID NO: 1283748
uauuuagacauucagaacu

SEQ ID NO: 1283750 - RNA, 19 nt, Artificial Sequence
  Description of Artificial Sequence: Synthetic oligonucleotide
  Sense strand starting at position 174 of SEQ ID NO: 1241585
acggaaugccaggagucaa

SEQ ID NO: 1283751 - RNA, 19 nt, Artificial Sequence
  Description of Artificial Sequence: Synthetic oligonucleotide
  Antisense strand to SEQ ID NO: 1283750
uugacuccuggcauuccgu

SEQ ID NO: 1283752 - RNA, 19 nt, Artificial Sequence
  Description of Artificial Sequence: Synthetic oligonucleotide
  Sense strand starting at position 222 of SEQ ID NO: 1241585
auaacuagcuaugucugaa

SEQ ID NO: 1283753 - RNA, 19 nt, Artificial Sequence
  Description of Artificial Sequence: Synthetic oligonucleotide
  Antisense strand to SEQ ID NO: 1283752
uucagacauagcuaguuau

SEQ ID NO: 1283754 - RNA, 19 nt, Artificial Sequence
  Description of Artificial Sequence: Synthetic oligonucleotide
  Sense strand starting at position 225 of SEQ ID NO: 1241585
acuagcuaugucugaacaa

SEQ ID NO: 1283755 - RNA, 19 nt, Artificial Sequence
  Description of Artificial Sequence: Synthetic oligonucleotide
  Antisense strand to SEQ ID NO: 1283754
uuguucagacauagcuagu

SEQ ID NO: 1283756 - RNA, 19 nt, Artificial Sequence
  Description of Artificial Sequence: Synthetic oligonucleotide
  Sense strand starting at position 240 of SEQ ID NO: 1241585
acaaaucauccuugugagu

SEQ ID NO: 1283757 - RNA, 19 nt, Artificial Sequence
  Description of Artificial Sequence: Synthetic oligonucleotide
  Antisense strand to SEQ ID NO: 1283756
acucacaaggaugauuugu

SEQ ID NO: 1283758 - RNA, 19 nt, Artificial Sequence
  Description of Artificial Sequence: Synthetic oligonucleotide
  Sense strand starting at position 253 of SEQ ID NO: 1241585
gugaguuaugggcauaaau

SEQ ID NO: 1283759 - RNA, 19 nt, Artificial Sequence
  Description of Artificial Sequence: Synthetic oligonucleotide
  Antisense strand to SEQ ID NO: 1283758
auuuaugcccauaacucac

SEQ ID NO: 1283760 - RNA, 19 nt, Artificial Sequence
  Description of Artificial Sequence: Synthetic oligonucleotide
  Sense strand starting at position 255 of SEQ ID NO: 1241585
gaguuaugggcauaaaugc

SEQ ID NO: 1283761 - RNA, 19 nt, Artificial Sequence
  Description of Artificial Sequence: Synthetic oligonucleotide
  Antisense strand to SEQ ID NO: 1283760
gcauuuaugcccauaacuc

SEQ ID NO: 1283762 - RNA, 19 nt, Artificial Sequence
  Description of Artificial Sequence: Synthetic oligonucleotide
  Sense strand starting at position 277 of SEQ ID NO: 1241585
accugcuugccucaagaau

SEQ ID NO: 1283763 - RNA, 19 nt, Artificial Sequence
  Description of Artificial Sequence: Synthetic oligonucleotide
  Antisense strand to SEQ ID NO: 1283762
auucuugaggcaagcaggu

SEQ ID NO: 1283764 - RNA, 19 nt, Artificial Sequence
  Description of Artificial Sequence: Synthetic oligonucleotide
  Sense strand starting at position 311 of SEQ ID NO: 1241585
acaugaaacugcuuuguca

SEQ ID NO: 1283765 - RNA, 19 nt, Artificial Sequence
  Description of Artificial Sequence: Synthetic oligonucleotide
  Antisense strand to SEQ ID NO: 1283764
ugacaaagcaguuucaugu

SEQ ID NO: 1283766 - RNA, 19 nt, Artificial Sequence
  Description of Artificial Sequence: Synthetic oligonucleotide
  Sense strand starting at position 474 of SEQ ID NO: 1241585
cacguugacagaggguuua

SEQ ID NO: 1283767 - RNA, 19 nt, Artificial Sequence
  Description of Artificial Sequence: Synthetic oligonucleotide
  Antisense strand to SEQ ID NO: 1283766
uaaacccucugucaacgug

SEQ ID NO: 1283768 - RNA, 19 nt, Artificial Sequence
  Description of Artificial Sequence: Synthetic oligonucleotide
  Sense strand starting at position 494 of SEQ ID NO: 1241585
uuguauuucuguccuccaa

SEQ ID NO: 1283769 - RNA, 19 nt, Artificial Sequence
  Description of Artificial Sequence: Synthetic oligonucleotide
  Antisense strand to SEQ ID NO: 1283768
uuggaggacagaaauacaa

SEQ ID NO: 1283770 - RNA, 19 nt, Artificial Sequence
  Description of Artificial Sequence: Synthetic oligonucleotide
  Sense strand starting at position 614 of SEQ ID NO: 1241585
uggacuguuucuuuacuaa

SEQ ID NO: 1283771 - RNA, 19 nt, Artificial Sequence
  Description of Artificial Sequence: Synthetic oligonucleotide
  Antisense strand to SEQ ID NO: 1283770
uuaguaaagaaacagucca

SEQ ID NO: 1283772 - RNA, 19 nt, Artificial Sequence
  Description of Artificial Sequence: Synthetic oligonucleotide
  Sense strand starting at position 899 of SEQ ID NO: 1241585
auugaacaguaaucuuagu

SEQ ID NO: 1283773 - RNA, 19 nt, Artificial Sequence
  Description of Artificial Sequence: Synthetic oligonucleotide
  Antisense strand to SEQ ID NO: 1283772
acuaagauuacuguucaau

SEQ ID NO: 1283774 - RNA, 19 nt, Artificial Sequence
  Description of Artificial Sequence: Synthetic oligonucleotide
  Sense strand starting at position 1029 of SEQ ID NO: 1241585
guagguggcauguauaaca

SEQ ID NO: 1283775 - RNA, 19 nt, Artificial Sequence
  Description of Artificial Sequence: Synthetic oligonucleotide
  Antisense strand to SEQ ID NO: 1283774
uguuauacaugccaccuac

SEQ ID NO: 1283776 - RNA, 19 nt, Artificial Sequence
  Description of Artificial Sequence: Synthetic oligonucleotide
  Sense strand starting at position 1093 of SEQ ID NO: 1241585
gcaauacuuguuuaagcac

SEQ ID NO: 1283777 - RNA, 19 nt, Artificial Sequence
  Description of Artificial Sequence: Synthetic oligonucleotide
  Antisense strand to SEQ ID NO: 1283776
gugcuuaaacaaguauugc

SEQ ID NO: 1283778 - RNA, 19 nt, Artificial Sequence
  Description of Artificial Sequence: Synthetic oligonucleotide
  Sense strand starting at position 1173 of SEQ ID NO: 1241585
uccgaaugauaaucacuua

SEQ ID NO: 1283779 - RNA, 19 nt, Artificial Sequence
  Description of Artificial Sequence: Synthetic oligonucleotide
  Antisense strand to SEQ ID NO: 1283778
uaagugauuaucauucgga

SEQ ID NO: 1283780 - RNA, 19 nt, Artificial Sequence
  Description of Artificial Sequence: Synthetic oligonucleotide
  Sense strand starting at position 1222 of SEQ ID NO: 1241585
uggauuguucucugacauu

SEQ ID NO: 1283781 - RNA, 19 nt, Artificial Sequence
  Description of Artificial Sequence: Synthetic oligonucleotide
  Antisense strand to SEQ ID NO: 1283780
aaugucagagaacaaucca

SEQ ID NO: 1283782 - RNA, 19 nt, Artificial Sequence
  Description of Artificial Sequence: Synthetic oligonucleotide
  Sense strand starting at position 1283 of SEQ ID NO: 1241585
auguaauuaugguccucca

SEQ ID NO: 1283783 - RNA, 19 nt, Artificial Sequence
  Description of Artificial Sequence: Synthetic oligonucleotide
  Antisense strand to SEQ ID NO: 1283782
uggaggaccauaauuacau

SEQ ID NO: 1283784 - RNA, 19 nt, Artificial Sequence
  Description of Artificial Sequence: Synthetic oligonucleotide
  Sense strand starting at position 1412 of SEQ ID NO: 1241585
gacgauauggguuauuaug

SEQ ID NO: 1283785 - RNA, 19 nt, Artificial Sequence
  Description of Artificial Sequence: Synthetic oligonucleotide
  Antisense strand to SEQ ID NO: 1283784
cauaauaacccauaucguc

SEQ ID NO: 1283786 - RNA, 19 nt, Artificial Sequence
  Description of Artificial Sequence: Synthetic oligonucleotide
  Sense strand starting at position 1414 of SEQ ID NO: 1241585
cgauauggguuauuaugac

SEQ ID NO: 1283787 - RNA, 19 nt, Artificial Sequence
  Description of Artificial Sequence: Synthetic oligonucleotide
  Antisense strand to SEQ ID NO: 1283786
gucauaauaacccauaucg

SEQ ID NO: 1283788 - RNA, 19 nt, Artificial Sequence
  Description of Artificial Sequence: Synthetic oligonucleotide
  Sense strand starting at position 1466 of SEQ ID NO: 1241585
gucuuucgacuccaagaac

SEQ ID NO: 1283789 - RNA, 19 nt, Artificial Sequence
  Description of Artificial Sequence: Synthetic oligonucleotide
  Antisense strand to SEQ ID NO: 1283788
guucuuggagucgaaagac

SEQ ID NO: 1283790 - RNA, 19 nt, Artificial Sequence
  Description of Artificial Sequence: Synthetic oligonucleotide
  Sense strand starting at position 1509 of SEQ ID NO: 1241585
cuuguuugagcuuacuuga

SEQ ID NO: 1283791 - RNA, 19 nt, Artificial Sequence
  Description of Artificial Sequence: Synthetic oligonucleotide
  Antisense strand to SEQ ID NO: 1283790
ucaaguaagcucaaacaag

SEQ ID NO: 1283792 - RNA, 19 nt, Artificial Sequence
  Description of Artificial Sequence: Synthetic oligonucleotide
  Sense strand starting at position 1514 of SEQ ID NO: 1241585
uugagcuuacuugacucaa

SEQ ID NO: 1283793 - RNA, 19 nt, Artificial Sequence
  Description of Artificial Sequence: Synthetic oligonucleotide
  Antisense strand to SEQ ID NO: 1283792
uugagucaaguaagcucaa

SEQ ID NO: 1283794 - RNA, 19 nt, Artificial Sequence
  Description of Artificial Sequence: Synthetic oligonucleotide
  Sense strand starting at position 1798 of SEQ ID NO: 1241585
cggcgaaaggcuucugcuu

SEQ ID NO: 1283795 - RNA, 19 nt, Artificial Sequence
  Description of Artificial Sequence: Synthetic oligonucleotide
  Antisense strand to SEQ ID NO: 1283794
aagcagaagccuuucgccg

SEQ ID NO: 1283796 - RNA, 19 nt, Artificial Sequence
  Description of Artificial Sequence: Synthetic oligonucleotide
  Sense strand starting at position 2289 of SEQ ID NO: 1241585
cugagauggaagugaagua

SEQ ID NO: 1283797 - RNA, 19 nt, Artificial Sequence
  Description of Artificial Sequence: Synthetic oligonucleotide
  Antisense strand to SEQ ID NO: 1283796
uacuucacuuccaucucag

SEQ ID NO: 1283798 - RNA, 19 nt, Artificial Sequence
  Description of Artificial Sequence: Synthetic oligonucleotide
  Sense strand starting at position 2301 of SEQ ID NO: 1241585
ugaaguaggaaauguguaa

SEQ ID NO: 1283799 - RNA, 19 nt, Artificial Sequence
  Description of Artificial Sequence: Synthetic oligonucleotide
  Antisense strand to SEQ ID NO: 1283798
uuacacauuuccuacuuca

SEQ ID NO: 1283800 - RNA, 19 nt, Artificial Sequence
  Description of Artificial Sequence: Synthetic oligonucleotide
  Sense strand starting at position 2356 of SEQ ID NO: 1241585
acagauggccuuuguuaua

SEQ ID NO: 1283801 - RNA, 19 nt, Artificial Sequence
  Description of Artificial Sequence: Synthetic oligonucleotide
  Antisense strand to SEQ ID NO: 1283800
uauaacaaaggccaucugu

SEQ ID NO: 1283802 - RNA, 19 nt, Artificial Sequence
  Description of Artificial Sequence: Synthetic oligonucleotide
  Sense strand starting at position 2433 of SEQ ID NO: 1241585
ucagucagugaaugaggua

SEQ ID NO: 1283803 - RNA, 19 nt, Artificial Sequence
  Description of Artificial Sequence: Synthetic oligonucleotide
  Antisense strand to SEQ ID NO: 1283802
uaccucauucacugacuga

SEQ ID NO: 1283804 - RNA, 19 nt, Artificial Sequence
  Description of Artificial Sequence: Synthetic oligonucleotide
  Sense strand starting at position 2434 of SEQ ID NO: 1241585
cagucagugaaugagguau

SEQ ID NO: 1283805 - RNA, 19 nt, Artificial Sequence
  Description of Artificial Sequence: Synthetic oligonucleotide
  Antisense strand to SEQ ID NO: 1283804
auaccucauucacugacug

SEQ ID NO: 1283806 - RNA, 19 nt, Artificial Sequence
  Description of Artificial Sequence: Synthetic oligonucleotide
  Sense strand starting at position 2445 of SEQ ID NO: 1241585
ugagguauuaaagguagau

SEQ ID NO: 1283807 - RNA, 19 nt, Artificial Sequence
  Description of Artificial Sequence: Synthetic oligonucleotide
  Antisense strand to SEQ ID NO: 1283806
aucuaccuuuaauaccuca

SEQ ID NO: 1283808 - RNA, 19 nt, Artificial Sequence
  Description of Artificial Sequence: Synthetic oligonucleotide
  Sense strand starting at position 2454 of SEQ ID NO: 1241585
aaagguagaucugcuuauc

SEQ ID NO: 1283809 - RNA, 19 nt, Artificial Sequence
  Description of Artificial Sequence: Synthetic oligonucleotide
  Antisense strand to SEQ ID NO: 1283808
gauaagcagaucuaccuuu

SEQ ID NO: 1283810 - RNA, 19 nt, Artificial Sequence
  Description of Artificial Sequence: Synthetic oligonucleotide
  Sense strand starting at position 2457 of SEQ ID NO: 1241585
gguagaucugcuuaucauu

SEQ ID NO: 1283811 - RNA, 19 nt, Artificial Sequence
  Description of Artificial Sequence: Synthetic oligonucleotide
  Antisense strand to SEQ ID NO: 1283810
aaugauaagcagaucuacc

SEQ ID NO: 1283812 - RNA, 19 nt, Artificial Sequence
  Description of Artificial Sequence: Synthetic oligonucleotide
  Sense strand starting at position 2467 of SEQ ID NO: 1241585
cuuaucauuugauaggaaa

SEQ ID NO: 1283813 - RNA, 19 nt, Artificial Sequence
  Description of Artificial Sequence: Synthetic oligonucleotide
  Antisense strand to SEQ ID NO: 1283812
uuuccuaucaaaugauaag

SEQ ID NO: 1283814 - RNA, 19 nt, Artificial Sequence
  Description of Artificial Sequence: Synthetic oligonucleotide
  Sense strand starting at position 2784 of SEQ ID NO: 1241585
aacuuugaagucugauaga

SEQ ID NO: 1283815 - RNA, 19 nt, Artificial Sequence
  Description of Artificial Sequence: Synthetic oligonucleotide
  Antisense strand to SEQ ID NO: 1283814
ucuaucagacuucaaaguu

SEQ ID NO: 1283816 - RNA, 19 nt, Artificial Sequence
  Description of Artificial Sequence: Synthetic oligonucleotide
  Sense strand starting at position 3534 of SEQ ID NO: 1241585
auaggauaaugugccuaaa

SEQ ID NO: 1283817 - RNA, 19 nt, Artificial Sequence
  Description of Artificial Sequence: Synthetic oligonucleotide
  Antisense strand to SEQ ID NO: 1283816
uuuaggcacauuauccuau

SEQ ID NO: 1283818 - RNA, 19 nt, Artificial Sequence
  Description of Artificial Sequence: Synthetic oligonucleotide
  Sense strand starting at position 3536 of SEQ ID NO: 1241585
aggauaaugugccuaaaca

SEQ ID NO: 1283819 - RNA, 19 nt, Artificial Sequence
  Description of Artificial Sequence: Synthetic oligonucleotide
  Antisense strand to SEQ ID NO: 1283818
uguuuaggcacauuauccu

SEQ ID NO: 1283820 - RNA, 19 nt, Artificial Sequence
  Description of Artificial Sequence: Synthetic oligonucleotide
  Sense strand starting at position 3537 of SEQ ID NO: 1241585
ggauaaugugccuaaacac

SEQ ID NO: 1283821 - RNA, 19 nt, Artificial Sequence
  Description of Artificial Sequence: Synthetic oligonucleotide
  Antisense strand to SEQ ID NO: 1283820
guguuuaggcacauuaucc

SEQ ID NO: 1283822 - RNA, 19 nt, Artificial Sequence
  Description of Artificial Sequence: Synthetic oligonucleotide
  Sense strand starting at position 3750 of SEQ ID NO: 1241585
uuauccaauggccaugaau

SEQ ID NO: 1283823 - RNA, 19 nt, Artificial Sequence
  Description of Artificial Sequence: Synthetic oligonucleotide
  Antisense strand to SEQ ID NO: 1283822
auucauggccauuggauaa

SEQ ID NO: 1283824 - RNA, 19 nt, Artificial Sequence
  Description of Artificial Sequence: Synthetic oligonucleotide
  Sense strand starting at position 3752 of SEQ ID NO: 1241585
auccaauggccaugaaugu

SEQ ID NO: 1283825 - RNA, 19 nt, Artificial Sequence
  Description of Artificial Sequence: Synthetic oligonucleotide
  Antisense strand to SEQ ID NO: 1283824
acauucauggccauuggau

SEQ ID NO: 1283826 - RNA, 19 nt, Artificial Sequence
  Description of Artificial Sequence: Synthetic oligonucleotide
  Sense strand starting at position 3881 of SEQ ID NO: 1241585
auggguauugugugaauau

SEQ ID NO: 1283827 - RNA, 19 nt, Artificial Sequence
  Description of Artificial Sequence: Synthetic oligonucleotide
  Antisense strand to SEQ ID NO: 1283826
auauucacacaauacccau

SEQ ID NO: 1283828 - RNA, 19 nt, Artificial Sequence
  Description of Artificial Sequence: Synthetic oligonucleotide
  Sense strand starting at position 314 of SEQ ID NO: 1241586
ggacaaugguuugacuuga

SEQ ID NO: 1283829 - RNA, 19 nt, Artificial Sequence
  Description of Artificial Sequence: Synthetic oligonucleotide
  Antisense strand to SEQ ID NO: 1283828
ucaagucaaaccauugucc

SEQ ID NO: 1283830 - RNA, 19 nt, Artificial Sequence
  Description of Artificial Sequence: Synthetic oligonucleotide
  Sense strand starting at position 325 of SEQ ID NO: 1241586
ugacuugaagccugagagu

SEQ ID NO: 1283831 - RNA, 19 nt, Artificial Sequence
  Description of Artificial Sequence: Synthetic oligonucleotide
  Antisense strand to SEQ ID NO: 1283830
acucucaggcuucaaguca

SEQ ID NO: 1283832 - RNA, 19 nt, Artificial Sequence
  Description of Artificial Sequence: Synthetic oligonucleotide
  Sense strand starting at position 328 of SEQ ID NO: 1241586
cuugaagccugagaguuua

SEQ ID NO: 1283833 - RNA, 19 nt, Artificial Sequence
  Description of Artificial Sequence: Synthetic oligonucleotide
  Antisense strand to SEQ ID NO: 1283832
uaaacucucaggcuucaag

SEQ ID NO: 1283834 - RNA, 19 nt, Artificial Sequence
  Description of Artificial Sequence: Synthetic oligonucleotide
  Sense strand starting at position 470 of SEQ ID NO: 1241586
agcaaugggucagucacau

SEQ ID NO: 1283835 - RNA, 19 nt, Artificial Sequence
  Description of Artificial Sequence: Synthetic oligonucleotide
  Antisense strand to SEQ ID NO: 1283834
augugacugacccauugcu

SEQ ID NO: 1283836 - RNA, 19 nt, Artificial Sequence
  Description of Artificial Sequence: Synthetic oligonucleotide
  Sense strand starting at position 474 of SEQ ID NO: 1241586
augggucagucacaugauu

SEQ ID NO: 1283837 - RNA, 19 nt, Artificial Sequence
  Description of Artificial Sequence: Synthetic oligonucleotide
  Antisense strand to SEQ ID NO: 1283836
aaucaugugacugacccau

SEQ ID NO: 1283838 - RNA, 19 nt, Artificial Sequence
  Description of Artificial Sequence: Synthetic oligonucleotide
  Sense strand starting at position 476 of SEQ ID NO: 1241586
gggucagucacaugauuga

SEQ ID NO: 1283839 - RNA, 19 nt, Artificial Sequence
  Description of Artificial Sequence: Synthetic oligonucleotide
  Antisense strand to SEQ ID NO: 1283838
ucaaucaugugacugaccc

SEQ ID NO: 1283840 - RNA, 19 nt, Artificial Sequence
  Description of Artificial Sequence: Synthetic oligonucleotide
  Sense strand starting at position 486 of SEQ ID NO: 1241586
caugauugagccuguguga

SEQ ID NO: 1283841 - RNA, 19 nt, Artificial Sequence
  Description of Artificial Sequence: Synthetic oligonucleotide
  Antisense strand to SEQ ID NO: 1283840
ucacacaggcucaaucaug

SEQ ID NO: 1283842 - RNA, 19 nt, Artificial Sequence
  Description of Artificial Sequence: Synthetic oligonucleotide
  Sense strand starting at position 630 of SEQ ID NO: 1241586
ugucuuccuucugcagaaa

SEQ ID NO: 1283843 - RNA, 19 nt, Artificial Sequence
  Description of Artificial Sequence: Synthetic oligonucleotide
  Antisense strand to SEQ ID NO: 1283842
uuucugcagaaggaagaca

SEQ ID NO: 1283844 - RNA, 19 nt, Artificial Sequence
  Description of Artificial Sequence: Synthetic oligonucleotide
  Sense strand starting at position 658 of SEQ ID NO: 1241586
ucaugagagucaggacuaa

SEQ ID NO: 1283845 - RNA, 19 nt, Artificial Sequence
  Description of Artificial Sequence: Synthetic oligonucleotide
  Antisense strand to SEQ ID NO: 1283844
uuaguccugacucucauga

SEQ ID NO: 1283846 - RNA, 19 nt, Artificial Sequence
  Description of Artificial Sequence: Synthetic oligonucleotide
  Sense strand starting at position 871 of SEQ ID NO: 1241586
gggaguuccucucaccuca

SEQ ID NO: 1283847 - RNA, 19 nt, Artificial Sequence
  Description of Artificial Sequence: Synthetic oligonucleotide
  Antisense strand to SEQ ID NO: 1283846
ugaggugagaggaacuccc

SEQ ID NO: 1283848 - RNA, 19 nt, Artificial Sequence
  Description of Artificial Sequence: Synthetic oligonucleotide
  Sense strand starting at position 1054 of SEQ ID NO: 1241586
gcaucaaaugcccguccua

SEQ ID NO: 1283849 - RNA, 19 nt, Artificial Sequence
  Description of Artificial Sequence: Synthetic oligonucleotide
  Antisense strand to SEQ ID NO: 1283848
uaggacgggcauuugaugc

SEQ ID NO: 1283850 - RNA, 19 nt, Artificial Sequence
  Description of Artificial Sequence: Synthetic oligonucleotide
  Sense strand starting at position 1134 of SEQ ID NO: 1241586
ugucuuaccuugguacaga

SEQ ID NO: 1283851 - RNA, 19 nt, Artificial Sequence
  Description of Artificial Sequence: Synthetic oligonucleotide
  Antisense strand to SEQ ID NO: 1283850
ucuguaccaagguaagaca

SEQ ID NO: 1283852 - RNA, 19 nt, Artificial Sequence
  Description of Artificial Sequence: Synthetic oligonucleotide
  Sense strand starting at position 1231 of SEQ ID NO: 1241586
acaguucccuuaggguuau

SEQ ID NO: 1283853 - RNA, 19 nt, Artificial Sequence
  Description of Artificial Sequence: Synthetic oligonucleotide
  Antisense strand to SEQ ID NO: 1283852
auaacccuaagggaacugu

SEQ ID NO: 1283854 - RNA, 19 nt, Artificial Sequence
  Description of Artificial Sequence: Synthetic oligonucleotide
  Sense strand starting at position 1346 of SEQ ID NO: 1241586
gaagguggaucucugcaga

SEQ ID NO: 1283855 - RNA, 19 nt, Artificial Sequence
  Description of Artificial Sequence: Synthetic oligonucleotide
  Antisense strand to SEQ ID NO: 1283854
ucugcagagauccaccuuc

SEQ ID NO: 1283856 - RNA, 19 nt, Artificial Sequence
  Description of Artificial Sequence: Synthetic oligonucleotide
  Sense strand starting at position 1444 of SEQ ID NO: 1241586
guguucacgugagaacaga

SEQ ID NO: 1283857 - RNA, 19 nt, Artificial Sequence
  Description of Artificial Sequence: Synthetic oligonucleotide
  Antisense strand to SEQ ID NO: 1283856
ucuguucucacgugaacac

SEQ ID NO: 1283858 - RNA, 19 nt, Artificial Sequence
  Description of Artificial Sequence: Synthetic oligonucleotide
  Sense strand starting at position 1496 of SEQ ID NO: 1241586
ugcugagaguccucugcaa

SEQ ID NO: 1283859 - RNA, 19 nt, Artificial Sequence
  Description of Artificial Sequence: Synthetic oligonucleotide
  Antisense strand to SEQ ID NO: 1283858
uugcagaggacucucagca

SEQ ID NO: 1283860 - RNA, 19 nt, Artificial Sequence
  Description of Artificial Sequence: Synthetic oligonucleotide
  Sense strand starting at position 1498 of SEQ ID NO: 1241586
cugagaguccucugcaagu

SEQ ID NO: 1283861 - RNA, 19 nt, Artificial Sequence
  Description of Artificial Sequence: Synthetic oligonucleotide
  Antisense strand to SEQ ID NO: 1283860
acuugcagaggacucucag

SEQ ID NO: 1283862 - RNA, 19 nt, Artificial Sequence
  Description of Artificial Sequence: Synthetic oligonucleotide
  Sense strand starting at position 1500 of SEQ ID NO: 1241586
gagaguccucugcaaguag

SEQ ID NO: 1283863 - RNA, 19 nt, Artificial Sequence
  Description of Artificial Sequence: Synthetic oligonucleotide
  Antisense strand to SEQ ID NO: 1283862
cuacuugcagaggacucuc

SEQ ID NO: 1283864 - RNA, 19 nt, Artificial Sequence
  Description of Artificial Sequence: Synthetic oligonucleotide
  Sense strand starting at position 2379 of SEQ ID NO: 1241586
uuccgucuuucccuagaga

SEQ ID NO: 1283865 - RNA, 19 nt, Artificial Sequence
  Description of Artificial Sequence: Synthetic oligonucleotide
  Antisense strand to SEQ ID NO: 1283864
ucucuagggaaagacggaa

SEQ ID NO: 1283866 - RNA, 19 nt, Artificial Sequence
  Description of Artificial Sequence: Synthetic oligonucleotide
  Sense strand starting at position 2380 of SEQ ID NO: 1241586
uccgucuuucccuagagau

SEQ ID NO: 1283867 - RNA, 19 nt, Artificial Sequence
  Description of Artificial Sequence: Synthetic oligonucleotide
  Antisense strand to SEQ ID NO: 1283866
aucucuagggaaagacgga

SEQ ID NO: 1283868 - RNA, 19 nt, Artificial Sequence
  Description of Artificial Sequence: Synthetic oligonucleotide
  Sense strand starting at position 2622 of SEQ ID NO: 1241586
ccuguugaccuuugaauga

SEQ ID NO: 1283869 - RNA, 19 nt, Artificial Sequence
  Description of Artificial Sequence: Synthetic oligonucleotide
  Antisense strand to SEQ ID NO: 1283868
ucauucaaaggucaacagg

SEQ ID NO: 1283870 - RNA, 19 nt, Artificial Sequence
  Description of Artificial Sequence: Synthetic oligonucleotide
  Sense strand starting at position 2626 of SEQ ID NO: 1241586
uugaccuuugaaugaaauc

SEQ ID NO: 1283871 - RNA, 19 nt, Artificial Sequence
  Description of Artificial Sequence: Synthetic oligonucleotide
  Antisense strand to SEQ ID NO: 1283870
gauuucauucaaaggucaa

SEQ ID NO: 1283872 - RNA, 19 nt, Artificial Sequence
  Description of Artificial Sequence: Synthetic oligonucleotide
  Sense strand starting at position 2713 of SEQ ID NO: 1241586
uugcaaauauuugggcuau

SEQ ID NO: 1283873 - RNA, 19 nt, Artificial Sequence
  Description of Artificial Sequence: Synthetic oligonucleotide
  Antisense strand to SEQ ID NO: 1283872
auagcccaaauauuugcaa

SEQ ID NO: 1283874 - RNA, 19 nt, Artificial Sequence
  Description of Artificial Sequence: Synthetic oligonucleotide
  Sense strand starting at position 2714 of SEQ ID NO: 1241586
ugcaaauauuugggcuauu

SEQ ID NO: 1283875 - RNA, 19 nt, Artificial Sequence
  Description of Artificial Sequence: Synthetic oligonucleotide
  Antisense strand to SEQ ID NO: 1283874
aauagcccaaauauuugca

SEQ ID NO: 1283876 - RNA, 19 nt, Artificial Sequence
  Description of Artificial Sequence: Synthetic oligonucleotide
  Sense strand starting at position 2726 of SEQ ID NO: 1241586
ggcuauuuguuucucagau

SEQ ID NO: 1283877 - RNA, 19 nt, Artificial Sequence
  Description of Artificial Sequence: Synthetic oligonucleotide
  Antisense strand to SEQ ID NO: 1283876
aucugagaaacaaauagcc

SEQ ID NO: 1283878 - RNA, 19 nt, Artificial Sequence
  Description of Artificial Sequence: Synthetic oligonucleotide
  Sense strand starting at position 2728 of SEQ ID NO: 1241586
cuauuuguuucucagaugu

SEQ ID NO: 1283879 - RNA, 19 nt, Artificial Sequence
  Description of Artificial Sequence: Synthetic oligonucleotide
  Antisense strand to SEQ ID NO: 1283878
acaucugagaaacaaauag

SEQ ID NO: 1283880 - RNA, 19 nt, Artificial Sequence
  Description of Artificial Sequence: Synthetic oligonucleotide
  Sense strand starting at position 2730 of SEQ ID NO: 1241586
auuuguuucucagaugugu

SEQ ID NO: 1283881 - RNA, 19 nt, Artificial Sequence
  Description of Artificial Sequence: Synthetic oligonucleotide
  Antisense strand to SEQ ID NO: 1283880
acacaucugagaaacaaau

SEQ ID NO: 1283882 - RNA, 19 nt, Artificial Sequence
  Description of Artificial Sequence: Synthetic oligonucleotide
  Sense strand starting at position 2732 of SEQ ID NO: 1241586
uuguuucucagauguguca

SEQ ID NO: 1283883 - RNA, 19 nt, Artificial Sequence
  Description of Artificial Sequence: Synthetic oligonucleotide
  Antisense strand to SEQ ID NO: 1283882
ugacacaucugagaaacaa

SEQ ID NO: 1283884 - RNA, 19 nt, Artificial Sequence
  Description of Artificial Sequence: Synthetic oligonucleotide
  Sense strand starting at position 2734 of SEQ ID NO: 1241586
guuucucagaugugucaug

SEQ ID NO: 1283885 - RNA, 19 nt, Artificial Sequence
  Description of Artificial Sequence: Synthetic oligonucleotide
  Antisense strand to SEQ ID NO: 1283884
caugacacaucugagaaac

SEQ ID NO: 1283886 - RNA, 19 nt, Artificial Sequence
  Description of Artificial Sequence: Synthetic oligonucleotide
  Sense strand starting at position 2769 of SEQ ID NO: 1241586
ggccuuugcccuugcuaau

SEQ ID NO: 1283887 - RNA, 19 nt, Artificial Sequence
  Description of Artificial Sequence: Synthetic oligonucleotide
  Antisense strand to SEQ ID NO: 1283886
auuagcaagggcaaaggcc

SEQ ID NO: 1283888 - RNA, 19 nt, Artificial Sequence
  Description of Artificial Sequence: Synthetic oligonucleotide
  Sense strand starting at position 2820 of SEQ ID NO: 1241586
uguugucauucgguucuca

SEQ ID NO: 1283889 - RNA, 19 nt, Artificial Sequence
  Description of Artificial Sequence: Synthetic oligonucleotide
  Antisense strand to SEQ ID NO: 1283888
ugagaaccgaaugacaaca

SEQ ID NO: 1283890 - RNA, 19 nt, Artificial Sequence
  Description of Artificial Sequence: Synthetic oligonucleotide
  Sense strand starting at position 2824 of SEQ ID NO: 1241586
gucauucgguucucaguuu

SEQ ID NO: 1283891 - RNA, 19 nt, Artificial Sequence
  Description of Artificial Sequence: Synthetic oligonucleotide
  Antisense strand to SEQ ID NO: 1283890
aaacugagaaccgaaugac

SEQ ID NO: 1283892 - RNA, 19 nt, Artificial Sequence
  Description of Artificial Sequence: Synthetic oligonucleotide
  Sense strand starting at position 2830 of SEQ ID NO: 1241586
cgguucucaguuuagaugu

SEQ ID NO: 1283893 - RNA, 19 nt, Artificial Sequence
  Description of Artificial Sequence: Synthetic oligonucleotide
  Antisense strand to SEQ ID NO: 1283892
acaucuaaacugagaaccg

SEQ ID NO: 1283894 - RNA, 19 nt, Artificial Sequence
  Description of Artificial Sequence: Synthetic oligonucleotide
  Sense strand starting at position 2952 of SEQ ID NO: 1241586
ugauauuagccagguguuu

SEQ ID NO: 1283895 - RNA, 19 nt, Artificial Sequence
  Description of Artificial Sequence: Synthetic oligonucleotide
  Antisense strand to SEQ ID NO: 1283894
aaacaccuggcuaauauca

SEQ ID NO: 1283896 - RNA, 19 nt, Artificial Sequence
  Description of Artificial Sequence: Synthetic oligonucleotide
  Sense strand starting at position 3423 of SEQ ID NO: 1241586
uaggaaagcugccauaugu

SEQ ID NO: 1283897 - RNA, 19 nt, Artificial Sequence
  Description of Artificial Sequence: Synthetic oligonucleotide
  Antisense strand to SEQ ID NO: 1283896
acauauggcagcuuuccua

SEQ ID NO: 1283898 - RNA, 19 nt, Artificial Sequence
  Description of Artificial Sequence: Synthetic oligonucleotide
  Sense strand starting at position 3444 of SEQ ID NO: 1241586
augaauuaguuuggugaga

SEQ ID NO: 1283899 - RNA, 19 nt, Artificial Sequence
  Description of Artificial Sequence: Synthetic oligonucleotide
  Antisense strand to SEQ ID NO: 1283898
ucucaccaaacuaauucau

SEQ ID NO: 1283900 - RNA, 19 nt, Artificial Sequence
  Description of Artificial Sequence: Synthetic oligonucleotide
  Sense strand starting at position 3445 of SEQ ID NO: 1241586
ugaauuaguuuggugagau

SEQ ID NO: 1283901 - RNA, 19 nt, Artificial Sequence
  Description of Artificial Sequence: Synthetic oligonucleotide
  Antisense strand to SEQ ID NO: 1283900
aucucaccaaacuaauuca

SEQ ID NO: 1283902 - RNA, 19 nt, Artificial Sequence
  Description of Artificial Sequence: Synthetic oligonucleotide
  Sense strand starting at position 3446 of SEQ ID NO: 1241586
gaauuaguuuggugagaua

SEQ ID NO: 1283903 - RNA, 19 nt, Artificial Sequence
  Description of Artificial Sequence: Synthetic oligonucleotide
  Antisense strand to SEQ ID NO: 1283902
uaucucaccaaacuaauuc

SEQ ID NO: 1283904 - RNA, 19 nt, Artificial Sequence
  Description of Artificial Sequence: Synthetic oligonucleotide
  Sense strand starting at position 3449 of SEQ ID NO: 1241586
uuaguuuggugagauaaca

SEQ ID NO: 1283905 - RNA, 19 nt, Artificial Sequence
  Description of Artificial Sequence: Synthetic oligonucleotide
  Antisense strand to SEQ ID NO: 1283904
uguuaucucaccaaacuaa

SEQ ID NO: 1283906 - RNA, 19 nt, Artificial Sequence
  Description of Artificial Sequence: Synthetic oligonucleotide
  Sense strand starting at position 3495 of SEQ ID NO: 1241586
auguaacuuucuccuguaa

SEQ ID NO: 1283907 - RNA, 19 nt, Artificial Sequence
  Description of Artificial Sequence: Synthetic oligonucleotide
  Antisense strand to SEQ ID NO: 1283906
uuacaggagaaaguuacau

SEQ ID NO: 1283908 - RNA, 19 nt, Artificial Sequence
  Description of Artificial Sequence: Synthetic oligonucleotide
  Sense strand starting at position 22 of SEQ ID NO: 1241587
ugagucacagaaugucuaa

SEQ ID NO: 1283909 - RNA, 19 nt, Artificial Sequence
  Description of Artificial Sequence: Synthetic oligonucleotide
  Antisense strand to SEQ ID NO: 1283908
uuagacauucugugacuca

SEQ ID NO: 1283910 - RNA, 19 nt, Artificial Sequence
  Description of Artificial Sequence: Synthetic oligonucleotide
  Sense strand starting at position 29 of SEQ ID NO: 1241587
cagaaugucuaagugacuu

SEQ ID NO: 1283911 - RNA, 19 nt, Artificial Sequence
  Description of Artificial Sequence: Synthetic oligonucleotide
  Antisense strand to SEQ ID NO: 1283910
aagucacuuagacauucug

SEQ ID NO: 1283912 - RNA, 19 nt, Artificial Sequence
  Description of Artificial Sequence: Synthetic oligonucleotide
  Sense strand starting at position 33 of SEQ ID NO: 1241587
augucuaagugacuuacuu

SEQ ID NO: 1283913 - RNA, 19 nt, Artificial Sequence
  Description of Artificial Sequence: Synthetic oligonucleotide
  Antisense strand to SEQ ID NO: 1283912
aaguaagucacuuagacau

SEQ ID NO: 1283914 - RNA, 19 nt, Artificial Sequence
  Description of Artificial Sequence: Synthetic oligonucleotide
  Sense strand starting at position 71 of SEQ ID NO: 1241587
cugauagaaucacgauuug

SEQ ID NO: 1283915 - RNA, 19 nt, Artificial Sequence
  Description of Artificial Sequence: Synthetic oligonucleotide
  Antisense strand to SEQ ID NO: 1283914
caaaucgugauucuaucag

SEQ ID NO: 1283916 - RNA, 19 nt, Artificial Sequence
  Description of Artificial Sequence: Synthetic oligonucleotide
  Sense strand starting at position 235 of SEQ ID NO: 1241587
ugugauaagagaggucuaa

SEQ ID NO: 1283917 - RNA, 19 nt, Artificial Sequence
  Description of Artificial Sequence: Synthetic oligonucleotide
  Antisense strand to SEQ ID NO: 1283916
uuagaccucucuuaucaca

SEQ ID NO: 1283918 - RNA, 19 nt, Artificial Sequence
  Description of Artificial Sequence: Synthetic oligonucleotide
  Sense strand starting at position 314 of SEQ ID NO: 1241587
ggacuaggucucuguauga

SEQ ID NO: 1283919 - RNA, 19 nt, Artificial Sequence
  Description of Artificial Sequence: Synthetic oligonucleotide
  Antisense strand to SEQ ID NO: 1283918
ucauacagagaccuagucc

SEQ ID NO: 1283920 - RNA, 19 nt, Artificial Sequence
  Description of Artificial Sequence: Synthetic oligonucleotide
  Sense strand starting at position 318 of SEQ ID NO: 1241587
uaggucucuguaugaagga

SEQ ID NO: 1283921 - RNA, 19 nt, Artificial Sequence
  Description of Artificial Sequence: Synthetic oligonucleotide
  Antisense strand to SEQ ID NO: 1283920
uccuucauacagagaccua

SEQ ID NO: 1283922 - RNA, 19 nt, Artificial Sequence
  Description of Artificial Sequence: Synthetic oligonucleotide
  Sense strand starting at position 327 of SEQ ID NO: 1241587
guaugaaggacuuguaucu

SEQ ID NO: 1283923 - RNA, 19 nt, Artificial Sequence
  Description of Artificial Sequence: Synthetic oligonucleotide
  Antisense strand to SEQ ID NO: 1283922
agauacaaguccuucauac

SEQ ID NO: 1283924 - RNA, 19 nt, Artificial Sequence
  Description of Artificial Sequence: Synthetic oligonucleotide
  Sense strand starting at position 337 of SEQ ID NO: 1241587
cuuguaucuacggaggagu

SEQ ID NO: 1283925 - RNA, 19 nt, Artificial Sequence
  Description of Artificial Sequence: Synthetic oligonucleotide
  Antisense strand to SEQ ID NO: 1283924
acuccuccguagauacaag

SEQ ID NO: 1283926 - RNA, 19 nt, Artificial Sequence
  Description of Artificial Sequence: Synthetic oligonucleotide
  Sense strand starting at position 417 of SEQ ID NO: 1241587
ugcauuucucuuugagagu

SEQ ID NO: 1283927 - RNA, 19 nt, Artificial Sequence
  Description of Artificial Sequence: Synthetic oligonucleotide
  Antisense strand to SEQ ID NO: 1283926
acucucaaagagaaaugca

SEQ ID NO: 1283928 - RNA, 19 nt, Artificial Sequence
  Description of Artificial Sequence: Synthetic oligonucleotide
  Sense strand starting at position 499 of SEQ ID NO: 1241587
acacuuauggacugugaga

SEQ ID NO: 1283929 - RNA, 19 nt, Artificial Sequence
  Description of Artificial Sequence: Synthetic oligonucleotide
  Antisense strand to SEQ ID NO: 1283928
ucucacaguccauaagugu

SEQ ID NO: 1283930 - RNA, 19 nt, Artificial Sequence
  Description of Artificial Sequence: Synthetic oligonucleotide
  Sense strand starting at position 685 of SEQ ID NO: 1241587
cuucuccauuggguuuaua

SEQ ID NO: 1283931 - RNA, 19 nt, Artificial Sequence
  Description of Artificial Sequence: Synthetic oligonucleotide
  Antisense strand to SEQ ID NO: 1283930
uauaaacccaauggagaag

SEQ ID NO: 1283932 - RNA, 19 nt, Artificial Sequence
  Description of Artificial Sequence: Synthetic oligonucleotide
  Sense strand starting at position 693 of SEQ ID NO: 1241587
uuggguuuauaguccaagu

SEQ ID NO: 1283933 - RNA, 19 nt, Artificial Sequence
  Description of Artificial Sequence: Synthetic oligonucleotide
  Antisense strand to SEQ ID NO: 1283932
acuuggacuauaaacccaa

SEQ ID NO: 1283934 - RNA, 19 nt, Artificial Sequence
  Description of Artificial Sequence: Synthetic oligonucleotide
  Sense strand starting at position 987 of SEQ ID NO: 1241587
uccaguuguuagcuagaga

SEQ ID NO: 1283935 - RNA, 19 nt, Artificial Sequence
  Description of Artificial Sequence: Synthetic oligonucleotide
  Antisense strand to SEQ ID NO: 1283934
ucucuagcuaacaacugga

SEQ ID NO: 1283936 - RNA, 19 nt, Artificial Sequence
  Description of Artificial Sequence: Synthetic oligonucleotide
  Sense strand starting at position 988 of SEQ ID NO: 1241587
ccaguuguuagcuagagag

SEQ ID NO: 1283937 - RNA, 19 nt, Artificial Sequence
  Description of Artificial Sequence: Synthetic oligonucleotide
  Antisense strand to SEQ ID NO: 1283936
cucucuagcuaacaacugg

SEQ ID NO: 1283938 - RNA, 19 nt, Artificial Sequence
  Description of Artificial Sequence: Synthetic oligonucleotide
  Sense strand starting at position 1160 of SEQ ID NO: 1241587
gaauaugcucaaugagaug

SEQ ID NO: 1283939 - RNA, 19 nt, Artificial Sequence
  Description of Artificial Sequence: Synthetic oligonucleotide
  Antisense strand to SEQ ID NO: 1283938
caucucauugagcauauuc

SEQ ID NO: 1283940 - RNA, 19 nt, Artificial Sequence
  Description of Artificial Sequence: Synthetic oligonucleotide
  Sense strand starting at position 1165 of SEQ ID NO: 1241587
ugcucaaugagaugucuga

SEQ ID NO: 1283941 - RNA, 19 nt, Artificial Sequence
  Description of Artificial Sequence: Synthetic oligonucleotide
  Antisense strand to SEQ ID NO: 1283940
ucagacaucucauugagca

SEQ ID NO: 1283942 - RNA, 19 nt, Artificial Sequence
  Description of Artificial Sequence: Synthetic oligonucleotide
  Sense strand starting at position 1217 of SEQ ID NO: 1241587
ggguccaagacuugcaaau

SEQ ID NO: 1283943 - RNA, 19 nt, Artificial Sequence
  Description of Artificial Sequence: Synthetic oligonucleotide
  Antisense strand to SEQ ID NO: 1283942
auuugcaagucuuggaccc

SEQ ID NO: 1283944 - RNA, 19 nt, Artificial Sequence
  Description of Artificial Sequence: Synthetic oligonucleotide
  Sense strand starting at position 1293 of SEQ ID NO: 1241587
gaagguuaggacugugaua

SEQ ID NO: 1283945 - RNA, 19 nt, Artificial Sequence
  Description of Artificial Sequence: Synthetic oligonucleotide
  Antisense strand to SEQ ID NO: 1283944
uaucacaguccuaaccuuc

SEQ ID NO: 1283946 - RNA, 19 nt, Artificial Sequence
  Description of Artificial Sequence: Synthetic oligonucleotide
  Sense strand starting at position 1295 of SEQ ID NO: 1241587
agguuaggacugugauauu

SEQ ID NO: 1283947 - RNA, 19 nt, Artificial Sequence
  Description of Artificial Sequence: Synthetic oligonucleotide
  Antisense strand to SEQ ID NO: 1283946
aauaucacaguccuaaccu

SEQ ID NO: 1283948 - RNA, 19 nt, Artificial Sequence
  Description of Artificial Sequence: Synthetic oligonucleotide
  Sense strand starting at position 1307 of SEQ ID NO: 1241587
ugauauuccugcuuuggaa

SEQ ID NO: 1283949 - RNA, 19 nt, Artificial Sequence
  Description of Artificial Sequence: Synthetic oligonucleotide
  Antisense strand to SEQ ID NO: 1283948
uuccaaagcaggaauauca

SEQ ID NO: 1283950 - RNA, 19 nt, Artificial Sequence
  Description of Artificial Sequence: Synthetic oligonucleotide
  Sense strand starting at position 1398 of SEQ ID NO: 1241587
gauuaaagguagcuaucaa

SEQ ID NO: 1283951 - RNA, 19 nt, Artificial Sequence
  Description of Artificial Sequence: Synthetic oligonucleotide
  Antisense strand to SEQ ID NO: 1283950
uugauagcuaccuuuaauc

SEQ ID NO: 1283952 - RNA, 19 nt, Artificial Sequence
  Description of Artificial Sequence: Synthetic oligonucleotide
  Sense strand starting at position 1441 of SEQ ID NO: 1241587
aggcuugguaagggaagua

SEQ ID NO: 1283953 - RNA, 19 nt, Artificial Sequence
  Description of Artificial Sequence: Synthetic oligonucleotide
  Antisense strand to SEQ ID NO: 1283952
uacuucccuuaccaagccu

SEQ ID NO: 1283954 - RNA, 19 nt, Artificial Sequence
  Description of Artificial Sequence: Synthetic oligonucleotide
  Sense strand starting at position 1499 of SEQ ID NO: 1241587
ggcuguuauccucaaguau

SEQ ID NO: 1283955 - RNA, 19 nt, Artificial Sequence
  Description of Artificial Sequence: Synthetic oligonucleotide
  Antisense strand to SEQ ID NO: 1283954
auacuugaggauaacagcc

SEQ ID NO: 1283956 - RNA, 19 nt, Artificial Sequence
  Description of Artificial Sequence: Synthetic oligonucleotide
  Sense strand starting at position 1511 of SEQ ID NO: 1241587
caaguauugguccaagauu

SEQ ID NO: 1283957 - RNA, 19 nt, Artificial Sequence
  Description of Artificial Sequence: Synthetic oligonucleotide
  Antisense strand to SEQ ID NO: 1283956
aaucuuggaccaauacuug

SEQ ID NO: 1283958 - RNA, 19 nt, Artificial Sequence
  Description of Artificial Sequence: Synthetic oligonucleotide
  Sense strand starting at position 1531 of SEQ ID NO: 1241587
ugggucaaaucgcucaaau

SEQ ID NO: 1283959 - RNA, 19 nt, Artificial Sequence
  Description of Artificial Sequence: Synthetic oligonucleotide
  Antisense strand to SEQ ID NO: 1283958
auuugagcgauuugaccca

SEQ ID NO: 1283960 - RNA, 19 nt, Artificial Sequence
  Description of Artificial Sequence: Synthetic oligonucleotide
  Sense strand starting at position 1541 of SEQ ID NO: 1241587
cgcucaaauccagagacuu

SEQ ID NO: 1283961 - RNA, 19 nt, Artificial Sequence
  Description of Artificial Sequence: Synthetic oligonucleotide
  Antisense strand to SEQ ID NO: 1283960
aagucucuggauuugagcg

SEQ ID NO: 1283962 - RNA, 19 nt, Artificial Sequence
  Description of Artificial Sequence: Synthetic oligonucleotide
  Sense strand starting at position 1626 of SEQ ID NO: 1241587
aagggucuggguugucaaa

SEQ ID NO: 1283963 - RNA, 19 nt, Artificial Sequence
  Description of Artificial Sequence: Synthetic oligonucleotide
  Antisense strand to SEQ ID NO: 1283962
uuugacaacccagacccuu

SEQ ID NO: 1283964 - RNA, 19 nt, Artificial Sequence
  Description of Artificial Sequence: Synthetic oligonucleotide
  Sense strand starting at position 1936 of SEQ ID NO: 1241587
gcugcuucagucgcuagau

SEQ ID NO: 1283965 - RNA, 19 nt, Artificial Sequence
  Description of Artificial Sequence: Synthetic oligonucleotide
  Antisense strand to SEQ ID NO: 1283964
aucuagcgacugaagcagc

SEQ ID NO: 1283966 - RNA, 19 nt, Artificial Sequence
  Description of Artificial Sequence: Synthetic oligonucleotide
  Sense strand starting at position 2102 of SEQ ID NO: 1241587
gccaguugccacuaggaga

SEQ ID NO: 1283967 - RNA, 19 nt, Artificial Sequence
  Description of Artificial Sequence: Synthetic oligonucleotide
  Antisense strand to SEQ ID NO: 1283966
ucuccuaguggcaacuggc

SEQ ID NO: 1283968 - RNA, 19 nt, Artificial Sequence
  Description of Artificial Sequence: Synthetic oligonucleotide
  Sense strand starting at position 2262 of SEQ ID NO: 1241587
guaagagaggugggaguau

SEQ ID NO: 1283969 - RNA, 19 nt, Artificial Sequence
  Description of Artificial Sequence: Synthetic oligonucleotide
  Antisense strand to SEQ ID NO: 1283968
auacucccaccucucuuac

SEQ ID NO: 1283970 - RNA, 19 nt, Artificial Sequence
  Description of Artificial Sequence: Synthetic oligonucleotide
  Sense strand starting at position 2530 of SEQ ID NO: 1241587
ggugggacuuccucgguga

SEQ ID NO: 1283971 - RNA, 19 nt, Artificial Sequence
  Description of Artificial Sequence: Synthetic oligonucleotide
  Antisense strand to SEQ ID NO: 1283970
ucaccgaggaagucccacc

SEQ ID NO: 1283972 - RNA, 19 nt, Artificial Sequence
  Description of Artificial Sequence: Synthetic oligonucleotide
  Sense strand starting at position 2667 of SEQ ID NO: 1241587
gagcgcuugacugagggaa

SEQ ID NO: 1283973 - RNA, 19 nt, Artificial Sequence
  Description of Artificial Sequence: Synthetic oligonucleotide
  Antisense strand to SEQ ID NO: 1283972
uucccucagucaagcgcuc

SEQ ID NO: 1283974 - RNA, 19 nt, Artificial Sequence
  Description of Artificial Sequence: Synthetic oligonucleotide
  Sense strand starting at position 2715 of SEQ ID NO: 1241587
ggagccauuugccuucuca

SEQ ID NO: 1283975 - RNA, 19 nt, Artificial Sequence
  Description of Artificial Sequence: Synthetic oligonucleotide
  Antisense strand to SEQ ID NO: 1283974
ugagaaggcaaauggcucc

SEQ ID NO: 1283976 - RNA, 19 nt, Artificial Sequence
  Description of Artificial Sequence: Synthetic oligonucleotide
  Sense strand starting at position 3780 of SEQ ID NO: 1241587
ucuagucuugauggacuua

SEQ ID NO: 1283977 - RNA, 19 nt, Artificial Sequence
  Description of Artificial Sequence: Synthetic oligonucleotide
  Antisense strand to SEQ ID NO: 1283976
uaaguccaucaagacuaga

SEQ ID NO: 1283978 - RNA, 19 nt, Artificial Sequence
  Description of Artificial Sequence: Synthetic oligonucleotide
  Sense strand starting at position 3884 of SEQ ID NO: 1241587
gggagcuccggguacugau

SEQ ID NO: 1283979 - RNA, 19 nt, Artificial Sequence
  Description of Artificial Sequence: Synthetic oligonucleotide
  Antisense strand to SEQ ID NO: 1283978
aucaguacccggagcuccc

SEQ ID NO: 1283980 - RNA, 19 nt, Artificial Sequence
  Description of Artificial Sequence: Synthetic oligonucleotide
  Sense strand starting at position 3905 of SEQ ID NO: 1241587
uccuucugugaauguuaag

SEQ ID NO: 1283981 - RNA, 19 nt, Artificial Sequence
  Description of Artificial Sequence: Synthetic oligonucleotide
  Antisense strand to SEQ ID NO: 1283980
cuuaacauucacagaagga

SEQ ID NO: 1283982 - RNA, 19 nt, Artificial Sequence
  Description of Artificial Sequence: Synthetic oligonucleotide
  Sense strand starting at position 3937 of SEQ ID NO: 1241587
gagggagggcuuuguucua

SEQ ID NO: 1283983 - RNA, 19 nt, Artificial Sequence
  Description of Artificial Sequence: Synthetic oligonucleotide
  Antisense strand to SEQ ID NO: 1283982
uagaacaaagcccucccuc

SEQ ID NO: 1283984 - RNA, 19 nt, Artificial Sequence
  Description of Artificial Sequence: Synthetic oligonucleotide
  Sense strand starting at position 3978 of SEQ ID NO: 1241587
uuaucuguauuauugcaga

SEQ ID NO: 1283985 - RNA, 19 nt, Artificial Sequence
  Description of Artificial Sequence: Synthetic oligonucleotide
  Antisense strand to SEQ ID NO: 1283984
ucugcaauaauacagauaa

SEQ ID NO: 1283986 - RNA, 19 nt, Artificial Sequence
  Description of Artificial Sequence: Synthetic oligonucleotide
  Sense strand starting at position 3983 of SEQ ID NO: 1241587
uguauuauugcagaauacu

SEQ ID NO: 1283987 - RNA, 19 nt, Artificial Sequence
  Description of Artificial Sequence: Synthetic oligonucleotide
  Antisense strand to SEQ ID NO: 1283986
aguauucugcaauaauaca

SEQ ID NO: 1283988 - RNA, 19 nt, Artificial Sequence
  Description of Artificial Sequence: Synthetic oligonucleotide
  Sense strand starting at position 97 of SEQ ID NO: 1241588
acagaagucucaggauuuc

SEQ ID NO: 1283989 - RNA, 19 nt, Artificial Sequence
  Description of Artificial Sequence: Synthetic oligonucleotide
  Antisense strand to SEQ ID NO: 1283988
gaaauccugagacuucugu

SEQ ID NO: 1283990 - RNA, 19 nt, Artificial Sequence
  Description of Artificial Sequence: Synthetic oligonucleotide
  Sense strand starting at position 123 of SEQ ID NO: 1241588
ugggauuggcaauggaauu

SEQ ID NO: 1283991 - RNA, 19 nt, Artificial Sequence
  Description of Artificial Sequence: Synthetic oligonucleotide
  Antisense strand to SEQ ID NO: 1283990
aauuccauugccaauccca

SEQ ID NO: 1283992 - RNA, 19 nt, Artificial Sequence
  Description of Artificial Sequence: Synthetic oligonucleotide
  Sense strand starting at position 581 of SEQ ID NO: 1241588
gggagaagaucgucccaga

SEQ ID NO: 1283993 - RNA, 19 nt, Artificial Sequence
  Description of Artificial Sequence: Synthetic oligonucleotide
  Antisense strand to SEQ ID NO: 1283992
ucugggacgaucuucuccc

SEQ ID NO: 1283994 - RNA, 19 nt, Artificial Sequence
  Description of Artificial Sequence: Synthetic oligonucleotide
  Sense strand starting at position 614 of SEQ ID NO: 1241588
uucugauaccacugaaguc

SEQ ID NO: 1283995 - RNA, 19 nt, Artificial Sequence
  Description of Artificial Sequence: Synthetic oligonucleotide
  Antisense strand to SEQ ID NO: 1283994
gacuucagugguaucagaa

SEQ ID NO: 1283996 - RNA, 19 nt, Artificial Sequence
  Description of Artificial Sequence: Synthetic oligonucleotide
  Sense strand starting at position 628 of SEQ ID NO: 1241588
aagucaugagcaggucuaa

SEQ ID NO: 1283997 - RNA, 19 nt, Artificial Sequence
  Description of Artificial Sequence: Synthetic oligonucleotide
  Antisense strand to SEQ ID NO: 1283996
uuagaccugcucaugacuu

SEQ ID NO: 1283998 - RNA, 19 nt, Artificial Sequence
  Description of Artificial Sequence: Synthetic oligonucleotide
  Sense strand starting at position 686 of SEQ ID NO: 1241588
uccuguugccaaggagaaa

SEQ ID NO: 1283999 - RNA, 19 nt, Artificial Sequence
  Description of Artificial Sequence: Synthetic oligonucleotide
  Antisense strand to SEQ ID NO: 1283998
uuucuccuuggcaacagga

SEQ ID NO: 1284000 - RNA, 19 nt, Artificial Sequence
  Description of Artificial Sequence: Synthetic oligonucleotide
  Sense strand starting at position 866 of SEQ ID NO: 1241588
uccgcaaacugaguuauau

SEQ ID NO: 1284001 - RNA, 19 nt, Artificial Sequence
  Description of Artificial Sequence: Synthetic oligonucleotide
  Antisense strand to SEQ ID NO: 1284000
auauaacucaguuugcgga

SEQ ID NO: 1284002 - RNA, 19 nt, Artificial Sequence
  Description of Artificial Sequence: Synthetic oligonucleotide
  Sense strand starting at position 2182 of SEQ ID NO: 1241588
cugcguucucaguagagac

SEQ ID NO: 1284003 - RNA, 19 nt, Artificial Sequence
  Description of Artificial Sequence: Synthetic oligonucleotide
  Antisense strand to SEQ ID NO: 1284002
gucucuacugagaacgcag

SEQ ID NO: 1284004 - RNA, 19 nt, Artificial Sequence
  Description of Artificial Sequence: Synthetic oligonucleotide
  Sense strand starting at position 2364 of SEQ ID NO: 1241588
uggccaagaacucgaaaga

SEQ ID NO: 1284005 - RNA, 19 nt, Artificial Sequence
  Description of Artificial Sequence: Synthetic oligonucleotide
  Antisense strand to SEQ ID NO: 1284004
ucuuucgaguucuuggcca

SEQ ID NO: 1284006 - RNA, 19 nt, Artificial Sequence
  Description of Artificial Sequence: Synthetic oligonucleotide
  Sense strand starting at position 2413 of SEQ ID NO: 1241588
ucuaccuaguugucuugaa

SEQ ID NO: 1284007 - RNA, 19 nt, Artificial Sequence
  Description of Artificial Sequence: Synthetic oligonucleotide
  Antisense strand to SEQ ID NO: 1284006
uucaagacaacuagguaga

SEQ ID NO: 1284008 - RNA, 19 nt, Artificial Sequence
  Description of Artificial Sequence: Synthetic oligonucleotide
  Sense strand starting at position 2414 of SEQ ID NO: 1241588
cuaccuaguugucuugaau

SEQ ID NO: 1284009 - RNA, 19 nt, Artificial Sequence
  Description of Artificial Sequence: Synthetic oligonucleotide
  Antisense strand to SEQ ID NO: 1284008
auucaagacaacuagguag

SEQ ID NO: 1284010 - RNA, 19 nt, Artificial Sequence
  Description of Artificial Sequence: Synthetic oligonucleotide
  Sense strand starting at position 2417 of SEQ ID NO: 1241588
ccuaguugucuugaauuag

SEQ ID NO: 1284011 - RNA, 19 nt, Artificial Sequence
  Description of Artificial Sequence: Synthetic oligonucleotide
  Antisense strand to SEQ ID NO: 1284010
cuaauucaagacaacuagg

SEQ ID NO: 1284012 - RNA, 19 nt, Artificial Sequence
  Description of Artificial Sequence: Synthetic oligonucleotide
  Sense strand starting at position 2428 of SEQ ID NO: 1241588
ugaauuagcuagucaagga

SEQ ID NO: 1284013 - RNA, 19 nt, Artificial Sequence
  Description of Artificial Sequence: Synthetic oligonucleotide
  Antisense strand to SEQ ID NO: 1284012
uccuugacuagcuaauuca

SEQ ID NO: 1284014 - RNA, 19 nt, Artificial Sequence
  Description of Artificial Sequence: Synthetic oligonucleotide
  Sense strand starting at position 2530 of SEQ ID NO: 1241588
ggucaucuccauugcauag

SEQ ID NO: 1284015 - RNA, 19 nt, Artificial Sequence
  Description of Artificial Sequence: Synthetic oligonucleotide
  Antisense strand to SEQ ID NO: 1284014
cuaugcaauggagaugacc

SEQ ID NO: 1284016 - RNA, 19 nt, Artificial Sequence
  Description of Artificial Sequence: Synthetic oligonucleotide
  Sense strand starting at position 2556 of SEQ ID NO: 1241588
aacugaggccuuggaaagu

SEQ ID NO: 1284017 - RNA, 19 nt, Artificial Sequence
  Description of Artificial Sequence: Synthetic oligonucleotide
  Antisense strand to SEQ ID NO: 1284016
acuuuccaaggccucaguu

SEQ ID NO: 1284018 - RNA, 19 nt, Artificial Sequence
  Description of Artificial Sequence: Synthetic oligonucleotide
  Sense strand starting at position 2567 of SEQ ID NO: 1241588
uggaaaguuaagugaucug

SEQ ID NO: 1284019 - RNA, 19 nt, Artificial Sequence
  Description of Artificial Sequence: Synthetic oligonucleotide
  Antisense strand to SEQ ID NO: 1284018
cagaucacuuaacuuucca

SEQ ID NO: 1284020 - RNA, 19 nt, Artificial Sequence
  Description of Artificial Sequence: Synthetic oligonucleotide
  Sense strand starting at position 2681 of SEQ ID NO: 1241588
ccaagaaguuguccagauu

SEQ ID NO: 1284021 - RNA, 19 nt, Artificial Sequence
  Description of Artificial Sequence: Synthetic oligonucleotide
  Antisense strand to SEQ ID NO: 1284020
aaucuggacaacuucuugg

SEQ ID NO: 1284022 - RNA, 19 nt, Artificial Sequence
  Description of Artificial Sequence: Synthetic oligonucleotide
  Sense strand starting at position 2703 of SEQ ID NO: 1241588
gggaagugguuugugggaa

SEQ ID NO: 1284023 - RNA, 19 nt, Artificial Sequence
  Description of Artificial Sequence: Synthetic oligonucleotide
  Antisense strand to SEQ ID NO: 1284022
uucccacaaaccacuuccc

SEQ ID NO: 1284024 - RNA, 19 nt, Artificial Sequence
  Description of Artificial Sequence: Synthetic oligonucleotide
  Sense strand starting at position 2754 of SEQ ID NO: 1241588
gaaucacauugacuguaga

SEQ ID NO: 1284025 - RNA, 19 nt, Artificial Sequence
  Description of Artificial Sequence: Synthetic oligonucleotide
  Antisense strand to SEQ ID NO: 1284024
ucuacagucaaugugauuc

SEQ ID NO: 1284026 - RNA, 19 nt, Artificial Sequence
  Description of Artificial Sequence: Synthetic oligonucleotide
  Sense strand starting at position 2919 of SEQ ID NO: 1241588
gcucuucugaggcauagaa

SEQ ID NO: 1284027 - RNA, 19 nt, Artificial Sequence
  Description of Artificial Sequence: Synthetic oligonucleotide
  Antisense strand to SEQ ID NO: 1284026
uucuaugccucagaagagc

SEQ ID NO: 1284028 - RNA, 19 nt, Artificial Sequence
  Description of Artificial Sequence: Synthetic oligonucleotide
  Sense strand starting at position 3143 of SEQ ID NO: 1241588
uugacuuggcugcaucaua

SEQ ID NO: 1284029 - RNA, 19 nt, Artificial Sequence
  Description of Artificial Sequence: Synthetic oligonucleotide
  Antisense strand to SEQ ID NO: 1284028
uaugaugcagccaagucaa

SEQ ID NO: 1284030 - RNA, 19 nt, Artificial Sequence
  Description of Artificial Sequence: Synthetic oligonucleotide
  Sense strand starting at position 3229 of SEQ ID NO: 1241588
agaaauuggcuuugagugu

SEQ ID NO: 1284031 - RNA, 19 nt, Artificial Sequence
  Description of Artificial Sequence: Synthetic oligonucleotide
  Antisense strand to SEQ ID NO: 1284030
acacucaaagccaauuucu

SEQ ID NO: 1284032 - RNA, 19 nt, Artificial Sequence
  Description of Artificial Sequence: Synthetic oligonucleotide
  Sense strand starting at position 3233 of SEQ ID NO: 1241588
auuggcuuugaguguggaa

SEQ ID NO: 1284033 - RNA, 19 nt, Artificial Sequence
  Description of Artificial Sequence: Synthetic oligonucleotide
  Antisense strand to SEQ ID NO: 1284032
uuccacacucaaagccaau

SEQ ID NO: 1284034 - RNA, 19 nt, Artificial Sequence
  Description of Artificial Sequence: Synthetic oligonucleotide
  Sense strand starting at position 3245 of SEQ ID NO: 1241588
uguggaaucucagugggau

SEQ ID NO: 1284035 - RNA, 19 nt, Artificial Sequence
  Description of Artificial Sequence: Synthetic oligonucleotide
  Antisense strand to SEQ ID NO: 1284034
aucccacugagauuccaca

SEQ ID NO: 1284036 - RNA, 19 nt, Artificial Sequence
  Description of Artificial Sequence: Synthetic oligonucleotide
  Sense strand starting at position 3246 of SEQ ID NO: 1241588
guggaaucucagugggaug

SEQ ID NO: 1284037 - RNA, 19 nt, Artificial Sequence
  Description of Artificial Sequence: Synthetic oligonucleotide
  Antisense strand to SEQ ID NO: 1284036
caucccacugagauuccac

SEQ ID NO: 1284038 - RNA, 19 nt, Artificial Sequence
  Description of Artificial Sequence: Synthetic oligonucleotide
  Sense strand starting at position 3247 of SEQ ID NO: 1241588
uggaaucucagugggauga

SEQ ID NO: 1284039 - RNA, 19 nt, Artificial Sequence
  Description of Artificial Sequence: Synthetic oligonucleotide
  Antisense strand to SEQ ID NO: 1284038
ucaucccacugagauucca

SEQ ID NO: 1284040 - RNA, 19 nt, Artificial Sequence
  Description of Artificial Sequence: Synthetic oligonucleotide
  Sense strand starting at position 3251 of SEQ ID NO: 1241588
aucucagugggaugacuaa

SEQ ID NO: 1284041 - RNA, 19 nt, Artificial Sequence
  Description of Artificial Sequence: Synthetic oligonucleotide
  Antisense strand to SEQ ID NO: 1284040
uuagucaucccacugagau

SEQ ID NO: 1284042 - RNA, 19 nt, Artificial Sequence
  Description of Artificial Sequence: Synthetic oligonucleotide
  Sense strand starting at position 3275 of SEQ ID NO: 1241588
uguuauguaagugaguaga

SEQ ID NO: 1284043 - RNA, 19 nt, Artificial Sequence
  Description of Artificial Sequence: Synthetic oligonucleotide
  Antisense strand to SEQ ID NO: 1284042
ucuacucacuuacauaaca

SEQ ID NO: 1284044 - RNA, 19 nt, Artificial Sequence
  Description of Artificial Sequence: Synthetic oligonucleotide
  Sense strand starting at position 3291 of SEQ ID NO: 1241588
agaugaugccugggcuuga

SEQ ID NO: 1284045 - RNA, 19 nt, Artificial Sequence
  Description of Artificial Sequence: Synthetic oligonucleotide
  Antisense strand to SEQ ID NO: 1284044
ucaagcccaggcaucaucu

SEQ ID NO: 1284046 - RNA, 19 nt, Artificial Sequence
  Description of Artificial Sequence: Synthetic oligonucleotide
  Sense strand starting at position 3292 of SEQ ID NO: 1241588
gaugaugccugggcuugaa

SEQ ID NO: 1284047 - RNA, 19 nt, Artificial Sequence
  Description of Artificial Sequence: Synthetic oligonucleotide
  Antisense strand to SEQ ID NO: 1284046
uucaagcccaggcaucauc

SEQ ID NO: 1284048 - RNA, 19 nt, Artificial Sequence
  Description of Artificial Sequence: Synthetic oligonucleotide
  Sense strand starting at position 3333 of SEQ ID NO: 1241588
gccaguucugauggacaga

SEQ ID NO: 1284049 - RNA, 19 nt, Artificial Sequence
  Description of Artificial Sequence: Synthetic oligonucleotide
  Antisense strand to SEQ ID NO: 1284048
ucuguccaucagaacuggc

SEQ ID NO: 1284050 - RNA, 19 nt, Artificial Sequence
  Description of Artificial Sequence: Synthetic oligonucleotide
  Sense strand starting at position 3362 of SEQ ID NO: 1241588
gagcaagacccuugggauu

SEQ ID NO: 1284051 - RNA, 19 nt, Artificial Sequence
  Description of Artificial Sequence: Synthetic oligonucleotide
  Antisense strand to SEQ ID NO: 1284050
aaucccaagggucuugcuc

SEQ ID NO: 1284052 - RNA, 19 nt, Artificial Sequence
  Description of Artificial Sequence: Synthetic oligonucleotide
  Sense strand starting at position 3384 of SEQ ID NO: 1241588
augugaaagccugaagggu

SEQ ID NO: 1284053 - RNA, 19 nt, Artificial Sequence
  Description of Artificial Sequence: Synthetic oligonucleotide
  Antisense strand to SEQ ID NO: 1284052
acccuucaggcuuucacau

SEQ ID NO: 1284054 - RNA, 19 nt, Artificial Sequence
  Description of Artificial Sequence: Synthetic oligonucleotide
  Sense strand starting at position 3425 of SEQ ID NO: 1241588
cugaaagucuggccaguaa

SEQ ID NO: 1284055 - RNA, 19 nt, Artificial Sequence
  Description of Artificial Sequence: Synthetic oligonucleotide
  Antisense strand to SEQ ID NO: 1284054
uuacuggccagacuuucag

SEQ ID NO: 1284056 - RNA, 19 nt, Artificial Sequence
  Description of Artificial Sequence: Synthetic oligonucleotide
  Sense strand starting at position 3467 of SEQ ID NO: 1241588
agaaucuaagcuuggaauu

SEQ ID NO: 1284057 - RNA, 19 nt, Artificial Sequence
  Description of Artificial Sequence: Synthetic oligonucleotide
  Antisense strand to SEQ ID NO: 1284056
aauuccaagcuuagauucu

SEQ ID NO: 1284058 - RNA, 19 nt, Artificial Sequence
  Description of Artificial Sequence: Synthetic oligonucleotide
  Sense strand starting at position 3605 of SEQ ID NO: 1241588
uuuggcauaguguaauaau

SEQ ID NO: 1284059 - RNA, 19 nt, Artificial Sequence
  Description of Artificial Sequence: Synthetic oligonucleotide
  Antisense strand to SEQ ID NO: 1284058
auuauuacacuaugccaaa

SEQ ID NO: 1284060 - RNA, 19 nt, Artificial Sequence
  Description of Artificial Sequence: Synthetic oligonucleotide
  Sense strand starting at position 3697 of SEQ ID NO: 1241588
aauagaaggccuuguauag

SEQ ID NO: 1284061 - RNA, 19 nt, Artificial Sequence
  Description of Artificial Sequence: Synthetic oligonucleotide
  Antisense strand to SEQ ID NO: 1284060
cuauacaaggccuucuauu

SEQ ID NO: 1284062 - RNA, 19 nt, Artificial Sequence
  Description of Artificial Sequence: Synthetic oligonucleotide
  Sense strand starting at position 3701 of SEQ ID NO: 1241588
gaaggccuuguauagaguu

SEQ ID NO: 1284063 - RNA, 19 nt, Artificial Sequence
  Description of Artificial Sequence: Synthetic oligonucleotide
  Antisense strand to SEQ ID NO: 1284062
aacucuauacaaggccuuc

SEQ ID NO: 1284064 - RNA, 19 nt, Artificial Sequence
  Description of Artificial Sequence: Synthetic oligonucleotide
  Sense strand starting at position 3770 of SEQ ID NO: 1241588
gcacauaagaauggguuua

SEQ ID NO: 1284065 - RNA, 19 nt, Artificial Sequence
  Description of Artificial Sequence: Synthetic oligonucleotide
  Antisense strand to SEQ ID NO: 1284064
uaaacccauucuuaugugc

SEQ ID NO: 1284066 - RNA, 19 nt, Artificial Sequence
  Description of Artificial Sequence: Synthetic oligonucleotide
  Sense strand starting at position 3848 of SEQ ID NO: 1241588
augagaauuugaugaaagc

SEQ ID NO: 1284067 - RNA, 19 nt, Artificial Sequence
  Description of Artificial Sequence: Synthetic oligonucleotide
  Antisense strand to SEQ ID NO: 1284066
gcuuucaucaaauucucau

SEQ ID NO: 1284068 - RNA, 19 nt, Artificial Sequence
  Description of Artificial Sequence: Synthetic oligonucleotide
  Sense strand starting at position 139 of SEQ ID NO: 1241589
gaaggacaccuguguguau

SEQ ID NO: 1284069 - RNA, 19 nt, Artificial Sequence
  Description of Artificial Sequence: Synthetic oligonucleotide
  Antisense strand to SEQ ID NO: 1284068
auacacacagguguccuuc

SEQ ID NO: 1284070 - RNA, 19 nt, Artificial Sequence
  Description of Artificial Sequence: Synthetic oligonucleotide
  Sense strand starting at position 141 of SEQ ID NO: 1241589
aggacaccuguguguauuu

SEQ ID NO: 1284071 - RNA, 19 nt, Artificial Sequence
  Description of Artificial Sequence: Synthetic oligonucleotide
  Antisense strand to SEQ ID NO: 1284070
aaauacacacagguguccu

SEQ ID NO: 1284072 - RNA, 19 nt, Artificial Sequence
  Description of Artificial Sequence: Synthetic oligonucleotide
  Sense strand starting at position 233 of SEQ ID NO: 1241589
ucuaguuaucauuaugguu

SEQ ID NO: 1284073 - RNA, 19 nt, Artificial Sequence
  Description of Artificial Sequence: Synthetic oligonucleotide
  Antisense strand to SEQ ID NO: 1284072
aaccauaaugauaacuaga

SEQ ID NO: 1284074 - RNA, 19 nt, Artificial Sequence
  Description of Artificial Sequence: Synthetic oligonucleotide
  Sense strand starting at position 310 of SEQ ID NO: 1241589
aaacuagauguuuguugga

SEQ ID NO: 1284075 - RNA, 19 nt, Artificial Sequence
  Description of Artificial Sequence: Synthetic oligonucleotide
  Antisense strand to SEQ ID NO: 1284074
uccaacaaacaucuaguuu

SEQ ID NO: 1284076 - RNA, 19 nt, Artificial Sequence
  Description of Artificial Sequence: Synthetic oligonucleotide
  Sense strand starting at position 312 of SEQ ID NO: 1241589
acuagauguuuguuggacu

SEQ ID NO: 1284077 - RNA, 19 nt, Artificial Sequence
  Description of Artificial Sequence: Synthetic oligonucleotide
  Antisense strand to SEQ ID NO: 1284076
aguccaacaaacaucuagu

SEQ ID NO: 1284078 - RNA, 19 nt, Artificial Sequence
  Description of Artificial Sequence: Synthetic oligonucleotide
  Sense strand starting at position 370 of SEQ ID NO: 1241589
ggacccuucucaucuggga

SEQ ID NO: 1284079 - RNA, 19 nt, Artificial Sequence
  Description of Artificial Sequence: Synthetic oligonucleotide
  Antisense strand to SEQ ID NO: 1284078
ucccagaugagaagggucc

SEQ ID NO: 1284080 - RNA, 19 nt, Artificial Sequence
  Description of Artificial Sequence: Synthetic oligonucleotide
  Sense strand starting at position 628 of SEQ ID NO: 1241589
ugaggagauuggcuagcuu

SEQ ID NO: 1284081 - RNA, 19 nt, Artificial Sequence
  Description of Artificial Sequence: Synthetic oligonucleotide
  Antisense strand to SEQ ID NO: 1284080
aagcuagccaaucuccuca

SEQ ID NO: 1284082 - RNA, 19 nt, Artificial Sequence
  Description of Artificial Sequence: Synthetic oligonucleotide
  Sense strand starting at position 768 of SEQ ID NO: 1241589
ggcuacagaucuuuacaaa

SEQ ID NO: 1284083 - RNA, 19 nt, Artificial Sequence
  Description of Artificial Sequence: Synthetic oligonucleotide
  Antisense strand to SEQ ID NO: 1284082
uuuguaaagaucuguagcc

SEQ ID NO: 1284084 - RNA, 19 nt, Artificial Sequence
  Description of Artificial Sequence: Synthetic oligonucleotide
  Sense strand starting at position 888 of SEQ ID NO: 1241589
aaacguagggagugacuua

SEQ ID NO: 1284085 - RNA, 19 nt, Artificial Sequence
  Description of Artificial Sequence: Synthetic oligonucleotide
  Antisense strand to SEQ ID NO: 1284084
uaagucacucccuacguuu

SEQ ID NO: 1284086 - RNA, 19 nt, Artificial Sequence
  Description of Artificial Sequence: Synthetic oligonucleotide
  Sense strand starting at position 895 of SEQ ID NO: 1241589
gggagugacuuaccgugaa

SEQ ID NO: 1284087 - RNA, 19 nt, Artificial Sequence
  Description of Artificial Sequence: Synthetic oligonucleotide
  Antisense strand to SEQ ID NO: 1284086
uucacgguaagucacuccc

SEQ ID NO: 1284088 - RNA, 19 nt, Artificial Sequence
  Description of Artificial Sequence: Synthetic oligonucleotide
  Sense strand starting at position 2451 of SEQ ID NO: 1241589
acccaaucccgugaaauga

SEQ ID NO: 1284089 - RNA, 19 nt, Artificial Sequence
  Description of Artificial Sequence: Synthetic oligonucleotide
  Antisense strand to SEQ ID NO: 1284088
ucauuucacgggauugggu

SEQ ID NO: 1284090 - RNA, 19 nt, Artificial Sequence
  Description of Artificial Sequence: Synthetic oligonucleotide
  Sense strand starting at position 2459 of SEQ ID NO: 1241589
ccgugaaaugagcggaaca

SEQ ID NO: 1284091 - RNA, 19 nt, Artificial Sequence
  Description of Artificial Sequence: Synthetic oligonucleotide
  Antisense strand to SEQ ID NO: 1284090
uguuccgcucauuucacgg

SEQ ID NO: 1284092 - RNA, 19 nt, Artificial Sequence
  Description of Artificial Sequence: Synthetic oligonucleotide
  Sense strand starting at position 2460 of SEQ ID NO: 1241589
cgugaaaugagcggaacaa

SEQ ID NO: 1284093 - RNA, 19 nt, Artificial Sequence
  Description of Artificial Sequence: Synthetic oligonucleotide
  Antisense strand to SEQ ID NO: 1284092
uuguuccgcucauuucacg

SEQ ID NO: 1284094 - RNA, 19 nt, Artificial Sequence
  Description of Artificial Sequence: Synthetic oligonucleotide
  Sense strand starting at position 2534 of SEQ ID NO: 1241589
uuacuauucccaggaagau

SEQ ID NO: 1284095 - RNA, 19 nt, Artificial Sequence
  Description of Artificial Sequence: Synthetic oligonucleotide
  Antisense strand to SEQ ID NO: 1284094
aucuuccugggaauaguaa

SEQ ID NO: 1284096 - RNA, 19 nt, Artificial Sequence
  Description of Artificial Sequence: Synthetic oligonucleotide
  Sense strand starting at position 2648 of SEQ ID NO: 1241589
guugcacugccgcuuugau

SEQ ID NO: 1284097 - RNA, 19 nt, Artificial Sequence
  Description of Artificial Sequence: Synthetic oligonucleotide
  Antisense strand to SEQ ID NO: 1284096
aucaaagcggcagugcaac

SEQ ID NO: 1284098 - RNA, 19 nt, Artificial Sequence
  Description of Artificial Sequence: Synthetic oligonucleotide
  Sense strand starting at position 2649 of SEQ ID NO: 1241589
uugcacugccgcuuugauu

SEQ ID NO: 1284099 - RNA, 19 nt, Artificial Sequence
  Description of Artificial Sequence: Synthetic oligonucleotide
  Antisense strand to SEQ ID NO: 1284098
aaucaaagcggcagugcaa

SEQ ID NO: 1284100 - RNA, 19 nt, Artificial Sequence
  Description of Artificial Sequence: Synthetic oligonucleotide
  Sense strand starting at position 2655 of SEQ ID NO: 1241589
ugccgcuuugauucgguua

SEQ ID NO: 1284101 - RNA, 19 nt, Artificial Sequence
  Description of Artificial Sequence: Synthetic oligonucleotide
  Antisense strand to SEQ ID NO: 1284100
uaaccgaaucaaagcggca

SEQ ID NO: 1284102 - RNA, 19 nt, Artificial Sequence
  Description of Artificial Sequence: Synthetic oligonucleotide
  Sense strand starting at position 2743 of SEQ ID NO: 1241589
agaggagugugucuuauac

SEQ ID NO: 1284103 - RNA, 19 nt, Artificial Sequence
  Description of Artificial Sequence: Synthetic oligonucleotide
  Antisense strand to SEQ ID NO: 1284102
guauaagacacacuccucu

SEQ ID NO: 1284104 - RNA, 19 nt, Artificial Sequence
  Description of Artificial Sequence: Synthetic oligonucleotide
  Sense strand starting at position 2749 of SEQ ID NO: 1241589
gugugucuuauacagaauu

SEQ ID NO: 1284105 - RNA, 19 nt, Artificial Sequence
  Description of Artificial Sequence: Synthetic oligonucleotide
  Antisense strand to SEQ ID NO: 1284104
aauucuguauaagacacac

SEQ ID NO: 1284106 - RNA, 19 nt, Artificial Sequence
  Description of Artificial Sequence: Synthetic oligonucleotide
  Sense strand starting at position 2751 of SEQ ID NO: 1241589
gugucuuauacagaauugu

SEQ ID NO: 1284107 - RNA, 19 nt, Artificial Sequence
  Description of Artificial Sequence: Synthetic oligonucleotide
  Antisense strand to SEQ ID NO: 1284106
acaauucuguauaagacac

SEQ ID NO: 1284108 - RNA, 19 nt, Artificial Sequence
  Description of Artificial Sequence: Synthetic oligonucleotide
  Sense strand starting at position 2760 of SEQ ID NO: 1241589
acagaauuguguuugugga

SEQ ID NO: 1284109 - RNA, 19 nt, Artificial Sequence
  Description of Artificial Sequence: Synthetic oligonucleotide
  Antisense strand to SEQ ID NO: 1284108
uccacaaacacaauucugu

SEQ ID NO: 1284110 - RNA, 19 nt, Artificial Sequence
  Description of Artificial Sequence: Synthetic oligonucleotide
  Sense strand starting at position 2762 of SEQ ID NO: 1241589
agaauuguguuuguggaua

SEQ ID NO: 1284111 - RNA, 19 nt, Artificial Sequence
  Description of Artificial Sequence: Synthetic oligonucleotide
  Antisense strand to SEQ ID NO: 1284110
uauccacaaacacaauucu

SEQ ID NO: 1284112 - RNA, 19 nt, Artificial Sequence
  Description of Artificial Sequence: Synthetic oligonucleotide
  Sense strand starting at position 2767 of SEQ ID NO: 1241589
uguguuuguggauacaaca

SEQ ID NO: 1284113 - RNA, 19 nt, Artificial Sequence
  Description of Artificial Sequence: Synthetic oligonucleotide
  Antisense strand to SEQ ID NO: 1284112
uguuguauccacaaacaca

SEQ ID NO: 1284114 - RNA, 19 nt, Artificial Sequence
  Description of Artificial Sequence: Synthetic oligonucleotide
  Sense strand starting at position 2848 of SEQ ID NO: 1241589
uuuguuuagccguuuaucu

SEQ ID NO: 1284115 - RNA, 19 nt, Artificial Sequence
  Description of Artificial Sequence: Synthetic oligonucleotide
  Antisense strand to SEQ ID NO: 1284114
agauaaacggcuaaacaaa

SEQ ID NO: 1284116 - RNA, 19 nt, Artificial Sequence
  Description of Artificial Sequence: Synthetic oligonucleotide
  Sense strand starting at position 2849 of SEQ ID NO: 1241589
uuguuuagccguuuaucuu

SEQ ID NO: 1284117 - RNA, 19 nt, Artificial Sequence
  Description of Artificial Sequence: Synthetic oligonucleotide
  Antisense strand to SEQ ID NO: 1284116
aagauaaacggcuaaacaa

SEQ ID NO: 1284118 - RNA, 19 nt, Artificial Sequence
  Description of Artificial Sequence: Synthetic oligonucleotide
  Sense strand starting at position 2900 of SEQ ID NO: 1241589
aaagacuuguuccuggcaa

SEQ ID NO: 1284119 - RNA, 19 nt, Artificial Sequence
  Description of Artificial Sequence: Synthetic oligonucleotide
  Antisense strand to SEQ ID NO: 1284118
uugccaggaacaagucuuu

SEQ ID NO: 1284120 - RNA, 19 nt, Artificial Sequence
  Description of Artificial Sequence: Synthetic oligonucleotide
  Sense strand starting at position 2902 of SEQ ID NO: 1241589
agacuuguuccuggcaaag

SEQ ID NO: 1284121 - RNA, 19 nt, Artificial Sequence
  Description of Artificial Sequence: Synthetic oligonucleotide
  Antisense strand to SEQ ID NO: 1284120
cuuugccaggaacaagucu

SEQ ID NO: 1284122 - RNA, 19 nt, Artificial Sequence
  Description of Artificial Sequence: Synthetic oligonucleotide
  Sense strand starting at position 3043 of SEQ ID NO: 1241589
uccaguuuggcagacaaca

SEQ ID NO: 1284123 - RNA, 19 nt, Artificial Sequence
  Description of Artificial Sequence: Synthetic oligonucleotide
  Antisense strand to SEQ ID NO: 1284122
uguugucugccaaacugga

SEQ ID NO: 1284124 - RNA, 19 nt, Artificial Sequence
  Description of Artificial Sequence: Synthetic oligonucleotide
  Sense strand starting at position 3128 of SEQ ID NO: 1241589
gucugaucugccuagggaa

SEQ ID NO: 1284125 - RNA, 19 nt, Artificial Sequence
  Description of Artificial Sequence: Synthetic oligonucleotide
  Antisense strand to SEQ ID NO: 1284124
uucccuaggcagaucagac

SEQ ID NO: 1284126 - RNA, 19 nt, Artificial Sequence
  Description of Artificial Sequence: Synthetic oligonucleotide
  Sense strand starting at position 3160 of SEQ ID NO: 1241589
cagucauaacgugggagga

SEQ ID NO: 1284127 - RNA, 19 nt, Artificial Sequence
  Description of Artificial Sequence: Synthetic oligonucleotide
  Antisense strand to SEQ ID NO: 1284126
uccucccacguuaugacug

SEQ ID NO: 1284128 - RNA, 19 nt, Artificial Sequence
  Description of Artificial Sequence: Synthetic oligonucleotide
  Sense strand starting at position 3161 of SEQ ID NO: 1241589
agucauaacgugggaggaa

SEQ ID NO: 1284129 - RNA, 19 nt, Artificial Sequence
  Description of Artificial Sequence: Synthetic oligonucleotide
  Antisense strand to SEQ ID NO: 1284128
uuccucccacguuaugacu

SEQ ID NO: 1284130 - RNA, 19 nt, Artificial Sequence
  Description of Artificial Sequence: Synthetic oligonucleotide
  Sense strand starting at position 3293 of SEQ ID NO: 1241589
ggugguucccacuagaaca

SEQ ID NO: 1284131 - RNA, 19 nt, Artificial Sequence
  Description of Artificial Sequence: Synthetic oligonucleotide
  Antisense strand to SEQ ID NO: 1284130
uguucuagugggaaccacc

SEQ ID NO: 1284132 - RNA, 19 nt, Artificial Sequence
  Description of Artificial Sequence: Synthetic oligonucleotide
  Sense strand starting at position 3396 of SEQ ID NO: 1241589
uggcauggauuccuaggaa

SEQ ID NO: 1284133 - RNA, 19 nt, Artificial Sequence
  Description of Artificial Sequence: Synthetic oligonucleotide
  Antisense strand to SEQ ID NO: 1284132
uuccuaggaauccaugcca

SEQ ID NO: 1284134 - RNA, 19 nt, Artificial Sequence
  Description of Artificial Sequence: Synthetic oligonucleotide
  Sense strand starting at position 3571 of SEQ ID NO: 1241589
agaaguauuucuuaauagg

SEQ ID NO: 1284135 - RNA, 19 nt, Artificial Sequence
  Description of Artificial Sequence: Synthetic oligonucleotide
  Antisense strand to SEQ ID NO: 1284134
ccuauuaagaaauacuucu

SEQ ID NO: 1284136 - RNA, 19 nt, Artificial Sequence
  Description of Artificial Sequence: Synthetic oligonucleotide
  Sense strand starting at position 3660 of SEQ ID NO: 1241589
gaauuugcacagugcuuau

SEQ ID NO: 1284137 - RNA, 19 nt, Artificial Sequence
  Description of Artificial Sequence: Synthetic oligonucleotide
  Antisense strand to SEQ ID NO: 1284136
auaagcacugugcaaauuc

SEQ ID NO: 1284138 - RNA, 19 nt, Artificial Sequence
  Description of Artificial Sequence: Synthetic oligonucleotide
  Sense strand starting at position 3753 of SEQ ID NO: 1241589
auauauuugucucuagcuu

SEQ ID NO: 1284139 - RNA, 19 nt, Artificial Sequence
  Description of Artificial Sequence: Synthetic oligonucleotide
  Antisense strand to SEQ ID NO: 1284138
aagcuagagacaaauauau

SEQ ID NO: 1284140 - RNA, 19 nt, Artificial Sequence
  Description of Artificial Sequence: Synthetic oligonucleotide
  Sense strand starting at position 3943 of SEQ ID NO: 1241589
auauguggacaguauaguu

SEQ ID NO: 1284141 - RNA, 19 nt, Artificial Sequence
  Description of Artificial Sequence: Synthetic oligonucleotide
  Antisense strand to SEQ ID NO: 1284140
aacuauacuguccacauau

SEQ ID NO: 1284142 - RNA, 19 nt, Artificial Sequence
  Description of Artificial Sequence: Synthetic oligonucleotide
  Sense strand starting at position 3964 of SEQ ID NO: 1241589
auauguggacacuauaguu

SEQ ID NO: 1284143 - RNA, 19 nt, Artificial Sequence
  Description of Artificial Sequence: Synthetic oligonucleotide
  Antisense strand to SEQ ID NO: 1284142
aacuauaguguccacauau

SEQ ID NO: 1284144 - RNA, 19 nt, Artificial Sequence
  Description of Artificial Sequence: Synthetic oligonucleotide
  Sense strand starting at position 3970 of SEQ ID NO: 1241589
ggacacuauaguuguugau

SEQ ID NO: 1284145 - RNA, 19 nt, Artificial Sequence
  Description of Artificial Sequence: Synthetic oligonucleotide
  Antisense strand to SEQ ID NO: 1284144
aucaacaacuauagugucc

SEQ ID NO: 1284146 - RNA, 19 nt, Artificial Sequence
  Description of Artificial Sequence: Synthetic oligonucleotide
  Sense strand starting at position 3972 of SEQ ID NO: 1241589
acacuauaguuguugauaa

SEQ ID NO: 1284147 - RNA, 19 nt, Artificial Sequence
  Description of Artificial Sequence: Synthetic oligonucleotide
  Antisense strand to SEQ ID NO: 1284146
uuaucaacaacuauagugu

SEQ ID NO: 1284148 - RNA, 19 nt, Artificial Sequence
  Description of Artificial Sequence: Synthetic oligonucleotide
  Sense strand starting at position 160 of SEQ ID NO: 1241590
aacugugagguugguaaua

SEQ ID NO: 1284149 - RNA, 19 nt, Artificial Sequence
  Description of Artificial Sequence: Synthetic oligonucleotide
  Antisense strand to SEQ ID NO: 1284148
uauuaccaaccucacaguu

SEQ ID NO: 1284150 - RNA, 19 nt, Artificial Sequence
  Description of Artificial Sequence: Synthetic oligonucleotide
  Sense strand starting at position 532 of SEQ ID NO: 1241590
agagaauaauucgcccaga

SEQ ID NO: 1284151 - RNA, 19 nt, Artificial Sequence
  Description of Artificial Sequence: Synthetic oligonucleotide
  Antisense strand to SEQ ID NO: 1284150
ucugggcgaauuauucucu

SEQ ID NO: 1284152 - RNA, 19 nt, Artificial Sequence
  Description of Artificial Sequence: Synthetic oligonucleotide
  Sense strand starting at position 533 of SEQ ID NO: 1241590
gagaauaauucgcccagag

SEQ ID NO: 1284153 - RNA, 19 nt, Artificial Sequence
  Description of Artificial Sequence: Synthetic oligonucleotide
  Antisense strand to SEQ ID NO: 1284152
cucugggcgaauuauucuc

SEQ ID NO: 1284154 - RNA, 19 nt, Artificial Sequence
  Description of Artificial Sequence: Synthetic oligonucleotide
  Sense strand starting at position 535 of SEQ ID NO: 1241590
gaauaauucgcccagaguc

SEQ ID NO: 1284155 - RNA, 19 nt, Artificial Sequence
  Description of Artificial Sequence: Synthetic oligonucleotide
  Antisense strand to SEQ ID NO: 1284154
gacucugggcgaauuauuc

SEQ ID NO: 1284156 - RNA, 19 nt, Artificial Sequence
  Description of Artificial Sequence: Synthetic oligonucleotide
  Sense strand starting at position 637 of SEQ ID NO: 1241590
uacccuuauuucgugcgau

SEQ ID NO: 1284157 - RNA, 19 nt, Artificial Sequence
  Description of Artificial Sequence: Synthetic oligonucleotide
  Antisense strand to SEQ ID NO: 1284156
aucgcacgaaauaagggua

SEQ ID NO: 1284158 - RNA, 19 nt, Artificial Sequence
  Description of Artificial Sequence: Synthetic oligonucleotide
  Sense strand starting at position 640 of SEQ ID NO: 1241590
ccuuauuucgugcgauuau

SEQ ID NO: 1284159 - RNA, 19 nt, Artificial Sequence
  Description of Artificial Sequence: Synthetic oligonucleotide
  Antisense strand to SEQ ID NO: 1284158
auaaucgcacgaaauaagg

SEQ ID NO: 1284160 - RNA, 19 nt, Artificial Sequence
  Description of Artificial Sequence: Synthetic oligonucleotide
  Sense strand starting at position 680 of SEQ ID NO: 1241590
gaccacgccuuguuauaaa

SEQ ID NO: 1284161 - RNA, 19 nt, Artificial Sequence
  Description of Artificial Sequence: Synthetic oligonucleotide
  Antisense strand to SEQ ID NO: 1284160
uuuauaacaaggcgugguc

SEQ ID NO: 1284162 - RNA, 19 nt, Artificial Sequence
  Description of Artificial Sequence: Synthetic oligonucleotide
  Sense strand starting at position 701 of SEQ ID NO: 1241590
guaucuuucugggcccaga

SEQ ID NO: 1284163 - RNA, 19 nt, Artificial Sequence
  Description of Artificial Sequence: Synthetic oligonucleotide
  Antisense strand to SEQ ID NO: 1284162
ucugggcccagaaagauac

SEQ ID NO: 1284164 - RNA, 19 nt, Artificial Sequence
  Description of Artificial Sequence: Synthetic oligonucleotide
  Sense strand starting at position 1082 of SEQ ID NO: 1241590
aagucuugcauguggagau

SEQ ID NO: 1284165 - RNA, 19 nt, Artificial Sequence
  Description of Artificial Sequence: Synthetic oligonucleotide
  Antisense strand to SEQ ID NO: 1284164
aucuccacaugcaagacuu

SEQ ID NO: 1284166 - RNA, 19 nt, Artificial Sequence
  Description of Artificial Sequence: Synthetic oligonucleotide
  Sense strand starting at position 1180 of SEQ ID NO: 1241590
auaauaauuugcgucucua

SEQ ID NO: 1284167 - RNA, 19 nt, Artificial Sequence
  Description of Artificial Sequence: Synthetic oligonucleotide
  Antisense strand to SEQ ID NO: 1284166
uagagacgcaaauuauuau

SEQ ID NO: 1284168 - RNA, 19 nt, Artificial Sequence
  Description of Artificial Sequence: Synthetic oligonucleotide
  Sense strand starting at position 1227 of SEQ ID NO: 1241590
ucgucagcgcuaagaggau

SEQ ID NO: 1284169 - RNA, 19 nt, Artificial Sequence
  Description of Artificial Sequence: Synthetic oligonucleotide
  Antisense strand to SEQ ID NO: 1284168
auccucuuagcgcugacga

SEQ ID NO: 1284170 - RNA, 19 nt, Artificial Sequence
  Description of Artificial Sequence: Synthetic oligonucleotide
  Sense strand starting at position 1601 of SEQ ID NO: 1241590
guacgugcucaacaaaucu

SEQ ID NO: 1284171 - RNA, 19 nt, Artificial Sequence
  Description of Artificial Sequence: Synthetic oligonucleotide
  Antisense strand to SEQ ID NO: 1284170
agauuuguugagcacguac

SEQ ID NO: 1284172 - RNA, 19 nt, Artificial Sequence
  Description of Artificial Sequence: Synthetic oligonucleotide
  Sense strand starting at position 2050 of SEQ ID NO: 1241590
aagcuuagggauuggaagu

SEQ ID NO: 1284173 - RNA, 19 nt, Artificial Sequence
  Description of Artificial Sequence: Synthetic oligonucleotide
  Antisense strand to SEQ ID NO: 1284172
acuuccaaucccuaagcuu

SEQ ID NO: 1284174 - RNA, 19 nt, Artificial Sequence
  Description of Artificial Sequence: Synthetic oligonucleotide
  Sense strand starting at position 2051 of SEQ ID NO: 1241590
agcuuagggauuggaaguu

SEQ ID NO: 1284175 - RNA, 19 nt, Artificial Sequence
  Description of Artificial Sequence: Synthetic oligonucleotide
  Antisense strand to SEQ ID NO: 1284174
aacuuccaaucccuaagcu

SEQ ID NO: 1284176 - RNA, 19 nt, Artificial Sequence
  Description of Artificial Sequence: Synthetic oligonucleotide
  Sense strand starting at position 2131 of SEQ ID NO: 1241590
gaguuacuagucugggcaa

SEQ ID NO: 1284177 - RNA, 19 nt, Artificial Sequence
  Description of Artificial Sequence: Synthetic oligonucleotide
  Antisense strand to SEQ ID NO: 1284176
uugcccagacuaguaacuc

SEQ ID NO: 1284178 - RNA, 19 nt, Artificial Sequence
  Description of Artificial Sequence: Synthetic oligonucleotide
  Sense strand starting at position 2133 of SEQ ID NO: 1241590
guuacuagucugggcaaag

SEQ ID NO: 1284179 - RNA, 19 nt, Artificial Sequence
  Description of Artificial Sequence: Synthetic oligonucleotide
  Antisense strand to SEQ ID NO: 1284178
cuuugcccagacuaguaac

SEQ ID NO: 1284180 - RNA, 19 nt, Artificial Sequence
  Description of Artificial Sequence: Synthetic oligonucleotide
  Sense strand starting at position 2134 of SEQ ID NO: 1241590
uuacuagucugggcaaagu

SEQ ID NO: 1284181 - RNA, 19 nt, Artificial Sequence
  Description of Artificial Sequence: Synthetic oligonucleotide
  Antisense strand to SEQ ID NO: 1284180
acuuugcccagacuaguaa

SEQ ID NO: 1284182 - RNA, 19 nt, Artificial Sequence
  Description of Artificial Sequence: Synthetic oligonucleotide
  Sense strand starting at position 2145 of SEQ ID NO: 1241590
ggcaaagugcauuaauaac

SEQ ID NO: 1284183 - RNA, 19 nt, Artificial Sequence
  Description of Artificial Sequence: Synthetic oligonucleotide
  Antisense strand to SEQ ID NO: 1284182
guuauuaaugcacuuugcc

SEQ ID NO: 1284184 - RNA, 19 nt, Artificial Sequence
  Description of Artificial Sequence: Synthetic oligonucleotide
  Sense strand starting at position 2245 of SEQ ID NO: 1241590
cauuuagcaguccgugaag

SEQ ID NO: 1284185 - RNA, 19 nt, Artificial Sequence
  Description of Artificial Sequence: Synthetic oligonucleotide
  Antisense strand to SEQ ID NO: 1284184
cuucacggacugcuaaaug

SEQ ID NO: 1284186 - RNA, 19 nt, Artificial Sequence
  Description of Artificial Sequence: Synthetic oligonucleotide
  Sense strand starting at position 2248 of SEQ ID NO: 1241590
uuagcaguccgugaagaag

SEQ ID NO: 1284187 - RNA, 19 nt, Artificial Sequence
  Description of Artificial Sequence: Synthetic oligonucleotide
  Antisense strand to SEQ ID NO: 1284186
cuucuucacggacugcuaa

SEQ ID NO: 1284188 - RNA, 19 nt, Artificial Sequence
  Description of Artificial Sequence: Synthetic oligonucleotide
  Sense strand starting at position 2292 of SEQ ID NO: 1241590
cugaaccucgauugggaaa

SEQ ID NO: 1284189 - RNA, 19 nt, Artificial Sequence
  Description of Artificial Sequence: Synthetic oligonucleotide
  Antisense strand to SEQ ID NO: 1284188
uuucccaaucgagguucag

SEQ ID NO: 1284190 - RNA, 19 nt, Artificial Sequence
  Description of Artificial Sequence: Synthetic oligonucleotide
  Sense strand starting at position 2293 of SEQ ID NO: 1241590
ugaaccucgauugggaaau

SEQ ID NO: 1284191 - RNA, 19 nt, Artificial Sequence
  Description of Artificial Sequence: Synthetic oligonucleotide
  Antisense strand to SEQ ID NO: 1284190
auuucccaaucgagguuca

SEQ ID NO: 1284192 - RNA, 19 nt, Artificial Sequence
  Description of Artificial Sequence: Synthetic oligonucleotide
  Sense strand starting at position 2377 of SEQ ID NO: 1241590
agcugaugugauuggacca

SEQ ID NO: 1284193 - RNA, 19 nt, Artificial Sequence
  Description of Artificial Sequence: Synthetic oligonucleotide
  Antisense strand to SEQ ID NO: 1284192
ugguccaaucacaucagcu

SEQ ID NO: 1284194 - RNA, 19 nt, Artificial Sequence
  Description of Artificial Sequence: Synthetic oligonucleotide
  Sense strand starting at position 2575 of SEQ ID NO: 1241590
gguugagagaaguguauac

SEQ ID NO: 1284195 - RNA, 19 nt, Artificial Sequence
  Description of Artificial Sequence: Synthetic oligonucleotide
  Antisense strand to SEQ ID NO: 1284194
guauacacuucucucaacc

SEQ ID NO: 1284196 - RNA, 19 nt, Artificial Sequence
  Description of Artificial Sequence: Synthetic oligonucleotide
  Sense strand starting at position 2641 of SEQ ID NO: 1241590
aucugaauuaggcagguau

SEQ ID NO: 1284197 - RNA, 19 nt, Artificial Sequence
  Description of Artificial Sequence: Synthetic oligonucleotide
  Antisense strand to SEQ ID NO: 1284196
auaccugccuaauucagau

SEQ ID NO: 1284198 - RNA, 19 nt, Artificial Sequence
  Description of Artificial Sequence: Synthetic oligonucleotide
  Sense strand starting at position 2643 of SEQ ID NO: 1241590
cugaauuaggcagguauaa

SEQ ID NO: 1284199 - RNA, 19 nt, Artificial Sequence
  Description of Artificial Sequence: Synthetic oligonucleotide
  Antisense strand to SEQ ID NO: 1284198
uuauaccugccuaauucag

SEQ ID NO: 1284200 - RNA, 19 nt, Artificial Sequence
  Description of Artificial Sequence: Synthetic oligonucleotide
  Sense strand starting at position 2656 of SEQ ID NO: 1241590
guauaagaauugcuuguau

SEQ ID NO: 1284201 - RNA, 19 nt, Artificial Sequence
  Description of Artificial Sequence: Synthetic oligonucleotide
  Antisense strand to SEQ ID NO: 1284200
auacaagcaauucuuauac

SEQ ID NO: 1284202 - RNA, 19 nt, Artificial Sequence
  Description of Artificial Sequence: Synthetic oligonucleotide
  Sense strand starting at position 2658 of SEQ ID NO: 1241590
auaagaauugcuuguauuc

SEQ ID NO: 1284203 - RNA, 19 nt, Artificial Sequence
  Description of Artificial Sequence: Synthetic oligonucleotide
  Antisense strand to SEQ ID NO: 1284202
gaauacaagcaauucuuau

SEQ ID NO: 1284204 - RNA, 19 nt, Artificial Sequence
  Description of Artificial Sequence: Synthetic oligonucleotide
  Sense strand starting at position 2670 of SEQ ID NO: 1241590
uguauucaugugggagcua

SEQ ID NO: 1284205 - RNA, 19 nt, Artificial Sequence
  Description of Artificial Sequence: Synthetic oligonucleotide
  Antisense strand to SEQ ID NO: 1284204
uagcucccacaugaauaca

SEQ ID NO: 1284206 - RNA, 19 nt, Artificial Sequence
  Description of Artificial Sequence: Synthetic oligonucleotide
  Sense strand starting at position 2686 of SEQ ID NO: 1241590
cuaauagcucagcacaagu

SEQ ID NO: 1284207 - RNA, 19 nt, Artificial Sequence
  Description of Artificial Sequence: Synthetic oligonucleotide
  Antisense strand to SEQ ID NO: 1284206
acuugugcugagcuauuag

SEQ ID NO: 1284208 - RNA, 19 nt, Artificial Sequence
  Description of Artificial Sequence: Synthetic oligonucleotide
  Sense strand starting at position 2699 of SEQ ID NO: 1241590
acaagucaugcauggagua

SEQ ID NO: 1284209 - RNA, 19 nt, Artificial Sequence
  Description of Artificial Sequence: Synthetic oligonucleotide
  Antisense strand to SEQ ID NO: 1284208
uacuccaugcaugacuugu

SEQ ID NO: 1284210 - RNA, 19 nt, Artificial Sequence
  Description of Artificial Sequence: Synthetic oligonucleotide
  Sense strand starting at position 2718 of SEQ ID NO: 1241590
gcugaaagaugacuagguu

SEQ ID NO: 1284211 - RNA, 19 nt, Artificial Sequence
  Description of Artificial Sequence: Synthetic oligonucleotide
  Antisense strand to SEQ ID NO: 1284210
aaccuagucaucuuucagc

SEQ ID NO: 1284212 - RNA, 19 nt, Artificial Sequence
  Description of Artificial Sequence: Synthetic oligonucleotide
  Sense strand starting at position 2721 of SEQ ID NO: 1241590
gaaagaugacuagguuggu

SEQ ID NO: 1284213 - RNA, 19 nt, Artificial Sequence
  Description of Artificial Sequence: Synthetic oligonucleotide
  Antisense strand to SEQ ID NO: 1284212
accaaccuagucaucuuuc

SEQ ID NO: 1284214 - RNA, 19 nt, Artificial Sequence
  Description of Artificial Sequence: Synthetic oligonucleotide
  Sense strand starting at position 2734 of SEQ ID NO: 1241590
guuggugagcaagggaaua

SEQ ID NO: 1284215 - RNA, 19 nt, Artificial Sequence
  Description of Artificial Sequence: Synthetic oligonucleotide
  Antisense strand to SEQ ID NO: 1284214
uauucccuugcucaccaac

SEQ ID NO: 1284216 - RNA, 19 nt, Artificial Sequence
  Description of Artificial Sequence: Synthetic oligonucleotide
  Sense strand starting at position 3367 of SEQ ID NO: 1241590
gauucuagggucugugaac

SEQ ID NO: 1284217 - RNA, 19 nt, Artificial Sequence
  Description of Artificial Sequence: Synthetic oligonucleotide
  Antisense strand to SEQ ID NO: 1284216
guucacagacccuagaauc

SEQ ID NO: 1284218 - RNA, 19 nt, Artificial Sequence
  Description of Artificial Sequence: Synthetic oligonucleotide
  Sense strand starting at position 3368 of SEQ ID NO: 1241590
auucuagggucugugaacu

SEQ ID NO: 1284219 - RNA, 19 nt, Artificial Sequence
  Description of Artificial Sequence: Synthetic oligonucleotide
  Antisense strand to SEQ ID NO: 1284218
aguucacagacccuagaau

SEQ ID NO: 1284220 - RNA, 19 nt, Artificial Sequence
  Description of Artificial Sequence: Synthetic oligonucleotide
  Sense strand starting at position 3378 of SEQ ID NO: 1241590
cugugaacuccuuguaaca

SEQ ID NO: 1284221 - RNA, 19 nt, Artificial Sequence
  Description of Artificial Sequence: Synthetic oligonucleotide
  Antisense strand to SEQ ID NO: 1284220
uguuacaaggaguucacag

SEQ ID NO: 1284222 - RNA, 19 nt, Artificial Sequence
  Description of Artificial Sequence: Synthetic oligonucleotide
  Sense strand starting at position 3535 of SEQ ID NO: 1241590
guaguuugaguuggauaau

SEQ ID NO: 1284223 - RNA, 19 nt, Artificial Sequence
  Description of Artificial Sequence: Synthetic oligonucleotide
  Antisense strand to SEQ ID NO: 1284222
auuauccaacucaaacuac

SEQ ID NO: 1284224 - RNA, 19 nt, Artificial Sequence
  Description of Artificial Sequence: Synthetic oligonucleotide
  Sense strand starting at position 3544 of SEQ ID NO: 1241590
guuggauaaugccuuauau

SEQ ID NO: 1284225 - RNA, 19 nt, Artificial Sequence
  Description of Artificial Sequence: Synthetic oligonucleotide
  Antisense strand to SEQ ID NO: 1284224
auauaaggcauuauccaac

SEQ ID NO: 1284226 - RNA, 19 nt, Artificial Sequence
  Description of Artificial Sequence: Synthetic oligonucleotide
  Sense strand starting at position 3716 of SEQ ID NO: 1241590
accugacccuuuguuauau

SEQ ID NO: 1284227 - RNA, 19 nt, Artificial Sequence
  Description of Artificial Sequence: Synthetic oligonucleotide
  Antisense strand to SEQ ID NO: 1284226
auauaacaaagggucaggu

SEQ ID NO: 1284228 - RNA, 19 nt, Artificial Sequence
  Description of Artificial Sequence: Synthetic oligonucleotide
  Sense strand starting at position 173 of SEQ ID NO: 1241591
aacugugagguugguaaua

SEQ ID NO: 1284229 - RNA, 19 nt, Artificial Sequence
  Description of Artificial Sequence: Synthetic oligonucleotide
  Antisense strand to SEQ ID NO: 1284228
uauuaccaaccucacaguu

SEQ ID NO: 1284230 - RNA, 19 nt, Artificial Sequence
  Description of Artificial Sequence: Synthetic oligonucleotide
  Sense strand starting at position 545 of SEQ ID NO: 1241591
agagaauaauucgcccaga

SEQ ID NO: 1284231 - RNA, 19 nt, Artificial Sequence
  Description of Artificial Sequence: Synthetic oligonucleotide
  Antisense strand to SEQ ID NO: 1284230
ucugggcgaauuauucucu

SEQ ID NO: 1284232 - RNA, 19 nt, Artificial Sequence
  Description of Artificial Sequence: Synthetic oligonucleotide
  Sense strand starting at position 546 of SEQ ID NO: 1241591
gagaauaauucgcccagag

SEQ ID NO: 1284233 - RNA, 19 nt, Artificial Sequence
  Description of Artificial Sequence: Synthetic oligonucleotide
  Antisense strand to SEQ ID NO: 1284232
cucugggcgaauuauucuc

SEQ ID NO: 1284234 - RNA, 19 nt, Artificial Sequence
  Description of Artificial Sequence: Synthetic oligonucleotide
  Sense strand starting at position 548 of SEQ ID NO: 1241591
gaauaauucgcccagaguc

SEQ ID NO: 1284235 - RNA, 19 nt, Artificial Sequence
  Description of Artificial Sequence: Synthetic oligonucleotide
  Antisense strand to SEQ ID NO: 1284234
gacucugggcgaauuauuc

SEQ ID NO: 1284236 - RNA, 19 nt, Artificial Sequence
  Description of Artificial Sequence: Synthetic oligonucleotide
  Sense strand starting at position 650 of SEQ ID NO: 1241591
uacccuuauuucgugcgau

SEQ ID NO: 1284237 - RNA, 19 nt, Artificial Sequence
  Description of Artificial Sequence: Synthetic oligonucleotide
  Antisense strand to SEQ ID NO: 1284236
aucgcacgaaauaagggua

SEQ ID NO: 1284238 - RNA, 19 nt, Artificial Sequence
  Description of Artificial Sequence: Synthetic oligonucleotide
  Sense strand starting at position 653 of SEQ ID NO: 1241591
ccuuauuucgugcgauuau

SEQ ID NO: 1284239 - RNA, 19 nt, Artificial Sequence
  Description of Artificial Sequence: Synthetic oligonucleotide
  Antisense strand to SEQ ID NO: 1284238
auaaucgcacgaaauaagg

SEQ ID NO: 1284240 - RNA, 19 nt, Artificial Sequence
  Description of Artificial Sequence: Synthetic oligonucleotide
  Sense strand starting at position 693 of SEQ ID NO: 1241591
gaccacgccuuguuauaaa

SEQ ID NO: 1284241 - RNA, 19 nt, Artificial Sequence
  Description of Artificial Sequence: Synthetic oligonucleotide
  Antisense strand to SEQ ID NO: 1284240
uuuauaacaaggcgugguc

SEQ ID NO: 1284242 - RNA, 19 nt, Artificial Sequence
  Description of Artificial Sequence: Synthetic oligonucleotide
  Sense strand starting at position 714 of SEQ ID NO: 1241591
guaucuuucugggcccaga

SEQ ID NO: 1284243 - RNA, 19 nt, Artificial Sequence
  Description of Artificial Sequence: Synthetic oligonucleotide
  Antisense strand to SEQ ID NO: 1284242
ucugggcccagaaagauac

SEQ ID NO: 1284244 - RNA, 19 nt, Artificial Sequence
  Description of Artificial Sequence: Synthetic oligonucleotide
  Sense strand starting at position 1095 of SEQ ID NO: 1241591
aagucuugcauguggagau

SEQ ID NO: 1284245 - RNA, 19 nt, Artificial Sequence
  Description of Artificial Sequence: Synthetic oligonucleotide
  Antisense strand to SEQ ID NO: 1284244
aucuccacaugcaagacuu

SEQ ID NO: 1284246 - RNA, 19 nt, Artificial Sequence
  Description of Artificial Sequence: Synthetic oligonucleotide
  Sense strand starting at position 1193 of SEQ ID NO: 1241591
auaauaauuugcgucucua

SEQ ID NO: 1284247 - RNA, 19 nt, Artificial Sequence
  Description of Artificial Sequence: Synthetic oligonucleotide
  Antisense strand to SEQ ID NO: 1284246
uagagacgcaaauuauuau

SEQ ID NO: 1284248 - RNA, 19 nt, Artificial Sequence
  Description of Artificial Sequence: Synthetic oligonucleotide
  Sense strand starting at position 1240 of SEQ ID NO: 1241591
ucgucagcgcuaagaggau

SEQ ID NO: 1284249 - RNA, 19 nt, Artificial Sequence
  Description of Artificial Sequence: Synthetic oligonucleotide
  Antisense strand to SEQ ID NO: 1284248
auccucuuagcgcugacga

SEQ ID NO: 1284250 - RNA, 19 nt, Artificial Sequence
  Description of Artificial Sequence: Synthetic oligonucleotide
  Sense strand starting at position 1614 of SEQ ID NO: 1241591
guacgugcucaacaaaucu

SEQ ID NO: 1284251 - RNA, 19 nt, Artificial Sequence
  Description of Artificial Sequence: Synthetic oligonucleotide
  Antisense strand to SEQ ID NO: 1284250
agauuuguugagcacguac

SEQ ID NO: 1284252 - RNA, 19 nt, Artificial Sequence
  Description of Artificial Sequence: Synthetic oligonucleotide
  Sense strand starting at position 2063 of SEQ ID NO: 1241591
aagcuuagggauuggaagu

SEQ ID NO: 1284253 - RNA, 19 nt, Artificial Sequence
  Description of Artificial Sequence: Synthetic oligonucleotide
  Antisense strand to SEQ ID NO: 1284252
acuuccaaucccuaagcuu

SEQ ID NO: 1284254 - RNA, 19 nt, Artificial Sequence
  Description of Artificial Sequence: Synthetic oligonucleotide
  Sense strand starting at position 2064 of SEQ ID NO: 1241591
agcuuagggauuggaaguu

SEQ ID NO: 1284255 - RNA, 19 nt, Artificial Sequence
  Description of Artificial Sequence: Synthetic oligonucleotide
  Antisense strand to SEQ ID NO: 1284254
aacuuccaaucccuaagcu

SEQ ID NO: 1284256 - RNA, 19 nt, Artificial Sequence
  Description of Artificial Sequence: Synthetic oligonucleotide
  Sense strand starting at position 2144 of SEQ ID NO: 1241591
gaguuacuagucugggcaa

SEQ ID NO: 1284257 - RNA, 19 nt, Artificial Sequence
  Description of Artificial Sequence: Synthetic oligonucleotide
  Antisense strand to SEQ ID NO: 1284256
uugcccagacuaguaacuc

SEQ ID NO: 1284258 - RNA, 19 nt, Artificial Sequence
  Description of Artificial Sequence: Synthetic oligonucleotide
  Sense strand starting at position 2146 of SEQ ID NO: 1241591
guuacuagucugggcaaag

SEQ ID NO: 1284259 - RNA, 19 nt, Artificial Sequence
  Description of Artificial Sequence: Synthetic oligonucleotide
  Antisense strand to SEQ ID NO: 1284258
cuuugcccagacuaguaac

SEQ ID NO: 1284260 - RNA, 19 nt, Artificial Sequence
  Description of Artificial Sequence: Synthetic oligonucleotide
  Sense strand starting at position 2147 of SEQ ID NO: 1241591
uuacuagucugggcaaagu

SEQ ID NO: 1284261 - RNA, 19 nt, Artificial Sequence
  Description of Artificial Sequence: Synthetic oligonucleotide
  Antisense strand to SEQ ID NO: 1284260
acuuugcccagacuaguaa

SEQ ID NO: 1284262 - RNA, 19 nt, Artificial Sequence
  Description of Artificial Sequence: Synthetic oligonucleotide
  Sense strand starting at position 2158 of SEQ ID NO: 1241591
ggcaaagugcauuaauaac

SEQ ID NO: 1284263 - RNA, 19 nt, Artificial Sequence
  Description of Artificial Sequence: Synthetic oligonucleotide
  Antisense strand to SEQ ID NO: 1284262
guuauuaaugcacuuugcc

SEQ ID NO: 1284264 - RNA, 19 nt, Artificial Sequence
  Description of Artificial Sequence: Synthetic oligonucleotide
  Sense strand starting at position 2258 of SEQ ID NO: 1241591
cauuuagcaguccgugaag

SEQ ID NO: 1284265 - RNA, 19 nt, Artificial Sequence
  Description of Artificial Sequence: Synthetic oligonucleotide
  Antisense strand to SEQ ID NO: 1284264
cuucacggacugcuaaaug

SEQ ID NO: 1284266 - RNA, 19 nt, Artificial Sequence
  Description of Artificial Sequence: Synthetic oligonucleotide
  Sense strand starting at position 2261 of SEQ ID NO: 1241591
uuagcaguccgugaagaag

SEQ ID NO: 1284267 - RNA, 19 nt, Artificial Sequence
  Description of Artificial Sequence: Synthetic oligonucleotide
  Antisense strand to SEQ ID NO: 1284266
cuucuucacggacugcuaa

SEQ ID NO: 1284268 - RNA, 19 nt, Artificial Sequence
  Description of Artificial Sequence: Synthetic oligonucleotide
  Sense strand starting at position 2305 of SEQ ID NO: 1241591
cugaaccucgauugggaaa

SEQ ID NO: 1284269 - RNA, 19 nt, Artificial Sequence
  Description of Artificial Sequence: Synthetic oligonucleotide
  Antisense strand to SEQ ID NO: 1284268
uuucccaaucgagguucag

SEQ ID NO: 1284270 - RNA, 19 nt, Artificial Sequence
  Description of Artificial Sequence: Synthetic oligonucleotide
  Sense strand starting at position 2306 of SEQ ID NO: 1241591
ugaaccucgauugggaaau

SEQ ID NO: 1284271 - RNA, 19 nt, Artificial Sequence
  Description of Artificial Sequence: Synthetic oligonucleotide
  Antisense strand to SEQ ID NO: 1284270
auuucccaaucgagguuca

SEQ ID NO: 1284272 - RNA, 19 nt, Artificial Sequence
  Description of Artificial Sequence: Synthetic oligonucleotide
  Sense strand starting at position 2390 of SEQ ID NO: 1241591
agcugaugugauuggacca

SEQ ID NO: 1284273 - RNA, 19 nt, Artificial Sequence
  Description of Artificial Sequence: Synthetic oligonucleotide
  Antisense strand to SEQ ID NO: 1284272
ugguccaaucacaucagcu

SEQ ID NO: 1284274 - RNA, 19 nt, Artificial Sequence
  Description of Artificial Sequence: Synthetic oligonucleotide
  Sense strand starting at position 2588 of SEQ ID NO: 1241591
gguugagagaaguguauac

SEQ ID NO: 1284275 - RNA, 19 nt, Artificial Sequence
  Description of Artificial Sequence: Synthetic oligonucleotide
  Antisense strand to SEQ ID NO: 1284274
guauacacuucucucaacc

SEQ ID NO: 1284276 - RNA, 19 nt, Artificial Sequence
  Description of Artificial Sequence: Synthetic oligonucleotide
  Sense strand starting at position 2654 of SEQ ID NO: 1241591
aucugaauuaggcagguau

SEQ ID NO: 1284277 - RNA, 19 nt, Artificial Sequence
  Description of Artificial Sequence: Synthetic oligonucleotide
  Antisense strand to SEQ ID NO: 1284276
auaccugccuaauucagau

SEQ ID NO: 1284278 - RNA, 19 nt, Artificial Sequence
  Description of Artificial Sequence: Synthetic oligonucleotide
  Sense strand starting at position 2656 of SEQ ID NO: 1241591
cugaauuaggcagguauaa

SEQ ID NO: 1284279 - RNA, 19 nt, Artificial Sequence
  Description of Artificial Sequence: Synthetic oligonucleotide
  Antisense strand to SEQ ID NO: 1284278
uuauaccugccuaauucag

SEQ ID NO: 1284280 - RNA, 19 nt, Artificial Sequence
  Description of Artificial Sequence: Synthetic oligonucleotide
  Sense strand starting at position 2669 of SEQ ID NO: 1241591
guauaagaauugcuuguau

SEQ ID NO: 1284281 - RNA, 19 nt, Artificial Sequence
  Description of Artificial Sequence: Synthetic oligonucleotide
  Antisense strand to SEQ ID NO: 1284280
auacaagcaauucuuauac

SEQ ID NO: 1284282 - RNA, 19 nt, Artificial Sequence
  Description of Artificial Sequence: Synthetic oligonucleotide
  Sense strand starting at position 2671 of SEQ ID NO: 1241591
auaagaauugcuuguauuc

SEQ ID NO: 1284283 - RNA, 19 nt, Artificial Sequence
  Description of Artificial Sequence: Synthetic oligonucleotide
  Antisense strand to SEQ ID NO: 1284282
gaauacaagcaauucuuau

SEQ ID NO: 1284284 - RNA, 19 nt, Artificial Sequence
  Description of Artificial Sequence: Synthetic oligonucleotide
  Sense strand starting at position 2683 of SEQ ID NO: 1241591
uguauucaugugggagcua

SEQ ID NO: 1284285 - RNA, 19 nt, Artificial Sequence
  Description of Artificial Sequence: Synthetic oligonucleotide
  Antisense strand to SEQ ID NO: 1284284
uagcucccacaugaauaca

SEQ ID NO: 1284286 - RNA, 19 nt, Artificial Sequence
  Description of Artificial Sequence: Synthetic oligonucleotide
  Sense strand starting at position 2699 of SEQ ID NO: 1241591
cuaauagcucagcacaagu

SEQ ID NO: 1284287 - RNA, 19 nt, Artificial Sequence
  Description of Artificial Sequence: Synthetic oligonucleotide
  Antisense strand to SEQ ID NO: 1284286
acuugugcugagcuauuag

SEQ ID NO: 1284288 - RNA, 19 nt, Artificial Sequence
  Description of Artificial Sequence: Synthetic oligonucleotide
  Sense strand starting at position 2712 of SEQ ID NO: 1241591
acaagucaugcauggagua

SEQ ID NO: 1284289 - RNA, 19 nt, Artificial Sequence
  Description of Artificial Sequence: Synthetic oligonucleotide
  Antisense strand to SEQ ID NO: 1284288
uacuccaugcaugacuugu

SEQ ID NO: 1284290 - RNA, 19 nt, Artificial Sequence
  Description of Artificial Sequence: Synthetic oligonucleotide
  Sense strand starting at position 2731 of SEQ ID NO: 1241591
gcugaaagaugacuagguu

SEQ ID NO: 1284291 - RNA, 19 nt, Artificial Sequence
  Description of Artificial Sequence: Synthetic oligonucleotide
  Antisense strand to SEQ ID NO: 1284290
aaccuagucaucuuucagc

SEQ ID NO: 1284292 - RNA, 19 nt, Artificial Sequence
  Description of Artificial Sequence: Synthetic oligonucleotide
  Sense strand starting at position 2734 of SEQ ID NO: 1241591
gaaagaugacuagguuggu

SEQ ID NO: 1284293 - RNA, 19 nt, Artificial Sequence
  Description of Artificial Sequence: Synthetic oligonucleotide
  Antisense strand to SEQ ID NO: 1284292
accaaccuagucaucuuuc

SEQ ID NO: 1284294 - RNA, 19 nt, Artificial Sequence
  Description of Artificial Sequence: Synthetic oligonucleotide
  Sense strand starting at position 2747 of SEQ ID NO: 1241591
guuggugagcaagggaaua

SEQ ID NO: 1284295 - RNA, 19 nt, Artificial Sequence
  Description of Artificial Sequence: Synthetic oligonucleotide
  Antisense strand to SEQ ID NO: 1284294
uauucccuugcucaccaac

SEQ ID NO: 1284296 - RNA, 19 nt, Artificial Sequence
  Description of Artificial Sequence: Synthetic oligonucleotide
  Sense strand starting at position 3380 of SEQ ID NO: 1241591
gauucuagggucugugaac

SEQ ID NO: 1284297 - RNA, 19 nt, Artificial Sequence
  Description of Artificial Sequence: Synthetic oligonucleotide
  Antisense strand to SEQ ID NO: 1284296
guucacagacccuagaauc

SEQ ID NO: 1284298 - RNA, 19 nt, Artificial Sequence
  Description of Artificial Sequence: Synthetic oligonucleotide
  Sense strand starting at position 3381 of SEQ ID NO: 1241591
auucuagggucugugaacu

SEQ ID NO: 1284299 - RNA, 19 nt, Artificial Sequence
  Description of Artificial Sequence: Synthetic oligonucleotide
  Antisense strand to SEQ ID NO: 1284298
aguucacagacccuagaau

SEQ ID NO: 1284300 - RNA, 19 nt, Artificial Sequence
  Description of Artificial Sequence: Synthetic oligonucleotide
  Sense strand starting at position 3391 of SEQ ID NO: 1241591
cugugaacuccuuguaaca

SEQ ID NO: 1284301 - RNA, 19 nt, Artificial Sequence
  Description of Artificial Sequence: Synthetic oligonucleotide
  Antisense strand to SEQ ID NO: 1284300
uguuacaaggaguucacag

SEQ ID NO: 1284302 - RNA, 19 nt, Artificial Sequence
  Description of Artificial Sequence: Synthetic oligonucleotide
  Sense strand starting at position 3548 of SEQ ID NO: 1241591
guaguuugaguuggauaau

SEQ ID NO: 1284303 - RNA, 19 nt, Artificial Sequence
  Description of Artificial Sequence: Synthetic oligonucleotide
  Antisense strand to SEQ ID NO: 1284302
auuauccaacucaaacuac

SEQ ID NO: 1284304 - RNA, 19 nt, Artificial Sequence
  Description of Artificial Sequence: Synthetic oligonucleotide
  Sense strand starting at position 3557 of SEQ ID NO: 1241591
guuggauaaugccuuauau

SEQ ID NO: 1284305 - RNA, 19 nt, Artificial Sequence
  Description of Artificial Sequence: Synthetic oligonucleotide
  Antisense strand to SEQ ID NO: 1284304
auauaaggcauuauccaac

SEQ ID NO: 1284306 - RNA, 19 nt, Artificial Sequence
  Description of Artificial Sequence: Synthetic oligonucleotide
  Sense strand starting at position 3729 of SEQ ID NO: 1241591
accugacccuuuguuauau

SEQ ID NO: 1284307 - RNA, 19 nt, Artificial Sequence
  Description of Artificial Sequence: Synthetic oligonucleotide
  Antisense strand to SEQ ID NO: 1284306
auauaacaaagggucaggu

SEQ ID NO: 1284308 - RNA, 19 nt, Artificial Sequence
  Description of Artificial Sequence: Synthetic oligonucleotide
  Sense strand starting at position 29 of SEQ ID NO: 1241592
augauagaguguguugagu

SEQ ID NO: 1284309 - RNA, 19 nt, Artificial Sequence
  Description of Artificial Sequence: Synthetic oligonucleotide
  Antisense strand to SEQ ID NO: 1284308
acucaacacacucuaucau

SEQ ID NO: 1284310 - RNA, 19 nt, Artificial Sequence
  Description of Artificial Sequence: Synthetic oligonucleotide
  Sense strand starting at position 37 of SEQ ID NO: 1241592
guguguugaguguuuaccu

SEQ ID NO: 1284311 - RNA, 19 nt, Artificial Sequence
  Description of Artificial Sequence: Synthetic oligonucleotide
  Antisense strand to SEQ ID NO: 1284310
agguaaacacucaacacac

SEQ ID NO: 1284312 - RNA, 19 nt, Artificial Sequence
  Description of Artificial Sequence: Synthetic oligonucleotide
  Sense strand starting at position 247 of SEQ ID NO: 1241592
aacugugagguugguaaua

SEQ ID NO: 1284313 - RNA, 19 nt, Artificial Sequence
  Description of Artificial Sequence: Synthetic oligonucleotide
  Antisense strand to SEQ ID NO: 1284312
uauuaccaaccucacaguu

SEQ ID NO: 1284314 - RNA, 19 nt, Artificial Sequence
  Description of Artificial Sequence: Synthetic oligonucleotide
  Sense strand starting at position 619 of SEQ ID NO: 1241592
agagaauaauucgcccaga

SEQ ID NO: 1284315 - RNA, 19 nt, Artificial Sequence
  Description of Artificial Sequence: Synthetic oligonucleotide
  Antisense strand to SEQ ID NO: 1284314
ucugggcgaauuauucucu

SEQ ID NO: 1284316 - RNA, 19 nt, Artificial Sequence
  Description of Artificial Sequence: Synthetic oligonucleotide
  Sense strand starting at position 620 of SEQ ID NO: 1241592
gagaauaauucgcccagag

SEQ ID NO: 1284317 - RNA, 19 nt, Artificial Sequence
  Description of Artificial Sequence: Synthetic oligonucleotide
  Antisense strand to SEQ ID NO: 1284316
cucugggcgaauuauucuc

SEQ ID NO: 1284318 - RNA, 19 nt, Artificial Sequence
  Description of Artificial Sequence: Synthetic oligonucleotide
  Sense strand starting at position 622 of SEQ ID NO: 1241592
gaauaauucgcccagaguc

SEQ ID NO: 1284319 - RNA, 19 nt, Artificial Sequence
  Description of Artificial Sequence: Synthetic oligonucleotide
  Antisense strand to SEQ ID NO: 1284318
gacucugggcgaauuauuc

SEQ ID NO: 1284320 - RNA, 19 nt, Artificial Sequence
  Description of Artificial Sequence: Synthetic oligonucleotide
  Sense strand starting at position 724 of SEQ ID NO: 1241592
uacccuuauuucgugcgau

SEQ ID NO: 1284321 - RNA, 19 nt, Artificial Sequence
  Description of Artificial Sequence: Synthetic oligonucleotide
  Antisense strand to SEQ ID NO: 1284320
aucgcacgaaauaagggua

SEQ ID NO: 1284322 - RNA, 19 nt, Artificial Sequence
  Description of Artificial Sequence: Synthetic oligonucleotide
  Sense strand starting at position 727 of SEQ ID NO: 1241592
ccuuauuucgugcgauuau

SEQ ID NO: 1284323 - RNA, 19 nt, Artificial Sequence
  Description of Artificial Sequence: Synthetic oligonucleotide
  Antisense strand to SEQ ID NO: 1284322
auaaucgcacgaaauaagg

SEQ ID NO: 1284324 - RNA, 19 nt, Artificial Sequence
  Description of Artificial Sequence: Synthetic oligonucleotide
  Sense strand starting at position 788 of SEQ ID NO: 1241592
guaucuuucugggcccaga

SEQ ID NO: 1284325 - RNA, 19 nt, Artificial Sequence
  Description of Artificial Sequence: Synthetic oligonucleotide
  Antisense strand to SEQ ID NO: 1284324
ucugggcccagaaagauac

SEQ ID NO: 1284326 - RNA, 19 nt, Artificial Sequence
  Description of Artificial Sequence: Synthetic oligonucleotide
  Sense strand starting at position 1169 of SEQ ID NO: 1241592
aagucuugcauguggagau

SEQ ID NO: 1284327 - RNA, 19 nt, Artificial Sequence
  Description of Artificial Sequence: Synthetic oligonucleotide
  Antisense strand to SEQ ID NO: 1284326
aucuccacaugcaagacuu

SEQ ID NO: 1284328 - RNA, 19 nt, Artificial Sequence
  Description of Artificial Sequence: Synthetic oligonucleotide
  Sense strand starting at position 1267 of SEQ ID NO: 1241592
auaauaauuugcgucucua

SEQ ID NO: 1284329 - RNA, 19 nt, Artificial Sequence
  Description of Artificial Sequence: Synthetic oligonucleotide
  Antisense strand to SEQ ID NO: 1284328
uagagacgcaaauuauuau

SEQ ID NO: 1284330 - RNA, 19 nt, Artificial Sequence
  Description of Artificial Sequence: Synthetic oligonucleotide
  Sense strand starting at position 1314 of SEQ ID NO: 1241592
ucgucagcgcuaagaggau

SEQ ID NO: 1284331 - RNA, 19 nt, Artificial Sequence
  Description of Artificial Sequence: Synthetic oligonucleotide
  Antisense strand to SEQ ID NO: 1284330
auccucuuagcgcugacga

SEQ ID NO: 1284332 - RNA, 19 nt, Artificial Sequence
  Description of Artificial Sequence: Synthetic oligonucleotide
  Sense strand starting at position 1688 of SEQ ID NO: 1241592
guacgugcucaacaaaucu

SEQ ID NO: 1284333 - RNA, 19 nt, Artificial Sequence
  Description of Artificial Sequence: Synthetic oligonucleotide
  Antisense strand to SEQ ID NO: 1284332
agauuuguugagcacguac

SEQ ID NO: 1284334 - RNA, 19 nt, Artificial Sequence
  Description of Artificial Sequence: Synthetic oligonucleotide
  Sense strand starting at position 2137 of SEQ ID NO: 1241592
aagcuuagggauuggaagu

SEQ ID NO: 1284335 - RNA, 19 nt, Artificial Sequence
  Description of Artificial Sequence: Synthetic oligonucleotide
  Antisense strand to SEQ ID NO: 1284334
acuuccaaucccuaagcuu

SEQ ID NO: 1284336 - RNA, 19 nt, Artificial Sequence
  Description of Artificial Sequence: Synthetic oligonucleotide
  Sense strand starting at position 2138 of SEQ ID NO: 1241592
agcuuagggauuggaaguu

SEQ ID NO: 1284337 - RNA, 19 nt, Artificial Sequence
  Description of Artificial Sequence: Synthetic oligonucleotide
  Antisense strand to SEQ ID NO: 1284336
aacuuccaaucccuaagcu

SEQ ID NO: 1284338 - RNA, 19 nt, Artificial Sequence
  Description of Artificial Sequence: Synthetic oligonucleotide
  Sense strand starting at position 2218 of SEQ ID NO: 1241592
gaguuacuagucugggcaa

SEQ ID NO: 1284339 - RNA, 19 nt, Artificial Sequence
  Description of Artificial Sequence: Synthetic oligonucleotide
  Antisense strand to SEQ ID NO: 1284338
uugcccagacuaguaacuc

SEQ ID NO: 1284340 - RNA, 19 nt, Artificial Sequence
  Description of Artificial Sequence: Synthetic oligonucleotide
  Sense strand starting at position 2220 of SEQ ID NO: 1241592
guuacuagucugggcaaag

SEQ ID NO: 1284341 - RNA, 19 nt, Artificial Sequence
  Description of Artificial Sequence: Synthetic oligonucleotide
  Antisense strand to SEQ ID NO: 1284340
cuuugcccagacuaguaac

SEQ ID NO: 1284342 - RNA, 19 nt, Artificial Sequence
  Description of Artificial Sequence: Synthetic oligonucleotide
  Sense strand starting at position 2221 of SEQ ID NO: 1241592
uuacuagucugggcaaagu

SEQ ID NO: 1284343 - RNA, 19 nt, Artificial Sequence
  Description of Artificial Sequence: Synthetic oligonucleotide
  Antisense strand to SEQ ID NO: 1284342
acuuugcccagacuaguaa

SEQ ID NO: 1284344 - RNA, 19 nt, Artificial Sequence
  Description of Artificial Sequence: Synthetic oligonucleotide
  Sense strand starting at position 2232 of SEQ ID NO: 1241592
ggcaaagugcauuaauaac

SEQ ID NO: 1284345 - RNA, 19 nt, Artificial Sequence
  Description of Artificial Sequence: Synthetic oligonucleotide
  Antisense strand to SEQ ID NO: 1284344
guuauuaaugcacuuugcc

SEQ ID NO: 1284346 - RNA, 19 nt, Artificial Sequence
  Description of Artificial Sequence: Synthetic oligonucleotide
  Sense strand starting at position 2332 of SEQ ID NO: 1241592
cauuuagcaguccgugaag

SEQ ID NO: 1284347 - RNA, 19 nt, Artificial Sequence
  Description of Artificial Sequence: Synthetic oligonucleotide
  Antisense strand to SEQ ID NO: 1284346
cuucacggacugcuaaaug

SEQ ID NO: 1284348 - RNA, 19 nt, Artificial Sequence
  Description of Artificial Sequence: Synthetic oligonucleotide
  Sense strand starting at position 2335 of SEQ ID NO: 1241592
uuagcaguccgugaagaag

SEQ ID NO: 1284349 - RNA, 19 nt, Artificial Sequence
  Description of Artificial Sequence: Synthetic oligonucleotide
  Antisense strand to SEQ ID NO: 1284348
cuucuucacggacugcuaa

SEQ ID NO: 1284350 - RNA, 19 nt, Artificial Sequence
  Description of Artificial Sequence: Synthetic oligonucleotide
  Sense strand starting at position 2379 of SEQ ID NO: 1241592
cugaaccucgauugggaaa

SEQ ID NO: 1284351 - RNA, 19 nt, Artificial Sequence
  Description of Artificial Sequence: Synthetic oligonucleotide
  Antisense strand to SEQ ID NO: 1284350
uuucccaaucgagguucag

SEQ ID NO: 1284352 - RNA, 19 nt, Artificial Sequence
  Description of Artificial Sequence: Synthetic oligonucleotide
  Sense strand starting at position 2380 of SEQ ID NO: 1241592
ugaaccucgauugggaaau

SEQ ID NO: 1284353 - RNA, 19 nt, Artificial Sequence
  Description of Artificial Sequence: Synthetic oligonucleotide
  Antisense strand to SEQ ID NO: 1284352
auuucccaaucgagguuca

SEQ ID NO: 1284354 - RNA, 19 nt, Artificial Sequence
  Description of Artificial Sequence: Synthetic oligonucleotide
  Sense strand starting at position 2464 of SEQ ID NO: 1241592
agcugaugugauuggacca

SEQ ID NO: 1284355 - RNA, 19 nt, Artificial Sequence
  Description of Artificial Sequence: Synthetic oligonucleotide
  Antisense strand to SEQ ID NO: 1284354
ugguccaaucacaucagcu

SEQ ID NO: 1284356 - RNA, 19 nt, Artificial Sequence
  Description of Artificial Sequence: Synthetic oligonucleotide
  Sense strand starting at position 2662 of SEQ ID NO: 1241592
gguugagagaaguguauac

SEQ ID NO: 1284357 - RNA, 19 nt, Artificial Sequence
  Description of Artificial Sequence: Synthetic oligonucleotide
  Antisense strand to SEQ ID NO: 1284356
guauacacuucucucaacc

SEQ ID NO: 1284358 - RNA, 19 nt, Artificial Sequence
  Description of Artificial Sequence: Synthetic oligonucleotide
  Sense strand starting at position 2728 of SEQ ID NO: 1241592
aucugaauuaggcagguau

SEQ ID NO: 1284359 - RNA, 19 nt, Artificial Sequence
  Description of Artificial Sequence: Synthetic oligonucleotide
  Antisense strand to SEQ ID NO: 1284358
auaccugccuaauucagau

SEQ ID NO: 1284360 - RNA, 19 nt, Artificial Sequence
  Description of Artificial Sequence: Synthetic oligonucleotide
  Sense strand starting at position 2730 of SEQ ID NO: 1241592
cugaauuaggcagguauaa

SEQ ID NO: 1284361 - RNA, 19 nt, Artificial Sequence
  Description of Artificial Sequence: Synthetic oligonucleotide
  Antisense strand to SEQ ID NO: 1284360
uuauaccugccuaauucag

SEQ ID NO: 1284362 - RNA, 19 nt, Artificial Sequence
  Description of Artificial Sequence: Synthetic oligonucleotide
  Sense strand starting at position 2743 of SEQ ID NO: 1241592
guauaagaauugcuuguau

SEQ ID NO: 1284363 - RNA, 19 nt, Artificial Sequence
  Description of Artificial Sequence: Synthetic oligonucleotide
  Antisense strand to SEQ ID NO: 1284362
auacaagcaauucuuauac

SEQ ID NO: 1284364 - RNA, 19 nt, Artificial Sequence
  Description of Artificial Sequence: Synthetic oligonucleotide
  Sense strand starting at position 2745 of SEQ ID NO: 1241592
auaagaauugcuuguauuc

SEQ ID NO: 1284365 - RNA, 19 nt, Artificial Sequence
  Description of Artificial Sequence: Synthetic oligonucleotide
  Antisense strand to SEQ ID NO: 1284364
gaauacaagcaauucuuau

SEQ ID NO: 1284366 - RNA, 19 nt, Artificial Sequence
  Description of Artificial Sequence: Synthetic oligonucleotide
  Sense strand starting at position 2773 of SEQ ID NO: 1241592
cuaauagcucagcacaagu

SEQ ID NO: 1284367 - RNA, 19 nt, Artificial Sequence
  Description of Artificial Sequence: Synthetic oligonucleotide
  Antisense strand to SEQ ID NO: 1284366
acuugugcugagcuauuag

SEQ ID NO: 1284368 - RNA, 19 nt, Artificial Sequence
  Description of Artificial Sequence: Synthetic oligonucleotide
  Sense strand starting at position 2786 of SEQ ID NO: 1241592
acaagucaugcauggagua

SEQ ID NO: 1284369 - RNA, 19 nt, Artificial Sequence
  Description of Artificial Sequence: Synthetic oligonucleotide
  Antisense strand to SEQ ID NO: 1284368
uacuccaugcaugacuugu

SEQ ID NO: 1284370 - RNA, 19 nt, Artificial Sequence
  Description of Artificial Sequence: Synthetic oligonucleotide
  Sense strand starting at position 2805 of SEQ ID NO: 1241592
gcugaaagaugacuagguu

SEQ ID NO: 1284371 - RNA, 19 nt, Artificial Sequence
  Description of Artificial Sequence: Synthetic oligonucleotide
  Antisense strand to SEQ ID NO: 1284370
aaccuagucaucuuucagc

SEQ ID NO: 1284372 - RNA, 19 nt, Artificial Sequence
  Description of Artificial Sequence: Synthetic oligonucleotide
  Sense strand starting at position 2808 of SEQ ID NO: 1241592
gaaagaugacuagguuggu

SEQ ID NO: 1284373 - RNA, 19 nt, Artificial Sequence
  Description of Artificial Sequence: Synthetic oligonucleotide
  Antisense strand to SEQ ID NO: 1284372
accaaccuagucaucuuuc

SEQ ID NO: 1284374 - RNA, 19 nt, Artificial Sequence
  Description of Artificial Sequence: Synthetic oligonucleotide
  Sense strand starting at position 2821 of SEQ ID NO: 1241592
guuggugagcaagggaaua

SEQ ID NO: 1284375 - RNA, 19 nt, Artificial Sequence
  Description of Artificial Sequence: Synthetic oligonucleotide
  Antisense strand to SEQ ID NO: 1284374
uauucccuugcucaccaac

SEQ ID NO: 1284376 - RNA, 19 nt, Artificial Sequence
  Description of Artificial Sequence: Synthetic oligonucleotide
  Sense strand starting at position 3454 of SEQ ID NO: 1241592
gauucuagggucugugaac

SEQ ID NO: 1284377 - RNA, 19 nt, Artificial Sequence
  Description of Artificial Sequence: Synthetic oligonucleotide
  Antisense strand to SEQ ID NO: 1284376
guucacagacccuagaauc

SEQ ID NO: 1284378 - RNA, 19 nt, Artificial Sequence
  Description of Artificial Sequence: Synthetic oligonucleotide
  Sense strand starting at position 3455 of SEQ ID NO: 1241592
auucuagggucugugaacu

SEQ ID NO: 1284379 - RNA, 19 nt, Artificial Sequence
  Description of Artificial Sequence: Synthetic oligonucleotide
  Antisense strand to SEQ ID NO: 1284378
aguucacagacccuagaau

SEQ ID NO: 1284380 - RNA, 19 nt, Artificial Sequence
  Description of Artificial Sequence: Synthetic oligonucleotide
  Sense strand starting at position 3465 of SEQ ID NO: 1241592
cugugaacuccuuguaaca

SEQ ID NO: 1284381 - RNA, 19 nt, Artificial Sequence
  Description of Artificial Sequence: Synthetic oligonucleotide
  Antisense strand to SEQ ID NO: 1284380
uguuacaaggaguucacag

SEQ ID NO: 1284382 - RNA, 19 nt, Artificial Sequence
  Description of Artificial Sequence: Synthetic oligonucleotide
  Sense strand starting at position 3622 of SEQ ID NO: 1241592
guaguuugaguuggauaau

SEQ ID NO: 1284383 - RNA, 19 nt, Artificial Sequence
  Description of Artificial Sequence: Synthetic oligonucleotide
  Antisense strand to SEQ ID NO: 1284382
auuauccaacucaaacuac

SEQ ID NO: 1284384 - RNA, 19 nt, Artificial Sequence
  Description of Artificial Sequence: Synthetic oligonucleotide
  Sense strand starting at position 3631 of SEQ ID NO: 1241592
guuggauaaugccuuauau

SEQ ID NO: 1284385 - RNA, 19 nt, Artificial Sequence
  Description of Artificial Sequence: Synthetic oligonucleotide
  Antisense strand to SEQ ID NO: 1284384
auauaaggcauuauccaac

SEQ ID NO: 1284386 - RNA, 19 nt, Artificial Sequence
  Description of Artificial Sequence: Synthetic oligonucleotide
  Sense strand starting at position 3803 of SEQ ID NO: 1241592
accugacccuuuguuauau

SEQ ID NO: 1284387 - RNA, 19 nt, Artificial Sequence
  Description of Artificial Sequence: Synthetic oligonucleotide
  Antisense strand to SEQ ID NO: 1284386
auauaacaaagggucaggu

SEQ ID NO: 1284388 - RNA, 19 nt, Artificial Sequence
  Description of Artificial Sequence: Synthetic oligonucleotide
  Sense strand starting at position 134 of SEQ ID NO: 1241593
aucagaugguggguuucaa

SEQ ID NO: 1284389 - RNA, 19 nt, Artificial Sequence
  Description of Artificial Sequence: Synthetic oligonucleotide
  Antisense strand to SEQ ID NO: 1284388
uugaaacccaccaucugau

SEQ ID NO: 1284390 - RNA, 19 nt, Artificial Sequence
  Description of Artificial Sequence: Synthetic oligonucleotide
  Sense strand starting at position 189 of SEQ ID NO: 1241593
gauuaaguaguguagauga

SEQ ID NO: 1284391 - RNA, 19 nt, Artificial Sequence
  Description of Artificial Sequence: Synthetic oligonucleotide
  Antisense strand to SEQ ID NO: 1284390
ucaucuacacuacuuaauc

SEQ ID NO: 1284392 - RNA, 19 nt, Artificial Sequence
  Description of Artificial Sequence: Synthetic oligonucleotide
  Sense strand starting at position 213 of SEQ ID NO: 1241593
caagauauugcauaugugu

SEQ ID NO: 1284393 - RNA, 19 nt, Artificial Sequence
  Description of Artificial Sequence: Synthetic oligonucleotide
  Antisense strand to SEQ ID NO: 1284392
acacauaugcaauaucuug

SEQ ID NO: 1284394 - RNA, 19 nt, Artificial Sequence
  Description of Artificial Sequence: Synthetic oligonucleotide
  Sense strand starting at position 219 of SEQ ID NO: 1241593
auugcauauguguagagga

SEQ ID NO: 1284395 - RNA, 19 nt, Artificial Sequence
  Description of Artificial Sequence: Synthetic oligonucleotide
  Antisense strand to SEQ ID NO: 1284394
uccucuacacauaugcaau

SEQ ID NO: 1284396 - RNA, 19 nt, Artificial Sequence
  Description of Artificial Sequence: Synthetic oligonucleotide
  Sense strand starting at position 290 of SEQ ID NO: 1241593
auagaacuaugccuugaaa

SEQ ID NO: 1284397 - RNA, 19 nt, Artificial Sequence
  Description of Artificial Sequence: Synthetic oligonucleotide
  Antisense strand to SEQ ID NO: 1284396
uuucaaggcauaguucuau

SEQ ID NO: 1284398 - RNA, 19 nt, Artificial Sequence
  Description of Artificial Sequence: Synthetic oligonucleotide
  Sense strand starting at position 292 of SEQ ID NO: 1241593
agaacuaugccuugaaagc

SEQ ID NO: 1284399 - RNA, 19 nt, Artificial Sequence
  Description of Artificial Sequence: Synthetic oligonucleotide
  Antisense strand to SEQ ID NO: 1284398
gcuuucaaggcauaguucu

SEQ ID NO: 1284400 - RNA, 19 nt, Artificial Sequence
  Description of Artificial Sequence: Synthetic oligonucleotide
  Sense strand starting at position 345 of SEQ ID NO: 1241593
uuaagcucugauuaagcaa

SEQ ID NO: 1284401 - RNA, 19 nt, Artificial Sequence
  Description of Artificial Sequence: Synthetic oligonucleotide
  Antisense strand to SEQ ID NO: 1284400
uugcuuaaucagagcuuaa

SEQ ID NO: 1284402 - RNA, 19 nt, Artificial Sequence
  Description of Artificial Sequence: Synthetic oligonucleotide
  Sense strand starting at position 348 of SEQ ID NO: 1241593
agcucugauuaagcaaacu

SEQ ID NO: 1284403 - RNA, 19 nt, Artificial Sequence
  Description of Artificial Sequence: Synthetic oligonucleotide
  Antisense strand to SEQ ID NO: 1284402
aguuugcuuaaucagagcu

SEQ ID NO: 1284404 - RNA, 19 nt, Artificial Sequence
  Description of Artificial Sequence: Synthetic oligonucleotide
  Sense strand starting at position 402 of SEQ ID NO: 1241593
guauuacugcaucagggau

SEQ ID NO: 1284405 - RNA, 19 nt, Artificial Sequence
  Description of Artificial Sequence: Synthetic oligonucleotide
  Antisense strand to SEQ ID NO: 1284404
aucccugaugcaguaauac

SEQ ID NO: 1284406 - RNA, 19 nt, Artificial Sequence
  Description of Artificial Sequence: Synthetic oligonucleotide
  Sense strand starting at position 631 of SEQ ID NO: 1241593
caguauuuguugccaaaug

SEQ ID NO: 1284407 - RNA, 19 nt, Artificial Sequence
  Description of Artificial Sequence: Synthetic oligonucleotide
  Antisense strand to SEQ ID NO: 1284406
cauuuggcaacaaauacug

SEQ ID NO: 1284408 - RNA, 19 nt, Artificial Sequence
  Description of Artificial Sequence: Synthetic oligonucleotide
  Sense strand starting at position 641 of SEQ ID NO: 1241593
ugccaaaugguguaauaca

SEQ ID NO: 1284409 - RNA, 19 nt, Artificial Sequence
  Description of Artificial Sequence: Synthetic oligonucleotide
  Antisense strand to SEQ ID NO: 1284408
uguauuacaccauuuggca

SEQ ID NO: 1284410 - RNA, 19 nt, Artificial Sequence
  Description of Artificial Sequence: Synthetic oligonucleotide
  Sense strand starting at position 695 of SEQ ID NO: 1241593
guagaaauuuaagaguucu

SEQ ID NO: 1284411 - RNA, 19 nt, Artificial Sequence
  Description of Artificial Sequence: Synthetic oligonucleotide
  Antisense strand to SEQ ID NO: 1284410
agaacucuuaaauuucuac

SEQ ID NO: 1284412 - RNA, 19 nt, Artificial Sequence
  Description of Artificial Sequence: Synthetic oligonucleotide
  Sense strand starting at position 757 of SEQ ID NO: 1241593
gaaagugauugggucugga

SEQ ID NO: 1284413 - RNA, 19 nt, Artificial Sequence
  Description of Artificial Sequence: Synthetic oligonucleotide
  Antisense strand to SEQ ID NO: 1284412
uccagacccaaucacuuuc

SEQ ID NO: 1284414 - RNA, 19 nt, Artificial Sequence
  Description of Artificial Sequence: Synthetic oligonucleotide
  Sense strand starting at position 760 of SEQ ID NO: 1241593
agugauugggucuggaauu

SEQ ID NO: 1284415 - RNA, 19 nt, Artificial Sequence
  Description of Artificial Sequence: Synthetic oligonucleotide
  Antisense strand to SEQ ID NO: 1284414
aauuccagacccaaucacu

SEQ ID NO: 1284416 - RNA, 19 nt, Artificial Sequence
  Description of Artificial Sequence: Synthetic oligonucleotide
  Sense strand starting at position 1033 of SEQ ID NO: 1241593
agguccuuaccacauguaa

SEQ ID NO: 1284417 - RNA, 19 nt, Artificial Sequence
  Description of Artificial Sequence: Synthetic oligonucleotide
  Antisense strand to SEQ ID NO: 1284416
uuacaugugguaaggaccu

SEQ ID NO: 1284418 - RNA, 19 nt, Artificial Sequence
  Description of Artificial Sequence: Synthetic oligonucleotide
  Sense strand starting at position 1092 of SEQ ID NO: 1241593
gagagaguaugugacauuu

SEQ ID NO: 1284419 - RNA, 19 nt, Artificial Sequence
  Description of Artificial Sequence: Synthetic oligonucleotide
  Antisense strand to SEQ ID NO: 1284418
aaaugucacauacucucuc

SEQ ID NO: 1284420 - RNA, 19 nt, Artificial Sequence
  Description of Artificial Sequence: Synthetic oligonucleotide
  Sense strand starting at position 1144 of SEQ ID NO: 1241593
cauguuucucacggagaaa

SEQ ID NO: 1284421 - RNA, 19 nt, Artificial Sequence
  Description of Artificial Sequence: Synthetic oligonucleotide
  Antisense strand to SEQ ID NO: 1284420
uuucuccgugagaaacaug

SEQ ID NO: 1284422 - RNA, 19 nt, Artificial Sequence
  Description of Artificial Sequence: Synthetic oligonucleotide
  Sense strand starting at position 1397 of SEQ ID NO: 1241593
cggccaaucuaaucaggau

SEQ ID NO: 1284423 - RNA, 19 nt, Artificial Sequence
  Description of Artificial Sequence: Synthetic oligonucleotide
  Antisense strand to SEQ ID NO: 1284422
auccugauuagauuggccg

SEQ ID NO: 1284424 - RNA, 19 nt, Artificial Sequence
  Description of Artificial Sequence: Synthetic oligonucleotide
  Sense strand starting at position 1457 of SEQ ID NO: 1241593
uuguuuccagaguaaauac

SEQ ID NO: 1284425 - RNA, 19 nt, Artificial Sequence
  Description of Artificial Sequence: Synthetic oligonucleotide
  Antisense strand to SEQ ID NO: 1284424
guauuuacucuggaaacaa

SEQ ID NO: 1284426 - RNA, 19 nt, Artificial Sequence
  Description of Artificial Sequence: Synthetic oligonucleotide
  Sense strand starting at position 1556 of SEQ ID NO: 1241593
acguuuauauauucugaga

SEQ ID NO: 1284427 - RNA, 19 nt, Artificial Sequence
  Description of Artificial Sequence: Synthetic oligonucleotide
  Antisense strand to SEQ ID NO: 1284426
ucucagaauauauaaacgu

SEQ ID NO: 1284428 - RNA, 19 nt, Artificial Sequence
  Description of Artificial Sequence: Synthetic oligonucleotide
  Sense strand starting at position 2443 of SEQ ID NO: 1241593
uuauuuagguuccagauaa

SEQ ID NO: 1284429 - RNA, 19 nt, Artificial Sequence
  Description of Artificial Sequence: Synthetic oligonucleotide
  Antisense strand to SEQ ID NO: 1284428
uuaucuggaaccuaaauaa

SEQ ID NO: 1284430 - RNA, 19 nt, Artificial Sequence
  Description of Artificial Sequence: Synthetic oligonucleotide
  Sense strand starting at position 2476 of SEQ ID NO: 1241593
guguuauuagguaggcugu

SEQ ID NO: 1284431 - RNA, 19 nt, Artificial Sequence
  Description of Artificial Sequence: Synthetic oligonucleotide
  Antisense strand to SEQ ID NO: 1284430
acagccuaccuaauaacac

SEQ ID NO: 1284432 - RNA, 19 nt, Artificial Sequence
  Description of Artificial Sequence: Synthetic oligonucleotide
  Sense strand starting at position 2610 of SEQ ID NO: 1241593
uccaguacugggugggaaa

SEQ ID NO: 1284433 - RNA, 19 nt, Artificial Sequence
  Description of Artificial Sequence: Synthetic oligonucleotide
  Antisense strand to SEQ ID NO: 1284432
uuucccacccaguacugga

SEQ ID NO: 1284434 - RNA, 19 nt, Artificial Sequence
  Description of Artificial Sequence: Synthetic oligonucleotide
  Sense strand starting at position 2692 of SEQ ID NO: 1241593
cugcuuaugcaauauagag

SEQ ID NO: 1284435 - RNA, 19 nt, Artificial Sequence
  Description of Artificial Sequence: Synthetic oligonucleotide
  Antisense strand to SEQ ID NO: 1284434
cucuauauugcauaagcag

SEQ ID NO: 1284436 - RNA, 19 nt, Artificial Sequence
  Description of Artificial Sequence: Synthetic oligonucleotide
  Sense strand starting at position 2733 of SEQ ID NO: 1241593
uugacaaaguugucaaauc

SEQ ID NO: 1284437 - RNA, 19 nt, Artificial Sequence
  Description of Artificial Sequence: Synthetic oligonucleotide
  Antisense strand to SEQ ID NO: 1284436
gauuugacaacuuugucaa

SEQ ID NO: 1284438 - RNA, 19 nt, Artificial Sequence
  Description of Artificial Sequence: Synthetic oligonucleotide
  Sense strand starting at position 2775 of SEQ ID NO: 1241593
gaugaccuugugcaaguuu

SEQ ID NO: 1284439 - RNA, 19 nt, Artificial Sequence
  Description of Artificial Sequence: Synthetic oligonucleotide
  Antisense strand to SEQ ID NO: 1284438
aaacuugcacaaggucauc

SEQ ID NO: 1284440 - RNA, 19 nt, Artificial Sequence
  Description of Artificial Sequence: Synthetic oligonucleotide
  Sense strand starting at position 2833 of SEQ ID NO: 1241593
ggauauuaauaucuuugca

SEQ ID NO: 1284441 - RNA, 19 nt, Artificial Sequence
  Description of Artificial Sequence: Synthetic oligonucleotide
  Antisense strand to SEQ ID NO: 1284440
ugcaaagauauuaauaucc

SEQ ID NO: 1284442 - RNA, 19 nt, Artificial Sequence
  Description of Artificial Sequence: Synthetic oligonucleotide
  Sense strand starting at position 2887 of SEQ ID NO: 1241593
ccaauaacuuguguaaagu

SEQ ID NO: 1284443 - RNA, 19 nt, Artificial Sequence
  Description of Artificial Sequence: Synthetic oligonucleotide
  Antisense strand to SEQ ID NO: 1284442
acuuuacacaaguuauugg

SEQ ID NO: 1284444 - RNA, 19 nt, Artificial Sequence
  Description of Artificial Sequence: Synthetic oligonucleotide
  Sense strand starting at position 2972 of SEQ ID NO: 1241593
agcacuuaagcugaggaau

SEQ ID NO: 1284445 - RNA, 19 nt, Artificial Sequence
  Description of Artificial Sequence: Synthetic oligonucleotide
  Antisense strand to SEQ ID NO: 1284444
auuccucagcuuaagugcu

SEQ ID NO: 1284446 - RNA, 19 nt, Artificial Sequence
  Description of Artificial Sequence: Synthetic oligonucleotide
  Sense strand starting at position 3008 of SEQ ID NO: 1241593
ccacuauuacaauagugua

SEQ ID NO: 1284447 - RNA, 19 nt, Artificial Sequence
  Description of Artificial Sequence: Synthetic oligonucleotide
  Antisense strand to SEQ ID NO: 1284446
uacacuauuguaauagugg

SEQ ID NO: 1284448 - RNA, 19 nt, Artificial Sequence
  Description of Artificial Sequence: Synthetic oligonucleotide
  Sense strand starting at position 3227 of SEQ ID NO: 1241593
ugguuuagugggugauaaa

SEQ ID NO: 1284449 - RNA, 19 nt, Artificial Sequence
  Description of Artificial Sequence: Synthetic oligonucleotide
  Antisense strand to SEQ ID NO: 1284448
uuuaucacccacuaaacca

SEQ ID NO: 1284450 - RNA, 19 nt, Artificial Sequence
  Description of Artificial Sequence: Synthetic oligonucleotide
  Sense strand starting at position 3228 of SEQ ID NO: 1241593
gguuuagugggugauaaac

SEQ ID NO: 1284451 - RNA, 19 nt, Artificial Sequence
  Description of Artificial Sequence: Synthetic oligonucleotide
  Antisense strand to SEQ ID NO: 1284450
guuuaucacccacuaaacc

SEQ ID NO: 1284452 - RNA, 19 nt, Artificial Sequence
  Description of Artificial Sequence: Synthetic oligonucleotide
  Sense strand starting at position 3288 of SEQ ID NO: 1241593
agcauugucauagagguau

SEQ ID NO: 1284453 - RNA, 19 nt, Artificial Sequence
  Description of Artificial Sequence: Synthetic oligonucleotide
  Antisense strand to SEQ ID NO: 1284452
auaccucuaugacaaugcu

SEQ ID NO: 1284454 - RNA, 19 nt, Artificial Sequence
  Description of Artificial Sequence: Synthetic oligonucleotide
  Sense strand starting at position 3292 of SEQ ID NO: 1241593
uugucauagagguaugagu

SEQ ID NO: 1284455 - RNA, 19 nt, Artificial Sequence
  Description of Artificial Sequence: Synthetic oligonucleotide
  Antisense strand to SEQ ID NO: 1284454
acucauaccucuaugacaa

SEQ ID NO: 1284456 - RNA, 19 nt, Artificial Sequence
  Description of Artificial Sequence: Synthetic oligonucleotide
  Sense strand starting at position 3308 of SEQ ID NO: 1241593
agugcuauccaagagcaaa

SEQ ID NO: 1284457 - RNA, 19 nt, Artificial Sequence
  Description of Artificial Sequence: Synthetic oligonucleotide
  Antisense strand to SEQ ID NO: 1284456
uuugcucuuggauagcacu

SEQ ID NO: 1284458 - RNA, 19 nt, Artificial Sequence
  Description of Artificial Sequence: Synthetic oligonucleotide
  Sense strand starting at position 3337 of SEQ ID NO: 1241593
gugcaucuugggucguuua

SEQ ID NO: 1284459 - RNA, 19 nt, Artificial Sequence
  Description of Artificial Sequence: Synthetic oligonucleotide
  Antisense strand to SEQ ID NO: 1284458
uaaacgacccaagaugcac

SEQ ID NO: 1284460 - RNA, 19 nt, Artificial Sequence
  Description of Artificial Sequence: Synthetic oligonucleotide
  Sense strand starting at position 3499 of SEQ ID NO: 1241593
cuggcuucccaagguagaa

SEQ ID NO: 1284461 - RNA, 19 nt, Artificial Sequence
  Description of Artificial Sequence: Synthetic oligonucleotide
  Antisense strand to SEQ ID NO: 1284460
uucuaccuugggaagccag

SEQ ID NO: 1284462 - RNA, 19 nt, Artificial Sequence
  Description of Artificial Sequence: Synthetic oligonucleotide
  Sense strand starting at position 3520 of SEQ ID NO: 1241593
acuggaaucaugugugacu

SEQ ID NO: 1284463 - RNA, 19 nt, Artificial Sequence
  Description of Artificial Sequence: Synthetic oligonucleotide
  Antisense strand to SEQ ID NO: 1284462
agucacacaugauuccagu

SEQ ID NO: 1284464 - RNA, 19 nt, Artificial Sequence
  Description of Artificial Sequence: Synthetic oligonucleotide
  Sense strand starting at position 3521 of SEQ ID NO: 1241593
cuggaaucaugugugacuu

SEQ ID NO: 1284465 - RNA, 19 nt, Artificial Sequence
  Description of Artificial Sequence: Synthetic oligonucleotide
  Antisense strand to SEQ ID NO: 1284464
aagucacacaugauuccag

SEQ ID NO: 1284466 - RNA, 19 nt, Artificial Sequence
  Description of Artificial Sequence: Synthetic oligonucleotide
  Sense strand starting at position 3931 of SEQ ID NO: 1241593
cucugcuuccaggaugacu

SEQ ID NO: 1284467 - RNA, 19 nt, Artificial Sequence
  Description of Artificial Sequence: Synthetic oligonucleotide
  Antisense strand to SEQ ID NO: 1284466
agucauccuggaagcagag

SEQ ID NO: 1284468 - RNA, 19 nt, Artificial Sequence
  Description of Artificial Sequence: Synthetic oligonucleotide
  Sense strand starting at position 437 of SEQ ID NO: 1241594
gaagaagaguuacuuucca

SEQ ID NO: 1284469 - RNA, 19 nt, Artificial Sequence
  Description of Artificial Sequence: Synthetic oligonucleotide
  Antisense strand to SEQ ID NO: 1284468
uggaaaguaacucuucuuc

SEQ ID NO: 1284470 - RNA, 19 nt, Artificial Sequence
  Description of Artificial Sequence: Synthetic oligonucleotide
  Sense strand starting at position 442 of SEQ ID NO: 1241594
agaguuacuuuccauuuga

SEQ ID NO: 1284471 - RNA, 19 nt, Artificial Sequence
  Description of Artificial Sequence: Synthetic oligonucleotide
  Antisense strand to SEQ ID NO: 1284470
ucaaauggaaaguaacucu

SEQ ID NO: 1284472 - RNA, 19 nt, Artificial Sequence
  Description of Artificial Sequence: Synthetic oligonucleotide
  Sense strand starting at position 472 of SEQ ID NO: 1241594
guugcaauuucuuacuaug

SEQ ID NO: 1284473 - RNA, 19 nt, Artificial Sequence
  Description of Artificial Sequence: Synthetic oligonucleotide
  Antisense strand to SEQ ID NO: 1284472
cauaguaagaaauugcaac

SEQ ID NO: 1284474 - RNA, 19 nt, Artificial Sequence
  Description of Artificial Sequence: Synthetic oligonucleotide
  Sense strand starting at position 475 of SEQ ID NO: 1241594
gcaauuucuuacuaugaga

SEQ ID NO: 1284475 - RNA, 19 nt, Artificial Sequence
  Description of Artificial Sequence: Synthetic oligonucleotide
  Antisense strand to SEQ ID NO: 1284474
ucucauaguaagaaauugc

SEQ ID NO: 1284476 - RNA, 19 nt, Artificial Sequence
  Description of Artificial Sequence: Synthetic oligonucleotide
  Sense strand starting at position 630 of SEQ ID NO: 1241594
ugggauguaucccaaucuu

SEQ ID NO: 1284477 - RNA, 19 nt, Artificial Sequence
  Description of Artificial Sequence: Synthetic oligonucleotide
  Antisense strand to SEQ ID NO: 1284476
aagauugggauacauccca

SEQ ID NO: 1284478 - RNA, 19 nt, Artificial Sequence
  Description of Artificial Sequence: Synthetic oligonucleotide
  Sense strand starting at position 808 of SEQ ID NO: 1241594
gagauauugucccucugua

SEQ ID NO: 1284479 - RNA, 19 nt, Artificial Sequence
  Description of Artificial Sequence: Synthetic oligonucleotide
  Antisense strand to SEQ ID NO: 1284478
uacagagggacaauaucuc

SEQ ID NO: 1284480 - RNA, 19 nt, Artificial Sequence
  Description of Artificial Sequence: Synthetic oligonucleotide
  Sense strand starting at position 1009 of SEQ ID NO: 1241594
uugcgaaagacucacggaa

SEQ ID NO: 1284481 - RNA, 19 nt, Artificial Sequence
  Description of Artificial Sequence: Synthetic oligonucleotide
  Antisense strand to SEQ ID NO: 1284480
uuccgugagucuuucgcaa

SEQ ID NO: 1284482 - RNA, 19 nt, Artificial Sequence
  Description of Artificial Sequence: Synthetic oligonucleotide
  Sense strand starting at position 1021 of SEQ ID NO: 1241594
cacggaauuccaggagcua

SEQ ID NO: 1284483 - RNA, 19 nt, Artificial Sequence
  Description of Artificial Sequence: Synthetic oligonucleotide
  Antisense strand to SEQ ID NO: 1284482
uagcuccuggaauuccgug

SEQ ID NO: 1284484 - RNA, 19 nt, Artificial Sequence
  Description of Artificial Sequence: Synthetic oligonucleotide
  Sense strand starting at position 1240 of SEQ ID NO: 1241594
agagaauaguguccggcau

SEQ ID NO: 1284485 - RNA, 19 nt, Artificial Sequence
  Description of Artificial Sequence: Synthetic oligonucleotide
  Antisense strand to SEQ ID NO: 1284484
augccggacacuauucucu

SEQ ID NO: 1284486 - RNA, 19 nt, Artificial Sequence
  Description of Artificial Sequence: Synthetic oligonucleotide
  Sense strand starting at position 1241 of SEQ ID NO: 1241594
gagaauaguguccggcaua

SEQ ID NO: 1284487 - RNA, 19 nt, Artificial Sequence
  Description of Artificial Sequence: Synthetic oligonucleotide
  Antisense strand to SEQ ID NO: 1284486
uaugccggacacuauucuc

SEQ ID NO: 1284488 - RNA, 19 nt, Artificial Sequence
  Description of Artificial Sequence: Synthetic oligonucleotide
  Sense strand starting at position 1275 of SEQ ID NO: 1241594
ccgucaccucuugauuaaa

SEQ ID NO: 1284489 - RNA, 19 nt, Artificial Sequence
  Description of Artificial Sequence: Synthetic oligonucleotide
  Antisense strand to SEQ ID NO: 1284488
uuuaaucaagaggugacgg

SEQ ID NO: 1284490 - RNA, 19 nt, Artificial Sequence
  Description of Artificial Sequence: Synthetic oligonucleotide
  Sense strand starting at position 1277 of SEQ ID NO: 1241594
gucaccucuugauuaaaug

SEQ ID NO: 1284491 - RNA, 19 nt, Artificial Sequence
  Description of Artificial Sequence: Synthetic oligonucleotide
  Antisense strand to SEQ ID NO: 1284490
cauuuaaucaagaggugac

SEQ ID NO: 1284492 - RNA, 19 nt, Artificial Sequence
  Description of Artificial Sequence: Synthetic oligonucleotide
  Sense strand starting at position 1286 of SEQ ID NO: 1241594
ugauuaaaugcugagaguc

SEQ ID NO: 1284493 - RNA, 19 nt, Artificial Sequence
  Description of Artificial Sequence: Synthetic oligonucleotide
  Antisense strand to SEQ ID NO: 1284492
gacucucagcauuuaauca

SEQ ID NO: 1284494 - RNA, 19 nt, Artificial Sequence
  Description of Artificial Sequence: Synthetic oligonucleotide
  Sense strand starting at position 1288 of SEQ ID NO: 1241594
auuaaaugcugagagucaa

SEQ ID NO: 1284495 - RNA, 19 nt, Artificial Sequence
  Description of Artificial Sequence: Synthetic oligonucleotide
  Antisense strand to SEQ ID NO: 1284494
uugacucucagcauuuaau

SEQ ID NO: 1284496 - RNA, 19 nt, Artificial Sequence
  Description of Artificial Sequence: Synthetic oligonucleotide
  Sense strand starting at position 1978 of SEQ ID NO: 1241594
gcuuucaacgcgcacgaaa

SEQ ID NO: 1284497 - RNA, 19 nt, Artificial Sequence
  Description of Artificial Sequence: Synthetic oligonucleotide
  Antisense strand to SEQ ID NO: 1284496
uuucgugcgcguugaaagc

SEQ ID NO: 1284498 - RNA, 19 nt, Artificial Sequence
  Description of Artificial Sequence: Synthetic oligonucleotide
  Sense strand starting at position 2307 of SEQ ID NO: 1241594
ugccgauguuuauuuguua

SEQ ID NO: 1284499 - RNA, 19 nt, Artificial Sequence
  Description of Artificial Sequence: Synthetic oligonucleotide
  Antisense strand to SEQ ID NO: 1284498
uaacaaauaaacaucggca

SEQ ID NO: 1284500 - RNA, 19 nt, Artificial Sequence
  Description of Artificial Sequence: Synthetic oligonucleotide
  Sense strand starting at position 2308 of SEQ ID NO: 1241594
gccgauguuuauuuguuau

SEQ ID NO: 1284501 - RNA, 19 nt, Artificial Sequence
  Description of Artificial Sequence: Synthetic oligonucleotide
  Antisense strand to SEQ ID NO: 1284500
auaacaaauaaacaucggc

SEQ ID NO: 1284502 - RNA, 19 nt, Artificial Sequence
  Description of Artificial Sequence: Synthetic oligonucleotide
  Sense strand starting at position 2312 of SEQ ID NO: 1241594
auguuuauuuguuaugcca

SEQ ID NO: 1284503 - RNA, 19 nt, Artificial Sequence
  Description of Artificial Sequence: Synthetic oligonucleotide
  Antisense strand to SEQ ID NO: 1284502
uggcauaacaaauaaacau

SEQ ID NO: 1284504 - RNA, 19 nt, Artificial Sequence
  Description of Artificial Sequence: Synthetic oligonucleotide
  Sense strand starting at position 2320 of SEQ ID NO: 1241594
uuguuaugccauuaugacu

SEQ ID NO: 1284505 - RNA, 19 nt, Artificial Sequence
  Description of Artificial Sequence: Synthetic oligonucleotide
  Antisense strand to SEQ ID NO: 1284504
agucauaauggcauaacaa

SEQ ID NO: 1284506 - RNA, 19 nt, Artificial Sequence
  Description of Artificial Sequence: Synthetic oligonucleotide
  Sense strand starting at position 2329 of SEQ ID NO: 1241594
cauuaugacuguuaggauu

SEQ ID NO: 1284507 - RNA, 19 nt, Artificial Sequence
  Description of Artificial Sequence: Synthetic oligonucleotide
  Antisense strand to SEQ ID NO: 1284506
aauccuaacagucauaaug

SEQ ID NO: 1284508 - RNA, 19 nt, Artificial Sequence
  Description of Artificial Sequence: Synthetic oligonucleotide
  Sense strand starting at position 2559 of SEQ ID NO: 1241594
gucucucauccuuagaggu

SEQ ID NO: 1284509 - RNA, 19 nt, Artificial Sequence
  Description of Artificial Sequence: Synthetic oligonucleotide
  Antisense strand to SEQ ID NO: 1284508
accucuaaggaugagagac

SEQ ID NO: 1284510 - RNA, 19 nt, Artificial Sequence
  Description of Artificial Sequence: Synthetic oligonucleotide
  Sense strand starting at position 2573 of SEQ ID NO: 1241594
gagguagguuacuaagaau

SEQ ID NO: 1284511 - RNA, 19 nt, Artificial Sequence
  Description of Artificial Sequence: Synthetic oligonucleotide
  Antisense strand to SEQ ID NO: 1284510
auucuuaguaaccuaccuc

SEQ ID NO: 1284512 - RNA, 19 nt, Artificial Sequence
  Description of Artificial Sequence: Synthetic oligonucleotide
  Sense strand starting at position 2576 of SEQ ID NO: 1241594
guagguuacuaagaaucag

SEQ ID NO: 1284513 - RNA, 19 nt, Artificial Sequence
  Description of Artificial Sequence: Synthetic oligonucleotide
  Antisense strand to SEQ ID NO: 1284512
cugauucuuaguaaccuac

SEQ ID NO: 1284514 - RNA, 19 nt, Artificial Sequence
  Description of Artificial Sequence: Synthetic oligonucleotide
  Sense strand starting at position 2604 of SEQ ID NO: 1241594
ggugaagcucuagggucau

SEQ ID NO: 1284515 - RNA, 19 nt, Artificial Sequence
  Description of Artificial Sequence: Synthetic oligonucleotide
  Antisense strand to SEQ ID NO: 1284514
augacccuagagcuucacc

SEQ ID NO: 1284516 - RNA, 19 nt, Artificial Sequence
  Description of Artificial Sequence: Synthetic oligonucleotide
  Sense strand starting at position 2641 of SEQ ID NO: 1241594
accuuaggcuucuucgaau

SEQ ID NO: 1284517 - RNA, 19 nt, Artificial Sequence
  Description of Artificial Sequence: Synthetic oligonucleotide
  Antisense strand to SEQ ID NO: 1284516
auucgaagaagccuaaggu

SEQ ID NO: 1284518 - RNA, 19 nt, Artificial Sequence
  Description of Artificial Sequence: Synthetic oligonucleotide
  Sense strand starting at position 2648 of SEQ ID NO: 1241594
gcuucuucgaauuacguuu

SEQ ID NO: 1284519 - RNA, 19 nt, Artificial Sequence
  Description of Artificial Sequence: Synthetic oligonucleotide
  Antisense strand to SEQ ID NO: 1284518
aaacguaauucgaagaagc

SEQ ID NO: 1284520 - RNA, 19 nt, Artificial Sequence
  Description of Artificial Sequence: Synthetic oligonucleotide
  Sense strand starting at position 2820 of SEQ ID NO: 1241594
cacuuugggugguauuuga

SEQ ID NO: 1284521 - RNA, 19 nt, Artificial Sequence
  Description of Artificial Sequence: Synthetic oligonucleotide
  Antisense strand to SEQ ID NO: 1284520
ucaaauaccacccaaagug

SEQ ID NO: 1284522 - RNA, 19 nt, Artificial Sequence
  Description of Artificial Sequence: Synthetic oligonucleotide
  Sense strand starting at position 2828 of SEQ ID NO: 1241594
gugguauuugaauaugcgu

SEQ ID NO: 1284523 - RNA, 19 nt, Artificial Sequence
  Description of Artificial Sequence: Synthetic oligonucleotide
  Antisense strand to SEQ ID NO: 1284522
acgcauauucaaauaccac

SEQ ID NO: 1284524 - RNA, 19 nt, Artificial Sequence
  Description of Artificial Sequence: Synthetic oligonucleotide
  Sense strand starting at position 2831 of SEQ ID NO: 1241594
guauuugaauaugcguguu

SEQ ID NO: 1284525 - RNA, 19 nt, Artificial Sequence
  Description of Artificial Sequence: Synthetic oligonucleotide
  Antisense strand to SEQ ID NO: 1284524
aacacgcauauucaaauac

SEQ ID NO: 1284526 - RNA, 19 nt, Artificial Sequence
  Description of Artificial Sequence: Synthetic oligonucleotide
  Sense strand starting at position 2833 of SEQ ID NO: 1241594
auuugaauaugcguguuua

SEQ ID NO: 1284527 - RNA, 19 nt, Artificial Sequence
  Description of Artificial Sequence: Synthetic oligonucleotide
  Antisense strand to SEQ ID NO: 1284526
uaaacacgcauauucaaau

SEQ ID NO: 1284528 - RNA, 19 nt, Artificial Sequence
  Description of Artificial Sequence: Synthetic oligonucleotide
  Sense strand starting at position 2834 of SEQ ID NO: 1241594
uuugaauaugcguguuuau

SEQ ID NO: 1284529 - RNA, 19 nt, Artificial Sequence
  Description of Artificial Sequence: Synthetic oligonucleotide
  Antisense strand to SEQ ID NO: 1284528
auaaacacgcauauucaaa

SEQ ID NO: 1284530 - RNA, 19 nt, Artificial Sequence
  Description of Artificial Sequence: Synthetic oligonucleotide
  Sense strand starting at position 2837 of SEQ ID NO: 1241594
gaauaugcguguuuaugug

SEQ ID NO: 1284531 - RNA, 19 nt, Artificial Sequence
  Description of Artificial Sequence: Synthetic oligonucleotide
  Antisense strand to SEQ ID NO: 1284530
cacauaaacacgcauauuc

SEQ ID NO: 1284532 - RNA, 19 nt, Artificial Sequence
  Description of Artificial Sequence: Synthetic oligonucleotide
  Sense strand starting at position 2845 of SEQ ID NO: 1241594
guguuuaugugugcuuaaa

SEQ ID NO: 1284533 - RNA, 19 nt, Artificial Sequence
  Description of Artificial Sequence: Synthetic oligonucleotide
  Antisense strand to SEQ ID NO: 1284532
uuuaagcacacauaaacac

SEQ ID NO: 1284534 - RNA, 19 nt, Artificial Sequence
  Description of Artificial Sequence: Synthetic oligonucleotide
  Sense strand starting at position 2847 of SEQ ID NO: 1241594
guuuaugugugcuuaaacc

SEQ ID NO: 1284535 - RNA, 19 nt, Artificial Sequence
  Description of Artificial Sequence: Synthetic oligonucleotide
  Antisense strand to SEQ ID NO: 1284534
gguuuaagcacacauaaac

SEQ ID NO: 1284536 - RNA, 19 nt, Artificial Sequence
  Description of Artificial Sequence: Synthetic oligonucleotide
  Sense strand starting at position 2855 of SEQ ID NO: 1241594
gugcuuaaaccuugguaaa

SEQ ID NO: 1284537 - RNA, 19 nt, Artificial Sequence
  Description of Artificial Sequence: Synthetic oligonucleotide
  Antisense strand to SEQ ID NO: 1284536
uuuaccaagguuuaagcac

SEQ ID NO: 1284538 - RNA, 19 nt, Artificial Sequence
  Description of Artificial Sequence: Synthetic oligonucleotide
  Sense strand starting at position 2856 of SEQ ID NO: 1241594
ugcuuaaaccuugguaaag

SEQ ID NO: 1284539 - RNA, 19 nt, Artificial Sequence
  Description of Artificial Sequence: Synthetic oligonucleotide
  Antisense strand to SEQ ID NO: 1284538
cuuuaccaagguuuaagca

SEQ ID NO: 1284540 - RNA, 19 nt, Artificial Sequence
  Description of Artificial Sequence: Synthetic oligonucleotide
  Sense strand starting at position 2946 of SEQ ID NO: 1241594
gaaacaguccauugccaga

SEQ ID NO: 1284541 - RNA, 19 nt, Artificial Sequence
  Description of Artificial Sequence: Synthetic oligonucleotide
  Antisense strand to SEQ ID NO: 1284540
ucuggcaauggacuguuuc

SEQ ID NO: 1284542 - RNA, 19 nt, Artificial Sequence
  Description of Artificial Sequence: Synthetic oligonucleotide
  Sense strand starting at position 2951 of SEQ ID NO: 1241594
aguccauugccagaauuaa

SEQ ID NO: 1284543 - RNA, 19 nt, Artificial Sequence
  Description of Artificial Sequence: Synthetic oligonucleotide
  Antisense strand to SEQ ID NO: 1284542
uuaauucuggcaauggacu

SEQ ID NO: 1284544 - RNA, 19 nt, Artificial Sequence
  Description of Artificial Sequence: Synthetic oligonucleotide
  Sense strand starting at position 3312 of SEQ ID NO: 1241594
ggccaauagucacauauau

SEQ ID NO: 1284545 - RNA, 19 nt, Artificial Sequence
  Description of Artificial Sequence: Synthetic oligonucleotide
  Antisense strand to SEQ ID NO: 1284544
auauaugugacuauuggcc

SEQ ID NO: 1284546 - RNA, 19 nt, Artificial Sequence
  Description of Artificial Sequence: Synthetic oligonucleotide
  Sense strand starting at position 3897 of SEQ ID NO: 1241594
ugaauugggccuuaugcaa

SEQ ID NO: 1284547 - RNA, 19 nt, Artificial Sequence
  Description of Artificial Sequence: Synthetic oligonucleotide
  Antisense strand to SEQ ID NO: 1284546
uugcauaaggcccaauuca

SEQ ID NO: 1284548 - RNA, 19 nt, Artificial Sequence
  Description of Artificial Sequence: Synthetic oligonucleotide
  Sense strand starting at position 4 of SEQ ID NO: 1241595
cccacagcucucuggagau

SEQ ID NO: 1284549 - RNA, 19 nt, Artificial Sequence
  Description of Artificial Sequence: Synthetic oligonucleotide
  Antisense strand to SEQ ID NO: 1284548
aucuccagagagcuguggg

SEQ ID NO: 1284550 - RNA, 19 nt, Artificial Sequence
  Description of Artificial Sequence: Synthetic oligonucleotide
  Sense strand starting at position 17 of SEQ ID NO: 1241595
ggagauagcucaguaguuc

SEQ ID NO: 1284551 - RNA, 19 nt, Artificial Sequence
  Description of Artificial Sequence: Synthetic oligonucleotide
  Antisense strand to SEQ ID NO: 1284550
gaacuacugagcuaucucc

SEQ ID NO: 1284552 - RNA, 19 nt, Artificial Sequence
  Description of Artificial Sequence: Synthetic oligonucleotide
  Sense strand starting at position 286 of SEQ ID NO: 1241595
gcuccuggguuuccuaaga

SEQ ID NO: 1284553 - RNA, 19 nt, Artificial Sequence
  Description of Artificial Sequence: Synthetic oligonucleotide
  Antisense strand to SEQ ID NO: 1284552
ucuuaggaaacccaggagc

SEQ ID NO: 1284554 - RNA, 19 nt, Artificial Sequence
  Description of Artificial Sequence: Synthetic oligonucleotide
  Sense strand starting at position 296 of SEQ ID NO: 1241595
uuccuaagaguuggccuua

SEQ ID NO: 1284555 - RNA, 19 nt, Artificial Sequence
  Description of Artificial Sequence: Synthetic oligonucleotide
  Antisense strand to SEQ ID NO: 1284554
uaaggccaacucuuaggaa

SEQ ID NO: 1284556 - RNA, 19 nt, Artificial Sequence
  Description of Artificial Sequence: Synthetic oligonucleotide
  Sense strand starting at position 301 of SEQ ID NO: 1241595
aagaguuggccuuacagcu

SEQ ID NO: 1284557 - RNA, 19 nt, Artificial Sequence
  Description of Artificial Sequence: Synthetic oligonucleotide
  Antisense strand to SEQ ID NO: 1284556
agcuguaaggccaacucuu

SEQ ID NO: 1284558 - RNA, 19 nt, Artificial Sequence
  Description of Artificial Sequence: Synthetic oligonucleotide
  Sense strand starting at position 310 of SEQ ID NO: 1241595
ccuuacagcuccucugaga

SEQ ID NO: 1284559 - RNA, 19 nt, Artificial Sequence
  Description of Artificial Sequence: Synthetic oligonucleotide
  Antisense strand to SEQ ID NO: 1284558
ucucagaggagcuguaagg

SEQ ID NO: 1284560 - RNA, 19 nt, Artificial Sequence
  Description of Artificial Sequence: Synthetic oligonucleotide
  Sense strand starting at position 419 of SEQ ID NO: 1241595
ugauaauggcaauagcagu

SEQ ID NO: 1284561 - RNA, 19 nt, Artificial Sequence
  Description of Artificial Sequence: Synthetic oligonucleotide
  Antisense strand to SEQ ID NO: 1284560
acugcuauugccauuauca

SEQ ID NO: 1284562 - RNA, 19 nt, Artificial Sequence
  Description of Artificial Sequence: Synthetic oligonucleotide
  Sense strand starting at position 425 of SEQ ID NO: 1241595
uggcaauagcaguaagaac

SEQ ID NO: 1284563 - RNA, 19 nt, Artificial Sequence
  Description of Artificial Sequence: Synthetic oligonucleotide
  Antisense strand to SEQ ID NO: 1284562
guucuuacugcuauugcca

SEQ ID NO: 1284564 - RNA, 19 nt, Artificial Sequence
  Description of Artificial Sequence: Synthetic oligonucleotide
  Sense strand starting at position 468 of SEQ ID NO: 1241595
augugucuggcugugcuaa

SEQ ID NO: 1284565 - RNA, 19 nt, Artificial Sequence
  Description of Artificial Sequence: Synthetic oligonucleotide
  Antisense strand to SEQ ID NO: 1284564
uuagcacagccagacacau

SEQ ID NO: 1284566 - RNA, 19 nt, Artificial Sequence
  Description of Artificial Sequence: Synthetic oligonucleotide
  Sense strand starting at position 551 of SEQ ID NO: 1241595
acccguucuacagaugaga

SEQ ID NO: 1284567 - RNA, 19 nt, Artificial Sequence
  Description of Artificial Sequence: Synthetic oligonucleotide
  Antisense strand to SEQ ID NO: 1284566
ucucaucuguagaacgggu

SEQ ID NO: 1284568 - RNA, 19 nt, Artificial Sequence
  Description of Artificial Sequence: Synthetic oligonucleotide
  Sense strand starting at position 583 of SEQ ID NO: 1241595
ucagaaguuuaggcaauau

SEQ ID NO: 1284569 - RNA, 19 nt, Artificial Sequence
  Description of Artificial Sequence: Synthetic oligonucleotide
  Antisense strand to SEQ ID NO: 1284568
auauugccuaaacuucuga

SEQ ID NO: 1284570 - RNA, 19 nt, Artificial Sequence
  Description of Artificial Sequence: Synthetic oligonucleotide
  Sense strand starting at position 656 of SEQ ID NO: 1241595
gcuucuuaaccagaagguu

SEQ ID NO: 1284571 - RNA, 19 nt, Artificial Sequence
  Description of Artificial Sequence: Synthetic oligonucleotide
  Antisense strand to SEQ ID NO: 1284570
aaccuucugguuaagaagc

SEQ ID NO: 1284572 - RNA, 19 nt, Artificial Sequence
  Description of Artificial Sequence: Synthetic oligonucleotide
  Sense strand starting at position 690 of SEQ ID NO: 1241595
guaucuaucugcuccuacu

SEQ ID NO: 1284573 - RNA, 19 nt, Artificial Sequence
  Description of Artificial Sequence: Synthetic oligonucleotide
  Antisense strand to SEQ ID NO: 1284572
aguaggagcagauagauac

SEQ ID NO: 1284574 - RNA, 19 nt, Artificial Sequence
  Description of Artificial Sequence: Synthetic oligonucleotide
  Sense strand starting at position 908 of SEQ ID NO: 1241595
agcagcugaggaugaaauu

SEQ ID NO: 1284575 - RNA, 19 nt, Artificial Sequence
  Description of Artificial Sequence: Synthetic oligonucleotide
  Antisense strand to SEQ ID NO: 1284574
aauuucauccucagcugcu

SEQ ID NO: 1284576 - RNA, 19 nt, Artificial Sequence
  Description of Artificial Sequence: Synthetic oligonucleotide
  Sense strand starting at position 917 of SEQ ID NO: 1241595
ggaugaaauucccucuacu

SEQ ID NO: 1284577 - RNA, 19 nt, Artificial Sequence
  Description of Artificial Sequence: Synthetic oligonucleotide
  Antisense strand to SEQ ID NO: 1284576
aguagagggaauuucaucc

SEQ ID NO: 1284578 - RNA, 19 nt, Artificial Sequence
  Description of Artificial Sequence: Synthetic oligonucleotide
  Sense strand starting at position 932 of SEQ ID NO: 1241595
uacucagacuucucaggga

SEQ ID NO: 1284579 - RNA, 19 nt, Artificial Sequence
  Description of Artificial Sequence: Synthetic oligonucleotide
  Antisense strand to SEQ ID NO: 1284578
ucccugagaagucugagua

SEQ ID NO: 1284580 - RNA, 19 nt, Artificial Sequence
  Description of Artificial Sequence: Synthetic oligonucleotide
  Sense strand starting at position 1005 of SEQ ID NO: 1241595
uggacccauuccuagaaua

SEQ ID NO: 1284581 - RNA, 19 nt, Artificial Sequence
  Description of Artificial Sequence: Synthetic oligonucleotide
  Antisense strand to SEQ ID NO: 1284580
uauucuaggaaugggucca

SEQ ID NO: 1284582 - RNA, 19 nt, Artificial Sequence
  Description of Artificial Sequence: Synthetic oligonucleotide
  Sense strand starting at position 1150 of SEQ ID NO: 1241595
gcagguauuccugacacuc

SEQ ID NO: 1284583 - RNA, 19 nt, Artificial Sequence
  Description of Artificial Sequence: Synthetic oligonucleotide
  Antisense strand to SEQ ID NO: 1284582
gagugucaggaauaccugc

SEQ ID NO: 1284584 - RNA, 19 nt, Artificial Sequence
  Description of Artificial Sequence: Synthetic oligonucleotide
  Sense strand starting at position 1475 of SEQ ID NO: 1241595
gcggcuacgauucuugcua

SEQ ID NO: 1284585 - RNA, 19 nt, Artificial Sequence
  Description of Artificial Sequence: Synthetic oligonucleotide
  Antisense strand to SEQ ID NO: 1284584
uagcaagaaucguagccgc

SEQ ID NO: 1284586 - RNA, 19 nt, Artificial Sequence
  Description of Artificial Sequence: Synthetic oligonucleotide
  Sense strand starting at position 2610 of SEQ ID NO: 1241595
ccgagaguguggguggaau

SEQ ID NO: 1284587 - RNA, 19 nt, Artificial Sequence
  Description of Artificial Sequence: Synthetic oligonucleotide
  Antisense strand to SEQ ID NO: 1284586
auuccacccacacucucgg

SEQ ID NO: 1284588 - RNA, 19 nt, Artificial Sequence
  Description of Artificial Sequence: Synthetic oligonucleotide
  Sense strand starting at position 2611 of SEQ ID NO: 1241595
cgagaguguggguggaauu

SEQ ID NO: 1284589 - RNA, 19 nt, Artificial Sequence
  Description of Artificial Sequence: Synthetic oligonucleotide
  Antisense strand to SEQ ID NO: 1284588
aauuccacccacacucucg

SEQ ID NO: 1284590 - RNA, 19 nt, Artificial Sequence
  Description of Artificial Sequence: Synthetic oligonucleotide
  Sense strand starting at position 2817 of SEQ ID NO: 1241595
ccucuaaggugcuuaggau

SEQ ID NO: 1284591 - RNA, 19 nt, Artificial Sequence
  Description of Artificial Sequence: Synthetic oligonucleotide
  Antisense strand to SEQ ID NO: 1284590
auccuaagcaccuuagagg

SEQ ID NO: 1284592 - RNA, 19 nt, Artificial Sequence
  Description of Artificial Sequence: Synthetic oligonucleotide
  Sense strand starting at position 2818 of SEQ ID NO: 1241595
cucuaaggugcuuaggaua

SEQ ID NO: 1284593 - RNA, 19 nt, Artificial Sequence
  Description of Artificial Sequence: Synthetic oligonucleotide
  Antisense strand to SEQ ID NO: 1284592
uauccuaagcaccuuagag

SEQ ID NO: 1284594 - RNA, 19 nt, Artificial Sequence
  Description of Artificial Sequence: Synthetic oligonucleotide
  Sense strand starting at position 2869 of SEQ ID NO: 1241595
cccuaaauuucucuguggu

SEQ ID NO: 1284595 - RNA, 19 nt, Artificial Sequence
  Description of Artificial Sequence: Synthetic oligonucleotide
  Antisense strand to SEQ ID NO: 1284594
accacagagaaauuuaggg

SEQ ID NO: 1284596 - RNA, 19 nt, Artificial Sequence
  Description of Artificial Sequence: Synthetic oligonucleotide
  Sense strand starting at position 2873 of SEQ ID NO: 1241595
aaauuucucugugguauag

SEQ ID NO: 1284597 - RNA, 19 nt, Artificial Sequence
  Description of Artificial Sequence: Synthetic oligonucleotide
  Antisense strand to SEQ ID NO: 1284596
cuauaccacagagaaauuu

SEQ ID NO: 1284598 - RNA, 19 nt, Artificial Sequence
  Description of Artificial Sequence: Synthetic oligonucleotide
  Sense strand starting at position 2933 of SEQ ID NO: 1241595
guuuccuaccacugaaugu

SEQ ID NO: 1284599 - RNA, 19 nt, Artificial Sequence
  Description of Artificial Sequence: Synthetic oligonucleotide
  Antisense strand to SEQ ID NO: 1284598
acauucagugguaggaaac

SEQ ID NO: 1284600 - RNA, 19 nt, Artificial Sequence
  Description of Artificial Sequence: Synthetic oligonucleotide
  Sense strand starting at position 2949 of SEQ ID NO: 1241595
uguguuagcaccggagaga

SEQ ID NO: 1284601 - RNA, 19 nt, Artificial Sequence
  Description of Artificial Sequence: Synthetic oligonucleotide
  Antisense strand to SEQ ID NO: 1284600
ucucuccggugcuaacaca

SEQ ID NO: 1284602 - RNA, 19 nt, Artificial Sequence
  Description of Artificial Sequence: Synthetic oligonucleotide
  Sense strand starting at position 2972 of SEQ ID NO: 1241595
aaugaaugcucuccggagu

SEQ ID NO: 1284603 - RNA, 19 nt, Artificial Sequence
  Description of Artificial Sequence: Synthetic oligonucleotide
  Antisense strand to SEQ ID NO: 1284602
acuccggagagcauucauu

SEQ ID NO: 1284604 - RNA, 19 nt, Artificial Sequence
  Description of Artificial Sequence: Synthetic oligonucleotide
  Sense strand starting at position 2973 of SEQ ID NO: 1241595
augaaugcucuccggaguu

SEQ ID NO: 1284605 - RNA, 19 nt, Artificial Sequence
  Description of Artificial Sequence: Synthetic oligonucleotide
  Antisense strand to SEQ ID NO: 1284604
aacuccggagagcauucau

SEQ ID NO: 1284606 - RNA, 19 nt, Artificial Sequence
  Description of Artificial Sequence: Synthetic oligonucleotide
  Sense strand starting at position 2975 of SEQ ID NO: 1241595
gaaugcucuccggaguuga

SEQ ID NO: 1284607 - RNA, 19 nt, Artificial Sequence
  Description of Artificial Sequence: Synthetic oligonucleotide
  Antisense strand to SEQ ID NO: 1284606
ucaacuccggagagcauuc

SEQ ID NO: 1284608 - RNA, 19 nt, Artificial Sequence
  Description of Artificial Sequence: Synthetic oligonucleotide
  Sense strand starting at position 2979 of SEQ ID NO: 1241595
gcucuccggaguugagaaa

SEQ ID NO: 1284609 - RNA, 19 nt, Artificial Sequence
  Description of Artificial Sequence: Synthetic oligonucleotide
  Antisense strand to SEQ ID NO: 1284608
uuucucaacuccggagagc

SEQ ID NO: 1284610 - RNA, 19 nt, Artificial Sequence
  Description of Artificial Sequence: Synthetic oligonucleotide
  Sense strand starting at position 3016 of SEQ ID NO: 1241595
cgaguauugagggagagca

SEQ ID NO: 1284611 - RNA, 19 nt, Artificial Sequence
  Description of Artificial Sequence: Synthetic oligonucleotide
  Antisense strand to SEQ ID NO: 1284610
ugcucucccucaauacucg

SEQ ID NO: 1284612 - RNA, 19 nt, Artificial Sequence
  Description of Artificial Sequence: Synthetic oligonucleotide
  Sense strand starting at position 3031 of SEQ ID NO: 1241595
agcaaagucuagccuauua

SEQ ID NO: 1284613 - RNA, 19 nt, Artificial Sequence
  Description of Artificial Sequence: Synthetic oligonucleotide
  Antisense strand to SEQ ID NO: 1284612
uaauaggcuagacuuugcu

SEQ ID NO: 1284614 - RNA, 19 nt, Artificial Sequence
  Description of Artificial Sequence: Synthetic oligonucleotide
  Sense strand starting at position 3492 of SEQ ID NO: 1241595
cagguuaagugucugaauu

SEQ ID NO: 1284615 - RNA, 19 nt, Artificial Sequence
  Description of Artificial Sequence: Synthetic oligonucleotide
  Antisense strand to SEQ ID NO: 1284614
aauucagacacuuaaccug

SEQ ID NO: 1284616 - RNA, 19 nt, Artificial Sequence
  Description of Artificial Sequence: Synthetic oligonucleotide
  Sense strand starting at position 3493 of SEQ ID NO: 1241595
agguuaagugucugaauua

SEQ ID NO: 1284617 - RNA, 19 nt, Artificial Sequence
  Description of Artificial Sequence: Synthetic oligonucleotide
  Antisense strand to SEQ ID NO: 1284616
uaauucagacacuuaaccu

SEQ ID NO: 1284618 - RNA, 19 nt, Artificial Sequence
  Description of Artificial Sequence: Synthetic oligonucleotide
  Sense strand starting at position 3778 of SEQ ID NO: 1241595
ccugcuagcuacucugauu

SEQ ID NO: 1284619 - RNA, 19 nt, Artificial Sequence
  Description of Artificial Sequence: Synthetic oligonucleotide
  Antisense strand to SEQ ID NO: 1284618
aaucagaguagcuagcagg

SEQ ID NO: 1284620 - RNA, 19 nt, Artificial Sequence
  Description of Artificial Sequence: Synthetic oligonucleotide
  Sense strand starting at position 3805 of SEQ ID NO: 1241595
agcuaaaggaacugaugua

SEQ ID NO: 1284621 - RNA, 19 nt, Artificial Sequence
  Description of Artificial Sequence: Synthetic oligonucleotide
  Antisense strand to SEQ ID NO: 1284620
uacaucaguuccuuuagcu

SEQ ID NO: 1284622 - RNA, 19 nt, Artificial Sequence
  Description of Artificial Sequence: Synthetic oligonucleotide
  Sense strand starting at position 3946 of SEQ ID NO: 1241595
cugugcaaucuugagcaca

SEQ ID NO: 1284623 - RNA, 19 nt, Artificial Sequence
  Description of Artificial Sequence: Synthetic oligonucleotide
  Antisense strand to SEQ ID NO: 1284622
ugugcucaagauugcacag

SEQ ID NO: 1284624 - RNA, 19 nt, Artificial Sequence
  Description of Artificial Sequence: Synthetic oligonucleotide
  Sense strand starting at position 3948 of SEQ ID NO: 1241595
gugcaaucuugagcacauu

SEQ ID NO: 1284625 - RNA, 19 nt, Artificial Sequence
  Description of Artificial Sequence: Synthetic oligonucleotide
  Antisense strand to SEQ ID NO: 1284624
aaugugcucaagauugcac

SEQ ID NO: 1284626 - RNA, 19 nt, Artificial Sequence
  Description of Artificial Sequence: Synthetic oligonucleotide
  Sense strand starting at position 3949 of SEQ ID NO: 1241595
ugcaaucuugagcacauua

SEQ ID NO: 1284627 - RNA, 19 nt, Artificial Sequence
  Description of Artificial Sequence: Synthetic oligonucleotide
  Antisense strand to SEQ ID NO: 1284626
uaaugugcucaagauugca

SEQ ID NO: 1284628 - RNA, 19 nt, Artificial Sequence
  Description of Artificial Sequence: Synthetic oligonucleotide
  Sense strand starting at position 144 of SEQ ID NO: 1241596
cuuguuauacuuggauauu

SEQ ID NO: 1284629 - RNA, 19 nt, Artificial Sequence
  Description of Artificial Sequence: Synthetic oligonucleotide
  Antisense strand to SEQ ID NO: 1284628
aauauccaaguauaacaag

SEQ ID NO: 1284630 - RNA, 19 nt, Artificial Sequence
  Description of Artificial Sequence: Synthetic oligonucleotide
  Sense strand starting at position 147 of SEQ ID NO: 1241596
guuauacuuggauauuggu

SEQ ID NO: 1284631 - RNA, 19 nt, Artificial Sequence
  Description of Artificial Sequence: Synthetic oligonucleotide
  Antisense strand to SEQ ID NO: 1284630
accaauauccaaguauaac

SEQ ID NO: 1284632 - RNA, 19 nt, Artificial Sequence
  Description of Artificial Sequence: Synthetic oligonucleotide
  Sense strand starting at position 153 of SEQ ID NO: 1241596
cuuggauauuggucagaga

SEQ ID NO: 1284633 - RNA, 19 nt, Artificial Sequence
  Description of Artificial Sequence: Synthetic oligonucleotide
  Antisense strand to SEQ ID NO: 1284632
ucucugaccaauauccaag

SEQ ID NO: 1284634 - RNA, 19 nt, Artificial Sequence
  Description of Artificial Sequence: Synthetic oligonucleotide
  Sense strand starting at position 256 of SEQ ID NO: 1241596
ccacaccugucgguaaaga

SEQ ID NO: 1284635 - RNA, 19 nt, Artificial Sequence
  Description of Artificial Sequence: Synthetic oligonucleotide
  Antisense strand to SEQ ID NO: 1284634
ucuuuaccgacaggugugg

SEQ ID NO: 1284636 - RNA, 19 nt, Artificial Sequence
  Description of Artificial Sequence: Synthetic oligonucleotide
  Sense strand starting at position 362 of SEQ ID NO: 1241596
gucugaacucaaugccacu

SEQ ID NO: 1284637 - RNA, 19 nt, Artificial Sequence
  Description of Artificial Sequence: Synthetic oligonucleotide
  Antisense strand to SEQ ID NO: 1284636
aguggcauugaguucagac

SEQ ID NO: 1284638 - RNA, 19 nt, Artificial Sequence
  Description of Artificial Sequence: Synthetic oligonucleotide
  Sense strand starting at position 393 of SEQ ID NO: 1241596
gcugccuauuugcuccaau

SEQ ID NO: 1284639 - RNA, 19 nt, Artificial Sequence
  Description of Artificial Sequence: Synthetic oligonucleotide
  Antisense strand to SEQ ID NO: 1284638
auuggagcaaauaggcagc

SEQ ID NO: 1284640 - RNA, 19 nt, Artificial Sequence
  Description of Artificial Sequence: Synthetic oligonucleotide
  Sense strand starting at position 554 of SEQ ID NO: 1241596
uagcaauguuagguuaaug

SEQ ID NO: 1284641 - RNA, 19 nt, Artificial Sequence
  Description of Artificial Sequence: Synthetic oligonucleotide
  Antisense strand to SEQ ID NO: 1284640
cauuaaccuaacauugcua

SEQ ID NO: 1284642 - RNA, 19 nt, Artificial Sequence
  Description of Artificial Sequence: Synthetic oligonucleotide
  Sense strand starting at position 571 of SEQ ID NO: 1241596
ugcuuaaauuugguuaggu

SEQ ID NO: 1284643 - RNA, 19 nt, Artificial Sequence
  Description of Artificial Sequence: Synthetic oligonucleotide
  Antisense strand to SEQ ID NO: 1284642
accuaaccaaauuuaagca

SEQ ID NO: 1284644 - RNA, 19 nt, Artificial Sequence
  Description of Artificial Sequence: Synthetic oligonucleotide
  Sense strand starting at position 694 of SEQ ID NO: 1241596
uuugcaauuccagauguuu

SEQ ID NO: 1284645 - RNA, 19 nt, Artificial Sequence
  Description of Artificial Sequence: Synthetic oligonucleotide
  Antisense strand to SEQ ID NO: 1284644
aaacaucuggaauugcaaa

SEQ ID NO: 1284646 - RNA, 19 nt, Artificial Sequence
  Description of Artificial Sequence: Synthetic oligonucleotide
  Sense strand starting at position 1011 of SEQ ID NO: 1241596
ccuaucgcaaagugagaau

SEQ ID NO: 1284647 - RNA, 19 nt, Artificial Sequence
  Description of Artificial Sequence: Synthetic oligonucleotide
  Antisense strand to SEQ ID NO: 1284646
auucucacuuugcgauagg

SEQ ID NO: 1284648 - RNA, 19 nt, Artificial Sequence
  Description of Artificial Sequence: Synthetic oligonucleotide
  Sense strand starting at position 1020 of SEQ ID NO: 1241596
aagugagaauucgcucaau

SEQ ID NO: 1284649 - RNA, 19 nt, Artificial Sequence
  Description of Artificial Sequence: Synthetic oligonucleotide
  Antisense strand to SEQ ID NO: 1284648
auugagcgaauucucacuu

SEQ ID NO: 1284650 - RNA, 19 nt, Artificial Sequence
  Description of Artificial Sequence: Synthetic oligonucleotide
  Sense strand starting at position 1023 of SEQ ID NO: 1241596
ugagaauucgcucaauauu

SEQ ID NO: 1284651 - RNA, 19 nt, Artificial Sequence
  Description of Artificial Sequence: Synthetic oligonucleotide
  Antisense strand to SEQ ID NO: 1284650
aauauugagcgaauucuca

SEQ ID NO: 1284652 - RNA, 19 nt, Artificial Sequence
  Description of Artificial Sequence: Synthetic oligonucleotide
  Sense strand starting at position 1106 of SEQ ID NO: 1241596
cuaaauaaauccguuagga

SEQ ID NO: 1284653 - RNA, 19 nt, Artificial Sequence
  Description of Artificial Sequence: Synthetic oligonucleotide
  Antisense strand to SEQ ID NO: 1284652
uccuaacggauuuauuuag

SEQ ID NO: 1284654 - RNA, 19 nt, Artificial Sequence
  Description of Artificial Sequence: Synthetic oligonucleotide
  Sense strand starting at position 1210 of SEQ ID NO: 1241596
cugcauuugcauggcaaga

SEQ ID NO: 1284655 - RNA, 19 nt, Artificial Sequence
  Description of Artificial Sequence: Synthetic oligonucleotide
  Antisense strand to SEQ ID NO: 1284654
ucuugccaugcaaaugcag

SEQ ID NO: 1284656 - RNA, 19 nt, Artificial Sequence
  Description of Artificial Sequence: Synthetic oligonucleotide
  Sense strand starting at position 1307 of SEQ ID NO: 1241596
ggccaugccuuaucacaaa

SEQ ID NO: 1284657 - RNA, 19 nt, Artificial Sequence
  Description of Artificial Sequence: Synthetic oligonucleotide
  Antisense strand to SEQ ID NO: 1284656
uuugugauaaggcauggcc

SEQ ID NO: 1284658 - RNA, 19 nt, Artificial Sequence
  Description of Artificial Sequence: Synthetic oligonucleotide
  Sense strand starting at position 1318 of SEQ ID NO: 1241596
aucacaaacgugugggaaa

SEQ ID NO: 1284659 - RNA, 19 nt, Artificial Sequence
  Description of Artificial Sequence: Synthetic oligonucleotide
  Antisense strand to SEQ ID NO: 1284658
uuucccacacguuugugau

SEQ ID NO: 1284660 - RNA, 19 nt, Artificial Sequence
  Description of Artificial Sequence: Synthetic oligonucleotide
  Sense strand starting at position 1325 of SEQ ID NO: 1241596
acgugugggaaagguuaau

SEQ ID NO: 1284661 - RNA, 19 nt, Artificial Sequence
  Description of Artificial Sequence: Synthetic oligonucleotide
  Antisense strand to SEQ ID NO: 1284660
auuaaccuuucccacacgu

SEQ ID NO: 1284662 - RNA, 19 nt, Artificial Sequence
  Description of Artificial Sequence: Synthetic oligonucleotide
  Sense strand starting at position 1564 of SEQ ID NO: 1241596
uuaugcuuucgugggauuu

SEQ ID NO: 1284663 - RNA, 19 nt, Artificial Sequence
  Description of Artificial Sequence: Synthetic oligonucleotide
  Antisense strand to SEQ ID NO: 1284662
aaaucccacgaaagcauaa

SEQ ID NO: 1284664 - RNA, 19 nt, Artificial Sequence
  Description of Artificial Sequence: Synthetic oligonucleotide
  Sense strand starting at position 1718 of SEQ ID NO: 1241596
uuaacauaaguuuggacua

SEQ ID NO: 1284665 - RNA, 19 nt, Artificial Sequence
  Description of Artificial Sequence: Synthetic oligonucleotide
  Antisense strand to SEQ ID NO: 1284664
uaguccaaacuuauguuaa

SEQ ID NO: 1284666 - RNA, 19 nt, Artificial Sequence
  Description of Artificial Sequence: Synthetic oligonucleotide
  Sense strand starting at position 1723 of SEQ ID NO: 1241596
auaaguuuggacuaguuua

SEQ ID NO: 1284667 - RNA, 19 nt, Artificial Sequence
  Description of Artificial Sequence: Synthetic oligonucleotide
  Antisense strand to SEQ ID NO: 1284666
uaaacuaguccaaacuuau

SEQ ID NO: 1284668 - RNA, 19 nt, Artificial Sequence
  Description of Artificial Sequence: Synthetic oligonucleotide
  Sense strand starting at position 1728 of SEQ ID NO: 1241596
uuuggacuaguuuaaagua

SEQ ID NO: 1284669 - RNA, 19 nt, Artificial Sequence
  Description of Artificial Sequence: Synthetic oligonucleotide
  Antisense strand to SEQ ID NO: 1284668
uacuuuaaacuaguccaaa

SEQ ID NO: 1284670 - RNA, 19 nt, Artificial Sequence
  Description of Artificial Sequence: Synthetic oligonucleotide
  Sense strand starting at position 1797 of SEQ ID NO: 1241596
uuagcaauuuagcuaguca

SEQ ID NO: 1284671 - RNA, 19 nt, Artificial Sequence
  Description of Artificial Sequence: Synthetic oligonucleotide
  Antisense strand to SEQ ID NO: 1284670
ugacuagcuaaauugcuaa

SEQ ID NO: 1284672 - RNA, 19 nt, Artificial Sequence
  Description of Artificial Sequence: Synthetic oligonucleotide
  Sense strand starting at position 1801 of SEQ ID NO: 1241596
caauuuagcuagucagguu

SEQ ID NO: 1284673 - RNA, 19 nt, Artificial Sequence
  Description of Artificial Sequence: Synthetic oligonucleotide
  Antisense strand to SEQ ID NO: 1284672
aaccugacuagcuaaauug

SEQ ID NO: 1284674 - RNA, 19 nt, Artificial Sequence
  Description of Artificial Sequence: Synthetic oligonucleotide
  Sense strand starting at position 1819 of SEQ ID NO: 1241596
uuuaucaucuguucuggaa

SEQ ID NO: 1284675 - RNA, 19 nt, Artificial Sequence
  Description of Artificial Sequence: Synthetic oligonucleotide
  Antisense strand to SEQ ID NO: 1284674
uuccagaacagaugauaaa

SEQ ID NO: 1284676 - RNA, 19 nt, Artificial Sequence
  Description of Artificial Sequence: Synthetic oligonucleotide
  Sense strand starting at position 1879 of SEQ ID NO: 1241596
ggaaccgcuuaucuguaaa

SEQ ID NO: 1284677 - RNA, 19 nt, Artificial Sequence
  Description of Artificial Sequence: Synthetic oligonucleotide
  Antisense strand to SEQ ID NO: 1284676
uuuacagauaagcgguucc

SEQ ID NO: 1284678 - RNA, 19 nt, Artificial Sequence
  Description of Artificial Sequence: Synthetic oligonucleotide
  Sense strand starting at position 1882 of SEQ ID NO: 1241596
accgcuuaucuguaaacug

SEQ ID NO: 1284679 - RNA, 19 nt, Artificial Sequence
  Description of Artificial Sequence: Synthetic oligonucleotide
  Antisense strand to SEQ ID NO: 1284678
caguuuacagauaagcggu

SEQ ID NO: 1284680 - RNA, 19 nt, Artificial Sequence
  Description of Artificial Sequence: Synthetic oligonucleotide
  Sense strand starting at position 2155 of SEQ ID NO: 1241596
ugugucuccgaugaugaua

SEQ ID NO: 1284681 - RNA, 19 nt, Artificial Sequence
  Description of Artificial Sequence: Synthetic oligonucleotide
  Antisense strand to SEQ ID NO: 1284680
uaucaucaucggagacaca

SEQ ID NO: 1284682 - RNA, 19 nt, Artificial Sequence
  Description of Artificial Sequence: Synthetic oligonucleotide
  Sense strand starting at position 2337 of SEQ ID NO: 1241596
agaucacgucucuauugca

SEQ ID NO: 1284683 - RNA, 19 nt, Artificial Sequence
  Description of Artificial Sequence: Synthetic oligonucleotide
  Antisense strand to SEQ ID NO: 1284682
ugcaauagagacgugaucu

SEQ ID NO: 1284684 - RNA, 19 nt, Artificial Sequence
  Description of Artificial Sequence: Synthetic oligonucleotide
  Sense strand starting at position 2360 of SEQ ID NO: 1241596
ccggaaucauccuuagguc

SEQ ID NO: 1284685 - RNA, 19 nt, Artificial Sequence
  Description of Artificial Sequence: Synthetic oligonucleotide
  Antisense strand to SEQ ID NO: 1284684
gaccuaaggaugauuccgg

SEQ ID NO: 1284686 - RNA, 19 nt, Artificial Sequence
  Description of Artificial Sequence: Synthetic oligonucleotide
  Sense strand starting at position 2737 of SEQ ID NO: 1241596
ucagaaugucagggucaaa

SEQ ID NO: 1284687 - RNA, 19 nt, Artificial Sequence
  Description of Artificial Sequence: Synthetic oligonucleotide
  Antisense strand to SEQ ID NO: 1284686
uuugacccugacauucuga

SEQ ID NO: 1284688 - RNA, 19 nt, Artificial Sequence
  Description of Artificial Sequence: Synthetic oligonucleotide
  Sense strand starting at position 2818 of SEQ ID NO: 1241596
uccaguuucccggaggaaa

SEQ ID NO: 1284689 - RNA, 19 nt, Artificial Sequence
  Description of Artificial Sequence: Synthetic oligonucleotide
  Antisense strand to SEQ ID NO: 1284688
uuuccuccgggaaacugga

SEQ ID NO: 1284690 - RNA, 19 nt, Artificial Sequence
  Description of Artificial Sequence: Synthetic oligonucleotide
  Sense strand starting at position 3001 of SEQ ID NO: 1241596
gcaauugguguuuagagaa

SEQ ID NO: 1284691 - RNA, 19 nt, Artificial Sequence
  Description of Artificial Sequence: Synthetic oligonucleotide
  Antisense strand to SEQ ID NO: 1284690
uucucuaaacaccaauugc

SEQ ID NO: 1284692 - RNA, 19 nt, Artificial Sequence
  Description of Artificial Sequence: Synthetic oligonucleotide
  Sense strand starting at position 3072 of SEQ ID NO: 1241596
aguugcugucaucagaaag

SEQ ID NO: 1284693 - RNA, 19 nt, Artificial Sequence
  Description of Artificial Sequence: Synthetic oligonucleotide
  Antisense strand to SEQ ID NO: 1284692
cuuucugaugacagcaacu

SEQ ID NO: 1284694 - RNA, 19 nt, Artificial Sequence
  Description of Artificial Sequence: Synthetic oligonucleotide
  Sense strand starting at position 3154 of SEQ ID NO: 1241596
ggaauugucuccuuucucu

SEQ ID NO: 1284695 - RNA, 19 nt, Artificial Sequence
  Description of Artificial Sequence: Synthetic oligonucleotide
  Antisense strand to SEQ ID NO: 1284694
agagaaaggagacaauucc

SEQ ID NO: 1284696 - RNA, 19 nt, Artificial Sequence
  Description of Artificial Sequence: Synthetic oligonucleotide
  Sense strand starting at position 3675 of SEQ ID NO: 1241596
uugaguaggacauguguuu

SEQ ID NO: 1284697 - RNA, 19 nt, Artificial Sequence
  Description of Artificial Sequence: Synthetic oligonucleotide
  Antisense strand to SEQ ID NO: 1284696
aaacacauguccuacucaa

SEQ ID NO: 1284698 - RNA, 19 nt, Artificial Sequence
  Description of Artificial Sequence: Synthetic oligonucleotide
  Sense strand starting at position 3760 of SEQ ID NO: 1241596
gucaaacagcuguaauuau

SEQ ID NO: 1284699 - RNA, 19 nt, Artificial Sequence
  Description of Artificial Sequence: Synthetic oligonucleotide
  Antisense strand to SEQ ID NO: 1284698
auaauuacagcuguuugac

SEQ ID NO: 1284700 - RNA, 19 nt, Artificial Sequence
  Description of Artificial Sequence: Synthetic oligonucleotide
  Sense strand starting at position 3872 of SEQ ID NO: 1241596
agauauguaucacuuguuu

SEQ ID NO: 1284701 - RNA, 19 nt, Artificial Sequence
  Description of Artificial Sequence: Synthetic oligonucleotide
  Antisense strand to SEQ ID NO: 1284700
aaacaagugauacauaucu

SEQ ID NO: 1284702 - RNA, 19 nt, Artificial Sequence
  Description of Artificial Sequence: Synthetic oligonucleotide
  Sense strand starting at position 3876 of SEQ ID NO: 1241596
auguaucacuuguuuggga

SEQ ID NO: 1284703 - RNA, 19 nt, Artificial Sequence
  Description of Artificial Sequence: Synthetic oligonucleotide
  Antisense strand to SEQ ID NO: 1284702
ucccaaacaagugauacau

SEQ ID NO: 1284704 - RNA, 19 nt, Artificial Sequence
  Description of Artificial Sequence: Synthetic oligonucleotide
  Sense strand starting at position 3878 of SEQ ID NO: 1241596
guaucacuuguuugggaga

SEQ ID NO: 1284705 - RNA, 19 nt, Artificial Sequence
  Description of Artificial Sequence: Synthetic oligonucleotide
  Antisense strand to SEQ ID NO: 1284704
ucucccaaacaagugauac

SEQ ID NO: 1284706 - RNA, 19 nt, Artificial Sequence
  Description of Artificial Sequence: Synthetic oligonucleotide
  Sense strand starting at position 3883 of SEQ ID NO: 1241596
acuuguuugggagaggcaa

SEQ ID NO: 1284707 - RNA, 19 nt, Artificial Sequence
  Description of Artificial Sequence: Synthetic oligonucleotide
  Antisense strand to SEQ ID NO: 1284706
uugccucucccaaacaagu

SEQ ID NO: 1284708 - RNA, 19 nt, Artificial Sequence
  Description of Artificial Sequence: Synthetic oligonucleotide
  Sense strand starting at position 62 of SEQ ID NO: 1241597
gucugaacucaaugccacu

SEQ ID NO: 1284709 - RNA, 19 nt, Artificial Sequence
  Description of Artificial Sequence: Synthetic oligonucleotide
  Antisense strand to SEQ ID NO: 1284708
aguggcauugaguucagac

SEQ ID NO: 1284710 - RNA, 19 nt, Artificial Sequence
  Description of Artificial Sequence: Synthetic oligonucleotide
  Sense strand starting at position 93 of SEQ ID NO: 1241597
gcugccuauuugcuccaau

SEQ ID NO: 1284711 - RNA, 19 nt, Artificial Sequence
  Description of Artificial Sequence: Synthetic oligonucleotide
  Antisense strand to SEQ ID NO: 1284710
auuggagcaaauaggcagc

SEQ ID NO: 1284712 - RNA, 19 nt, Artificial Sequence
  Description of Artificial Sequence: Synthetic oligonucleotide
  Sense strand starting at position 254 of SEQ ID NO: 1241597
uagcaauguuagguuaaug

SEQ ID NO: 1284713 - RNA, 19 nt, Artificial Sequence
  Description of Artificial Sequence: Synthetic oligonucleotide
  Antisense strand to SEQ ID NO: 1284712
cauuaaccuaacauugcua

SEQ ID NO: 1284714 - RNA, 19 nt, Artificial Sequence
  Description of Artificial Sequence: Synthetic oligonucleotide
  Sense strand starting at position 271 of SEQ ID NO: 1241597
ugcuuaaauuugguuaggu

SEQ ID NO: 1284715 - RNA, 19 nt, Artificial Sequence
  Description of Artificial Sequence: Synthetic oligonucleotide
  Antisense strand to SEQ ID NO: 1284714
accuaaccaaauuuaagca

SEQ ID NO: 1284716 - RNA, 19 nt, Artificial Sequence
  Description of Artificial Sequence: Synthetic oligonucleotide
  Sense strand starting at position 394 of SEQ ID NO: 1241597
uuugcaauuccagauguuu

SEQ ID NO: 1284717 - RNA, 19 nt, Artificial Sequence
  Description of Artificial Sequence: Synthetic oligonucleotide
  Antisense strand to SEQ ID NO: 1284716
aaacaucuggaauugcaaa

SEQ ID NO: 1284718 - RNA, 19 nt, Artificial Sequence
  Description of Artificial Sequence: Synthetic oligonucleotide
  Sense strand starting at position 711 of SEQ ID NO: 1241597
ccuaucgcaaagugagaau

SEQ ID NO: 1284719 - RNA, 19 nt, Artificial Sequence
  Description of Artificial Sequence: Synthetic oligonucleotide
  Antisense strand to SEQ ID NO: 1284718
auucucacuuugcgauagg

SEQ ID NO: 1284720 - RNA, 19 nt, Artificial Sequence
  Description of Artificial Sequence: Synthetic oligonucleotide
  Sense strand starting at position 720 of SEQ ID NO: 1241597
aagugagaauucgcucaau

SEQ ID NO: 1284721 - RNA, 19 nt, Artificial Sequence
  Description of Artificial Sequence: Synthetic oligonucleotide
  Antisense strand to SEQ ID NO: 1284720
auugagcgaauucucacuu

SEQ ID NO: 1284722 - RNA, 19 nt, Artificial Sequence
  Description of Artificial Sequence: Synthetic oligonucleotide
  Sense strand starting at position 723 of SEQ ID NO: 1241597
ugagaauucgcucaauauu

SEQ ID NO: 1284723 - RNA, 19 nt, Artificial Sequence
  Description of Artificial Sequence: Synthetic oligonucleotide
  Antisense strand to SEQ ID NO: 1284722
aauauugagcgaauucuca

SEQ ID NO: 1284724 - RNA, 19 nt, Artificial Sequence
  Description of Artificial Sequence: Synthetic oligonucleotide
  Sense strand starting at position 806 of SEQ ID NO: 1241597
cuaaauaaauccguuagga

SEQ ID NO: 1284725 - RNA, 19 nt, Artificial Sequence
  Description of Artificial Sequence: Synthetic oligonucleotide
  Antisense strand to SEQ ID NO: 1284724
uccuaacggauuuauuuag

SEQ ID NO: 1284726 - RNA, 19 nt, Artificial Sequence
  Description of Artificial Sequence: Synthetic oligonucleotide
  Sense strand starting at position 910 of SEQ ID NO: 1241597
cugcauuugcauggcaaga

SEQ ID NO: 1284727 - RNA, 19 nt, Artificial Sequence
  Description of Artificial Sequence: Synthetic oligonucleotide
  Antisense strand to SEQ ID NO: 1284726
ucuugccaugcaaaugcag

SEQ ID NO: 1284728 - RNA, 19 nt, Artificial Sequence
  Description of Artificial Sequence: Synthetic oligonucleotide
  Sense strand starting at position 1007 of SEQ ID NO: 1241597
ggccaugccuuaucacaaa

SEQ ID NO: 1284729 - RNA, 19 nt, Artificial Sequence
  Description of Artificial Sequence: Synthetic oligonucleotide
  Antisense strand to SEQ ID NO: 1284728
uuugugauaaggcauggcc

SEQ ID NO: 1284730 - RNA, 19 nt, Artificial Sequence
  Description of Artificial Sequence: Synthetic oligonucleotide
  Sense strand starting at position 1018 of SEQ ID NO: 1241597
aucacaaacgugugggaaa

SEQ ID NO: 1284731 - RNA, 19 nt, Artificial Sequence
  Description of Artificial Sequence: Synthetic oligonucleotide
  Antisense strand to SEQ ID NO: 1284730
uuucccacacguuugugau

SEQ ID NO: 1284732 - RNA, 19 nt, Artificial Sequence
  Description of Artificial Sequence: Synthetic oligonucleotide
  Sense strand starting at position 1025 of SEQ ID NO: 1241597
acgugugggaaagguuaau

SEQ ID NO: 1284733 - RNA, 19 nt, Artificial Sequence
  Description of Artificial Sequence: Synthetic oligonucleotide
  Antisense strand to SEQ ID NO: 1284732
auuaaccuuucccacacgu

SEQ ID NO: 1284734 - RNA, 19 nt, Artificial Sequence
  Description of Artificial Sequence: Synthetic oligonucleotide
  Sense strand starting at position 1264 of SEQ ID NO: 1241597
uuaugcuuucgugggauuu

SEQ ID NO: 1284735 - RNA, 19 nt, Artificial Sequence
  Description of Artificial Sequence: Synthetic oligonucleotide
  Antisense strand to SEQ ID NO: 1284734
aaaucccacgaaagcauaa

SEQ ID NO: 1284736 - RNA, 19 nt, Artificial Sequence
  Description of Artificial Sequence: Synthetic oligonucleotide
  Sense strand starting at position 1418 of SEQ ID NO: 1241597
uuaacauaaguuuggacua

SEQ ID NO: 1284737 - RNA, 19 nt, Artificial Sequence
  Description of Artificial Sequence: Synthetic oligonucleotide
  Antisense strand to SEQ ID NO: 1284736
uaguccaaacuuauguuaa

SEQ ID NO: 1284738 - RNA, 19 nt, Artificial Sequence
  Description of Artificial Sequence: Synthetic oligonucleotide
  Sense strand starting at position 1423 of SEQ ID NO: 1241597
auaaguuuggacuaguuua

SEQ ID NO: 1284739 - RNA, 19 nt, Artificial Sequence
  Description of Artificial Sequence: Synthetic oligonucleotide
  Antisense strand to SEQ ID NO: 1284738
uaaacuaguccaaacuuau

SEQ ID NO: 1284740 - RNA, 19 nt, Artificial Sequence
  Description of Artificial Sequence: Synthetic oligonucleotide
  Sense strand starting at position 1428 of SEQ ID NO: 1241597
uuuggacuaguuuaaagua

SEQ ID NO: 1284741 - RNA, 19 nt, Artificial Sequence
  Description of Artificial Sequence: Synthetic oligonucleotide
  Antisense strand to SEQ ID NO: 1284740
uacuuuaaacuaguccaaa

SEQ ID NO: 1284742 - RNA, 19 nt, Artificial Sequence
  Description of Artificial Sequence: Synthetic oligonucleotide
  Sense strand starting at position 1497 of SEQ ID NO: 1241597
uuagcaauuuagcuaguca

SEQ ID NO: 1284743 - RNA, 19 nt, Artificial Sequence
  Description of Artificial Sequence: Synthetic oligonucleotide
  Antisense strand to SEQ ID NO: 1284742
ugacuagcuaaauugcuaa

SEQ ID NO: 1284744 - RNA, 19 nt, Artificial Sequence
  Description of Artificial Sequence: Synthetic oligonucleotide
  Sense strand starting at position 1501 of SEQ ID NO: 1241597
caauuuagcuagucagguu

SEQ ID NO: 1284745 - RNA, 19 nt, Artificial Sequence
  Description of Artificial Sequence: Synthetic oligonucleotide
  Antisense strand to SEQ ID NO: 1284744
aaccugacuagcuaaauug

SEQ ID NO: 1284746 - RNA, 19 nt, Artificial Sequence
  Description of Artificial Sequence: Synthetic oligonucleotide
  Sense strand starting at position 1519 of SEQ ID NO: 1241597
uuuaucaucuguucuggaa

SEQ ID NO: 1284747 - RNA, 19 nt, Artificial Sequence
  Description of Artificial Sequence: Synthetic oligonucleotide
  Antisense strand to SEQ ID NO: 1284746
uuccagaacagaugauaaa

SEQ ID NO: 1284748 - RNA, 19 nt, Artificial Sequence
  Description of Artificial Sequence: Synthetic oligonucleotide
  Sense strand starting at position 1579 of SEQ ID NO: 1241597
ggaaccgcuuaucuguaaa

SEQ ID NO: 1284749 - RNA, 19 nt, Artificial Sequence
  Description of Artificial Sequence: Synthetic oligonucleotide
  Antisense strand to SEQ ID NO: 1284748
uuuacagauaagcgguucc

SEQ ID NO: 1284750 - RNA, 19 nt, Artificial Sequence
  Description of Artificial Sequence: Synthetic oligonucleotide
  Sense strand starting at position 1582 of SEQ ID NO: 1241597
accgcuuaucuguaaacug

SEQ ID NO: 1284751 - RNA, 19 nt, Artificial Sequence
  Description of Artificial Sequence: Synthetic oligonucleotide
  Antisense strand to SEQ ID NO: 1284750
caguuuacagauaagcggu

SEQ ID NO: 1284752 - RNA, 19 nt, Artificial Sequence
  Description of Artificial Sequence: Synthetic oligonucleotide
  Sense strand starting at position 1855 of SEQ ID NO: 1241597
ugugucuccgaugaugaua

SEQ ID NO: 1284753 - RNA, 19 nt, Artificial Sequence
  Description of Artificial Sequence: Synthetic oligonucleotide
  Antisense strand to SEQ ID NO: 1284752
uaucaucaucggagacaca

SEQ ID NO: 1284754 - RNA, 19 nt, Artificial Sequence
  Description of Artificial Sequence: Synthetic oligonucleotide
  Sense strand starting at position 1931 of SEQ ID NO: 1241597
cgacuucuauagccacuua

SEQ ID NO: 1284755 - RNA, 19 nt, Artificial Sequence
  Description of Artificial Sequence: Synthetic oligonucleotide
  Antisense strand to SEQ ID NO: 1284754
uaaguggcuauagaagucg

SEQ ID NO: 1284756 - RNA, 19 nt, Artificial Sequence
  Description of Artificial Sequence: Synthetic oligonucleotide
  Sense strand starting at position 2037 of SEQ ID NO: 1241597
agaucacgucucuauugca

SEQ ID NO: 1284757 - RNA, 19 nt, Artificial Sequence
  Description of Artificial Sequence: Synthetic oligonucleotide
  Antisense strand to SEQ ID NO: 1284756
ugcaauagagacgugaucu

SEQ ID NO: 1284758 - RNA, 19 nt, Artificial Sequence
  Description of Artificial Sequence: Synthetic oligonucleotide
  Sense strand starting at position 2060 of SEQ ID NO: 1241597
ccggaaucauccuuagguc

SEQ ID NO: 1284759 - RNA, 19 nt, Artificial Sequence
  Description of Artificial Sequence: Synthetic oligonucleotide
  Antisense strand to SEQ ID NO: 1284758
gaccuaaggaugauuccgg

SEQ ID NO: 1284760 - RNA, 19 nt, Artificial Sequence
  Description of Artificial Sequence: Synthetic oligonucleotide
  Sense strand starting at position 2067 of SEQ ID NO: 1241597
cauccuuaggucgggagua

SEQ ID NO: 1284761 - RNA, 19 nt, Artificial Sequence
  Description of Artificial Sequence: Synthetic oligonucleotide
  Antisense strand to SEQ ID NO: 1284760
uacucccgaccuaaggaug

SEQ ID NO: 1284762 - RNA, 19 nt, Artificial Sequence
  Description of Artificial Sequence: Synthetic oligonucleotide
  Sense strand starting at position 2437 of SEQ ID NO: 1241597
ucagaaugucagggucaaa

SEQ ID NO: 1284763 - RNA, 19 nt, Artificial Sequence
  Description of Artificial Sequence: Synthetic oligonucleotide
  Antisense strand to SEQ ID NO: 1284762
uuugacccugacauucuga

SEQ ID NO: 1284764 - RNA, 19 nt, Artificial Sequence
  Description of Artificial Sequence: Synthetic oligonucleotide
  Sense strand starting at position 2518 of SEQ ID NO: 1241597
uccaguuucccggaggaaa

SEQ ID NO: 1284765 - RNA, 19 nt, Artificial Sequence
  Description of Artificial Sequence: Synthetic oligonucleotide
  Antisense strand to SEQ ID NO: 1284764
uuuccuccgggaaacugga

SEQ ID NO: 1284766 - RNA, 19 nt, Artificial Sequence
  Description of Artificial Sequence: Synthetic oligonucleotide
  Sense strand starting at position 2701 of SEQ ID NO: 1241597
gcaauugguguuuagagaa

SEQ ID NO: 1284767 - RNA, 19 nt, Artificial Sequence
  Description of Artificial Sequence: Synthetic oligonucleotide
  Antisense strand to SEQ ID NO: 1284766
uucucuaaacaccaauugc

SEQ ID NO: 1284768 - RNA, 19 nt, Artificial Sequence
  Description of Artificial Sequence: Synthetic oligonucleotide
  Sense strand starting at position 2772 of SEQ ID NO: 1241597
aguugcugucaucagaaag

SEQ ID NO: 1284769 - RNA, 19 nt, Artificial Sequence
  Description of Artificial Sequence: Synthetic oligonucleotide
  Antisense strand to SEQ ID NO: 1284768
cuuucugaugacagcaacu

SEQ ID NO: 1284770 - RNA, 19 nt, Artificial Sequence
  Description of Artificial Sequence: Synthetic oligonucleotide
  Sense strand starting at position 2854 of SEQ ID NO: 1241597
ggaauugucuccuuucucu

SEQ ID NO: 1284771 - RNA, 19 nt, Artificial Sequence
  Description of Artificial Sequence: Synthetic oligonucleotide
  Antisense strand to SEQ ID NO: 1284770
agagaaaggagacaauucc

SEQ ID NO: 1284772 - RNA, 19 nt, Artificial Sequence
  Description of Artificial Sequence: Synthetic oligonucleotide
  Sense strand starting at position 3375 of SEQ ID NO: 1241597
uugaguaggacauguguuu

SEQ ID NO: 1284773 - RNA, 19 nt, Artificial Sequence
  Description of Artificial Sequence: Synthetic oligonucleotide
  Antisense strand to SEQ ID NO: 1284772
aaacacauguccuacucaa

SEQ ID NO: 1284774 - RNA, 19 nt, Artificial Sequence
  Description of Artificial Sequence: Synthetic oligonucleotide
  Sense strand starting at position 3460 of SEQ ID NO: 1241597
gucaaacagcuguaauuau

SEQ ID NO: 1284775 - RNA, 19 nt, Artificial Sequence
  Description of Artificial Sequence: Synthetic oligonucleotide
  Antisense strand to SEQ ID NO: 1284774
auaauuacagcuguuugac

SEQ ID NO: 1284776 - RNA, 19 nt, Artificial Sequence
  Description of Artificial Sequence: Synthetic oligonucleotide
  Sense strand starting at position 3572 of SEQ ID NO: 1241597
agauauguaucacuuguuu

SEQ ID NO: 1284777 - RNA, 19 nt, Artificial Sequence
  Description of Artificial Sequence: Synthetic oligonucleotide
  Antisense strand to SEQ ID NO: 1284776
aaacaagugauacauaucu

SEQ ID NO: 1284778 - RNA, 19 nt, Artificial Sequence
  Description of Artificial Sequence: Synthetic oligonucleotide
  Sense strand starting at position 3576 of SEQ ID NO: 1241597
auguaucacuuguuuggga

SEQ ID NO: 1284779 - RNA, 19 nt, Artificial Sequence
  Description of Artificial Sequence: Synthetic oligonucleotide
  Antisense strand to SEQ ID NO: 1284778
ucccaaacaagugauacau

SEQ ID NO: 1284780 - RNA, 19 nt, Artificial Sequence
  Description of Artificial Sequence: Synthetic oligonucleotide
  Sense strand starting at position 3578 of SEQ ID NO: 1241597
guaucacuuguuugggaga

SEQ ID NO: 1284781 - RNA, 19 nt, Artificial Sequence
  Description of Artificial Sequence: Synthetic oligonucleotide
  Antisense strand to SEQ ID NO: 1284780
ucucccaaacaagugauac

SEQ ID NO: 1284782 - RNA, 19 nt, Artificial Sequence
  Description of Artificial Sequence: Synthetic oligonucleotide
  Sense strand starting at position 3583 of SEQ ID NO: 1241597
acuuguuugggagaggcaa

SEQ ID NO: 1284783 - RNA, 19 nt, Artificial Sequence
  Description of Artificial Sequence: Synthetic oligonucleotide
  Antisense strand to SEQ ID NO: 1284782
uugccucucccaaacaagu

SEQ ID NO: 1284784 - RNA, 19 nt, Artificial Sequence
  Description of Artificial Sequence: Synthetic oligonucleotide
  Sense strand starting at position 3732 of SEQ ID NO: 1241597
caagaauugucaguggcug

SEQ ID NO: 1284785 - RNA, 19 nt, Artificial Sequence
  Description of Artificial Sequence: Synthetic oligonucleotide
  Antisense strand to SEQ ID NO: 1284784
cagccacugacaauucuug

SEQ ID NO: 1284786 - RNA, 19 nt, Artificial Sequence
  Description of Artificial Sequence: Synthetic oligonucleotide
  Sense strand starting at position 3757 of SEQ ID NO: 1241597
gggcuuauccuauaauccu

SEQ ID NO: 1284787 - RNA, 19 nt, Artificial Sequence
  Description of Artificial Sequence: Synthetic oligonucleotide
  Antisense strand to SEQ ID NO: 1284786
aggauuauaggauaagccc

SEQ ID NO: 1284788 - RNA, 19 nt, Artificial Sequence
  Description of Artificial Sequence: Synthetic oligonucleotide
  Sense strand starting at position 776 of SEQ ID NO: 1241598
cccagaaucuggcuuguca

SEQ ID NO: 1284789 - RNA, 19 nt, Artificial Sequence
  Description of Artificial Sequence: Synthetic oligonucleotide
  Antisense strand to SEQ ID NO: 1284788
ugacaagccagauucuggg

SEQ ID NO: 1284790 - RNA, 19 nt, Artificial Sequence
  Description of Artificial Sequence: Synthetic oligonucleotide
  Sense strand starting at position 778 of SEQ ID NO: 1241598
cagaaucuggcuugucagu

SEQ ID NO: 1284791 - RNA, 19 nt, Artificial Sequence
  Description of Artificial Sequence: Synthetic oligonucleotide
  Antisense strand to SEQ ID NO: 1284790
acugacaagccagauucug

SEQ ID NO: 1284792 - RNA, 19 nt, Artificial Sequence
  Description of Artificial Sequence: Synthetic oligonucleotide
  Sense strand starting at position 956 of SEQ ID NO: 1241598
gcuuuauggccuuacaggu

SEQ ID NO: 1284793 - RNA, 19 nt, Artificial Sequence
  Description of Artificial Sequence: Synthetic oligonucleotide
  Antisense strand to SEQ ID NO: 1284792
accuguaaggccauaaagc

SEQ ID NO: 1284794 - RNA, 19 nt, Artificial Sequence
  Description of Artificial Sequence: Synthetic oligonucleotide
  Sense strand starting at position 1150 of SEQ ID NO: 1241598
uggccucugcacuauacua

SEQ ID NO: 1284795 - RNA, 19 nt, Artificial Sequence
  Description of Artificial Sequence: Synthetic oligonucleotide
  Antisense strand to SEQ ID NO: 1284794
uaguauagugcagaggcca

SEQ ID NO: 1284796 - RNA, 19 nt, Artificial Sequence
  Description of Artificial Sequence: Synthetic oligonucleotide
  Sense strand starting at position 1470 of SEQ ID NO: 1241598
ggcucaggguucucaccau

SEQ ID NO: 1284797 - RNA, 19 nt, Artificial Sequence
  Description of Artificial Sequence: Synthetic oligonucleotide
  Antisense strand to SEQ ID NO: 1284796
auggugagaacccugagcc

SEQ ID NO: 1284798 - RNA, 19 nt, Artificial Sequence
  Description of Artificial Sequence: Synthetic oligonucleotide
  Sense strand starting at position 1525 of SEQ ID NO: 1241598
agugguagcccuugaaguc

SEQ ID NO: 1284799 - RNA, 19 nt, Artificial Sequence
  Description of Artificial Sequence: Synthetic oligonucleotide
  Antisense strand to SEQ ID NO: 1284798
gacuucaagggcuaccacu

SEQ ID NO: 1284800 - RNA, 19 nt, Artificial Sequence
  Description of Artificial Sequence: Synthetic oligonucleotide
  Sense strand starting at position 1544 of SEQ ID NO: 1241598
ugaggagagaagugucaau

SEQ ID NO: 1284801 - RNA, 19 nt, Artificial Sequence
  Description of Artificial Sequence: Synthetic oligonucleotide
  Antisense strand to SEQ ID NO: 1284800
auugacacuucucuccuca

SEQ ID NO: 1284802 - RNA, 19 nt, Artificial Sequence
  Description of Artificial Sequence: Synthetic oligonucleotide
  Sense strand starting at position 1710 of SEQ ID NO: 1241598
ccguguggcccuuccuaua

SEQ ID NO: 1284803 - RNA, 19 nt, Artificial Sequence
  Description of Artificial Sequence: Synthetic oligonucleotide
  Antisense strand to SEQ ID NO: 1284802
uauaggaagggccacacgg

SEQ ID NO: 1284804 - RNA, 19 nt, Artificial Sequence
  Description of Artificial Sequence: Synthetic oligonucleotide
  Sense strand starting at position 2099 of SEQ ID NO: 1241598
uguagcgugcgugugaaau

SEQ ID NO: 1284805 - RNA, 19 nt, Artificial Sequence
  Description of Artificial Sequence: Synthetic oligonucleotide
  Antisense strand to SEQ ID NO: 1284804
auuucacacgcacgcuaca

SEQ ID NO: 1284806 - RNA, 19 nt, Artificial Sequence
  Description of Artificial Sequence: Synthetic oligonucleotide
  Sense strand starting at position 2144 of SEQ ID NO: 1241598
cucagagugcaauguaguu

SEQ ID NO: 1284807 - RNA, 19 nt, Artificial Sequence
  Description of Artificial Sequence: Synthetic oligonucleotide
  Antisense strand to SEQ ID NO: 1284806
aacuacauugcacucugag

SEQ ID NO: 1284808 - RNA, 19 nt, Artificial Sequence
  Description of Artificial Sequence: Synthetic oligonucleotide
  Sense strand starting at position 2150 of SEQ ID NO: 1241598
gugcaauguaguuagugga

SEQ ID NO: 1284809 - RNA, 19 nt, Artificial Sequence
  Description of Artificial Sequence: Synthetic oligonucleotide
  Antisense strand to SEQ ID NO: 1284808
uccacuaacuacauugcac

SEQ ID NO: 1284810 - RNA, 19 nt, Artificial Sequence
  Description of Artificial Sequence: Synthetic oligonucleotide
  Sense strand starting at position 2156 of SEQ ID NO: 1241598
uguaguuaguggaagaggu

SEQ ID NO: 1284811 - RNA, 19 nt, Artificial Sequence
  Description of Artificial Sequence: Synthetic oligonucleotide
  Antisense strand to SEQ ID NO: 1284810
accucuuccacuaacuaca

SEQ ID NO: 1284812 - RNA, 19 nt, Artificial Sequence
  Description of Artificial Sequence: Synthetic oligonucleotide
  Sense strand starting at position 2158 of SEQ ID NO: 1241598
uaguuaguggaagagguuu

SEQ ID NO: 1284813 - RNA, 19 nt, Artificial Sequence
  Description of Artificial Sequence: Synthetic oligonucleotide
  Antisense strand to SEQ ID NO: 1284812
aaaccucuuccacuaacua

SEQ ID NO: 1284814 - RNA, 19 nt, Artificial Sequence
  Description of Artificial Sequence: Synthetic oligonucleotide
  Sense strand starting at position 2166 of SEQ ID NO: 1241598
ggaagagguuucuccaaca

SEQ ID NO: 1284815 - RNA, 19 nt, Artificial Sequence
  Description of Artificial Sequence: Synthetic oligonucleotide
  Antisense strand to SEQ ID NO: 1284814
uguuggagaaaccucuucc

SEQ ID NO: 1284816 - RNA, 19 nt, Artificial Sequence
  Description of Artificial Sequence: Synthetic oligonucleotide
  Sense strand starting at position 2235 of SEQ ID NO: 1241598
gacagccuucuagauguca

SEQ ID NO: 1284817 - RNA, 19 nt, Artificial Sequence
  Description of Artificial Sequence: Synthetic oligonucleotide
  Antisense strand to SEQ ID NO: 1284816
ugacaucuagaaggcuguc

SEQ ID NO: 1284818 - RNA, 19 nt, Artificial Sequence
  Description of Artificial Sequence: Synthetic oligonucleotide
  Sense strand starting at position 2393 of SEQ ID NO: 1241598
cccuaaauguuggugaucu

SEQ ID NO: 1284819 - RNA, 19 nt, Artificial Sequence
  Description of Artificial Sequence: Synthetic oligonucleotide
  Antisense strand to SEQ ID NO: 1284818
agaucaccaacauuuaggg

SEQ ID NO: 1284820 - RNA, 19 nt, Artificial Sequence
  Description of Artificial Sequence: Synthetic oligonucleotide
  Sense strand starting at position 2449 of SEQ ID NO: 1241598
cuguuccugggagaauguu

SEQ ID NO: 1284821 - RNA, 19 nt, Artificial Sequence
  Description of Artificial Sequence: Synthetic oligonucleotide
  Antisense strand to SEQ ID NO: 1284820
aacauucucccaggaacag

SEQ ID NO: 1284822 - RNA, 19 nt, Artificial Sequence
  Description of Artificial Sequence: Synthetic oligonucleotide
  Sense strand starting at position 2535 of SEQ ID NO: 1241598
uuacacuuucucuggguga

SEQ ID NO: 1284823 - RNA, 19 nt, Artificial Sequence
  Description of Artificial Sequence: Synthetic oligonucleotide
  Antisense strand to SEQ ID NO: 1284822
ucacccagagaaaguguaa

SEQ ID NO: 1284824 - RNA, 19 nt, Artificial Sequence
  Description of Artificial Sequence: Synthetic oligonucleotide
  Sense strand starting at position 2537 of SEQ ID NO: 1241598
acacuuucucugggugagu

SEQ ID NO: 1284825 - RNA, 19 nt, Artificial Sequence
  Description of Artificial Sequence: Synthetic oligonucleotide
  Antisense strand to SEQ ID NO: 1284824
acucacccagagaaagugu

SEQ ID NO: 1284826 - RNA, 19 nt, Artificial Sequence
  Description of Artificial Sequence: Synthetic oligonucleotide
  Sense strand starting at position 2538 of SEQ ID NO: 1241598
cacuuucucugggugaguu

SEQ ID NO: 1284827 - RNA, 19 nt, Artificial Sequence
  Description of Artificial Sequence: Synthetic oligonucleotide
  Antisense strand to SEQ ID NO: 1284826
aacucacccagagaaagug

SEQ ID NO: 1284828 - RNA, 19 nt, Artificial Sequence
  Description of Artificial Sequence: Synthetic oligonucleotide
  Sense strand starting at position 2587 of SEQ ID NO: 1241598
guaaauugaugacacccaa

SEQ ID NO: 1284829 - RNA, 19 nt, Artificial Sequence
  Description of Artificial Sequence: Synthetic oligonucleotide
  Antisense strand to SEQ ID NO: 1284828
uugggugucaucaauuuac

SEQ ID NO: 1284830 - RNA, 19 nt, Artificial Sequence
  Description of Artificial Sequence: Synthetic oligonucleotide
  Sense strand starting at position 2762 of SEQ ID NO: 1241598
gucuaaacauuggccuuua

SEQ ID NO: 1284831 - RNA, 19 nt, Artificial Sequence
  Description of Artificial Sequence: Synthetic oligonucleotide
  Antisense strand to SEQ ID NO: 1284830
uaaaggccaauguuuagac

SEQ ID NO: 1284832 - RNA, 19 nt, Artificial Sequence
  Description of Artificial Sequence: Synthetic oligonucleotide
  Sense strand starting at position 2883 of SEQ ID NO: 1241598
ucuucuccagauuguugaa

SEQ ID NO: 1284833 - RNA, 19 nt, Artificial Sequence
  Description of Artificial Sequence: Synthetic oligonucleotide
  Antisense strand to SEQ ID NO: 1284832
uucaacaaucuggagaaga

SEQ ID NO: 1284834 - RNA, 19 nt, Artificial Sequence
  Description of Artificial Sequence: Synthetic oligonucleotide
  Sense strand starting at position 2987 of SEQ ID NO: 1241598
acgucauaucugugccuaa

SEQ ID NO: 1284835 - RNA, 19 nt, Artificial Sequence
  Description of Artificial Sequence: Synthetic oligonucleotide
  Antisense strand to SEQ ID NO: 1284834
uuaggcacagauaugacgu

SEQ ID NO: 1284836 - RNA, 19 nt, Artificial Sequence
  Description of Artificial Sequence: Synthetic oligonucleotide
  Sense strand starting at position 2988 of SEQ ID NO: 1241598
cgucauaucugugccuaaa

SEQ ID NO: 1284837 - RNA, 19 nt, Artificial Sequence
  Description of Artificial Sequence: Synthetic oligonucleotide
  Antisense strand to SEQ ID NO: 1284836
uuuaggcacagauaugacg

SEQ ID NO: 1284838 - RNA, 19 nt, Artificial Sequence
  Description of Artificial Sequence: Synthetic oligonucleotide
  Sense strand starting at position 3028 of SEQ ID NO: 1241598
aggauagaauuguaaucuc

SEQ ID NO: 1284839 - RNA, 19 nt, Artificial Sequence
  Description of Artificial Sequence: Synthetic oligonucleotide
  Antisense strand to SEQ ID NO: 1284838
gagauuacaauucuauccu

SEQ ID NO: 1284840 - RNA, 19 nt, Artificial Sequence
  Description of Artificial Sequence: Synthetic oligonucleotide
  Sense strand starting at position 3086 of SEQ ID NO: 1241598
ccuacucucuggcuguaua

SEQ ID NO: 1284841 - RNA, 19 nt, Artificial Sequence
  Description of Artificial Sequence: Synthetic oligonucleotide
  Antisense strand to SEQ ID NO: 1284840
uauacagccagagaguagg

SEQ ID NO: 1284842 - RNA, 19 nt, Artificial Sequence
  Description of Artificial Sequence: Synthetic oligonucleotide
  Sense strand starting at position 3087 of SEQ ID NO: 1241598
cuacucucuggcuguauau

SEQ ID NO: 1284843 - RNA, 19 nt, Artificial Sequence
  Description of Artificial Sequence: Synthetic oligonucleotide
  Antisense strand to SEQ ID NO: 1284842
auauacagccagagaguag

SEQ ID NO: 1284844 - RNA, 19 nt, Artificial Sequence
  Description of Artificial Sequence: Synthetic oligonucleotide
  Sense strand starting at position 3222 of SEQ ID NO: 1241598
aguaauuccuguuuaucuu

SEQ ID NO: 1284845 - RNA, 19 nt, Artificial Sequence
  Description of Artificial Sequence: Synthetic oligonucleotide
  Antisense strand to SEQ ID NO: 1284844
aagauaaacaggaauuacu

SEQ ID NO: 1284846 - RNA, 19 nt, Artificial Sequence
  Description of Artificial Sequence: Synthetic oligonucleotide
  Sense strand starting at position 3223 of SEQ ID NO: 1241598
guaauuccuguuuaucuuu

SEQ ID NO: 1284847 - RNA, 19 nt, Artificial Sequence
  Description of Artificial Sequence: Synthetic oligonucleotide
  Antisense strand to SEQ ID NO: 1284846
aaagauaaacaggaauuac

SEQ ID NO: 1284848 - RNA, 19 nt, Artificial Sequence
  Description of Artificial Sequence: Synthetic oligonucleotide
  Sense strand starting at position 3465 of SEQ ID NO: 1241598
gugugugaugucuuugcga

SEQ ID NO: 1284849 - RNA, 19 nt, Artificial Sequence
  Description of Artificial Sequence: Synthetic oligonucleotide
  Antisense strand to SEQ ID NO: 1284848
ucgcaaagacaucacacac

SEQ ID NO: 1284850 - RNA, 19 nt, Artificial Sequence
  Description of Artificial Sequence: Synthetic oligonucleotide
  Sense strand starting at position 3468 of SEQ ID NO: 1241598
ugugaugucuuugcgaaua

SEQ ID NO: 1284851 - RNA, 19 nt, Artificial Sequence
  Description of Artificial Sequence: Synthetic oligonucleotide
  Antisense strand to SEQ ID NO: 1284850
uauucgcaaagacaucaca

SEQ ID NO: 1284852 - RNA, 19 nt, Artificial Sequence
  Description of Artificial Sequence: Synthetic oligonucleotide
  Sense strand starting at position 3480 of SEQ ID NO: 1241598
gcgaauaguguguccaugu

SEQ ID NO: 1284853 - RNA, 19 nt, Artificial Sequence
  Description of Artificial Sequence: Synthetic oligonucleotide
  Antisense strand to SEQ ID NO: 1284852
acauggacacacuauucgc

SEQ ID NO: 1284854 - RNA, 19 nt, Artificial Sequence
  Description of Artificial Sequence: Synthetic oligonucleotide
  Sense strand starting at position 3481 of SEQ ID NO: 1241598
cgaauaguguguccaugug

SEQ ID NO: 1284855 - RNA, 19 nt, Artificial Sequence
  Description of Artificial Sequence: Synthetic oligonucleotide
  Antisense strand to SEQ ID NO: 1284854
cacauggacacacuauucg

SEQ ID NO: 1284856 - RNA, 19 nt, Artificial Sequence
  Description of Artificial Sequence: Synthetic oligonucleotide
  Sense strand starting at position 3894 of SEQ ID NO: 1241598
ccuggaaauguauguaaag

SEQ ID NO: 1284857 - RNA, 19 nt, Artificial Sequence
  Description of Artificial Sequence: Synthetic oligonucleotide
  Antisense strand to SEQ ID NO: 1284856
cuuuacauacauuuccagg

SEQ ID NO: 1284858 - RNA, 19 nt, Artificial Sequence
  Description of Artificial Sequence: Synthetic oligonucleotide
  Sense strand starting at position 3895 of SEQ ID NO: 1241598
cuggaaauguauguaaagu

SEQ ID NO: 1284859 - RNA, 19 nt, Artificial Sequence
  Description of Artificial Sequence: Synthetic oligonucleotide
  Antisense strand to SEQ ID NO: 1284858
acuuuacauacauuuccag

SEQ ID NO: 1284860 - RNA, 19 nt, Artificial Sequence
  Description of Artificial Sequence: Synthetic oligonucleotide
  Sense strand starting at position 3896 of SEQ ID NO: 1241598
uggaaauguauguaaagug

SEQ ID NO: 1284861 - RNA, 19 nt, Artificial Sequence
  Description of Artificial Sequence: Synthetic oligonucleotide
  Antisense strand to SEQ ID NO: 1284860
cacuuuacauacauuucca

SEQ ID NO: 1284862 - RNA, 19 nt, Artificial Sequence
  Description of Artificial Sequence: Synthetic oligonucleotide
  Sense strand starting at position 3905 of SEQ ID NO: 1241598
auguaaaguguccauuaua

SEQ ID NO: 1284863 - RNA, 19 nt, Artificial Sequence
  Description of Artificial Sequence: Synthetic oligonucleotide
  Antisense strand to SEQ ID NO: 1284862
uauaauggacacuuuacau

SEQ ID NO: 1284864 - RNA, 19 nt, Artificial Sequence
  Description of Artificial Sequence: Synthetic oligonucleotide
  Sense strand starting at position 3928 of SEQ ID NO: 1241598
uguccuuuccuagauccua

SEQ ID NO: 1284865 - RNA, 19 nt, Artificial Sequence
  Description of Artificial Sequence: Synthetic oligonucleotide
  Antisense strand to SEQ ID NO: 1284864
uaggaucuaggaaaggaca

SEQ ID NO: 1284866 - RNA, 19 nt, Artificial Sequence
  Description of Artificial Sequence: Synthetic oligonucleotide
  Sense strand starting at position 3973 of SEQ ID NO: 1241598
uuccuaucccuguguauuu

SEQ ID NO: 1284867 - RNA, 19 nt, Artificial Sequence
  Description of Artificial Sequence: Synthetic oligonucleotide
  Antisense strand to SEQ ID NO: 1284866
aaauacacagggauaggaa

SEQ ID NO: 1284868 - RNA, 19 nt, Artificial Sequence
  Description of Artificial Sequence: Synthetic oligonucleotide
  Sense strand starting at position 120 of SEQ ID NO: 1241599
gagagaaccugucuccaca

SEQ ID NO: 1284869 - RNA, 19 nt, Artificial Sequence
  Description of Artificial Sequence: Synthetic oligonucleotide
  Antisense strand to SEQ ID NO: 1284868
uguggagacagguucucuc

SEQ ID NO: 1284870 - RNA, 19 nt, Artificial Sequence
  Description of Artificial Sequence: Synthetic oligonucleotide
  Sense strand starting at position 402 of SEQ ID NO: 1241599
aucacuugccuggacuauu

SEQ ID NO: 1284871 - RNA, 19 nt, Artificial Sequence
  Description of Artificial Sequence: Synthetic oligonucleotide
  Antisense strand to SEQ ID NO: 1284870
aauaguccaggcaagugau

SEQ ID NO: 1284872 - RNA, 19 nt, Artificial Sequence
  Description of Artificial Sequence: Synthetic oligonucleotide
  Sense strand starting at position 412 of SEQ ID NO: 1241599
uggacuauugcauauuguu

SEQ ID NO: 1284873 - RNA, 19 nt, Artificial Sequence
  Description of Artificial Sequence: Synthetic oligonucleotide
  Antisense strand to SEQ ID NO: 1284872
aacaauaugcaauagucca

SEQ ID NO: 1284874 - RNA, 19 nt, Artificial Sequence
  Description of Artificial Sequence: Synthetic oligonucleotide
  Sense strand starting at position 543 of SEQ ID NO: 1241599
gaauacucauaguugagau

SEQ ID NO: 1284875 - RNA, 19 nt, Artificial Sequence
  Description of Artificial Sequence: Synthetic oligonucleotide
  Antisense strand to SEQ ID NO: 1284874
aucucaacuaugaguauuc

SEQ ID NO: 1284876 - RNA, 19 nt, Artificial Sequence
  Description of Artificial Sequence: Synthetic oligonucleotide
  Sense strand starting at position 595 of SEQ ID NO: 1241599
ugcaguaagcauuacaauu

SEQ ID NO: 1284877 - RNA, 19 nt, Artificial Sequence
  Description of Artificial Sequence: Synthetic oligonucleotide
  Antisense strand to SEQ ID NO: 1284876
aauuguaaugcuuacugca

SEQ ID NO: 1284878 - RNA, 19 nt, Artificial Sequence
  Description of Artificial Sequence: Synthetic oligonucleotide
  Sense strand starting at position 669 of SEQ ID NO: 1241599
aagucagaucagugucaca

SEQ ID NO: 1284879 - RNA, 19 nt, Artificial Sequence
  Description of Artificial Sequence: Synthetic oligonucleotide
  Antisense strand to SEQ ID NO: 1284878
ugugacacugaucugacuu

SEQ ID NO: 1284880 - RNA, 19 nt, Artificial Sequence
  Description of Artificial Sequence: Synthetic oligonucleotide
  Sense strand starting at position 714 of SEQ ID NO: 1241599
agucacgauuauccuuuaa

SEQ ID NO: 1284881 - RNA, 19 nt, Artificial Sequence
  Description of Artificial Sequence: Synthetic oligonucleotide
  Antisense strand to SEQ ID NO: 1284880
uuaaaggauaaucgugacu

SEQ ID NO: 1284882 - RNA, 19 nt, Artificial Sequence
  Description of Artificial Sequence: Synthetic oligonucleotide
  Sense strand starting at position 946 of SEQ ID NO: 1241599
gacuguaguggagguuaaa

SEQ ID NO: 1284883 - RNA, 19 nt, Artificial Sequence
  Description of Artificial Sequence: Synthetic oligonucleotide
  Antisense strand to SEQ ID NO: 1284882
uuuaaccuccacuacaguc

SEQ ID NO: 1284884 - RNA, 19 nt, Artificial Sequence
  Description of Artificial Sequence: Synthetic oligonucleotide
  Sense strand starting at position 989 of SEQ ID NO: 1241599
aguacuuaaggucagcaau

SEQ ID NO: 1284885 - RNA, 19 nt, Artificial Sequence
  Description of Artificial Sequence: Synthetic oligonucleotide
  Antisense strand to SEQ ID NO: 1284884
auugcugaccuuaaguacu

SEQ ID NO: 1284886 - RNA, 19 nt, Artificial Sequence
  Description of Artificial Sequence: Synthetic oligonucleotide
  Sense strand starting at position 992 of SEQ ID NO: 1241599
acuuaaggucagcaaucau

SEQ ID NO: 1284887 - RNA, 19 nt, Artificial Sequence
  Description of Artificial Sequence: Synthetic oligonucleotide
  Antisense strand to SEQ ID NO: 1284886
augauugcugaccuuaagu

SEQ ID NO: 1284888 - RNA, 19 nt, Artificial Sequence
  Description of Artificial Sequence: Synthetic oligonucleotide
  Sense strand starting at position 1152 of SEQ ID NO: 1241599
gcacauaucuauucgauaa

SEQ ID NO: 1284889 - RNA, 19 nt, Artificial Sequence
  Description of Artificial Sequence: Synthetic oligonucleotide
  Antisense strand to SEQ ID NO: 1284888
uuaucgaauagauaugugc

SEQ ID NO: 1284890 - RNA, 19 nt, Artificial Sequence
  Description of Artificial Sequence: Synthetic oligonucleotide
  Sense strand starting at position 1181 of SEQ ID NO: 1241599
auacuauuauggcuugcaa

SEQ ID NO: 1284891 - RNA, 19 nt, Artificial Sequence
  Description of Artificial Sequence: Synthetic oligonucleotide
  Antisense strand to SEQ ID NO: 1284890
uugcaagccauaauaguau

SEQ ID NO: 1284892 - RNA, 19 nt, Artificial Sequence
  Description of Artificial Sequence: Synthetic oligonucleotide
  Sense strand starting at position 1222 of SEQ ID NO: 1241599
acguaaauuccugcggugu

SEQ ID NO: 1284893 - RNA, 19 nt, Artificial Sequence
  Description of Artificial Sequence: Synthetic oligonucleotide
  Antisense strand to SEQ ID NO: 1284892
acaccgcaggaauuuacgu

SEQ ID NO: 1284894 - RNA, 19 nt, Artificial Sequence
  Description of Artificial Sequence: Synthetic oligonucleotide
  Sense strand starting at position 1283 of SEQ ID NO: 1241599
gacggucaacccuggagaa

SEQ ID NO: 1284895 - RNA, 19 nt, Artificial Sequence
  Description of Artificial Sequence: Synthetic oligonucleotide
  Antisense strand to SEQ ID NO: 1284894
uucuccaggguugaccguc

SEQ ID NO: 1284896 - RNA, 19 nt, Artificial Sequence
  Description of Artificial Sequence: Synthetic oligonucleotide
  Sense strand starting at position 1284 of SEQ ID NO: 1241599
acggucaacccuggagaau

SEQ ID NO: 1284897 - RNA, 19 nt, Artificial Sequence
  Description of Artificial Sequence: Synthetic oligonucleotide
  Antisense strand to SEQ ID NO: 1284896
auucuccaggguugaccgu

SEQ ID NO: 1284898 - RNA, 19 nt, Artificial Sequence
  Description of Artificial Sequence: Synthetic oligonucleotide
  Sense strand starting at position 1417 of SEQ ID NO: 1241599
uuccaaaggcuucggauau

SEQ ID NO: 1284899 - RNA, 19 nt, Artificial Sequence
  Description of Artificial Sequence: Synthetic oligonucleotide
  Antisense strand to SEQ ID NO: 1284898
auauccgaagccuuuggaa

SEQ ID NO: 1284900 - RNA, 19 nt, Artificial Sequence
  Description of Artificial Sequence: Synthetic oligonucleotide
  Sense strand starting at position 1463 of SEQ ID NO: 1241599
ugagguaacuaguugagaa

SEQ ID NO: 1284901 - RNA, 19 nt, Artificial Sequence
  Description of Artificial Sequence: Synthetic oligonucleotide
  Antisense strand to SEQ ID NO: 1284900
uucucaacuaguuaccuca

SEQ ID NO: 1284902 - RNA, 19 nt, Artificial Sequence
  Description of Artificial Sequence: Synthetic oligonucleotide
  Sense strand starting at position 1473 of SEQ ID NO: 1241599
aguugagaaacuugggcaa

SEQ ID NO: 1284903 - RNA, 19 nt, Artificial Sequence
  Description of Artificial Sequence: Synthetic oligonucleotide
  Antisense strand to SEQ ID NO: 1284902
uugcccaaguuucucaacu

SEQ ID NO: 1284904 - RNA, 19 nt, Artificial Sequence
  Description of Artificial Sequence: Synthetic oligonucleotide
  Sense strand starting at position 1476 of SEQ ID NO: 1241599
ugagaaacuugggcaaagu

SEQ ID NO: 1284905 - RNA, 19 nt, Artificial Sequence
  Description of Artificial Sequence: Synthetic oligonucleotide
  Antisense strand to SEQ ID NO: 1284904
acuuugcccaaguuucuca

SEQ ID NO: 1284906 - RNA, 19 nt, Artificial Sequence
  Description of Artificial Sequence: Synthetic oligonucleotide
  Sense strand starting at position 1492 of SEQ ID NO: 1241599
aguuaaacagcugacaauu

SEQ ID NO: 1284907 - RNA, 19 nt, Artificial Sequence
  Description of Artificial Sequence: Synthetic oligonucleotide
  Antisense strand to SEQ ID NO: 1284906
aauugucagcuguuuaacu

SEQ ID NO: 1284908 - RNA, 19 nt, Artificial Sequence
  Description of Artificial Sequence: Synthetic oligonucleotide
  Sense strand starting at position 1500 of SEQ ID NO: 1241599
agcugacaauuggugugaa

SEQ ID NO: 1284909 - RNA, 19 nt, Artificial Sequence
  Description of Artificial Sequence: Synthetic oligonucleotide
  Antisense strand to SEQ ID NO: 1284908
uucacaccaauugucagcu

SEQ ID NO: 1284910 - RNA, 19 nt, Artificial Sequence
  Description of Artificial Sequence: Synthetic oligonucleotide
  Sense strand starting at position 1503 of SEQ ID NO: 1241599
ugacaauuggugugaagcu

SEQ ID NO: 1284911 - RNA, 19 nt, Artificial Sequence
  Description of Artificial Sequence: Synthetic oligonucleotide
  Antisense strand to SEQ ID NO: 1284910
agcuucacaccaauuguca

SEQ ID NO: 1284912 - RNA, 19 nt, Artificial Sequence
  Description of Artificial Sequence: Synthetic oligonucleotide
  Sense strand starting at position 1578 of SEQ ID NO: 1241599
gugggagagucccucaacu

SEQ ID NO: 1284913 - RNA, 19 nt, Artificial Sequence
  Description of Artificial Sequence: Synthetic oligonucleotide
  Antisense strand to SEQ ID NO: 1284912
aguugagggacucucccac

SEQ ID NO: 1284914 - RNA, 19 nt, Artificial Sequence
  Description of Artificial Sequence: Synthetic oligonucleotide
  Sense strand starting at position 1658 of SEQ ID NO: 1241599
gcggaaacaucacccagaa

SEQ ID NO: 1284915 - RNA, 19 nt, Artificial Sequence
  Description of Artificial Sequence: Synthetic oligonucleotide
  Antisense strand to SEQ ID NO: 1284914
uucugggugauguuuccgc

SEQ ID NO: 1284916 - RNA, 19 nt, Artificial Sequence
  Description of Artificial Sequence: Synthetic oligonucleotide
  Sense strand starting at position 2086 of SEQ ID NO: 1241599
ugggaauuguaguuaauac

SEQ ID NO: 1284917 - RNA, 19 nt, Artificial Sequence
  Description of Artificial Sequence: Synthetic oligonucleotide
  Antisense strand to SEQ ID NO: 1284916
guauuaacuacaauuccca

SEQ ID NO: 1284918 - RNA, 19 nt, Artificial Sequence
  Description of Artificial Sequence: Synthetic oligonucleotide
  Sense strand starting at position 2134 of SEQ ID NO: 1241599
gcaguuucucaauauagug

SEQ ID NO: 1284919 - RNA, 19 nt, Artificial Sequence
  Description of Artificial Sequence: Synthetic oligonucleotide
  Antisense strand to SEQ ID NO: 1284918
cacuauauugagaaacugc

SEQ ID NO: 1284920 - RNA, 19 nt, Artificial Sequence
  Description of Artificial Sequence: Synthetic oligonucleotide
  Sense strand starting at position 2202 of SEQ ID NO: 1241599
ggaacacccuguuuggaaa

SEQ ID NO: 1284921 - RNA, 19 nt, Artificial Sequence
  Description of Artificial Sequence: Synthetic oligonucleotide
  Antisense strand to SEQ ID NO: 1284920
uuuccaaacaggguguucc

SEQ ID NO: 1284922 - RNA, 19 nt, Artificial Sequence
  Description of Artificial Sequence: Synthetic oligonucleotide
  Sense strand starting at position 2203 of SEQ ID NO: 1241599
gaacacccuguuuggaaau

SEQ ID NO: 1284923 - RNA, 19 nt, Artificial Sequence
  Description of Artificial Sequence: Synthetic oligonucleotide
  Antisense strand to SEQ ID NO: 1284922
auuuccaaacaggguguuc

SEQ ID NO: 1284924 - RNA, 19 nt, Artificial Sequence
  Description of Artificial Sequence: Synthetic oligonucleotide
  Sense strand starting at position 2205 of SEQ ID NO: 1241599
acacccuguuuggaaauuu

SEQ ID NO: 1284925 - RNA, 19 nt, Artificial Sequence
  Description of Artificial Sequence: Synthetic oligonucleotide
  Antisense strand to SEQ ID NO: 1284924
aaauuuccaaacagggugu

SEQ ID NO: 1284926 - RNA, 19 nt, Artificial Sequence
  Description of Artificial Sequence: Synthetic oligonucleotide
  Sense strand starting at position 2784 of SEQ ID NO: 1241599
gcccgauggguucaccuua

SEQ ID NO: 1284927 - RNA, 19 nt, Artificial Sequence
  Description of Artificial Sequence: Synthetic oligonucleotide
  Antisense strand to SEQ ID NO: 1284926
uaaggugaacccaucgggc

SEQ ID NO: 1284928 - RNA, 19 nt, Artificial Sequence
  Description of Artificial Sequence: Synthetic oligonucleotide
  Sense strand starting at position 2923 of SEQ ID NO: 1241599
cgagcauuugcggaucgga

SEQ ID NO: 1284929 - RNA, 19 nt, Artificial Sequence
  Description of Artificial Sequence: Synthetic oligonucleotide
  Antisense strand to SEQ ID NO: 1284928
uccgauccgcaaaugcucg

SEQ ID NO: 1284930 - RNA, 19 nt, Artificial Sequence
  Description of Artificial Sequence: Synthetic oligonucleotide
  Sense strand starting at position 3083 of SEQ ID NO: 1241599
ccaaauuacuggucugagu

SEQ ID NO: 1284931 - RNA, 19 nt, Artificial Sequence
  Description of Artificial Sequence: Synthetic oligonucleotide
  Antisense strand to SEQ ID NO: 1284930
acucagaccaguaauuugg

SEQ ID NO: 1284932 - RNA, 19 nt, Artificial Sequence
  Description of Artificial Sequence: Synthetic oligonucleotide
  Sense strand starting at position 3152 of SEQ ID NO: 1241599
gaucuuagggcuugcaaua

SEQ ID NO: 1284933 - RNA, 19 nt, Artificial Sequence
  Description of Artificial Sequence: Synthetic oligonucleotide
  Antisense strand to SEQ ID NO: 1284932
uauugcaagcccuaagauc

SEQ ID NO: 1284934 - RNA, 19 nt, Artificial Sequence
  Description of Artificial Sequence: Synthetic oligonucleotide
  Sense strand starting at position 3157 of SEQ ID NO: 1241599
uagggcuugcaauagugau

SEQ ID NO: 1284935 - RNA, 19 nt, Artificial Sequence
  Description of Artificial Sequence: Synthetic oligonucleotide
  Antisense strand to SEQ ID NO: 1284934
aucacuauugcaagcccua

SEQ ID NO: 1284936 - RNA, 19 nt, Artificial Sequence
  Description of Artificial Sequence: Synthetic oligonucleotide
  Sense strand starting at position 3702 of SEQ ID NO: 1241599
gggccagaaagccauguua

SEQ ID NO: 1284937 - RNA, 19 nt, Artificial Sequence
  Description of Artificial Sequence: Synthetic oligonucleotide
  Antisense strand to SEQ ID NO: 1284936
uaacauggcuuucuggccc

SEQ ID NO: 1284938 - RNA, 19 nt, Artificial Sequence
  Description of Artificial Sequence: Synthetic oligonucleotide
  Sense strand starting at position 3807 of SEQ ID NO: 1241599
ccacccuuuggugauuaaa

SEQ ID NO: 1284939 - RNA, 19 nt, Artificial Sequence
  Description of Artificial Sequence: Synthetic oligonucleotide
  Antisense strand to SEQ ID NO: 1284938
uuuaaucaccaaagggugg

SEQ ID NO: 1284940 - RNA, 19 nt, Artificial Sequence
  Description of Artificial Sequence: Synthetic oligonucleotide
  Sense strand starting at position 3809 of SEQ ID NO: 1241599
acccuuuggugauuaaaua

SEQ ID NO: 1284941 - RNA, 19 nt, Artificial Sequence
  Description of Artificial Sequence: Synthetic oligonucleotide
  Antisense strand to SEQ ID NO: 1284940
uauuuaaucaccaaagggu

SEQ ID NO: 1284942 - RNA, 19 nt, Artificial Sequence
  Description of Artificial Sequence: Synthetic oligonucleotide
  Sense strand starting at position 3817 of SEQ ID NO: 1241599
gugauuaaauaguuuggga

SEQ ID NO: 1284943 - RNA, 19 nt, Artificial Sequence
  Description of Artificial Sequence: Synthetic oligonucleotide
  Antisense strand to SEQ ID NO: 1284942
ucccaaacuauuuaaucac

SEQ ID NO: 1284944 - RNA, 19 nt, Artificial Sequence
  Description of Artificial Sequence: Synthetic oligonucleotide
  Sense strand starting at position 3885 of SEQ ID NO: 1241599
gagagucugugauuaaagc

SEQ ID NO: 1284945 - RNA, 19 nt, Artificial Sequence
  Description of Artificial Sequence: Synthetic oligonucleotide
  Antisense strand to SEQ ID NO: 1284944
gcuuuaaucacagacucuc

SEQ ID NO: 1284946 - RNA, 19 nt, Artificial Sequence
  Description of Artificial Sequence: Synthetic oligonucleotide
  Sense strand starting at position 3886 of SEQ ID NO: 1241599
agagucugugauuaaagca

SEQ ID NO: 1284947 - RNA, 19 nt, Artificial Sequence
  Description of Artificial Sequence: Synthetic oligonucleotide
  Antisense strand to SEQ ID NO: 1284946
ugcuuuaaucacagacucu

SEQ ID NO: 1284948 - RNA, 19 nt, Artificial Sequence
  Description of Artificial Sequence: Synthetic oligonucleotide
  Sense strand starting at position 179 of SEQ ID NO: 1241600
uggauuaacugcuuucuua

SEQ ID NO: 1284949 - RNA, 19 nt, Artificial Sequence
  Description of Artificial Sequence: Synthetic oligonucleotide
  Antisense strand to SEQ ID NO: 1284948
uaagaaagcaguuaaucca

SEQ ID NO: 1284950 - RNA, 19 nt, Artificial Sequence
  Description of Artificial Sequence: Synthetic oligonucleotide
  Sense strand starting at position 220 of SEQ ID NO: 1241600
auuuacuugugacaaagau

SEQ ID NO: 1284951 - RNA, 19 nt, Artificial Sequence
  Description of Artificial Sequence: Synthetic oligonucleotide
  Antisense strand to SEQ ID NO: 1284950
aucuuugucacaaguaaau

SEQ ID NO: 1284952 - RNA, 19 nt, Artificial Sequence
  Description of Artificial Sequence: Synthetic oligonucleotide
  Sense strand starting at position 230 of SEQ ID NO: 1241600
gacaaagauuagcugucau

SEQ ID NO: 1284953 - RNA, 19 nt, Artificial Sequence
  Description of Artificial Sequence: Synthetic oligonucleotide
  Antisense strand to SEQ ID NO: 1284952
augacagcuaaucuuuguc

SEQ ID NO: 1284954 - RNA, 19 nt, Artificial Sequence
  Description of Artificial Sequence: Synthetic oligonucleotide
  Sense strand starting at position 330 of SEQ ID NO: 1241600
acuacucgauguucccaaa

SEQ ID NO: 1284955 - RNA, 19 nt, Artificial Sequence
  Description of Artificial Sequence: Synthetic oligonucleotide
  Antisense strand to SEQ ID NO: 1284954
uuugggaacaucgaguagu

SEQ ID NO: 1284956 - RNA, 19 nt, Artificial Sequence
  Description of Artificial Sequence: Synthetic oligonucleotide
  Sense strand starting at position 399 of SEQ ID NO: 1241600
gaguuauugcaaggauuau

SEQ ID NO: 1284957 - RNA, 19 nt, Artificial Sequence
  Description of Artificial Sequence: Synthetic oligonucleotide
  Antisense strand to SEQ ID NO: 1284956
auaauccuugcaauaacuc

SEQ ID NO: 1284958 - RNA, 19 nt, Artificial Sequence
  Description of Artificial Sequence: Synthetic oligonucleotide
  Sense strand starting at position 405 of SEQ ID NO: 1241600
uugcaaggauuaucauaau

SEQ ID NO: 1284959 - RNA, 19 nt, Artificial Sequence
  Description of Artificial Sequence: Synthetic oligonucleotide
  Antisense strand to SEQ ID NO: 1284958
auuaugauaauccuugcaa

SEQ ID NO: 1284960 - RNA, 19 nt, Artificial Sequence
  Description of Artificial Sequence: Synthetic oligonucleotide
  Sense strand starting at position 426 of SEQ ID NO: 1241600
acgugaaaucacuguaaac

SEQ ID NO: 1284961 - RNA, 19 nt, Artificial Sequence
  Description of Artificial Sequence: Synthetic oligonucleotide
  Antisense strand to SEQ ID NO: 1284960
guuuacagugauuucacgu

SEQ ID NO: 1284962 - RNA, 19 nt, Artificial Sequence
  Description of Artificial Sequence: Synthetic oligonucleotide
  Sense strand starting at position 455 of SEQ ID NO: 1241600
cauagaaauguuggguaau

SEQ ID NO: 1284963 - RNA, 19 nt, Artificial Sequence
  Description of Artificial Sequence: Synthetic oligonucleotide
  Antisense strand to SEQ ID NO: 1284962
auuacccaacauuucuaug

SEQ ID NO: 1284964 - RNA, 19 nt, Artificial Sequence
  Description of Artificial Sequence: Synthetic oligonucleotide
  Sense strand starting at position 457 of SEQ ID NO: 1241600
uagaaauguuggguaauau

SEQ ID NO: 1284965 - RNA, 19 nt, Artificial Sequence
  Description of Artificial Sequence: Synthetic oligonucleotide
  Antisense strand to SEQ ID NO: 1284964
auauuacccaacauuucua

SEQ ID NO: 1284966 - RNA, 19 nt, Artificial Sequence
  Description of Artificial Sequence: Synthetic oligonucleotide
  Sense strand starting at position 742 of SEQ ID NO: 1241600
uggaccagauguuccauaa

SEQ ID NO: 1284967 - RNA, 19 nt, Artificial Sequence
  Description of Artificial Sequence: Synthetic oligonucleotide
  Antisense strand to SEQ ID NO: 1284966
uuauggaacaucuggucca

SEQ ID NO: 1284968 - RNA, 19 nt, Artificial Sequence
  Description of Artificial Sequence: Synthetic oligonucleotide
  Sense strand starting at position 746 of SEQ ID NO: 1241600
ccagauguuccauaaguau

SEQ ID NO: 1284969 - RNA, 19 nt, Artificial Sequence
  Description of Artificial Sequence: Synthetic oligonucleotide
  Antisense strand to SEQ ID NO: 1284968
auacuuauggaacaucugg

SEQ ID NO: 1284970 - RNA, 19 nt, Artificial Sequence
  Description of Artificial Sequence: Synthetic oligonucleotide
  Sense strand starting at position 811 of SEQ ID NO: 1241600
gucgauuaacauuauauuc

SEQ ID NO: 1284971 - RNA, 19 nt, Artificial Sequence
  Description of Artificial Sequence: Synthetic oligonucleotide
  Antisense strand to SEQ ID NO: 1284970
gaauauaauguuaaucgac

SEQ ID NO: 1284972 - RNA, 19 nt, Artificial Sequence
  Description of Artificial Sequence: Synthetic oligonucleotide
  Sense strand starting at position 968 of SEQ ID NO: 1241600
cccucuaaaugacuaguga

SEQ ID NO: 1284973 - RNA, 19 nt, Artificial Sequence
  Description of Artificial Sequence: Synthetic oligonucleotide
  Antisense strand to SEQ ID NO: 1284972
ucacuagucauuuagaggg

SEQ ID NO: 1284974 - RNA, 19 nt, Artificial Sequence
  Description of Artificial Sequence: Synthetic oligonucleotide
  Sense strand starting at position 1111 of SEQ ID NO: 1241600
gguuuauauugucugagag

SEQ ID NO: 1284975 - RNA, 19 nt, Artificial Sequence
  Description of Artificial Sequence: Synthetic oligonucleotide
  Antisense strand to SEQ ID NO: 1284974
cucucagacaauauaaacc

SEQ ID NO: 1284976 - RNA, 19 nt, Artificial Sequence
  Description of Artificial Sequence: Synthetic oligonucleotide
  Sense strand starting at position 1112 of SEQ ID NO: 1241600
guuuauauugucugagaga

SEQ ID NO: 1284977 - RNA, 19 nt, Artificial Sequence
  Description of Artificial Sequence: Synthetic oligonucleotide
  Antisense strand to SEQ ID NO: 1284976
ucucucagacaauauaaac

SEQ ID NO: 1284978 - RNA, 19 nt, Artificial Sequence
  Description of Artificial Sequence: Synthetic oligonucleotide
  Sense strand starting at position 1298 of SEQ ID NO: 1241600
auuagauuacuguguuaac

SEQ ID NO: 1284979 - RNA, 19 nt, Artificial Sequence
  Description of Artificial Sequence: Synthetic oligonucleotide
  Antisense strand to SEQ ID NO: 1284978
guuaacacaguaaucuaau

SEQ ID NO: 1284980 - RNA, 19 nt, Artificial Sequence
  Description of Artificial Sequence: Synthetic oligonucleotide
  Sense strand starting at position 1299 of SEQ ID NO: 1241600
uuagauuacuguguuaaca

SEQ ID NO: 1284981 - RNA, 19 nt, Artificial Sequence
  Description of Artificial Sequence: Synthetic oligonucleotide
  Antisense strand to SEQ ID NO: 1284980
uguuaacacaguaaucuaa

SEQ ID NO: 1284982 - RNA, 19 nt, Artificial Sequence
  Description of Artificial Sequence: Synthetic oligonucleotide
  Sense strand starting at position 1307 of SEQ ID NO: 1241600
cuguguuaacaguaaucag

SEQ ID NO: 1284983 - RNA, 19 nt, Artificial Sequence
  Description of Artificial Sequence: Synthetic oligonucleotide
  Antisense strand to SEQ ID NO: 1284982
cugauuacuguuaacacag

SEQ ID NO: 1284984 - RNA, 19 nt, Artificial Sequence
  Description of Artificial Sequence: Synthetic oligonucleotide
  Sense strand starting at position 1531 of SEQ ID NO: 1241600
gagucagugcguccuucuu

SEQ ID NO: 1284985 - RNA, 19 nt, Artificial Sequence
  Description of Artificial Sequence: Synthetic oligonucleotide
  Antisense strand to SEQ ID NO: 1284984
aagaaggacgcacugacuc

SEQ ID NO: 1284986 - RNA, 19 nt, Artificial Sequence
  Description of Artificial Sequence: Synthetic oligonucleotide
  Sense strand starting at position 2138 of SEQ ID NO: 1241600
ucaagaguucuugacguca

SEQ ID NO: 1284987 - RNA, 19 nt, Artificial Sequence
  Description of Artificial Sequence: Synthetic oligonucleotide
  Antisense strand to SEQ ID NO: 1284986
ugacgucaagaacucuuga

SEQ ID NO: 1284988 - RNA, 19 nt, Artificial Sequence
  Description of Artificial Sequence: Synthetic oligonucleotide
  Sense strand starting at position 2249 of SEQ ID NO: 1241600
cugcgugcuccauuguaag

SEQ ID NO: 1284989 - RNA, 19 nt, Artificial Sequence
  Description of Artificial Sequence: Synthetic oligonucleotide
  Antisense strand to SEQ ID NO: 1284988
cuuacaauggagcacgcag

SEQ ID NO: 1284990 - RNA, 19 nt, Artificial Sequence
  Description of Artificial Sequence: Synthetic oligonucleotide
  Sense strand starting at position 2438 of SEQ ID NO: 1241600
ugcacuauguaugugauuu

SEQ ID NO: 1284991 - RNA, 19 nt, Artificial Sequence
  Description of Artificial Sequence: Synthetic oligonucleotide
  Antisense strand to SEQ ID NO: 1284990
aaaucacauacauagugca

SEQ ID NO: 1284992 - RNA, 19 nt, Artificial Sequence
  Description of Artificial Sequence: Synthetic oligonucleotide
  Sense strand starting at position 2518 of SEQ ID NO: 1241600
aaggcuuaagcagagguau

SEQ ID NO: 1284993 - RNA, 19 nt, Artificial Sequence
  Description of Artificial Sequence: Synthetic oligonucleotide
  Antisense strand to SEQ ID NO: 1284992
auaccucugcuuaagccuu

SEQ ID NO: 1284994 - RNA, 19 nt, Artificial Sequence
  Description of Artificial Sequence: Synthetic oligonucleotide
  Sense strand starting at position 2526 of SEQ ID NO: 1241600
agcagagguaucuagguuu

SEQ ID NO: 1284995 - RNA, 19 nt, Artificial Sequence
  Description of Artificial Sequence: Synthetic oligonucleotide
  Antisense strand to SEQ ID NO: 1284994
aaaccuagauaccucugcu

SEQ ID NO: 1284996 - RNA, 19 nt, Artificial Sequence
  Description of Artificial Sequence: Synthetic oligonucleotide
  Sense strand starting at position 2666 of SEQ ID NO: 1241600
uucuuauuacauugaugga

SEQ ID NO: 1284997 - RNA, 19 nt, Artificial Sequence
  Description of Artificial Sequence: Synthetic oligonucleotide
  Antisense strand to SEQ ID NO: 1284996
uccaucaauguaauaagaa

SEQ ID NO: 1284998 - RNA, 19 nt, Artificial Sequence
  Description of Artificial Sequence: Synthetic oligonucleotide
  Sense strand starting at position 3155 of SEQ ID NO: 1241600
gcaauagacuuguccaaug

SEQ ID NO: 1284999 - RNA, 19 nt, Artificial Sequence
  Description of Artificial Sequence: Synthetic oligonucleotide
  Antisense strand to SEQ ID NO: 1284998
cauuggacaagucuauugc

SEQ ID NO: 1285000 - RNA, 19 nt, Artificial Sequence
  Description of Artificial Sequence: Synthetic oligonucleotide
  Sense strand starting at position 3650 of SEQ ID NO: 1241600
uguaaacuacaucagugau

SEQ ID NO: 1285001 - RNA, 19 nt, Artificial Sequence
  Description of Artificial Sequence: Synthetic oligonucleotide
  Antisense strand to SEQ ID NO: 1285000
aucacugauguaguuuaca

SEQ ID NO: 1285002 - RNA, 19 nt, Artificial Sequence
  Description of Artificial Sequence: Synthetic oligonucleotide
  Sense strand starting at position 3656 of SEQ ID NO: 1241600
cuacaucagugauugugau

SEQ ID NO: 1285003 - RNA, 19 nt, Artificial Sequence
  Description of Artificial Sequence: Synthetic oligonucleotide
  Antisense strand to SEQ ID NO: 1285002
aucacaaucacugauguag

SEQ ID NO: 1285004 - RNA, 19 nt, Artificial Sequence
  Description of Artificial Sequence: Synthetic oligonucleotide
  Sense strand starting at position 3657 of SEQ ID NO: 1241600
uacaucagugauugugaua

SEQ ID NO: 1285005 - RNA, 19 nt, Artificial Sequence
  Description of Artificial Sequence: Synthetic oligonucleotide
  Antisense strand to SEQ ID NO: 1285004
uaucacaaucacugaugua

SEQ ID NO: 1285006 - RNA, 19 nt, Artificial Sequence
  Description of Artificial Sequence: Synthetic oligonucleotide
  Sense strand starting at position 3669 of SEQ ID NO: 1241600
ugugauaauuaggugagaa

SEQ ID NO: 1285007 - RNA, 19 nt, Artificial Sequence
  Description of Artificial Sequence: Synthetic oligonucleotide
  Antisense strand to SEQ ID NO: 1285006
uucucaccuaauuaucaca

SEQ ID NO: 1285008 - RNA, 19 nt, Artificial Sequence
  Description of Artificial Sequence: Synthetic oligonucleotide
  Sense strand starting at position 3763 of SEQ ID NO: 1241600
uguguaacuguuuacagau

SEQ ID NO: 1285009 - RNA, 19 nt, Artificial Sequence
  Description of Artificial Sequence: Synthetic oligonucleotide
  Antisense strand to SEQ ID NO: 1285008
aucuguaaacaguuacaca

SEQ ID NO: 1285010 - RNA, 19 nt, Artificial Sequence
  Description of Artificial Sequence: Synthetic oligonucleotide
  Sense strand starting at position 3797 of SEQ ID NO: 1241600
acuguaaacucccugagga

SEQ ID NO: 1285011 - RNA, 19 nt, Artificial Sequence
  Description of Artificial Sequence: Synthetic oligonucleotide
  Antisense strand to SEQ ID NO: 1285010
uccucagggaguuuacagu

SEQ ID NO: 1285012 - RNA, 19 nt, Artificial Sequence
  Description of Artificial Sequence: Synthetic oligonucleotide
  Sense strand starting at position 3798 of SEQ ID NO: 1241600
cuguaaacucccugaggac

SEQ ID NO: 1285013 - RNA, 19 nt, Artificial Sequence
  Description of Artificial Sequence: Synthetic oligonucleotide
  Antisense strand to SEQ ID NO: 1285012
guccucagggaguuuacag

SEQ ID NO: 1285014 - RNA, 19 nt, Artificial Sequence
  Description of Artificial Sequence: Synthetic oligonucleotide
  Sense strand starting at position 3820 of SEQ ID NO: 1241600
gacuguauagauugucuaa

SEQ ID NO: 1285015 - RNA, 19 nt, Artificial Sequence
  Description of Artificial Sequence: Synthetic oligonucleotide
  Antisense strand to SEQ ID NO: 1285014
uuagacaaucuauacaguc

SEQ ID NO: 1285016 - RNA, 19 nt, Artificial Sequence
  Description of Artificial Sequence: Synthetic oligonucleotide
  Sense strand starting at position 3822 of SEQ ID NO: 1241600
cuguauagauugucuaaag

SEQ ID NO: 1285017 - RNA, 19 nt, Artificial Sequence
  Description of Artificial Sequence: Synthetic oligonucleotide
  Antisense strand to SEQ ID NO: 1285016
cuuuagacaaucuauacag

SEQ ID NO: 1285018 - RNA, 19 nt, Artificial Sequence
  Description of Artificial Sequence: Synthetic oligonucleotide
  Sense strand starting at position 3885 of SEQ ID NO: 1241600
caauaaaucugugucgaau

SEQ ID NO: 1285019 - RNA, 19 nt, Artificial Sequence
  Description of Artificial Sequence: Synthetic oligonucleotide
  Antisense strand to SEQ ID NO: 1285018
auucgacacagauuuauug

SEQ ID NO: 1285020 - RNA, 19 nt, Artificial Sequence
  Description of Artificial Sequence: Synthetic oligonucleotide
  Sense strand starting at position 3888 of SEQ ID NO: 1241600
uaaaucugugucgaauaga

SEQ ID NO: 1285021 - RNA, 19 nt, Artificial Sequence
  Description of Artificial Sequence: Synthetic oligonucleotide
  Antisense strand to SEQ ID NO: 1285020
ucuauucgacacagauuua

SEQ ID NO: 1285022 - RNA, 19 nt, Artificial Sequence
  Description of Artificial Sequence: Synthetic oligonucleotide
  Sense strand starting at position 3891 of SEQ ID NO: 1241600
aucugugucgaauagaaga

SEQ ID NO: 1285023 - RNA, 19 nt, Artificial Sequence
  Description of Artificial Sequence: Synthetic oligonucleotide
  Antisense strand to SEQ ID NO: 1285022
ucuucuauucgacacagau

SEQ ID NO: 1285024 - RNA, 19 nt, Artificial Sequence
  Description of Artificial Sequence: Synthetic oligonucleotide
  Sense strand starting at position 3951 of SEQ ID NO: 1241600
aguaaauguuuggcaaaug

SEQ ID NO: 1285025 - RNA, 19 nt, Artificial Sequence
  Description of Artificial Sequence: Synthetic oligonucleotide
  Antisense strand to SEQ ID NO: 1285024
cauuugccaaacauuuacu

SEQ ID NO: 1285026 - RNA, 19 nt, Artificial Sequence
  Description of Artificial Sequence: Synthetic oligonucleotide
  Sense strand starting at position 3960 of SEQ ID NO: 1241600
uuggcaaaugagugacaua

SEQ ID NO: 1285027 - RNA, 19 nt, Artificial Sequence
  Description of Artificial Sequence: Synthetic oligonucleotide
  Antisense strand to SEQ ID NO: 1285026
uaugucacucauuugccaa

SEQ ID NO: 1285028 - RNA, 19 nt, Artificial Sequence
  Description of Artificial Sequence: Synthetic oligonucleotide
  Sense strand starting at position 107 of SEQ ID NO: 1241601
aagaacugcucauuguuga

SEQ ID NO: 1285029 - RNA, 19 nt, Artificial Sequence
  Description of Artificial Sequence: Synthetic oligonucleotide
  Antisense strand to SEQ ID NO: 1285028
ucaacaaugagcaguucuu

SEQ ID NO: 1285030 - RNA, 19 nt, Artificial Sequence
  Description of Artificial Sequence: Synthetic oligonucleotide
  Sense strand starting at position 114 of SEQ ID NO: 1241601
gcucauuguugagugcuaa

SEQ ID NO: 1285031 - RNA, 19 nt, Artificial Sequence
  Description of Artificial Sequence: Synthetic oligonucleotide
  Antisense strand to SEQ ID NO: 1285030
uuagcacucaacaaugagc

SEQ ID NO: 1285032 - RNA, 19 nt, Artificial Sequence
  Description of Artificial Sequence: Synthetic oligonucleotide
  Sense strand starting at position 115 of SEQ ID NO: 1241601
cucauuguugagugcuaau

SEQ ID NO: 1285033 - RNA, 19 nt, Artificial Sequence
  Description of Artificial Sequence: Synthetic oligonucleotide
  Antisense strand to SEQ ID NO: 1285032
auuagcacucaacaaugag

SEQ ID NO: 1285034 - RNA, 19 nt, Artificial Sequence
  Description of Artificial Sequence: Synthetic oligonucleotide
  Sense strand starting at position 230 of SEQ ID NO: 1241601
acaaauauauccguuuaag

SEQ ID NO: 1285035 - RNA, 19 nt, Artificial Sequence
  Description of Artificial Sequence: Synthetic oligonucleotide
  Antisense strand to SEQ ID NO: 1285034
cuuaaacggauauauuugu

SEQ ID NO: 1285036 - RNA, 19 nt, Artificial Sequence
  Description of Artificial Sequence: Synthetic oligonucleotide
  Sense strand starting at position 279 of SEQ ID NO: 1241601
cuugcaaucucacuggguu

SEQ ID NO: 1285037 - RNA, 19 nt, Artificial Sequence
  Description of Artificial Sequence: Synthetic oligonucleotide
  Antisense strand to SEQ ID NO: 1285036
aacccagugagauugcaag

SEQ ID NO: 1285038 - RNA, 19 nt, Artificial Sequence
  Description of Artificial Sequence: Synthetic oligonucleotide
  Sense strand starting at position 280 of SEQ ID NO: 1241601
uugcaaucucacuggguuu

SEQ ID NO: 1285039 - RNA, 19 nt, Artificial Sequence
  Description of Artificial Sequence: Synthetic oligonucleotide
  Antisense strand to SEQ ID NO: 1285038
aaacccagugagauugcaa

SEQ ID NO: 1285040 - RNA, 19 nt, Artificial Sequence
  Description of Artificial Sequence: Synthetic oligonucleotide
  Sense strand starting at position 292 of SEQ ID NO: 1241601
uggguuuagugucuuucua

SEQ ID NO: 1285041 - RNA, 19 nt, Artificial Sequence
  Description of Artificial Sequence: Synthetic oligonucleotide
  Antisense strand to SEQ ID NO: 1285040
uagaaagacacuaaaccca

SEQ ID NO: 1285042 - RNA, 19 nt, Artificial Sequence
  Description of Artificial Sequence: Synthetic oligonucleotide
  Sense strand starting at position 294 of SEQ ID NO: 1241601
gguuuagugucuuucuaga

SEQ ID NO: 1285043 - RNA, 19 nt, Artificial Sequence
  Description of Artificial Sequence: Synthetic oligonucleotide
  Antisense strand to SEQ ID NO: 1285042
ucuagaaagacacuaaacc

SEQ ID NO: 1285044 - RNA, 19 nt, Artificial Sequence
  Description of Artificial Sequence: Synthetic oligonucleotide
  Sense strand starting at position 296 of SEQ ID NO: 1241601
uuuagugucuuucuagaug

SEQ ID NO: 1285045 - RNA, 19 nt, Artificial Sequence
  Description of Artificial Sequence: Synthetic oligonucleotide
  Antisense strand to SEQ ID NO: 1285044
caucuagaaagacacuaaa

SEQ ID NO: 1285046 - RNA, 19 nt, Artificial Sequence
  Description of Artificial Sequence: Synthetic oligonucleotide
  Sense strand starting at position 655 of SEQ ID NO: 1241601
guuccuagaccucgucaua

SEQ ID NO: 1285047 - RNA, 19 nt, Artificial Sequence
  Description of Artificial Sequence: Synthetic oligonucleotide
  Antisense strand to SEQ ID NO: 1285046
uaugacgaggucuaggaac

SEQ ID NO: 1285048 - RNA, 19 nt, Artificial Sequence
  Description of Artificial Sequence: Synthetic oligonucleotide
  Sense strand starting at position 726 of SEQ ID NO: 1241601
cagaccaauucgggaagaa

SEQ ID NO: 1285049 - RNA, 19 nt, Artificial Sequence
  Description of Artificial Sequence: Synthetic oligonucleotide
  Antisense strand to SEQ ID NO: 1285048
uucuucccgaauuggucug

SEQ ID NO: 1285050 - RNA, 19 nt, Artificial Sequence
  Description of Artificial Sequence: Synthetic oligonucleotide
  Sense strand starting at position 894 of SEQ ID NO: 1241601
cauguuguguagcuuuaaa

SEQ ID NO: 1285051 - RNA, 19 nt, Artificial Sequence
  Description of Artificial Sequence: Synthetic oligonucleotide
  Antisense strand to SEQ ID NO: 1285050
uuuaaagcuacacaacaug

SEQ ID NO: 1285052 - RNA, 19 nt, Artificial Sequence
  Description of Artificial Sequence: Synthetic oligonucleotide
  Sense strand starting at position 1347 of SEQ ID NO: 1241601
gcccauaaaggucaacaua

SEQ ID NO: 1285053 - RNA, 19 nt, Artificial Sequence
  Description of Artificial Sequence: Synthetic oligonucleotide
  Antisense strand to SEQ ID NO: 1285052
uauguugaccuuuaugggc

SEQ ID NO: 1285054 - RNA, 19 nt, Artificial Sequence
  Description of Artificial Sequence: Synthetic oligonucleotide
  Sense strand starting at position 1355 of SEQ ID NO: 1241601
aggucaacauagugaacau

SEQ ID NO: 1285055 - RNA, 19 nt, Artificial Sequence
  Description of Artificial Sequence: Synthetic oligonucleotide
  Antisense strand to SEQ ID NO: 1285054
auguucacuauguugaccu

SEQ ID NO: 1285056 - RNA, 19 nt, Artificial Sequence
  Description of Artificial Sequence: Synthetic oligonucleotide
  Sense strand starting at position 1368 of SEQ ID NO: 1241601
gaacaugaaucuucgacag

SEQ ID NO: 1285057 - RNA, 19 nt, Artificial Sequence
  Description of Artificial Sequence: Synthetic oligonucleotide
  Antisense strand to SEQ ID NO: 1285056
cugucgaagauucauguuc

SEQ ID NO: 1285058 - RNA, 19 nt, Artificial Sequence
  Description of Artificial Sequence: Synthetic oligonucleotide
  Sense strand starting at position 1370 of SEQ ID NO: 1241601
acaugaaucuucgacagac

SEQ ID NO: 1285059 - RNA, 19 nt, Artificial Sequence
  Description of Artificial Sequence: Synthetic oligonucleotide
  Antisense strand to SEQ ID NO: 1285058
gucugucgaagauucaugu

SEQ ID NO: 1285060 - RNA, 19 nt, Artificial Sequence
  Description of Artificial Sequence: Synthetic oligonucleotide
  Sense strand starting at position 1387 of SEQ ID NO: 1241601
acuagagauugaggaagaa

SEQ ID NO: 1285061 - RNA, 19 nt, Artificial Sequence
  Description of Artificial Sequence: Synthetic oligonucleotide
  Antisense strand to SEQ ID NO: 1285060
uucuuccucaaucucuagu

SEQ ID NO: 1285062 - RNA, 19 nt, Artificial Sequence
  Description of Artificial Sequence: Synthetic oligonucleotide
  Sense strand starting at position 1440 of SEQ ID NO: 1241601
gcgaguggcugaaacugau

SEQ ID NO: 1285063 - RNA, 19 nt, Artificial Sequence
  Description of Artificial Sequence: Synthetic oligonucleotide
  Antisense strand to SEQ ID NO: 1285062
aucaguuucagccacucgc

SEQ ID NO: 1285064 - RNA, 19 nt, Artificial Sequence
  Description of Artificial Sequence: Synthetic oligonucleotide
  Sense strand starting at position 1570 of SEQ ID NO: 1241601
cgcaucuuuaucggugcaa

SEQ ID NO: 1285065 - RNA, 19 nt, Artificial Sequence
  Description of Artificial Sequence: Synthetic oligonucleotide
  Antisense strand to SEQ ID NO: 1285064
uugcaccgauaaagaugcg

SEQ ID NO: 1285066 - RNA, 19 nt, Artificial Sequence
  Description of Artificial Sequence: Synthetic oligonucleotide
  Sense strand starting at position 1571 of SEQ ID NO: 1241601
gcaucuuuaucggugcaag

SEQ ID NO: 1285067 - RNA, 19 nt, Artificial Sequence
  Description of Artificial Sequence: Synthetic oligonucleotide
  Antisense strand to SEQ ID NO: 1285066
cuugcaccgauaaagaugc

SEQ ID NO: 1285068 - RNA, 19 nt, Artificial Sequence
  Description of Artificial Sequence: Synthetic oligonucleotide
  Sense strand starting at position 1572 of SEQ ID NO: 1241601
caucuuuaucggugcaaga

SEQ ID NO: 1285069 - RNA, 19 nt, Artificial Sequence
  Description of Artificial Sequence: Synthetic oligonucleotide
  Antisense strand to SEQ ID NO: 1285068
ucuugcaccgauaaagaug

SEQ ID NO: 1285070 - RNA, 19 nt, Artificial Sequence
  Description of Artificial Sequence: Synthetic oligonucleotide
  Sense strand starting at position 1574 of SEQ ID NO: 1241601
ucuuuaucggugcaagaua

SEQ ID NO: 1285071 - RNA, 19 nt, Artificial Sequence
  Description of Artificial Sequence: Synthetic oligonucleotide
  Antisense strand to SEQ ID NO: 1285070
uaucuugcaccgauaaaga

SEQ ID NO: 1285072 - RNA, 19 nt, Artificial Sequence
  Description of Artificial Sequence: Synthetic oligonucleotide
  Sense strand starting at position 1698 of SEQ ID NO: 1241601
gccugaaucucuucgugac

SEQ ID NO: 1285073 - RNA, 19 nt, Artificial Sequence
  Description of Artificial Sequence: Synthetic oligonucleotide
  Antisense strand to SEQ ID NO: 1285072
gucacgaagagauucaggc

SEQ ID NO: 1285074 - RNA, 19 nt, Artificial Sequence
  Description of Artificial Sequence: Synthetic oligonucleotide
  Sense strand starting at position 1880 of SEQ ID NO: 1241601
cucggauaguuccuagagu

SEQ ID NO: 1285075 - RNA, 19 nt, Artificial Sequence
  Description of Artificial Sequence: Synthetic oligonucleotide
  Antisense strand to SEQ ID NO: 1285074
acucuaggaacuauccgag

SEQ ID NO: 1285076 - RNA, 19 nt, Artificial Sequence
  Description of Artificial Sequence: Synthetic oligonucleotide
  Sense strand starting at position 1888 of SEQ ID NO: 1241601
guuccuagagucuaggcaa

SEQ ID NO: 1285077 - RNA, 19 nt, Artificial Sequence
  Description of Artificial Sequence: Synthetic oligonucleotide
  Antisense strand to SEQ ID NO: 1285076
uugccuagacucuaggaac

SEQ ID NO: 1285078 - RNA, 19 nt, Artificial Sequence
  Description of Artificial Sequence: Synthetic oligonucleotide
  Sense strand starting at position 1891 of SEQ ID NO: 1241601
ccuagagucuaggcaagaa

SEQ ID NO: 1285079 - RNA, 19 nt, Artificial Sequence
  Description of Artificial Sequence: Synthetic oligonucleotide
  Antisense strand to SEQ ID NO: 1285078
uucuugccuagacucuagg

SEQ ID NO: 1285080 - RNA, 19 nt, Artificial Sequence
  Description of Artificial Sequence: Synthetic oligonucleotide
  Sense strand starting at position 1962 of SEQ ID NO: 1241601
ugccgucuuccagaaccuu

SEQ ID NO: 1285081 - RNA, 19 nt, Artificial Sequence
  Description of Artificial Sequence: Synthetic oligonucleotide
  Antisense strand to SEQ ID NO: 1285080
aagguucuggaagacggca

SEQ ID NO: 1285082 - RNA, 19 nt, Artificial Sequence
  Description of Artificial Sequence: Synthetic oligonucleotide
  Sense strand starting at position 2056 of SEQ ID NO: 1241601
acagguucucauuggcuaa

SEQ ID NO: 1285083 - RNA, 19 nt, Artificial Sequence
  Description of Artificial Sequence: Synthetic oligonucleotide
  Antisense strand to SEQ ID NO: 1285082
uuagccaaugagaaccugu

SEQ ID NO: 1285084 - RNA, 19 nt, Artificial Sequence
  Description of Artificial Sequence: Synthetic oligonucleotide
  Sense strand starting at position 2059 of SEQ ID NO: 1241601
gguucucauuggcuaaagu

SEQ ID NO: 1285085 - RNA, 19 nt, Artificial Sequence
  Description of Artificial Sequence: Synthetic oligonucleotide
  Antisense strand to SEQ ID NO: 1285084
acuuuagccaaugagaacc

SEQ ID NO: 1285086 - RNA, 19 nt, Artificial Sequence
  Description of Artificial Sequence: Synthetic oligonucleotide
  Sense strand starting at position 2079 of SEQ ID NO: 1241601
cuaaguauggguggagcaa

SEQ ID NO: 1285087 - RNA, 19 nt, Artificial Sequence
  Description of Artificial Sequence: Synthetic oligonucleotide
  Antisense strand to SEQ ID NO: 1285086
uugcuccacccauacuuag

SEQ ID NO: 1285088 - RNA, 19 nt, Artificial Sequence
  Description of Artificial Sequence: Synthetic oligonucleotide
  Sense strand starting at position 2080 of SEQ ID NO: 1241601
uaaguauggguggagcaaa

SEQ ID NO: 1285089 - RNA, 19 nt, Artificial Sequence
  Description of Artificial Sequence: Synthetic oligonucleotide
  Antisense strand to SEQ ID NO: 1285088
uuugcuccacccauacuua

SEQ ID NO: 1285090 - RNA, 19 nt, Artificial Sequence
  Description of Artificial Sequence: Synthetic oligonucleotide
  Sense strand starting at position 2125 of SEQ ID NO: 1241601
guucccauugauuggcuaa

SEQ ID NO: 1285091 - RNA, 19 nt, Artificial Sequence
  Description of Artificial Sequence: Synthetic oligonucleotide
  Antisense strand to SEQ ID NO: 1285090
uuagccaaucaaugggaac

SEQ ID NO: 1285092 - RNA, 19 nt, Artificial Sequence
  Description of Artificial Sequence: Synthetic oligonucleotide
  Sense strand starting at position 2162 of SEQ ID NO: 1241601
auggaagcguccuuuggua

SEQ ID NO: 1285093 - RNA, 19 nt, Artificial Sequence
  Description of Artificial Sequence: Synthetic oligonucleotide
  Antisense strand to SEQ ID NO: 1285092
uaccaaaggacgcuuccau

SEQ ID NO: 1285094 - RNA, 19 nt, Artificial Sequence
  Description of Artificial Sequence: Synthetic oligonucleotide
  Sense strand starting at position 2188 of SEQ ID NO: 1241601
aucacucucucauugguua

SEQ ID NO: 1285095 - RNA, 19 nt, Artificial Sequence
  Description of Artificial Sequence: Synthetic oligonucleotide
  Antisense strand to SEQ ID NO: 1285094
uaaccaaugagagagugau

SEQ ID NO: 1285096 - RNA, 19 nt, Artificial Sequence
  Description of Artificial Sequence: Synthetic oligonucleotide
  Sense strand starting at position 2192 of SEQ ID NO: 1241601
cucucucauugguuaaaug

SEQ ID NO: 1285097 - RNA, 19 nt, Artificial Sequence
  Description of Artificial Sequence: Synthetic oligonucleotide
  Antisense strand to SEQ ID NO: 1285096
cauuuaaccaaugagagag

SEQ ID NO: 1285098 - RNA, 19 nt, Artificial Sequence
  Description of Artificial Sequence: Synthetic oligonucleotide
  Sense strand starting at position 2193 of SEQ ID NO: 1241601
ucucucauugguuaaauga

SEQ ID NO: 1285099 - RNA, 19 nt, Artificial Sequence
  Description of Artificial Sequence: Synthetic oligonucleotide
  Antisense strand to SEQ ID NO: 1285098
ucauuuaaccaaugagaga

SEQ ID NO: 1285100 - RNA, 19 nt, Artificial Sequence
  Description of Artificial Sequence: Synthetic oligonucleotide
  Sense strand starting at position 2202 of SEQ ID NO: 1241601
gguuaaaugacuugcggag

SEQ ID NO: 1285101 - RNA, 19 nt, Artificial Sequence
  Description of Artificial Sequence: Synthetic oligonucleotide
  Antisense strand to SEQ ID NO: 1285100
cuccgcaagucauuuaacc

SEQ ID NO: 1285102 - RNA, 19 nt, Artificial Sequence
  Description of Artificial Sequence: Synthetic oligonucleotide
  Sense strand starting at position 3918 of SEQ ID NO: 1241601
auggcaauguauuaaggua

SEQ ID NO: 1285103 - RNA, 19 nt, Artificial Sequence
  Description of Artificial Sequence: Synthetic oligonucleotide
  Antisense strand to SEQ ID NO: 1285102
uaccuuaauacauugccau

SEQ ID NO: 1285104 - RNA, 19 nt, Artificial Sequence
  Description of Artificial Sequence: Synthetic oligonucleotide
  Sense strand starting at position 3930 of SEQ ID NO: 1241601
uaagguagguguggagaua

SEQ ID NO: 1285105 - RNA, 19 nt, Artificial Sequence
  Description of Artificial Sequence: Synthetic oligonucleotide
  Antisense strand to SEQ ID NO: 1285104
uaucuccacaccuaccuua

SEQ ID NO: 1285106 - RNA, 19 nt, Artificial Sequence
  Description of Artificial Sequence: Synthetic oligonucleotide
  Sense strand starting at position 3952 of SEQ ID NO: 1241601
ugauaaacaugacaagacu

SEQ ID NO: 1285107 - RNA, 19 nt, Artificial Sequence
  Description of Artificial Sequence: Synthetic oligonucleotide
  Antisense strand to SEQ ID NO: 1285106
agucuugucauguuuauca

SEQ ID NO: 1285108 - RNA, 19 nt, Artificial Sequence
  Description of Artificial Sequence: Synthetic oligonucleotide
  Sense strand starting at position 65 of SEQ ID NO: 1241602
cugcuaauuugucugugga

SEQ ID NO: 1285109 - RNA, 19 nt, Artificial Sequence
  Description of Artificial Sequence: Synthetic oligonucleotide
  Antisense strand to SEQ ID NO: 1285108
uccacagacaaauuagcag

SEQ ID NO: 1285110 - RNA, 19 nt, Artificial Sequence
  Description of Artificial Sequence: Synthetic oligonucleotide
  Sense strand starting at position 66 of SEQ ID NO: 1241602
ugcuaauuugucuguggac

SEQ ID NO: 1285111 - RNA, 19 nt, Artificial Sequence
  Description of Artificial Sequence: Synthetic oligonucleotide
  Antisense strand to SEQ ID NO: 1285110
guccacagacaaauuagca

SEQ ID NO: 1285112 - RNA, 19 nt, Artificial Sequence
  Description of Artificial Sequence: Synthetic oligonucleotide
  Sense strand starting at position 67 of SEQ ID NO: 1241602
gcuaauuugucuguggaca

SEQ ID NO: 1285113 - RNA, 19 nt, Artificial Sequence
  Description of Artificial Sequence: Synthetic oligonucleotide
  Antisense strand to SEQ ID NO: 1285112
uguccacagacaaauuagc

SEQ ID NO: 1285114 - RNA, 19 nt, Artificial Sequence
  Description of Artificial Sequence: Synthetic oligonucleotide
  Sense strand starting at position 111 of SEQ ID NO: 1241602
uccuguuaggucugaagua

SEQ ID NO: 1285115 - RNA, 19 nt, Artificial Sequence
  Description of Artificial Sequence: Synthetic oligonucleotide
  Antisense strand to SEQ ID NO: 1285114
uacuucagaccuaacagga

SEQ ID NO: 1285116 - RNA, 19 nt, Artificial Sequence
  Description of Artificial Sequence: Synthetic oligonucleotide
  Sense strand starting at position 123 of SEQ ID NO: 1241602
ugaaguaguuacccaaugu

SEQ ID NO: 1285117 - RNA, 19 nt, Artificial Sequence
  Description of Artificial Sequence: Synthetic oligonucleotide
  Antisense strand to SEQ ID NO: 1285116
acauuggguaacuacuuca

SEQ ID NO: 1285118 - RNA, 19 nt, Artificial Sequence
  Description of Artificial Sequence: Synthetic oligonucleotide
  Sense strand starting at position 127 of SEQ ID NO: 1241602
guaguuacccaauguuaac

SEQ ID NO: 1285119 - RNA, 19 nt, Artificial Sequence
  Description of Artificial Sequence: Synthetic oligonucleotide
  Antisense strand to SEQ ID NO: 1285118
guuaacauuggguaacuac

SEQ ID NO: 1285120 - RNA, 19 nt, Artificial Sequence
  Description of Artificial Sequence: Synthetic oligonucleotide
  Sense strand starting at position 570 of SEQ ID NO: 1241602
auguguguuaccuggauac

SEQ ID NO: 1285121 - RNA, 19 nt, Artificial Sequence
  Description of Artificial Sequence: Synthetic oligonucleotide
  Antisense strand to SEQ ID NO: 1285120
guauccagguaacacacau

SEQ ID NO: 1285122 - RNA, 19 nt, Artificial Sequence
  Description of Artificial Sequence: Synthetic oligonucleotide
  Sense strand starting at position 572 of SEQ ID NO: 1241602
guguguuaccuggauacug

SEQ ID NO: 1285123 - RNA, 19 nt, Artificial Sequence
  Description of Artificial Sequence: Synthetic oligonucleotide
  Antisense strand to SEQ ID NO: 1285122
caguauccagguaacacac

SEQ ID NO: 1285124 - RNA, 19 nt, Artificial Sequence
  Description of Artificial Sequence: Synthetic oligonucleotide
  Sense strand starting at position 754 of SEQ ID NO: 1241602
cuugaaucaugaguaacuu

SEQ ID NO: 1285125 - RNA, 19 nt, Artificial Sequence
  Description of Artificial Sequence: Synthetic oligonucleotide
  Antisense strand to SEQ ID NO: 1285124
aaguuacucaugauucaag

SEQ ID NO: 1285126 - RNA, 19 nt, Artificial Sequence
  Description of Artificial Sequence: Synthetic oligonucleotide
  Sense strand starting at position 881 of SEQ ID NO: 1241602
cggccuaauacacagagua

SEQ ID NO: 1285127 - RNA, 19 nt, Artificial Sequence
  Description of Artificial Sequence: Synthetic oligonucleotide
  Antisense strand to SEQ ID NO: 1285126
uacucuguguauuaggccg

SEQ ID NO: 1285128 - RNA, 19 nt, Artificial Sequence
  Description of Artificial Sequence: Synthetic oligonucleotide
  Sense strand starting at position 1111 of SEQ ID NO: 1241602
uaauguggagcuuaguaau

SEQ ID NO: 1285129 - RNA, 19 nt, Artificial Sequence
  Description of Artificial Sequence: Synthetic oligonucleotide
  Antisense strand to SEQ ID NO: 1285128
auuacuaagcuccacauua

SEQ ID NO: 1285130 - RNA, 19 nt, Artificial Sequence
  Description of Artificial Sequence: Synthetic oligonucleotide
  Sense strand starting at position 1122 of SEQ ID NO: 1241602
uuaguaaucgccuagaaug

SEQ ID NO: 1285131 - RNA, 19 nt, Artificial Sequence
  Description of Artificial Sequence: Synthetic oligonucleotide
  Antisense strand to SEQ ID NO: 1285130
cauucuaggcgauuacuaa

SEQ ID NO: 1285132 - RNA, 19 nt, Artificial Sequence
  Description of Artificial Sequence: Synthetic oligonucleotide
  Sense strand starting at position 1124 of SEQ ID NO: 1241602
aguaaucgccuagaaugaa

SEQ ID NO: 1285133 - RNA, 19 nt, Artificial Sequence
  Description of Artificial Sequence: Synthetic oligonucleotide
  Antisense strand to SEQ ID NO: 1285132
uucauucuaggcgauuacu

SEQ ID NO: 1285134 - RNA, 19 nt, Artificial Sequence
  Description of Artificial Sequence: Synthetic oligonucleotide
  Sense strand starting at position 1132 of SEQ ID NO: 1241602
ccuagaaugaauggcgaua

SEQ ID NO: 1285135 - RNA, 19 nt, Artificial Sequence
  Description of Artificial Sequence: Synthetic oligonucleotide
  Antisense strand to SEQ ID NO: 1285134
uaucgccauucauucuagg

SEQ ID NO: 1285136 - RNA, 19 nt, Artificial Sequence
  Description of Artificial Sequence: Synthetic oligonucleotide
  Sense strand starting at position 1313 of SEQ ID NO: 1241602
gggaaagauauccguuggu

SEQ ID NO: 1285137 - RNA, 19 nt, Artificial Sequence
  Description of Artificial Sequence: Synthetic oligonucleotide
  Antisense strand to SEQ ID NO: 1285136
accaacggauaucuuuccc

SEQ ID NO: 1285138 - RNA, 19 nt, Artificial Sequence
  Description of Artificial Sequence: Synthetic oligonucleotide
  Sense strand starting at position 2028 of SEQ ID NO: 1241602
cauagagaagaacguauau

SEQ ID NO: 1285139 - RNA, 19 nt, Artificial Sequence
  Description of Artificial Sequence: Synthetic oligonucleotide
  Antisense strand to SEQ ID NO: 1285138
auauacguucuucucuaug

SEQ ID NO: 1285140 - RNA, 19 nt, Artificial Sequence
  Description of Artificial Sequence: Synthetic oligonucleotide
  Sense strand starting at position 2105 of SEQ ID NO: 1241602
cagcgucuagcgguuacua

SEQ ID NO: 1285141 - RNA, 19 nt, Artificial Sequence
  Description of Artificial Sequence: Synthetic oligonucleotide
  Antisense strand to SEQ ID NO: 1285140
uaguaaccgcuagacgcug

SEQ ID NO: 1285142 - RNA, 19 nt, Artificial Sequence
  Description of Artificial Sequence: Synthetic oligonucleotide
  Sense strand starting at position 2127 of SEQ ID NO: 1241602
aggcccgaacuguaaauua

SEQ ID NO: 1285143 - RNA, 19 nt, Artificial Sequence
  Description of Artificial Sequence: Synthetic oligonucleotide
  Antisense strand to SEQ ID NO: 1285142
uaauuuacaguucgggccu

SEQ ID NO: 1285144 - RNA, 19 nt, Artificial Sequence
  Description of Artificial Sequence: Synthetic oligonucleotide
  Sense strand starting at position 2239 of SEQ ID NO: 1241602
guuagaggcuuucucacuu

SEQ ID NO: 1285145 - RNA, 19 nt, Artificial Sequence
  Description of Artificial Sequence: Synthetic oligonucleotide
  Antisense strand to SEQ ID NO: 1285144
aagugagaaagccucuaac

SEQ ID NO: 1285146 - RNA, 19 nt, Artificial Sequence
  Description of Artificial Sequence: Synthetic oligonucleotide
  Sense strand starting at position 2278 of SEQ ID NO: 1241602
ggaaccuugcuuugugauu

SEQ ID NO: 1285147 - RNA, 19 nt, Artificial Sequence
  Description of Artificial Sequence: Synthetic oligonucleotide
  Antisense strand to SEQ ID NO: 1285146
aaucacaaagcaagguucc

SEQ ID NO: 1285148 - RNA, 19 nt, Artificial Sequence
  Description of Artificial Sequence: Synthetic oligonucleotide
  Sense strand starting at position 2287 of SEQ ID NO: 1241602
cuuugugauuccuugaggu

SEQ ID NO: 1285149 - RNA, 19 nt, Artificial Sequence
  Description of Artificial Sequence: Synthetic oligonucleotide
  Antisense strand to SEQ ID NO: 1285148
accucaaggaaucacaaag

SEQ ID NO: 1285150 - RNA, 19 nt, Artificial Sequence
  Description of Artificial Sequence: Synthetic oligonucleotide
  Sense strand starting at position 2460 of SEQ ID NO: 1241602
gcuagaagauguuuggaaa

SEQ ID NO: 1285151 - RNA, 19 nt, Artificial Sequence
  Description of Artificial Sequence: Synthetic oligonucleotide
  Antisense strand to SEQ ID NO: 1285150
uuuccaaacaucuucuagc

SEQ ID NO: 1285152 - RNA, 19 nt, Artificial Sequence
  Description of Artificial Sequence: Synthetic oligonucleotide
  Sense strand starting at position 2492 of SEQ ID NO: 1241602
cuguaauacuaguuaacac

SEQ ID NO: 1285153 - RNA, 19 nt, Artificial Sequence
  Description of Artificial Sequence: Synthetic oligonucleotide
  Antisense strand to SEQ ID NO: 1285152
guguuaacuaguauuacag

SEQ ID NO: 1285154 - RNA, 19 nt, Artificial Sequence
  Description of Artificial Sequence: Synthetic oligonucleotide
  Sense strand starting at position 2550 of SEQ ID NO: 1241602
gcuuaaguuaauggaaaug

SEQ ID NO: 1285155 - RNA, 19 nt, Artificial Sequence
  Description of Artificial Sequence: Synthetic oligonucleotide
  Antisense strand to SEQ ID NO: 1285154
cauuuccauuaacuuaagc

SEQ ID NO: 1285156 - RNA, 19 nt, Artificial Sequence
  Description of Artificial Sequence: Synthetic oligonucleotide
  Sense strand starting at position 2586 of SEQ ID NO: 1241602
augauuacguuauuccaau

SEQ ID NO: 1285157 - RNA, 19 nt, Artificial Sequence
  Description of Artificial Sequence: Synthetic oligonucleotide
  Antisense strand to SEQ ID NO: 1285156
auuggaauaacguaaucau

SEQ ID NO: 1285158 - RNA, 19 nt, Artificial Sequence
  Description of Artificial Sequence: Synthetic oligonucleotide
  Sense strand starting at position 2587 of SEQ ID NO: 1241602
ugauuacguuauuccaauu

SEQ ID NO: 1285159 - RNA, 19 nt, Artificial Sequence
  Description of Artificial Sequence: Synthetic oligonucleotide
  Antisense strand to SEQ ID NO: 1285158
aauuggaauaacguaauca

SEQ ID NO: 1285160 - RNA, 19 nt, Artificial Sequence
  Description of Artificial Sequence: Synthetic oligonucleotide
  Sense strand starting at position 2593 of SEQ ID NO: 1241602
cguuauuccaauuguggac

SEQ ID NO: 1285161 - RNA, 19 nt, Artificial Sequence
  Description of Artificial Sequence: Synthetic oligonucleotide
  Antisense strand to SEQ ID NO: 1285160
guccacaauuggaauaacg

SEQ ID NO: 1285162 - RNA, 19 nt, Artificial Sequence
  Description of Artificial Sequence: Synthetic oligonucleotide
  Sense strand starting at position 2704 of SEQ ID NO: 1241602
guuccuggugcuguguuaa

SEQ ID NO: 1285163 - RNA, 19 nt, Artificial Sequence
  Description of Artificial Sequence: Synthetic oligonucleotide
  Antisense strand to SEQ ID NO: 1285162
uuaacacagcaccaggaac

SEQ ID NO: 1285164 - RNA, 19 nt, Artificial Sequence
  Description of Artificial Sequence: Synthetic oligonucleotide
  Sense strand starting at position 2717 of SEQ ID NO: 1241602
uguuaagugcuggaaguau

SEQ ID NO: 1285165 - RNA, 19 nt, Artificial Sequence
  Description of Artificial Sequence: Synthetic oligonucleotide
  Antisense strand to SEQ ID NO: 1285164
auacuuccagcacuuaaca

SEQ ID NO: 1285166 - RNA, 19 nt, Artificial Sequence
  Description of Artificial Sequence: Synthetic oligonucleotide
  Sense strand starting at position 2739 of SEQ ID NO: 1241602
ggcaaauggaagugagauu

SEQ ID NO: 1285167 - RNA, 19 nt, Artificial Sequence
  Description of Artificial Sequence: Synthetic oligonucleotide
  Antisense strand to SEQ ID NO: 1285166
aaucucacuuccauuugcc

SEQ ID NO: 1285168 - RNA, 19 nt, Artificial Sequence
  Description of Artificial Sequence: Synthetic oligonucleotide
  Sense strand starting at position 2751 of SEQ ID NO: 1241602
ugagauuuguuccuguccu

SEQ ID NO: 1285169 - RNA, 19 nt, Artificial Sequence
  Description of Artificial Sequence: Synthetic oligonucleotide
  Antisense strand to SEQ ID NO: 1285168
aggacaggaacaaaucuca

SEQ ID NO: 1285170 - RNA, 19 nt, Artificial Sequence
  Description of Artificial Sequence: Synthetic oligonucleotide
  Sense strand starting at position 2755 of SEQ ID NO: 1241602
auuuguuccuguccugcaa

SEQ ID NO: 1285171 - RNA, 19 nt, Artificial Sequence
  Description of Artificial Sequence: Synthetic oligonucleotide
  Antisense strand to SEQ ID NO: 1285170
uugcaggacaggaacaaau

SEQ ID NO: 1285172 - RNA, 19 nt, Artificial Sequence
  Description of Artificial Sequence: Synthetic oligonucleotide
  Sense strand starting at position 2759 of SEQ ID NO: 1241602
guuccuguccugcaagaac

SEQ ID NO: 1285173 - RNA, 19 nt, Artificial Sequence
  Description of Artificial Sequence: Synthetic oligonucleotide
  Antisense strand to SEQ ID NO: 1285172
guucuugcaggacaggaac

SEQ ID NO: 1285174 - RNA, 19 nt, Artificial Sequence
  Description of Artificial Sequence: Synthetic oligonucleotide
  Sense strand starting at position 2775 of SEQ ID NO: 1241602
aacugugagccaggugaaa

SEQ ID NO: 1285175 - RNA, 19 nt, Artificial Sequence
  Description of Artificial Sequence: Synthetic oligonucleotide
  Antisense strand to SEQ ID NO: 1285174
uuucaccuggcucacaguu

SEQ ID NO: 1285176 - RNA, 19 nt, Artificial Sequence
  Description of Artificial Sequence: Synthetic oligonucleotide
  Sense strand starting at position 2777 of SEQ ID NO: 1241602
cugugagccaggugaaaua

SEQ ID NO: 1285177 - RNA, 19 nt, Artificial Sequence
  Description of Artificial Sequence: Synthetic oligonucleotide
  Antisense strand to SEQ ID NO: 1285176
uauuucaccuggcucacag

SEQ ID NO: 1285178 - RNA, 19 nt, Artificial Sequence
  Description of Artificial Sequence: Synthetic oligonucleotide
  Sense strand starting at position 2992 of SEQ ID NO: 1241602
agaacagguccugguacau

SEQ ID NO: 1285179 - RNA, 19 nt, Artificial Sequence
  Description of Artificial Sequence: Synthetic oligonucleotide
  Antisense strand to SEQ ID NO: 1285178
auguaccaggaccuguucu

SEQ ID NO: 1285180 - RNA, 19 nt, Artificial Sequence
  Description of Artificial Sequence: Synthetic oligonucleotide
  Sense strand starting at position 3009 of SEQ ID NO: 1241602
auagcaagcgcucaauaaa

SEQ ID NO: 1285181 - RNA, 19 nt, Artificial Sequence
  Description of Artificial Sequence: Synthetic oligonucleotide
  Antisense strand to SEQ ID NO: 1285180
uuuauugagcgcuugcuau

SEQ ID NO: 1285182 - RNA, 19 nt, Artificial Sequence
  Description of Artificial Sequence: Synthetic oligonucleotide
  Sense strand starting at position 3012 of SEQ ID NO: 1241602
gcaagcgcucaauaaauau

SEQ ID NO: 1285183 - RNA, 19 nt, Artificial Sequence
  Description of Artificial Sequence: Synthetic oligonucleotide
  Antisense strand to SEQ ID NO: 1285182
auauuuauugagcgcuugc

SEQ ID NO: 1285184 - RNA, 19 nt, Artificial Sequence
  Description of Artificial Sequence: Synthetic oligonucleotide
  Sense strand starting at position 3554 of SEQ ID NO: 1241602
uuacuugggagacgaaauu

SEQ ID NO: 1285185 - RNA, 19 nt, Artificial Sequence
  Description of Artificial Sequence: Synthetic oligonucleotide
  Antisense strand to SEQ ID NO: 1285184
aauuucgucucccaaguaa

SEQ ID NO: 1285186 - RNA, 19 nt, Artificial Sequence
  Description of Artificial Sequence: Synthetic oligonucleotide
  Sense strand starting at position 3563 of SEQ ID NO: 1241602
agacgaaauuaacuuaugu

SEQ ID NO: 1285187 - RNA, 19 nt, Artificial Sequence
  Description of Artificial Sequence: Synthetic oligonucleotide
  Antisense strand to SEQ ID NO: 1285186
acauaaguuaauuucgucu

SEQ ID NO: 1285188 - RNA, 19 nt, Artificial Sequence
  Description of Artificial Sequence: Synthetic oligonucleotide
  Sense strand starting at position 51 of SEQ ID NO: 1241603
cacaaacgcgaguauuaga

SEQ ID NO: 1285189 - RNA, 19 nt, Artificial Sequence
  Description of Artificial Sequence: Synthetic oligonucleotide
  Antisense strand to SEQ ID NO: 1285188
ucuaauacucgcguuugug

SEQ ID NO: 1285190 - RNA, 19 nt, Artificial Sequence
  Description of Artificial Sequence: Synthetic oligonucleotide
  Sense strand starting at position 54 of SEQ ID NO: 1241603
aaacgcgaguauuagacaa

SEQ ID NO: 1285191 - RNA, 19 nt, Artificial Sequence
  Description of Artificial Sequence: Synthetic oligonucleotide
  Antisense strand to SEQ ID NO: 1285190
uugucuaauacucgcguuu

SEQ ID NO: 1285192 - RNA, 19 nt, Artificial Sequence
  Description of Artificial Sequence: Synthetic oligonucleotide
  Sense strand starting at position 56 of SEQ ID NO: 1241603
acgcgaguauuagacaaau

SEQ ID NO: 1285193 - RNA, 19 nt, Artificial Sequence
  Description of Artificial Sequence: Synthetic oligonucleotide
  Antisense strand to SEQ ID NO: 1285192
auuugucuaauacucgcgu

SEQ ID NO: 1285194 - RNA, 19 nt, Artificial Sequence
  Description of Artificial Sequence: Synthetic oligonucleotide
  Sense strand starting at position 58 of SEQ ID NO: 1241603
gcgaguauuagacaaauaa

SEQ ID NO: 1285195 - RNA, 19 nt, Artificial Sequence
  Description of Artificial Sequence: Synthetic oligonucleotide
  Antisense strand to SEQ ID NO: 1285194
uuauuugucuaauacucgc

SEQ ID NO: 1285196 - RNA, 19 nt, Artificial Sequence
  Description of Artificial Sequence: Synthetic oligonucleotide
  Sense strand starting at position 79 of SEQ ID NO: 1241603
uuaacagauuuacgucaac

SEQ ID NO: 1285197 - RNA, 19 nt, Artificial Sequence
  Description of Artificial Sequence: Synthetic oligonucleotide
  Antisense strand to SEQ ID NO: 1285196
guugacguaaaucuguuaa

SEQ ID NO: 1285198 - RNA, 19 nt, Artificial Sequence
  Description of Artificial Sequence: Synthetic oligonucleotide
  Sense strand starting at position 128 of SEQ ID NO: 1241603
gucauuuauuuccagagug

SEQ ID NO: 1285199 - RNA, 19 nt, Artificial Sequence
  Description of Artificial Sequence: Synthetic oligonucleotide
  Antisense strand to SEQ ID NO: 1285198
cacucuggaaauaaaugac

SEQ ID NO: 1285200 - RNA, 19 nt, Artificial Sequence
  Description of Artificial Sequence: Synthetic oligonucleotide
  Sense strand starting at position 191 of SEQ ID NO: 1241603
gcaguuuaguaccuuaaua

SEQ ID NO: 1285201 - RNA, 19 nt, Artificial Sequence
  Description of Artificial Sequence: Synthetic oligonucleotide
  Antisense strand to SEQ ID NO: 1285200
uauuaagguacuaaacugc

SEQ ID NO: 1285202 - RNA, 19 nt, Artificial Sequence
  Description of Artificial Sequence: Synthetic oligonucleotide
  Sense strand starting at position 193 of SEQ ID NO: 1241603
aguuuaguaccuuaauaac

SEQ ID NO: 1285203 - RNA, 19 nt, Artificial Sequence
  Description of Artificial Sequence: Synthetic oligonucleotide
  Antisense strand to SEQ ID NO: 1285202
guuauuaagguacuaaacu

SEQ ID NO: 1285204 - RNA, 19 nt, Artificial Sequence
  Description of Artificial Sequence: Synthetic oligonucleotide
  Sense strand starting at position 207 of SEQ ID NO: 1241603
auaacagcuugagagcaau

SEQ ID NO: 1285205 - RNA, 19 nt, Artificial Sequence
  Description of Artificial Sequence: Synthetic oligonucleotide
  Antisense strand to SEQ ID NO: 1285204
auugcucucaagcuguuau

SEQ ID NO: 1285206 - RNA, 19 nt, Artificial Sequence
  Description of Artificial Sequence: Synthetic oligonucleotide
  Sense strand starting at position 237 of SEQ ID NO: 1241603
aggacuagaucauugcaau

SEQ ID NO: 1285207 - RNA, 19 nt, Artificial Sequence
  Description of Artificial Sequence: Synthetic oligonucleotide
  Antisense strand to SEQ ID NO: 1285206
auugcaaugaucuaguccu

SEQ ID NO: 1285208 - RNA, 19 nt, Artificial Sequence
  Description of Artificial Sequence: Synthetic oligonucleotide
  Sense strand starting at position 238 of SEQ ID NO: 1241603
ggacuagaucauugcaauu

SEQ ID NO: 1285209 - RNA, 19 nt, Artificial Sequence
  Description of Artificial Sequence: Synthetic oligonucleotide
  Antisense strand to SEQ ID NO: 1285208
aauugcaaugaucuagucc

SEQ ID NO: 1285210 - RNA, 19 nt, Artificial Sequence
  Description of Artificial Sequence: Synthetic oligonucleotide
  Sense strand starting at position 285 of SEQ ID NO: 1241603
cauguaugcguuuaucuuu

SEQ ID NO: 1285211 - RNA, 19 nt, Artificial Sequence
  Description of Artificial Sequence: Synthetic oligonucleotide
  Antisense strand to SEQ ID NO: 1285210
aaagauaaacgcauacaug

SEQ ID NO: 1285212 - RNA, 19 nt, Artificial Sequence
  Description of Artificial Sequence: Synthetic oligonucleotide
  Sense strand starting at position 414 of SEQ ID NO: 1241603
ugaaauaaauccuacguuc

SEQ ID NO: 1285213 - RNA, 19 nt, Artificial Sequence
  Description of Artificial Sequence: Synthetic oligonucleotide
  Antisense strand to SEQ ID NO: 1285212
gaacguaggauuuauuuca

SEQ ID NO: 1285214 - RNA, 19 nt, Artificial Sequence
  Description of Artificial Sequence: Synthetic oligonucleotide
  Sense strand starting at position 485 of SEQ ID NO: 1241603
uggcuagaaucucaugcau

SEQ ID NO: 1285215 - RNA, 19 nt, Artificial Sequence
  Description of Artificial Sequence: Synthetic oligonucleotide
  Antisense strand to SEQ ID NO: 1285214
augcaugagauucuagcca

SEQ ID NO: 1285216 - RNA, 19 nt, Artificial Sequence
  Description of Artificial Sequence: Synthetic oligonucleotide
  Sense strand starting at position 512 of SEQ ID NO: 1241603
gacgaauuccuuugucuga

SEQ ID NO: 1285217 - RNA, 19 nt, Artificial Sequence
  Description of Artificial Sequence: Synthetic oligonucleotide
  Antisense strand to SEQ ID NO: 1285216
ucagacaaaggaauucguc

SEQ ID NO: 1285218 - RNA, 19 nt, Artificial Sequence
  Description of Artificial Sequence: Synthetic oligonucleotide
  Sense strand starting at position 513 of SEQ ID NO: 1241603
acgaauuccuuugucugau

SEQ ID NO: 1285219 - RNA, 19 nt, Artificial Sequence
  Description of Artificial Sequence: Synthetic oligonucleotide
  Antisense strand to SEQ ID NO: 1285218
aucagacaaaggaauucgu

SEQ ID NO: 1285220 - RNA, 19 nt, Artificial Sequence
  Description of Artificial Sequence: Synthetic oligonucleotide
  Sense strand starting at position 514 of SEQ ID NO: 1241603
cgaauuccuuugucugauc

SEQ ID NO: 1285221 - RNA, 19 nt, Artificial Sequence
  Description of Artificial Sequence: Synthetic oligonucleotide
  Antisense strand to SEQ ID NO: 1285220
gaucagacaaaggaauucg

SEQ ID NO: 1285222 - RNA, 19 nt, Artificial Sequence
  Description of Artificial Sequence: Synthetic oligonucleotide
  Sense strand starting at position 519 of SEQ ID NO: 1241603
uccuuugucugaucggauu

SEQ ID NO: 1285223 - RNA, 19 nt, Artificial Sequence
  Description of Artificial Sequence: Synthetic oligonucleotide
  Antisense strand to SEQ ID NO: 1285222
aauccgaucagacaaagga

SEQ ID NO: 1285224 - RNA, 19 nt, Artificial Sequence
  Description of Artificial Sequence: Synthetic oligonucleotide
  Sense strand starting at position 587 of SEQ ID NO: 1241603
ggaacuaaguguuccauuc

SEQ ID NO: 1285225 - RNA, 19 nt, Artificial Sequence
  Description of Artificial Sequence: Synthetic oligonucleotide
  Antisense strand to SEQ ID NO: 1285224
gaauggaacacuuaguucc

SEQ ID NO: 1285226 - RNA, 19 nt, Artificial Sequence
  Description of Artificial Sequence: Synthetic oligonucleotide
  Sense strand starting at position 616 of SEQ ID NO: 1241603
ggcuuucuuguaggugaaa

SEQ ID NO: 1285227 - RNA, 19 nt, Artificial Sequence
  Description of Artificial Sequence: Synthetic oligonucleotide
  Antisense strand to SEQ ID NO: 1285226
uuucaccuacaagaaagcc

SEQ ID NO: 1285228 - RNA, 19 nt, Artificial Sequence
  Description of Artificial Sequence: Synthetic oligonucleotide
  Sense strand starting at position 634 of SEQ ID NO: 1241603
aagcauuuguuaggcuaaa

SEQ ID NO: 1285229 - RNA, 19 nt, Artificial Sequence
  Description of Artificial Sequence: Synthetic oligonucleotide
  Antisense strand to SEQ ID NO: 1285228
uuuagccuaacaaaugcuu

SEQ ID NO: 1285230 - RNA, 19 nt, Artificial Sequence
  Description of Artificial Sequence: Synthetic oligonucleotide
  Sense strand starting at position 909 of SEQ ID NO: 1241603
ugggaaggguuccgagaaa

SEQ ID NO: 1285231 - RNA, 19 nt, Artificial Sequence
  Description of Artificial Sequence: Synthetic oligonucleotide
  Antisense strand to SEQ ID NO: 1285230
uuucucggaacccuuccca

SEQ ID NO: 1285232 - RNA, 19 nt, Artificial Sequence
  Description of Artificial Sequence: Synthetic oligonucleotide
  Sense strand starting at position 910 of SEQ ID NO: 1241603
gggaaggguuccgagaaag

SEQ ID NO: 1285233 - RNA, 19 nt, Artificial Sequence
  Description of Artificial Sequence: Synthetic oligonucleotide
  Antisense strand to SEQ ID NO: 1285232
cuuucucggaacccuuccc

SEQ ID NO: 1285234 - RNA, 19 nt, Artificial Sequence
  Description of Artificial Sequence: Synthetic oligonucleotide
  Sense strand starting at position 2280 of SEQ ID NO: 1241603
cgugguuugagguuugcca

SEQ ID NO: 1285235 - RNA, 19 nt, Artificial Sequence
  Description of Artificial Sequence: Synthetic oligonucleotide
  Antisense strand to SEQ ID NO: 1285234
uggcaaaccucaaaccacg

SEQ ID NO: 1285236 - RNA, 19 nt, Artificial Sequence
  Description of Artificial Sequence: Synthetic oligonucleotide
  Sense strand starting at position 2451 of SEQ ID NO: 1241603
cccgucgacuucucaaagu

SEQ ID NO: 1285237 - RNA, 19 nt, Artificial Sequence
  Description of Artificial Sequence: Synthetic oligonucleotide
  Antisense strand to SEQ ID NO: 1285236
acuuugagaagucgacggg

SEQ ID NO: 1285238 - RNA, 19 nt, Artificial Sequence
  Description of Artificial Sequence: Synthetic oligonucleotide
  Sense strand starting at position 2544 of SEQ ID NO: 1241603
gcgcuaagacuccauacaa

SEQ ID NO: 1285239 - RNA, 19 nt, Artificial Sequence
  Description of Artificial Sequence: Synthetic oligonucleotide
  Antisense strand to SEQ ID NO: 1285238
uuguauggagucuuagcgc

SEQ ID NO: 1285240 - RNA, 19 nt, Artificial Sequence
  Description of Artificial Sequence: Synthetic oligonucleotide
  Sense strand starting at position 3217 of SEQ ID NO: 1241603
ucguaauuagaccagugga

SEQ ID NO: 1285241 - RNA, 19 nt, Artificial Sequence
  Description of Artificial Sequence: Synthetic oligonucleotide
  Antisense strand to SEQ ID NO: 1285240
uccacuggucuaauuacga

SEQ ID NO: 1285242 - RNA, 19 nt, Artificial Sequence
  Description of Artificial Sequence: Synthetic oligonucleotide
  Sense strand starting at position 3220 of SEQ ID NO: 1241603
uaauuagaccaguggaggu

SEQ ID NO: 1285243 - RNA, 19 nt, Artificial Sequence
  Description of Artificial Sequence: Synthetic oligonucleotide
  Antisense strand to SEQ ID NO: 1285242
accuccacuggucuaauua

SEQ ID NO: 1285244 - RNA, 19 nt, Artificial Sequence
  Description of Artificial Sequence: Synthetic oligonucleotide
  Sense strand starting at position 3230 of SEQ ID NO: 1241603
aguggaggucuauacggaa

SEQ ID NO: 1285245 - RNA, 19 nt, Artificial Sequence
  Description of Artificial Sequence: Synthetic oligonucleotide
  Antisense strand to SEQ ID NO: 1285244
uuccguauagaccuccacu

SEQ ID NO: 1285246 - RNA, 19 nt, Artificial Sequence
  Description of Artificial Sequence: Synthetic oligonucleotide
  Sense strand starting at position 3312 of SEQ ID NO: 1241603
gggacuagcucuggauaua

SEQ ID NO: 1285247 - RNA, 19 nt, Artificial Sequence
  Description of Artificial Sequence: Synthetic oligonucleotide
  Antisense strand to SEQ ID NO: 1285246
uauauccagagcuaguccc

SEQ ID NO: 1285248 - RNA, 19 nt, Artificial Sequence
  Description of Artificial Sequence: Synthetic oligonucleotide
  Sense strand starting at position 3365 of SEQ ID NO: 1241603
uuuaaagccugaguaaaua

SEQ ID NO: 1285249 - RNA, 19 nt, Artificial Sequence
  Description of Artificial Sequence: Synthetic oligonucleotide
  Antisense strand to SEQ ID NO: 1285248
uauuuacucaggcuuuaaa

SEQ ID NO: 1285250 - RNA, 19 nt, Artificial Sequence
  Description of Artificial Sequence: Synthetic oligonucleotide
  Sense strand starting at position 3489 of SEQ ID NO: 1241603
gagcccuccugguauagaa

SEQ ID NO: 1285251 - RNA, 19 nt, Artificial Sequence
  Description of Artificial Sequence: Synthetic oligonucleotide
  Antisense strand to SEQ ID NO: 1285250
uucuauaccaggagggcuc

SEQ ID NO: 1285252 - RNA, 19 nt, Artificial Sequence
  Description of Artificial Sequence: Synthetic oligonucleotide
  Sense strand starting at position 3690 of SEQ ID NO: 1241603
cugacucauccggagguga

SEQ ID NO: 1285253 - RNA, 19 nt, Artificial Sequence
  Description of Artificial Sequence: Synthetic oligonucleotide
  Antisense strand to SEQ ID NO: 1285252
ucaccuccggaugagucag

SEQ ID NO: 1285254 - RNA, 19 nt, Artificial Sequence
  Description of Artificial Sequence: Synthetic oligonucleotide
  Sense strand starting at position 3701 of SEQ ID NO: 1241603
ggaggugagcccuguguga

SEQ ID NO: 1285255 - RNA, 19 nt, Artificial Sequence
  Description of Artificial Sequence: Synthetic oligonucleotide
  Antisense strand to SEQ ID NO: 1285254
ucacacagggcucaccucc

SEQ ID NO: 1285256 - RNA, 19 nt, Artificial Sequence
  Description of Artificial Sequence: Synthetic oligonucleotide
  Sense strand starting at position 3747 of SEQ ID NO: 1241603
gcucgcuuggugucuacaa

SEQ ID NO: 1285257 - RNA, 19 nt, Artificial Sequence
  Description of Artificial Sequence: Synthetic oligonucleotide
  Antisense strand to SEQ ID NO: 1285256
uuguagacaccaagcgagc

SEQ ID NO: 1285258 - RNA, 19 nt, Artificial Sequence
  Description of Artificial Sequence: Synthetic oligonucleotide
  Sense strand starting at position 3748 of SEQ ID NO: 1241603
cucgcuuggugucuacaaa

SEQ ID NO: 1285259 - RNA, 19 nt, Artificial Sequence
  Description of Artificial Sequence: Synthetic oligonucleotide
  Antisense strand to SEQ ID NO: 1285258
uuuguagacaccaagcgag

SEQ ID NO: 1285260 - RNA, 19 nt, Artificial Sequence
  Description of Artificial Sequence: Synthetic oligonucleotide
  Sense strand starting at position 3764 of SEQ ID NO: 1241603
aaaguucugccacgagacu

SEQ ID NO: 1285261 - RNA, 19 nt, Artificial Sequence
  Description of Artificial Sequence: Synthetic oligonucleotide
  Antisense strand to SEQ ID NO: 1285260
agucucguggcagaacuuu

SEQ ID NO: 1285262 - RNA, 19 nt, Artificial Sequence
  Description of Artificial Sequence: Synthetic oligonucleotide
  Sense strand starting at position 3765 of SEQ ID NO: 1241603
aaguucugccacgagacua

SEQ ID NO: 1285263 - RNA, 19 nt, Artificial Sequence
  Description of Artificial Sequence: Synthetic oligonucleotide
  Antisense strand to SEQ ID NO: 1285262
uagucucguggcagaacuu

SEQ ID NO: 1285264 - RNA, 19 nt, Artificial Sequence
  Description of Artificial Sequence: Synthetic oligonucleotide
  Sense strand starting at position 3809 of SEQ ID NO: 1241603
aggugauacugggucauua

SEQ ID NO: 1285265 - RNA, 19 nt, Artificial Sequence
  Description of Artificial Sequence: Synthetic oligonucleotide
  Antisense strand to SEQ ID NO: 1285264
uaaugacccaguaucaccu

SEQ ID NO: 1285266 - RNA, 19 nt, Artificial Sequence
  Description of Artificial Sequence: Synthetic oligonucleotide
  Sense strand starting at position 3811 of SEQ ID NO: 1241603
gugauacugggucauuaag

SEQ ID NO: 1285267 - RNA, 19 nt, Artificial Sequence
  Description of Artificial Sequence: Synthetic oligonucleotide
  Antisense strand to SEQ ID NO: 1285266
cuuaaugacccaguaucac

SEQ ID NO: 1285268 - RNA, 19 nt, Artificial Sequence
  Description of Artificial Sequence: Synthetic oligonucleotide
  Sense strand starting at position 74 of SEQ ID NO: 1241604
augggauguugacuucuca

SEQ ID NO: 1285269 - RNA, 19 nt, Artificial Sequence
  Description of Artificial Sequence: Synthetic oligonucleotide
  Antisense strand to SEQ ID NO: 1285268
ugagaagucaacaucccau

SEQ ID NO: 1285270 - RNA, 19 nt, Artificial Sequence
  Description of Artificial Sequence: Synthetic oligonucleotide
  Sense strand starting at position 81 of SEQ ID NO: 1241604
guugacuucucauuucugu

SEQ ID NO: 1285271 - RNA, 19 nt, Artificial Sequence
  Description of Artificial Sequence: Synthetic oligonucleotide
  Antisense strand to SEQ ID NO: 1285270
acagaaaugagaagucaac

SEQ ID NO: 1285272 - RNA, 19 nt, Artificial Sequence
  Description of Artificial Sequence: Synthetic oligonucleotide
  Sense strand starting at position 109 of SEQ ID NO: 1241604
aagauaggauucguauuaa

SEQ ID NO: 1285273 - RNA, 19 nt, Artificial Sequence
  Description of Artificial Sequence: Synthetic oligonucleotide
  Antisense strand to SEQ ID NO: 1285272
uuaauacgaauccuaucuu

SEQ ID NO: 1285274 - RNA, 19 nt, Artificial Sequence
  Description of Artificial Sequence: Synthetic oligonucleotide
  Sense strand starting at position 242 of SEQ ID NO: 1241604
guggguuugagguauaaga

SEQ ID NO: 1285275 - RNA, 19 nt, Artificial Sequence
  Description of Artificial Sequence: Synthetic oligonucleotide
  Antisense strand to SEQ ID NO: 1285274
ucuuauaccucaaacccac

SEQ ID NO: 1285276 - RNA, 19 nt, Artificial Sequence
  Description of Artificial Sequence: Synthetic oligonucleotide
  Sense strand starting at position 387 of SEQ ID NO: 1241604
acaggauacugaccuugua

SEQ ID NO: 1285277 - RNA, 19 nt, Artificial Sequence
  Description of Artificial Sequence: Synthetic oligonucleotide
  Antisense strand to SEQ ID NO: 1285276
uacaaggucaguauccugu

SEQ ID NO: 1285278 - RNA, 19 nt, Artificial Sequence
  Description of Artificial Sequence: Synthetic oligonucleotide
  Sense strand starting at position 390 of SEQ ID NO: 1241604
ggauacugaccuuguaaca

SEQ ID NO: 1285279 - RNA, 19 nt, Artificial Sequence
  Description of Artificial Sequence: Synthetic oligonucleotide
  Antisense strand to SEQ ID NO: 1285278
uguuacaaggucaguaucc

SEQ ID NO: 1285280 - RNA, 19 nt, Artificial Sequence
  Description of Artificial Sequence: Synthetic oligonucleotide
  Sense strand starting at position 497 of SEQ ID NO: 1241604
cuuaacuagaugggugaua

SEQ ID NO: 1285281 - RNA, 19 nt, Artificial Sequence
  Description of Artificial Sequence: Synthetic oligonucleotide
  Antisense strand to SEQ ID NO: 1285280
uaucacccaucuaguuaag

SEQ ID NO: 1285282 - RNA, 19 nt, Artificial Sequence
  Description of Artificial Sequence: Synthetic oligonucleotide
  Sense strand starting at position 582 of SEQ ID NO: 1241604
acuggaaaugguggguauu

SEQ ID NO: 1285283 - RNA, 19 nt, Artificial Sequence
  Description of Artificial Sequence: Synthetic oligonucleotide
  Antisense strand to SEQ ID NO: 1285282
aauacccaccauuuccagu

SEQ ID NO: 1285284 - RNA, 19 nt, Artificial Sequence
  Description of Artificial Sequence: Synthetic oligonucleotide
  Sense strand starting at position 725 of SEQ ID NO: 1241604
ucagaacuugcuugaagau

SEQ ID NO: 1285285 - RNA, 19 nt, Artificial Sequence
  Description of Artificial Sequence: Synthetic oligonucleotide
  Antisense strand to SEQ ID NO: 1285284
aucuucaagcaaguucuga

SEQ ID NO: 1285286 - RNA, 19 nt, Artificial Sequence
  Description of Artificial Sequence: Synthetic oligonucleotide
  Sense strand starting at position 1008 of SEQ ID NO: 1241604
agaauacaguuucuaguca

SEQ ID NO: 1285287 - RNA, 19 nt, Artificial Sequence
  Description of Artificial Sequence: Synthetic oligonucleotide
  Antisense strand to SEQ ID NO: 1285286
ugacuagaaacuguauucu

SEQ ID NO: 1285288 - RNA, 19 nt, Artificial Sequence
  Description of Artificial Sequence: Synthetic oligonucleotide
  Sense strand starting at position 1118 of SEQ ID NO: 1241604
uugaacuugugagcaaaga

SEQ ID NO: 1285289 - RNA, 19 nt, Artificial Sequence
  Description of Artificial Sequence: Synthetic oligonucleotide
  Antisense strand to SEQ ID NO: 1285288
ucuuugcucacaaguucaa

SEQ ID NO: 1285290 - RNA, 19 nt, Artificial Sequence
  Description of Artificial Sequence: Synthetic oligonucleotide
  Sense strand starting at position 1312 of SEQ ID NO: 1241604
cuaugucugagccaggaua

SEQ ID NO: 1285291 - RNA, 19 nt, Artificial Sequence
  Description of Artificial Sequence: Synthetic oligonucleotide
  Antisense strand to SEQ ID NO: 1285290
uauccuggcucagacauag

SEQ ID NO: 1285292 - RNA, 19 nt, Artificial Sequence
  Description of Artificial Sequence: Synthetic oligonucleotide
  Sense strand starting at position 1436 of SEQ ID NO: 1241604
uguucuucugagcaaauau

SEQ ID NO: 1285293 - RNA, 19 nt, Artificial Sequence
  Description of Artificial Sequence: Synthetic oligonucleotide
  Antisense strand to SEQ ID NO: 1285292
auauuugcucagaagaaca

SEQ ID NO: 1285294 - RNA, 19 nt, Artificial Sequence
  Description of Artificial Sequence: Synthetic oligonucleotide
  Sense strand starting at position 1790 of SEQ ID NO: 1241604
aguugaugggcugauguga

SEQ ID NO: 1285295 - RNA, 19 nt, Artificial Sequence
  Description of Artificial Sequence: Synthetic oligonucleotide
  Antisense strand to SEQ ID NO: 1285294
ucacaucagcccaucaacu

SEQ ID NO: 1285296 - RNA, 19 nt, Artificial Sequence
  Description of Artificial Sequence: Synthetic oligonucleotide
  Sense strand starting at position 1807 of SEQ ID NO: 1241604
gauguugccaaagaguuga

SEQ ID NO: 1285297 - RNA, 19 nt, Artificial Sequence
  Description of Artificial Sequence: Synthetic oligonucleotide
  Antisense strand to SEQ ID NO: 1285296
ucaacucuuuggcaacauc

SEQ ID NO: 1285298 - RNA, 19 nt, Artificial Sequence
  Description of Artificial Sequence: Synthetic oligonucleotide
  Sense strand starting at position 1815 of SEQ ID NO: 1241604
caaagaguugacugaaguu

SEQ ID NO: 1285299 - RNA, 19 nt, Artificial Sequence
  Description of Artificial Sequence: Synthetic oligonucleotide
  Antisense strand to SEQ ID NO: 1285298
aacuucagucaacucuuug

SEQ ID NO: 1285300 - RNA, 19 nt, Artificial Sequence
  Description of Artificial Sequence: Synthetic oligonucleotide
  Sense strand starting at position 1954 of SEQ ID NO: 1241604
uaggaaugaggcugugaug

SEQ ID NO: 1285301 - RNA, 19 nt, Artificial Sequence
  Description of Artificial Sequence: Synthetic oligonucleotide
  Antisense strand to SEQ ID NO: 1285300
caucacagccucauuccua

SEQ ID NO: 1285302 - RNA, 19 nt, Artificial Sequence
  Description of Artificial Sequence: Synthetic oligonucleotide
  Sense strand starting at position 1981 of SEQ ID NO: 1241604
uggagagaaugcucauuaa

SEQ ID NO: 1285303 - RNA, 19 nt, Artificial Sequence
  Description of Artificial Sequence: Synthetic oligonucleotide
  Antisense strand to SEQ ID NO: 1285302
uuaaugagcauucucucca

SEQ ID NO: 1285304 - RNA, 19 nt, Artificial Sequence
  Description of Artificial Sequence: Synthetic oligonucleotide
  Sense strand starting at position 1984 of SEQ ID NO: 1241604
agagaaugcucauuaauuc

SEQ ID NO: 1285305 - RNA, 19 nt, Artificial Sequence
  Description of Artificial Sequence: Synthetic oligonucleotide
  Antisense strand to SEQ ID NO: 1285304
gaauuaaugagcauucucu

SEQ ID NO: 1285306 - RNA, 19 nt, Artificial Sequence
  Description of Artificial Sequence: Synthetic oligonucleotide
  Sense strand starting at position 2006 of SEQ ID NO: 1241604
uuguaaguaagcuagaaga

SEQ ID NO: 1285307 - RNA, 19 nt, Artificial Sequence
  Description of Artificial Sequence: Synthetic oligonucleotide
  Antisense strand to SEQ ID NO: 1285306
ucuucuagcuuacuuacaa

SEQ ID NO: 1285308 - RNA, 19 nt, Artificial Sequence
  Description of Artificial Sequence: Synthetic oligonucleotide
  Sense strand starting at position 2169 of SEQ ID NO: 1241604
gaagaauggucgucuaaag

SEQ ID NO: 1285309 - RNA, 19 nt, Artificial Sequence
  Description of Artificial Sequence: Synthetic oligonucleotide
  Antisense strand to SEQ ID NO: 1285308
cuuuagacgaccauucuuc

SEQ ID NO: 1285310 - RNA, 19 nt, Artificial Sequence
  Description of Artificial Sequence: Synthetic oligonucleotide
  Sense strand starting at position 2179 of SEQ ID NO: 1241604
cgucuaaagcaccauagau

SEQ ID NO: 1285311 - RNA, 19 nt, Artificial Sequence
  Description of Artificial Sequence: Synthetic oligonucleotide
  Antisense strand to SEQ ID NO: 1285310
aucuauggugcuuuagacg

SEQ ID NO: 1285312 - RNA, 19 nt, Artificial Sequence
  Description of Artificial Sequence: Synthetic oligonucleotide
  Sense strand starting at position 2213 of SEQ ID NO: 1241604
gugaagacugucgcgugau

SEQ ID NO: 1285313 - RNA, 19 nt, Artificial Sequence
  Description of Artificial Sequence: Synthetic oligonucleotide
  Antisense strand to SEQ ID NO: 1285312
aucacgcgacagucuucac

SEQ ID NO: 1285314 - RNA, 19 nt, Artificial Sequence
  Description of Artificial Sequence: Synthetic oligonucleotide
  Sense strand starting at position 2215 of SEQ ID NO: 1241604
gaagacugucgcgugaugu

SEQ ID NO: 1285315 - RNA, 19 nt, Artificial Sequence
  Description of Artificial Sequence: Synthetic oligonucleotide
  Antisense strand to SEQ ID NO: 1285314
acaucacgcgacagucuuc

SEQ ID NO: 1285316 - RNA, 19 nt, Artificial Sequence
  Description of Artificial Sequence: Synthetic oligonucleotide
  Sense strand starting at position 2233 of SEQ ID NO: 1241604
ugaugcuuugcugugcaua

SEQ ID NO: 1285317 - RNA, 19 nt, Artificial Sequence
  Description of Artificial Sequence: Synthetic oligonucleotide
  Antisense strand to SEQ ID NO: 1285316
uaugcacagcaaagcauca

SEQ ID NO: 1285318 - RNA, 19 nt, Artificial Sequence
  Description of Artificial Sequence: Synthetic oligonucleotide
  Sense strand starting at position 2434 of SEQ ID NO: 1241604
cauuguaauugagugaaau

SEQ ID NO: 1285319 - RNA, 19 nt, Artificial Sequence
  Description of Artificial Sequence: Synthetic oligonucleotide
  Antisense strand to SEQ ID NO: 1285318
auuucacucaauuacaaug

SEQ ID NO: 1285320 - RNA, 19 nt, Artificial Sequence
  Description of Artificial Sequence: Synthetic oligonucleotide
  Sense strand starting at position 2628 of SEQ ID NO: 1241604
augguaauaaggcaguaau

SEQ ID NO: 1285321 - RNA, 19 nt, Artificial Sequence
  Description of Artificial Sequence: Synthetic oligonucleotide
  Antisense strand to SEQ ID NO: 1285320
auuacugccuuauuaccau

SEQ ID NO: 1285322 - RNA, 19 nt, Artificial Sequence
  Description of Artificial Sequence: Synthetic oligonucleotide
  Sense strand starting at position 2798 of SEQ ID NO: 1241604
ggucauuauugugcuauuu

SEQ ID NO: 1285323 - RNA, 19 nt, Artificial Sequence
  Description of Artificial Sequence: Synthetic oligonucleotide
  Antisense strand to SEQ ID NO: 1285322
aaauagcacaauaaugacc

SEQ ID NO: 1285324 - RNA, 19 nt, Artificial Sequence
  Description of Artificial Sequence: Synthetic oligonucleotide
  Sense strand starting at position 3262 of SEQ ID NO: 1241604
guaaacugggcucaaguaa

SEQ ID NO: 1285325 - RNA, 19 nt, Artificial Sequence
  Description of Artificial Sequence: Synthetic oligonucleotide
  Antisense strand to SEQ ID NO: 1285324
uuacuugagcccaguuuac

SEQ ID NO: 1285326 - RNA, 19 nt, Artificial Sequence
  Description of Artificial Sequence: Synthetic oligonucleotide
  Sense strand starting at position 3340 of SEQ ID NO: 1241604
ugugcuaauuuccuaugca

SEQ ID NO: 1285327 - RNA, 19 nt, Artificial Sequence
  Description of Artificial Sequence: Synthetic oligonucleotide
  Antisense strand to SEQ ID NO: 1285326
ugcauaggaaauuagcaca

SEQ ID NO: 1285328 - RNA, 19 nt, Artificial Sequence
  Description of Artificial Sequence: Synthetic oligonucleotide
  Sense strand starting at position 3343 of SEQ ID NO: 1241604
gcuaauuuccuaugcaagu

SEQ ID NO: 1285329 - RNA, 19 nt, Artificial Sequence
  Description of Artificial Sequence: Synthetic oligonucleotide
  Antisense strand to SEQ ID NO: 1285328
acuugcauaggaaauuagc

SEQ ID NO: 1285330 - RNA, 19 nt, Artificial Sequence
  Description of Artificial Sequence: Synthetic oligonucleotide
  Sense strand starting at position 3372 of SEQ ID NO: 1241604
ugcuaaagaguagauagua

SEQ ID NO: 1285331 - RNA, 19 nt, Artificial Sequence
  Description of Artificial Sequence: Synthetic oligonucleotide
  Antisense strand to SEQ ID NO: 1285330
uacuaucuacucuuuagca

SEQ ID NO: 1285332 - RNA, 19 nt, Artificial Sequence
  Description of Artificial Sequence: Synthetic oligonucleotide
  Sense strand starting at position 3481 of SEQ ID NO: 1241604
ucaagugagccaugaagag

SEQ ID NO: 1285333 - RNA, 19 nt, Artificial Sequence
  Description of Artificial Sequence: Synthetic oligonucleotide
  Antisense strand to SEQ ID NO: 1285332
cucuucauggcucacuuga

SEQ ID NO: 1285334 - RNA, 19 nt, Artificial Sequence
  Description of Artificial Sequence: Synthetic oligonucleotide
  Sense strand starting at position 3594 of SEQ ID NO: 1241604
gccagaugucaggacugau

SEQ ID NO: 1285335 - RNA, 19 nt, Artificial Sequence
  Description of Artificial Sequence: Synthetic oligonucleotide
  Antisense strand to SEQ ID NO: 1285334
aucaguccugacaucuggc

SEQ ID NO: 1285336 - RNA, 19 nt, Artificial Sequence
  Description of Artificial Sequence: Synthetic oligonucleotide
  Sense strand starting at position 3597 of SEQ ID NO: 1241604
agaugucaggacugauuau

SEQ ID NO: 1285337 - RNA, 19 nt, Artificial Sequence
  Description of Artificial Sequence: Synthetic oligonucleotide
  Antisense strand to SEQ ID NO: 1285336
auaaucaguccugacaucu

SEQ ID NO: 1285338 - RNA, 19 nt, Artificial Sequence
  Description of Artificial Sequence: Synthetic oligonucleotide
  Sense strand starting at position 3603 of SEQ ID NO: 1241604
caggacugauuauugucaa

SEQ ID NO: 1285339 - RNA, 19 nt, Artificial Sequence
  Description of Artificial Sequence: Synthetic oligonucleotide
  Antisense strand to SEQ ID NO: 1285338
uugacaauaaucaguccug

SEQ ID NO: 1285340 - RNA, 19 nt, Artificial Sequence
  Description of Artificial Sequence: Synthetic oligonucleotide
  Sense strand starting at position 3606 of SEQ ID NO: 1241604
gacugauuauugucaacug

SEQ ID NO: 1285341 - RNA, 19 nt, Artificial Sequence
  Description of Artificial Sequence: Synthetic oligonucleotide
  Antisense strand to SEQ ID NO: 1285340
caguugacaauaaucaguc

SEQ ID NO: 1285342 - RNA, 19 nt, Artificial Sequence
  Description of Artificial Sequence: Synthetic oligonucleotide
  Sense strand starting at position 3613 of SEQ ID NO: 1241604
uauugucaacuggaagguu

SEQ ID NO: 1285343 - RNA, 19 nt, Artificial Sequence
  Description of Artificial Sequence: Synthetic oligonucleotide
  Antisense strand to SEQ ID NO: 1285342
aaccuuccaguugacaaua

SEQ ID NO: 1285344 - RNA, 19 nt, Artificial Sequence
  Description of Artificial Sequence: Synthetic oligonucleotide
  Sense strand starting at position 3682 of SEQ ID NO: 1241604
ugaugacagaaguguccua

SEQ ID NO: 1285345 - RNA, 19 nt, Artificial Sequence
  Description of Artificial Sequence: Synthetic oligonucleotide
  Antisense strand to SEQ ID NO: 1285344
uaggacacuucugucauca

SEQ ID NO: 1285346 - RNA, 19 nt, Artificial Sequence
  Description of Artificial Sequence: Synthetic oligonucleotide
  Sense strand starting at position 3724 of SEQ ID NO: 1241604
gcgaaucuugccgcauacu

SEQ ID NO: 1285347 - RNA, 19 nt, Artificial Sequence
  Description of Artificial Sequence: Synthetic oligonucleotide
  Antisense strand to SEQ ID NO: 1285346
aguaugcggcaagauucgc

SEQ ID NO: 1285348 - RNA, 19 nt, Artificial Sequence
  Description of Artificial Sequence: Synthetic oligonucleotide
  Sense strand starting at position 285 of SEQ ID NO: 1241605
aucuguugaccaggagaug

SEQ ID NO: 1285349 - RNA, 19 nt, Artificial Sequence
  Description of Artificial Sequence: Synthetic oligonucleotide
  Antisense strand to SEQ ID NO: 1285348
caucuccuggucaacagau

SEQ ID NO: 1285350 - RNA, 19 nt, Artificial Sequence
  Description of Artificial Sequence: Synthetic oligonucleotide
  Sense strand starting at position 297 of SEQ ID NO: 1241605
ggagaugcauucuuaaaga

SEQ ID NO: 1285351 - RNA, 19 nt, Artificial Sequence
  Description of Artificial Sequence: Synthetic oligonucleotide
  Antisense strand to SEQ ID NO: 1285350
ucuuuaagaaugcaucucc

SEQ ID NO: 1285352 - RNA, 19 nt, Artificial Sequence
  Description of Artificial Sequence: Synthetic oligonucleotide
  Sense strand starting at position 340 of SEQ ID NO: 1241605
uuggaauugcaagguacau

SEQ ID NO: 1285353 - RNA, 19 nt, Artificial Sequence
  Description of Artificial Sequence: Synthetic oligonucleotide
  Antisense strand to SEQ ID NO: 1285352
auguaccuugcaauuccaa

SEQ ID NO: 1285354 - RNA, 19 nt, Artificial Sequence
  Description of Artificial Sequence: Synthetic oligonucleotide
  Sense strand starting at position 408 of SEQ ID NO: 1241605
ggcagauuaacucaugguc

SEQ ID NO: 1285355 - RNA, 19 nt, Artificial Sequence
  Description of Artificial Sequence: Synthetic oligonucleotide
  Antisense strand to SEQ ID NO: 1285354
gaccaugaguuaaucugcc

SEQ ID NO: 1285356 - RNA, 19 nt, Artificial Sequence
  Description of Artificial Sequence: Synthetic oligonucleotide
  Sense strand starting at position 545 of SEQ ID NO: 1241605
cuccuuaaccagcaggaau

SEQ ID NO: 1285357 - RNA, 19 nt, Artificial Sequence
  Description of Artificial Sequence: Synthetic oligonucleotide
  Antisense strand to SEQ ID NO: 1285356
auuccugcugguuaaggag

SEQ ID NO: 1285358 - RNA, 19 nt, Artificial Sequence
  Description of Artificial Sequence: Synthetic oligonucleotide
  Sense strand starting at position 792 of SEQ ID NO: 1241605
uugagauucuauguggaua

SEQ ID NO: 1285359 - RNA, 19 nt, Artificial Sequence
  Description of Artificial Sequence: Synthetic oligonucleotide
  Antisense strand to SEQ ID NO: 1285358
uauccacauagaaucucaa

SEQ ID NO: 1285360 - RNA, 19 nt, Artificial Sequence
  Description of Artificial Sequence: Synthetic oligonucleotide
  Sense strand starting at position 793 of SEQ ID NO: 1241605
ugagauucuauguggauaa

SEQ ID NO: 1285361 - RNA, 19 nt, Artificial Sequence
  Description of Artificial Sequence: Synthetic oligonucleotide
  Antisense strand to SEQ ID NO: 1285360
uuauccacauagaaucuca

SEQ ID NO: 1285362 - RNA, 19 nt, Artificial Sequence
  Description of Artificial Sequence: Synthetic oligonucleotide
  Sense strand starting at position 887 of SEQ ID NO: 1241605
gggagaacugaguguucag

SEQ ID NO: 1285363 - RNA, 19 nt, Artificial Sequence
  Description of Artificial Sequence: Synthetic oligonucleotide
  Antisense strand to SEQ ID NO: 1285362
cugaacacucaguucuccc

SEQ ID NO: 1285364 - RNA, 19 nt, Artificial Sequence
  Description of Artificial Sequence: Synthetic oligonucleotide
  Sense strand starting at position 890 of SEQ ID NO: 1241605
agaacugaguguucagaag

SEQ ID NO: 1285365 - RNA, 19 nt, Artificial Sequence
  Description of Artificial Sequence: Synthetic oligonucleotide
  Antisense strand to SEQ ID NO: 1285364
cuucugaacacucaguucu

SEQ ID NO: 1285366 - RNA, 19 nt, Artificial Sequence
  Description of Artificial Sequence: Synthetic oligonucleotide
  Sense strand starting at position 989 of SEQ ID NO: 1241605
guaagaaaugacugugauc

SEQ ID NO: 1285367 - RNA, 19 nt, Artificial Sequence
  Description of Artificial Sequence: Synthetic oligonucleotide
  Antisense strand to SEQ ID NO: 1285366
gaucacagucauuucuuac

SEQ ID NO: 1285368 - RNA, 19 nt, Artificial Sequence
  Description of Artificial Sequence: Synthetic oligonucleotide
  Sense strand starting at position 1097 of SEQ ID NO: 1241605
gugauuuacuuagaaccaa

SEQ ID NO: 1285369 - RNA, 19 nt, Artificial Sequence
  Description of Artificial Sequence: Synthetic oligonucleotide
  Antisense strand to SEQ ID NO: 1285368
uugguucuaaguaaaucac

SEQ ID NO: 1285370 - RNA, 19 nt, Artificial Sequence
  Description of Artificial Sequence: Synthetic oligonucleotide
  Sense strand starting at position 1168 of SEQ ID NO: 1241605
cagccuugggcugauugau

SEQ ID NO: 1285371 - RNA, 19 nt, Artificial Sequence
  Description of Artificial Sequence: Synthetic oligonucleotide
  Antisense strand to SEQ ID NO: 1285370
aucaaucagcccaaggcug

SEQ ID NO: 1285372 - RNA, 19 nt, Artificial Sequence
  Description of Artificial Sequence: Synthetic oligonucleotide
  Sense strand starting at position 1174 of SEQ ID NO: 1241605
ugggcugauugaucuauca

SEQ ID NO: 1285373 - RNA, 19 nt, Artificial Sequence
  Description of Artificial Sequence: Synthetic oligonucleotide
  Antisense strand to SEQ ID NO: 1285372
ugauagaucaaucagccca

SEQ ID NO: 1285374 - RNA, 19 nt, Artificial Sequence
  Description of Artificial Sequence: Synthetic oligonucleotide
  Sense strand starting at position 1348 of SEQ ID NO: 1241605
agaacaagcgauuguaaca

SEQ ID NO: 1285375 - RNA, 19 nt, Artificial Sequence
  Description of Artificial Sequence: Synthetic oligonucleotide
  Antisense strand to SEQ ID NO: 1285374
uguuacaaucgcuuguucu

SEQ ID NO: 1285376 - RNA, 19 nt, Artificial Sequence
  Description of Artificial Sequence: Synthetic oligonucleotide
  Sense strand starting at position 1411 of SEQ ID NO: 1241605
ucaguuucagagggcgaaa

SEQ ID NO: 1285377 - RNA, 19 nt, Artificial Sequence
  Description of Artificial Sequence: Synthetic oligonucleotide
  Antisense strand to SEQ ID NO: 1285376
uuucgcccucugaaacuga

SEQ ID NO: 1285378 - RNA, 19 nt, Artificial Sequence
  Description of Artificial Sequence: Synthetic oligonucleotide
  Sense strand starting at position 1414 of SEQ ID NO: 1241605
guuucagagggcgaaaugu

SEQ ID NO: 1285379 - RNA, 19 nt, Artificial Sequence
  Description of Artificial Sequence: Synthetic oligonucleotide
  Antisense strand to SEQ ID NO: 1285378
acauuucgcccucugaaac

SEQ ID NO: 1285380 - RNA, 19 nt, Artificial Sequence
  Description of Artificial Sequence: Synthetic oligonucleotide
  Sense strand starting at position 1499 of SEQ ID NO: 1241605
gccauaucccauugaagag

SEQ ID NO: 1285381 - RNA, 19 nt, Artificial Sequence
  Description of Artificial Sequence: Synthetic oligonucleotide
  Antisense strand to SEQ ID NO: 1285380
cucuucaaugggauauggc

SEQ ID NO: 1285382 - RNA, 19 nt, Artificial Sequence
  Description of Artificial Sequence: Synthetic oligonucleotide
  Sense strand starting at position 1508 of SEQ ID NO: 1241605
cauugaagaguccgaaacu

SEQ ID NO: 1285383 - RNA, 19 nt, Artificial Sequence
  Description of Artificial Sequence: Synthetic oligonucleotide
  Antisense strand to SEQ ID NO: 1285382
aguuucggacucuucaaug

SEQ ID NO: 1285384 - RNA, 19 nt, Artificial Sequence
  Description of Artificial Sequence: Synthetic oligonucleotide
  Sense strand starting at position 2016 of SEQ ID NO: 1241605
gcagaccuucugggaaaug

SEQ ID NO: 1285385 - RNA, 19 nt, Artificial Sequence
  Description of Artificial Sequence: Synthetic oligonucleotide
  Antisense strand to SEQ ID NO: 1285384
cauuucccagaaggucugc

SEQ ID NO: 1285386 - RNA, 19 nt, Artificial Sequence
  Description of Artificial Sequence: Synthetic oligonucleotide
  Sense strand starting at position 2089 of SEQ ID NO: 1241605
cuggcagaaguugaauuau

SEQ ID NO: 1285387 - RNA, 19 nt, Artificial Sequence
  Description of Artificial Sequence: Synthetic oligonucleotide
  Antisense strand to SEQ ID NO: 1285386
auaauucaacuucugccag

SEQ ID NO: 1285388 - RNA, 19 nt, Artificial Sequence
  Description of Artificial Sequence: Synthetic oligonucleotide
  Sense strand starting at position 2100 of SEQ ID NO: 1241605
ugaauuauacaucgcuaau

SEQ ID NO: 1285389 - RNA, 19 nt, Artificial Sequence
  Description of Artificial Sequence: Synthetic oligonucleotide
  Antisense strand to SEQ ID NO: 1285388
auuagcgauguauaauuca

SEQ ID NO: 1285390 - RNA, 19 nt, Artificial Sequence
  Description of Artificial Sequence: Synthetic oligonucleotide
  Sense strand starting at position 2215 of SEQ ID NO: 1241605
acacaugguuucucacacu

SEQ ID NO: 1285391 - RNA, 19 nt, Artificial Sequence
  Description of Artificial Sequence: Synthetic oligonucleotide
  Antisense strand to SEQ ID NO: 1285390
agugugagaaaccaugugu

SEQ ID NO: 1285392 - RNA, 19 nt, Artificial Sequence
  Description of Artificial Sequence: Synthetic oligonucleotide
  Sense strand starting at position 2510 of SEQ ID NO: 1241605
acuguuucuccuggagauc

SEQ ID NO: 1285393 - RNA, 19 nt, Artificial Sequence
  Description of Artificial Sequence: Synthetic oligonucleotide
  Antisense strand to SEQ ID NO: 1285392
gaucuccaggagaaacagu

SEQ ID NO: 1285394 - RNA, 19 nt, Artificial Sequence
  Description of Artificial Sequence: Synthetic oligonucleotide
  Sense strand starting at position 2511 of SEQ ID NO: 1241605
cuguuucuccuggagauca

SEQ ID NO: 1285395 - RNA, 19 nt, Artificial Sequence
  Description of Artificial Sequence: Synthetic oligonucleotide
  Antisense strand to SEQ ID NO: 1285394
ugaucuccaggagaaacag

SEQ ID NO: 1285396 - RNA, 19 nt, Artificial Sequence
  Description of Artificial Sequence: Synthetic oligonucleotide
  Sense strand starting at position 2617 of SEQ ID NO: 1241605
cccuuccuccucgaggauu

SEQ ID NO: 1285397 - RNA, 19 nt, Artificial Sequence
  Description of Artificial Sequence: Synthetic oligonucleotide
  Antisense strand to SEQ ID NO: 1285396
aauccucgaggaggaaggg

SEQ ID NO: 1285398 - RNA, 19 nt, Artificial Sequence
  Description of Artificial Sequence: Synthetic oligonucleotide
  Sense strand starting at position 2656 of SEQ ID NO: 1241605
agcaauaaguccuugaaga

SEQ ID NO: 1285399 - RNA, 19 nt, Artificial Sequence
  Description of Artificial Sequence: Synthetic oligonucleotide
  Antisense strand to SEQ ID NO: 1285398
ucuucaaggacuuauugcu

SEQ ID NO: 1285400 - RNA, 19 nt, Artificial Sequence
  Description of Artificial Sequence: Synthetic oligonucleotide
  Sense strand starting at position 2657 of SEQ ID NO: 1241605
gcaauaaguccuugaagac

SEQ ID NO: 1285401 - RNA, 19 nt, Artificial Sequence
  Description of Artificial Sequence: Synthetic oligonucleotide
  Antisense strand to SEQ ID NO: 1285400
gucuucaaggacuuauugc

SEQ ID NO: 1285402 - RNA, 19 nt, Artificial Sequence
  Description of Artificial Sequence: Synthetic oligonucleotide
  Sense strand starting at position 2698 of SEQ ID NO: 1241605
ugugucuaucuugaauuau

SEQ ID NO: 1285403 - RNA, 19 nt, Artificial Sequence
  Description of Artificial Sequence: Synthetic oligonucleotide
  Antisense strand to SEQ ID NO: 1285402
auaauucaagauagacaca

SEQ ID NO: 1285404 - RNA, 19 nt, Artificial Sequence
  Description of Artificial Sequence: Synthetic oligonucleotide
  Sense strand starting at position 2708 of SEQ ID NO: 1241605
uugaauuaugguggcaacu

SEQ ID NO: 1285405 - RNA, 19 nt, Artificial Sequence
  Description of Artificial Sequence: Synthetic oligonucleotide
  Antisense strand to SEQ ID NO: 1285404
aguugccaccauaauucaa

SEQ ID NO: 1285406 - RNA, 19 nt, Artificial Sequence
  Description of Artificial Sequence: Synthetic oligonucleotide
  Sense strand starting at position 2812 of SEQ ID NO: 1241605
gguagcaaugaauaucuca

SEQ ID NO: 1285407 - RNA, 19 nt, Artificial Sequence
  Description of Artificial Sequence: Synthetic oligonucleotide
  Antisense strand to SEQ ID NO: 1285406
ugagauauucauugcuacc

SEQ ID NO: 1285408 - RNA, 19 nt, Artificial Sequence
  Description of Artificial Sequence: Synthetic oligonucleotide
  Sense strand starting at position 2815 of SEQ ID NO: 1241605
agcaaugaauaucucagau

SEQ ID NO: 1285409 - RNA, 19 nt, Artificial Sequence
  Description of Artificial Sequence: Synthetic oligonucleotide
  Antisense strand to SEQ ID NO: 1285408
aucugagauauucauugcu

SEQ ID NO: 1285410 - RNA, 19 nt, Artificial Sequence
  Description of Artificial Sequence: Synthetic oligonucleotide
  Sense strand starting at position 2892 of SEQ ID NO: 1241605
augaauauguucucuguga

SEQ ID NO: 1285411 - RNA, 19 nt, Artificial Sequence
  Description of Artificial Sequence: Synthetic oligonucleotide
  Antisense strand to SEQ ID NO: 1285410
ucacagagaacauauucau

SEQ ID NO: 1285412 - RNA, 19 nt, Artificial Sequence
  Description of Artificial Sequence: Synthetic oligonucleotide
  Sense strand starting at position 2893 of SEQ ID NO: 1241605
ugaauauguucucugugaa

SEQ ID NO: 1285413 - RNA, 19 nt, Artificial Sequence
  Description of Artificial Sequence: Synthetic oligonucleotide
  Antisense strand to SEQ ID NO: 1285412
uucacagagaacauauuca

SEQ ID NO: 1285414 - RNA, 19 nt, Artificial Sequence
  Description of Artificial Sequence: Synthetic oligonucleotide
  Sense strand starting at position 2896 of SEQ ID NO: 1241605
auauguucucugugaauaa

SEQ ID NO: 1285415 - RNA, 19 nt, Artificial Sequence
  Description of Artificial Sequence: Synthetic oligonucleotide
  Antisense strand to SEQ ID NO: 1285414
uuauucacagagaacauau

SEQ ID NO: 1285416 - RNA, 19 nt, Artificial Sequence
  Description of Artificial Sequence: Synthetic oligonucleotide
  Sense strand starting at position 2900 of SEQ ID NO: 1241605
guucucugugaauaaauag

SEQ ID NO: 1285417 - RNA, 19 nt, Artificial Sequence
  Description of Artificial Sequence: Synthetic oligonucleotide
  Antisense strand to SEQ ID NO: 1285416
cuauuuauucacagagaac

SEQ ID NO: 1285418 - RNA, 19 nt, Artificial Sequence
  Description of Artificial Sequence: Synthetic oligonucleotide
  Sense strand starting at position 2990 of SEQ ID NO: 1241605
aucaauaucugucugugau

SEQ ID NO: 1285419 - RNA, 19 nt, Artificial Sequence
  Description of Artificial Sequence: Synthetic oligonucleotide
  Antisense strand to SEQ ID NO: 1285418
aucacagacagauauugau

SEQ ID NO: 1285420 - RNA, 19 nt, Artificial Sequence
  Description of Artificial Sequence: Synthetic oligonucleotide
  Sense strand starting at position 3010 of SEQ ID NO: 1241605
ccuuaauuguacccaguaa

SEQ ID NO: 1285421 - RNA, 19 nt, Artificial Sequence
  Description of Artificial Sequence: Synthetic oligonucleotide
  Antisense strand to SEQ ID NO: 1285420
uuacuggguacaauuaagg

SEQ ID NO: 1285422 - RNA, 19 nt, Artificial Sequence
  Description of Artificial Sequence: Synthetic oligonucleotide
  Sense strand starting at position 3300 of SEQ ID NO: 1241605
auggcauuccuauagugua

SEQ ID NO: 1285423 - RNA, 19 nt, Artificial Sequence
  Description of Artificial Sequence: Synthetic oligonucleotide
  Antisense strand to SEQ ID NO: 1285422
uacacuauaggaaugccau

SEQ ID NO: 1285424 - RNA, 19 nt, Artificial Sequence
  Description of Artificial Sequence: Synthetic oligonucleotide
  Sense strand starting at position 3456 of SEQ ID NO: 1241605
gagaaagcucugggagcuu

SEQ ID NO: 1285425 - RNA, 19 nt, Artificial Sequence
  Description of Artificial Sequence: Synthetic oligonucleotide
  Antisense strand to SEQ ID NO: 1285424
aagcucccagagcuuucuc

SEQ ID NO: 1285426 - RNA, 19 nt, Artificial Sequence
  Description of Artificial Sequence: Synthetic oligonucleotide
  Sense strand starting at position 3503 of SEQ ID NO: 1241605
agaggcuuauuugaggaaa

SEQ ID NO: 1285427 - RNA, 19 nt, Artificial Sequence
  Description of Artificial Sequence: Synthetic oligonucleotide
  Antisense strand to SEQ ID NO: 1285426
uuuccucaaauaagccucu

SEQ ID NO: 1285428 - RNA, 19 nt, Artificial Sequence
  Description of Artificial Sequence: Synthetic oligonucleotide
  Sense strand starting at position 326 of SEQ ID NO: 1241606
cauguaggaucgucuaagu

SEQ ID NO: 1285429 - RNA, 19 nt, Artificial Sequence
  Description of Artificial Sequence: Synthetic oligonucleotide
  Antisense strand to SEQ ID NO: 1285428
acuuagacgauccuacaug

SEQ ID NO: 1285430 - RNA, 19 nt, Artificial Sequence
  Description of Artificial Sequence: Synthetic oligonucleotide
  Sense strand starting at position 336 of SEQ ID NO: 1241606
cgucuaaguucucugucua

SEQ ID NO: 1285431 - RNA, 19 nt, Artificial Sequence
  Description of Artificial Sequence: Synthetic oligonucleotide
  Antisense strand to SEQ ID NO: 1285430
uagacagagaacuuagacg

SEQ ID NO: 1285432 - RNA, 19 nt, Artificial Sequence
  Description of Artificial Sequence: Synthetic oligonucleotide
  Sense strand starting at position 337 of SEQ ID NO: 1241606
gucuaaguucucugucuac

SEQ ID NO: 1285433 - RNA, 19 nt, Artificial Sequence
  Description of Artificial Sequence: Synthetic oligonucleotide
  Antisense strand to SEQ ID NO: 1285432
guagacagagaacuuagac

SEQ ID NO: 1285434 - RNA, 19 nt, Artificial Sequence
  Description of Artificial Sequence: Synthetic oligonucleotide
  Sense strand starting at position 417 of SEQ ID NO: 1241606
gcucacuguuuauaguauu

SEQ ID NO: 1285435 - RNA, 19 nt, Artificial Sequence
  Description of Artificial Sequence: Synthetic oligonucleotide
  Antisense strand to SEQ ID NO: 1285434
aauacuauaaacagugagc

SEQ ID NO: 1285436 - RNA, 19 nt, Artificial Sequence
  Description of Artificial Sequence: Synthetic oligonucleotide
  Sense strand starting at position 618 of SEQ ID NO: 1241606
uagauuaccuauugggaca

SEQ ID NO: 1285437 - RNA, 19 nt, Artificial Sequence
  Description of Artificial Sequence: Synthetic oligonucleotide
  Antisense strand to SEQ ID NO: 1285436
ugucccaauagguaaucua

SEQ ID NO: 1285438 - RNA, 19 nt, Artificial Sequence
  Description of Artificial Sequence: Synthetic oligonucleotide
  Sense strand starting at position 621 of SEQ ID NO: 1241606
auuaccuauugggacaaau

SEQ ID NO: 1285439 - RNA, 19 nt, Artificial Sequence
  Description of Artificial Sequence: Synthetic oligonucleotide
  Antisense strand to SEQ ID NO: 1285438
auuugucccaauagguaau

SEQ ID NO: 1285440 - RNA, 19 nt, Artificial Sequence
  Description of Artificial Sequence: Synthetic oligonucleotide
  Sense strand starting at position 769 of SEQ ID NO: 1241606
gccagaugaggugacucau

SEQ ID NO: 1285441 - RNA, 19 nt, Artificial Sequence
  Description of Artificial Sequence: Synthetic oligonucleotide
  Antisense strand to SEQ ID NO: 1285440
augagucaccucaucuggc

SEQ ID NO: 1285442 - RNA, 19 nt, Artificial Sequence
  Description of Artificial Sequence: Synthetic oligonucleotide
  Sense strand starting at position 1339 of SEQ ID NO: 1241606
uggucagauuuauacuugu

SEQ ID NO: 1285443 - RNA, 19 nt, Artificial Sequence
  Description of Artificial Sequence: Synthetic oligonucleotide
  Antisense strand to SEQ ID NO: 1285442
acaaguauaaaucugacca

SEQ ID NO: 1285444 - RNA, 19 nt, Artificial Sequence
  Description of Artificial Sequence: Synthetic oligonucleotide
  Sense strand starting at position 1536 of SEQ ID NO: 1241606
uuaaauuucuugcuuaggu

SEQ ID NO: 1285445 - RNA, 19 nt, Artificial Sequence
  Description of Artificial Sequence: Synthetic oligonucleotide
  Antisense strand to SEQ ID NO: 1285444
accuaagcaagaaauuuaa

SEQ ID NO: 1285446 - RNA, 19 nt, Artificial Sequence
  Description of Artificial Sequence: Synthetic oligonucleotide
  Sense strand starting at position 1540 of SEQ ID NO: 1241606
auuucuugcuuagguaaau

SEQ ID NO: 1285447 - RNA, 19 nt, Artificial Sequence
  Description of Artificial Sequence: Synthetic oligonucleotide
  Antisense strand to SEQ ID NO: 1285446
auuuaccuaagcaagaaau

SEQ ID NO: 1285448 - RNA, 19 nt, Artificial Sequence
  Description of Artificial Sequence: Synthetic oligonucleotide
  Sense strand starting at position 1541 of SEQ ID NO: 1241606
uuucuugcuuagguaaaua

SEQ ID NO: 1285449 - RNA, 19 nt, Artificial Sequence
  Description of Artificial Sequence: Synthetic oligonucleotide
  Antisense strand to SEQ ID NO: 1285448
uauuuaccuaagcaagaaa

SEQ ID NO: 1285450 - RNA, 19 nt, Artificial Sequence
  Description of Artificial Sequence: Synthetic oligonucleotide
  Sense strand starting at position 1549 of SEQ ID NO: 1241606
uuagguaaauaucugacau

SEQ ID NO: 1285451 - RNA, 19 nt, Artificial Sequence
  Description of Artificial Sequence: Synthetic oligonucleotide
  Antisense strand to SEQ ID NO: 1285450
augucagauauuuaccuaa

SEQ ID NO: 1285452 - RNA, 19 nt, Artificial Sequence
  Description of Artificial Sequence: Synthetic oligonucleotide
  Sense strand starting at position 1551 of SEQ ID NO: 1241606
agguaaauaucugacauuc

SEQ ID NO: 1285453 - RNA, 19 nt, Artificial Sequence
  Description of Artificial Sequence: Synthetic oligonucleotide
  Antisense strand to SEQ ID NO: 1285452
gaaugucagauauuuaccu

SEQ ID NO: 1285454 - RNA, 19 nt, Artificial Sequence
  Description of Artificial Sequence: Synthetic oligonucleotide
  Sense strand starting at position 1796 of SEQ ID NO: 1241606
uuauccuaaugcuuuagga

SEQ ID NO: 1285455 - RNA, 19 nt, Artificial Sequence
  Description of Artificial Sequence: Synthetic oligonucleotide
  Antisense strand to SEQ ID NO: 1285454
uccuaaagcauuaggauaa

SEQ ID NO: 1285456 - RNA, 19 nt, Artificial Sequence
  Description of Artificial Sequence: Synthetic oligonucleotide
  Sense strand starting at position 2029 of SEQ ID NO: 1241606
augccacugcaugauaaua

SEQ ID NO: 1285457 - RNA, 19 nt, Artificial Sequence
  Description of Artificial Sequence: Synthetic oligonucleotide
  Antisense strand to SEQ ID NO: 1285456
uauuaucaugcaguggcau

SEQ ID NO: 1285458 - RNA, 19 nt, Artificial Sequence
  Description of Artificial Sequence: Synthetic oligonucleotide
  Sense strand starting at position 2031 of SEQ ID NO: 1241606
gccacugcaugauaauaau

SEQ ID NO: 1285459 - RNA, 19 nt, Artificial Sequence
  Description of Artificial Sequence: Synthetic oligonucleotide
  Antisense strand to SEQ ID NO: 1285458
auuauuaucaugcaguggc

SEQ ID NO: 1285460 - RNA, 19 nt, Artificial Sequence
  Description of Artificial Sequence: Synthetic oligonucleotide
  Sense strand starting at position 2393 of SEQ ID NO: 1241606
ccaagauagugacacugua

SEQ ID NO: 1285461 - RNA, 19 nt, Artificial Sequence
  Description of Artificial Sequence: Synthetic oligonucleotide
  Antisense strand to SEQ ID NO: 1285460
uacagugucacuaucuugg

SEQ ID NO: 1285462 - RNA, 19 nt, Artificial Sequence
  Description of Artificial Sequence: Synthetic oligonucleotide
  Sense strand starting at position 2506 of SEQ ID NO: 1241606
gauuaaguuggcuauaauc

SEQ ID NO: 1285463 - RNA, 19 nt, Artificial Sequence
  Description of Artificial Sequence: Synthetic oligonucleotide
  Antisense strand to SEQ ID NO: 1285462
gauuauagccaacuuaauc

SEQ ID NO: 1285464 - RNA, 19 nt, Artificial Sequence
  Description of Artificial Sequence: Synthetic oligonucleotide
  Sense strand starting at position 2508 of SEQ ID NO: 1241606
uuaaguuggcuauaaucaa

SEQ ID NO: 1285465 - RNA, 19 nt, Artificial Sequence
  Description of Artificial Sequence: Synthetic oligonucleotide
  Antisense strand to SEQ ID NO: 1285464
uugauuauagccaacuuaa

SEQ ID NO: 1285466 - RNA, 19 nt, Artificial Sequence
  Description of Artificial Sequence: Synthetic oligonucleotide
  Sense strand starting at position 2542 of SEQ ID NO: 1241606
guuucuaaagauugagauu

SEQ ID NO: 1285467 - RNA, 19 nt, Artificial Sequence
  Description of Artificial Sequence: Synthetic oligonucleotide
  Antisense strand to SEQ ID NO: 1285466
aaucucaaucuuuagaaac

SEQ ID NO: 1285468 - RNA, 19 nt, Artificial Sequence
  Description of Artificial Sequence: Synthetic oligonucleotide
  Sense strand starting at position 2560 of SEQ ID NO: 1241606
uuugguccucuauguuaaa

SEQ ID NO: 1285469 - RNA, 19 nt, Artificial Sequence
  Description of Artificial Sequence: Synthetic oligonucleotide
  Antisense strand to SEQ ID NO: 1285468
uuuaacauagaggaccaaa

SEQ ID NO: 1285470 - RNA, 19 nt, Artificial Sequence
  Description of Artificial Sequence: Synthetic oligonucleotide
  Sense strand starting at position 2595 of SEQ ID NO: 1241606
guauaaauuugcucuuagu

SEQ ID NO: 1285471 - RNA, 19 nt, Artificial Sequence
  Description of Artificial Sequence: Synthetic oligonucleotide
  Antisense strand to SEQ ID NO: 1285470
acuaagagcaaauuuauac

SEQ ID NO: 1285472 - RNA, 19 nt, Artificial Sequence
  Description of Artificial Sequence: Synthetic oligonucleotide
  Sense strand starting at position 2601 of SEQ ID NO: 1241606
auuugcucuuagugaauua

SEQ ID NO: 1285473 - RNA, 19 nt, Artificial Sequence
  Description of Artificial Sequence: Synthetic oligonucleotide
  Antisense strand to SEQ ID NO: 1285472
uaauucacuaagagcaaau

SEQ ID NO: 1285474 - RNA, 19 nt, Artificial Sequence
  Description of Artificial Sequence: Synthetic oligonucleotide
  Sense strand starting at position 2611 of SEQ ID NO: 1241606
agugaauuacaagagcuuu

SEQ ID NO: 1285475 - RNA, 19 nt, Artificial Sequence
  Description of Artificial Sequence: Synthetic oligonucleotide
  Antisense strand to SEQ ID NO: 1285474
aaagcucuuguaauucacu

SEQ ID NO: 1285476 - RNA, 19 nt, Artificial Sequence
  Description of Artificial Sequence: Synthetic oligonucleotide
  Sense strand starting at position 2701 of SEQ ID NO: 1241606
gcuauaccucgcugcacau

SEQ ID NO: 1285477 - RNA, 19 nt, Artificial Sequence
  Description of Artificial Sequence: Synthetic oligonucleotide
  Antisense strand to SEQ ID NO: 1285476
augugcagcgagguauagc

SEQ ID NO: 1285478 - RNA, 19 nt, Artificial Sequence
  Description of Artificial Sequence: Synthetic oligonucleotide
  Sense strand starting at position 2714 of SEQ ID NO: 1241606
gcacaugauucccaaguca

SEQ ID NO: 1285479 - RNA, 19 nt, Artificial Sequence
  Description of Artificial Sequence: Synthetic oligonucleotide
  Antisense strand to SEQ ID NO: 1285478
ugacuugggaaucaugugc

SEQ ID NO: 1285480 - RNA, 19 nt, Artificial Sequence
  Description of Artificial Sequence: Synthetic oligonucleotide
  Sense strand starting at position 2728 of SEQ ID NO: 1241606
agucaugaaucguuguugu

SEQ ID NO: 1285481 - RNA, 19 nt, Artificial Sequence
  Description of Artificial Sequence: Synthetic oligonucleotide
  Antisense strand to SEQ ID NO: 1285480
acaacaacgauucaugacu

SEQ ID NO: 1285482 - RNA, 19 nt, Artificial Sequence
  Description of Artificial Sequence: Synthetic oligonucleotide
  Sense strand starting at position 2738 of SEQ ID NO: 1241606
cguuguuguucguucuuua

SEQ ID NO: 1285483 - RNA, 19 nt, Artificial Sequence
  Description of Artificial Sequence: Synthetic oligonucleotide
  Antisense strand to SEQ ID NO: 1285482
uaaagaacgaacaacaacg

SEQ ID NO: 1285484 - RNA, 19 nt, Artificial Sequence
  Description of Artificial Sequence: Synthetic oligonucleotide
  Sense strand starting at position 2739 of SEQ ID NO: 1241606
guuguuguucguucuuuau

SEQ ID NO: 1285485 - RNA, 19 nt, Artificial Sequence
  Description of Artificial Sequence: Synthetic oligonucleotide
  Antisense strand to SEQ ID NO: 1285484
auaaagaacgaacaacaac

SEQ ID NO: 1285486 - RNA, 19 nt, Artificial Sequence
  Description of Artificial Sequence: Synthetic oligonucleotide
  Sense strand starting at position 2741 of SEQ ID NO: 1241606
uguuguucguucuuuauac

SEQ ID NO: 1285487 - RNA, 19 nt, Artificial Sequence
  Description of Artificial Sequence: Synthetic oligonucleotide
  Antisense strand to SEQ ID NO: 1285486
guauaaagaacgaacaaca

SEQ ID NO: 1285488 - RNA, 19 nt, Artificial Sequence
  Description of Artificial Sequence: Synthetic oligonucleotide
  Sense strand starting at position 2817 of SEQ ID NO: 1241606
uugucaacuucuguaaucu

SEQ ID NO: 1285489 - RNA, 19 nt, Artificial Sequence
  Description of Artificial Sequence: Synthetic oligonucleotide
  Antisense strand to SEQ ID NO: 1285488
agauuacagaaguugacaa

SEQ ID NO: 1285490 - RNA, 19 nt, Artificial Sequence
  Description of Artificial Sequence: Synthetic oligonucleotide
  Sense strand starting at position 2818 of SEQ ID NO: 1241606
ugucaacuucuguaaucuu

SEQ ID NO: 1285491 - RNA, 19 nt, Artificial Sequence
  Description of Artificial Sequence: Synthetic oligonucleotide
  Antisense strand to SEQ ID NO: 1285490
aagauuacagaaguugaca

SEQ ID NO: 1285492 - RNA, 19 nt, Artificial Sequence
  Description of Artificial Sequence: Synthetic oligonucleotide
  Sense strand starting at position 3205 of SEQ ID NO: 1241606
agugcagugccgcgaucua

SEQ ID NO: 1285493 - RNA, 19 nt, Artificial Sequence
  Description of Artificial Sequence: Synthetic oligonucleotide
  Antisense strand to SEQ ID NO: 1285492
uagaucgcggcacugcacu

SEQ ID NO: 1285494 - RNA, 19 nt, Artificial Sequence
  Description of Artificial Sequence: Synthetic oligonucleotide
  Sense strand starting at position 3510 of SEQ ID NO: 1241606
aucuuaaagcucuggaaca

SEQ ID NO: 1285495 - RNA, 19 nt, Artificial Sequence
  Description of Artificial Sequence: Synthetic oligonucleotide
  Antisense strand to SEQ ID NO: 1285494
uguuccagagcuuuaagau

SEQ ID NO: 1285496 - RNA, 19 nt, Artificial Sequence
  Description of Artificial Sequence: Synthetic oligonucleotide
  Sense strand starting at position 3511 of SEQ ID NO: 1241606
ucuuaaagcucuggaacaa

SEQ ID NO: 1285497 - RNA, 19 nt, Artificial Sequence
  Description of Artificial Sequence: Synthetic oligonucleotide
  Antisense strand to SEQ ID NO: 1285496
uuguuccagagcuuuaaga

SEQ ID NO: 1285498 - RNA, 19 nt, Artificial Sequence
  Description of Artificial Sequence: Synthetic oligonucleotide
  Sense strand starting at position 3615 of SEQ ID NO: 1241606
ugaugcuguuacugagaca

SEQ ID NO: 1285499 - RNA, 19 nt, Artificial Sequence
  Description of Artificial Sequence: Synthetic oligonucleotide
  Antisense strand to SEQ ID NO: 1285498
ugucucaguaacagcauca

SEQ ID NO: 1285500 - RNA, 19 nt, Artificial Sequence
  Description of Artificial Sequence: Synthetic oligonucleotide
  Sense strand starting at position 3618 of SEQ ID NO: 1241606
ugcuguuacugagacauau

SEQ ID NO: 1285501 - RNA, 19 nt, Artificial Sequence
  Description of Artificial Sequence: Synthetic oligonucleotide
  Antisense strand to SEQ ID NO: 1285500
auaugucucaguaacagca

SEQ ID NO: 1285502 - RNA, 19 nt, Artificial Sequence
  Description of Artificial Sequence: Synthetic oligonucleotide
  Sense strand starting at position 3641 of SEQ ID NO: 1241606
uguccugcuuaagauacaa

SEQ ID NO: 1285503 - RNA, 19 nt, Artificial Sequence
  Description of Artificial Sequence: Synthetic oligonucleotide
  Antisense strand to SEQ ID NO: 1285502
uuguaucuuaagcaggaca

SEQ ID NO: 1285504 - RNA, 19 nt, Artificial Sequence
  Description of Artificial Sequence: Synthetic oligonucleotide
  Sense strand starting at position 3654 of SEQ ID NO: 1241606
auacaaguuuccuuguuua

SEQ ID NO: 1285505 - RNA, 19 nt, Artificial Sequence
  Description of Artificial Sequence: Synthetic oligonucleotide
  Antisense strand to SEQ ID NO: 1285504
uaaacaaggaaacuuguau

SEQ ID NO: 1285506 - RNA, 19 nt, Artificial Sequence
  Description of Artificial Sequence: Synthetic oligonucleotide
  Sense strand starting at position 3689 of SEQ ID NO: 1241606
aguguacacucauaacucu

SEQ ID NO: 1285507 - RNA, 19 nt, Artificial Sequence
  Description of Artificial Sequence: Synthetic oligonucleotide
  Antisense strand to SEQ ID NO: 1285506
agaguuaugaguguacacu

SEQ ID NO: 1285508 - RNA, 19 nt, Artificial Sequence
  Description of Artificial Sequence: Synthetic oligonucleotide
  Sense strand starting at position 211 of SEQ ID NO: 1241607
uaguaaucuguuugcagca

SEQ ID NO: 1285509 - RNA, 19 nt, Artificial Sequence
  Description of Artificial Sequence: Synthetic oligonucleotide
  Antisense strand to SEQ ID NO: 1285508
ugcugcaaacagauuacua

SEQ ID NO: 1285510 - RNA, 19 nt, Artificial Sequence
  Description of Artificial Sequence: Synthetic oligonucleotide
  Sense strand starting at position 265 of SEQ ID NO: 1241607
gugacauuaagcuguagga

SEQ ID NO: 1285511 - RNA, 19 nt, Artificial Sequence
  Description of Artificial Sequence: Synthetic oligonucleotide
  Antisense strand to SEQ ID NO: 1285510
uccuacagcuuaaugucac

SEQ ID NO: 1285512 - RNA, 19 nt, Artificial Sequence
  Description of Artificial Sequence: Synthetic oligonucleotide
  Sense strand starting at position 267 of SEQ ID NO: 1241607
gacauuaagcuguaggagu

SEQ ID NO: 1285513 - RNA, 19 nt, Artificial Sequence
  Description of Artificial Sequence: Synthetic oligonucleotide
  Antisense strand to SEQ ID NO: 1285512
acuccuacagcuuaauguc

SEQ ID NO: 1285514 - RNA, 19 nt, Artificial Sequence
  Description of Artificial Sequence: Synthetic oligonucleotide
  Sense strand starting at position 269 of SEQ ID NO: 1241607
cauuaagcuguaggaguau

SEQ ID NO: 1285515 - RNA, 19 nt, Artificial Sequence
  Description of Artificial Sequence: Synthetic oligonucleotide
  Antisense strand to SEQ ID NO: 1285514
auacuccuacagcuuaaug

SEQ ID NO: 1285516 - RNA, 19 nt, Artificial Sequence
  Description of Artificial Sequence: Synthetic oligonucleotide
  Sense strand starting at position 278 of SEQ ID NO: 1241607
guaggaguauugggaauag

SEQ ID NO: 1285517 - RNA, 19 nt, Artificial Sequence
  Description of Artificial Sequence: Synthetic oligonucleotide
  Antisense strand to SEQ ID NO: 1285516
cuauucccaauacuccuac

SEQ ID NO: 1285518 - RNA, 19 nt, Artificial Sequence
  Description of Artificial Sequence: Synthetic oligonucleotide
  Sense strand starting at position 409 of SEQ ID NO: 1241607
gggaaaccgucugaucaga

SEQ ID NO: 1285519 - RNA, 19 nt, Artificial Sequence
  Description of Artificial Sequence: Synthetic oligonucleotide
  Antisense strand to SEQ ID NO: 1285518
ucugaucagacgguuuccc

SEQ ID NO: 1285520 - RNA, 19 nt, Artificial Sequence
  Description of Artificial Sequence: Synthetic oligonucleotide
  Sense strand starting at position 411 of SEQ ID NO: 1241607
gaaaccgucugaucagauu

SEQ ID NO: 1285521 - RNA, 19 nt, Artificial Sequence
  Description of Artificial Sequence: Synthetic oligonucleotide
  Antisense strand to SEQ ID NO: 1285520
aaucugaucagacgguuuc

SEQ ID NO: 1285522 - RNA, 19 nt, Artificial Sequence
  Description of Artificial Sequence: Synthetic oligonucleotide
  Sense strand starting at position 423 of SEQ ID NO: 1241607
ucagauuggcccugaguag

SEQ ID NO: 1285523 - RNA, 19 nt, Artificial Sequence
  Description of Artificial Sequence: Synthetic oligonucleotide
  Antisense strand to SEQ ID NO: 1285522
cuacucagggccaaucuga

SEQ ID NO: 1285524 - RNA, 19 nt, Artificial Sequence
  Description of Artificial Sequence: Synthetic oligonucleotide
  Sense strand starting at position 430 of SEQ ID NO: 1241607
ggcccugaguagguaagua

SEQ ID NO: 1285525 - RNA, 19 nt, Artificial Sequence
  Description of Artificial Sequence: Synthetic oligonucleotide
  Antisense strand to SEQ ID NO: 1285524
uacuuaccuacucagggcc

SEQ ID NO: 1285526 - RNA, 19 nt, Artificial Sequence
  Description of Artificial Sequence: Synthetic oligonucleotide
  Sense strand starting at position 492 of SEQ ID NO: 1241607
caccaucuccugugggaga

SEQ ID NO: 1285527 - RNA, 19 nt, Artificial Sequence
  Description of Artificial Sequence: Synthetic oligonucleotide
  Antisense strand to SEQ ID NO: 1285526
ucucccacaggagauggug

SEQ ID NO: 1285528 - RNA, 19 nt, Artificial Sequence
  Description of Artificial Sequence: Synthetic oligonucleotide
  Sense strand starting at position 503 of SEQ ID NO: 1241607
gugggagagagcuguggua

SEQ ID NO: 1285529 - RNA, 19 nt, Artificial Sequence
  Description of Artificial Sequence: Synthetic oligonucleotide
  Antisense strand to SEQ ID NO: 1285528
uaccacagcucucucccac

SEQ ID NO: 1285530 - RNA, 19 nt, Artificial Sequence
  Description of Artificial Sequence: Synthetic oligonucleotide
  Sense strand starting at position 607 of SEQ ID NO: 1241607
agcccuaccugagggauau

SEQ ID NO: 1285531 - RNA, 19 nt, Artificial Sequence
  Description of Artificial Sequence: Synthetic oligonucleotide
  Antisense strand to SEQ ID NO: 1285530
auaucccucagguagggcu

SEQ ID NO: 1285532 - RNA, 19 nt, Artificial Sequence
  Description of Artificial Sequence: Synthetic oligonucleotide
  Sense strand starting at position 744 of SEQ ID NO: 1241607
gaauguaggccgugaagga

SEQ ID NO: 1285533 - RNA, 19 nt, Artificial Sequence
  Description of Artificial Sequence: Synthetic oligonucleotide
  Antisense strand to SEQ ID NO: 1285532
uccuucacggccuacauuc

SEQ ID NO: 1285534 - RNA, 19 nt, Artificial Sequence
  Description of Artificial Sequence: Synthetic oligonucleotide
  Sense strand starting at position 976 of SEQ ID NO: 1241607
cagccuuacccacgaggua

SEQ ID NO: 1285535 - RNA, 19 nt, Artificial Sequence
  Description of Artificial Sequence: Synthetic oligonucleotide
  Antisense strand to SEQ ID NO: 1285534
uaccucguggguaaggcug

SEQ ID NO: 1285536 - RNA, 19 nt, Artificial Sequence
  Description of Artificial Sequence: Synthetic oligonucleotide
  Sense strand starting at position 2051 of SEQ ID NO: 1241607
cgccaaguauccuggcaac

SEQ ID NO: 1285537 - RNA, 19 nt, Artificial Sequence
  Description of Artificial Sequence: Synthetic oligonucleotide
  Antisense strand to SEQ ID NO: 1285536
guugccaggauacuuggcg

SEQ ID NO: 1285538 - RNA, 19 nt, Artificial Sequence
  Description of Artificial Sequence: Synthetic oligonucleotide
  Sense strand starting at position 2123 of SEQ ID NO: 1241607
ggguccauugugagguguu

SEQ ID NO: 1285539 - RNA, 19 nt, Artificial Sequence
  Description of Artificial Sequence: Synthetic oligonucleotide
  Antisense strand to SEQ ID NO: 1285538
aacaccucacaauggaccc

SEQ ID NO: 1285540 - RNA, 19 nt, Artificial Sequence
  Description of Artificial Sequence: Synthetic oligonucleotide
  Sense strand starting at position 2156 of SEQ ID NO: 1241607
ccgguucucgccucuagua

SEQ ID NO: 1285541 - RNA, 19 nt, Artificial Sequence
  Description of Artificial Sequence: Synthetic oligonucleotide
  Antisense strand to SEQ ID NO: 1285540
uacuagaggcgagaaccgg

SEQ ID NO: 1285542 - RNA, 19 nt, Artificial Sequence
  Description of Artificial Sequence: Synthetic oligonucleotide
  Sense strand starting at position 2157 of SEQ ID NO: 1241607
cgguucucgccucuaguaa

SEQ ID NO: 1285543 - RNA, 19 nt, Artificial Sequence
  Description of Artificial Sequence: Synthetic oligonucleotide
  Antisense strand to SEQ ID NO: 1285542
uuacuagaggcgagaaccg

SEQ ID NO: 1285544 - RNA, 19 nt, Artificial Sequence
  Description of Artificial Sequence: Synthetic oligonucleotide
  Sense strand starting at position 2385 of SEQ ID NO: 1241607
ccgacuuuguuuccaacua

SEQ ID NO: 1285545 - RNA, 19 nt, Artificial Sequence
  Description of Artificial Sequence: Synthetic oligonucleotide
  Antisense strand to SEQ ID NO: 1285544
uaguuggaaacaaagucgg

SEQ ID NO: 1285546 - RNA, 19 nt, Artificial Sequence
  Description of Artificial Sequence: Synthetic oligonucleotide
  Sense strand starting at position 2426 of SEQ ID NO: 1241607
gaagaaagaugugagauga

SEQ ID NO: 1285547 - RNA, 19 nt, Artificial Sequence
  Description of Artificial Sequence: Synthetic oligonucleotide
  Antisense strand to SEQ ID NO: 1285546
ucaucucacaucuuucuuc

SEQ ID NO: 1285548 - RNA, 19 nt, Artificial Sequence
  Description of Artificial Sequence: Synthetic oligonucleotide
  Sense strand starting at position 2749 of SEQ ID NO: 1241607
gugagaugauggccuugga

SEQ ID NO: 1285549 - RNA, 19 nt, Artificial Sequence
  Description of Artificial Sequence: Synthetic oligonucleotide
  Antisense strand to SEQ ID NO: 1285548
uccaaggccaucaucucac

SEQ ID NO: 1285550 - RNA, 19 nt, Artificial Sequence
  Description of Artificial Sequence: Synthetic oligonucleotide
  Sense strand starting at position 2874 of SEQ ID NO: 1241607
gauggaggcucucacuguu

SEQ ID NO: 1285551 - RNA, 19 nt, Artificial Sequence
  Description of Artificial Sequence: Synthetic oligonucleotide
  Antisense strand to SEQ ID NO: 1285550
aacagugagagccuccauc

SEQ ID NO: 1285552 - RNA, 19 nt, Artificial Sequence
  Description of Artificial Sequence: Synthetic oligonucleotide
  Sense strand starting at position 2912 of SEQ ID NO: 1241607
ggcgcuaucucggcaaucu

SEQ ID NO: 1285553 - RNA, 19 nt, Artificial Sequence
  Description of Artificial Sequence: Synthetic oligonucleotide
  Antisense strand to SEQ ID NO: 1285552
agauugccgagauagcgcc

SEQ ID NO: 1285554 - RNA, 19 nt, Artificial Sequence
  Description of Artificial Sequence: Synthetic oligonucleotide
  Sense strand starting at position 3387 of SEQ ID NO: 1241607
agaagucaaucuuacacga

SEQ ID NO: 1285555 - RNA, 19 nt, Artificial Sequence
  Description of Artificial Sequence: Synthetic oligonucleotide
  Antisense strand to SEQ ID NO: 1285554
ucguguaagauugacuucu

SEQ ID NO: 1285556 - RNA, 19 nt, Artificial Sequence
  Description of Artificial Sequence: Synthetic oligonucleotide
  Sense strand starting at position 3492 of SEQ ID NO: 1241607
caguguucucccggcugaa

SEQ ID NO: 1285557 - RNA, 19 nt, Artificial Sequence
  Description of Artificial Sequence: Synthetic oligonucleotide
  Antisense strand to SEQ ID NO: 1285556
uucagccgggagaacacug

SEQ ID NO: 1285558 - RNA, 19 nt, Artificial Sequence
  Description of Artificial Sequence: Synthetic oligonucleotide
  Sense strand starting at position 3495 of SEQ ID NO: 1241607
uguucucccggcugaaaua

SEQ ID NO: 1285559 - RNA, 19 nt, Artificial Sequence
  Description of Artificial Sequence: Synthetic oligonucleotide
  Antisense strand to SEQ ID NO: 1285558
uauuucagccgggagaaca

SEQ ID NO: 1285560 - RNA, 19 nt, Artificial Sequence
  Description of Artificial Sequence: Synthetic oligonucleotide
  Sense strand starting at position 3592 of SEQ ID NO: 1241607
gagguacaguuguaauaau

SEQ ID NO: 1285561 - RNA, 19 nt, Artificial Sequence
  Description of Artificial Sequence: Synthetic oligonucleotide
  Antisense strand to SEQ ID NO: 1285560
auuauuacaacuguaccuc

SEQ ID NO: 1285562 - RNA, 19 nt, Artificial Sequence
  Description of Artificial Sequence: Synthetic oligonucleotide
  Sense strand starting at position 3644 of SEQ ID NO: 1241607
gccauuucuuuggccuaga

SEQ ID NO: 1285563 - RNA, 19 nt, Artificial Sequence
  Description of Artificial Sequence: Synthetic oligonucleotide
  Antisense strand to SEQ ID NO: 1285562
ucuaggccaaagaaauggc

SEQ ID NO: 1285564 - RNA, 19 nt, Artificial Sequence
  Description of Artificial Sequence: Synthetic oligonucleotide
  Sense strand starting at position 3686 of SEQ ID NO: 1241607
agagcaugcuucuuccuga

SEQ ID NO: 1285565 - RNA, 19 nt, Artificial Sequence
  Description of Artificial Sequence: Synthetic oligonucleotide
  Antisense strand to SEQ ID NO: 1285564
ucaggaagaagcaugcucu

SEQ ID NO: 1285566 - RNA, 19 nt, Artificial Sequence
  Description of Artificial Sequence: Synthetic oligonucleotide
  Sense strand starting at position 3689 of SEQ ID NO: 1241607
gcaugcuucuuccugagac

SEQ ID NO: 1285567 - RNA, 19 nt, Artificial Sequence
  Description of Artificial Sequence: Synthetic oligonucleotide
  Antisense strand to SEQ ID NO: 1285566
gucucaggaagaagcaugc

SEQ ID NO: 1285568 - RNA, 19 nt, Artificial Sequence
  Description of Artificial Sequence: Synthetic oligonucleotide
  Sense strand starting at position 3691 of SEQ ID NO: 1241607
augcuucuuccugagacuu

SEQ ID NO: 1285569 - RNA, 19 nt, Artificial Sequence
  Description of Artificial Sequence: Synthetic oligonucleotide
  Antisense strand to SEQ ID NO: 1285568
aagucucaggaagaagcau

SEQ ID NO: 1285570 - RNA, 19 nt, Artificial Sequence
  Description of Artificial Sequence: Synthetic oligonucleotide
  Sense strand starting at position 3693 of SEQ ID NO: 1241607
gcuucuuccugagacuuau

SEQ ID NO: 1285571 - RNA, 19 nt, Artificial Sequence
  Description of Artificial Sequence: Synthetic oligonucleotide
  Antisense strand to SEQ ID NO: 1285570
auaagucucaggaagaagc

SEQ ID NO: 1285572 - RNA, 19 nt, Artificial Sequence
  Description of Artificial Sequence: Synthetic oligonucleotide
  Sense strand starting at position 579 of SEQ ID NO: 1241608
ggaagcuaugagugggaua

SEQ ID NO: 1285573 - RNA, 19 nt, Artificial Sequence
  Description of Artificial Sequence: Synthetic oligonucleotide
  Antisense strand to SEQ ID NO: 1285572
uaucccacucauagcuucc

SEQ ID NO: 1285574 - RNA, 19 nt, Artificial Sequence
  Description of Artificial Sequence: Synthetic oligonucleotide
  Sense strand starting at position 580 of SEQ ID NO: 1241608
gaagcuaugagugggauau

SEQ ID NO: 1285575 - RNA, 19 nt, Artificial Sequence
  Description of Artificial Sequence: Synthetic oligonucleotide
  Antisense strand to SEQ ID NO: 1285574
auaucccacucauagcuuc

SEQ ID NO: 1285576 - RNA, 19 nt, Artificial Sequence
  Description of Artificial Sequence: Synthetic oligonucleotide
  Sense strand starting at position 581 of SEQ ID NO: 1241608
aagcuaugagugggauaug

SEQ ID NO: 1285577 - RNA, 19 nt, Artificial Sequence
  Description of Artificial Sequence: Synthetic oligonucleotide
  Antisense strand to SEQ ID NO: 1285576
cauaucccacucauagcuu

SEQ ID NO: 1285578 - RNA, 19 nt, Artificial Sequence
  Description of Artificial Sequence: Synthetic oligonucleotide
  Sense strand starting at position 586 of SEQ ID NO: 1241608
augagugggauaugcucaa

SEQ ID NO: 1285579 - RNA, 19 nt, Artificial Sequence
  Description of Artificial Sequence: Synthetic oligonucleotide
  Antisense strand to SEQ ID NO: 1285578
uugagcauaucccacucau

SEQ ID NO: 1285580 - RNA, 19 nt, Artificial Sequence
  Description of Artificial Sequence: Synthetic oligonucleotide
  Sense strand starting at position 590 of SEQ ID NO: 1241608
gugggauaugcucaaccau

SEQ ID NO: 1285581 - RNA, 19 nt, Artificial Sequence
  Description of Artificial Sequence: Synthetic oligonucleotide
  Antisense strand to SEQ ID NO: 1285580
augguugagcauaucccac

SEQ ID NO: 1285582 - RNA, 19 nt, Artificial Sequence
  Description of Artificial Sequence: Synthetic oligonucleotide
  Sense strand starting at position 738 of SEQ ID NO: 1241608
uggaguugacaugauagcu

SEQ ID NO: 1285583 - RNA, 19 nt, Artificial Sequence
  Description of Artificial Sequence: Synthetic oligonucleotide
  Antisense strand to SEQ ID NO: 1285582
agcuaucaugucaacucca

SEQ ID NO: 1285584 - RNA, 19 nt, Artificial Sequence
  Description of Artificial Sequence: Synthetic oligonucleotide
  Sense strand starting at position 1035 of SEQ ID NO: 1241608
guagguauagcagaguaaa

SEQ ID NO: 1285585 - RNA, 19 nt, Artificial Sequence
  Description of Artificial Sequence: Synthetic oligonucleotide
  Antisense strand to SEQ ID NO: 1285584
uuuacucugcuauaccuac

SEQ ID NO: 1285586 - RNA, 19 nt, Artificial Sequence
  Description of Artificial Sequence: Synthetic oligonucleotide
  Sense strand starting at position 1064 of SEQ ID NO: 1241608
gugagcuucuuccuaggaa

SEQ ID NO: 1285587 - RNA, 19 nt, Artificial Sequence
  Description of Artificial Sequence: Synthetic oligonucleotide
  Antisense strand to SEQ ID NO: 1285586
uuccuaggaagaagcucac

SEQ ID NO: 1285588 - RNA, 19 nt, Artificial Sequence
  Description of Artificial Sequence: Synthetic oligonucleotide
  Sense strand starting at position 1204 of SEQ ID NO: 1241608
cgugguuggaugugagaau

SEQ ID NO: 1285589 - RNA, 19 nt, Artificial Sequence
  Description of Artificial Sequence: Synthetic oligonucleotide
  Antisense strand to SEQ ID NO: 1285588
auucucacauccaaccacg

SEQ ID NO: 1285590 - RNA, 19 nt, Artificial Sequence
  Description of Artificial Sequence: Synthetic oligonucleotide
  Sense strand starting at position 1215 of SEQ ID NO: 1241608
gugagaauccugcaucccu

SEQ ID NO: 1285591 - RNA, 19 nt, Artificial Sequence
  Description of Artificial Sequence: Synthetic oligonucleotide
  Antisense strand to SEQ ID NO: 1285590
agggaugcaggauucucac

SEQ ID NO: 1285592 - RNA, 19 nt, Artificial Sequence
  Description of Artificial Sequence: Synthetic oligonucleotide
  Sense strand starting at position 1263 of SEQ ID NO: 1241608
guguucauagagcaguaga

SEQ ID NO: 1285593 - RNA, 19 nt, Artificial Sequence
  Description of Artificial Sequence: Synthetic oligonucleotide
  Antisense strand to SEQ ID NO: 1285592
ucuacugcucuaugaacac

SEQ ID NO: 1285594 - RNA, 19 nt, Artificial Sequence
  Description of Artificial Sequence: Synthetic oligonucleotide
  Sense strand starting at position 2206 of SEQ ID NO: 1241608
cagagcuugguugaguuau

SEQ ID NO: 1285595 - RNA, 19 nt, Artificial Sequence
  Description of Artificial Sequence: Synthetic oligonucleotide
  Antisense strand to SEQ ID NO: 1285594
auaacucaaccaagcucug

SEQ ID NO: 1285596 - RNA, 19 nt, Artificial Sequence
  Description of Artificial Sequence: Synthetic oligonucleotide
  Sense strand starting at position 2208 of SEQ ID NO: 1241608
gagcuugguugaguuauga

SEQ ID NO: 1285597 - RNA, 19 nt, Artificial Sequence
  Description of Artificial Sequence: Synthetic oligonucleotide
  Antisense strand to SEQ ID NO: 1285596
ucauaacucaaccaagcuc

SEQ ID NO: 1285598 - RNA, 19 nt, Artificial Sequence
  Description of Artificial Sequence: Synthetic oligonucleotide
  Sense strand starting at position 2348 of SEQ ID NO: 1241608
cgcaucauuugucuuugua

SEQ ID NO: 1285599 - RNA, 19 nt, Artificial Sequence
  Description of Artificial Sequence: Synthetic oligonucleotide
  Antisense strand to SEQ ID NO: 1285598
uacaaagacaaaugaugcg

SEQ ID NO: 1285600 - RNA, 19 nt, Artificial Sequence
  Description of Artificial Sequence: Synthetic oligonucleotide
  Sense strand starting at position 2356 of SEQ ID NO: 1241608
uugucuuuguauuuccaga

SEQ ID NO: 1285601 - RNA, 19 nt, Artificial Sequence
  Description of Artificial Sequence: Synthetic oligonucleotide
  Antisense strand to SEQ ID NO: 1285600
ucuggaaauacaaagacaa

SEQ ID NO: 1285602 - RNA, 19 nt, Artificial Sequence
  Description of Artificial Sequence: Synthetic oligonucleotide
  Sense strand starting at position 2533 of SEQ ID NO: 1241608
ugccucuucugggcuaaga

SEQ ID NO: 1285603 - RNA, 19 nt, Artificial Sequence
  Description of Artificial Sequence: Synthetic oligonucleotide
  Antisense strand to SEQ ID NO: 1285602
ucuuagcccagaagaggca

SEQ ID NO: 1285604 - RNA, 19 nt, Artificial Sequence
  Description of Artificial Sequence: Synthetic oligonucleotide
  Sense strand starting at position 2592 of SEQ ID NO: 1241608
ggcucugaggaaggaaauu

SEQ ID NO: 1285605 - RNA, 19 nt, Artificial Sequence
  Description of Artificial Sequence: Synthetic oligonucleotide
  Antisense strand to SEQ ID NO: 1285604
aauuuccuuccucagagcc

SEQ ID NO: 1285606 - RNA, 19 nt, Artificial Sequence
  Description of Artificial Sequence: Synthetic oligonucleotide
  Sense strand starting at position 2740 of SEQ ID NO: 1241608
gugagacaaagcuagcuau

SEQ ID NO: 1285607 - RNA, 19 nt, Artificial Sequence
  Description of Artificial Sequence: Synthetic oligonucleotide
  Antisense strand to SEQ ID NO: 1285606
auagcuagcuuugucucac

SEQ ID NO: 1285608 - RNA, 19 nt, Artificial Sequence
  Description of Artificial Sequence: Synthetic oligonucleotide
  Sense strand starting at position 2862 of SEQ ID NO: 1241608
ggccuucugggcuaugcaa

SEQ ID NO: 1285609 - RNA, 19 nt, Artificial Sequence
  Description of Artificial Sequence: Synthetic oligonucleotide
  Antisense strand to SEQ ID NO: 1285608
uugcauagcccagaaggcc

SEQ ID NO: 1285610 - RNA, 19 nt, Artificial Sequence
  Description of Artificial Sequence: Synthetic oligonucleotide
  Sense strand starting at position 3209 of SEQ ID NO: 1241608
acaucuuuccagugccaag

SEQ ID NO: 1285611 - RNA, 19 nt, Artificial Sequence
  Description of Artificial Sequence: Synthetic oligonucleotide
  Antisense strand to SEQ ID NO: 1285610
cuuggcacuggaaagaugu

SEQ ID NO: 1285612 - RNA, 19 nt, Artificial Sequence
  Description of Artificial Sequence: Synthetic oligonucleotide
  Sense strand starting at position 3278 of SEQ ID NO: 1241608
ugucuccuauuauugggaa

SEQ ID NO: 1285613 - RNA, 19 nt, Artificial Sequence
  Description of Artificial Sequence: Synthetic oligonucleotide
  Antisense strand to SEQ ID NO: 1285612
uucccaauaauaggagaca

SEQ ID NO: 1285614 - RNA, 19 nt, Artificial Sequence
  Description of Artificial Sequence: Synthetic oligonucleotide
  Sense strand starting at position 3292 of SEQ ID NO: 1241608
gggaacagucuauauugcu

SEQ ID NO: 1285615 - RNA, 19 nt, Artificial Sequence
  Description of Artificial Sequence: Synthetic oligonucleotide
  Antisense strand to SEQ ID NO: 1285614
agcaauauagacuguuccc

SEQ ID NO: 1285616 - RNA, 19 nt, Artificial Sequence
  Description of Artificial Sequence: Synthetic oligonucleotide
  Sense strand starting at position 3301 of SEQ ID NO: 1241608
cuauauugcuauccucagu

SEQ ID NO: 1285617 - RNA, 19 nt, Artificial Sequence
  Description of Artificial Sequence: Synthetic oligonucleotide
  Antisense strand to SEQ ID NO: 1285616
acugaggauagcaauauag

SEQ ID NO: 1285618 - RNA, 19 nt, Artificial Sequence
  Description of Artificial Sequence: Synthetic oligonucleotide
  Sense strand starting at position 3304 of SEQ ID NO: 1241608
uauugcuauccucagugga

SEQ ID NO: 1285619 - RNA, 19 nt, Artificial Sequence
  Description of Artificial Sequence: Synthetic oligonucleotide
  Antisense strand to SEQ ID NO: 1285618
uccacugaggauagcaaua

SEQ ID NO: 1285620 - RNA, 19 nt, Artificial Sequence
  Description of Artificial Sequence: Synthetic oligonucleotide
  Sense strand starting at position 3306 of SEQ ID NO: 1241608
uugcuauccucaguggacu

SEQ ID NO: 1285621 - RNA, 19 nt, Artificial Sequence
  Description of Artificial Sequence: Synthetic oligonucleotide
  Antisense strand to SEQ ID NO: 1285620
aguccacugaggauagcaa

SEQ ID NO: 1285622 - RNA, 19 nt, Artificial Sequence
  Description of Artificial Sequence: Synthetic oligonucleotide
  Sense strand starting at position 3462 of SEQ ID NO: 1241608
gcuuuacucacuggguaga

SEQ ID NO: 1285623 - RNA, 19 nt, Artificial Sequence
  Description of Artificial Sequence: Synthetic oligonucleotide
  Antisense strand to SEQ ID NO: 1285622
ucuacccagugaguaaagc

SEQ ID NO: 1285624 - RNA, 19 nt, Artificial Sequence
  Description of Artificial Sequence: Synthetic oligonucleotide
  Sense strand starting at position 3463 of SEQ ID NO: 1241608
cuuuacucacuggguagau

SEQ ID NO: 1285625 - RNA, 19 nt, Artificial Sequence
  Description of Artificial Sequence: Synthetic oligonucleotide
  Antisense strand to SEQ ID NO: 1285624
aucuacccagugaguaaag

SEQ ID NO: 1285626 - RNA, 19 nt, Artificial Sequence
  Description of Artificial Sequence: Synthetic oligonucleotide
  Sense strand starting at position 3464 of SEQ ID NO: 1241608
uuuacucacuggguagauu

SEQ ID NO: 1285627 - RNA, 19 nt, Artificial Sequence
  Description of Artificial Sequence: Synthetic oligonucleotide
  Antisense strand to SEQ ID NO: 1285626
aaucuacccagugaguaaa

SEQ ID NO: 1285628 - RNA, 19 nt, Artificial Sequence
  Description of Artificial Sequence: Synthetic oligonucleotide
  Sense strand starting at position 3543 of SEQ ID NO: 1241608
uaacguguccauguguguu

SEQ ID NO: 1285629 - RNA, 19 nt, Artificial Sequence
  Description of Artificial Sequence: Synthetic oligonucleotide
  Antisense strand to SEQ ID NO: 1285628
aacacacauggacacguua

SEQ ID NO: 1285630 - RNA, 19 nt, Artificial Sequence
  Description of Artificial Sequence: Synthetic oligonucleotide
  Sense strand starting at position 3562 of SEQ ID NO: 1241608
ccuguacuaguagauuaga

SEQ ID NO: 1285631 - RNA, 19 nt, Artificial Sequence
  Description of Artificial Sequence: Synthetic oligonucleotide
  Antisense strand to SEQ ID NO: 1285630
ucuaaucuacuaguacagg

SEQ ID NO: 1285632 - RNA, 19 nt, Artificial Sequence
  Description of Artificial Sequence: Synthetic oligonucleotide
  Sense strand starting at position 3607 of SEQ ID NO: 1241608
cuuguagucagggaggcaa

SEQ ID NO: 1285633 - RNA, 19 nt, Artificial Sequence
  Description of Artificial Sequence: Synthetic oligonucleotide
  Antisense strand to SEQ ID NO: 1285632
uugccucccugacuacaag

SEQ ID NO: 1285634 - RNA, 19 nt, Artificial Sequence
  Description of Artificial Sequence: Synthetic oligonucleotide
  Sense strand starting at position 3670 of SEQ ID NO: 1241608
uuauaaguggucuaagguc

SEQ ID NO: 1285635 - RNA, 19 nt, Artificial Sequence
  Description of Artificial Sequence: Synthetic oligonucleotide
  Antisense strand to SEQ ID NO: 1285634
gaccuuagaccacuuauaa

SEQ ID NO: 1285636 - RNA, 19 nt, Artificial Sequence
  Description of Artificial Sequence: Synthetic oligonucleotide
  Sense strand starting at position 3758 of SEQ ID NO: 1241608
agccauugguuucugugaa

SEQ ID NO: 1285637 - RNA, 19 nt, Artificial Sequence
  Description of Artificial Sequence: Synthetic oligonucleotide
  Antisense strand to SEQ ID NO: 1285636
uucacagaaaccaauggcu

SEQ ID NO: 1285638 - RNA, 19 nt, Artificial Sequence
  Description of Artificial Sequence: Synthetic oligonucleotide
  Sense strand starting at position 3765 of SEQ ID NO: 1241608
gguuucugugaaugauccu

SEQ ID NO: 1285639 - RNA, 19 nt, Artificial Sequence
  Description of Artificial Sequence: Synthetic oligonucleotide
  Antisense strand to SEQ ID NO: 1285638
aggaucauucacagaaacc

SEQ ID NO: 1285640 - RNA, 19 nt, Artificial Sequence
  Description of Artificial Sequence: Synthetic oligonucleotide
  Sense strand starting at position 3771 of SEQ ID NO: 1241608
ugugaaugauccucaguua

SEQ ID NO: 1285641 - RNA, 19 nt, Artificial Sequence
  Description of Artificial Sequence: Synthetic oligonucleotide
  Antisense strand to SEQ ID NO: 1285640
uaacugaggaucauucaca

SEQ ID NO: 1285642 - RNA, 19 nt, Artificial Sequence
  Description of Artificial Sequence: Synthetic oligonucleotide
  Sense strand starting at position 3772 of SEQ ID NO: 1241608
gugaaugauccucaguuau

SEQ ID NO: 1285643 - RNA, 19 nt, Artificial Sequence
  Description of Artificial Sequence: Synthetic oligonucleotide
  Antisense strand to SEQ ID NO: 1285642
auaacugaggaucauucac

SEQ ID NO: 1285644 - RNA, 19 nt, Artificial Sequence
  Description of Artificial Sequence: Synthetic oligonucleotide
  Sense strand starting at position 3774 of SEQ ID NO: 1241608
gaaugauccucaguuaugc

SEQ ID NO: 1285645 - RNA, 19 nt, Artificial Sequence
  Description of Artificial Sequence: Synthetic oligonucleotide
  Antisense strand to SEQ ID NO: 1285644
gcauaacugaggaucauuc

SEQ ID NO: 1285646 - RNA, 19 nt, Artificial Sequence
  Description of Artificial Sequence: Synthetic oligonucleotide
  Sense strand starting at position 3779 of SEQ ID NO: 1241608
auccucaguuaugcagaaa

SEQ ID NO: 1285647 - RNA, 19 nt, Artificial Sequence
  Description of Artificial Sequence: Synthetic oligonucleotide
  Antisense strand to SEQ ID NO: 1285646
uuucugcauaacugaggau

SEQ ID NO: 1285648 - RNA, 19 nt, Artificial Sequence
  Description of Artificial Sequence: Synthetic oligonucleotide
  Sense strand starting at position 3808 of SEQ ID NO: 1241608
ugcagauaugcugaagaca

SEQ ID NO: 1285649 - RNA, 19 nt, Artificial Sequence
  Description of Artificial Sequence: Synthetic oligonucleotide
  Antisense strand to SEQ ID NO: 1285648
ugucuucagcauaucugca

SEQ ID NO: 1285650 - RNA, 19 nt, Artificial Sequence
  Description of Artificial Sequence: Synthetic oligonucleotide
  Sense strand starting at position 3817 of SEQ ID NO: 1241608
gcugaagacaaguguaaca

SEQ ID NO: 1285651 - RNA, 19 nt, Artificial Sequence
  Description of Artificial Sequence: Synthetic oligonucleotide
  Antisense strand to SEQ ID NO: 1285650
uguuacacuugucuucagc

SEQ ID NO: 1285652 - RNA, 19 nt, Artificial Sequence
  Description of Artificial Sequence: Synthetic oligonucleotide
  Sense strand starting at position 90 of SEQ ID NO: 1241609
aauuaaucccgguauugag

SEQ ID NO: 1285653 - RNA, 19 nt, Artificial Sequence
  Description of Artificial Sequence: Synthetic oligonucleotide
  Antisense strand to SEQ ID NO: 1285652
cucaauaccgggauuaauu

SEQ ID NO: 1285654 - RNA, 19 nt, Artificial Sequence
  Description of Artificial Sequence: Synthetic oligonucleotide
  Sense strand starting at position 102 of SEQ ID NO: 1241609
uauugagaucucugacagc

SEQ ID NO: 1285655 - RNA, 19 nt, Artificial Sequence
  Description of Artificial Sequence: Synthetic oligonucleotide
  Antisense strand to SEQ ID NO: 1285654
gcugucagagaucucaaua

SEQ ID NO: 1285656 - RNA, 19 nt, Artificial Sequence
  Description of Artificial Sequence: Synthetic oligonucleotide
  Sense strand starting at position 202 of SEQ ID NO: 1241609
ucagcaauuccuggcaaag

SEQ ID NO: 1285657 - RNA, 19 nt, Artificial Sequence
  Description of Artificial Sequence: Synthetic oligonucleotide
  Antisense strand to SEQ ID NO: 1285656
cuuugccaggaauugcuga

SEQ ID NO: 1285658 - RNA, 19 nt, Artificial Sequence
  Description of Artificial Sequence: Synthetic oligonucleotide
  Sense strand starting at position 249 of SEQ ID NO: 1241609
gggagaagaugagagacau

SEQ ID NO: 1285659 - RNA, 19 nt, Artificial Sequence
  Description of Artificial Sequence: Synthetic oligonucleotide
  Antisense strand to SEQ ID NO: 1285658
augucucucaucuucuccc

SEQ ID NO: 1285660 - RNA, 19 nt, Artificial Sequence
  Description of Artificial Sequence: Synthetic oligonucleotide
  Sense strand starting at position 336 of SEQ ID NO: 1241609
uggcaaauuguccacagua

SEQ ID NO: 1285661 - RNA, 19 nt, Artificial Sequence
  Description of Artificial Sequence: Synthetic oligonucleotide
  Antisense strand to SEQ ID NO: 1285660
uacuguggacaauuugcca

SEQ ID NO: 1285662 - RNA, 19 nt, Artificial Sequence
  Description of Artificial Sequence: Synthetic oligonucleotide
  Sense strand starting at position 338 of SEQ ID NO: 1241609
gcaaauuguccacaguaac

SEQ ID NO: 1285663 - RNA, 19 nt, Artificial Sequence
  Description of Artificial Sequence: Synthetic oligonucleotide
  Antisense strand to SEQ ID NO: 1285662
guuacuguggacaauuugc

SEQ ID NO: 1285664 - RNA, 19 nt, Artificial Sequence
  Description of Artificial Sequence: Synthetic oligonucleotide
  Sense strand starting at position 368 of SEQ ID NO: 1241609
uuucuuucucaagaaacgu

SEQ ID NO: 1285665 - RNA, 19 nt, Artificial Sequence
  Description of Artificial Sequence: Synthetic oligonucleotide
  Antisense strand to SEQ ID NO: 1285664
acguuucuugagaaagaaa

SEQ ID NO: 1285666 - RNA, 19 nt, Artificial Sequence
  Description of Artificial Sequence: Synthetic oligonucleotide
  Sense strand starting at position 376 of SEQ ID NO: 1241609
ucaagaaacgucuacuuac

SEQ ID NO: 1285667 - RNA, 19 nt, Artificial Sequence
  Description of Artificial Sequence: Synthetic oligonucleotide
  Antisense strand to SEQ ID NO: 1285666
guaaguagacguuucuuga

SEQ ID NO: 1285668 - RNA, 19 nt, Artificial Sequence
  Description of Artificial Sequence: Synthetic oligonucleotide
  Sense strand starting at position 404 of SEQ ID NO: 1241609
aucuauguugcagaucuua

SEQ ID NO: 1285669 - RNA, 19 nt, Artificial Sequence
  Description of Artificial Sequence: Synthetic oligonucleotide
  Antisense strand to SEQ ID NO: 1285668
uaagaucugcaacauagau

SEQ ID NO: 1285670 - RNA, 19 nt, Artificial Sequence
  Description of Artificial Sequence: Synthetic oligonucleotide
  Sense strand starting at position 415 of SEQ ID NO: 1241609
agaucuuauucugcaaguc

SEQ ID NO: 1285671 - RNA, 19 nt, Artificial Sequence
  Description of Artificial Sequence: Synthetic oligonucleotide
  Antisense strand to SEQ ID NO: 1285670
gacuugcagaauaagaucu

SEQ ID NO: 1285672 - RNA, 19 nt, Artificial Sequence
  Description of Artificial Sequence: Synthetic oligonucleotide
  Sense strand starting at position 582 of SEQ ID NO: 1241609
agugaauguuaacugaaau

SEQ ID NO: 1285673 - RNA, 19 nt, Artificial Sequence
  Description of Artificial Sequence: Synthetic oligonucleotide
  Antisense strand to SEQ ID NO: 1285672
auuucaguuaacauucacu

SEQ ID NO: 1285674 - RNA, 19 nt, Artificial Sequence
  Description of Artificial Sequence: Synthetic oligonucleotide
  Sense strand starting at position 699 of SEQ ID NO: 1241609
agcugacauuuauagaacu

SEQ ID NO: 1285675 - RNA, 19 nt, Artificial Sequence
  Description of Artificial Sequence: Synthetic oligonucleotide
  Antisense strand to SEQ ID NO: 1285674
aguucuauaaaugucagcu

SEQ ID NO: 1285676 - RNA, 19 nt, Artificial Sequence
  Description of Artificial Sequence: Synthetic oligonucleotide
  Sense strand starting at position 775 of SEQ ID NO: 1241609
uaguuuauggugcaugaga

SEQ ID NO: 1285677 - RNA, 19 nt, Artificial Sequence
  Description of Artificial Sequence: Synthetic oligonucleotide
  Antisense strand to SEQ ID NO: 1285676
ucucaugcaccauaaacua

SEQ ID NO: 1285678 - RNA, 19 nt, Artificial Sequence
  Description of Artificial Sequence: Synthetic oligonucleotide
  Sense strand starting at position 791 of SEQ ID NO: 1241609
agaucauauuuacaggaca

SEQ ID NO: 1285679 - RNA, 19 nt, Artificial Sequence
  Description of Artificial Sequence: Synthetic oligonucleotide
  Antisense strand to SEQ ID NO: 1285678
uguccuguaaauaugaucu

SEQ ID NO: 1285680 - RNA, 19 nt, Artificial Sequence
  Description of Artificial Sequence: Synthetic oligonucleotide
  Sense strand starting at position 812 of SEQ ID NO: 1241609
uuagcuuaagagugguaca

SEQ ID NO: 1285681 - RNA, 19 nt, Artificial Sequence
  Description of Artificial Sequence: Synthetic oligonucleotide
  Antisense strand to SEQ ID NO: 1285680
uguaccacucuuaagcuaa

SEQ ID NO: 1285682 - RNA, 19 nt, Artificial Sequence
  Description of Artificial Sequence: Synthetic oligonucleotide
  Sense strand starting at position 864 of SEQ ID NO: 1241609
augcgagauuuggcuugca

SEQ ID NO: 1285683 - RNA, 19 nt, Artificial Sequence
  Description of Artificial Sequence: Synthetic oligonucleotide
  Antisense strand to SEQ ID NO: 1285682
ugcaagccaaaucucgcau

SEQ ID NO: 1285684 - RNA, 19 nt, Artificial Sequence
  Description of Artificial Sequence: Synthetic oligonucleotide
  Sense strand starting at position 895 of SEQ ID NO: 1241609
ucaagagucucaccaaaug

SEQ ID NO: 1285685 - RNA, 19 nt, Artificial Sequence
  Description of Artificial Sequence: Synthetic oligonucleotide
  Antisense strand to SEQ ID NO: 1285684
cauuuggugagacucuuga

SEQ ID NO: 1285686 - RNA, 19 nt, Artificial Sequence
  Description of Artificial Sequence: Synthetic oligonucleotide
  Sense strand starting at position 1074 of SEQ ID NO: 1241609
ccguguugucaacacauuu

SEQ ID NO: 1285687 - RNA, 19 nt, Artificial Sequence
  Description of Artificial Sequence: Synthetic oligonucleotide
  Antisense strand to SEQ ID NO: 1285686
aaauguguugacaacacgg

SEQ ID NO: 1285688 - RNA, 19 nt, Artificial Sequence
  Description of Artificial Sequence: Synthetic oligonucleotide
  Sense strand starting at position 1225 of SEQ ID NO: 1241609
aagaaaguccaguggaagu

SEQ ID NO: 1285689 - RNA, 19 nt, Artificial Sequence
  Description of Artificial Sequence: Synthetic oligonucleotide
  Antisense strand to SEQ ID NO: 1285688
acuuccacuggacuuucuu

SEQ ID NO: 1285690 - RNA, 19 nt, Artificial Sequence
  Description of Artificial Sequence: Synthetic oligonucleotide
  Sense strand starting at position 1227 of SEQ ID NO: 1241609
gaaaguccaguggaaguuu

SEQ ID NO: 1285691 - RNA, 19 nt, Artificial Sequence
  Description of Artificial Sequence: Synthetic oligonucleotide
  Antisense strand to SEQ ID NO: 1285690
aaacuuccacuggacuuuc

SEQ ID NO: 1285692 - RNA, 19 nt, Artificial Sequence
  Description of Artificial Sequence: Synthetic oligonucleotide
  Sense strand starting at position 1281 of SEQ ID NO: 1241609
gguuguuaaagguauugau

SEQ ID NO: 1285693 - RNA, 19 nt, Artificial Sequence
  Description of Artificial Sequence: Synthetic oligonucleotide
  Antisense strand to SEQ ID NO: 1285692
aucaauaccuuuaacaacc

SEQ ID NO: 1285694 - RNA, 19 nt, Artificial Sequence
  Description of Artificial Sequence: Synthetic oligonucleotide
  Sense strand starting at position 1733 of SEQ ID NO: 1241609
uaaugaacgccugauuaga

SEQ ID NO: 1285695 - RNA, 19 nt, Artificial Sequence
  Description of Artificial Sequence: Synthetic oligonucleotide
  Antisense strand to SEQ ID NO: 1285694
ucuaaucaggcguucauua

SEQ ID NO: 1285696 - RNA, 19 nt, Artificial Sequence
  Description of Artificial Sequence: Synthetic oligonucleotide
  Sense strand starting at position 3000 of SEQ ID NO: 1241609
cggcgucaagguucucuua

SEQ ID NO: 1285697 - RNA, 19 nt, Artificial Sequence
  Description of Artificial Sequence: Synthetic oligonucleotide
  Antisense strand to SEQ ID NO: 1285696
uaagagaaccuugacgccg

SEQ ID NO: 1285698 - RNA, 19 nt, Artificial Sequence
  Description of Artificial Sequence: Synthetic oligonucleotide
  Sense strand starting at position 3169 of SEQ ID NO: 1241609
acacgcugcauuuggaaua

SEQ ID NO: 1285699 - RNA, 19 nt, Artificial Sequence
  Description of Artificial Sequence: Synthetic oligonucleotide
  Antisense strand to SEQ ID NO: 1285698
uauuccaaaugcagcgugu

SEQ ID NO: 1285700 - RNA, 19 nt, Artificial Sequence
  Description of Artificial Sequence: Synthetic oligonucleotide
  Sense strand starting at position 3379 of SEQ ID NO: 1241609
ggacaagaucacuagugcu

SEQ ID NO: 1285701 - RNA, 19 nt, Artificial Sequence
  Description of Artificial Sequence: Synthetic oligonucleotide
  Antisense strand to SEQ ID NO: 1285700
agcacuagugaucuugucc

SEQ ID NO: 1285702 - RNA, 19 nt, Artificial Sequence
  Description of Artificial Sequence: Synthetic oligonucleotide
  Sense strand starting at position 3399 of SEQ ID NO: 1241609
gacgguaaccgugggauuu

SEQ ID NO: 1285703 - RNA, 19 nt, Artificial Sequence
  Description of Artificial Sequence: Synthetic oligonucleotide
  Antisense strand to SEQ ID NO: 1285702
aaaucccacgguuaccguc

SEQ ID NO: 1285704 - RNA, 19 nt, Artificial Sequence
  Description of Artificial Sequence: Synthetic oligonucleotide
  Sense strand starting at position 3409 of SEQ ID NO: 1241609
gugggauuugugugcaaua

SEQ ID NO: 1285705 - RNA, 19 nt, Artificial Sequence
  Description of Artificial Sequence: Synthetic oligonucleotide
  Antisense strand to SEQ ID NO: 1285704
uauugcacacaaaucccac

SEQ ID NO: 1285706 - RNA, 19 nt, Artificial Sequence
  Description of Artificial Sequence: Synthetic oligonucleotide
  Sense strand starting at position 3462 of SEQ ID NO: 1241609
uuaguccugaauuguagua

SEQ ID NO: 1285707 - RNA, 19 nt, Artificial Sequence
  Description of Artificial Sequence: Synthetic oligonucleotide
  Antisense strand to SEQ ID NO: 1285706
uacuacaauucaggacuaa

SEQ ID NO: 1285708 - RNA, 19 nt, Artificial Sequence
  Description of Artificial Sequence: Synthetic oligonucleotide
  Sense strand starting at position 3474 of SEQ ID NO: 1241609
uguaguaugucaccagaaa

SEQ ID NO: 1285709 - RNA, 19 nt, Artificial Sequence
  Description of Artificial Sequence: Synthetic oligonucleotide
  Antisense strand to SEQ ID NO: 1285708
uuucuggugacauacuaca

SEQ ID NO: 1285710 - RNA, 19 nt, Artificial Sequence
  Description of Artificial Sequence: Synthetic oligonucleotide
  Sense strand starting at position 3519 of SEQ ID NO: 1241609
ccuaaaugccuuuaacgau

SEQ ID NO: 1285711 - RNA, 19 nt, Artificial Sequence
  Description of Artificial Sequence: Synthetic oligonucleotide
  Antisense strand to SEQ ID NO: 1285710
aucguuaaaggcauuuagg

SEQ ID NO: 1285712 - RNA, 19 nt, Artificial Sequence
  Description of Artificial Sequence: Synthetic oligonucleotide
  Sense strand starting at position 3525 of SEQ ID NO: 1241609
ugccuuuaacgauggauga

SEQ ID NO: 1285713 - RNA, 19 nt, Artificial Sequence
  Description of Artificial Sequence: Synthetic oligonucleotide
  Antisense strand to SEQ ID NO: 1285712
ucauccaucguuaaaggca

SEQ ID NO: 1285714 - RNA, 19 nt, Artificial Sequence
  Description of Artificial Sequence: Synthetic oligonucleotide
  Sense strand starting at position 3581 of SEQ ID NO: 1241609
aguaaagucuccuucccaa

SEQ ID NO: 1285715 - RNA, 19 nt, Artificial Sequence
  Description of Artificial Sequence: Synthetic oligonucleotide
  Antisense strand to SEQ ID NO: 1285714
uugggaaggagacuuuacu

SEQ ID NO: 1285716 - RNA, 19 nt, Artificial Sequence
  Description of Artificial Sequence: Synthetic oligonucleotide
  Sense strand starting at position 3612 of SEQ ID NO: 1241609
cccgccauucuacauugau

SEQ ID NO: 1285717 - RNA, 19 nt, Artificial Sequence
  Description of Artificial Sequence: Synthetic oligonucleotide
  Antisense strand to SEQ ID NO: 1285716
aucaauguagaauggcggg

SEQ ID NO: 1285718 - RNA, 19 nt, Artificial Sequence
  Description of Artificial Sequence: Synthetic oligonucleotide
  Sense strand starting at position 3626 of SEQ ID NO: 1241609
uugauuaauggauguauuc

SEQ ID NO: 1285719 - RNA, 19 nt, Artificial Sequence
  Description of Artificial Sequence: Synthetic oligonucleotide
  Antisense strand to SEQ ID NO: 1285718
gaauacauccauuaaucaa

SEQ ID NO: 1285720 - RNA, 19 nt, Artificial Sequence
  Description of Artificial Sequence: Synthetic oligonucleotide
  Sense strand starting at position 3742 of SEQ ID NO: 1241609
cuucacgucgaaugggaua

SEQ ID NO: 1285721 - RNA, 19 nt, Artificial Sequence
  Description of Artificial Sequence: Synthetic oligonucleotide
  Antisense strand to SEQ ID NO: 1285720
uaucccauucgacgugaag

SEQ ID NO: 1285722 - RNA, 19 nt, Artificial Sequence
  Description of Artificial Sequence: Synthetic oligonucleotide
  Sense strand starting at position 3747 of SEQ ID NO: 1241609
cgucgaaugggauaacaca

SEQ ID NO: 1285723 - RNA, 19 nt, Artificial Sequence
  Description of Artificial Sequence: Synthetic oligonucleotide
  Antisense strand to SEQ ID NO: 1285722
uguguuaucccauucgacg

SEQ ID NO: 1285724 - RNA, 19 nt, Artificial Sequence
  Description of Artificial Sequence: Synthetic oligonucleotide
  Sense strand starting at position 3777 of SEQ ID NO: 1241609
guguguuaugguaggcuua

SEQ ID NO: 1285725 - RNA, 19 nt, Artificial Sequence
  Description of Artificial Sequence: Synthetic oligonucleotide
  Antisense strand to SEQ ID NO: 1285724
uaagccuaccauaacacac

SEQ ID NO: 1285726 - RNA, 19 nt, Artificial Sequence
  Description of Artificial Sequence: Synthetic oligonucleotide
  Sense strand starting at position 3883 of SEQ ID NO: 1241609
gucccaguuguuuauuaaa

SEQ ID NO: 1285727 - RNA, 19 nt, Artificial Sequence
  Description of Artificial Sequence: Synthetic oligonucleotide
  Antisense strand to SEQ ID NO: 1285726
uuuaauaaacaacugggac

SEQ ID NO: 1285728 - RNA, 19 nt, Artificial Sequence
  Description of Artificial Sequence: Synthetic oligonucleotide
  Sense strand starting at position 3930 of SEQ ID NO: 1241609
ggcucaauacuuggcucaa

SEQ ID NO: 1285729 - RNA, 19 nt, Artificial Sequence
  Description of Artificial Sequence: Synthetic oligonucleotide
  Antisense strand to SEQ ID NO: 1285728
uugagccaaguauugagcc

SEQ ID NO: 1285730 - RNA, 19 nt, Artificial Sequence
  Description of Artificial Sequence: Synthetic oligonucleotide
  Sense strand starting at position 3931 of SEQ ID NO: 1241609
gcucaauacuuggcucaag

SEQ ID NO: 1285731 - RNA, 19 nt, Artificial Sequence
  Description of Artificial Sequence: Synthetic oligonucleotide
  Antisense strand to SEQ ID NO: 1285730
cuugagccaaguauugagc

SEQ ID NO: 1285732 - RNA, 19 nt, Artificial Sequence
  Description of Artificial Sequence: Synthetic oligonucleotide
  Sense strand starting at position 105 of SEQ ID NO: 1241610
ccguguugucaacacauuu

SEQ ID NO: 1285733 - RNA, 19 nt, Artificial Sequence
  Description of Artificial Sequence: Synthetic oligonucleotide
  Antisense strand to SEQ ID NO: 1285732
aaauguguugacaacacgg

SEQ ID NO: 1285734 - RNA, 19 nt, Artificial Sequence
  Description of Artificial Sequence: Synthetic oligonucleotide
  Sense strand starting at position 256 of SEQ ID NO: 1241610
aagaaaguccaguggaagu

SEQ ID NO: 1285735 - RNA, 19 nt, Artificial Sequence
  Description of Artificial Sequence: Synthetic oligonucleotide
  Antisense strand to SEQ ID NO: 1285734
acuuccacuggacuuucuu

SEQ ID NO: 1285736 - RNA, 19 nt, Artificial Sequence
  Description of Artificial Sequence: Synthetic oligonucleotide
  Sense strand starting at position 258 of SEQ ID NO: 1241610
gaaaguccaguggaaguuu

SEQ ID NO: 1285737 - RNA, 19 nt, Artificial Sequence
  Description of Artificial Sequence: Synthetic oligonucleotide
  Antisense strand to SEQ ID NO: 1285736
aaacuuccacuggacuuuc

SEQ ID NO: 1285738 - RNA, 19 nt, Artificial Sequence
  Description of Artificial Sequence: Synthetic oligonucleotide
  Sense strand starting at position 312 of SEQ ID NO: 1241610
gguuguuaaagguauugau

SEQ ID NO: 1285739 - RNA, 19 nt, Artificial Sequence
  Description of Artificial Sequence: Synthetic oligonucleotide
  Antisense strand to SEQ ID NO: 1285738
aucaauaccuuuaacaacc

SEQ ID NO: 1285740 - RNA, 19 nt, Artificial Sequence
  Description of Artificial Sequence: Synthetic oligonucleotide
  Sense strand starting at position 764 of SEQ ID NO: 1241610
uaaugaacgccugauuaga

SEQ ID NO: 1285741 - RNA, 19 nt, Artificial Sequence
  Description of Artificial Sequence: Synthetic oligonucleotide
  Antisense strand to SEQ ID NO: 1285740
ucuaaucaggcguucauua

SEQ ID NO: 1285742 - RNA, 19 nt, Artificial Sequence
  Description of Artificial Sequence: Synthetic oligonucleotide
  Sense strand starting at position 2031 of SEQ ID NO: 1241610
cggcgucaagguucucuua

SEQ ID NO: 1285743 - RNA, 19 nt, Artificial Sequence
  Description of Artificial Sequence: Synthetic oligonucleotide
  Antisense strand to SEQ ID NO: 1285742
uaagagaaccuugacgccg

SEQ ID NO: 1285744 - RNA, 19 nt, Artificial Sequence
  Description of Artificial Sequence: Synthetic oligonucleotide
  Sense strand starting at position 2200 of SEQ ID NO: 1241610
acacgcugcauuuggaaua

SEQ ID NO: 1285745 - RNA, 19 nt, Artificial Sequence
  Description of Artificial Sequence: Synthetic oligonucleotide
  Antisense strand to SEQ ID NO: 1285744
uauuccaaaugcagcgugu

SEQ ID NO: 1285746 - RNA, 19 nt, Artificial Sequence
  Description of Artificial Sequence: Synthetic oligonucleotide
  Sense strand starting at position 2410 of SEQ ID NO: 1241610
ggacaagaucacuagugcu

SEQ ID NO: 1285747 - RNA, 19 nt, Artificial Sequence
  Description of Artificial Sequence: Synthetic oligonucleotide
  Antisense strand to SEQ ID NO: 1285746
agcacuagugaucuugucc

SEQ ID NO: 1285748 - RNA, 19 nt, Artificial Sequence
  Description of Artificial Sequence: Synthetic oligonucleotide
  Sense strand starting at position 2430 of SEQ ID NO: 1241610
gacgguaaccgugggauuu

SEQ ID NO: 1285749 - RNA, 19 nt, Artificial Sequence
  Description of Artificial Sequence: Synthetic oligonucleotide
  Antisense strand to SEQ ID NO: 1285748
aaaucccacgguuaccguc

SEQ ID NO: 1285750 - RNA, 19 nt, Artificial Sequence
  Description of Artificial Sequence: Synthetic oligonucleotide
  Sense strand starting at position 2440 of SEQ ID NO: 1241610
gugggauuugugugcaaua

SEQ ID NO: 1285751 - RNA, 19 nt, Artificial Sequence
  Description of Artificial Sequence: Synthetic oligonucleotide
  Antisense strand to SEQ ID NO: 1285750
uauugcacacaaaucccac

SEQ ID NO: 1285752 - RNA, 19 nt, Artificial Sequence
  Description of Artificial Sequence: Synthetic oligonucleotide
  Sense strand starting at position 2493 of SEQ ID NO: 1241610
uuaguccugaauuguagua

SEQ ID NO: 1285753 - RNA, 19 nt, Artificial Sequence
  Description of Artificial Sequence: Synthetic oligonucleotide
  Antisense strand to SEQ ID NO: 1285752
uacuacaauucaggacuaa

SEQ ID NO: 1285754 - RNA, 19 nt, Artificial Sequence
  Description of Artificial Sequence: Synthetic oligonucleotide
  Sense strand starting at position 2505 of SEQ ID NO: 1241610
uguaguaugucaccagaaa

SEQ ID NO: 1285755 - RNA, 19 nt, Artificial Sequence
  Description of Artificial Sequence: Synthetic oligonucleotide
  Antisense strand to SEQ ID NO: 1285754
uuucuggugacauacuaca

SEQ ID NO: 1285756 - RNA, 19 nt, Artificial Sequence
  Description of Artificial Sequence: Synthetic oligonucleotide
  Sense strand starting at position 2550 of SEQ ID NO: 1241610
ccuaaaugccuuuaacgau

SEQ ID NO: 1285757 - RNA, 19 nt, Artificial Sequence
  Description of Artificial Sequence: Synthetic oligonucleotide
  Antisense strand to SEQ ID NO: 1285756
aucguuaaaggcauuuagg

SEQ ID NO: 1285758 - RNA, 19 nt, Artificial Sequence
  Description of Artificial Sequence: Synthetic oligonucleotide
  Sense strand starting at position 2556 of SEQ ID NO: 1241610
ugccuuuaacgauggauga

SEQ ID NO: 1285759 - RNA, 19 nt, Artificial Sequence
  Description of Artificial Sequence: Synthetic oligonucleotide
  Antisense strand to SEQ ID NO: 1285758
ucauccaucguuaaaggca

SEQ ID NO: 1285760 - RNA, 19 nt, Artificial Sequence
  Description of Artificial Sequence: Synthetic oligonucleotide
  Sense strand starting at position 2612 of SEQ ID NO: 1241610
aguaaagucuccuucccaa

SEQ ID NO: 1285761 - RNA, 19 nt, Artificial Sequence
  Description of Artificial Sequence: Synthetic oligonucleotide
  Antisense strand to SEQ ID NO: 1285760
uugggaaggagacuuuacu

SEQ ID NO: 1285762 - RNA, 19 nt, Artificial Sequence
  Description of Artificial Sequence: Synthetic oligonucleotide
  Sense strand starting at position 2643 of SEQ ID NO: 1241610
cccgccauucuacauugau

SEQ ID NO: 1285763 - RNA, 19 nt, Artificial Sequence
  Description of Artificial Sequence: Synthetic oligonucleotide
  Antisense strand to SEQ ID NO: 1285762
aucaauguagaauggcggg

SEQ ID NO: 1285764 - RNA, 19 nt, Artificial Sequence
  Description of Artificial Sequence: Synthetic oligonucleotide
  Sense strand starting at position 2657 of SEQ ID NO: 1241610
uugauuaauggauguauuc

SEQ ID NO: 1285765 - RNA, 19 nt, Artificial Sequence
  Description of Artificial Sequence: Synthetic oligonucleotide
  Antisense strand to SEQ ID NO: 1285764
gaauacauccauuaaucaa

SEQ ID NO: 1285766 - RNA, 19 nt, Artificial Sequence
  Description of Artificial Sequence: Synthetic oligonucleotide
  Sense strand starting at position 2773 of SEQ ID NO: 1241610
cuucacgucgaaugggaua

SEQ ID NO: 1285767 - RNA, 19 nt, Artificial Sequence
  Description of Artificial Sequence: Synthetic oligonucleotide
  Antisense strand to SEQ ID NO: 1285766
uaucccauucgacgugaag

SEQ ID NO: 1285768 - RNA, 19 nt, Artificial Sequence
  Description of Artificial Sequence: Synthetic oligonucleotide
  Sense strand starting at position 2778 of SEQ ID NO: 1241610
cgucgaaugggauaacaca

SEQ ID NO: 1285769 - RNA, 19 nt, Artificial Sequence
  Description of Artificial Sequence: Synthetic oligonucleotide
  Antisense strand to SEQ ID NO: 1285768
uguguuaucccauucgacg

SEQ ID NO: 1285770 - RNA, 19 nt, Artificial Sequence
  Description of Artificial Sequence: Synthetic oligonucleotide
  Sense strand starting at position 2808 of SEQ ID NO: 1241610
guguguuaugguaggcuua

SEQ ID NO: 1285771 - RNA, 19 nt, Artificial Sequence
  Description of Artificial Sequence: Synthetic oligonucleotide
  Antisense strand to SEQ ID NO: 1285770
uaagccuaccauaacacac

SEQ ID NO: 1285772 - RNA, 19 nt, Artificial Sequence
  Description of Artificial Sequence: Synthetic oligonucleotide
  Sense strand starting at position 2914 of SEQ ID NO: 1241610
gucccaguuguuuauuaaa

SEQ ID NO: 1285773 - RNA, 19 nt, Artificial Sequence
  Description of Artificial Sequence: Synthetic oligonucleotide
  Antisense strand to SEQ ID NO: 1285772
uuuaauaaacaacugggac

SEQ ID NO: 1285774 - RNA, 19 nt, Artificial Sequence
  Description of Artificial Sequence: Synthetic oligonucleotide
  Sense strand starting at position 2961 of SEQ ID NO: 1241610
ggcucaauacuuggcucaa

SEQ ID NO: 1285775 - RNA, 19 nt, Artificial Sequence
  Description of Artificial Sequence: Synthetic oligonucleotide
  Antisense strand to SEQ ID NO: 1285774
uugagccaaguauugagcc

SEQ ID NO: 1285776 - RNA, 19 nt, Artificial Sequence
  Description of Artificial Sequence: Synthetic oligonucleotide
  Sense strand starting at position 2962 of SEQ ID NO: 1241610
gcucaauacuuggcucaag

SEQ ID NO: 1285777 - RNA, 19 nt, Artificial Sequence
  Description of Artificial Sequence: Synthetic oligonucleotide
  Antisense strand to SEQ ID NO: 1285776
cuugagccaaguauugagc

SEQ ID NO: 1285778 - RNA, 19 nt, Artificial Sequence
  Description of Artificial Sequence: Synthetic oligonucleotide
  Sense strand starting at position 3017 of SEQ ID NO: 1241610
uaaagaauaggcuguacau

SEQ ID NO: 1285779 - RNA, 19 nt, Artificial Sequence
  Description of Artificial Sequence: Synthetic oligonucleotide
  Antisense strand to SEQ ID NO: 1285778
auguacagccuauucuuua

SEQ ID NO: 1285780 - RNA, 19 nt, Artificial Sequence
  Description of Artificial Sequence: Synthetic oligonucleotide
  Sense strand starting at position 3055 of SEQ ID NO: 1241610
agggaaacuuccgcuuuga

SEQ ID NO: 1285781 - RNA, 19 nt, Artificial Sequence
  Description of Artificial Sequence: Synthetic oligonucleotide
  Antisense strand to SEQ ID NO: 1285780
ucaaagcggaaguuucccu

SEQ ID NO: 1285782 - RNA, 19 nt, Artificial Sequence
  Description of Artificial Sequence: Synthetic oligonucleotide
  Sense strand starting at position 3455 of SEQ ID NO: 1241610
ggaauaauacuguggaagu

SEQ ID NO: 1285783 - RNA, 19 nt, Artificial Sequence
  Description of Artificial Sequence: Synthetic oligonucleotide
  Antisense strand to SEQ ID NO: 1285782
acuuccacaguauuauucc

SEQ ID NO: 1285784 - RNA, 19 nt, Artificial Sequence
  Description of Artificial Sequence: Synthetic oligonucleotide
  Sense strand starting at position 3501 of SEQ ID NO: 1241610
aagaaagccuuacugugua

SEQ ID NO: 1285785 - RNA, 19 nt, Artificial Sequence
  Description of Artificial Sequence: Synthetic oligonucleotide
  Antisense strand to SEQ ID NO: 1285784
uacacaguaaggcuuucuu

SEQ ID NO: 1285786 - RNA, 19 nt, Artificial Sequence
  Description of Artificial Sequence: Synthetic oligonucleotide
  Sense strand starting at position 3593 of SEQ ID NO: 1241610
uuguguauuauaugggauu

SEQ ID NO: 1285787 - RNA, 19 nt, Artificial Sequence
  Description of Artificial Sequence: Synthetic oligonucleotide
  Antisense strand to SEQ ID NO: 1285786
aaucccauauaauacacaa

SEQ ID NO: 1285788 - RNA, 19 nt, Artificial Sequence
  Description of Artificial Sequence: Synthetic oligonucleotide
  Sense strand starting at position 3613 of SEQ ID NO: 1241610
cugauauaucuauguagua

SEQ ID NO: 1285789 - RNA, 19 nt, Artificial Sequence
  Description of Artificial Sequence: Synthetic oligonucleotide
  Antisense strand to SEQ ID NO: 1285788
uacuacauagauauaucag

SEQ ID NO: 1285790 - RNA, 19 nt, Artificial Sequence
  Description of Artificial Sequence: Synthetic oligonucleotide
  Sense strand starting at position 3740 of SEQ ID NO: 1241610
uggccaagagauugguuua

SEQ ID NO: 1285791 - RNA, 19 nt, Artificial Sequence
  Description of Artificial Sequence: Synthetic oligonucleotide
  Antisense strand to SEQ ID NO: 1285790
uaaaccaaucucuuggcca

SEQ ID NO: 1285792 - RNA, 19 nt, Artificial Sequence
  Description of Artificial Sequence: Synthetic oligonucleotide
  Sense strand starting at position 3741 of SEQ ID NO: 1241610
ggccaagagauugguuuau

SEQ ID NO: 1285793 - RNA, 19 nt, Artificial Sequence
  Description of Artificial Sequence: Synthetic oligonucleotide
  Antisense strand to SEQ ID NO: 1285792
auaaaccaaucucuuggcc

SEQ ID NO: 1285794 - RNA, 19 nt, Artificial Sequence
  Description of Artificial Sequence: Synthetic oligonucleotide
  Sense strand starting at position 3743 of SEQ ID NO: 1241610
ccaagagauugguuuaugu

SEQ ID NO: 1285795 - RNA, 19 nt, Artificial Sequence
  Description of Artificial Sequence: Synthetic oligonucleotide
  Antisense strand to SEQ ID NO: 1285794
acauaaaccaaucucuugg

SEQ ID NO: 1285796 - RNA, 19 nt, Artificial Sequence
  Description of Artificial Sequence: Synthetic oligonucleotide
  Sense strand starting at position 3756 of SEQ ID NO: 1241610
uuaugugcuagggaauuga

SEQ ID NO: 1285797 - RNA, 19 nt, Artificial Sequence
  Description of Artificial Sequence: Synthetic oligonucleotide
  Antisense strand to SEQ ID NO: 1285796
ucaauucccuagcacauaa

SEQ ID NO: 1285798 - RNA, 19 nt, Artificial Sequence
  Description of Artificial Sequence: Synthetic oligonucleotide
  Sense strand starting at position 3760 of SEQ ID NO: 1241610
gugcuagggaauugagcaa

SEQ ID NO: 1285799 - RNA, 19 nt, Artificial Sequence
  Description of Artificial Sequence: Synthetic oligonucleotide
  Antisense strand to SEQ ID NO: 1285798
uugcucaauucccuagcac

SEQ ID NO: 1285800 - RNA, 19 nt, Artificial Sequence
  Description of Artificial Sequence: Synthetic oligonucleotide
  Sense strand starting at position 3808 of SEQ ID NO: 1241610
cagucaucucacugcugga

SEQ ID NO: 1285801 - RNA, 19 nt, Artificial Sequence
  Description of Artificial Sequence: Synthetic oligonucleotide
  Antisense strand to SEQ ID NO: 1285800
uccagcagugagaugacug

SEQ ID NO: 1285802 - RNA, 19 nt, Artificial Sequence
  Description of Artificial Sequence: Synthetic oligonucleotide
  Sense strand starting at position 3849 of SEQ ID NO: 1241610
aggcaagagaucuagcuau

SEQ ID NO: 1285803 - RNA, 19 nt, Artificial Sequence
  Description of Artificial Sequence: Synthetic oligonucleotide
  Antisense strand to SEQ ID NO: 1285802
auagcuagaucucuugccu

SEQ ID NO: 1285804 - RNA, 19 nt, Artificial Sequence
  Description of Artificial Sequence: Synthetic oligonucleotide
  Sense strand starting at position 3868 of SEQ ID NO: 1241610
gugccuugaaguuggagau

SEQ ID NO: 1285805 - RNA, 19 nt, Artificial Sequence
  Description of Artificial Sequence: Synthetic oligonucleotide
  Antisense strand to SEQ ID NO: 1285804
aucuccaacuucaaggcac

SEQ ID NO: 1285806 - RNA, 19 nt, Artificial Sequence
  Description of Artificial Sequence: Synthetic oligonucleotide
  Sense strand starting at position 3878 of SEQ ID NO: 1241610
guuggagaugaagguguaa

SEQ ID NO: 1285807 - RNA, 19 nt, Artificial Sequence
  Description of Artificial Sequence: Synthetic oligonucleotide
  Antisense strand to SEQ ID NO: 1285806
uuacaccuucaucuccaac

SEQ ID NO: 1285808 - RNA, 19 nt, Artificial Sequence
  Description of Artificial Sequence: Synthetic oligonucleotide
  Sense strand starting at position 3958 of SEQ ID NO: 1241610
uguguauauggugauauau

SEQ ID NO: 1285809 - RNA, 19 nt, Artificial Sequence
  Description of Artificial Sequence: Synthetic oligonucleotide
  Antisense strand to SEQ ID NO: 1285808
auauaucaccauauacaca

SEQ ID NO: 1285810 - RNA, 19 nt, Artificial Sequence
  Description of Artificial Sequence: Synthetic oligonucleotide
  Sense strand starting at position 3982 of SEQ ID NO: 1241610
agguuugucgacugagaag

SEQ ID NO: 1285811 - RNA, 19 nt, Artificial Sequence
  Description of Artificial Sequence: Synthetic oligonucleotide
  Antisense strand to SEQ ID NO: 1285810
cuucucagucgacaaaccu

SEQ ID NO: 1285812 - RNA, 19 nt, Artificial Sequence
  Description of Artificial Sequence: Synthetic oligonucleotide
  Sense strand starting at position 69 of SEQ ID NO: 1241611
agcugacauuuauagaacu

SEQ ID NO: 1285813 - RNA, 19 nt, Artificial Sequence
  Description of Artificial Sequence: Synthetic oligonucleotide
  Antisense strand to SEQ ID NO: 1285812
aguucuauaaaugucagcu

SEQ ID NO: 1285814 - RNA, 19 nt, Artificial Sequence
  Description of Artificial Sequence: Synthetic oligonucleotide
  Sense strand starting at position 145 of SEQ ID NO: 1241611
uaguuuauggugcaugaga

SEQ ID NO: 1285815 - RNA, 19 nt, Artificial Sequence
  Description of Artificial Sequence: Synthetic oligonucleotide
  Antisense strand to SEQ ID NO: 1285814
ucucaugcaccauaaacua

SEQ ID NO: 1285816 - RNA, 19 nt, Artificial Sequence
  Description of Artificial Sequence: Synthetic oligonucleotide
  Sense strand starting at position 147 of SEQ ID NO: 1241611
guuuauggugcaugagauc

SEQ ID NO: 1285817 - RNA, 19 nt, Artificial Sequence
  Description of Artificial Sequence: Synthetic oligonucleotide
  Antisense strand to SEQ ID NO: 1285816
gaucucaugcaccauaaac

SEQ ID NO: 1285818 - RNA, 19 nt, Artificial Sequence
  Description of Artificial Sequence: Synthetic oligonucleotide
  Sense strand starting at position 161 of SEQ ID NO: 1241611
agaucauauuuacaggaca

SEQ ID NO: 1285819 - RNA, 19 nt, Artificial Sequence
  Description of Artificial Sequence: Synthetic oligonucleotide
  Antisense strand to SEQ ID NO: 1285818
uguccuguaaauaugaucu

SEQ ID NO: 1285820 - RNA, 19 nt, Artificial Sequence
  Description of Artificial Sequence: Synthetic oligonucleotide
  Sense strand starting at position 182 of SEQ ID NO: 1241611
uuagcuuaagagugguaca

SEQ ID NO: 1285821 - RNA, 19 nt, Artificial Sequence
  Description of Artificial Sequence: Synthetic oligonucleotide
  Antisense strand to SEQ ID NO: 1285820
uguaccacucuuaagcuaa

SEQ ID NO: 1285822 - RNA, 19 nt, Artificial Sequence
  Description of Artificial Sequence: Synthetic oligonucleotide
  Sense strand starting at position 234 of SEQ ID NO: 1241611
augcgagauuuggcuugca

SEQ ID NO: 1285823 - RNA, 19 nt, Artificial Sequence
  Description of Artificial Sequence: Synthetic oligonucleotide
  Antisense strand to SEQ ID NO: 1285822
ugcaagccaaaucucgcau

SEQ ID NO: 1285824 - RNA, 19 nt, Artificial Sequence
  Description of Artificial Sequence: Synthetic oligonucleotide
  Sense strand starting at position 265 of SEQ ID NO: 1241611
ucaagagucucaccaaaug

SEQ ID NO: 1285825 - RNA, 19 nt, Artificial Sequence
  Description of Artificial Sequence: Synthetic oligonucleotide
  Antisense strand to SEQ ID NO: 1285824
cauuuggugagacucuuga

SEQ ID NO: 1285826 - RNA, 19 nt, Artificial Sequence
  Description of Artificial Sequence: Synthetic oligonucleotide
  Sense strand starting at position 392 of SEQ ID NO: 1241611
guucccacucuauguaauu

SEQ ID NO: 1285827 - RNA, 19 nt, Artificial Sequence
  Description of Artificial Sequence: Synthetic oligonucleotide
  Antisense strand to SEQ ID NO: 1285826
aauuacauagagugggaac

SEQ ID NO: 1285828 - RNA, 19 nt, Artificial Sequence
  Description of Artificial Sequence: Synthetic oligonucleotide
  Sense strand starting at position 444 of SEQ ID NO: 1241611
ccguguugucaacacauuu

SEQ ID NO: 1285829 - RNA, 19 nt, Artificial Sequence
  Description of Artificial Sequence: Synthetic oligonucleotide
  Antisense strand to SEQ ID NO: 1285828
aaauguguugacaacacgg

SEQ ID NO: 1285830 - RNA, 19 nt, Artificial Sequence
  Description of Artificial Sequence: Synthetic oligonucleotide
  Sense strand starting at position 595 of SEQ ID NO: 1241611
aagaaaguccaguggaagu

SEQ ID NO: 1285831 - RNA, 19 nt, Artificial Sequence
  Description of Artificial Sequence: Synthetic oligonucleotide
  Antisense strand to SEQ ID NO: 1285830
acuuccacuggacuuucuu

SEQ ID NO: 1285832 - RNA, 19 nt, Artificial Sequence
  Description of Artificial Sequence: Synthetic oligonucleotide
  Sense strand starting at position 597 of SEQ ID NO: 1241611
gaaaguccaguggaaguuu

SEQ ID NO: 1285833 - RNA, 19 nt, Artificial Sequence
  Description of Artificial Sequence: Synthetic oligonucleotide
  Antisense strand to SEQ ID NO: 1285832
aaacuuccacuggacuuuc

SEQ ID NO: 1285834 - RNA, 19 nt, Artificial Sequence
  Description of Artificial Sequence: Synthetic oligonucleotide
  Sense strand starting at position 651 of SEQ ID NO: 1241611
gguuguuaaagguauugau

SEQ ID NO: 1285835 - RNA, 19 nt, Artificial Sequence
  Description of Artificial Sequence: Synthetic oligonucleotide
  Antisense strand to SEQ ID NO: 1285834
aucaauaccuuuaacaacc

SEQ ID NO: 1285836 - RNA, 19 nt, Artificial Sequence
  Description of Artificial Sequence: Synthetic oligonucleotide
  Sense strand starting at position 1103 of SEQ ID NO: 1241611
uaaugaacgccugauuaga

SEQ ID NO: 1285837 - RNA, 19 nt, Artificial Sequence
  Description of Artificial Sequence: Synthetic oligonucleotide
  Antisense strand to SEQ ID NO: 1285836
ucuaaucaggcguucauua

SEQ ID NO: 1285838 - RNA, 19 nt, Artificial Sequence
  Description of Artificial Sequence: Synthetic oligonucleotide
  Sense strand starting at position 2370 of SEQ ID NO: 1241611
cggcgucaagguucucuua

SEQ ID NO: 1285839 - RNA, 19 nt, Artificial Sequence
  Description of Artificial Sequence: Synthetic oligonucleotide
  Antisense strand to SEQ ID NO: 1285838
uaagagaaccuugacgccg

SEQ ID NO: 1285840 - RNA, 19 nt, Artificial Sequence
  Description of Artificial Sequence: Synthetic oligonucleotide
  Sense strand starting at position 2539 of SEQ ID NO: 1241611
acacgcugcauuuggaaua

SEQ ID NO: 1285841 - RNA, 19 nt, Artificial Sequence
  Description of Artificial Sequence: Synthetic oligonucleotide
  Antisense strand to SEQ ID NO: 1285840
uauuccaaaugcagcgugu

SEQ ID NO: 1285842 - RNA, 19 nt, Artificial Sequence
  Description of Artificial Sequence: Synthetic oligonucleotide
  Sense strand starting at position 2749 of SEQ ID NO: 1241611
ggacaagaucacuagugcu

SEQ ID NO: 1285843 - RNA, 19 nt, Artificial Sequence
  Description of Artificial Sequence: Synthetic oligonucleotide
  Antisense strand to SEQ ID NO: 1285842
agcacuagugaucuugucc

SEQ ID NO: 1285844 - RNA, 19 nt, Artificial Sequence
  Description of Artificial Sequence: Synthetic oligonucleotide
  Sense strand starting at position 2768 of SEQ ID NO: 1241611
ggacgguaaccgugggauu

SEQ ID NO: 1285845 - RNA, 19 nt, Artificial Sequence
  Description of Artificial Sequence: Synthetic oligonucleotide
  Antisense strand to SEQ ID NO: 1285844
aaucccacgguuaccgucc

SEQ ID NO: 1285846 - RNA, 19 nt, Artificial Sequence
  Description of Artificial Sequence: Synthetic oligonucleotide
  Sense strand starting at position 2769 of SEQ ID NO: 1241611
gacgguaaccgugggauuu

SEQ ID NO: 1285847 - RNA, 19 nt, Artificial Sequence
  Description of Artificial Sequence: Synthetic oligonucleotide
  Antisense strand to SEQ ID NO: 1285846
aaaucccacgguuaccguc

SEQ ID NO: 1285848 - RNA, 19 nt, Artificial Sequence
  Description of Artificial Sequence: Synthetic oligonucleotide
  Sense strand starting at position 2779 of SEQ ID NO: 1241611
gugggauuugugugcaaua

SEQ ID NO: 1285849 - RNA, 19 nt, Artificial Sequence
  Description of Artificial Sequence: Synthetic oligonucleotide
  Antisense strand to SEQ ID NO: 1285848
uauugcacacaaaucccac

SEQ ID NO: 1285850 - RNA, 19 nt, Artificial Sequence
  Description of Artificial Sequence: Synthetic oligonucleotide
  Sense strand starting at position 2827 of SEQ ID NO: 1241611
gagauuuaguccugaauug

SEQ ID NO: 1285851 - RNA, 19 nt, Artificial Sequence
  Description of Artificial Sequence: Synthetic oligonucleotide
  Antisense strand to SEQ ID NO: 1285850
caauucaggacuaaaucuc

SEQ ID NO: 1285852 - RNA, 19 nt, Artificial Sequence
  Description of Artificial Sequence: Synthetic oligonucleotide
  Sense strand starting at position 2832 of SEQ ID NO: 1241611
uuaguccugaauuguagua

SEQ ID NO: 1285853 - RNA, 19 nt, Artificial Sequence
  Description of Artificial Sequence: Synthetic oligonucleotide
  Antisense strand to SEQ ID NO: 1285852
uacuacaauucaggacuaa

SEQ ID NO: 1285854 - RNA, 19 nt, Artificial Sequence
  Description of Artificial Sequence: Synthetic oligonucleotide
  Sense strand starting at position 2844 of SEQ ID NO: 1241611
uguaguaugucaccagaaa

SEQ ID NO: 1285855 - RNA, 19 nt, Artificial Sequence
  Description of Artificial Sequence: Synthetic oligonucleotide
  Antisense strand to SEQ ID NO: 1285854
uuucuggugacauacuaca

SEQ ID NO: 1285856 - RNA, 19 nt, Artificial Sequence
  Description of Artificial Sequence: Synthetic oligonucleotide
  Sense strand starting at position 2889 of SEQ ID NO: 1241611
ccuaaaugccuuuaacgau

SEQ ID NO: 1285857 - RNA, 19 nt, Artificial Sequence
  Description of Artificial Sequence: Synthetic oligonucleotide
  Antisense strand to SEQ ID NO: 1285856
aucguuaaaggcauuuagg

SEQ ID NO: 1285858 - RNA, 19 nt, Artificial Sequence
  Description of Artificial Sequence: Synthetic oligonucleotide
  Sense strand starting at position 2895 of SEQ ID NO: 1241611
ugccuuuaacgauggauga

SEQ ID NO: 1285859 - RNA, 19 nt, Artificial Sequence
  Description of Artificial Sequence: Synthetic oligonucleotide
  Antisense strand to SEQ ID NO: 1285858
ucauccaucguuaaaggca

SEQ ID NO: 1285860 - RNA, 19 nt, Artificial Sequence
  Description of Artificial Sequence: Synthetic oligonucleotide
  Sense strand starting at position 2951 of SEQ ID NO: 1241611
aguaaagucuccuucccaa

SEQ ID NO: 1285861 - RNA, 19 nt, Artificial Sequence
  Description of Artificial Sequence: Synthetic oligonucleotide
  Antisense strand to SEQ ID NO: 1285860
uugggaaggagacuuuacu

SEQ ID NO: 1285862 - RNA, 19 nt, Artificial Sequence
  Description of Artificial Sequence: Synthetic oligonucleotide
  Sense strand starting at position 2982 of SEQ ID NO: 1241611
cccgccauucuacauugau

SEQ ID NO: 1285863 - RNA, 19 nt, Artificial Sequence
  Description of Artificial Sequence: Synthetic oligonucleotide
  Antisense strand to SEQ ID NO: 1285862
aucaauguagaauggcggg

SEQ ID NO: 1285864 - RNA, 19 nt, Artificial Sequence
  Description of Artificial Sequence: Synthetic oligonucleotide
  Sense strand starting at position 2996 of SEQ ID NO: 1241611
uugauuaauggauguauuc

SEQ ID NO: 1285865 - RNA, 19 nt, Artificial Sequence
  Description of Artificial Sequence: Synthetic oligonucleotide
  Antisense strand to SEQ ID NO: 1285864
gaauacauccauuaaucaa

SEQ ID NO: 1285866 - RNA, 19 nt, Artificial Sequence
  Description of Artificial Sequence: Synthetic oligonucleotide
  Sense strand starting at position 3112 of SEQ ID NO: 1241611
cuucacgucgaaugggaua

SEQ ID NO: 1285867 - RNA, 19 nt, Artificial Sequence
  Description of Artificial Sequence: Synthetic oligonucleotide
  Antisense strand to SEQ ID NO: 1285866
uaucccauucgacgugaag

SEQ ID NO: 1285868 - RNA, 19 nt, Artificial Sequence
  Description of Artificial Sequence: Synthetic oligonucleotide
  Sense strand starting at position 3117 of SEQ ID NO: 1241611
cgucgaaugggauaacaca

SEQ ID NO: 1285869 - RNA, 19 nt, Artificial Sequence
  Description of Artificial Sequence: Synthetic oligonucleotide
  Antisense strand to SEQ ID NO: 1285868
uguguuaucccauucgacg

SEQ ID NO: 1285870 - RNA, 19 nt, Artificial Sequence
  Description of Artificial Sequence: Synthetic oligonucleotide
  Sense strand starting at position 3147 of SEQ ID NO: 1241611
guguguuaugguaggcuua

SEQ ID NO: 1285871 - RNA, 19 nt, Artificial Sequence
  Description of Artificial Sequence: Synthetic oligonucleotide
  Antisense strand to SEQ ID NO: 1285870
uaagccuaccauaacacac

SEQ ID NO: 1285872 - RNA, 19 nt, Artificial Sequence
  Description of Artificial Sequence: Synthetic oligonucleotide
  Sense strand starting at position 3253 of SEQ ID NO: 1241611
gucccaguuguuuauuaaa

SEQ ID NO: 1285873 - RNA, 19 nt, Artificial Sequence
  Description of Artificial Sequence: Synthetic oligonucleotide
  Antisense strand to SEQ ID NO: 1285872
uuuaauaaacaacugggac

SEQ ID NO: 1285874 - RNA, 19 nt, Artificial Sequence
  Description of Artificial Sequence: Synthetic oligonucleotide
  Sense strand starting at position 3300 of SEQ ID NO: 1241611
ggcucaauacuuggcucaa

SEQ ID NO: 1285875 - RNA, 19 nt, Artificial Sequence
  Description of Artificial Sequence: Synthetic oligonucleotide
  Antisense strand to SEQ ID NO: 1285874
uugagccaaguauugagcc

SEQ ID NO: 1285876 - RNA, 19 nt, Artificial Sequence
  Description of Artificial Sequence: Synthetic oligonucleotide
  Sense strand starting at position 3301 of SEQ ID NO: 1241611
gcucaauacuuggcucaag

SEQ ID NO: 1285877 - RNA, 19 nt, Artificial Sequence
  Description of Artificial Sequence: Synthetic oligonucleotide
  Antisense strand to SEQ ID NO: 1285876
cuugagccaaguauugagc

SEQ ID NO: 1285878 - RNA, 19 nt, Artificial Sequence
  Description of Artificial Sequence: Synthetic oligonucleotide
  Sense strand starting at position 3356 of SEQ ID NO: 1241611
uaaagaauaggcuguacau

SEQ ID NO: 1285879 - RNA, 19 nt, Artificial Sequence
  Description of Artificial Sequence: Synthetic oligonucleotide
  Antisense strand to SEQ ID NO: 1285878
auguacagccuauucuuua

SEQ ID NO: 1285880 - RNA, 19 nt, Artificial Sequence
  Description of Artificial Sequence: Synthetic oligonucleotide
  Sense strand starting at position 3394 of SEQ ID NO: 1241611
agggaaacuuccgcuuuga

SEQ ID NO: 1285881 - RNA, 19 nt, Artificial Sequence
  Description of Artificial Sequence: Synthetic oligonucleotide
  Antisense strand to SEQ ID NO: 1285880
ucaaagcggaaguuucccu

SEQ ID NO: 1285882 - RNA, 19 nt, Artificial Sequence
  Description of Artificial Sequence: Synthetic oligonucleotide
  Sense strand starting at position 3794 of SEQ ID NO: 1241611
ggaauaauacuguggaagu

SEQ ID NO: 1285883 - RNA, 19 nt, Artificial Sequence
  Description of Artificial Sequence: Synthetic oligonucleotide
  Antisense strand to SEQ ID NO: 1285882
acuuccacaguauuauucc

SEQ ID NO: 1285884 - RNA, 19 nt, Artificial Sequence
  Description of Artificial Sequence: Synthetic oligonucleotide
  Sense strand starting at position 3840 of SEQ ID NO: 1241611
aagaaagccuuacugugua

SEQ ID NO: 1285885 - RNA, 19 nt, Artificial Sequence
  Description of Artificial Sequence: Synthetic oligonucleotide
  Antisense strand to SEQ ID NO: 1285884
uacacaguaaggcuuucuu

SEQ ID NO: 1285886 - RNA, 19 nt, Artificial Sequence
  Description of Artificial Sequence: Synthetic oligonucleotide
  Sense strand starting at position 3852 of SEQ ID NO: 1241611
cuguguacuucucuuuaaa

SEQ ID NO: 1285887 - RNA, 19 nt, Artificial Sequence
  Description of Artificial Sequence: Synthetic oligonucleotide
  Antisense strand to SEQ ID NO: 1285886
uuuaaagagaaguacacag

SEQ ID NO: 1285888 - RNA, 19 nt, Artificial Sequence
  Description of Artificial Sequence: Synthetic oligonucleotide
  Sense strand starting at position 3932 of SEQ ID NO: 1241611
uuguguauuauaugggauu

SEQ ID NO: 1285889 - RNA, 19 nt, Artificial Sequence
  Description of Artificial Sequence: Synthetic oligonucleotide
  Antisense strand to SEQ ID NO: 1285888
aaucccauauaauacacaa

SEQ ID NO: 1285890 - RNA, 19 nt, Artificial Sequence
  Description of Artificial Sequence: Synthetic oligonucleotide
  Sense strand starting at position 3952 of SEQ ID NO: 1241611
cugauauaucuauguagua

SEQ ID NO: 1285891 - RNA, 19 nt, Artificial Sequence
  Description of Artificial Sequence: Synthetic oligonucleotide
  Antisense strand to SEQ ID NO: 1285890
uacuacauagauauaucag

SEQ ID NO: 1285892 - RNA, 19 nt, Artificial Sequence
  Description of Artificial Sequence: Synthetic oligonucleotide
  Sense strand starting at position 211 of SEQ ID NO: 1241612
gaagcagugacuuagguga

SEQ ID NO: 1285893 - RNA, 19 nt, Artificial Sequence
  Description of Artificial Sequence: Synthetic oligonucleotide
  Antisense strand to SEQ ID NO: 1285892
ucaccuaagucacugcuuc

SEQ ID NO: 1285894 - RNA, 19 nt, Artificial Sequence
  Description of Artificial Sequence: Synthetic oligonucleotide
  Sense strand starting at position 247 of SEQ ID NO: 1241612
agaagcuacuuucuauaga

SEQ ID NO: 1285895 - RNA, 19 nt, Artificial Sequence
  Description of Artificial Sequence: Synthetic oligonucleotide
  Antisense strand to SEQ ID NO: 1285894
ucuauagaaaguagcuucu

SEQ ID NO: 1285896 - RNA, 19 nt, Artificial Sequence
  Description of Artificial Sequence: Synthetic oligonucleotide
  Sense strand starting at position 388 of SEQ ID NO: 1241612
ggucucagaucucugauaa

SEQ ID NO: 1285897 - RNA, 19 nt, Artificial Sequence
  Description of Artificial Sequence: Synthetic oligonucleotide
  Antisense strand to SEQ ID NO: 1285896
uuaucagagaucugagacc

SEQ ID NO: 1285898 - RNA, 19 nt, Artificial Sequence
  Description of Artificial Sequence: Synthetic oligonucleotide
  Sense strand starting at position 389 of SEQ ID NO: 1241612
gucucagaucucugauaaa

SEQ ID NO: 1285899 - RNA, 19 nt, Artificial Sequence
  Description of Artificial Sequence: Synthetic oligonucleotide
  Antisense strand to SEQ ID NO: 1285898
uuuaucagagaucugagac

SEQ ID NO: 1285900 - RNA, 19 nt, Artificial Sequence
  Description of Artificial Sequence: Synthetic oligonucleotide
  Sense strand starting at position 441 of SEQ ID NO: 1241612
cuaccauaagcuugaagaa

SEQ ID NO: 1285901 - RNA, 19 nt, Artificial Sequence
  Description of Artificial Sequence: Synthetic oligonucleotide
  Antisense strand to SEQ ID NO: 1285900
uucuucaagcuuaugguag

SEQ ID NO: 1285902 - RNA, 19 nt, Artificial Sequence
  Description of Artificial Sequence: Synthetic oligonucleotide
  Sense strand starting at position 549 of SEQ ID NO: 1241612
ugcuaucacccagacaagu

SEQ ID NO: 1285903 - RNA, 19 nt, Artificial Sequence
  Description of Artificial Sequence: Synthetic oligonucleotide
  Antisense strand to SEQ ID NO: 1285902
acuugucugggugauagca

SEQ ID NO: 1285904 - RNA, 19 nt, Artificial Sequence
  Description of Artificial Sequence: Synthetic oligonucleotide
  Sense strand starting at position 611 of SEQ ID NO: 1241612
guaaguugugacuacaaug

SEQ ID NO: 1285905 - RNA, 19 nt, Artificial Sequence
  Description of Artificial Sequence: Synthetic oligonucleotide
  Antisense strand to SEQ ID NO: 1285904
cauuguagucacaacuuac

SEQ ID NO: 1285906 - RNA, 19 nt, Artificial Sequence
  Description of Artificial Sequence: Synthetic oligonucleotide
  Sense strand starting at position 755 of SEQ ID NO: 1241612
agauacagauugccuaaua

SEQ ID NO: 1285907 - RNA, 19 nt, Artificial Sequence
  Description of Artificial Sequence: Synthetic oligonucleotide
  Antisense strand to SEQ ID NO: 1285906
uauuaggcaaucuguaucu

SEQ ID NO: 1285908 - RNA, 19 nt, Artificial Sequence
  Description of Artificial Sequence: Synthetic oligonucleotide
  Sense strand starting at position 835 of SEQ ID NO: 1241612
guauuauagcaccaauugu

SEQ ID NO: 1285909 - RNA, 19 nt, Artificial Sequence
  Description of Artificial Sequence: Synthetic oligonucleotide
  Antisense strand to SEQ ID NO: 1285908
acaauuggugcuauaauac

SEQ ID NO: 1285910 - RNA, 19 nt, Artificial Sequence
  Description of Artificial Sequence: Synthetic oligonucleotide
  Sense strand starting at position 944 of SEQ ID NO: 1241612
ucaccauuugugugucuag

SEQ ID NO: 1285911 - RNA, 19 nt, Artificial Sequence
  Description of Artificial Sequence: Synthetic oligonucleotide
  Antisense strand to SEQ ID NO: 1285910
cuagacacacaaaugguga

SEQ ID NO: 1285912 - RNA, 19 nt, Artificial Sequence
  Description of Artificial Sequence: Synthetic oligonucleotide
  Sense strand starting at position 945 of SEQ ID NO: 1241612
caccauuugugugucuagu

SEQ ID NO: 1285913 - RNA, 19 nt, Artificial Sequence
  Description of Artificial Sequence: Synthetic oligonucleotide
  Antisense strand to SEQ ID NO: 1285912
acuagacacacaaauggug

SEQ ID NO: 1285914 - RNA, 19 nt, Artificial Sequence
  Description of Artificial Sequence: Synthetic oligonucleotide
  Sense strand starting at position 1169 of SEQ ID NO: 1241612
uuguucuaccaacagucaa

SEQ ID NO: 1285915 - RNA, 19 nt, Artificial Sequence
  Description of Artificial Sequence: Synthetic oligonucleotide
  Antisense strand to SEQ ID NO: 1285914
uugacuguugguagaacaa

SEQ ID NO: 1285916 - RNA, 19 nt, Artificial Sequence
  Description of Artificial Sequence: Synthetic oligonucleotide
  Sense strand starting at position 1984 of SEQ ID NO: 1241612
aggaaaucauggguuuccu

SEQ ID NO: 1285917 - RNA, 19 nt, Artificial Sequence
  Description of Artificial Sequence: Synthetic oligonucleotide
  Antisense strand to SEQ ID NO: 1285916
aggaaacccaugauuuccu

SEQ ID NO: 1285918 - RNA, 19 nt, Artificial Sequence
  Description of Artificial Sequence: Synthetic oligonucleotide
  Sense strand starting at position 2002 of SEQ ID NO: 1241612
ugcugaauuccauauuagg

SEQ ID NO: 1285919 - RNA, 19 nt, Artificial Sequence
  Description of Artificial Sequence: Synthetic oligonucleotide
  Antisense strand to SEQ ID NO: 1285918
ccuaauauggaauucagca

SEQ ID NO: 1285920 - RNA, 19 nt, Artificial Sequence
  Description of Artificial Sequence: Synthetic oligonucleotide
  Sense strand starting at position 2019 of SEQ ID NO: 1241612
ggaucagugggcugaggaa

SEQ ID NO: 1285921 - RNA, 19 nt, Artificial Sequence
  Description of Artificial Sequence: Synthetic oligonucleotide
  Antisense strand to SEQ ID NO: 1285920
uuccucagcccacugaucc

SEQ ID NO: 1285922 - RNA, 19 nt, Artificial Sequence
  Description of Artificial Sequence: Synthetic oligonucleotide
  Sense strand starting at position 2256 of SEQ ID NO: 1241612
aaugguuagagcgagcaga

SEQ ID NO: 1285923 - RNA, 19 nt, Artificial Sequence
  Description of Artificial Sequence: Synthetic oligonucleotide
  Antisense strand to SEQ ID NO: 1285922
ucugcucgcucuaaccauu

SEQ ID NO: 1285924 - RNA, 19 nt, Artificial Sequence
  Description of Artificial Sequence: Synthetic oligonucleotide
  Sense strand starting at position 2288 of SEQ ID NO: 1241612
gcaguccugggauaacaua

SEQ ID NO: 1285925 - RNA, 19 nt, Artificial Sequence
  Description of Artificial Sequence: Synthetic oligonucleotide
  Antisense strand to SEQ ID NO: 1285924
uauguuaucccaggacugc

SEQ ID NO: 1285926 - RNA, 19 nt, Artificial Sequence
  Description of Artificial Sequence: Synthetic oligonucleotide
  Sense strand starting at position 2378 of SEQ ID NO: 1241612
gagaaacuuuaagcgauuc

SEQ ID NO: 1285927 - RNA, 19 nt, Artificial Sequence
  Description of Artificial Sequence: Synthetic oligonucleotide
  Antisense strand to SEQ ID NO: 1285926
gaaucgcuuaaaguuucuc

SEQ ID NO: 1285928 - RNA, 19 nt, Artificial Sequence
  Description of Artificial Sequence: Synthetic oligonucleotide
  Sense strand starting at position 2457 of SEQ ID NO: 1241612
guaaguuguagguauaaua

SEQ ID NO: 1285929 - RNA, 19 nt, Artificial Sequence
  Description of Artificial Sequence: Synthetic oligonucleotide
  Antisense strand to SEQ ID NO: 1285928
uauuauaccuacaacuuac

SEQ ID NO: 1285930 - RNA, 19 nt, Artificial Sequence
  Description of Artificial Sequence: Synthetic oligonucleotide
  Sense strand starting at position 2464 of SEQ ID NO: 1241612
guagguauaauauguauga

SEQ ID NO: 1285931 - RNA, 19 nt, Artificial Sequence
  Description of Artificial Sequence: Synthetic oligonucleotide
  Antisense strand to SEQ ID NO: 1285930
ucauacauauuauaccuac

SEQ ID NO: 1285932 - RNA, 19 nt, Artificial Sequence
  Description of Artificial Sequence: Synthetic oligonucleotide
  Sense strand starting at position 2468 of SEQ ID NO: 1241612
guauaauauguaugaucag

SEQ ID NO: 1285933 - RNA, 19 nt, Artificial Sequence
  Description of Artificial Sequence: Synthetic oligonucleotide
  Antisense strand to SEQ ID NO: 1285932
cugaucauacauauuauac

SEQ ID NO: 1285934 - RNA, 19 nt, Artificial Sequence
  Description of Artificial Sequence: Synthetic oligonucleotide
  Sense strand starting at position 2471 of SEQ ID NO: 1241612
uaauauguaugaucagguu

SEQ ID NO: 1285935 - RNA, 19 nt, Artificial Sequence
  Description of Artificial Sequence: Synthetic oligonucleotide
  Antisense strand to SEQ ID NO: 1285934
aaccugaucauacauauua

SEQ ID NO: 1285936 - RNA, 19 nt, Artificial Sequence
  Description of Artificial Sequence: Synthetic oligonucleotide
  Sense strand starting at position 2498 of SEQ ID NO: 1241612
gccacaugucuggaauaug

SEQ ID NO: 1285937 - RNA, 19 nt, Artificial Sequence
  Description of Artificial Sequence: Synthetic oligonucleotide
  Antisense strand to SEQ ID NO: 1285936
cauauuccagacauguggc

SEQ ID NO: 1285938 - RNA, 19 nt, Artificial Sequence
  Description of Artificial Sequence: Synthetic oligonucleotide
  Sense strand starting at position 2501 of SEQ ID NO: 1241612
acaugucuggaauauguau

SEQ ID NO: 1285939 - RNA, 19 nt, Artificial Sequence
  Description of Artificial Sequence: Synthetic oligonucleotide
  Antisense strand to SEQ ID NO: 1285938
auacauauuccagacaugu

SEQ ID NO: 1285940 - RNA, 19 nt, Artificial Sequence
  Description of Artificial Sequence: Synthetic oligonucleotide
  Sense strand starting at position 2562 of SEQ ID NO: 1241612
caaucacaugugggauguu

SEQ ID NO: 1285941 - RNA, 19 nt, Artificial Sequence
  Description of Artificial Sequence: Synthetic oligonucleotide
  Antisense strand to SEQ ID NO: 1285940
aacaucccacaugugauug

SEQ ID NO: 1285942 - RNA, 19 nt, Artificial Sequence
  Description of Artificial Sequence: Synthetic oligonucleotide
  Sense strand starting at position 2784 of SEQ ID NO: 1241612
uuauuugucuguuugguca

SEQ ID NO: 1285943 - RNA, 19 nt, Artificial Sequence
  Description of Artificial Sequence: Synthetic oligonucleotide
  Antisense strand to SEQ ID NO: 1285942
ugaccaaacagacaaauaa

SEQ ID NO: 1285944 - RNA, 19 nt, Artificial Sequence
  Description of Artificial Sequence: Synthetic oligonucleotide
  Sense strand starting at position 2962 of SEQ ID NO: 1241612
uuauccaaauguuugagaa

SEQ ID NO: 1285945 - RNA, 19 nt, Artificial Sequence
  Description of Artificial Sequence: Synthetic oligonucleotide
  Antisense strand to SEQ ID NO: 1285944
uucucaaacauuuggauaa

SEQ ID NO: 1285946 - RNA, 19 nt, Artificial Sequence
  Description of Artificial Sequence: Synthetic oligonucleotide
  Sense strand starting at position 3140 of SEQ ID NO: 1241612
ccuauaaagggaugguguu

SEQ ID NO: 1285947 - RNA, 19 nt, Artificial Sequence
  Description of Artificial Sequence: Synthetic oligonucleotide
  Antisense strand to SEQ ID NO: 1285946
aacaccaucccuuuauagg

SEQ ID NO: 1285948 - RNA, 19 nt, Artificial Sequence
  Description of Artificial Sequence: Synthetic oligonucleotide
  Sense strand starting at position 3141 of SEQ ID NO: 1241612
cuauaaagggaugguguuu

SEQ ID NO: 1285949 - RNA, 19 nt, Artificial Sequence
  Description of Artificial Sequence: Synthetic oligonucleotide
  Antisense strand to SEQ ID NO: 1285948
aaacaccaucccuuuauag

SEQ ID NO: 1285950 - RNA, 19 nt, Artificial Sequence
  Description of Artificial Sequence: Synthetic oligonucleotide
  Sense strand starting at position 3200 of SEQ ID NO: 1241612
agaaacaaucccugaagcu

SEQ ID NO: 1285951 - RNA, 19 nt, Artificial Sequence
  Description of Artificial Sequence: Synthetic oligonucleotide
  Antisense strand to SEQ ID NO: 1285950
agcuucagggauuguuucu

SEQ ID NO: 1285952 - RNA, 19 nt, Artificial Sequence
  Description of Artificial Sequence: Synthetic oligonucleotide
  Sense strand starting at position 3279 of SEQ ID NO: 1241612
agggaucuaggccgauaga

SEQ ID NO: 1285953 - RNA, 19 nt, Artificial Sequence
  Description of Artificial Sequence: Synthetic oligonucleotide
  Antisense strand to SEQ ID NO: 1285952
ucuaucggccuagaucccu

SEQ ID NO: 1285954 - RNA, 19 nt, Artificial Sequence
  Description of Artificial Sequence: Synthetic oligonucleotide
  Sense strand starting at position 3314 of SEQ ID NO: 1241612
uauugaugaucaucauggu

SEQ ID NO: 1285955 - RNA, 19 nt, Artificial Sequence
  Description of Artificial Sequence: Synthetic oligonucleotide
  Antisense strand to SEQ ID NO: 1285954
accaugaugaucaucaaua

SEQ ID NO: 1285956 - RNA, 19 nt, Artificial Sequence
  Description of Artificial Sequence: Synthetic oligonucleotide
  Sense strand starting at position 3427 of SEQ ID NO: 1241612
ggcuuccuccuggaaguga

SEQ ID NO: 1285957 - RNA, 19 nt, Artificial Sequence
  Description of Artificial Sequence: Synthetic oligonucleotide
  Antisense strand to SEQ ID NO: 1285956
ucacuuccaggaggaagcc

SEQ ID NO: 1285958 - RNA, 19 nt, Artificial Sequence
  Description of Artificial Sequence: Synthetic oligonucleotide
  Sense strand starting at position 3452 of SEQ ID NO: 1241612
ugcuuauauuuguugguca

SEQ ID NO: 1285959 - RNA, 19 nt, Artificial Sequence
  Description of Artificial Sequence: Synthetic oligonucleotide
  Antisense strand to SEQ ID NO: 1285958
ugaccaacaaauauaagca

SEQ ID NO: 1285960 - RNA, 19 nt, Artificial Sequence
  Description of Artificial Sequence: Synthetic oligonucleotide
  Sense strand starting at position 3819 of SEQ ID NO: 1241612
agugauuggcagugacaag

SEQ ID NO: 1285961 - RNA, 19 nt, Artificial Sequence
  Description of Artificial Sequence: Synthetic oligonucleotide
  Antisense strand to SEQ ID NO: 1285960
cuugucacugccaaucacu

SEQ ID NO: 1285962 - RNA, 19 nt, Artificial Sequence
  Description of Artificial Sequence: Synthetic oligonucleotide
  Sense strand starting at position 3820 of SEQ ID NO: 1241612
gugauuggcagugacaaga

SEQ ID NO: 1285963 - RNA, 19 nt, Artificial Sequence
  Description of Artificial Sequence: Synthetic oligonucleotide
  Antisense strand to SEQ ID NO: 1285962
ucuugucacugccaaucac

SEQ ID NO: 1285964 - RNA, 19 nt, Artificial Sequence
  Description of Artificial Sequence: Synthetic oligonucleotide
  Sense strand starting at position 3871 of SEQ ID NO: 1241612
gccuaaugagcacagugau

SEQ ID NO: 1285965 - RNA, 19 nt, Artificial Sequence
  Description of Artificial Sequence: Synthetic oligonucleotide
  Antisense strand to SEQ ID NO: 1285964
aucacugugcucauuaggc

SEQ ID NO: 1285966 - RNA, 19 nt, Artificial Sequence
  Description of Artificial Sequence: Synthetic oligonucleotide
  Sense strand starting at position 3874 of SEQ ID NO: 1241612
uaaugagcacagugaugau

SEQ ID NO: 1285967 - RNA, 19 nt, Artificial Sequence
  Description of Artificial Sequence: Synthetic oligonucleotide
  Antisense strand to SEQ ID NO: 1285966
aucaucacugugcucauua

SEQ ID NO: 1285968 - RNA, 19 nt, Artificial Sequence
  Description of Artificial Sequence: Synthetic oligonucleotide
  Sense strand starting at position 3905 of SEQ ID NO: 1241612
gaauguugagaagguucuu

SEQ ID NO: 1285969 - RNA, 19 nt, Artificial Sequence
  Description of Artificial Sequence: Synthetic oligonucleotide
  Antisense strand to SEQ ID NO: 1285968
aagaaccuucucaacauuc

SEQ ID NO: 1285970 - RNA, 19 nt, Artificial Sequence
  Description of Artificial Sequence: Synthetic oligonucleotide
  Sense strand starting at position 3929 of SEQ ID NO: 1241612
gacuuugucccugagauug

SEQ ID NO: 1285971 - RNA, 19 nt, Artificial Sequence
  Description of Artificial Sequence: Synthetic oligonucleotide
  Antisense strand to SEQ ID NO: 1285970
caaucucagggacaaaguc

SEQ ID NO: 1285972 - RNA, 19 nt, Artificial Sequence
  Description of Artificial Sequence: Synthetic oligonucleotide
  Sense strand starting at position 30 of SEQ ID NO: 1241613
gcuacuuagcuaugaacuc

SEQ ID NO: 1285973 - RNA, 19 nt, Artificial Sequence
  Description of Artificial Sequence: Synthetic oligonucleotide
  Antisense strand to SEQ ID NO: 1285972
gaguucauagcuaaguagc

SEQ ID NO: 1285974 - RNA, 19 nt, Artificial Sequence
  Description of Artificial Sequence: Synthetic oligonucleotide
  Sense strand starting at position 60 of SEQ ID NO: 1241613
gaaacaauucuauguggug

SEQ ID NO: 1285975 - RNA, 19 nt, Artificial Sequence
  Description of Artificial Sequence: Synthetic oligonucleotide
  Antisense strand to SEQ ID NO: 1285974
caccacauagaauuguuuc

SEQ ID NO: 1285976 - RNA, 19 nt, Artificial Sequence
  Description of Artificial Sequence: Synthetic oligonucleotide
  Sense strand starting at position 61 of SEQ ID NO: 1241613
aaacaauucuauguggugu

SEQ ID NO: 1285977 - RNA, 19 nt, Artificial Sequence
  Description of Artificial Sequence: Synthetic oligonucleotide
  Antisense strand to SEQ ID NO: 1285976
acaccacauagaauuguuu

SEQ ID NO: 1285978 - RNA, 19 nt, Artificial Sequence
  Description of Artificial Sequence: Synthetic oligonucleotide
  Sense strand starting at position 119 of SEQ ID NO: 1241613
cgggucauuugucuaaggu

SEQ ID NO: 1285979 - RNA, 19 nt, Artificial Sequence
  Description of Artificial Sequence: Synthetic oligonucleotide
  Antisense strand to SEQ ID NO: 1285978
accuuagacaaaugacccg

SEQ ID NO: 1285980 - RNA, 19 nt, Artificial Sequence
  Description of Artificial Sequence: Synthetic oligonucleotide
  Sense strand starting at position 146 of SEQ ID NO: 1241613
uggcaaauggagggaucau

SEQ ID NO: 1285981 - RNA, 19 nt, Artificial Sequence
  Description of Artificial Sequence: Synthetic oligonucleotide
  Antisense strand to SEQ ID NO: 1285980
augaucccuccauuugcca

SEQ ID NO: 1285982 - RNA, 19 nt, Artificial Sequence
  Description of Artificial Sequence: Synthetic oligonucleotide
  Sense strand starting at position 201 of SEQ ID NO: 1241613
aaggguuuaccauauaguc

SEQ ID NO: 1285983 - RNA, 19 nt, Artificial Sequence
  Description of Artificial Sequence: Synthetic oligonucleotide
  Antisense strand to SEQ ID NO: 1285982
gacuauaugguaaacccuu

SEQ ID NO: 1285984 - RNA, 19 nt, Artificial Sequence
  Description of Artificial Sequence: Synthetic oligonucleotide
  Sense strand starting at position 234 of SEQ ID NO: 1241613
cuguguauuuaguccucaa

SEQ ID NO: 1285985 - RNA, 19 nt, Artificial Sequence
  Description of Artificial Sequence: Synthetic oligonucleotide
  Antisense strand to SEQ ID NO: 1285984
uugaggacuaaauacacag

SEQ ID NO: 1285986 - RNA, 19 nt, Artificial Sequence
  Description of Artificial Sequence: Synthetic oligonucleotide
  Sense strand starting at position 552 of SEQ ID NO: 1241613
ccggaugguauuugucuuu

SEQ ID NO: 1285987 - RNA, 19 nt, Artificial Sequence
  Description of Artificial Sequence: Synthetic oligonucleotide
  Antisense strand to SEQ ID NO: 1285986
aaagacaaauaccauccgg

SEQ ID NO: 1285988 - RNA, 19 nt, Artificial Sequence
  Description of Artificial Sequence: Synthetic oligonucleotide
  Sense strand starting at position 555 of SEQ ID NO: 1241613
gaugguauuugucuuugca

SEQ ID NO: 1285989 - RNA, 19 nt, Artificial Sequence
  Description of Artificial Sequence: Synthetic oligonucleotide
  Antisense strand to SEQ ID NO: 1285988
ugcaaagacaaauaccauc

SEQ ID NO: 1285990 - RNA, 19 nt, Artificial Sequence
  Description of Artificial Sequence: Synthetic oligonucleotide
  Sense strand starting at position 557 of SEQ ID NO: 1241613
ugguauuugucuuugcaga

SEQ ID NO: 1285991 - RNA, 19 nt, Artificial Sequence
  Description of Artificial Sequence: Synthetic oligonucleotide
  Antisense strand to SEQ ID NO: 1285990
ucugcaaagacaaauacca

SEQ ID NO: 1285992 - RNA, 19 nt, Artificial Sequence
  Description of Artificial Sequence: Synthetic oligonucleotide
  Sense strand starting at position 558 of SEQ ID NO: 1241613
gguauuugucuuugcagag

SEQ ID NO: 1285993 - RNA, 19 nt, Artificial Sequence
  Description of Artificial Sequence: Synthetic oligonucleotide
  Antisense strand to SEQ ID NO: 1285992
cucugcaaagacaaauacc

SEQ ID NO: 1285994 - RNA, 19 nt, Artificial Sequence
  Description of Artificial Sequence: Synthetic oligonucleotide
  Sense strand starting at position 576 of SEQ ID NO: 1241613
ggucgcuuucgagagaaag

SEQ ID NO: 1285995 - RNA, 19 nt, Artificial Sequence
  Description of Artificial Sequence: Synthetic oligonucleotide
  Antisense strand to SEQ ID NO: 1285994
cuuucucucgaaagcgacc

SEQ ID NO: 1285996 - RNA, 19 nt, Artificial Sequence
  Description of Artificial Sequence: Synthetic oligonucleotide
  Sense strand starting at position 578 of SEQ ID NO: 1241613
ucgcuuucgagagaaagaa

SEQ ID NO: 1285997 - RNA, 19 nt, Artificial Sequence
  Description of Artificial Sequence: Synthetic oligonucleotide
  Antisense strand to SEQ ID NO: 1285996
uucuuucucucgaaagcga

SEQ ID NO: 1285998 - RNA, 19 nt, Artificial Sequence
  Description of Artificial Sequence: Synthetic oligonucleotide
  Sense strand starting at position 1102 of SEQ ID NO: 1241613
gggacuccucuccaaguca

SEQ ID NO: 1285999 - RNA, 19 nt, Artificial Sequence
  Description of Artificial Sequence: Synthetic oligonucleotide
  Antisense strand to SEQ ID NO: 1285998
ugacuuggagaggaguccc

SEQ ID NO: 1286000 - RNA, 19 nt, Artificial Sequence
  Description of Artificial Sequence: Synthetic oligonucleotide
  Sense strand starting at position 1128 of SEQ ID NO: 1241613
aaccauucggcgucaugca

SEQ ID NO: 1286001 - RNA, 19 nt, Artificial Sequence
  Description of Artificial Sequence: Synthetic oligonucleotide
  Antisense strand to SEQ ID NO: 1286000
ugcaugacgccgaaugguu

SEQ ID NO: 1286002 - RNA, 19 nt, Artificial Sequence
  Description of Artificial Sequence: Synthetic oligonucleotide
  Sense strand starting at position 1514 of SEQ ID NO: 1241613
cgacgcacucccucguaau

SEQ ID NO: 1286003 - RNA, 19 nt, Artificial Sequence
  Description of Artificial Sequence: Synthetic oligonucleotide
  Antisense strand to SEQ ID NO: 1286002
auuacgagggagugcgucg

SEQ ID NO: 1286004 - RNA, 19 nt, Artificial Sequence
  Description of Artificial Sequence: Synthetic oligonucleotide
  Sense strand starting at position 1560 of SEQ ID NO: 1241613
cuggguucccagugaaaug

SEQ ID NO: 1286005 - RNA, 19 nt, Artificial Sequence
  Description of Artificial Sequence: Synthetic oligonucleotide
  Antisense strand to SEQ ID NO: 1286004
cauuucacugggaacccag

SEQ ID NO: 1286006 - RNA, 19 nt, Artificial Sequence
  Description of Artificial Sequence: Synthetic oligonucleotide
  Sense strand starting at position 1572 of SEQ ID NO: 1241613
ugaaaugccuggccuugaa

SEQ ID NO: 1286007 - RNA, 19 nt, Artificial Sequence
  Description of Artificial Sequence: Synthetic oligonucleotide
  Antisense strand to SEQ ID NO: 1286006
uucaaggccaggcauuuca

SEQ ID NO: 1286008 - RNA, 19 nt, Artificial Sequence
  Description of Artificial Sequence: Synthetic oligonucleotide
  Sense strand starting at position 1576 of SEQ ID NO: 1241613
augccuggccuugaaaguu

SEQ ID NO: 1286009 - RNA, 19 nt, Artificial Sequence
  Description of Artificial Sequence: Synthetic oligonucleotide
  Antisense strand to SEQ ID NO: 1286008
aacuuucaaggccaggcau

SEQ ID NO: 1286010 - RNA, 19 nt, Artificial Sequence
  Description of Artificial Sequence: Synthetic oligonucleotide
  Sense strand starting at position 1585 of SEQ ID NO: 1241613
cuugaaaguuuagccaaca

SEQ ID NO: 1286011 - RNA, 19 nt, Artificial Sequence
  Description of Artificial Sequence: Synthetic oligonucleotide
  Antisense strand to SEQ ID NO: 1286010
uguuggcuaaacuuucaag

SEQ ID NO: 1286012 - RNA, 19 nt, Artificial Sequence
  Description of Artificial Sequence: Synthetic oligonucleotide
  Sense strand starting at position 1586 of SEQ ID NO: 1241613
uugaaaguuuagccaacau

SEQ ID NO: 1286013 - RNA, 19 nt, Artificial Sequence
  Description of Artificial Sequence: Synthetic oligonucleotide
  Antisense strand to SEQ ID NO: 1286012
auguuggcuaaacuuucaa

SEQ ID NO: 1286014 - RNA, 19 nt, Artificial Sequence
  Description of Artificial Sequence: Synthetic oligonucleotide
  Sense strand starting at position 1716 of SEQ ID NO: 1241613
aggacucucugggacaaga

SEQ ID NO: 1286015 - RNA, 19 nt, Artificial Sequence
  Description of Artificial Sequence: Synthetic oligonucleotide
  Antisense strand to SEQ ID NO: 1286014
ucuugucccagagaguccu

SEQ ID NO: 1286016 - RNA, 19 nt, Artificial Sequence
  Description of Artificial Sequence: Synthetic oligonucleotide
  Sense strand starting at position 1998 of SEQ ID NO: 1241613
uucuacuuccuguaucgga

SEQ ID NO: 1286017 - RNA, 19 nt, Artificial Sequence
  Description of Artificial Sequence: Synthetic oligonucleotide
  Antisense strand to SEQ ID NO: 1286016
uccgauacaggaaguagaa

SEQ ID NO: 1286018 - RNA, 19 nt, Artificial Sequence
  Description of Artificial Sequence: Synthetic oligonucleotide
  Sense strand starting at position 2509 of SEQ ID NO: 1241613
ggaugcuucccgugacaag

SEQ ID NO: 1286019 - RNA, 19 nt, Artificial Sequence
  Description of Artificial Sequence: Synthetic oligonucleotide
  Antisense strand to SEQ ID NO: 1286018
cuugucacgggaagcaucc

SEQ ID NO: 1286020 - RNA, 19 nt, Artificial Sequence
  Description of Artificial Sequence: Synthetic oligonucleotide
  Sense strand starting at position 2527 of SEQ ID NO: 1241613
ggagcucacuccucaacaa

SEQ ID NO: 1286021 - RNA, 19 nt, Artificial Sequence
  Description of Artificial Sequence: Synthetic oligonucleotide
  Antisense strand to SEQ ID NO: 1286020
uuguugaggagugagcucc

SEQ ID NO: 1286022 - RNA, 19 nt, Artificial Sequence
  Description of Artificial Sequence: Synthetic oligonucleotide
  Sense strand starting at position 2757 of SEQ ID NO: 1241613
ccuauuaggucaccucagu

SEQ ID NO: 1286023 - RNA, 19 nt, Artificial Sequence
  Description of Artificial Sequence: Synthetic oligonucleotide
  Antisense strand to SEQ ID NO: 1286022
acugaggugaccuaauagg

SEQ ID NO: 1286024 - RNA, 19 nt, Artificial Sequence
  Description of Artificial Sequence: Synthetic oligonucleotide
  Sense strand starting at position 2819 of SEQ ID NO: 1241613
ccggcuaaugcuuuguuau

SEQ ID NO: 1286025 - RNA, 19 nt, Artificial Sequence
  Description of Artificial Sequence: Synthetic oligonucleotide
  Antisense strand to SEQ ID NO: 1286024
auaacaaagcauuagccgg

SEQ ID NO: 1286026 - RNA, 19 nt, Artificial Sequence
  Description of Artificial Sequence: Synthetic oligonucleotide
  Sense strand starting at position 2904 of SEQ ID NO: 1241613
gagguuuaacgguauccau

SEQ ID NO: 1286027 - RNA, 19 nt, Artificial Sequence
  Description of Artificial Sequence: Synthetic oligonucleotide
  Antisense strand to SEQ ID NO: 1286026
auggauaccguuaaaccuc

SEQ ID NO: 1286028 - RNA, 19 nt, Artificial Sequence
  Description of Artificial Sequence: Synthetic oligonucleotide
  Sense strand starting at position 2965 of SEQ ID NO: 1241613
cucuguaacgaccagaaau

SEQ ID NO: 1286029 - RNA, 19 nt, Artificial Sequence
  Description of Artificial Sequence: Synthetic oligonucleotide
  Antisense strand to SEQ ID NO: 1286028
auuucuggucguuacagag

SEQ ID NO: 1286030 - RNA, 19 nt, Artificial Sequence
  Description of Artificial Sequence: Synthetic oligonucleotide
  Sense strand starting at position 3223 of SEQ ID NO: 1241613
gccugccuucuagaaguua

SEQ ID NO: 1286031 - RNA, 19 nt, Artificial Sequence
  Description of Artificial Sequence: Synthetic oligonucleotide
  Antisense strand to SEQ ID NO: 1286030
uaacuucuagaaggcaggc

SEQ ID NO: 1286032 - RNA, 19 nt, Artificial Sequence
  Description of Artificial Sequence: Synthetic oligonucleotide
  Sense strand starting at position 3345 of SEQ ID NO: 1241613
aaaguuaaacgucaaguua

SEQ ID NO: 1286033 - RNA, 19 nt, Artificial Sequence
  Description of Artificial Sequence: Synthetic oligonucleotide
  Antisense strand to SEQ ID NO: 1286032
uaacuugacguuuaacuuu

SEQ ID NO: 1286034 - RNA, 19 nt, Artificial Sequence
  Description of Artificial Sequence: Synthetic oligonucleotide
  Sense strand starting at position 3363 of SEQ ID NO: 1241613
aagcauauggcccaguaau

SEQ ID NO: 1286035 - RNA, 19 nt, Artificial Sequence
  Description of Artificial Sequence: Synthetic oligonucleotide
  Antisense strand to SEQ ID NO: 1286034
auuacugggccauaugcuu

SEQ ID NO: 1286036 - RNA, 19 nt, Artificial Sequence
  Description of Artificial Sequence: Synthetic oligonucleotide
  Sense strand starting at position 3389 of SEQ ID NO: 1241613
cuaguuauguagccaagaa

SEQ ID NO: 1286037 - RNA, 19 nt, Artificial Sequence
  Description of Artificial Sequence: Synthetic oligonucleotide
  Antisense strand to SEQ ID NO: 1286036
uucuuggcuacauaacuag

SEQ ID NO: 1286038 - RNA, 19 nt, Artificial Sequence
  Description of Artificial Sequence: Synthetic oligonucleotide
  Sense strand starting at position 3543 of SEQ ID NO: 1241613
aucuaaugucaucaguuga

SEQ ID NO: 1286039 - RNA, 19 nt, Artificial Sequence
  Description of Artificial Sequence: Synthetic oligonucleotide
  Antisense strand to SEQ ID NO: 1286038
ucaacugaugacauuagau

SEQ ID NO: 1286040 - RNA, 19 nt, Artificial Sequence
  Description of Artificial Sequence: Synthetic oligonucleotide
  Sense strand starting at position 3548 of SEQ ID NO: 1241613
augucaucaguugacaaau

SEQ ID NO: 1286041 - RNA, 19 nt, Artificial Sequence
  Description of Artificial Sequence: Synthetic oligonucleotide
  Antisense strand to SEQ ID NO: 1286040
auuugucaacugaugacau

SEQ ID NO: 1286042 - RNA, 19 nt, Artificial Sequence
  Description of Artificial Sequence: Synthetic oligonucleotide
  Sense strand starting at position 3580 of SEQ ID NO: 1241613
gugauacauccauacagug

SEQ ID NO: 1286043 - RNA, 19 nt, Artificial Sequence
  Description of Artificial Sequence: Synthetic oligonucleotide
  Antisense strand to SEQ ID NO: 1286042
cacuguauggauguaucac

SEQ ID NO: 1286044 - RNA, 19 nt, Artificial Sequence
  Description of Artificial Sequence: Synthetic oligonucleotide
  Sense strand starting at position 3715 of SEQ ID NO: 1241613
auaugaaguguccaguaua

SEQ ID NO: 1286045 - RNA, 19 nt, Artificial Sequence
  Description of Artificial Sequence: Synthetic oligonucleotide
  Antisense strand to SEQ ID NO: 1286044
uauacuggacacuucauau

SEQ ID NO: 1286046 - RNA, 19 nt, Artificial Sequence
  Description of Artificial Sequence: Synthetic oligonucleotide
  Sense strand starting at position 3757 of SEQ ID NO: 1241613
uacucuagugauugucaga

SEQ ID NO: 1286047 - RNA, 19 nt, Artificial Sequence
  Description of Artificial Sequence: Synthetic oligonucleotide
  Antisense strand to SEQ ID NO: 1286046
ucugacaaucacuagagua

SEQ ID NO: 1286048 - RNA, 19 nt, Artificial Sequence
  Description of Artificial Sequence: Synthetic oligonucleotide
  Sense strand starting at position 3888 of SEQ ID NO: 1241613
auugaauuguaugcuguaa

SEQ ID NO: 1286049 - RNA, 19 nt, Artificial Sequence
  Description of Artificial Sequence: Synthetic oligonucleotide
  Antisense strand to SEQ ID NO: 1286048
uuacagcauacaauucaau

SEQ ID NO: 1286050 - RNA, 19 nt, Artificial Sequence
  Description of Artificial Sequence: Synthetic oligonucleotide
  Sense strand starting at position 3909 of SEQ ID NO: 1241613
gggugaauuguacaguaua

SEQ ID NO: 1286051 - RNA, 19 nt, Artificial Sequence
  Description of Artificial Sequence: Synthetic oligonucleotide
  Antisense strand to SEQ ID NO: 1286050
uauacuguacaauucaccc

SEQ ID NO: 1286052 - RNA, 19 nt, Artificial Sequence
  Description of Artificial Sequence: Synthetic oligonucleotide
  Sense strand starting at position 192 of SEQ ID NO: 1241614
agaauccuccuagagucuu

SEQ ID NO: 1286053 - RNA, 19 nt, Artificial Sequence
  Description of Artificial Sequence: Synthetic oligonucleotide
  Antisense strand to SEQ ID NO: 1286052
aagacucuaggaggauucu

SEQ ID NO: 1286054 - RNA, 19 nt, Artificial Sequence
  Description of Artificial Sequence: Synthetic oligonucleotide
  Sense strand starting at position 286 of SEQ ID NO: 1241614
gguccaaucacuggcaaga

SEQ ID NO: 1286055 - RNA, 19 nt, Artificial Sequence
  Description of Artificial Sequence: Synthetic oligonucleotide
  Antisense strand to SEQ ID NO: 1286054
ucuugccagugauuggacc

SEQ ID NO: 1286056 - RNA, 19 nt, Artificial Sequence
  Description of Artificial Sequence: Synthetic oligonucleotide
  Sense strand starting at position 297 of SEQ ID NO: 1241614
uggcaagacuccuuuccua

SEQ ID NO: 1286057 - RNA, 19 nt, Artificial Sequence
  Description of Artificial Sequence: Synthetic oligonucleotide
  Antisense strand to SEQ ID NO: 1286056
uaggaaaggagucuugcca

SEQ ID NO: 1286058 - RNA, 19 nt, Artificial Sequence
  Description of Artificial Sequence: Synthetic oligonucleotide
  Sense strand starting at position 374 of SEQ ID NO: 1241614
cgggauccuuaccuguaga

SEQ ID NO: 1286059 - RNA, 19 nt, Artificial Sequence
  Description of Artificial Sequence: Synthetic oligonucleotide
  Antisense strand to SEQ ID NO: 1286058
ucuacagguaaggaucccg

SEQ ID NO: 1286060 - RNA, 19 nt, Artificial Sequence
  Description of Artificial Sequence: Synthetic oligonucleotide
  Sense strand starting at position 377 of SEQ ID NO: 1241614
gauccuuaccuguagacgu

SEQ ID NO: 1286061 - RNA, 19 nt, Artificial Sequence
  Description of Artificial Sequence: Synthetic oligonucleotide
  Antisense strand to SEQ ID NO: 1286060
acgucuacagguaaggauc

SEQ ID NO: 1286062 - RNA, 19 nt, Artificial Sequence
  Description of Artificial Sequence: Synthetic oligonucleotide
  Sense strand starting at position 414 of SEQ ID NO: 1241614
uccgguuuacguuaacaaa

SEQ ID NO: 1286063 - RNA, 19 nt, Artificial Sequence
  Description of Artificial Sequence: Synthetic oligonucleotide
  Antisense strand to SEQ ID NO: 1286062
uuuguuaacguaaaccgga

SEQ ID NO: 1286064 - RNA, 19 nt, Artificial Sequence
  Description of Artificial Sequence: Synthetic oligonucleotide
  Sense strand starting at position 492 of SEQ ID NO: 1241614
gugagccucccugaaaugu

SEQ ID NO: 1286065 - RNA, 19 nt, Artificial Sequence
  Description of Artificial Sequence: Synthetic oligonucleotide
  Antisense strand to SEQ ID NO: 1286064
acauuucagggaggcucac

SEQ ID NO: 1286066 - RNA, 19 nt, Artificial Sequence
  Description of Artificial Sequence: Synthetic oligonucleotide
  Sense strand starting at position 651 of SEQ ID NO: 1241614
ggaagagguucccuuggau

SEQ ID NO: 1286067 - RNA, 19 nt, Artificial Sequence
  Description of Artificial Sequence: Synthetic oligonucleotide
  Antisense strand to SEQ ID NO: 1286066
auccaagggaaccucuucc

SEQ ID NO: 1286068 - RNA, 19 nt, Artificial Sequence
  Description of Artificial Sequence: Synthetic oligonucleotide
  Sense strand starting at position 1147 of SEQ ID NO: 1241614
ggagccguucuccaugaau

SEQ ID NO: 1286069 - RNA, 19 nt, Artificial Sequence
  Description of Artificial Sequence: Synthetic oligonucleotide
  Antisense strand to SEQ ID NO: 1286068
auucauggagaacggcucc

SEQ ID NO: 1286070 - RNA, 19 nt, Artificial Sequence
  Description of Artificial Sequence: Synthetic oligonucleotide
  Sense strand starting at position 1149 of SEQ ID NO: 1241614
agccguucuccaugaauuu

SEQ ID NO: 1286071 - RNA, 19 nt, Artificial Sequence
  Description of Artificial Sequence: Synthetic oligonucleotide
  Antisense strand to SEQ ID NO: 1286070
aaauucauggagaacggcu

SEQ ID NO: 1286072 - RNA, 19 nt, Artificial Sequence
  Description of Artificial Sequence: Synthetic oligonucleotide
  Sense strand starting at position 1691 of SEQ ID NO: 1241614
agacguucucugagcgagu

SEQ ID NO: 1286073 - RNA, 19 nt, Artificial Sequence
  Description of Artificial Sequence: Synthetic oligonucleotide
  Antisense strand to SEQ ID NO: 1286072
acucgcucagagaacgucu

SEQ ID NO: 1286074 - RNA, 19 nt, Artificial Sequence
  Description of Artificial Sequence: Synthetic oligonucleotide
  Sense strand starting at position 1816 of SEQ ID NO: 1241614
cuggaaauugcgagccgua

SEQ ID NO: 1286075 - RNA, 19 nt, Artificial Sequence
  Description of Artificial Sequence: Synthetic oligonucleotide
  Antisense strand to SEQ ID NO: 1286074
uacggcucgcaauuuccag

SEQ ID NO: 1286076 - RNA, 19 nt, Artificial Sequence
  Description of Artificial Sequence: Synthetic oligonucleotide
  Sense strand starting at position 1952 of SEQ ID NO: 1241614
uuccgaguugacugaacaa

SEQ ID NO: 1286077 - RNA, 19 nt, Artificial Sequence
  Description of Artificial Sequence: Synthetic oligonucleotide
  Antisense strand to SEQ ID NO: 1286076
uuguucagucaacucggaa

SEQ ID NO: 1286078 - RNA, 19 nt, Artificial Sequence
  Description of Artificial Sequence: Synthetic oligonucleotide
  Sense strand starting at position 2380 of SEQ ID NO: 1241614
auuaccuuucuauagguga

SEQ ID NO: 1286079 - RNA, 19 nt, Artificial Sequence
  Description of Artificial Sequence: Synthetic oligonucleotide
  Antisense strand to SEQ ID NO: 1286078
ucaccuauagaaagguaau

SEQ ID NO: 1286080 - RNA, 19 nt, Artificial Sequence
  Description of Artificial Sequence: Synthetic oligonucleotide
  Sense strand starting at position 2412 of SEQ ID NO: 1241614
cugagaguuuaaguaccuu

SEQ ID NO: 1286081 - RNA, 19 nt, Artificial Sequence
  Description of Artificial Sequence: Synthetic oligonucleotide
  Antisense strand to SEQ ID NO: 1286080
aagguacuuaaacucucag

SEQ ID NO: 1286082 - RNA, 19 nt, Artificial Sequence
  Description of Artificial Sequence: Synthetic oligonucleotide
  Sense strand starting at position 2430 of SEQ ID NO: 1241614
ugccuaagcccauauggaa

SEQ ID NO: 1286083 - RNA, 19 nt, Artificial Sequence
  Description of Artificial Sequence: Synthetic oligonucleotide
  Antisense strand to SEQ ID NO: 1286082
uuccauaugggcuuaggca

SEQ ID NO: 1286084 - RNA, 19 nt, Artificial Sequence
  Description of Artificial Sequence: Synthetic oligonucleotide
  Sense strand starting at position 2444 of SEQ ID NO: 1241614
uggaaauaauggcucugaa

SEQ ID NO: 1286085 - RNA, 19 nt, Artificial Sequence
  Description of Artificial Sequence: Synthetic oligonucleotide
  Antisense strand to SEQ ID NO: 1286084
uucagagccauuauuucca

SEQ ID NO: 1286086 - RNA, 19 nt, Artificial Sequence
  Description of Artificial Sequence: Synthetic oligonucleotide
  Sense strand starting at position 2540 of SEQ ID NO: 1241614
ugaagcauccaacaaugua

SEQ ID NO: 1286087 - RNA, 19 nt, Artificial Sequence
  Description of Artificial Sequence: Synthetic oligonucleotide
  Antisense strand to SEQ ID NO: 1286086
uacauuguuggaugcuuca

SEQ ID NO: 1286088 - RNA, 19 nt, Artificial Sequence
  Description of Artificial Sequence: Synthetic oligonucleotide
  Sense strand starting at position 2615 of SEQ ID NO: 1241614
agucuuuggcauugauagg

SEQ ID NO: 1286089 - RNA, 19 nt, Artificial Sequence
  Description of Artificial Sequence: Synthetic oligonucleotide
  Antisense strand to SEQ ID NO: 1286088
ccuaucaaugccaaagacu

SEQ ID NO: 1286090 - RNA, 19 nt, Artificial Sequence
  Description of Artificial Sequence: Synthetic oligonucleotide
  Sense strand starting at position 2620 of SEQ ID NO: 1241614
uuggcauugauagggacuu

SEQ ID NO: 1286091 - RNA, 19 nt, Artificial Sequence
  Description of Artificial Sequence: Synthetic oligonucleotide
  Antisense strand to SEQ ID NO: 1286090
aagucccuaucaaugccaa

SEQ ID NO: 1286092 - RNA, 19 nt, Artificial Sequence
  Description of Artificial Sequence: Synthetic oligonucleotide
  Sense strand starting at position 2633 of SEQ ID NO: 1241614
ggacuuauaugcccuuuga

SEQ ID NO: 1286093 - RNA, 19 nt, Artificial Sequence
  Description of Artificial Sequence: Synthetic oligonucleotide
  Antisense strand to SEQ ID NO: 1286092
ucaaagggcauauaagucc

SEQ ID NO: 1286094 - RNA, 19 nt, Artificial Sequence
  Description of Artificial Sequence: Synthetic oligonucleotide
  Sense strand starting at position 2740 of SEQ ID NO: 1241614
gacauugugguguacacua

SEQ ID NO: 1286095 - RNA, 19 nt, Artificial Sequence
  Description of Artificial Sequence: Synthetic oligonucleotide
  Antisense strand to SEQ ID NO: 1286094
uaguguacaccacaauguc

SEQ ID NO: 1286096 - RNA, 19 nt, Artificial Sequence
  Description of Artificial Sequence: Synthetic oligonucleotide
  Sense strand starting at position 2827 of SEQ ID NO: 1241614
auuaauguuccugacaagc

SEQ ID NO: 1286097 - RNA, 19 nt, Artificial Sequence
  Description of Artificial Sequence: Synthetic oligonucleotide
  Antisense strand to SEQ ID NO: 1286096
gcuugucaggaacauuaau

SEQ ID NO: 1286098 - RNA, 19 nt, Artificial Sequence
  Description of Artificial Sequence: Synthetic oligonucleotide
  Sense strand starting at position 2892 of SEQ ID NO: 1241614
cuuaaagauuuagggcaga

SEQ ID NO: 1286099 - RNA, 19 nt, Artificial Sequence
  Description of Artificial Sequence: Synthetic oligonucleotide
  Antisense strand to SEQ ID NO: 1286098
ucugcccuaaaucuuuaag

SEQ ID NO: 1286100 - RNA, 19 nt, Artificial Sequence
  Description of Artificial Sequence: Synthetic oligonucleotide
  Sense strand starting at position 2932 of SEQ ID NO: 1241614
cuuucugaggucugaccau

SEQ ID NO: 1286101 - RNA, 19 nt, Artificial Sequence
  Description of Artificial Sequence: Synthetic oligonucleotide
  Antisense strand to SEQ ID NO: 1286100
auggucagaccucagaaag

SEQ ID NO: 1286102 - RNA, 19 nt, Artificial Sequence
  Description of Artificial Sequence: Synthetic oligonucleotide
  Sense strand starting at position 3028 of SEQ ID NO: 1241614
gugcguuggcucucacuaa

SEQ ID NO: 1286103 - RNA, 19 nt, Artificial Sequence
  Description of Artificial Sequence: Synthetic oligonucleotide
  Antisense strand to SEQ ID NO: 1286102
uuagugagagccaacgcac

SEQ ID NO: 1286104 - RNA, 19 nt, Artificial Sequence
  Description of Artificial Sequence: Synthetic oligonucleotide
  Sense strand starting at position 3032 of SEQ ID NO: 1241614
guuggcucucacuaaaggu

SEQ ID NO: 1286105 - RNA, 19 nt, Artificial Sequence
  Description of Artificial Sequence: Synthetic oligonucleotide
  Antisense strand to SEQ ID NO: 1286104
accuuuagugagagccaac

SEQ ID NO: 1286106 - RNA, 19 nt, Artificial Sequence
  Description of Artificial Sequence: Synthetic oligonucleotide
  Sense strand starting at position 3192 of SEQ ID NO: 1241614
uggaacuauuuagggaauu

SEQ ID NO: 1286107 - RNA, 19 nt, Artificial Sequence
  Description of Artificial Sequence: Synthetic oligonucleotide
  Antisense strand to SEQ ID NO: 1286106
aauucccuaaauaguucca

SEQ ID NO: 1286108 - RNA, 19 nt, Artificial Sequence
  Description of Artificial Sequence: Synthetic oligonucleotide
  Sense strand starting at position 3193 of SEQ ID NO: 1241614
ggaacuauuuagggaauug

SEQ ID NO: 1286109 - RNA, 19 nt, Artificial Sequence
  Description of Artificial Sequence: Synthetic oligonucleotide
  Antisense strand to SEQ ID NO: 1286108
caauucccuaaauaguucc

SEQ ID NO: 1286110 - RNA, 19 nt, Artificial Sequence
  Description of Artificial Sequence: Synthetic oligonucleotide
  Sense strand starting at position 3309 of SEQ ID NO: 1241614
uucuuaaggcacugaucau

SEQ ID NO: 1286111 - RNA, 19 nt, Artificial Sequence
  Description of Artificial Sequence: Synthetic oligonucleotide
  Antisense strand to SEQ ID NO: 1286110
augaucagugccuuaagaa

SEQ ID NO: 1286112 - RNA, 19 nt, Artificial Sequence
  Description of Artificial Sequence: Synthetic oligonucleotide
  Sense strand starting at position 3315 of SEQ ID NO: 1241614
aggcacugaucauccuaga

SEQ ID NO: 1286113 - RNA, 19 nt, Artificial Sequence
  Description of Artificial Sequence: Synthetic oligonucleotide
  Antisense strand to SEQ ID NO: 1286112
ucuaggaugaucagugccu

SEQ ID NO: 1286114 - RNA, 19 nt, Artificial Sequence
  Description of Artificial Sequence: Synthetic oligonucleotide
  Sense strand starting at position 3356 of SEQ ID NO: 1241614
ggaaagaggugauuggguu

SEQ ID NO: 1286115 - RNA, 19 nt, Artificial Sequence
  Description of Artificial Sequence: Synthetic oligonucleotide
  Antisense strand to SEQ ID NO: 1286114
aacccaaucaccucuuucc

SEQ ID NO: 1286116 - RNA, 19 nt, Artificial Sequence
  Description of Artificial Sequence: Synthetic oligonucleotide
  Sense strand starting at position 3422 of SEQ ID NO: 1241614
ugaaguaggcuuuaguaua

SEQ ID NO: 1286117 - RNA, 19 nt, Artificial Sequence
  Description of Artificial Sequence: Synthetic oligonucleotide
  Antisense strand to SEQ ID NO: 1286116
uauacuaaagccuacuuca

SEQ ID NO: 1286118 - RNA, 19 nt, Artificial Sequence
  Description of Artificial Sequence: Synthetic oligonucleotide
  Sense strand starting at position 3427 of SEQ ID NO: 1241614
uaggcuuuaguauagagau

SEQ ID NO: 1286119 - RNA, 19 nt, Artificial Sequence
  Description of Artificial Sequence: Synthetic oligonucleotide
  Antisense strand to SEQ ID NO: 1286118
aucucuauacuaaagccua

SEQ ID NO: 1286120 - RNA, 19 nt, Artificial Sequence
  Description of Artificial Sequence: Synthetic oligonucleotide
  Sense strand starting at position 3429 of SEQ ID NO: 1241614
ggcuuuaguauagagauau

SEQ ID NO: 1286121 - RNA, 19 nt, Artificial Sequence
  Description of Artificial Sequence: Synthetic oligonucleotide
  Antisense strand to SEQ ID NO: 1286120
auaucucuauacuaaagcc

SEQ ID NO: 1286122 - RNA, 19 nt, Artificial Sequence
  Description of Artificial Sequence: Synthetic oligonucleotide
  Sense strand starting at position 3439 of SEQ ID NO: 1241614
uagagauauggugguauca

SEQ ID NO: 1286123 - RNA, 19 nt, Artificial Sequence
  Description of Artificial Sequence: Synthetic oligonucleotide
  Antisense strand to SEQ ID NO: 1286122
ugauaccaccauaucucua

SEQ ID NO: 1286124 - RNA, 19 nt, Artificial Sequence
  Description of Artificial Sequence: Synthetic oligonucleotide
  Sense strand starting at position 3707 of SEQ ID NO: 1241614
gguaucagggccuauacua

SEQ ID NO: 1286125 - RNA, 19 nt, Artificial Sequence
  Description of Artificial Sequence: Synthetic oligonucleotide
  Antisense strand to SEQ ID NO: 1286124
uaguauaggcccugauacc

SEQ ID NO: 1286126 - RNA, 19 nt, Artificial Sequence
  Description of Artificial Sequence: Synthetic oligonucleotide
  Sense strand starting at position 3774 of SEQ ID NO: 1241614
agaagaaccuuagacuaag

SEQ ID NO: 1286127 - RNA, 19 nt, Artificial Sequence
  Description of Artificial Sequence: Synthetic oligonucleotide
  Antisense strand to SEQ ID NO: 1286126
cuuagucuaagguucuucu

SEQ ID NO: 1286128 - RNA, 19 nt, Artificial Sequence
  Description of Artificial Sequence: Synthetic oligonucleotide
  Sense strand starting at position 3846 of SEQ ID NO: 1241614
agaggcugauucuuggaau

SEQ ID NO: 1286129 - RNA, 19 nt, Artificial Sequence
  Description of Artificial Sequence: Synthetic oligonucleotide
  Antisense strand to SEQ ID NO: 1286128
auuccaagaaucagccucu

SEQ ID NO: 1286130 - RNA, 19 nt, Artificial Sequence
  Description of Artificial Sequence: Synthetic oligonucleotide
  Sense strand starting at position 3888 of SEQ ID NO: 1241614
gacugaugccucugaccac

SEQ ID NO: 1286131 - RNA, 19 nt, Artificial Sequence
  Description of Artificial Sequence: Synthetic oligonucleotide
  Antisense strand to SEQ ID NO: 1286130
guggucagaggcaucaguc

SEQ ID NO: 1286132 - RNA, 19 nt, Artificial Sequence
  Description of Artificial Sequence: Synthetic oligonucleotide
  Sense strand starting at position 22 of SEQ ID NO: 1241615
gguucuggcuuuccaacua

SEQ ID NO: 1286133 - RNA, 19 nt, Artificial Sequence
  Description of Artificial Sequence: Synthetic oligonucleotide
  Antisense strand to SEQ ID NO: 1286132
uaguuggaaagccagaacc

SEQ ID NO: 1286134 - RNA, 19 nt, Artificial Sequence
  Description of Artificial Sequence: Synthetic oligonucleotide
  Sense strand starting at position 57 of SEQ ID NO: 1241615
cugauuuaguaauagcuca

SEQ ID NO: 1286135 - RNA, 19 nt, Artificial Sequence
  Description of Artificial Sequence: Synthetic oligonucleotide
  Antisense strand to SEQ ID NO: 1286134
ugagcuauuacuaaaucag

SEQ ID NO: 1286136 - RNA, 19 nt, Artificial Sequence
  Description of Artificial Sequence: Synthetic oligonucleotide
  Sense strand starting at position 180 of SEQ ID NO: 1241615
ccuucugugccagagaaug

SEQ ID NO: 1286137 - RNA, 19 nt, Artificial Sequence
  Description of Artificial Sequence: Synthetic oligonucleotide
  Antisense strand to SEQ ID NO: 1286136
cauucucuggcacagaagg

SEQ ID NO: 1286138 - RNA, 19 nt, Artificial Sequence
  Description of Artificial Sequence: Synthetic oligonucleotide
  Sense strand starting at position 186 of SEQ ID NO: 1241615
gugccagagaaugauugua

SEQ ID NO: 1286139 - RNA, 19 nt, Artificial Sequence
  Description of Artificial Sequence: Synthetic oligonucleotide
  Antisense strand to SEQ ID NO: 1286138
uacaaucauucucuggcac

SEQ ID NO: 1286140 - RNA, 19 nt, Artificial Sequence
  Description of Artificial Sequence: Synthetic oligonucleotide
  Sense strand starting at position 188 of SEQ ID NO: 1241615
gccagagaaugauuguauu

SEQ ID NO: 1286141 - RNA, 19 nt, Artificial Sequence
  Description of Artificial Sequence: Synthetic oligonucleotide
  Antisense strand to SEQ ID NO: 1286140
aauacaaucauucucuggc

SEQ ID NO: 1286142 - RNA, 19 nt, Artificial Sequence
  Description of Artificial Sequence: Synthetic oligonucleotide
  Sense strand starting at position 191 of SEQ ID NO: 1241615
agagaaugauuguauuuga

SEQ ID NO: 1286143 - RNA, 19 nt, Artificial Sequence
  Description of Artificial Sequence: Synthetic oligonucleotide
  Antisense strand to SEQ ID NO: 1286142
ucaaauacaaucauucucu

SEQ ID NO: 1286144 - RNA, 19 nt, Artificial Sequence
  Description of Artificial Sequence: Synthetic oligonucleotide
  Sense strand starting at position 297 of SEQ ID NO: 1241615
uauguuuggcaucagggaa

SEQ ID NO: 1286145 - RNA, 19 nt, Artificial Sequence
  Description of Artificial Sequence: Synthetic oligonucleotide
  Antisense strand to SEQ ID NO: 1286144
uucccugaugccaaacaua

SEQ ID NO: 1286146 - RNA, 19 nt, Artificial Sequence
  Description of Artificial Sequence: Synthetic oligonucleotide
  Sense strand starting at position 476 of SEQ ID NO: 1241615
aaaucagguguuugcaacu

SEQ ID NO: 1286147 - RNA, 19 nt, Artificial Sequence
  Description of Artificial Sequence: Synthetic oligonucleotide
  Antisense strand to SEQ ID NO: 1286146
aguugcaaacaccugauuu

SEQ ID NO: 1286148 - RNA, 19 nt, Artificial Sequence
  Description of Artificial Sequence: Synthetic oligonucleotide
  Sense strand starting at position 1054 of SEQ ID NO: 1241615
ggaacugucugaguccaua

SEQ ID NO: 1286149 - RNA, 19 nt, Artificial Sequence
  Description of Artificial Sequence: Synthetic oligonucleotide
  Antisense strand to SEQ ID NO: 1286148
uauggacucagacaguucc

SEQ ID NO: 1286150 - RNA, 19 nt, Artificial Sequence
  Description of Artificial Sequence: Synthetic oligonucleotide
  Sense strand starting at position 1098 of SEQ ID NO: 1241615
gggauuccuugcccaggga

SEQ ID NO: 1286151 - RNA, 19 nt, Artificial Sequence
  Description of Artificial Sequence: Synthetic oligonucleotide
  Antisense strand to SEQ ID NO: 1286150
ucccugggcaaggaauccc

SEQ ID NO: 1286152 - RNA, 19 nt, Artificial Sequence
  Description of Artificial Sequence: Synthetic oligonucleotide
  Sense strand starting at position 1099 of SEQ ID NO: 1241615
ggauuccuugcccagggaa

SEQ ID NO: 1286153 - RNA, 19 nt, Artificial Sequence
  Description of Artificial Sequence: Synthetic oligonucleotide
  Antisense strand to SEQ ID NO: 1286152
uucccugggcaaggaaucc

SEQ ID NO: 1286154 - RNA, 19 nt, Artificial Sequence
  Description of Artificial Sequence: Synthetic oligonucleotide
  Sense strand starting at position 1173 of SEQ ID NO: 1241615
gagacuucuccagagccau

SEQ ID NO: 1286155 - RNA, 19 nt, Artificial Sequence
  Description of Artificial Sequence: Synthetic oligonucleotide
  Antisense strand to SEQ ID NO: 1286154
auggcucuggagaagucuc

SEQ ID NO: 1286156 - RNA, 19 nt, Artificial Sequence
  Description of Artificial Sequence: Synthetic oligonucleotide
  Sense strand starting at position 1195 of SEQ ID NO: 1241615
ggccucacuuucccagaaa

SEQ ID NO: 1286157 - RNA, 19 nt, Artificial Sequence
  Description of Artificial Sequence: Synthetic oligonucleotide
  Antisense strand to SEQ ID NO: 1286156
uuucugggaaagugaggcc

SEQ ID NO: 1286158 - RNA, 19 nt, Artificial Sequence
  Description of Artificial Sequence: Synthetic oligonucleotide
  Sense strand starting at position 1319 of SEQ ID NO: 1241615
cagaaagacguccauccua

SEQ ID NO: 1286159 - RNA, 19 nt, Artificial Sequence
  Description of Artificial Sequence: Synthetic oligonucleotide
  Antisense strand to SEQ ID NO: 1286158
uaggauggacgucuuucug

SEQ ID NO: 1286160 - RNA, 19 nt, Artificial Sequence
  Description of Artificial Sequence: Synthetic oligonucleotide
  Sense strand starting at position 1332 of SEQ ID NO: 1241615
auccuacuuccugagguuu

SEQ ID NO: 1286161 - RNA, 19 nt, Artificial Sequence
  Description of Artificial Sequence: Synthetic oligonucleotide
  Antisense strand to SEQ ID NO: 1286160
aaaccucaggaaguaggau

SEQ ID NO: 1286162 - RNA, 19 nt, Artificial Sequence
  Description of Artificial Sequence: Synthetic oligonucleotide
  Sense strand starting at position 1465 of SEQ ID NO: 1241615
gucaguuccuaucuuugaa

SEQ ID NO: 1286163 - RNA, 19 nt, Artificial Sequence
  Description of Artificial Sequence: Synthetic oligonucleotide
  Antisense strand to SEQ ID NO: 1286162
uucaaagauaggaacugac

SEQ ID NO: 1286164 - RNA, 19 nt, Artificial Sequence
  Description of Artificial Sequence: Synthetic oligonucleotide
  Sense strand starting at position 1511 of SEQ ID NO: 1241615
auuuguacccagugcucaa

SEQ ID NO: 1286165 - RNA, 19 nt, Artificial Sequence
  Description of Artificial Sequence: Synthetic oligonucleotide
  Antisense strand to SEQ ID NO: 1286164
uugagcacuggguacaaau

SEQ ID NO: 1286166 - RNA, 19 nt, Artificial Sequence
  Description of Artificial Sequence: Synthetic oligonucleotide
  Sense strand starting at position 1524 of SEQ ID NO: 1241615
gcucaaauggcucaucgaa

SEQ ID NO: 1286167 - RNA, 19 nt, Artificial Sequence
  Description of Artificial Sequence: Synthetic oligonucleotide
  Antisense strand to SEQ ID NO: 1286166
uucgaugagccauuugagc

SEQ ID NO: 1286168 - RNA, 19 nt, Artificial Sequence
  Description of Artificial Sequence: Synthetic oligonucleotide
  Sense strand starting at position 1526 of SEQ ID NO: 1241615
ucaaauggcucaucgaaac

SEQ ID NO: 1286169 - RNA, 19 nt, Artificial Sequence
  Description of Artificial Sequence: Synthetic oligonucleotide
  Antisense strand to SEQ ID NO: 1286168
guuucgaugagccauuuga

SEQ ID NO: 1286170 - RNA, 19 nt, Artificial Sequence
  Description of Artificial Sequence: Synthetic oligonucleotide
  Sense strand starting at position 1532 of SEQ ID NO: 1241615
ggcucaucgaaacaucagu

SEQ ID NO: 1286171 - RNA, 19 nt, Artificial Sequence
  Description of Artificial Sequence: Synthetic oligonucleotide
  Antisense strand to SEQ ID NO: 1286170
acugauguuucgaugagcc

SEQ ID NO: 1286172 - RNA, 19 nt, Artificial Sequence
  Description of Artificial Sequence: Synthetic oligonucleotide
  Sense strand starting at position 1537 of SEQ ID NO: 1241615
aucgaaacaucaguuugaa

SEQ ID NO: 1286173 - RNA, 19 nt, Artificial Sequence
  Description of Artificial Sequence: Synthetic oligonucleotide
  Antisense strand to SEQ ID NO: 1286172
uucaaacugauguuucgau

SEQ ID NO: 1286174 - RNA, 19 nt, Artificial Sequence
  Description of Artificial Sequence: Synthetic oligonucleotide
  Sense strand starting at position 1929 of SEQ ID NO: 1241615
cagcuuggugucugagaga

SEQ ID NO: 1286175 - RNA, 19 nt, Artificial Sequence
  Description of Artificial Sequence: Synthetic oligonucleotide
  Antisense strand to SEQ ID NO: 1286174
ucucucagacaccaagcug

SEQ ID NO: 1286176 - RNA, 19 nt, Artificial Sequence
  Description of Artificial Sequence: Synthetic oligonucleotide
  Sense strand starting at position 1954 of SEQ ID NO: 1241615
aggccaguuucugcaauca

SEQ ID NO: 1286177 - RNA, 19 nt, Artificial Sequence
  Description of Artificial Sequence: Synthetic oligonucleotide
  Antisense strand to SEQ ID NO: 1286176
ugauugcagaaacuggccu

SEQ ID NO: 1286178 - RNA, 19 nt, Artificial Sequence
  Description of Artificial Sequence: Synthetic oligonucleotide
  Sense strand starting at position 2177 of SEQ ID NO: 1241615
accacaucugucugcugau

SEQ ID NO: 1286179 - RNA, 19 nt, Artificial Sequence
  Description of Artificial Sequence: Synthetic oligonucleotide
  Antisense strand to SEQ ID NO: 1286178
aucagcagacagauguggu

SEQ ID NO: 1286180 - RNA, 19 nt, Artificial Sequence
  Description of Artificial Sequence: Synthetic oligonucleotide
  Sense strand starting at position 2253 of SEQ ID NO: 1241615
ggaacaaaguccuuguuac

SEQ ID NO: 1286181 - RNA, 19 nt, Artificial Sequence
  Description of Artificial Sequence: Synthetic oligonucleotide
  Antisense strand to SEQ ID NO: 1286180
guaacaaggacuuuguucc

SEQ ID NO: 1286182 - RNA, 19 nt, Artificial Sequence
  Description of Artificial Sequence: Synthetic oligonucleotide
  Sense strand starting at position 2291 of SEQ ID NO: 1241615
ccaaguagacuuggagguu

SEQ ID NO: 1286183 - RNA, 19 nt, Artificial Sequence
  Description of Artificial Sequence: Synthetic oligonucleotide
  Antisense strand to SEQ ID NO: 1286182
aaccuccaagucuacuugg

SEQ ID NO: 1286184 - RNA, 19 nt, Artificial Sequence
  Description of Artificial Sequence: Synthetic oligonucleotide
  Sense strand starting at position 2346 of SEQ ID NO: 1241615
agggaauucuggccaaagc

SEQ ID NO: 1286185 - RNA, 19 nt, Artificial Sequence
  Description of Artificial Sequence: Synthetic oligonucleotide
  Antisense strand to SEQ ID NO: 1286184
gcuuuggccagaauucccu

SEQ ID NO: 1286186 - RNA, 19 nt, Artificial Sequence
  Description of Artificial Sequence: Synthetic oligonucleotide
  Sense strand starting at position 2347 of SEQ ID NO: 1241615
gggaauucuggccaaagcu

SEQ ID NO: 1286187 - RNA, 19 nt, Artificial Sequence
  Description of Artificial Sequence: Synthetic oligonucleotide
  Antisense strand to SEQ ID NO: 1286186
agcuuuggccagaauuccc

SEQ ID NO: 1286188 - RNA, 19 nt, Artificial Sequence
  Description of Artificial Sequence: Synthetic oligonucleotide
  Sense strand starting at position 2495 of SEQ ID NO: 1241615
gcuucccagaucuggagaa

SEQ ID NO: 1286189 - RNA, 19 nt, Artificial Sequence
  Description of Artificial Sequence: Synthetic oligonucleotide
  Antisense strand to SEQ ID NO: 1286188
uucuccagaucugggaagc

SEQ ID NO: 1286190 - RNA, 19 nt, Artificial Sequence
  Description of Artificial Sequence: Synthetic oligonucleotide
  Sense strand starting at position 2631 of SEQ ID NO: 1241615
uguucuuaucuacaguaac

SEQ ID NO: 1286191 - RNA, 19 nt, Artificial Sequence
  Description of Artificial Sequence: Synthetic oligonucleotide
  Antisense strand to SEQ ID NO: 1286190
guuacuguagauaagaaca

SEQ ID NO: 1286192 - RNA, 19 nt, Artificial Sequence
  Description of Artificial Sequence: Synthetic oligonucleotide
  Sense strand starting at position 2809 of SEQ ID NO: 1241615
ggauaccucuaagaauuau

SEQ ID NO: 1286193 - RNA, 19 nt, Artificial Sequence
  Description of Artificial Sequence: Synthetic oligonucleotide
  Antisense strand to SEQ ID NO: 1286192
auaauucuuagagguaucc

SEQ ID NO: 1286194 - RNA, 19 nt, Artificial Sequence
  Description of Artificial Sequence: Synthetic oligonucleotide
  Sense strand starting at position 2840 of SEQ ID NO: 1241615
ucgugcuguguauucagau

SEQ ID NO: 1286195 - RNA, 19 nt, Artificial Sequence
  Description of Artificial Sequence: Synthetic oligonucleotide
  Antisense strand to SEQ ID NO: 1286194
aucugaauacacagcacga

SEQ ID NO: 1286196 - RNA, 19 nt, Artificial Sequence
  Description of Artificial Sequence: Synthetic oligonucleotide
  Sense strand starting at position 2882 of SEQ ID NO: 1241615
aguggccauagugaaauua

SEQ ID NO: 1286197 - RNA, 19 nt, Artificial Sequence
  Description of Artificial Sequence: Synthetic oligonucleotide
  Antisense strand to SEQ ID NO: 1286196
uaauuucacuauggccacu

SEQ ID NO: 1286198 - RNA, 19 nt, Artificial Sequence
  Description of Artificial Sequence: Synthetic oligonucleotide
  Sense strand starting at position 2916 of SEQ ID NO: 1241615
gugauuguaggucguaaga

SEQ ID NO: 1286199 - RNA, 19 nt, Artificial Sequence
  Description of Artificial Sequence: Synthetic oligonucleotide
  Antisense strand to SEQ ID NO: 1286198
ucuuacgaccuacaaucac

SEQ ID NO: 1286200 - RNA, 19 nt, Artificial Sequence
  Description of Artificial Sequence: Synthetic oligonucleotide
  Sense strand starting at position 3102 of SEQ ID NO: 1241615
uuuguugauauccaagugu

SEQ ID NO: 1286201 - RNA, 19 nt, Artificial Sequence
  Description of Artificial Sequence: Synthetic oligonucleotide
  Antisense strand to SEQ ID NO: 1286200
acacuuggauaucaacaaa

SEQ ID NO: 1286202 - RNA, 19 nt, Artificial Sequence
  Description of Artificial Sequence: Synthetic oligonucleotide
  Sense strand starting at position 3117 of SEQ ID NO: 1241615
guguaagaaugcccacuuu

SEQ ID NO: 1286203 - RNA, 19 nt, Artificial Sequence
  Description of Artificial Sequence: Synthetic oligonucleotide
  Antisense strand to SEQ ID NO: 1286202
aaagugggcauucuuacac

SEQ ID NO: 1286204 - RNA, 19 nt, Artificial Sequence
  Description of Artificial Sequence: Synthetic oligonucleotide
  Sense strand starting at position 3191 of SEQ ID NO: 1241615
aaucaauuuguaugcguuu

SEQ ID NO: 1286205 - RNA, 19 nt, Artificial Sequence
  Description of Artificial Sequence: Synthetic oligonucleotide
  Antisense strand to SEQ ID NO: 1286204
aaacgcauacaaauugauu

SEQ ID NO: 1286206 - RNA, 19 nt, Artificial Sequence
  Description of Artificial Sequence: Synthetic oligonucleotide
  Sense strand starting at position 3356 of SEQ ID NO: 1241615
ucucuugaauagucaaguu

SEQ ID NO: 1286207 - RNA, 19 nt, Artificial Sequence
  Description of Artificial Sequence: Synthetic oligonucleotide
  Antisense strand to SEQ ID NO: 1286206
aacuugacuauucaagaga

SEQ ID NO: 1286208 - RNA, 19 nt, Artificial Sequence
  Description of Artificial Sequence: Synthetic oligonucleotide
  Sense strand starting at position 3555 of SEQ ID NO: 1241615
gugaacagaucuucuguaa

SEQ ID NO: 1286209 - RNA, 19 nt, Artificial Sequence
  Description of Artificial Sequence: Synthetic oligonucleotide
  Antisense strand to SEQ ID NO: 1286208
uuacagaagaucuguucac

SEQ ID NO: 1286210 - RNA, 19 nt, Artificial Sequence
  Description of Artificial Sequence: Synthetic oligonucleotide
  Sense strand starting at position 3803 of SEQ ID NO: 1241615
ugcugaacuuguucuagac

SEQ ID NO: 1286211 - RNA, 19 nt, Artificial Sequence
  Description of Artificial Sequence: Synthetic oligonucleotide
  Antisense strand to SEQ ID NO: 1286210
gucuagaacaaguucagca

SEQ ID NO: 1286212 - RNA, 19 nt, Artificial Sequence
  Description of Artificial Sequence: Synthetic oligonucleotide
  Sense strand starting at position 25 of SEQ ID NO: 1241616
cccucucgugccuucgaua

SEQ ID NO: 1286213 - RNA, 19 nt, Artificial Sequence
  Description of Artificial Sequence: Synthetic oligonucleotide
  Antisense strand to SEQ ID NO: 1286212
uaucgaaggcacgagaggg

SEQ ID NO: 1286214 - RNA, 19 nt, Artificial Sequence
  Description of Artificial Sequence: Synthetic oligonucleotide
  Sense strand starting at position 414 of SEQ ID NO: 1241616
caauuagaguugguacaca

SEQ ID NO: 1286215 - RNA, 19 nt, Artificial Sequence
  Description of Artificial Sequence: Synthetic oligonucleotide
  Antisense strand to SEQ ID NO: 1286214
uguguaccaacucuaauug

SEQ ID NO: 1286216 - RNA, 19 nt, Artificial Sequence
  Description of Artificial Sequence: Synthetic oligonucleotide
  Sense strand starting at position 500 of SEQ ID NO: 1241616
gguucuggcuuuccaacua

SEQ ID NO: 1286217 - RNA, 19 nt, Artificial Sequence
  Description of Artificial Sequence: Synthetic oligonucleotide
  Antisense strand to SEQ ID NO: 1286216
uaguuggaaagccagaacc

SEQ ID NO: 1286218 - RNA, 19 nt, Artificial Sequence
  Description of Artificial Sequence: Synthetic oligonucleotide
  Sense strand starting at position 535 of SEQ ID NO: 1241616
cugauuuaguaauagcuca

SEQ ID NO: 1286219 - RNA, 19 nt, Artificial Sequence
  Description of Artificial Sequence: Synthetic oligonucleotide
  Antisense strand to SEQ ID NO: 1286218
ugagcuauuacuaaaucag

SEQ ID NO: 1286220 - RNA, 19 nt, Artificial Sequence
  Description of Artificial Sequence: Synthetic oligonucleotide
  Sense strand starting at position 658 of SEQ ID NO: 1241616
ccuucugugccagagaaug

SEQ ID NO: 1286221 - RNA, 19 nt, Artificial Sequence
  Description of Artificial Sequence: Synthetic oligonucleotide
  Antisense strand to SEQ ID NO: 1286220
cauucucuggcacagaagg

SEQ ID NO: 1286222 - RNA, 19 nt, Artificial Sequence
  Description of Artificial Sequence: Synthetic oligonucleotide
  Sense strand starting at position 664 of SEQ ID NO: 1241616
gugccagagaaugauugua

SEQ ID NO: 1286223 - RNA, 19 nt, Artificial Sequence
  Description of Artificial Sequence: Synthetic oligonucleotide
  Antisense strand to SEQ ID NO: 1286222
uacaaucauucucuggcac

SEQ ID NO: 1286224 - RNA, 19 nt, Artificial Sequence
  Description of Artificial Sequence: Synthetic oligonucleotide
  Sense strand starting at position 666 of SEQ ID NO: 1241616
gccagagaaugauuguauu

SEQ ID NO: 1286225 - RNA, 19 nt, Artificial Sequence
  Description of Artificial Sequence: Synthetic oligonucleotide
  Antisense strand to SEQ ID NO: 1286224
aauacaaucauucucuggc

SEQ ID NO: 1286226 - RNA, 19 nt, Artificial Sequence
  Description of Artificial Sequence: Synthetic oligonucleotide
  Sense strand starting at position 669 of SEQ ID NO: 1241616
agagaaugauuguauuuga

SEQ ID NO: 1286227 - RNA, 19 nt, Artificial Sequence
  Description of Artificial Sequence: Synthetic oligonucleotide
  Antisense strand to SEQ ID NO: 1286226
ucaaauacaaucauucucu

SEQ ID NO: 1286228 - RNA, 19 nt, Artificial Sequence
  Description of Artificial Sequence: Synthetic oligonucleotide
  Sense strand starting at position 775 of SEQ ID NO: 1241616
uauguuuggcaucagggaa

SEQ ID NO: 1286229 - RNA, 19 nt, Artificial Sequence
  Description of Artificial Sequence: Synthetic oligonucleotide
  Antisense strand to SEQ ID NO: 1286228
uucccugaugccaaacaua

SEQ ID NO: 1286230 - RNA, 19 nt, Artificial Sequence
  Description of Artificial Sequence: Synthetic oligonucleotide
  Sense strand starting at position 954 of SEQ ID NO: 1241616
aaaucagguguuugcaacu

SEQ ID NO: 1286231 - RNA, 19 nt, Artificial Sequence
  Description of Artificial Sequence: Synthetic oligonucleotide
  Antisense strand to SEQ ID NO: 1286230
aguugcaaacaccugauuu

SEQ ID NO: 1286232 - RNA, 19 nt, Artificial Sequence
  Description of Artificial Sequence: Synthetic oligonucleotide
  Sense strand starting at position 1532 of SEQ ID NO: 1241616
ggaacugucugaguccaua

SEQ ID NO: 1286233 - RNA, 19 nt, Artificial Sequence
  Description of Artificial Sequence: Synthetic oligonucleotide
  Antisense strand to SEQ ID NO: 1286232
uauggacucagacaguucc

SEQ ID NO: 1286234 - RNA, 19 nt, Artificial Sequence
  Description of Artificial Sequence: Synthetic oligonucleotide
  Sense strand starting at position 1576 of SEQ ID NO: 1241616
gggauuccuugcccaggga

SEQ ID NO: 1286235 - RNA, 19 nt, Artificial Sequence
  Description of Artificial Sequence: Synthetic oligonucleotide
  Antisense strand to SEQ ID NO: 1286234
ucccugggcaaggaauccc

SEQ ID NO: 1286236 - RNA, 19 nt, Artificial Sequence
  Description of Artificial Sequence: Synthetic oligonucleotide
  Sense strand starting at position 1577 of SEQ ID NO: 1241616
ggauuccuugcccagggaa

SEQ ID NO: 1286237 - RNA, 19 nt, Artificial Sequence
  Description of Artificial Sequence: Synthetic oligonucleotide
  Antisense strand to SEQ ID NO: 1286236
uucccugggcaaggaaucc

SEQ ID NO: 1286238 - RNA, 19 nt, Artificial Sequence
  Description of Artificial Sequence: Synthetic oligonucleotide
  Sense strand starting at position 1651 of SEQ ID NO: 1241616
gagacuucuccagagccau

SEQ ID NO: 1286239 - RNA, 19 nt, Artificial Sequence
  Description of Artificial Sequence: Synthetic oligonucleotide
  Antisense strand to SEQ ID NO: 1286238
auggcucuggagaagucuc

SEQ ID NO: 1286240 - RNA, 19 nt, Artificial Sequence
  Description of Artificial Sequence: Synthetic oligonucleotide
  Sense strand starting at position 1673 of SEQ ID NO: 1241616
ggccucacuuucccagaaa

SEQ ID NO: 1286241 - RNA, 19 nt, Artificial Sequence
  Description of Artificial Sequence: Synthetic oligonucleotide
  Antisense strand to SEQ ID NO: 1286240
uuucugggaaagugaggcc

SEQ ID NO: 1286242 - RNA, 19 nt, Artificial Sequence
  Description of Artificial Sequence: Synthetic oligonucleotide
  Sense strand starting at position 1797 of SEQ ID NO: 1241616
cagaaagacguccauccua

SEQ ID NO: 1286243 - RNA, 19 nt, Artificial Sequence
  Description of Artificial Sequence: Synthetic oligonucleotide
  Antisense strand to SEQ ID NO: 1286242
uaggauggacgucuuucug

SEQ ID NO: 1286244 - RNA, 19 nt, Artificial Sequence
  Description of Artificial Sequence: Synthetic oligonucleotide
  Sense strand starting at position 1810 of SEQ ID NO: 1241616
auccuacuuccugagguuu

SEQ ID NO: 1286245 - RNA, 19 nt, Artificial Sequence
  Description of Artificial Sequence: Synthetic oligonucleotide
  Antisense strand to SEQ ID NO: 1286244
aaaccucaggaaguaggau

SEQ ID NO: 1286246 - RNA, 19 nt, Artificial Sequence
  Description of Artificial Sequence: Synthetic oligonucleotide
  Sense strand starting at position 1943 of SEQ ID NO: 1241616
gucaguuccuaucuuugaa

SEQ ID NO: 1286247 - RNA, 19 nt, Artificial Sequence
  Description of Artificial Sequence: Synthetic oligonucleotide
  Antisense strand to SEQ ID NO: 1286246
uucaaagauaggaacugac

SEQ ID NO: 1286248 - RNA, 19 nt, Artificial Sequence
  Description of Artificial Sequence: Synthetic oligonucleotide
  Sense strand starting at position 1989 of SEQ ID NO: 1241616
auuuguacccagugcucaa

SEQ ID NO: 1286249 - RNA, 19 nt, Artificial Sequence
  Description of Artificial Sequence: Synthetic oligonucleotide
  Antisense strand to SEQ ID NO: 1286248
uugagcacuggguacaaau

SEQ ID NO: 1286250 - RNA, 19 nt, Artificial Sequence
  Description of Artificial Sequence: Synthetic oligonucleotide
  Sense strand starting at position 2002 of SEQ ID NO: 1241616
gcucaaauggcucaucgaa

SEQ ID NO: 1286251 - RNA, 19 nt, Artificial Sequence
  Description of Artificial Sequence: Synthetic oligonucleotide
  Antisense strand to SEQ ID NO: 1286250
uucgaugagccauuugagc

SEQ ID NO: 1286252 - RNA, 19 nt, Artificial Sequence
  Description of Artificial Sequence: Synthetic oligonucleotide
  Sense strand starting at position 2004 of SEQ ID NO: 1241616
ucaaauggcucaucgaaac

SEQ ID NO: 1286253 - RNA, 19 nt, Artificial Sequence
  Description of Artificial Sequence: Synthetic oligonucleotide
  Antisense strand to SEQ ID NO: 1286252
guuucgaugagccauuuga

SEQ ID NO: 1286254 - RNA, 19 nt, Artificial Sequence
  Description of Artificial Sequence: Synthetic oligonucleotide
  Sense strand starting at position 2010 of SEQ ID NO: 1241616
ggcucaucgaaacaucagu

SEQ ID NO: 1286255 - RNA, 19 nt, Artificial Sequence
  Description of Artificial Sequence: Synthetic oligonucleotide
  Antisense strand to SEQ ID NO: 1286254
acugauguuucgaugagcc

SEQ ID NO: 1286256 - RNA, 19 nt, Artificial Sequence
  Description of Artificial Sequence: Synthetic oligonucleotide
  Sense strand starting at position 2015 of SEQ ID NO: 1241616
aucgaaacaucaguuugaa

SEQ ID NO: 1286257 - RNA, 19 nt, Artificial Sequence
  Description of Artificial Sequence: Synthetic oligonucleotide
  Antisense strand to SEQ ID NO: 1286256
uucaaacugauguuucgau

SEQ ID NO: 1286258 - RNA, 19 nt, Artificial Sequence
  Description of Artificial Sequence: Synthetic oligonucleotide
  Sense strand starting at position 2407 of SEQ ID NO: 1241616
cagcuuggugucugagaga

SEQ ID NO: 1286259 - RNA, 19 nt, Artificial Sequence
  Description of Artificial Sequence: Synthetic oligonucleotide
  Antisense strand to SEQ ID NO: 1286258
ucucucagacaccaagcug

SEQ ID NO: 1286260 - RNA, 19 nt, Artificial Sequence
  Description of Artificial Sequence: Synthetic oligonucleotide
  Sense strand starting at position 2432 of SEQ ID NO: 1241616
aggccaguuucugcaauca

SEQ ID NO: 1286261 - RNA, 19 nt, Artificial Sequence
  Description of Artificial Sequence: Synthetic oligonucleotide
  Antisense strand to SEQ ID NO: 1286260
ugauugcagaaacuggccu

SEQ ID NO: 1286262 - RNA, 19 nt, Artificial Sequence
  Description of Artificial Sequence: Synthetic oligonucleotide
  Sense strand starting at position 2655 of SEQ ID NO: 1241616
accacaucugucugcugau

SEQ ID NO: 1286263 - RNA, 19 nt, Artificial Sequence
  Description of Artificial Sequence: Synthetic oligonucleotide
  Antisense strand to SEQ ID NO: 1286262
aucagcagacagauguggu

SEQ ID NO: 1286264 - RNA, 19 nt, Artificial Sequence
  Description of Artificial Sequence: Synthetic oligonucleotide
  Sense strand starting at position 2731 of SEQ ID NO: 1241616
ggaacaaaguccuuguuac

SEQ ID NO: 1286265 - RNA, 19 nt, Artificial Sequence
  Description of Artificial Sequence: Synthetic oligonucleotide
  Antisense strand to SEQ ID NO: 1286264
guaacaaggacuuuguucc

SEQ ID NO: 1286266 - RNA, 19 nt, Artificial Sequence
  Description of Artificial Sequence: Synthetic oligonucleotide
  Sense strand starting at position 2769 of SEQ ID NO: 1241616
ccaaguagacuuggagguu

SEQ ID NO: 1286267 - RNA, 19 nt, Artificial Sequence
  Description of Artificial Sequence: Synthetic oligonucleotide
  Antisense strand to SEQ ID NO: 1286266
aaccuccaagucuacuugg

SEQ ID NO: 1286268 - RNA, 19 nt, Artificial Sequence
  Description of Artificial Sequence: Synthetic oligonucleotide
  Sense strand starting at position 2824 of SEQ ID NO: 1241616
agggaauucuggccaaagc

SEQ ID NO: 1286269 - RNA, 19 nt, Artificial Sequence
  Description of Artificial Sequence: Synthetic oligonucleotide
  Antisense strand to SEQ ID NO: 1286268
gcuuuggccagaauucccu

SEQ ID NO: 1286270 - RNA, 19 nt, Artificial Sequence
  Description of Artificial Sequence: Synthetic oligonucleotide
  Sense strand starting at position 2825 of SEQ ID NO: 1241616
gggaauucuggccaaagcu

SEQ ID NO: 1286271 - RNA, 19 nt, Artificial Sequence
  Description of Artificial Sequence: Synthetic oligonucleotide
  Antisense strand to SEQ ID NO: 1286270
agcuuuggccagaauuccc

SEQ ID NO: 1286272 - RNA, 19 nt, Artificial Sequence
  Description of Artificial Sequence: Synthetic oligonucleotide
  Sense strand starting at position 2973 of SEQ ID NO: 1241616
gcuucccagaucuggagaa

SEQ ID NO: 1286273 - RNA, 19 nt, Artificial Sequence
  Description of Artificial Sequence: Synthetic oligonucleotide
  Antisense strand to SEQ ID NO: 1286272
uucuccagaucugggaagc

SEQ ID NO: 1286274 - RNA, 19 nt, Artificial Sequence
  Description of Artificial Sequence: Synthetic oligonucleotide
  Sense strand starting at position 3109 of SEQ ID NO: 1241616
uguucuuaucuacaguaac

SEQ ID NO: 1286275 - RNA, 19 nt, Artificial Sequence
  Description of Artificial Sequence: Synthetic oligonucleotide
  Antisense strand to SEQ ID NO: 1286274
guuacuguagauaagaaca

SEQ ID NO: 1286276 - RNA, 19 nt, Artificial Sequence
  Description of Artificial Sequence: Synthetic oligonucleotide
  Sense strand starting at position 3287 of SEQ ID NO: 1241616
ggauaccucuaagaauuau

SEQ ID NO: 1286277 - RNA, 19 nt, Artificial Sequence
  Description of Artificial Sequence: Synthetic oligonucleotide
  Antisense strand to SEQ ID NO: 1286276
auaauucuuagagguaucc

SEQ ID NO: 1286278 - RNA, 19 nt, Artificial Sequence
  Description of Artificial Sequence: Synthetic oligonucleotide
  Sense strand starting at position 3318 of SEQ ID NO: 1241616
ucgugcuguguauucagau

SEQ ID NO: 1286279 - RNA, 19 nt, Artificial Sequence
  Description of Artificial Sequence: Synthetic oligonucleotide
  Antisense strand to SEQ ID NO: 1286278
aucugaauacacagcacga

SEQ ID NO: 1286280 - RNA, 19 nt, Artificial Sequence
  Description of Artificial Sequence: Synthetic oligonucleotide
  Sense strand starting at position 3360 of SEQ ID NO: 1241616
aguggccauagugaaauua

SEQ ID NO: 1286281 - RNA, 19 nt, Artificial Sequence
  Description of Artificial Sequence: Synthetic oligonucleotide
  Antisense strand to SEQ ID NO: 1286280
uaauuucacuauggccacu

SEQ ID NO: 1286282 - RNA, 19 nt, Artificial Sequence
  Description of Artificial Sequence: Synthetic oligonucleotide
  Sense strand starting at position 3394 of SEQ ID NO: 1241616
gugauuguaggucguaaga

SEQ ID NO: 1286283 - RNA, 19 nt, Artificial Sequence
  Description of Artificial Sequence: Synthetic oligonucleotide
  Antisense strand to SEQ ID NO: 1286282
ucuuacgaccuacaaucac

SEQ ID NO: 1286284 - RNA, 19 nt, Artificial Sequence
  Description of Artificial Sequence: Synthetic oligonucleotide
  Sense strand starting at position 3580 of SEQ ID NO: 1241616
uuuguugauauccaagugu

SEQ ID NO: 1286285 - RNA, 19 nt, Artificial Sequence
  Description of Artificial Sequence: Synthetic oligonucleotide
  Antisense strand to SEQ ID NO: 1286284
acacuuggauaucaacaaa

SEQ ID NO: 1286286 - RNA, 19 nt, Artificial Sequence
  Description of Artificial Sequence: Synthetic oligonucleotide
  Sense strand starting at position 3595 of SEQ ID NO: 1241616
guguaagaaugcccacuuu

SEQ ID NO: 1286287 - RNA, 19 nt, Artificial Sequence
  Description of Artificial Sequence: Synthetic oligonucleotide
  Antisense strand to SEQ ID NO: 1286286
aaagugggcauucuuacac

SEQ ID NO: 1286288 - RNA, 19 nt, Artificial Sequence
  Description of Artificial Sequence: Synthetic oligonucleotide
  Sense strand starting at position 3669 of SEQ ID NO: 1241616
aaucaauuuguaugcguuu

SEQ ID NO: 1286289 - RNA, 19 nt, Artificial Sequence
  Description of Artificial Sequence: Synthetic oligonucleotide
  Antisense strand to SEQ ID NO: 1286288
aaacgcauacaaauugauu

SEQ ID NO: 1286290 - RNA, 19 nt, Artificial Sequence
  Description of Artificial Sequence: Synthetic oligonucleotide
  Sense strand starting at position 3834 of SEQ ID NO: 1241616
ucucuugaauagucaaguu

SEQ ID NO: 1286291 - RNA, 19 nt, Artificial Sequence
  Description of Artificial Sequence: Synthetic oligonucleotide
  Antisense strand to SEQ ID NO: 1286290
aacuugacuauucaagaga

SEQ ID NO: 1286292 - RNA, 19 nt, Artificial Sequence
  Description of Artificial Sequence: Synthetic oligonucleotide
  Sense strand starting at position 72 of SEQ ID NO: 1241617
acagcuauguucucagauu

SEQ ID NO: 1286293 - RNA, 19 nt, Artificial Sequence
  Description of Artificial Sequence: Synthetic oligonucleotide
  Antisense strand to SEQ ID NO: 1286292
aaucugagaacauagcugu

SEQ ID NO: 1286294 - RNA, 19 nt, Artificial Sequence
  Description of Artificial Sequence: Synthetic oligonucleotide
  Sense strand starting at position 202 of SEQ ID NO: 1241617
cuccuugauuaaguuugau

SEQ ID NO: 1286295 - RNA, 19 nt, Artificial Sequence
  Description of Artificial Sequence: Synthetic oligonucleotide
  Antisense strand to SEQ ID NO: 1286294
aucaaacuuaaucaaggag

SEQ ID NO: 1286296 - RNA, 19 nt, Artificial Sequence
  Description of Artificial Sequence: Synthetic oligonucleotide
  Sense strand starting at position 217 of SEQ ID NO: 1241617
ugauaccuucucugcugaa

SEQ ID NO: 1286297 - RNA, 19 nt, Artificial Sequence
  Description of Artificial Sequence: Synthetic oligonucleotide
  Antisense strand to SEQ ID NO: 1286296
uucagcagagaagguauca

SEQ ID NO: 1286298 - RNA, 19 nt, Artificial Sequence
  Description of Artificial Sequence: Synthetic oligonucleotide
  Sense strand starting at position 253 of SEQ ID NO: 1241617
uuucuuguucuuuagagca

SEQ ID NO: 1286299 - RNA, 19 nt, Artificial Sequence
  Description of Artificial Sequence: Synthetic oligonucleotide
  Antisense strand to SEQ ID NO: 1286298
ugcucuaaagaacaagaaa

SEQ ID NO: 1286300 - RNA, 19 nt, Artificial Sequence
  Description of Artificial Sequence: Synthetic oligonucleotide
  Sense strand starting at position 258 of SEQ ID NO: 1241617
uguucuuuagagcaauaaa

SEQ ID NO: 1286301 - RNA, 19 nt, Artificial Sequence
  Description of Artificial Sequence: Synthetic oligonucleotide
  Antisense strand to SEQ ID NO: 1286300
uuuauugcucuaaagaaca

SEQ ID NO: 1286302 - RNA, 19 nt, Artificial Sequence
  Description of Artificial Sequence: Synthetic oligonucleotide
  Sense strand starting at position 359 of SEQ ID NO: 1241617
ucugcuucuggacauaauu

SEQ ID NO: 1286303 - RNA, 19 nt, Artificial Sequence
  Description of Artificial Sequence: Synthetic oligonucleotide
  Antisense strand to SEQ ID NO: 1286302
aauuauguccagaagcaga

SEQ ID NO: 1286304 - RNA, 19 nt, Artificial Sequence
  Description of Artificial Sequence: Synthetic oligonucleotide
  Sense strand starting at position 525 of SEQ ID NO: 1241617
uagcauaagugaucaguau

SEQ ID NO: 1286305 - RNA, 19 nt, Artificial Sequence
  Description of Artificial Sequence: Synthetic oligonucleotide
  Antisense strand to SEQ ID NO: 1286304
auacugaucacuuaugcua

SEQ ID NO: 1286306 - RNA, 19 nt, Artificial Sequence
  Description of Artificial Sequence: Synthetic oligonucleotide
  Sense strand starting at position 526 of SEQ ID NO: 1241617
agcauaagugaucaguauc

SEQ ID NO: 1286307 - RNA, 19 nt, Artificial Sequence
  Description of Artificial Sequence: Synthetic oligonucleotide
  Antisense strand to SEQ ID NO: 1286306
gauacugaucacuuaugcu

SEQ ID NO: 1286308 - RNA, 19 nt, Artificial Sequence
  Description of Artificial Sequence: Synthetic oligonucleotide
  Sense strand starting at position 536 of SEQ ID NO: 1241617
aucaguaucggcugacuga

SEQ ID NO: 1286309 - RNA, 19 nt, Artificial Sequence
  Description of Artificial Sequence: Synthetic oligonucleotide
  Antisense strand to SEQ ID NO: 1286308
ucagucagccgauacugau

SEQ ID NO: 1286310 - RNA, 19 nt, Artificial Sequence
  Description of Artificial Sequence: Synthetic oligonucleotide
  Sense strand starting at position 537 of SEQ ID NO: 1241617
ucaguaucggcugacugaa

SEQ ID NO: 1286311 - RNA, 19 nt, Artificial Sequence
  Description of Artificial Sequence: Synthetic oligonucleotide
  Antisense strand to SEQ ID NO: 1286310
uucagucagccgauacuga

SEQ ID NO: 1286312 - RNA, 19 nt, Artificial Sequence
  Description of Artificial Sequence: Synthetic oligonucleotide
  Sense strand starting at position 870 of SEQ ID NO: 1241617
uccacaugguccuccagaa

SEQ ID NO: 1286313 - RNA, 19 nt, Artificial Sequence
  Description of Artificial Sequence: Synthetic oligonucleotide
  Antisense strand to SEQ ID NO: 1286312
uucuggaggaccaugugga

SEQ ID NO: 1286314 - RNA, 19 nt, Artificial Sequence
  Description of Artificial Sequence: Synthetic oligonucleotide
  Sense strand starting at position 922 of SEQ ID NO: 1241617
gcaauagagaagugcaguu

SEQ ID NO: 1286315 - RNA, 19 nt, Artificial Sequence
  Description of Artificial Sequence: Synthetic oligonucleotide
  Antisense strand to SEQ ID NO: 1286314
aacugcacuucucuauugc

SEQ ID NO: 1286316 - RNA, 19 nt, Artificial Sequence
  Description of Artificial Sequence: Synthetic oligonucleotide
  Sense strand starting at position 1251 of SEQ ID NO: 1241617
ucugcaugauaccuaagau

SEQ ID NO: 1286317 - RNA, 19 nt, Artificial Sequence
  Description of Artificial Sequence: Synthetic oligonucleotide
  Antisense strand to SEQ ID NO: 1286316
aucuuagguaucaugcaga

SEQ ID NO: 1286318 - RNA, 19 nt, Artificial Sequence
  Description of Artificial Sequence: Synthetic oligonucleotide
  Sense strand starting at position 1272 of SEQ ID NO: 1241617
ggagaacuauaugagaaag

SEQ ID NO: 1286319 - RNA, 19 nt, Artificial Sequence
  Description of Artificial Sequence: Synthetic oligonucleotide
  Antisense strand to SEQ ID NO: 1286318
cuuucucauauaguucucc

SEQ ID NO: 1286320 - RNA, 19 nt, Artificial Sequence
  Description of Artificial Sequence: Synthetic oligonucleotide
  Sense strand starting at position 1274 of SEQ ID NO: 1241617
agaacuauaugagaaagaa

SEQ ID NO: 1286321 - RNA, 19 nt, Artificial Sequence
  Description of Artificial Sequence: Synthetic oligonucleotide
  Antisense strand to SEQ ID NO: 1286320
uucuuucucauauaguucu

SEQ ID NO: 1286322 - RNA, 19 nt, Artificial Sequence
  Description of Artificial Sequence: Synthetic oligonucleotide
  Sense strand starting at position 2058 of SEQ ID NO: 1241617
ucuaguagagacuguaauc

SEQ ID NO: 1286323 - RNA, 19 nt, Artificial Sequence
  Description of Artificial Sequence: Synthetic oligonucleotide
  Antisense strand to SEQ ID NO: 1286322
gauuacagucucuacuaga

SEQ ID NO: 1286324 - RNA, 19 nt, Artificial Sequence
  Description of Artificial Sequence: Synthetic oligonucleotide
  Sense strand starting at position 2111 of SEQ ID NO: 1241617
cugugucuucugcacauua

SEQ ID NO: 1286325 - RNA, 19 nt, Artificial Sequence
  Description of Artificial Sequence: Synthetic oligonucleotide
  Antisense strand to SEQ ID NO: 1286324
uaaugugcagaagacacag

SEQ ID NO: 1286326 - RNA, 19 nt, Artificial Sequence
  Description of Artificial Sequence: Synthetic oligonucleotide
  Sense strand starting at position 2113 of SEQ ID NO: 1241617
gugucuucugcacauuacu

SEQ ID NO: 1286327 - RNA, 19 nt, Artificial Sequence
  Description of Artificial Sequence: Synthetic oligonucleotide
  Antisense strand to SEQ ID NO: 1286326
aguaaugugcagaagacac

SEQ ID NO: 1286328 - RNA, 19 nt, Artificial Sequence
  Description of Artificial Sequence: Synthetic oligonucleotide
  Sense strand starting at position 2148 of SEQ ID NO: 1241617
agcgauuucucuuuccauu

SEQ ID NO: 1286329 - RNA, 19 nt, Artificial Sequence
  Description of Artificial Sequence: Synthetic oligonucleotide
  Antisense strand to SEQ ID NO: 1286328
aauggaaagagaaaucgcu

SEQ ID NO: 1286330 - RNA, 19 nt, Artificial Sequence
  Description of Artificial Sequence: Synthetic oligonucleotide
  Sense strand starting at position 2195 of SEQ ID NO: 1241617
uucccuguugcuguguaau

SEQ ID NO: 1286331 - RNA, 19 nt, Artificial Sequence
  Description of Artificial Sequence: Synthetic oligonucleotide
  Antisense strand to SEQ ID NO: 1286330
auuacacagcaacagggaa

SEQ ID NO: 1286332 - RNA, 19 nt, Artificial Sequence
  Description of Artificial Sequence: Synthetic oligonucleotide
  Sense strand starting at position 2198 of SEQ ID NO: 1241617
ccuguugcuguguaauaaa

SEQ ID NO: 1286333 - RNA, 19 nt, Artificial Sequence
  Description of Artificial Sequence: Synthetic oligonucleotide
  Antisense strand to SEQ ID NO: 1286332
uuuauuacacagcaacagg

SEQ ID NO: 1286334 - RNA, 19 nt, Artificial Sequence
  Description of Artificial Sequence: Synthetic oligonucleotide
  Sense strand starting at position 2287 of SEQ ID NO: 1241617
auuuacauaugggaaauca

SEQ ID NO: 1286335 - RNA, 19 nt, Artificial Sequence
  Description of Artificial Sequence: Synthetic oligonucleotide
  Antisense strand to SEQ ID NO: 1286334
ugauuucccauauguaaau

SEQ ID NO: 1286336 - RNA, 19 nt, Artificial Sequence
  Description of Artificial Sequence: Synthetic oligonucleotide
  Sense strand starting at position 2650 of SEQ ID NO: 1241617
agaaauuugugccaaauaa

SEQ ID NO: 1286337 - RNA, 19 nt, Artificial Sequence
  Description of Artificial Sequence: Synthetic oligonucleotide
  Antisense strand to SEQ ID NO: 1286336
uuauuuggcacaaauuucu

SEQ ID NO: 1286338 - RNA, 19 nt, Artificial Sequence
  Description of Artificial Sequence: Synthetic oligonucleotide
  Sense strand starting at position 2672 of SEQ ID NO: 1241617
gagaaugauugagaagaca

SEQ ID NO: 1286339 - RNA, 19 nt, Artificial Sequence
  Description of Artificial Sequence: Synthetic oligonucleotide
  Antisense strand to SEQ ID NO: 1286338
ugucuucucaaucauucuc

SEQ ID NO: 1286340 - RNA, 19 nt, Artificial Sequence
  Description of Artificial Sequence: Synthetic oligonucleotide
  Sense strand starting at position 2729 of SEQ ID NO: 1241617
uguagaaagccuuauuguc

SEQ ID NO: 1286341 - RNA, 19 nt, Artificial Sequence
  Description of Artificial Sequence: Synthetic oligonucleotide
  Antisense strand to SEQ ID NO: 1286340
gacaauaaggcuuucuaca

SEQ ID NO: 1286342 - RNA, 19 nt, Artificial Sequence
  Description of Artificial Sequence: Synthetic oligonucleotide
  Sense strand starting at position 2959 of SEQ ID NO: 1241617
acaucuuguuaagccagau

SEQ ID NO: 1286343 - RNA, 19 nt, Artificial Sequence
  Description of Artificial Sequence: Synthetic oligonucleotide
  Antisense strand to SEQ ID NO: 1286342
aucuggcuuaacaagaugu

SEQ ID NO: 1286344 - RNA, 19 nt, Artificial Sequence
  Description of Artificial Sequence: Synthetic oligonucleotide
  Sense strand starting at position 2963 of SEQ ID NO: 1241617
cuuguuaagccagauuccu

SEQ ID NO: 1286345 - RNA, 19 nt, Artificial Sequence
  Description of Artificial Sequence: Synthetic oligonucleotide
  Antisense strand to SEQ ID NO: 1286344
aggaaucuggcuuaacaag

SEQ ID NO: 1286346 - RNA, 19 nt, Artificial Sequence
  Description of Artificial Sequence: Synthetic oligonucleotide
  Sense strand starting at position 2999 of SEQ ID NO: 1241617
cuuaacaucugaguagucu

SEQ ID NO: 1286347 - RNA, 19 nt, Artificial Sequence
  Description of Artificial Sequence: Synthetic oligonucleotide
  Antisense strand to SEQ ID NO: 1286346
agacuacucagauguuaag

SEQ ID NO: 1286348 - RNA, 19 nt, Artificial Sequence
  Description of Artificial Sequence: Synthetic oligonucleotide
  Sense strand starting at position 3000 of SEQ ID NO: 1241617
uuaacaucugaguagucuu

SEQ ID NO: 1286349 - RNA, 19 nt, Artificial Sequence
  Description of Artificial Sequence: Synthetic oligonucleotide
  Antisense strand to SEQ ID NO: 1286348
aagacuacucagauguuaa

SEQ ID NO: 1286350 - RNA, 19 nt, Artificial Sequence
  Description of Artificial Sequence: Synthetic oligonucleotide
  Sense strand starting at position 3016 of SEQ ID NO: 1241617
cuugcugauuagguuuaua

SEQ ID NO: 1286351 - RNA, 19 nt, Artificial Sequence
  Description of Artificial Sequence: Synthetic oligonucleotide
  Antisense strand to SEQ ID NO: 1286350
uauaaaccuaaucagcaag

SEQ ID NO: 1286352 - RNA, 19 nt, Artificial Sequence
  Description of Artificial Sequence: Synthetic oligonucleotide
  Sense strand starting at position 3108 of SEQ ID NO: 1241617
ucauaaagauucuaaggag

SEQ ID NO: 1286353 - RNA, 19 nt, Artificial Sequence
  Description of Artificial Sequence: Synthetic oligonucleotide
  Antisense strand to SEQ ID NO: 1286352
cuccuuagaaucuuuauga

SEQ ID NO: 1286354 - RNA, 19 nt, Artificial Sequence
  Description of Artificial Sequence: Synthetic oligonucleotide
  Sense strand starting at position 3367 of SEQ ID NO: 1241617
ugugugacggagugagauu

SEQ ID NO: 1286355 - RNA, 19 nt, Artificial Sequence
  Description of Artificial Sequence: Synthetic oligonucleotide
  Antisense strand to SEQ ID NO: 1286354
aaucucacuccgucacaca

SEQ ID NO: 1286356 - RNA, 19 nt, Artificial Sequence
  Description of Artificial Sequence: Synthetic oligonucleotide
  Sense strand starting at position 3467 of SEQ ID NO: 1241617
agacacauucccugccaga

SEQ ID NO: 1286357 - RNA, 19 nt, Artificial Sequence
  Description of Artificial Sequence: Synthetic oligonucleotide
  Antisense strand to SEQ ID NO: 1286356
ucuggcagggaaugugucu

SEQ ID NO: 1286358 - RNA, 19 nt, Artificial Sequence
  Description of Artificial Sequence: Synthetic oligonucleotide
  Sense strand starting at position 3530 of SEQ ID NO: 1241617
aaaguaugaucucuguagu

SEQ ID NO: 1286359 - RNA, 19 nt, Artificial Sequence
  Description of Artificial Sequence: Synthetic oligonucleotide
  Antisense strand to SEQ ID NO: 1286358
acuacagagaucauacuuu

SEQ ID NO: 1286360 - RNA, 19 nt, Artificial Sequence
  Description of Artificial Sequence: Synthetic oligonucleotide
  Sense strand starting at position 3531 of SEQ ID NO: 1241617
aaguaugaucucuguagua

SEQ ID NO: 1286361 - RNA, 19 nt, Artificial Sequence
  Description of Artificial Sequence: Synthetic oligonucleotide
  Antisense strand to SEQ ID NO: 1286360
uacuacagagaucauacuu

SEQ ID NO: 1286362 - RNA, 19 nt, Artificial Sequence
  Description of Artificial Sequence: Synthetic oligonucleotide
  Sense strand starting at position 3533 of SEQ ID NO: 1241617
guaugaucucuguaguaga

SEQ ID NO: 1286363 - RNA, 19 nt, Artificial Sequence
  Description of Artificial Sequence: Synthetic oligonucleotide
  Antisense strand to SEQ ID NO: 1286362
ucuacuacagagaucauac

SEQ ID NO: 1286364 - RNA, 19 nt, Artificial Sequence
  Description of Artificial Sequence: Synthetic oligonucleotide
  Sense strand starting at position 3611 of SEQ ID NO: 1241617
ugucuaaggcccuauaugu

SEQ ID NO: 1286365 - RNA, 19 nt, Artificial Sequence
  Description of Artificial Sequence: Synthetic oligonucleotide
  Antisense strand to SEQ ID NO: 1286364
acauauagggccuuagaca

SEQ ID NO: 1286366 - RNA, 19 nt, Artificial Sequence
  Description of Artificial Sequence: Synthetic oligonucleotide
  Sense strand starting at position 3898 of SEQ ID NO: 1241617
uugcacuuugcggcuauua

SEQ ID NO: 1286367 - RNA, 19 nt, Artificial Sequence
  Description of Artificial Sequence: Synthetic oligonucleotide
  Antisense strand to SEQ ID NO: 1286366
uaauagccgcaaagugcaa

SEQ ID NO: 1286368 - RNA, 19 nt, Artificial Sequence
  Description of Artificial Sequence: Synthetic oligonucleotide
  Sense strand starting at position 3939 of SEQ ID NO: 1241617
gaacacaggcgcugagaua

SEQ ID NO: 1286369 - RNA, 19 nt, Artificial Sequence
  Description of Artificial Sequence: Synthetic oligonucleotide
  Antisense strand to SEQ ID NO: 1286368
uaucucagcgccuguguuc

SEQ ID NO: 1286370 - RNA, 19 nt, Artificial Sequence
  Description of Artificial Sequence: Synthetic oligonucleotide
  Sense strand starting at position 3970 of SEQ ID NO: 1241617
aucugauauuggccacuaa

SEQ ID NO: 1286371 - RNA, 19 nt, Artificial Sequence
  Description of Artificial Sequence: Synthetic oligonucleotide
  Antisense strand to SEQ ID NO: 1286370
uuaguggccaauaucagau

SEQ ID NO: 1286372 - RNA, 19 nt, Artificial Sequence
  Description of Artificial Sequence: Synthetic oligonucleotide
  Sense strand starting at position 50 of SEQ ID NO: 1241618
uccuucuagcuguaaggau

SEQ ID NO: 1286373 - RNA, 19 nt, Artificial Sequence
  Description of Artificial Sequence: Synthetic oligonucleotide
  Antisense strand to SEQ ID NO: 1286372
auccuuacagcuagaagga

SEQ ID NO: 1286374 - RNA, 19 nt, Artificial Sequence
  Description of Artificial Sequence: Synthetic oligonucleotide
  Sense strand starting at position 67 of SEQ ID NO: 1241618
auacuaugcccauagcuga

SEQ ID NO: 1286375 - RNA, 19 nt, Artificial Sequence
  Description of Artificial Sequence: Synthetic oligonucleotide
  Antisense strand to SEQ ID NO: 1286374
ucagcuaugggcauaguau

SEQ ID NO: 1286376 - RNA, 19 nt, Artificial Sequence
  Description of Artificial Sequence: Synthetic oligonucleotide
  Sense strand starting at position 193 of SEQ ID NO: 1241618
gucacugagcucugaaagu

SEQ ID NO: 1286377 - RNA, 19 nt, Artificial Sequence
  Description of Artificial Sequence: Synthetic oligonucleotide
  Antisense strand to SEQ ID NO: 1286376
acuuucagagcucagugac

SEQ ID NO: 1286378 - RNA, 19 nt, Artificial Sequence
  Description of Artificial Sequence: Synthetic oligonucleotide
  Sense strand starting at position 213 of SEQ ID NO: 1241618
ucaaucccucccugggaaa

SEQ ID NO: 1286379 - RNA, 19 nt, Artificial Sequence
  Description of Artificial Sequence: Synthetic oligonucleotide
  Antisense strand to SEQ ID NO: 1286378
uuucccagggagggauuga

SEQ ID NO: 1286380 - RNA, 19 nt, Artificial Sequence
  Description of Artificial Sequence: Synthetic oligonucleotide
  Sense strand starting at position 224 of SEQ ID NO: 1241618
cugggaaauccuuaucugu

SEQ ID NO: 1286381 - RNA, 19 nt, Artificial Sequence
  Description of Artificial Sequence: Synthetic oligonucleotide
  Antisense strand to SEQ ID NO: 1286380
acagauaaggauuucccag

SEQ ID NO: 1286382 - RNA, 19 nt, Artificial Sequence
  Description of Artificial Sequence: Synthetic oligonucleotide
  Sense strand starting at position 226 of SEQ ID NO: 1241618
gggaaauccuuaucugugu

SEQ ID NO: 1286383 - RNA, 19 nt, Artificial Sequence
  Description of Artificial Sequence: Synthetic oligonucleotide
  Antisense strand to SEQ ID NO: 1286382
acacagauaaggauuuccc

SEQ ID NO: 1286384 - RNA, 19 nt, Artificial Sequence
  Description of Artificial Sequence: Synthetic oligonucleotide
  Sense strand starting at position 235 of SEQ ID NO: 1241618
uuaucugugucucucuaaa

SEQ ID NO: 1286385 - RNA, 19 nt, Artificial Sequence
  Description of Artificial Sequence: Synthetic oligonucleotide
  Antisense strand to SEQ ID NO: 1286384
uuuagagagacacagauaa

SEQ ID NO: 1286386 - RNA, 19 nt, Artificial Sequence
  Description of Artificial Sequence: Synthetic oligonucleotide
  Sense strand starting at position 415 of SEQ ID NO: 1241618
cuaggauuaggcugagguu

SEQ ID NO: 1286387 - RNA, 19 nt, Artificial Sequence
  Description of Artificial Sequence: Synthetic oligonucleotide
  Antisense strand to SEQ ID NO: 1286386
aaccucagccuaauccuag

SEQ ID NO: 1286388 - RNA, 19 nt, Artificial Sequence
  Description of Artificial Sequence: Synthetic oligonucleotide
  Sense strand starting at position 416 of SEQ ID NO: 1241618
uaggauuaggcugagguua

SEQ ID NO: 1286389 - RNA, 19 nt, Artificial Sequence
  Description of Artificial Sequence: Synthetic oligonucleotide
  Antisense strand to SEQ ID NO: 1286388
uaaccucagccuaauccua

SEQ ID NO: 1286390 - RNA, 19 nt, Artificial Sequence
  Description of Artificial Sequence: Synthetic oligonucleotide
  Sense strand starting at position 933 of SEQ ID NO: 1241618
ugauccuagccuugucaga

SEQ ID NO: 1286391 - RNA, 19 nt, Artificial Sequence
  Description of Artificial Sequence: Synthetic oligonucleotide
  Antisense strand to SEQ ID NO: 1286390
ucugacaaggcuaggauca

SEQ ID NO: 1286392 - RNA, 19 nt, Artificial Sequence
  Description of Artificial Sequence: Synthetic oligonucleotide
  Sense strand starting at position 935 of SEQ ID NO: 1241618
auccuagccuugucagauu

SEQ ID NO: 1286393 - RNA, 19 nt, Artificial Sequence
  Description of Artificial Sequence: Synthetic oligonucleotide
  Antisense strand to SEQ ID NO: 1286392
aaucugacaaggcuaggau

SEQ ID NO: 1286394 - RNA, 19 nt, Artificial Sequence
  Description of Artificial Sequence: Synthetic oligonucleotide
  Sense strand starting at position 1756 of SEQ ID NO: 1241618
uccuguuucucaucaaagg

SEQ ID NO: 1286395 - RNA, 19 nt, Artificial Sequence
  Description of Artificial Sequence: Synthetic oligonucleotide
  Antisense strand to SEQ ID NO: 1286394
ccuuugaugagaaacagga

SEQ ID NO: 1286396 - RNA, 19 nt, Artificial Sequence
  Description of Artificial Sequence: Synthetic oligonucleotide
  Sense strand starting at position 1757 of SEQ ID NO: 1241618
ccuguuucucaucaaagga

SEQ ID NO: 1286397 - RNA, 19 nt, Artificial Sequence
  Description of Artificial Sequence: Synthetic oligonucleotide
  Antisense strand to SEQ ID NO: 1286396
uccuuugaugagaaacagg

SEQ ID NO: 1286398 - RNA, 19 nt, Artificial Sequence
  Description of Artificial Sequence: Synthetic oligonucleotide
  Sense strand starting at position 1972 of SEQ ID NO: 1241618
cuccaaugccauugagaga

SEQ ID NO: 1286399 - RNA, 19 nt, Artificial Sequence
  Description of Artificial Sequence: Synthetic oligonucleotide
  Antisense strand to SEQ ID NO: 1286398
ucucucaauggcauuggag

SEQ ID NO: 1286400 - RNA, 19 nt, Artificial Sequence
  Description of Artificial Sequence: Synthetic oligonucleotide
  Sense strand starting at position 2007 of SEQ ID NO: 1241618
ggagcugaucuugaguuau

SEQ ID NO: 1286401 - RNA, 19 nt, Artificial Sequence
  Description of Artificial Sequence: Synthetic oligonucleotide
  Antisense strand to SEQ ID NO: 1286400
auaacucaagaucagcucc

SEQ ID NO: 1286402 - RNA, 19 nt, Artificial Sequence
  Description of Artificial Sequence: Synthetic oligonucleotide
  Sense strand starting at position 2051 of SEQ ID NO: 1241618
gccucaagucaucacaagu

SEQ ID NO: 1286403 - RNA, 19 nt, Artificial Sequence
  Description of Artificial Sequence: Synthetic oligonucleotide
  Antisense strand to SEQ ID NO: 1286402
acuugugaugacuugaggc

SEQ ID NO: 1286404 - RNA, 19 nt, Artificial Sequence
  Description of Artificial Sequence: Synthetic oligonucleotide
  Sense strand starting at position 2500 of SEQ ID NO: 1241618
acugcuguugaguaaggga

SEQ ID NO: 1286405 - RNA, 19 nt, Artificial Sequence
  Description of Artificial Sequence: Synthetic oligonucleotide
  Antisense strand to SEQ ID NO: 1286404
ucccuuacucaacagcagu

SEQ ID NO: 1286406 - RNA, 19 nt, Artificial Sequence
  Description of Artificial Sequence: Synthetic oligonucleotide
  Sense strand starting at position 2620 of SEQ ID NO: 1241618
ucacacugaccuugcaaga

SEQ ID NO: 1286407 - RNA, 19 nt, Artificial Sequence
  Description of Artificial Sequence: Synthetic oligonucleotide
  Antisense strand to SEQ ID NO: 1286406
ucuugcaaggucaguguga

SEQ ID NO: 1286408 - RNA, 19 nt, Artificial Sequence
  Description of Artificial Sequence: Synthetic oligonucleotide
  Sense strand starting at position 2704 of SEQ ID NO: 1241618
cugagcuguucucuaaauu

SEQ ID NO: 1286409 - RNA, 19 nt, Artificial Sequence
  Description of Artificial Sequence: Synthetic oligonucleotide
  Antisense strand to SEQ ID NO: 1286408
aauuuagagaacagcucag

SEQ ID NO: 1286410 - RNA, 19 nt, Artificial Sequence
  Description of Artificial Sequence: Synthetic oligonucleotide
  Sense strand starting at position 2705 of SEQ ID NO: 1241618
ugagcuguucucuaaauua

SEQ ID NO: 1286411 - RNA, 19 nt, Artificial Sequence
  Description of Artificial Sequence: Synthetic oligonucleotide
  Antisense strand to SEQ ID NO: 1286410
uaauuuagagaacagcuca

SEQ ID NO: 1286412 - RNA, 19 nt, Artificial Sequence
  Description of Artificial Sequence: Synthetic oligonucleotide
  Sense strand starting at position 2715 of SEQ ID NO: 1241618
ucuaaauuauuccuguugu

SEQ ID NO: 1286413 - RNA, 19 nt, Artificial Sequence
  Description of Artificial Sequence: Synthetic oligonucleotide
  Antisense strand to SEQ ID NO: 1286412
acaacaggaauaauuuaga

SEQ ID NO: 1286414 - RNA, 19 nt, Artificial Sequence
  Description of Artificial Sequence: Synthetic oligonucleotide
  Sense strand starting at position 2793 of SEQ ID NO: 1241618
cuucgaagugcucaacaca

SEQ ID NO: 1286415 - RNA, 19 nt, Artificial Sequence
  Description of Artificial Sequence: Synthetic oligonucleotide
  Antisense strand to SEQ ID NO: 1286414
uguguugagcacuucgaag

SEQ ID NO: 1286416 - RNA, 19 nt, Artificial Sequence
  Description of Artificial Sequence: Synthetic oligonucleotide
  Sense strand starting at position 2822 of SEQ ID NO: 1241618
uauagaaaguggucaaggu

SEQ ID NO: 1286417 - RNA, 19 nt, Artificial Sequence
  Description of Artificial Sequence: Synthetic oligonucleotide
  Antisense strand to SEQ ID NO: 1286416
accuugaccacuuucuaua

SEQ ID NO: 1286418 - RNA, 19 nt, Artificial Sequence
  Description of Artificial Sequence: Synthetic oligonucleotide
  Sense strand starting at position 2823 of SEQ ID NO: 1241618
auagaaaguggucaagguu

SEQ ID NO: 1286419 - RNA, 19 nt, Artificial Sequence
  Description of Artificial Sequence: Synthetic oligonucleotide
  Antisense strand to SEQ ID NO: 1286418
aaccuugaccacuuucuau

SEQ ID NO: 1286420 - RNA, 19 nt, Artificial Sequence
  Description of Artificial Sequence: Synthetic oligonucleotide
  Sense strand starting at position 2826 of SEQ ID NO: 1241618
gaaaguggucaagguuauu

SEQ ID NO: 1286421 - RNA, 19 nt, Artificial Sequence
  Description of Artificial Sequence: Synthetic oligonucleotide
  Antisense strand to SEQ ID NO: 1286420
aauaaccuugaccacuuuc

SEQ ID NO: 1286422 - RNA, 19 nt, Artificial Sequence
  Description of Artificial Sequence: Synthetic oligonucleotide
  Sense strand starting at position 3085 of SEQ ID NO: 1241618
gacaauaacugauagagag

SEQ ID NO: 1286423 - RNA, 19 nt, Artificial Sequence
  Description of Artificial Sequence: Synthetic oligonucleotide
  Antisense strand to SEQ ID NO: 1286422
cucucuaucaguuauuguc

SEQ ID NO: 1286424 - RNA, 19 nt, Artificial Sequence
  Description of Artificial Sequence: Synthetic oligonucleotide
  Sense strand starting at position 3230 of SEQ ID NO: 1241618
uccugaauguguccucauu

SEQ ID NO: 1286425 - RNA, 19 nt, Artificial Sequence
  Description of Artificial Sequence: Synthetic oligonucleotide
  Antisense strand to SEQ ID NO: 1286424
aaugaggacacauucagga

SEQ ID NO: 1286426 - RNA, 19 nt, Artificial Sequence
  Description of Artificial Sequence: Synthetic oligonucleotide
  Sense strand starting at position 3232 of SEQ ID NO: 1241618
cugaauguguccucauuaa

SEQ ID NO: 1286427 - RNA, 19 nt, Artificial Sequence
  Description of Artificial Sequence: Synthetic oligonucleotide
  Antisense strand to SEQ ID NO: 1286426
uuaaugaggacacauucag

SEQ ID NO: 1286428 - RNA, 19 nt, Artificial Sequence
  Description of Artificial Sequence: Synthetic oligonucleotide
  Sense strand starting at position 3236 of SEQ ID NO: 1241618
auguguccucauuaaacaa

SEQ ID NO: 1286429 - RNA, 19 nt, Artificial Sequence
  Description of Artificial Sequence: Synthetic oligonucleotide
  Antisense strand to SEQ ID NO: 1286428
uuguuuaaugaggacacau

SEQ ID NO: 1286430 - RNA, 19 nt, Artificial Sequence
  Description of Artificial Sequence: Synthetic oligonucleotide
  Sense strand starting at position 3303 of SEQ ID NO: 1241618
aguacugucuccuuucuaa

SEQ ID NO: 1286431 - RNA, 19 nt, Artificial Sequence
  Description of Artificial Sequence: Synthetic oligonucleotide
  Antisense strand to SEQ ID NO: 1286430
uuagaaaggagacaguacu

SEQ ID NO: 1286432 - RNA, 19 nt, Artificial Sequence
  Description of Artificial Sequence: Synthetic oligonucleotide
  Sense strand starting at position 3568 of SEQ ID NO: 1241618
uggagacaguucccaaacu

SEQ ID NO: 1286433 - RNA, 19 nt, Artificial Sequence
  Description of Artificial Sequence: Synthetic oligonucleotide
  Antisense strand to SEQ ID NO: 1286432
aguuugggaacugucucca

SEQ ID NO: 1286434 - RNA, 19 nt, Artificial Sequence
  Description of Artificial Sequence: Synthetic oligonucleotide
  Sense strand starting at position 3594 of SEQ ID NO: 1241618
guuggaaucaacgggagau

SEQ ID NO: 1286435 - RNA, 19 nt, Artificial Sequence
  Description of Artificial Sequence: Synthetic oligonucleotide
  Antisense strand to SEQ ID NO: 1286434
aucucccguugauuccaac

SEQ ID NO: 1286436 - RNA, 19 nt, Artificial Sequence
  Description of Artificial Sequence: Synthetic oligonucleotide
  Sense strand starting at position 3625 of SEQ ID NO: 1241618
uggcuuccaccuugauaca

SEQ ID NO: 1286437 - RNA, 19 nt, Artificial Sequence
  Description of Artificial Sequence: Synthetic oligonucleotide
  Antisense strand to SEQ ID NO: 1286436
uguaucaagguggaagcca

SEQ ID NO: 1286438 - RNA, 19 nt, Artificial Sequence
  Description of Artificial Sequence: Synthetic oligonucleotide
  Sense strand starting at position 3626 of SEQ ID NO: 1241618
ggcuuccaccuugauacau

SEQ ID NO: 1286439 - RNA, 19 nt, Artificial Sequence
  Description of Artificial Sequence: Synthetic oligonucleotide
  Antisense strand to SEQ ID NO: 1286438
auguaucaagguggaagcc

SEQ ID NO: 1286440 - RNA, 19 nt, Artificial Sequence
  Description of Artificial Sequence: Synthetic oligonucleotide
  Sense strand starting at position 3736 of SEQ ID NO: 1241618
accacugaaccaugguaua

SEQ ID NO: 1286441 - RNA, 19 nt, Artificial Sequence
  Description of Artificial Sequence: Synthetic oligonucleotide
  Antisense strand to SEQ ID NO: 1286440
uauaccaugguucaguggu

SEQ ID NO: 1286442 - RNA, 19 nt, Artificial Sequence
  Description of Artificial Sequence: Synthetic oligonucleotide
  Sense strand starting at position 3781 of SEQ ID NO: 1241618
uggauaaaggcuuagcuaa

SEQ ID NO: 1286443 - RNA, 19 nt, Artificial Sequence
  Description of Artificial Sequence: Synthetic oligonucleotide
  Antisense strand to SEQ ID NO: 1286442
uuagcuaagccuuuaucca

SEQ ID NO: 1286444 - RNA, 19 nt, Artificial Sequence
  Description of Artificial Sequence: Synthetic oligonucleotide
  Sense strand starting at position 3851 of SEQ ID NO: 1241618
ucucccaguuaguugauau

SEQ ID NO: 1286445 - RNA, 19 nt, Artificial Sequence
  Description of Artificial Sequence: Synthetic oligonucleotide
  Antisense strand to SEQ ID NO: 1286444
auaucaacuaacugggaga

SEQ ID NO: 1286446 - RNA, 19 nt, Artificial Sequence
  Description of Artificial Sequence: Synthetic oligonucleotide
  Sense strand starting at position 3958 of SEQ ID NO: 1241618
auaucugugucuuucuaau

SEQ ID NO: 1286447 - RNA, 19 nt, Artificial Sequence
  Description of Artificial Sequence: Synthetic oligonucleotide
  Antisense strand to SEQ ID NO: 1286446
auuagaaagacacagauau

SEQ ID NO: 1286448 - RNA, 19 nt, Artificial Sequence
  Description of Artificial Sequence: Synthetic oligonucleotide
  Sense strand starting at position 3960 of SEQ ID NO: 1241618
aucugugucuuucuaauug

SEQ ID NO: 1286449 - RNA, 19 nt, Artificial Sequence
  Description of Artificial Sequence: Synthetic oligonucleotide
  Antisense strand to SEQ ID NO: 1286448
caauuagaaagacacagau

SEQ ID NO: 1286450 - RNA, 19 nt, Artificial Sequence
  Description of Artificial Sequence: Synthetic oligonucleotide
  Sense strand starting at position 3970 of SEQ ID NO: 1241618
uucuaauuggcaggaagaa

SEQ ID NO: 1286451 - RNA, 19 nt, Artificial Sequence
  Description of Artificial Sequence: Synthetic oligonucleotide
  Antisense strand to SEQ ID NO: 1286450
uucuuccugccaauuagaa

SEQ ID NO: 1286452 - RNA, 19 nt, Artificial Sequence
  Description of Artificial Sequence: Synthetic oligonucleotide
  Sense strand starting at position 368 of SEQ ID NO: 1241619
ugauccuagccuugucaga

SEQ ID NO: 1286453 - RNA, 19 nt, Artificial Sequence
  Description of Artificial Sequence: Synthetic oligonucleotide
  Antisense strand to SEQ ID NO: 1286452
ucugacaaggcuaggauca

SEQ ID NO: 1286454 - RNA, 19 nt, Artificial Sequence
  Description of Artificial Sequence: Synthetic oligonucleotide
  Sense strand starting at position 370 of SEQ ID NO: 1241619
auccuagccuugucagauu

SEQ ID NO: 1286455 - RNA, 19 nt, Artificial Sequence
  Description of Artificial Sequence: Synthetic oligonucleotide
  Antisense strand to SEQ ID NO: 1286454
aaucugacaaggcuaggau

SEQ ID NO: 1286456 - RNA, 19 nt, Artificial Sequence
  Description of Artificial Sequence: Synthetic oligonucleotide
  Sense strand starting at position 1191 of SEQ ID NO: 1241619
uccuguuucucaucaaagg

SEQ ID NO: 1286457 - RNA, 19 nt, Artificial Sequence
  Description of Artificial Sequence: Synthetic oligonucleotide
  Antisense strand to SEQ ID NO: 1286456
ccuuugaugagaaacagga

SEQ ID NO: 1286458 - RNA, 19 nt, Artificial Sequence
  Description of Artificial Sequence: Synthetic oligonucleotide
  Sense strand starting at position 1192 of SEQ ID NO: 1241619
ccuguuucucaucaaagga

SEQ ID NO: 1286459 - RNA, 19 nt, Artificial Sequence
  Description of Artificial Sequence: Synthetic oligonucleotide
  Antisense strand to SEQ ID NO: 1286458
uccuuugaugagaaacagg

SEQ ID NO: 1286460 - RNA, 19 nt, Artificial Sequence
  Description of Artificial Sequence: Synthetic oligonucleotide
  Sense strand starting at position 1407 of SEQ ID NO: 1241619
cuccaaugccauugagaga

SEQ ID NO: 1286461 - RNA, 19 nt, Artificial Sequence
  Description of Artificial Sequence: Synthetic oligonucleotide
  Antisense strand to SEQ ID NO: 1286460
ucucucaauggcauuggag

SEQ ID NO: 1286462 - RNA, 19 nt, Artificial Sequence
  Description of Artificial Sequence: Synthetic oligonucleotide
  Sense strand starting at position 1442 of SEQ ID NO: 1241619
ggagcugaucuugaguuau

SEQ ID NO: 1286463 - RNA, 19 nt, Artificial Sequence
  Description of Artificial Sequence: Synthetic oligonucleotide
  Antisense strand to SEQ ID NO: 1286462
auaacucaagaucagcucc

SEQ ID NO: 1286464 - RNA, 19 nt, Artificial Sequence
  Description of Artificial Sequence: Synthetic oligonucleotide
  Sense strand starting at position 1486 of SEQ ID NO: 1241619
gccucaagucaucacaagu

SEQ ID NO: 1286465 - RNA, 19 nt, Artificial Sequence
  Description of Artificial Sequence: Synthetic oligonucleotide
  Antisense strand to SEQ ID NO: 1286464
acuugugaugacuugaggc

SEQ ID NO: 1286466 - RNA, 19 nt, Artificial Sequence
  Description of Artificial Sequence: Synthetic oligonucleotide
  Sense strand starting at position 1908 of SEQ ID NO: 1241619
aagagugacuucgcaucuu

SEQ ID NO: 1286467 - RNA, 19 nt, Artificial Sequence
  Description of Artificial Sequence: Synthetic oligonucleotide
  Antisense strand to SEQ ID NO: 1286466
aagaugcgaagucacucuu

SEQ ID NO: 1286468 - RNA, 19 nt, Artificial Sequence
  Description of Artificial Sequence: Synthetic oligonucleotide
  Sense strand starting at position 1935 of SEQ ID NO: 1241619
acugcuguugaguaaggga

SEQ ID NO: 1286469 - RNA, 19 nt, Artificial Sequence
  Description of Artificial Sequence: Synthetic oligonucleotide
  Antisense strand to SEQ ID NO: 1286468
ucccuuacucaacagcagu

SEQ ID NO: 1286470 - RNA, 19 nt, Artificial Sequence
  Description of Artificial Sequence: Synthetic oligonucleotide
  Sense strand starting at position 2055 of SEQ ID NO: 1241619
ucacacugaccuugcaaga

SEQ ID NO: 1286471 - RNA, 19 nt, Artificial Sequence
  Description of Artificial Sequence: Synthetic oligonucleotide
  Antisense strand to SEQ ID NO: 1286470
ucuugcaaggucaguguga

SEQ ID NO: 1286472 - RNA, 19 nt, Artificial Sequence
  Description of Artificial Sequence: Synthetic oligonucleotide
  Sense strand starting at position 2139 of SEQ ID NO: 1241619
cugagcuguucucuaaauu

SEQ ID NO: 1286473 - RNA, 19 nt, Artificial Sequence
  Description of Artificial Sequence: Synthetic oligonucleotide
  Antisense strand to SEQ ID NO: 1286472
aauuuagagaacagcucag

SEQ ID NO: 1286474 - RNA, 19 nt, Artificial Sequence
  Description of Artificial Sequence: Synthetic oligonucleotide
  Sense strand starting at position 2140 of SEQ ID NO: 1241619
ugagcuguucucuaaauua

SEQ ID NO: 1286475 - RNA, 19 nt, Artificial Sequence
  Description of Artificial Sequence: Synthetic oligonucleotide
  Antisense strand to SEQ ID NO: 1286474
uaauuuagagaacagcuca

SEQ ID NO: 1286476 - RNA, 19 nt, Artificial Sequence
  Description of Artificial Sequence: Synthetic oligonucleotide
  Sense strand starting at position 2150 of SEQ ID NO: 1241619
ucuaaauuauuccuguugu

SEQ ID NO: 1286477 - RNA, 19 nt, Artificial Sequence
  Description of Artificial Sequence: Synthetic oligonucleotide
  Antisense strand to SEQ ID NO: 1286476
acaacaggaauaauuuaga

SEQ ID NO: 1286478 - RNA, 19 nt, Artificial Sequence
  Description of Artificial Sequence: Synthetic oligonucleotide
  Sense strand starting at position 2228 of SEQ ID NO: 1241619
cuucgaagugcucaacaca

SEQ ID NO: 1286479 - RNA, 19 nt, Artificial Sequence
  Description of Artificial Sequence: Synthetic oligonucleotide
  Antisense strand to SEQ ID NO: 1286478
uguguugagcacuucgaag

SEQ ID NO: 1286480 - RNA, 19 nt, Artificial Sequence
  Description of Artificial Sequence: Synthetic oligonucleotide
  Sense strand starting at position 2257 of SEQ ID NO: 1241619
uauagaaaguggucaaggu

SEQ ID NO: 1286481 - RNA, 19 nt, Artificial Sequence
  Description of Artificial Sequence: Synthetic oligonucleotide
  Antisense strand to SEQ ID NO: 1286480
accuugaccacuuucuaua

SEQ ID NO: 1286482 - RNA, 19 nt, Artificial Sequence
  Description of Artificial Sequence: Synthetic oligonucleotide
  Sense strand starting at position 2258 of SEQ ID NO: 1241619
auagaaaguggucaagguu

SEQ ID NO: 1286483 - RNA, 19 nt, Artificial Sequence
  Description of Artificial Sequence: Synthetic oligonucleotide
  Antisense strand to SEQ ID NO: 1286482
aaccuugaccacuuucuau

SEQ ID NO: 1286484 - RNA, 19 nt, Artificial Sequence
  Description of Artificial Sequence: Synthetic oligonucleotide
  Sense strand starting at position 2261 of SEQ ID NO: 1241619
gaaaguggucaagguuauu

SEQ ID NO: 1286485 - RNA, 19 nt, Artificial Sequence
  Description of Artificial Sequence: Synthetic oligonucleotide
  Antisense strand to SEQ ID NO: 1286484
aauaaccuugaccacuuuc

SEQ ID NO: 1286486 - RNA, 19 nt, Artificial Sequence
  Description of Artificial Sequence: Synthetic oligonucleotide
  Sense strand starting at position 2506 of SEQ ID NO: 1241619
ucuugcuguucccugacaa

SEQ ID NO: 1286487 - RNA, 19 nt, Artificial Sequence
  Description of Artificial Sequence: Synthetic oligonucleotide
  Antisense strand to SEQ ID NO: 1286486
uugucagggaacagcaaga

SEQ ID NO: 1286488 - RNA, 19 nt, Artificial Sequence
  Description of Artificial Sequence: Synthetic oligonucleotide
  Sense strand starting at position 2520 of SEQ ID NO: 1241619
gacaauaacugauagagag

SEQ ID NO: 1286489 - RNA, 19 nt, Artificial Sequence
  Description of Artificial Sequence: Synthetic oligonucleotide
  Antisense strand to SEQ ID NO: 1286488
cucucuaucaguuauuguc

SEQ ID NO: 1286490 - RNA, 19 nt, Artificial Sequence
  Description of Artificial Sequence: Synthetic oligonucleotide
  Sense strand starting at position 2665 of SEQ ID NO: 1241619
uccugaauguguccucauu

SEQ ID NO: 1286491 - RNA, 19 nt, Artificial Sequence
  Description of Artificial Sequence: Synthetic oligonucleotide
  Antisense strand to SEQ ID NO: 1286490
aaugaggacacauucagga

SEQ ID NO: 1286492 - RNA, 19 nt, Artificial Sequence
  Description of Artificial Sequence: Synthetic oligonucleotide
  Sense strand starting at position 2667 of SEQ ID NO: 1241619
cugaauguguccucauuaa

SEQ ID NO: 1286493 - RNA, 19 nt, Artificial Sequence
  Description of Artificial Sequence: Synthetic oligonucleotide
  Antisense strand to SEQ ID NO: 1286492
uuaaugaggacacauucag

SEQ ID NO: 1286494 - RNA, 19 nt, Artificial Sequence
  Description of Artificial Sequence: Synthetic oligonucleotide
  Sense strand starting at position 2671 of SEQ ID NO: 1241619
auguguccucauuaaacaa

SEQ ID NO: 1286495 - RNA, 19 nt, Artificial Sequence
  Description of Artificial Sequence: Synthetic oligonucleotide
  Antisense strand to SEQ ID NO: 1286494
uuguuuaaugaggacacau

SEQ ID NO: 1286496 - RNA, 19 nt, Artificial Sequence
  Description of Artificial Sequence: Synthetic oligonucleotide
  Sense strand starting at position 2738 of SEQ ID NO: 1241619
aguacugucuccuuucuaa

SEQ ID NO: 1286497 - RNA, 19 nt, Artificial Sequence
  Description of Artificial Sequence: Synthetic oligonucleotide
  Antisense strand to SEQ ID NO: 1286496
uuagaaaggagacaguacu

SEQ ID NO: 1286498 - RNA, 19 nt, Artificial Sequence
  Description of Artificial Sequence: Synthetic oligonucleotide
  Sense strand starting at position 3003 of SEQ ID NO: 1241619
uggagacaguucccaaacu

SEQ ID NO: 1286499 - RNA, 19 nt, Artificial Sequence
  Description of Artificial Sequence: Synthetic oligonucleotide
  Antisense strand to SEQ ID NO: 1286498
aguuugggaacugucucca

SEQ ID NO: 1286500 - RNA, 19 nt, Artificial Sequence
  Description of Artificial Sequence: Synthetic oligonucleotide
  Sense strand starting at position 3029 of SEQ ID NO: 1241619
guuggaaucaacgggagau

SEQ ID NO: 1286501 - RNA, 19 nt, Artificial Sequence
  Description of Artificial Sequence: Synthetic oligonucleotide
  Antisense strand to SEQ ID NO: 1286500
aucucccguugauuccaac

SEQ ID NO: 1286502 - RNA, 19 nt, Artificial Sequence
  Description of Artificial Sequence: Synthetic oligonucleotide
  Sense strand starting at position 3060 of SEQ ID NO: 1241619
uggcuuccaccuugauaca

SEQ ID NO: 1286503 - RNA, 19 nt, Artificial Sequence
  Description of Artificial Sequence: Synthetic oligonucleotide
  Antisense strand to SEQ ID NO: 1286502
uguaucaagguggaagcca

SEQ ID NO: 1286504 - RNA, 19 nt, Artificial Sequence
  Description of Artificial Sequence: Synthetic oligonucleotide
  Sense strand starting at position 3061 of SEQ ID NO: 1241619
ggcuuccaccuugauacau

SEQ ID NO: 1286505 - RNA, 19 nt, Artificial Sequence
  Description of Artificial Sequence: Synthetic oligonucleotide
  Antisense strand to SEQ ID NO: 1286504
auguaucaagguggaagcc

SEQ ID NO: 1286506 - RNA, 19 nt, Artificial Sequence
  Description of Artificial Sequence: Synthetic oligonucleotide
  Sense strand starting at position 3171 of SEQ ID NO: 1241619
accacugaaccaugguaua

SEQ ID NO: 1286507 - RNA, 19 nt, Artificial Sequence
  Description of Artificial Sequence: Synthetic oligonucleotide
  Antisense strand to SEQ ID NO: 1286506
uauaccaugguucaguggu

SEQ ID NO: 1286508 - RNA, 19 nt, Artificial Sequence
  Description of Artificial Sequence: Synthetic oligonucleotide
  Sense strand starting at position 3216 of SEQ ID NO: 1241619
uggauaaaggcuuagcuaa

SEQ ID NO: 1286509 - RNA, 19 nt, Artificial Sequence
  Description of Artificial Sequence: Synthetic oligonucleotide
  Antisense strand to SEQ ID NO: 1286508
uuagcuaagccuuuaucca

SEQ ID NO: 1286510 - RNA, 19 nt, Artificial Sequence
  Description of Artificial Sequence: Synthetic oligonucleotide
  Sense strand starting at position 3286 of SEQ ID NO: 1241619
ucucccaguuaguugauau

SEQ ID NO: 1286511 - RNA, 19 nt, Artificial Sequence
  Description of Artificial Sequence: Synthetic oligonucleotide
  Antisense strand to SEQ ID NO: 1286510
auaucaacuaacugggaga

SEQ ID NO: 1286512 - RNA, 19 nt, Artificial Sequence
  Description of Artificial Sequence: Synthetic oligonucleotide
  Sense strand starting at position 3393 of SEQ ID NO: 1241619
auaucugugucuuucuaau

SEQ ID NO: 1286513 - RNA, 19 nt, Artificial Sequence
  Description of Artificial Sequence: Synthetic oligonucleotide
  Antisense strand to SEQ ID NO: 1286512
auuagaaagacacagauau

SEQ ID NO: 1286514 - RNA, 19 nt, Artificial Sequence
  Description of Artificial Sequence: Synthetic oligonucleotide
  Sense strand starting at position 3395 of SEQ ID NO: 1241619
aucugugucuuucuaauug

SEQ ID NO: 1286515 - RNA, 19 nt, Artificial Sequence
  Description of Artificial Sequence: Synthetic oligonucleotide
  Antisense strand to SEQ ID NO: 1286514
caauuagaaagacacagau

SEQ ID NO: 1286516 - RNA, 19 nt, Artificial Sequence
  Description of Artificial Sequence: Synthetic oligonucleotide
  Sense strand starting at position 3405 of SEQ ID NO: 1241619
uucuaauuggcaggaagaa

SEQ ID NO: 1286517 - RNA, 19 nt, Artificial Sequence
  Description of Artificial Sequence: Synthetic oligonucleotide
  Antisense strand to SEQ ID NO: 1286516
uucuuccugccaauuagaa

SEQ ID NO: 1286518 - RNA, 19 nt, Artificial Sequence
  Description of Artificial Sequence: Synthetic oligonucleotide
  Sense strand starting at position 3612 of SEQ ID NO: 1241619
ggauauguguuacccaaug

SEQ ID NO: 1286519 - RNA, 19 nt, Artificial Sequence
  Description of Artificial Sequence: Synthetic oligonucleotide
  Antisense strand to SEQ ID NO: 1286518
cauuggguaacacauaucc

SEQ ID NO: 1286520 - RNA, 19 nt, Artificial Sequence
  Description of Artificial Sequence: Synthetic oligonucleotide
  Sense strand starting at position 3617 of SEQ ID NO: 1241619
uguguuacccaaugccaca

SEQ ID NO: 1286521 - RNA, 19 nt, Artificial Sequence
  Description of Artificial Sequence: Synthetic oligonucleotide
  Antisense strand to SEQ ID NO: 1286520
uguggcauuggguaacaca

SEQ ID NO: 1286522 - RNA, 19 nt, Artificial Sequence
  Description of Artificial Sequence: Synthetic oligonucleotide
  Sense strand starting at position 3636 of SEQ ID NO: 1241619
aagauauaagugcaugcuu

SEQ ID NO: 1286523 - RNA, 19 nt, Artificial Sequence
  Description of Artificial Sequence: Synthetic oligonucleotide
  Antisense strand to SEQ ID NO: 1286522
aagcaugcacuuauaucuu

SEQ ID NO: 1286524 - RNA, 19 nt, Artificial Sequence
  Description of Artificial Sequence: Synthetic oligonucleotide
  Sense strand starting at position 3638 of SEQ ID NO: 1241619
gauauaagugcaugcuuaa

SEQ ID NO: 1286525 - RNA, 19 nt, Artificial Sequence
  Description of Artificial Sequence: Synthetic oligonucleotide
  Antisense strand to SEQ ID NO: 1286524
uuaagcaugcacuuauauc

SEQ ID NO: 1286526 - RNA, 19 nt, Artificial Sequence
  Description of Artificial Sequence: Synthetic oligonucleotide
  Sense strand starting at position 3641 of SEQ ID NO: 1241619
auaagugcaugcuuaauuu

SEQ ID NO: 1286527 - RNA, 19 nt, Artificial Sequence
  Description of Artificial Sequence: Synthetic oligonucleotide
  Antisense strand to SEQ ID NO: 1286526
aaauuaagcaugcacuuau

SEQ ID NO: 1286528 - RNA, 19 nt, Artificial Sequence
  Description of Artificial Sequence: Synthetic oligonucleotide
  Sense strand starting at position 3694 of SEQ ID NO: 1241619
guacaucuugcagaaacau

SEQ ID NO: 1286529 - RNA, 19 nt, Artificial Sequence
  Description of Artificial Sequence: Synthetic oligonucleotide
  Antisense strand to SEQ ID NO: 1286528
auguuucugcaagauguac

SEQ ID NO: 1286530 - RNA, 19 nt, Artificial Sequence
  Description of Artificial Sequence: Synthetic oligonucleotide
  Sense strand starting at position 3898 of SEQ ID NO: 1241619
aguugagacugaguccaaa

SEQ ID NO: 1286531 - RNA, 19 nt, Artificial Sequence
  Description of Artificial Sequence: Synthetic oligonucleotide
  Antisense strand to SEQ ID NO: 1286530
uuuggacucagucucaacu

SEQ ID NO: 1286532 - RNA, 19 nt, Artificial Sequence
  Description of Artificial Sequence: Synthetic oligonucleotide
  Sense strand starting at position 58 of SEQ ID NO: 1241620
aauugauuauggguugaca

SEQ ID NO: 1286533 - RNA, 19 nt, Artificial Sequence
  Description of Artificial Sequence: Synthetic oligonucleotide
  Antisense strand to SEQ ID NO: 1286532
ugucaacccauaaucaauu

SEQ ID NO: 1286534 - RNA, 19 nt, Artificial Sequence
  Description of Artificial Sequence: Synthetic oligonucleotide
  Sense strand starting at position 580 of SEQ ID NO: 1241620
gggugaguggagggaauua

SEQ ID NO: 1286535 - RNA, 19 nt, Artificial Sequence
  Description of Artificial Sequence: Synthetic oligonucleotide
  Antisense strand to SEQ ID NO: 1286534
uaauucccuccacucaccc

SEQ ID NO: 1286536 - RNA, 19 nt, Artificial Sequence
  Description of Artificial Sequence: Synthetic oligonucleotide
  Sense strand starting at position 876 of SEQ ID NO: 1241620
ugaucaaagcccuggacau

SEQ ID NO: 1286537 - RNA, 19 nt, Artificial Sequence
  Description of Artificial Sequence: Synthetic oligonucleotide
  Antisense strand to SEQ ID NO: 1286536
auguccagggcuuugauca

SEQ ID NO: 1286538 - RNA, 19 nt, Artificial Sequence
  Description of Artificial Sequence: Synthetic oligonucleotide
  Sense strand starting at position 936 of SEQ ID NO: 1241620
cucguaagucaggaaggaa

SEQ ID NO: 1286539 - RNA, 19 nt, Artificial Sequence
  Description of Artificial Sequence: Synthetic oligonucleotide
  Antisense strand to SEQ ID NO: 1286538
uuccuuccugacuuacgag

SEQ ID NO: 1286540 - RNA, 19 nt, Artificial Sequence
  Description of Artificial Sequence: Synthetic oligonucleotide
  Sense strand starting at position 954 of SEQ ID NO: 1241620
agucuuguuacagggauca

SEQ ID NO: 1286541 - RNA, 19 nt, Artificial Sequence
  Description of Artificial Sequence: Synthetic oligonucleotide
  Antisense strand to SEQ ID NO: 1286540
ugaucccuguaacaagacu

SEQ ID NO: 1286542 - RNA, 19 nt, Artificial Sequence
  Description of Artificial Sequence: Synthetic oligonucleotide
  Sense strand starting at position 964 of SEQ ID NO: 1241620
cagggaucagaguguugga

SEQ ID NO: 1286543 - RNA, 19 nt, Artificial Sequence
  Description of Artificial Sequence: Synthetic oligonucleotide
  Antisense strand to SEQ ID NO: 1286542
uccaacacucugaucccug

SEQ ID NO: 1286544 - RNA, 19 nt, Artificial Sequence
  Description of Artificial Sequence: Synthetic oligonucleotide
  Sense strand starting at position 1183 of SEQ ID NO: 1241620
gagggaauccugggugagu

SEQ ID NO: 1286545 - RNA, 19 nt, Artificial Sequence
  Description of Artificial Sequence: Synthetic oligonucleotide
  Antisense strand to SEQ ID NO: 1286544
acucacccaggauucccuc

SEQ ID NO: 1286546 - RNA, 19 nt, Artificial Sequence
  Description of Artificial Sequence: Synthetic oligonucleotide
  Sense strand starting at position 1185 of SEQ ID NO: 1241620
gggaauccugggugagugu

SEQ ID NO: 1286547 - RNA, 19 nt, Artificial Sequence
  Description of Artificial Sequence: Synthetic oligonucleotide
  Antisense strand to SEQ ID NO: 1286546
acacucacccaggauuccc

SEQ ID NO: 1286548 - RNA, 19 nt, Artificial Sequence
  Description of Artificial Sequence: Synthetic oligonucleotide
  Sense strand starting at position 1227 of SEQ ID NO: 1241620
agaagcugucacuauacuu

SEQ ID NO: 1286549 - RNA, 19 nt, Artificial Sequence
  Description of Artificial Sequence: Synthetic oligonucleotide
  Antisense strand to SEQ ID NO: 1286548
aaguauagugacagcuucu

SEQ ID NO: 1286550 - RNA, 19 nt, Artificial Sequence
  Description of Artificial Sequence: Synthetic oligonucleotide
  Sense strand starting at position 1312 of SEQ ID NO: 1241620
uugcaucuugccucgcaua

SEQ ID NO: 1286551 - RNA, 19 nt, Artificial Sequence
  Description of Artificial Sequence: Synthetic oligonucleotide
  Antisense strand to SEQ ID NO: 1286550
uaugcgaggcaagaugcaa

SEQ ID NO: 1286552 - RNA, 19 nt, Artificial Sequence
  Description of Artificial Sequence: Synthetic oligonucleotide
  Sense strand starting at position 1314 of SEQ ID NO: 1241620
gcaucuugccucgcauaua

SEQ ID NO: 1286553 - RNA, 19 nt, Artificial Sequence
  Description of Artificial Sequence: Synthetic oligonucleotide
  Antisense strand to SEQ ID NO: 1286552
uauaugcgaggcaagaugc

SEQ ID NO: 1286554 - RNA, 19 nt, Artificial Sequence
  Description of Artificial Sequence: Synthetic oligonucleotide
  Sense strand starting at position 1360 of SEQ ID NO: 1241620
gaaacccuuuggguaguua

SEQ ID NO: 1286555 - RNA, 19 nt, Artificial Sequence
  Description of Artificial Sequence: Synthetic oligonucleotide
  Antisense strand to SEQ ID NO: 1286554
uaacuacccaaaggguuuc

SEQ ID NO: 1286556 - RNA, 19 nt, Artificial Sequence
  Description of Artificial Sequence: Synthetic oligonucleotide
  Sense strand starting at position 1361 of SEQ ID NO: 1241620
aaacccuuuggguaguuaa

SEQ ID NO: 1286557 - RNA, 19 nt, Artificial Sequence
  Description of Artificial Sequence: Synthetic oligonucleotide
  Antisense strand to SEQ ID NO: 1286556
uuaacuacccaaaggguuu

SEQ ID NO: 1286558 - RNA, 19 nt, Artificial Sequence
  Description of Artificial Sequence: Synthetic oligonucleotide
  Sense strand starting at position 1371 of SEQ ID NO: 1241620
gguaguuaacccugggaua

SEQ ID NO: 1286559 - RNA, 19 nt, Artificial Sequence
  Description of Artificial Sequence: Synthetic oligonucleotide
  Antisense strand to SEQ ID NO: 1286558
uaucccaggguuaacuacc

SEQ ID NO: 1286560 - RNA, 19 nt, Artificial Sequence
  Description of Artificial Sequence: Synthetic oligonucleotide
  Sense strand starting at position 1372 of SEQ ID NO: 1241620
guaguuaacccugggauag

SEQ ID NO: 1286561 - RNA, 19 nt, Artificial Sequence
  Description of Artificial Sequence: Synthetic oligonucleotide
  Antisense strand to SEQ ID NO: 1286560
cuaucccaggguuaacuac

SEQ ID NO: 1286562 - RNA, 19 nt, Artificial Sequence
  Description of Artificial Sequence: Synthetic oligonucleotide
  Sense strand starting at position 1373 of SEQ ID NO: 1241620
uaguuaacccugggauagu

SEQ ID NO: 1286563 - RNA, 19 nt, Artificial Sequence
  Description of Artificial Sequence: Synthetic oligonucleotide
  Antisense strand to SEQ ID NO: 1286562
acuaucccaggguuaacua

SEQ ID NO: 1286564 - RNA, 19 nt, Artificial Sequence
  Description of Artificial Sequence: Synthetic oligonucleotide
  Sense strand starting at position 1383 of SEQ ID NO: 1241620
ugggauagucaaugcuuaa

SEQ ID NO: 1286565 - RNA, 19 nt, Artificial Sequence
  Description of Artificial Sequence: Synthetic oligonucleotide
  Antisense strand to SEQ ID NO: 1286564
uuaagcauugacuauccca

SEQ ID NO: 1286566 - RNA, 19 nt, Artificial Sequence
  Description of Artificial Sequence: Synthetic oligonucleotide
  Sense strand starting at position 1387 of SEQ ID NO: 1241620
auagucaaugcuuaaggua

SEQ ID NO: 1286567 - RNA, 19 nt, Artificial Sequence
  Description of Artificial Sequence: Synthetic oligonucleotide
  Antisense strand to SEQ ID NO: 1286566
uaccuuaagcauugacuau

SEQ ID NO: 1286568 - RNA, 19 nt, Artificial Sequence
  Description of Artificial Sequence: Synthetic oligonucleotide
  Sense strand starting at position 1394 of SEQ ID NO: 1241620
augcuuaagguauagaagu

SEQ ID NO: 1286569 - RNA, 19 nt, Artificial Sequence
  Description of Artificial Sequence: Synthetic oligonucleotide
  Antisense strand to SEQ ID NO: 1286568
acuucuauaccuuaagcau

SEQ ID NO: 1286570 - RNA, 19 nt, Artificial Sequence
  Description of Artificial Sequence: Synthetic oligonucleotide
  Sense strand starting at position 1431 of SEQ ID NO: 1241620
ucuugauguccaugaccag

SEQ ID NO: 1286571 - RNA, 19 nt, Artificial Sequence
  Description of Artificial Sequence: Synthetic oligonucleotide
  Antisense strand to SEQ ID NO: 1286570
cuggucauggacaucaaga

SEQ ID NO: 1286572 - RNA, 19 nt, Artificial Sequence
  Description of Artificial Sequence: Synthetic oligonucleotide
  Sense strand starting at position 1648 of SEQ ID NO: 1241620
agaggagaugcuugcccaa

SEQ ID NO: 1286573 - RNA, 19 nt, Artificial Sequence
  Description of Artificial Sequence: Synthetic oligonucleotide
  Antisense strand to SEQ ID NO: 1286572
uugggcaagcaucuccucu

SEQ ID NO: 1286574 - RNA, 19 nt, Artificial Sequence
  Description of Artificial Sequence: Synthetic oligonucleotide
  Sense strand starting at position 1739 of SEQ ID NO: 1241620
gaguccgugagcuacauuu

SEQ ID NO: 1286575 - RNA, 19 nt, Artificial Sequence
  Description of Artificial Sequence: Synthetic oligonucleotide
  Antisense strand to SEQ ID NO: 1286574
aaauguagcucacggacuc

SEQ ID NO: 1286576 - RNA, 19 nt, Artificial Sequence
  Description of Artificial Sequence: Synthetic oligonucleotide
  Sense strand starting at position 1772 of SEQ ID NO: 1241620
cuaacugguccuuggguga

SEQ ID NO: 1286577 - RNA, 19 nt, Artificial Sequence
  Description of Artificial Sequence: Synthetic oligonucleotide
  Antisense strand to SEQ ID NO: 1286576
ucacccaaggaccaguuag

SEQ ID NO: 1286578 - RNA, 19 nt, Artificial Sequence
  Description of Artificial Sequence: Synthetic oligonucleotide
  Sense strand starting at position 1787 of SEQ ID NO: 1241620
gugagagacucuucccaag

SEQ ID NO: 1286579 - RNA, 19 nt, Artificial Sequence
  Description of Artificial Sequence: Synthetic oligonucleotide
  Antisense strand to SEQ ID NO: 1286578
cuugggaagagucucucac

SEQ ID NO: 1286580 - RNA, 19 nt, Artificial Sequence
  Description of Artificial Sequence: Synthetic oligonucleotide
  Sense strand starting at position 1861 of SEQ ID NO: 1241620
gcaggcugaccugacaauu

SEQ ID NO: 1286581 - RNA, 19 nt, Artificial Sequence
  Description of Artificial Sequence: Synthetic oligonucleotide
  Antisense strand to SEQ ID NO: 1286580
aauugucaggucagccugc

SEQ ID NO: 1286582 - RNA, 19 nt, Artificial Sequence
  Description of Artificial Sequence: Synthetic oligonucleotide
  Sense strand starting at position 1977 of SEQ ID NO: 1241620
cuagaaagguuucuaggua

SEQ ID NO: 1286583 - RNA, 19 nt, Artificial Sequence
  Description of Artificial Sequence: Synthetic oligonucleotide
  Antisense strand to SEQ ID NO: 1286582
uaccuagaaaccuuucuag

SEQ ID NO: 1286584 - RNA, 19 nt, Artificial Sequence
  Description of Artificial Sequence: Synthetic oligonucleotide
  Sense strand starting at position 2099 of SEQ ID NO: 1241620
ucuacagugucauuggaac

SEQ ID NO: 1286585 - RNA, 19 nt, Artificial Sequence
  Description of Artificial Sequence: Synthetic oligonucleotide
  Antisense strand to SEQ ID NO: 1286584
guuccaaugacacuguaga

SEQ ID NO: 1286586 - RNA, 19 nt, Artificial Sequence
  Description of Artificial Sequence: Synthetic oligonucleotide
  Sense strand starting at position 2189 of SEQ ID NO: 1241620
gccugugcucucguggcaa

SEQ ID NO: 1286587 - RNA, 19 nt, Artificial Sequence
  Description of Artificial Sequence: Synthetic oligonucleotide
  Antisense strand to SEQ ID NO: 1286586
uugccacgagagcacaggc

SEQ ID NO: 1286588 - RNA, 19 nt, Artificial Sequence
  Description of Artificial Sequence: Synthetic oligonucleotide
  Sense strand starting at position 2213 of SEQ ID NO: 1241620
guaggaaagcacuguuaug

SEQ ID NO: 1286589 - RNA, 19 nt, Artificial Sequence
  Description of Artificial Sequence: Synthetic oligonucleotide
  Antisense strand to SEQ ID NO: 1286588
cauaacagugcuuuccuac

SEQ ID NO: 1286590 - RNA, 19 nt, Artificial Sequence
  Description of Artificial Sequence: Synthetic oligonucleotide
  Sense strand starting at position 2223 of SEQ ID NO: 1241620
acuguuauguuucugagga

SEQ ID NO: 1286591 - RNA, 19 nt, Artificial Sequence
  Description of Artificial Sequence: Synthetic oligonucleotide
  Antisense strand to SEQ ID NO: 1286590
uccucagaaacauaacagu

SEQ ID NO: 1286592 - RNA, 19 nt, Artificial Sequence
  Description of Artificial Sequence: Synthetic oligonucleotide
  Sense strand starting at position 2239 of SEQ ID NO: 1241620
ggaacaaagugcuucuuau

SEQ ID NO: 1286593 - RNA, 19 nt, Artificial Sequence
  Description of Artificial Sequence: Synthetic oligonucleotide
  Antisense strand to SEQ ID NO: 1286592
auaagaagcacuuuguucc

SEQ ID NO: 1286594 - RNA, 19 nt, Artificial Sequence
  Description of Artificial Sequence: Synthetic oligonucleotide
  Sense strand starting at position 2453 of SEQ ID NO: 1241620
gaguuugagcacuacugga

SEQ ID NO: 1286595 - RNA, 19 nt, Artificial Sequence
  Description of Artificial Sequence: Synthetic oligonucleotide
  Antisense strand to SEQ ID NO: 1286594
uccaguagugcucaaacuc

SEQ ID NO: 1286596 - RNA, 19 nt, Artificial Sequence
  Description of Artificial Sequence: Synthetic oligonucleotide
  Sense strand starting at position 2562 of SEQ ID NO: 1241620
uggcaugauccguuucgua

SEQ ID NO: 1286597 - RNA, 19 nt, Artificial Sequence
  Description of Artificial Sequence: Synthetic oligonucleotide
  Antisense strand to SEQ ID NO: 1286596
uacgaaacggaucaugcca

SEQ ID NO: 1286598 - RNA, 19 nt, Artificial Sequence
  Description of Artificial Sequence: Synthetic oligonucleotide
  Sense strand starting at position 2564 of SEQ ID NO: 1241620
gcaugauccguuucguacu

SEQ ID NO: 1286599 - RNA, 19 nt, Artificial Sequence
  Description of Artificial Sequence: Synthetic oligonucleotide
  Antisense strand to SEQ ID NO: 1286598
aguacgaaacggaucaugc

SEQ ID NO: 1286600 - RNA, 19 nt, Artificial Sequence
  Description of Artificial Sequence: Synthetic oligonucleotide
  Sense strand starting at position 2888 of SEQ ID NO: 1241620
aaagauugguguuccucau

SEQ ID NO: 1286601 - RNA, 19 nt, Artificial Sequence
  Description of Artificial Sequence: Synthetic oligonucleotide
  Antisense strand to SEQ ID NO: 1286600
augaggaacaccaaucuuu

SEQ ID NO: 1286602 - RNA, 19 nt, Artificial Sequence
  Description of Artificial Sequence: Synthetic oligonucleotide
  Sense strand starting at position 3014 of SEQ ID NO: 1241620
cugguuaccuaugcaagaa

SEQ ID NO: 1286603 - RNA, 19 nt, Artificial Sequence
  Description of Artificial Sequence: Synthetic oligonucleotide
  Antisense strand to SEQ ID NO: 1286602
uucuugcauagguaaccag

SEQ ID NO: 1286604 - RNA, 19 nt, Artificial Sequence
  Description of Artificial Sequence: Synthetic oligonucleotide
  Sense strand starting at position 3033 of SEQ ID NO: 1241620
accugaaagugauccuaga

SEQ ID NO: 1286605 - RNA, 19 nt, Artificial Sequence
  Description of Artificial Sequence: Synthetic oligonucleotide
  Antisense strand to SEQ ID NO: 1286604
ucuaggaucacuuucaggu

SEQ ID NO: 1286606 - RNA, 19 nt, Artificial Sequence
  Description of Artificial Sequence: Synthetic oligonucleotide
  Sense strand starting at position 3339 of SEQ ID NO: 1241620
gucacacagcccugacaau

SEQ ID NO: 1286607 - RNA, 19 nt, Artificial Sequence
  Description of Artificial Sequence: Synthetic oligonucleotide
  Antisense strand to SEQ ID NO: 1286606
auugucagggcugugugac

SEQ ID NO: 1286608 - RNA, 19 nt, Artificial Sequence
  Description of Artificial Sequence: Synthetic oligonucleotide
  Sense strand starting at position 3498 of SEQ ID NO: 1241620
gugugaucccuucuuucgu

SEQ ID NO: 1286609 - RNA, 19 nt, Artificial Sequence
  Description of Artificial Sequence: Synthetic oligonucleotide
  Antisense strand to SEQ ID NO: 1286608
acgaaagaagggaucacac

SEQ ID NO: 1286610 - RNA, 19 nt, Artificial Sequence
  Description of Artificial Sequence: Synthetic oligonucleotide
  Sense strand starting at position 3761 of SEQ ID NO: 1241620
gcuugucguaggguauagu

SEQ ID NO: 1286611 - RNA, 19 nt, Artificial Sequence
  Description of Artificial Sequence: Synthetic oligonucleotide
  Antisense strand to SEQ ID NO: 1286610
acuauacccuacgacaagc

SEQ ID NO: 1286612 - RNA, 19 nt, Artificial Sequence
  Description of Artificial Sequence: Synthetic oligonucleotide
  Sense strand starting at position 13 of SEQ ID NO: 1241621
ccuauaucucuugggauag

SEQ ID NO: 1286613 - RNA, 19 nt, Artificial Sequence
  Description of Artificial Sequence: Synthetic oligonucleotide
  Antisense strand to SEQ ID NO: 1286612
cuaucccaagagauauagg

SEQ ID NO: 1286614 - RNA, 19 nt, Artificial Sequence
  Description of Artificial Sequence: Synthetic oligonucleotide
  Sense strand starting at position 86 of SEQ ID NO: 1241621
guaucaaauugggcucaau

SEQ ID NO: 1286615 - RNA, 19 nt, Artificial Sequence
  Description of Artificial Sequence: Synthetic oligonucleotide
  Antisense strand to SEQ ID NO: 1286614
auugagcccaauuugauac

SEQ ID NO: 1286616 - RNA, 19 nt, Artificial Sequence
  Description of Artificial Sequence: Synthetic oligonucleotide
  Sense strand starting at position 89 of SEQ ID NO: 1241621
ucaaauugggcucaauugu

SEQ ID NO: 1286617 - RNA, 19 nt, Artificial Sequence
  Description of Artificial Sequence: Synthetic oligonucleotide
  Antisense strand to SEQ ID NO: 1286616
acaauugagcccaauuuga

SEQ ID NO: 1286618 - RNA, 19 nt, Artificial Sequence
  Description of Artificial Sequence: Synthetic oligonucleotide
  Sense strand starting at position 125 of SEQ ID NO: 1241621
aguggagaucuauacucgu

SEQ ID NO: 1286619 - RNA, 19 nt, Artificial Sequence
  Description of Artificial Sequence: Synthetic oligonucleotide
  Antisense strand to SEQ ID NO: 1286618
acgaguauagaucuccacu

SEQ ID NO: 1286620 - RNA, 19 nt, Artificial Sequence
  Description of Artificial Sequence: Synthetic oligonucleotide
  Sense strand starting at position 128 of SEQ ID NO: 1241621
ggagaucuauacucguuau

SEQ ID NO: 1286621 - RNA, 19 nt, Artificial Sequence
  Description of Artificial Sequence: Synthetic oligonucleotide
  Antisense strand to SEQ ID NO: 1286620
auaacgaguauagaucucc

SEQ ID NO: 1286622 - RNA, 19 nt, Artificial Sequence
  Description of Artificial Sequence: Synthetic oligonucleotide
  Sense strand starting at position 131 of SEQ ID NO: 1241621
gaucuauacucguuauagg

SEQ ID NO: 1286623 - RNA, 19 nt, Artificial Sequence
  Description of Artificial Sequence: Synthetic oligonucleotide
  Antisense strand to SEQ ID NO: 1286622
ccuauaacgaguauagauc

SEQ ID NO: 1286624 - RNA, 19 nt, Artificial Sequence
  Description of Artificial Sequence: Synthetic oligonucleotide
  Sense strand starting at position 132 of SEQ ID NO: 1241621
aucuauacucguuauaggu

SEQ ID NO: 1286625 - RNA, 19 nt, Artificial Sequence
  Description of Artificial Sequence: Synthetic oligonucleotide
  Antisense strand to SEQ ID NO: 1286624
accuauaacgaguauagau

SEQ ID NO: 1286626 - RNA, 19 nt, Artificial Sequence
  Description of Artificial Sequence: Synthetic oligonucleotide
  Sense strand starting at position 214 of SEQ ID NO: 1241621
caaugcuaaguugauguaa

SEQ ID NO: 1286627 - RNA, 19 nt, Artificial Sequence
  Description of Artificial Sequence: Synthetic oligonucleotide
  Antisense strand to SEQ ID NO: 1286626
uuacaucaacuuagcauug

SEQ ID NO: 1286628 - RNA, 19 nt, Artificial Sequence
  Description of Artificial Sequence: Synthetic oligonucleotide
  Sense strand starting at position 261 of SEQ ID NO: 1241621
aggaaucaguuaucacaug

SEQ ID NO: 1286629 - RNA, 19 nt, Artificial Sequence
  Description of Artificial Sequence: Synthetic oligonucleotide
  Antisense strand to SEQ ID NO: 1286628
caugugauaacugauuccu

SEQ ID NO: 1286630 - RNA, 19 nt, Artificial Sequence
  Description of Artificial Sequence: Synthetic oligonucleotide
  Sense strand starting at position 266 of SEQ ID NO: 1241621
ucaguuaucacauggagga

SEQ ID NO: 1286631 - RNA, 19 nt, Artificial Sequence
  Description of Artificial Sequence: Synthetic oligonucleotide
  Antisense strand to SEQ ID NO: 1286630
uccuccaugugauaacuga

SEQ ID NO: 1286632 - RNA, 19 nt, Artificial Sequence
  Description of Artificial Sequence: Synthetic oligonucleotide
  Sense strand starting at position 267 of SEQ ID NO: 1241621
caguuaucacauggaggau

SEQ ID NO: 1286633 - RNA, 19 nt, Artificial Sequence
  Description of Artificial Sequence: Synthetic oligonucleotide
  Antisense strand to SEQ ID NO: 1286632
auccuccaugugauaacug

SEQ ID NO: 1286634 - RNA, 19 nt, Artificial Sequence
  Description of Artificial Sequence: Synthetic oligonucleotide
  Sense strand starting at position 761 of SEQ ID NO: 1241621
ggaugaccuaguugugaag

SEQ ID NO: 1286635 - RNA, 19 nt, Artificial Sequence
  Description of Artificial Sequence: Synthetic oligonucleotide
  Antisense strand to SEQ ID NO: 1286634
cuucacaacuaggucaucc

SEQ ID NO: 1286636 - RNA, 19 nt, Artificial Sequence
  Description of Artificial Sequence: Synthetic oligonucleotide
  Sense strand starting at position 767 of SEQ ID NO: 1241621
ccuaguugugaagaggguu

SEQ ID NO: 1286637 - RNA, 19 nt, Artificial Sequence
  Description of Artificial Sequence: Synthetic oligonucleotide
  Antisense strand to SEQ ID NO: 1286636
aacccucuucacaacuagg

SEQ ID NO: 1286638 - RNA, 19 nt, Artificial Sequence
  Description of Artificial Sequence: Synthetic oligonucleotide
  Sense strand starting at position 794 of SEQ ID NO: 1241621
augacuaaagcuugaucaa

SEQ ID NO: 1286639 - RNA, 19 nt, Artificial Sequence
  Description of Artificial Sequence: Synthetic oligonucleotide
  Antisense strand to SEQ ID NO: 1286638
uugaucaagcuuuagucau

SEQ ID NO: 1286640 - RNA, 19 nt, Artificial Sequence
  Description of Artificial Sequence: Synthetic oligonucleotide
  Sense strand starting at position 803 of SEQ ID NO: 1241621
gcuugaucaaagcaagagu

SEQ ID NO: 1286641 - RNA, 19 nt, Artificial Sequence
  Description of Artificial Sequence: Synthetic oligonucleotide
  Antisense strand to SEQ ID NO: 1286640
acucuugcuuugaucaagc

SEQ ID NO: 1286642 - RNA, 19 nt, Artificial Sequence
  Description of Artificial Sequence: Synthetic oligonucleotide
  Sense strand starting at position 806 of SEQ ID NO: 1241621
ugaucaaagcaagagucuu

SEQ ID NO: 1286643 - RNA, 19 nt, Artificial Sequence
  Description of Artificial Sequence: Synthetic oligonucleotide
  Antisense strand to SEQ ID NO: 1286642
aagacucuugcuuugauca

SEQ ID NO: 1286644 - RNA, 19 nt, Artificial Sequence
  Description of Artificial Sequence: Synthetic oligonucleotide
  Sense strand starting at position 812 of SEQ ID NO: 1241621
aagcaagagucuucgacag

SEQ ID NO: 1286645 - RNA, 19 nt, Artificial Sequence
  Description of Artificial Sequence: Synthetic oligonucleotide
  Antisense strand to SEQ ID NO: 1286644
cugucgaagacucuugcuu

SEQ ID NO: 1286646 - RNA, 19 nt, Artificial Sequence
  Description of Artificial Sequence: Synthetic oligonucleotide
  Sense strand starting at position 834 of SEQ ID NO: 1241621
cuagauaucgguugagacc

SEQ ID NO: 1286647 - RNA, 19 nt, Artificial Sequence
  Description of Artificial Sequence: Synthetic oligonucleotide
  Antisense strand to SEQ ID NO: 1286646
ggucucaaccgauaucuag

SEQ ID NO: 1286648 - RNA, 19 nt, Artificial Sequence
  Description of Artificial Sequence: Synthetic oligonucleotide
  Sense strand starting at position 835 of SEQ ID NO: 1241621
uagauaucgguugagaccu

SEQ ID NO: 1286649 - RNA, 19 nt, Artificial Sequence
  Description of Artificial Sequence: Synthetic oligonucleotide
  Antisense strand to SEQ ID NO: 1286648
aggucucaaccgauaucua

SEQ ID NO: 1286650 - RNA, 19 nt, Artificial Sequence
  Description of Artificial Sequence: Synthetic oligonucleotide
  Sense strand starting at position 880 of SEQ ID NO: 1241621
gggauaagacugugcuguu

SEQ ID NO: 1286651 - RNA, 19 nt, Artificial Sequence
  Description of Artificial Sequence: Synthetic oligonucleotide
  Antisense strand to SEQ ID NO: 1286650
aacagcacagucuuauccc

SEQ ID NO: 1286652 - RNA, 19 nt, Artificial Sequence
  Description of Artificial Sequence: Synthetic oligonucleotide
  Sense strand starting at position 974 of SEQ ID NO: 1241621
uagaguagauugucacuaa

SEQ ID NO: 1286653 - RNA, 19 nt, Artificial Sequence
  Description of Artificial Sequence: Synthetic oligonucleotide
  Antisense strand to SEQ ID NO: 1286652
uuagugacaaucuacucua

SEQ ID NO: 1286654 - RNA, 19 nt, Artificial Sequence
  Description of Artificial Sequence: Synthetic oligonucleotide
  Sense strand starting at position 977 of SEQ ID NO: 1241621
aguagauugucacuaaaug

SEQ ID NO: 1286655 - RNA, 19 nt, Artificial Sequence
  Description of Artificial Sequence: Synthetic oligonucleotide
  Antisense strand to SEQ ID NO: 1286654
cauuuagugacaaucuacu

SEQ ID NO: 1286656 - RNA, 19 nt, Artificial Sequence
  Description of Artificial Sequence: Synthetic oligonucleotide
  Sense strand starting at position 1721 of SEQ ID NO: 1241621
agaaguaacuacucccuga

SEQ ID NO: 1286657 - RNA, 19 nt, Artificial Sequence
  Description of Artificial Sequence: Synthetic oligonucleotide
  Antisense strand to SEQ ID NO: 1286656
ucagggaguaguuacuucu

SEQ ID NO: 1286658 - RNA, 19 nt, Artificial Sequence
  Description of Artificial Sequence: Synthetic oligonucleotide
  Sense strand starting at position 1740 of SEQ ID NO: 1241621
ucgggucuugguuaugaca

SEQ ID NO: 1286659 - RNA, 19 nt, Artificial Sequence
  Description of Artificial Sequence: Synthetic oligonucleotide
  Antisense strand to SEQ ID NO: 1286658
ugucauaaccaagacccga

SEQ ID NO: 1286660 - RNA, 19 nt, Artificial Sequence
  Description of Artificial Sequence: Synthetic oligonucleotide
  Sense strand starting at position 2098 of SEQ ID NO: 1241621
acccacagauugguacaua

SEQ ID NO: 1286661 - RNA, 19 nt, Artificial Sequence
  Description of Artificial Sequence: Synthetic oligonucleotide
  Antisense strand to SEQ ID NO: 1286660
uauguaccaaucugugggu

SEQ ID NO: 1286662 - RNA, 19 nt, Artificial Sequence
  Description of Artificial Sequence: Synthetic oligonucleotide
  Sense strand starting at position 2116 of SEQ ID NO: 1241621
aguccacuugugcaaucau

SEQ ID NO: 1286663 - RNA, 19 nt, Artificial Sequence
  Description of Artificial Sequence: Synthetic oligonucleotide
  Antisense strand to SEQ ID NO: 1286662
augauugcacaaguggacu

SEQ ID NO: 1286664 - RNA, 19 nt, Artificial Sequence
  Description of Artificial Sequence: Synthetic oligonucleotide
  Sense strand starting at position 2216 of SEQ ID NO: 1241621
caagucauccuguguaaga

SEQ ID NO: 1286665 - RNA, 19 nt, Artificial Sequence
  Description of Artificial Sequence: Synthetic oligonucleotide
  Antisense strand to SEQ ID NO: 1286664
ucuuacacaggaugacuug

SEQ ID NO: 1286666 - RNA, 19 nt, Artificial Sequence
  Description of Artificial Sequence: Synthetic oligonucleotide
  Sense strand starting at position 2217 of SEQ ID NO: 1241621
aagucauccuguguaagac

SEQ ID NO: 1286667 - RNA, 19 nt, Artificial Sequence
  Description of Artificial Sequence: Synthetic oligonucleotide
  Antisense strand to SEQ ID NO: 1286666
gucuuacacaggaugacuu

SEQ ID NO: 1286668 - RNA, 19 nt, Artificial Sequence
  Description of Artificial Sequence: Synthetic oligonucleotide
  Sense strand starting at position 2223 of SEQ ID NO: 1241621
uccuguguaagacagaguu

SEQ ID NO: 1286669 - RNA, 19 nt, Artificial Sequence
  Description of Artificial Sequence: Synthetic oligonucleotide
  Antisense strand to SEQ ID NO: 1286668
aacucugucuuacacagga

SEQ ID NO: 1286670 - RNA, 19 nt, Artificial Sequence
  Description of Artificial Sequence: Synthetic oligonucleotide
  Sense strand starting at position 2505 of SEQ ID NO: 1241621
uuucuuagggcacaagauu

SEQ ID NO: 1286671 - RNA, 19 nt, Artificial Sequence
  Description of Artificial Sequence: Synthetic oligonucleotide
  Antisense strand to SEQ ID NO: 1286670
aaucuugugcccuaagaaa

SEQ ID NO: 1286672 - RNA, 19 nt, Artificial Sequence
  Description of Artificial Sequence: Synthetic oligonucleotide
  Sense strand starting at position 2549 of SEQ ID NO: 1241621
acacauacuugagggauuu

SEQ ID NO: 1286673 - RNA, 19 nt, Artificial Sequence
  Description of Artificial Sequence: Synthetic oligonucleotide
  Antisense strand to SEQ ID NO: 1286672
aaaucccucaaguaugugu

SEQ ID NO: 1286674 - RNA, 19 nt, Artificial Sequence
  Description of Artificial Sequence: Synthetic oligonucleotide
  Sense strand starting at position 2977 of SEQ ID NO: 1241621
guagacacauaauuguauu

SEQ ID NO: 1286675 - RNA, 19 nt, Artificial Sequence
  Description of Artificial Sequence: Synthetic oligonucleotide
  Antisense strand to SEQ ID NO: 1286674
aauacaauuaugugucuac

SEQ ID NO: 1286676 - RNA, 19 nt, Artificial Sequence
  Description of Artificial Sequence: Synthetic oligonucleotide
  Sense strand starting at position 2993 of SEQ ID NO: 1241621
auuacacuugugugaacau

SEQ ID NO: 1286677 - RNA, 19 nt, Artificial Sequence
  Description of Artificial Sequence: Synthetic oligonucleotide
  Antisense strand to SEQ ID NO: 1286676
auguucacacaaguguaau

SEQ ID NO: 1286678 - RNA, 19 nt, Artificial Sequence
  Description of Artificial Sequence: Synthetic oligonucleotide
  Sense strand starting at position 3196 of SEQ ID NO: 1241621
agugaauugcagugguaag

SEQ ID NO: 1286679 - RNA, 19 nt, Artificial Sequence
  Description of Artificial Sequence: Synthetic oligonucleotide
  Antisense strand to SEQ ID NO: 1286678
cuuaccacugcaauucacu

SEQ ID NO: 1286680 - RNA, 19 nt, Artificial Sequence
  Description of Artificial Sequence: Synthetic oligonucleotide
  Sense strand starting at position 3197 of SEQ ID NO: 1241621
gugaauugcagugguaaga

SEQ ID NO: 1286681 - RNA, 19 nt, Artificial Sequence
  Description of Artificial Sequence: Synthetic oligonucleotide
  Antisense strand to SEQ ID NO: 1286680
ucuuaccacugcaauucac

SEQ ID NO: 1286682 - RNA, 19 nt, Artificial Sequence
  Description of Artificial Sequence: Synthetic oligonucleotide
  Sense strand starting at position 3206 of SEQ ID NO: 1241621
agugguaagaccugaguac

SEQ ID NO: 1286683 - RNA, 19 nt, Artificial Sequence
  Description of Artificial Sequence: Synthetic oligonucleotide
  Antisense strand to SEQ ID NO: 1286682
guacucaggucuuaccacu

SEQ ID NO: 1286684 - RNA, 19 nt, Artificial Sequence
  Description of Artificial Sequence: Synthetic oligonucleotide
  Sense strand starting at position 3207 of SEQ ID NO: 1241621
gugguaagaccugaguacu

SEQ ID NO: 1286685 - RNA, 19 nt, Artificial Sequence
  Description of Artificial Sequence: Synthetic oligonucleotide
  Antisense strand to SEQ ID NO: 1286684
aguacucaggucuuaccac

SEQ ID NO: 1286686 - RNA, 19 nt, Artificial Sequence
  Description of Artificial Sequence: Synthetic oligonucleotide
  Sense strand starting at position 3666 of SEQ ID NO: 1241621
gcagguaccuggcuaaaca

SEQ ID NO: 1286687 - RNA, 19 nt, Artificial Sequence
  Description of Artificial Sequence: Synthetic oligonucleotide
  Antisense strand to SEQ ID NO: 1286686
uguuuagccagguaccugc

SEQ ID NO: 1286688 - RNA, 19 nt, Artificial Sequence
  Description of Artificial Sequence: Synthetic oligonucleotide
  Sense strand starting at position 3724 of SEQ ID NO: 1241621
ugguuuggaagguaaaguu

SEQ ID NO: 1286689 - RNA, 19 nt, Artificial Sequence
  Description of Artificial Sequence: Synthetic oligonucleotide
  Antisense strand to SEQ ID NO: 1286688
aacuuuaccuuccaaacca

SEQ ID NO: 1286690 - RNA, 19 nt, Artificial Sequence
  Description of Artificial Sequence: Synthetic oligonucleotide
  Sense strand starting at position 3964 of SEQ ID NO: 1241621
ggagacaucugugcuuaug

SEQ ID NO: 1286691 - RNA, 19 nt, Artificial Sequence
  Description of Artificial Sequence: Synthetic oligonucleotide
  Antisense strand to SEQ ID NO: 1286690
cauaagcacagaugucucc

SEQ ID NO: 1286692 - RNA, 19 nt, Artificial Sequence
  Description of Artificial Sequence: Synthetic oligonucleotide
  Sense strand starting at position 97 of SEQ ID NO: 1241622
cggcucucaucauccauuu

SEQ ID NO: 1286693 - RNA, 19 nt, Artificial Sequence
  Description of Artificial Sequence: Synthetic oligonucleotide
  Antisense strand to SEQ ID NO: 1286692
aaauggaugaugagagccg

SEQ ID NO: 1286694 - RNA, 19 nt, Artificial Sequence
  Description of Artificial Sequence: Synthetic oligonucleotide
  Sense strand starting at position 161 of SEQ ID NO: 1241622
cuuccugacagguguugaa

SEQ ID NO: 1286695 - RNA, 19 nt, Artificial Sequence
  Description of Artificial Sequence: Synthetic oligonucleotide
  Antisense strand to SEQ ID NO: 1286694
uucaacaccugucaggaag

SEQ ID NO: 1286696 - RNA, 19 nt, Artificial Sequence
  Description of Artificial Sequence: Synthetic oligonucleotide
  Sense strand starting at position 193 of SEQ ID NO: 1241622
cgccauugggaacaucuau

SEQ ID NO: 1286697 - RNA, 19 nt, Artificial Sequence
  Description of Artificial Sequence: Synthetic oligonucleotide
  Antisense strand to SEQ ID NO: 1286696
auagauguucccaauggcg

SEQ ID NO: 1286698 - RNA, 19 nt, Artificial Sequence
  Description of Artificial Sequence: Synthetic oligonucleotide
  Sense strand starting at position 436 of SEQ ID NO: 1241622
cucuauuacgauugcuaau

SEQ ID NO: 1286699 - RNA, 19 nt, Artificial Sequence
  Description of Artificial Sequence: Synthetic oligonucleotide
  Antisense strand to SEQ ID NO: 1286698
auuagcaaucguaauagag

SEQ ID NO: 1286700 - RNA, 19 nt, Artificial Sequence
  Description of Artificial Sequence: Synthetic oligonucleotide
  Sense strand starting at position 447 of SEQ ID NO: 1241622
uugcuaauagcuggagacu

SEQ ID NO: 1286701 - RNA, 19 nt, Artificial Sequence
  Description of Artificial Sequence: Synthetic oligonucleotide
  Antisense strand to SEQ ID NO: 1286700
agucuccagcuauuagcaa

SEQ ID NO: 1286702 - RNA, 19 nt, Artificial Sequence
  Description of Artificial Sequence: Synthetic oligonucleotide
  Sense strand starting at position 448 of SEQ ID NO: 1241622
ugcuaauagcuggagacuu

SEQ ID NO: 1286703 - RNA, 19 nt, Artificial Sequence
  Description of Artificial Sequence: Synthetic oligonucleotide
  Antisense strand to SEQ ID NO: 1286702
aagucuccagcuauuagca

SEQ ID NO: 1286704 - RNA, 19 nt, Artificial Sequence
  Description of Artificial Sequence: Synthetic oligonucleotide
  Sense strand starting at position 459 of SEQ ID NO: 1241622
ggagacuugaugugcccau

SEQ ID NO: 1286705 - RNA, 19 nt, Artificial Sequence
  Description of Artificial Sequence: Synthetic oligonucleotide
  Antisense strand to SEQ ID NO: 1286704
augggcacaucaagucucc

SEQ ID NO: 1286706 - RNA, 19 nt, Artificial Sequence
  Description of Artificial Sequence: Synthetic oligonucleotide
  Sense strand starting at position 460 of SEQ ID NO: 1241622
gagacuugaugugcccauu

SEQ ID NO: 1286707 - RNA, 19 nt, Artificial Sequence
  Description of Artificial Sequence: Synthetic oligonucleotide
  Antisense strand to SEQ ID NO: 1286706
aaugggcacaucaagucuc

SEQ ID NO: 1286708 - RNA, 19 nt, Artificial Sequence
  Description of Artificial Sequence: Synthetic oligonucleotide
  Sense strand starting at position 730 of SEQ ID NO: 1241622
auaucaaauugggcucaau

SEQ ID NO: 1286709 - RNA, 19 nt, Artificial Sequence
  Description of Artificial Sequence: Synthetic oligonucleotide
  Antisense strand to SEQ ID NO: 1286708
auugagcccaauuugauau

SEQ ID NO: 1286710 - RNA, 19 nt, Artificial Sequence
  Description of Artificial Sequence: Synthetic oligonucleotide
  Sense strand starting at position 807 of SEQ ID NO: 1241622
ggaggagucaguggaugga

SEQ ID NO: 1286711 - RNA, 19 nt, Artificial Sequence
  Description of Artificial Sequence: Synthetic oligonucleotide
  Antisense strand to SEQ ID NO: 1286710
uccauccacugacuccucc

SEQ ID NO: 1286712 - RNA, 19 nt, Artificial Sequence
  Description of Artificial Sequence: Synthetic oligonucleotide
  Sense strand starting at position 858 of SEQ ID NO: 1241622
gaccaaugcuaaguugacu

SEQ ID NO: 1286713 - RNA, 19 nt, Artificial Sequence
  Description of Artificial Sequence: Synthetic oligonucleotide
  Antisense strand to SEQ ID NO: 1286712
agucaacuuagcauugguc

SEQ ID NO: 1286714 - RNA, 19 nt, Artificial Sequence
  Description of Artificial Sequence: Synthetic oligonucleotide
  Sense strand starting at position 863 of SEQ ID NO: 1241622
augcuaaguugacucaauu

SEQ ID NO: 1286715 - RNA, 19 nt, Artificial Sequence
  Description of Artificial Sequence: Synthetic oligonucleotide
  Antisense strand to SEQ ID NO: 1286714
aauugagucaacuuagcau

SEQ ID NO: 1286716 - RNA, 19 nt, Artificial Sequence
  Description of Artificial Sequence: Synthetic oligonucleotide
  Sense strand starting at position 994 of SEQ ID NO: 1241622
uagagcagauugucacuaa

SEQ ID NO: 1286717 - RNA, 19 nt, Artificial Sequence
  Description of Artificial Sequence: Synthetic oligonucleotide
  Antisense strand to SEQ ID NO: 1286716
uuagugacaaucugcucua

SEQ ID NO: 1286718 - RNA, 19 nt, Artificial Sequence
  Description of Artificial Sequence: Synthetic oligonucleotide
  Sense strand starting at position 997 of SEQ ID NO: 1241622
agcagauugucacuaaaug

SEQ ID NO: 1286719 - RNA, 19 nt, Artificial Sequence
  Description of Artificial Sequence: Synthetic oligonucleotide
  Antisense strand to SEQ ID NO: 1286718
cauuuagugacaaucugcu

SEQ ID NO: 1286720 - RNA, 19 nt, Artificial Sequence
  Description of Artificial Sequence: Synthetic oligonucleotide
  Sense strand starting at position 998 of SEQ ID NO: 1241622
gcagauugucacuaaauga

SEQ ID NO: 1286721 - RNA, 19 nt, Artificial Sequence
  Description of Artificial Sequence: Synthetic oligonucleotide
  Antisense strand to SEQ ID NO: 1286720
ucauuuagugacaaucugc

SEQ ID NO: 1286722 - RNA, 19 nt, Artificial Sequence
  Description of Artificial Sequence: Synthetic oligonucleotide
  Sense strand starting at position 1757 of SEQ ID NO: 1241622
uccggucucgguuaugaca

SEQ ID NO: 1286723 - RNA, 19 nt, Artificial Sequence
  Description of Artificial Sequence: Synthetic oligonucleotide
  Antisense strand to SEQ ID NO: 1286722
ugucauaaccgagaccgga

SEQ ID NO: 1286724 - RNA, 19 nt, Artificial Sequence
  Description of Artificial Sequence: Synthetic oligonucleotide
  Sense strand starting at position 2062 of SEQ ID NO: 1241622
ugggucuggccaugcagaa

SEQ ID NO: 1286725 - RNA, 19 nt, Artificial Sequence
  Description of Artificial Sequence: Synthetic oligonucleotide
  Antisense strand to SEQ ID NO: 1286724
uucugcauggccagaccca

SEQ ID NO: 1286726 - RNA, 19 nt, Artificial Sequence
  Description of Artificial Sequence: Synthetic oligonucleotide
  Sense strand starting at position 2099 of SEQ ID NO: 1241622
gguccacuugugcaaucau

SEQ ID NO: 1286727 - RNA, 19 nt, Artificial Sequence
  Description of Artificial Sequence: Synthetic oligonucleotide
  Antisense strand to SEQ ID NO: 1286726
augauugcacaaguggacc

SEQ ID NO: 1286728 - RNA, 19 nt, Artificial Sequence
  Description of Artificial Sequence: Synthetic oligonucleotide
  Sense strand starting at position 2336 of SEQ ID NO: 1241622
aggcauaguaguuaggaga

SEQ ID NO: 1286729 - RNA, 19 nt, Artificial Sequence
  Description of Artificial Sequence: Synthetic oligonucleotide
  Antisense strand to SEQ ID NO: 1286728
ucuccuaacuacuaugccu

SEQ ID NO: 1286730 - RNA, 19 nt, Artificial Sequence
  Description of Artificial Sequence: Synthetic oligonucleotide
  Sense strand starting at position 2532 of SEQ ID NO: 1241622
ccauacaauugaggaauuu

SEQ ID NO: 1286731 - RNA, 19 nt, Artificial Sequence
  Description of Artificial Sequence: Synthetic oligonucleotide
  Antisense strand to SEQ ID NO: 1286730
aaauuccucaauuguaugg

SEQ ID NO: 1286732 - RNA, 19 nt, Artificial Sequence
  Description of Artificial Sequence: Synthetic oligonucleotide
  Sense strand starting at position 2607 of SEQ ID NO: 1241622
ugauuccacuuuguguaaa

SEQ ID NO: 1286733 - RNA, 19 nt, Artificial Sequence
  Description of Artificial Sequence: Synthetic oligonucleotide
  Antisense strand to SEQ ID NO: 1286732
uuuacacaaaguggaauca

SEQ ID NO: 1286734 - RNA, 19 nt, Artificial Sequence
  Description of Artificial Sequence: Synthetic oligonucleotide
  Sense strand starting at position 2609 of SEQ ID NO: 1241622
auuccacuuuguguaaagu

SEQ ID NO: 1286735 - RNA, 19 nt, Artificial Sequence
  Description of Artificial Sequence: Synthetic oligonucleotide
  Antisense strand to SEQ ID NO: 1286734
acuuuacacaaaguggaau

SEQ ID NO: 1286736 - RNA, 19 nt, Artificial Sequence
  Description of Artificial Sequence: Synthetic oligonucleotide
  Sense strand starting at position 2819 of SEQ ID NO: 1241622
acaagaauaugguucugua

SEQ ID NO: 1286737 - RNA, 19 nt, Artificial Sequence
  Description of Artificial Sequence: Synthetic oligonucleotide
  Antisense strand to SEQ ID NO: 1286736
uacagaaccauauucuugu

SEQ ID NO: 1286738 - RNA, 19 nt, Artificial Sequence
  Description of Artificial Sequence: Synthetic oligonucleotide
  Sense strand starting at position 2925 of SEQ ID NO: 1241622
auucuuggcccucagagaa

SEQ ID NO: 1286739 - RNA, 19 nt, Artificial Sequence
  Description of Artificial Sequence: Synthetic oligonucleotide
  Antisense strand to SEQ ID NO: 1286738
uucucugagggccaagaau

SEQ ID NO: 1286740 - RNA, 19 nt, Artificial Sequence
  Description of Artificial Sequence: Synthetic oligonucleotide
  Sense strand starting at position 2946 of SEQ ID NO: 1241622
acaggaaaguacuuguaga

SEQ ID NO: 1286741 - RNA, 19 nt, Artificial Sequence
  Description of Artificial Sequence: Synthetic oligonucleotide
  Antisense strand to SEQ ID NO: 1286740
ucuacaaguacuuuccugu

SEQ ID NO: 1286742 - RNA, 19 nt, Artificial Sequence
  Description of Artificial Sequence: Synthetic oligonucleotide
  Sense strand starting at position 2973 of SEQ ID NO: 1241622
uguauuacagugugauaga

SEQ ID NO: 1286743 - RNA, 19 nt, Artificial Sequence
  Description of Artificial Sequence: Synthetic oligonucleotide
  Antisense strand to SEQ ID NO: 1286742
ucuaucacacuguaauaca

SEQ ID NO: 1286744 - RNA, 19 nt, Artificial Sequence
  Description of Artificial Sequence: Synthetic oligonucleotide
  Sense strand starting at position 2978 of SEQ ID NO: 1241622
uacagugugauagagguaa

SEQ ID NO: 1286745 - RNA, 19 nt, Artificial Sequence
  Description of Artificial Sequence: Synthetic oligonucleotide
  Antisense strand to SEQ ID NO: 1286744
uuaccucuaucacacugua

SEQ ID NO: 1286746 - RNA, 19 nt, Artificial Sequence
  Description of Artificial Sequence: Synthetic oligonucleotide
  Sense strand starting at position 2992 of SEQ ID NO: 1241622
gguaauagcauuuguguga

SEQ ID NO: 1286747 - RNA, 19 nt, Artificial Sequence
  Description of Artificial Sequence: Synthetic oligonucleotide
  Antisense strand to SEQ ID NO: 1286746
ucacacaaaugcuauuacc

SEQ ID NO: 1286748 - RNA, 19 nt, Artificial Sequence
  Description of Artificial Sequence: Synthetic oligonucleotide
  Sense strand starting at position 2993 of SEQ ID NO: 1241622
guaauagcauuugugugaa

SEQ ID NO: 1286749 - RNA, 19 nt, Artificial Sequence
  Description of Artificial Sequence: Synthetic oligonucleotide
  Antisense strand to SEQ ID NO: 1286748
uucacacaaaugcuauuac

SEQ ID NO: 1286750 - RNA, 19 nt, Artificial Sequence
  Description of Artificial Sequence: Synthetic oligonucleotide
  Sense strand starting at position 3042 of SEQ ID NO: 1241622
gaaaucacuuggcuugaga

SEQ ID NO: 1286751 - RNA, 19 nt, Artificial Sequence
  Description of Artificial Sequence: Synthetic oligonucleotide
  Antisense strand to SEQ ID NO: 1286750
ucucaagccaagugauuuc

SEQ ID NO: 1286752 - RNA, 19 nt, Artificial Sequence
  Description of Artificial Sequence: Synthetic oligonucleotide
  Sense strand starting at position 3190 of SEQ ID NO: 1241622
ugagaagugaauugcaaag

SEQ ID NO: 1286753 - RNA, 19 nt, Artificial Sequence
  Description of Artificial Sequence: Synthetic oligonucleotide
  Antisense strand to SEQ ID NO: 1286752
cuuugcaauucacuucuca

SEQ ID NO: 1286754 - RNA, 19 nt, Artificial Sequence
  Description of Artificial Sequence: Synthetic oligonucleotide
  Sense strand starting at position 3239 of SEQ ID NO: 1241622
cuggucuagcuuugagauu

SEQ ID NO: 1286755 - RNA, 19 nt, Artificial Sequence
  Description of Artificial Sequence: Synthetic oligonucleotide
  Antisense strand to SEQ ID NO: 1286754
aaucucaaagcuagaccag

SEQ ID NO: 1286756 - RNA, 19 nt, Artificial Sequence
  Description of Artificial Sequence: Synthetic oligonucleotide
  Sense strand starting at position 3666 of SEQ ID NO: 1241622
gcagguacuuggcuaaaca

SEQ ID NO: 1286757 - RNA, 19 nt, Artificial Sequence
  Description of Artificial Sequence: Synthetic oligonucleotide
  Antisense strand to SEQ ID NO: 1286756
uguuuagccaaguaccugc

SEQ ID NO: 1286758 - RNA, 19 nt, Artificial Sequence
  Description of Artificial Sequence: Synthetic oligonucleotide
  Sense strand starting at position 3714 of SEQ ID NO: 1241622
uuaugauguuugguuugga

SEQ ID NO: 1286759 - RNA, 19 nt, Artificial Sequence
  Description of Artificial Sequence: Synthetic oligonucleotide
  Antisense strand to SEQ ID NO: 1286758
uccaaaccaaacaucauaa

SEQ ID NO: 1286760 - RNA, 19 nt, Artificial Sequence
  Description of Artificial Sequence: Synthetic oligonucleotide
  Sense strand starting at position 3715 of SEQ ID NO: 1241622
uaugauguuugguuuggaa

SEQ ID NO: 1286761 - RNA, 19 nt, Artificial Sequence
  Description of Artificial Sequence: Synthetic oligonucleotide
  Antisense strand to SEQ ID NO: 1286760
uuccaaaccaaacaucaua

SEQ ID NO: 1286762 - RNA, 19 nt, Artificial Sequence
  Description of Artificial Sequence: Synthetic oligonucleotide
  Sense strand starting at position 3717 of SEQ ID NO: 1241622
ugauguuugguuuggaaga

SEQ ID NO: 1286763 - RNA, 19 nt, Artificial Sequence
  Description of Artificial Sequence: Synthetic oligonucleotide
  Antisense strand to SEQ ID NO: 1286762
ucuuccaaaccaaacauca

SEQ ID NO: 1286764 - RNA, 19 nt, Artificial Sequence
  Description of Artificial Sequence: Synthetic oligonucleotide
  Sense strand starting at position 3831 of SEQ ID NO: 1241622
ucaauuagagcugaguaac

SEQ ID NO: 1286765 - RNA, 19 nt, Artificial Sequence
  Description of Artificial Sequence: Synthetic oligonucleotide
  Antisense strand to SEQ ID NO: 1286764
guuacucagcucuaauuga

SEQ ID NO: 1286766 - RNA, 19 nt, Artificial Sequence
  Description of Artificial Sequence: Synthetic oligonucleotide
  Sense strand starting at position 3953 of SEQ ID NO: 1241622
ugaagacaucugugcuuau

SEQ ID NO: 1286767 - RNA, 19 nt, Artificial Sequence
  Description of Artificial Sequence: Synthetic oligonucleotide
  Antisense strand to SEQ ID NO: 1286766
auaagcacagaugucuuca

SEQ ID NO: 1286768 - RNA, 19 nt, Artificial Sequence
  Description of Artificial Sequence: Synthetic oligonucleotide
  Sense strand starting at position 3954 of SEQ ID NO: 1241622
gaagacaucugugcuuaug

SEQ ID NO: 1286769 - RNA, 19 nt, Artificial Sequence
  Description of Artificial Sequence: Synthetic oligonucleotide
  Antisense strand to SEQ ID NO: 1286768
cauaagcacagaugucuuc

SEQ ID NO: 1286770 - RNA, 19 nt, Artificial Sequence
  Description of Artificial Sequence: Synthetic oligonucleotide
  Sense strand starting at position 3975 of SEQ ID NO: 1241622
auaucagacuuauugaagu

SEQ ID NO: 1286771 - RNA, 19 nt, Artificial Sequence
  Description of Artificial Sequence: Synthetic oligonucleotide
  Antisense strand to SEQ ID NO: 1286770
acuucaauaagucugauau

SEQ ID NO: 1286772 - RNA, 19 nt, Artificial Sequence
  Description of Artificial Sequence: Synthetic oligonucleotide
  Sense strand starting at position 91 of SEQ ID NO: 1241623
acauguauugcccaaggaa

SEQ ID NO: 1286773 - RNA, 19 nt, Artificial Sequence
  Description of Artificial Sequence: Synthetic oligonucleotide
  Antisense strand to SEQ ID NO: 1286772
uuccuugggcaauacaugu

SEQ ID NO: 1286774 - RNA, 19 nt, Artificial Sequence
  Description of Artificial Sequence: Synthetic oligonucleotide
  Sense strand starting at position 521 of SEQ ID NO: 1241623
gaaaguugcuguucgaagg

SEQ ID NO: 1286775 - RNA, 19 nt, Artificial Sequence
  Description of Artificial Sequence: Synthetic oligonucleotide
  Antisense strand to SEQ ID NO: 1286774
ccuucgaacagcaacuuuc

SEQ ID NO: 1286776 - RNA, 19 nt, Artificial Sequence
  Description of Artificial Sequence: Synthetic oligonucleotide
  Sense strand starting at position 522 of SEQ ID NO: 1241623
aaaguugcuguucgaagga

SEQ ID NO: 1286777 - RNA, 19 nt, Artificial Sequence
  Description of Artificial Sequence: Synthetic oligonucleotide
  Antisense strand to SEQ ID NO: 1286776
uccuucgaacagcaacuuu

SEQ ID NO: 1286778 - RNA, 19 nt, Artificial Sequence
  Description of Artificial Sequence: Synthetic oligonucleotide
  Sense strand starting at position 583 of SEQ ID NO: 1241623
ucugcuugucaucaguaaa

SEQ ID NO: 1286779 - RNA, 19 nt, Artificial Sequence
  Description of Artificial Sequence: Synthetic oligonucleotide
  Antisense strand to SEQ ID NO: 1286778
uuuacugaugacaagcaga

SEQ ID NO: 1286780 - RNA, 19 nt, Artificial Sequence
  Description of Artificial Sequence: Synthetic oligonucleotide
  Sense strand starting at position 611 of SEQ ID NO: 1241623
ugaauugaagcguauguaa

SEQ ID NO: 1286781 - RNA, 19 nt, Artificial Sequence
  Description of Artificial Sequence: Synthetic oligonucleotide
  Antisense strand to SEQ ID NO: 1286780
uuacauacgcuucaauuca

SEQ ID NO: 1286782 - RNA, 19 nt, Artificial Sequence
  Description of Artificial Sequence: Synthetic oligonucleotide
  Sense strand starting at position 613 of SEQ ID NO: 1241623
aauugaagcguauguaaua

SEQ ID NO: 1286783 - RNA, 19 nt, Artificial Sequence
  Description of Artificial Sequence: Synthetic oligonucleotide
  Antisense strand to SEQ ID NO: 1286782
uauuacauacgcuucaauu

SEQ ID NO: 1286784 - RNA, 19 nt, Artificial Sequence
  Description of Artificial Sequence: Synthetic oligonucleotide
  Sense strand starting at position 614 of SEQ ID NO: 1241623
auugaagcguauguaauaa

SEQ ID NO: 1286785 - RNA, 19 nt, Artificial Sequence
  Description of Artificial Sequence: Synthetic oligonucleotide
  Antisense strand to SEQ ID NO: 1286784
uuauuacauacgcuucaau

SEQ ID NO: 1286786 - RNA, 19 nt, Artificial Sequence
  Description of Artificial Sequence: Synthetic oligonucleotide
  Sense strand starting at position 659 of SEQ ID NO: 1241623
uggcucugugguuaaguaa

SEQ ID NO: 1286787 - RNA, 19 nt, Artificial Sequence
  Description of Artificial Sequence: Synthetic oligonucleotide
  Antisense strand to SEQ ID NO: 1286786
uuacuuaaccacagagcca

SEQ ID NO: 1286788 - RNA, 19 nt, Artificial Sequence
  Description of Artificial Sequence: Synthetic oligonucleotide
  Sense strand starting at position 666 of SEQ ID NO: 1241623
gugguuaaguaagucuuga

SEQ ID NO: 1286789 - RNA, 19 nt, Artificial Sequence
  Description of Artificial Sequence: Synthetic oligonucleotide
  Antisense strand to SEQ ID NO: 1286788
ucaagacuuacuuaaccac

SEQ ID NO: 1286790 - RNA, 19 nt, Artificial Sequence
  Description of Artificial Sequence: Synthetic oligonucleotide
  Sense strand starting at position 674 of SEQ ID NO: 1241623
guaagucuugaauaccuga

SEQ ID NO: 1286791 - RNA, 19 nt, Artificial Sequence
  Description of Artificial Sequence: Synthetic oligonucleotide
  Antisense strand to SEQ ID NO: 1286790
ucagguauucaagacuuac

SEQ ID NO: 1286792 - RNA, 19 nt, Artificial Sequence
  Description of Artificial Sequence: Synthetic oligonucleotide
  Sense strand starting at position 711 of SEQ ID NO: 1241623
gguccugugccacagauaa

SEQ ID NO: 1286793 - RNA, 19 nt, Artificial Sequence
  Description of Artificial Sequence: Synthetic oligonucleotide
  Antisense strand to SEQ ID NO: 1286792
uuaucuguggcacaggacc

SEQ ID NO: 1286794 - RNA, 19 nt, Artificial Sequence
  Description of Artificial Sequence: Synthetic oligonucleotide
  Sense strand starting at position 728 of SEQ ID NO: 1241623
aaugaugucccuuggguuu

SEQ ID NO: 1286795 - RNA, 19 nt, Artificial Sequence
  Description of Artificial Sequence: Synthetic oligonucleotide
  Antisense strand to SEQ ID NO: 1286794
aaacccaagggacaucauu

SEQ ID NO: 1286796 - RNA, 19 nt, Artificial Sequence
  Description of Artificial Sequence: Synthetic oligonucleotide
  Sense strand starting at position 742 of SEQ ID NO: 1241623
gguuucuacugauuacauu

SEQ ID NO: 1286797 - RNA, 19 nt, Artificial Sequence
  Description of Artificial Sequence: Synthetic oligonucleotide
  Antisense strand to SEQ ID NO: 1286796
aauguaaucaguagaaacc

SEQ ID NO: 1286798 - RNA, 19 nt, Artificial Sequence
  Description of Artificial Sequence: Synthetic oligonucleotide
  Sense strand starting at position 743 of SEQ ID NO: 1241623
guuucuacugauuacauua

SEQ ID NO: 1286799 - RNA, 19 nt, Artificial Sequence
  Description of Artificial Sequence: Synthetic oligonucleotide
  Antisense strand to SEQ ID NO: 1286798
uaauguaaucaguagaaac

SEQ ID NO: 1286800 - RNA, 19 nt, Artificial Sequence
  Description of Artificial Sequence: Synthetic oligonucleotide
  Sense strand starting at position 798 of SEQ ID NO: 1241623
ggucuuggcucaucugaga

SEQ ID NO: 1286801 - RNA, 19 nt, Artificial Sequence
  Description of Artificial Sequence: Synthetic oligonucleotide
  Antisense strand to SEQ ID NO: 1286800
ucucagaugagccaagacc

SEQ ID NO: 1286802 - RNA, 19 nt, Artificial Sequence
  Description of Artificial Sequence: Synthetic oligonucleotide
  Sense strand starting at position 897 of SEQ ID NO: 1241623
acgugcugucucagagcga

SEQ ID NO: 1286803 - RNA, 19 nt, Artificial Sequence
  Description of Artificial Sequence: Synthetic oligonucleotide
  Antisense strand to SEQ ID NO: 1286802
ucgcucugagacagcacgu

SEQ ID NO: 1286804 - RNA, 19 nt, Artificial Sequence
  Description of Artificial Sequence: Synthetic oligonucleotide
  Sense strand starting at position 967 of SEQ ID NO: 1241623
uggcaagugucucuaagaa

SEQ ID NO: 1286805 - RNA, 19 nt, Artificial Sequence
  Description of Artificial Sequence: Synthetic oligonucleotide
  Antisense strand to SEQ ID NO: 1286804
uucuuagagacacuugcca

SEQ ID NO: 1286806 - RNA, 19 nt, Artificial Sequence
  Description of Artificial Sequence: Synthetic oligonucleotide
  Sense strand starting at position 1060 of SEQ ID NO: 1241623
auguuaguuacgcuugcaa

SEQ ID NO: 1286807 - RNA, 19 nt, Artificial Sequence
  Description of Artificial Sequence: Synthetic oligonucleotide
  Antisense strand to SEQ ID NO: 1286806
uugcaagcguaacuaacau

SEQ ID NO: 1286808 - RNA, 19 nt, Artificial Sequence
  Description of Artificial Sequence: Synthetic oligonucleotide
  Sense strand starting at position 1104 of SEQ ID NO: 1241623
uggugauuagccugaauaa

SEQ ID NO: 1286809 - RNA, 19 nt, Artificial Sequence
  Description of Artificial Sequence: Synthetic oligonucleotide
  Antisense strand to SEQ ID NO: 1286808
uuauucaggcuaaucacca

SEQ ID NO: 1286810 - RNA, 19 nt, Artificial Sequence
  Description of Artificial Sequence: Synthetic oligonucleotide
  Sense strand starting at position 1105 of SEQ ID NO: 1241623
ggugauuagccugaauaac

SEQ ID NO: 1286811 - RNA, 19 nt, Artificial Sequence
  Description of Artificial Sequence: Synthetic oligonucleotide
  Antisense strand to SEQ ID NO: 1286810
guuauucaggcuaaucacc

SEQ ID NO: 1286812 - RNA, 19 nt, Artificial Sequence
  Description of Artificial Sequence: Synthetic oligonucleotide
  Sense strand starting at position 1250 of SEQ ID NO: 1241623
aguaaaccugagugggaau

SEQ ID NO: 1286813 - RNA, 19 nt, Artificial Sequence
  Description of Artificial Sequence: Synthetic oligonucleotide
  Antisense strand to SEQ ID NO: 1286812
auucccacucagguuuacu

SEQ ID NO: 1286814 - RNA, 19 nt, Artificial Sequence
  Description of Artificial Sequence: Synthetic oligonucleotide
  Sense strand starting at position 1266 of SEQ ID NO: 1241623
aauguaaagucguuaacuc

SEQ ID NO: 1286815 - RNA, 19 nt, Artificial Sequence
  Description of Artificial Sequence: Synthetic oligonucleotide
  Antisense strand to SEQ ID NO: 1286814
gaguuaacgacuuuacauu

SEQ ID NO: 1286816 - RNA, 19 nt, Artificial Sequence
  Description of Artificial Sequence: Synthetic oligonucleotide
  Sense strand starting at position 1267 of SEQ ID NO: 1241623
auguaaagucguuaacuca

SEQ ID NO: 1286817 - RNA, 19 nt, Artificial Sequence
  Description of Artificial Sequence: Synthetic oligonucleotide
  Antisense strand to SEQ ID NO: 1286816
ugaguuaacgacuuuacau

SEQ ID NO: 1286818 - RNA, 19 nt, Artificial Sequence
  Description of Artificial Sequence: Synthetic oligonucleotide
  Sense strand starting at position 2044 of SEQ ID NO: 1241623
ucgcgagacaguuuguguu

SEQ ID NO: 1286819 - RNA, 19 nt, Artificial Sequence
  Description of Artificial Sequence: Synthetic oligonucleotide
  Antisense strand to SEQ ID NO: 1286818
aacacaaacugucucgcga

SEQ ID NO: 1286820 - RNA, 19 nt, Artificial Sequence
  Description of Artificial Sequence: Synthetic oligonucleotide
  Sense strand starting at position 2412 of SEQ ID NO: 1241623
uuuagacuuuaggucacau

SEQ ID NO: 1286821 - RNA, 19 nt, Artificial Sequence
  Description of Artificial Sequence: Synthetic oligonucleotide
  Antisense strand to SEQ ID NO: 1286820
augugaccuaaagucuaaa

SEQ ID NO: 1286822 - RNA, 19 nt, Artificial Sequence
  Description of Artificial Sequence: Synthetic oligonucleotide
  Sense strand starting at position 2591 of SEQ ID NO: 1241623
ggccuuuggacuuaacgua

SEQ ID NO: 1286823 - RNA, 19 nt, Artificial Sequence
  Description of Artificial Sequence: Synthetic oligonucleotide
  Antisense strand to SEQ ID NO: 1286822
uacguuaaguccaaaggcc

SEQ ID NO: 1286824 - RNA, 19 nt, Artificial Sequence
  Description of Artificial Sequence: Synthetic oligonucleotide
  Sense strand starting at position 2598 of SEQ ID NO: 1241623
ggacuuaacguagaagcca

SEQ ID NO: 1286825 - RNA, 19 nt, Artificial Sequence
  Description of Artificial Sequence: Synthetic oligonucleotide
  Antisense strand to SEQ ID NO: 1286824
uggcuucuacguuaagucc

SEQ ID NO: 1286826 - RNA, 19 nt, Artificial Sequence
  Description of Artificial Sequence: Synthetic oligonucleotide
  Sense strand starting at position 3011 of SEQ ID NO: 1241623
aucucuuuauacccggaaa

SEQ ID NO: 1286827 - RNA, 19 nt, Artificial Sequence
  Description of Artificial Sequence: Synthetic oligonucleotide
  Antisense strand to SEQ ID NO: 1286826
uuuccggguauaaagagau

SEQ ID NO: 1286828 - RNA, 19 nt, Artificial Sequence
  Description of Artificial Sequence: Synthetic oligonucleotide
  Sense strand starting at position 3013 of SEQ ID NO: 1241623
cucuuuauacccggaaagu

SEQ ID NO: 1286829 - RNA, 19 nt, Artificial Sequence
  Description of Artificial Sequence: Synthetic oligonucleotide
  Antisense strand to SEQ ID NO: 1286828
acuuuccggguauaaagag

SEQ ID NO: 1286830 - RNA, 19 nt, Artificial Sequence
  Description of Artificial Sequence: Synthetic oligonucleotide
  Sense strand starting at position 3014 of SEQ ID NO: 1241623
ucuuuauacccggaaagua

SEQ ID NO: 1286831 - RNA, 19 nt, Artificial Sequence
  Description of Artificial Sequence: Synthetic oligonucleotide
  Antisense strand to SEQ ID NO: 1286830
uacuuuccggguauaaaga

SEQ ID NO: 1286832 - RNA, 19 nt, Artificial Sequence
  Description of Artificial Sequence: Synthetic oligonucleotide
  Sense strand starting at position 3623 of SEQ ID NO: 1241623
ucauaaggagugcaguuua

SEQ ID NO: 1286833 - RNA, 19 nt, Artificial Sequence
  Description of Artificial Sequence: Synthetic oligonucleotide
  Antisense strand to SEQ ID NO: 1286832
uaaacugcacuccuuauga

SEQ ID NO: 1286834 - RNA, 19 nt, Artificial Sequence
  Description of Artificial Sequence: Synthetic oligonucleotide
  Sense strand starting at position 3635 of SEQ ID NO: 1241623
caguuuagaucccuggcau

SEQ ID NO: 1286835 - RNA, 19 nt, Artificial Sequence
  Description of Artificial Sequence: Synthetic oligonucleotide
  Antisense strand to SEQ ID NO: 1286834
augccagggaucuaaacug

SEQ ID NO: 1286836 - RNA, 19 nt, Artificial Sequence
  Description of Artificial Sequence: Synthetic oligonucleotide
  Sense strand starting at position 3636 of SEQ ID NO: 1241623
aguuuagaucccuggcaug

SEQ ID NO: 1286837 - RNA, 19 nt, Artificial Sequence
  Description of Artificial Sequence: Synthetic oligonucleotide
  Antisense strand to SEQ ID NO: 1286836
caugccagggaucuaaacu

SEQ ID NO: 1286838 - RNA, 19 nt, Artificial Sequence
  Description of Artificial Sequence: Synthetic oligonucleotide
  Sense strand starting at position 3671 of SEQ ID NO: 1241623
guucgcgcuccugugagau

SEQ ID NO: 1286839 - RNA, 19 nt, Artificial Sequence
  Description of Artificial Sequence: Synthetic oligonucleotide
  Antisense strand to SEQ ID NO: 1286838
aucucacaggagcgcgaac

SEQ ID NO: 1286840 - RNA, 19 nt, Artificial Sequence
  Description of Artificial Sequence: Synthetic oligonucleotide
  Sense strand starting at position 3842 of SEQ ID NO: 1241623
gggcaaacccaauguuucu

SEQ ID NO: 1286841 - RNA, 19 nt, Artificial Sequence
  Description of Artificial Sequence: Synthetic oligonucleotide
  Antisense strand to SEQ ID NO: 1286840
agaaacauuggguuugccc

SEQ ID NO: 1286842 - RNA, 19 nt, Artificial Sequence
  Description of Artificial Sequence: Synthetic oligonucleotide
  Sense strand starting at position 3851 of SEQ ID NO: 1241623
caauguuucugugugaauu

SEQ ID NO: 1286843 - RNA, 19 nt, Artificial Sequence
  Description of Artificial Sequence: Synthetic oligonucleotide
  Antisense strand to SEQ ID NO: 1286842
aauucacacagaaacauug

SEQ ID NO: 1286844 - RNA, 19 nt, Artificial Sequence
  Description of Artificial Sequence: Synthetic oligonucleotide
  Sense strand starting at position 3857 of SEQ ID NO: 1241623
uucugugugaauucgcuuu

SEQ ID NO: 1286845 - RNA, 19 nt, Artificial Sequence
  Description of Artificial Sequence: Synthetic oligonucleotide
  Antisense strand to SEQ ID NO: 1286844
aaagcgaauucacacagaa

SEQ ID NO: 1286846 - RNA, 19 nt, Artificial Sequence
  Description of Artificial Sequence: Synthetic oligonucleotide
  Sense strand starting at position 3879 of SEQ ID NO: 1241623
agauaauauuugcagcuca

SEQ ID NO: 1286847 - RNA, 19 nt, Artificial Sequence
  Description of Artificial Sequence: Synthetic oligonucleotide
  Antisense strand to SEQ ID NO: 1286846
ugagcugcaaauauuaucu

SEQ ID NO: 1286848 - RNA, 19 nt, Artificial Sequence
  Description of Artificial Sequence: Synthetic oligonucleotide
  Sense strand starting at position 3910 of SEQ ID NO: 1241623
gccacauuucucugcguua

SEQ ID NO: 1286849 - RNA, 19 nt, Artificial Sequence
  Description of Artificial Sequence: Synthetic oligonucleotide
  Antisense strand to SEQ ID NO: 1286848
uaacgcagagaaauguggc

SEQ ID NO: 1286850 - RNA, 19 nt, Artificial Sequence
  Description of Artificial Sequence: Synthetic oligonucleotide
  Sense strand starting at position 3911 of SEQ ID NO: 1241623
ccacauuucucugcguuaa

SEQ ID NO: 1286851 - RNA, 19 nt, Artificial Sequence
  Description of Artificial Sequence: Synthetic oligonucleotide
  Antisense strand to SEQ ID NO: 1286850
uuaacgcagagaaaugugg

SEQ ID NO: 1286852 - RNA, 19 nt, Artificial Sequence
  Description of Artificial Sequence: Synthetic oligonucleotide
  Sense strand starting at position 345 of SEQ ID NO: 1241624
caguaagagacagaucguu

SEQ ID NO: 1286853 - RNA, 19 nt, Artificial Sequence
  Description of Artificial Sequence: Synthetic oligonucleotide
  Antisense strand to SEQ ID NO: 1286852
aacgaucugucucuuacug

SEQ ID NO: 1286854 - RNA, 19 nt, Artificial Sequence
  Description of Artificial Sequence: Synthetic oligonucleotide
  Sense strand starting at position 375 of SEQ ID NO: 1241624
agugaaucugccuaagcca

SEQ ID NO: 1286855 - RNA, 19 nt, Artificial Sequence
  Description of Artificial Sequence: Synthetic oligonucleotide
  Antisense strand to SEQ ID NO: 1286854
uggcuuaggcagauucacu

SEQ ID NO: 1286856 - RNA, 19 nt, Artificial Sequence
  Description of Artificial Sequence: Synthetic oligonucleotide
  Sense strand starting at position 430 of SEQ ID NO: 1241624
auagauauauccuucugua

SEQ ID NO: 1286857 - RNA, 19 nt, Artificial Sequence
  Description of Artificial Sequence: Synthetic oligonucleotide
  Antisense strand to SEQ ID NO: 1286856
uacagaaggauauaucuau

SEQ ID NO: 1286858 - RNA, 19 nt, Artificial Sequence
  Description of Artificial Sequence: Synthetic oligonucleotide
  Sense strand starting at position 457 of SEQ ID NO: 1241624
cguaacugucugucagcuu

SEQ ID NO: 1286859 - RNA, 19 nt, Artificial Sequence
  Description of Artificial Sequence: Synthetic oligonucleotide
  Antisense strand to SEQ ID NO: 1286858
aagcugacagacaguuacg

SEQ ID NO: 1286860 - RNA, 19 nt, Artificial Sequence
  Description of Artificial Sequence: Synthetic oligonucleotide
  Sense strand starting at position 1144 of SEQ ID NO: 1241624
ccaacuguucuuuagagua

SEQ ID NO: 1286861 - RNA, 19 nt, Artificial Sequence
  Description of Artificial Sequence: Synthetic oligonucleotide
  Antisense strand to SEQ ID NO: 1286860
uacucuaaagaacaguugg

SEQ ID NO: 1286862 - RNA, 19 nt, Artificial Sequence
  Description of Artificial Sequence: Synthetic oligonucleotide
  Sense strand starting at position 1178 of SEQ ID NO: 1241624
ucaaaugaaucuguuagua

SEQ ID NO: 1286863 - RNA, 19 nt, Artificial Sequence
  Description of Artificial Sequence: Synthetic oligonucleotide
  Antisense strand to SEQ ID NO: 1286862
uacuaacagauucauuuga

SEQ ID NO: 1286864 - RNA, 19 nt, Artificial Sequence
  Description of Artificial Sequence: Synthetic oligonucleotide
  Sense strand starting at position 1273 of SEQ ID NO: 1241624
gggaguuaacuugacaguu

SEQ ID NO: 1286865 - RNA, 19 nt, Artificial Sequence
  Description of Artificial Sequence: Synthetic oligonucleotide
  Antisense strand to SEQ ID NO: 1286864
aacugucaaguuaacuccc

SEQ ID NO: 1286866 - RNA, 19 nt, Artificial Sequence
  Description of Artificial Sequence: Synthetic oligonucleotide
  Sense strand starting at position 1288 of SEQ ID NO: 1241624
aguuuaugaugaguaacua

SEQ ID NO: 1286867 - RNA, 19 nt, Artificial Sequence
  Description of Artificial Sequence: Synthetic oligonucleotide
  Antisense strand to SEQ ID NO: 1286866
uaguuacucaucauaaacu

SEQ ID NO: 1286868 - RNA, 19 nt, Artificial Sequence
  Description of Artificial Sequence: Synthetic oligonucleotide
  Sense strand starting at position 1289 of SEQ ID NO: 1241624
guuuaugaugaguaacuau

SEQ ID NO: 1286869 - RNA, 19 nt, Artificial Sequence
  Description of Artificial Sequence: Synthetic oligonucleotide
  Antisense strand to SEQ ID NO: 1286868
auaguuacucaucauaaac

SEQ ID NO: 1286870 - RNA, 19 nt, Artificial Sequence
  Description of Artificial Sequence: Synthetic oligonucleotide
  Sense strand starting at position 1292 of SEQ ID NO: 1241624
uaugaugaguaacuauagu

SEQ ID NO: 1286871 - RNA, 19 nt, Artificial Sequence
  Description of Artificial Sequence: Synthetic oligonucleotide
  Antisense strand to SEQ ID NO: 1286870
acuauaguuacucaucaua

SEQ ID NO: 1286872 - RNA, 19 nt, Artificial Sequence
  Description of Artificial Sequence: Synthetic oligonucleotide
  Sense strand starting at position 1341 of SEQ ID NO: 1241624
uuauacauccuagggcaaa

SEQ ID NO: 1286873 - RNA, 19 nt, Artificial Sequence
  Description of Artificial Sequence: Synthetic oligonucleotide
  Antisense strand to SEQ ID NO: 1286872
uuugcccuaggauguauaa

SEQ ID NO: 1286874 - RNA, 19 nt, Artificial Sequence
  Description of Artificial Sequence: Synthetic oligonucleotide
  Sense strand starting at position 1455 of SEQ ID NO: 1241624
gaucuugggauguguucca

SEQ ID NO: 1286875 - RNA, 19 nt, Artificial Sequence
  Description of Artificial Sequence: Synthetic oligonucleotide
  Antisense strand to SEQ ID NO: 1286874
uggaacacaucccaagauc

SEQ ID NO: 1286876 - RNA, 19 nt, Artificial Sequence
  Description of Artificial Sequence: Synthetic oligonucleotide
  Sense strand starting at position 1468 of SEQ ID NO: 1241624
guuccacuuuguuugaaag

SEQ ID NO: 1286877 - RNA, 19 nt, Artificial Sequence
  Description of Artificial Sequence: Synthetic oligonucleotide
  Antisense strand to SEQ ID NO: 1286876
cuuucaaacaaaguggaac

SEQ ID NO: 1286878 - RNA, 19 nt, Artificial Sequence
  Description of Artificial Sequence: Synthetic oligonucleotide
  Sense strand starting at position 1469 of SEQ ID NO: 1241624
uuccacuuuguuugaaaga

SEQ ID NO: 1286879 - RNA, 19 nt, Artificial Sequence
  Description of Artificial Sequence: Synthetic oligonucleotide
  Antisense strand to SEQ ID NO: 1286878
ucuuucaaacaaaguggaa

SEQ ID NO: 1286880 - RNA, 19 nt, Artificial Sequence
  Description of Artificial Sequence: Synthetic oligonucleotide
  Sense strand starting at position 1580 of SEQ ID NO: 1241624
guguaaugccuguaacagg

SEQ ID NO: 1286881 - RNA, 19 nt, Artificial Sequence
  Description of Artificial Sequence: Synthetic oligonucleotide
  Antisense strand to SEQ ID NO: 1286880
ccuguuacaggcauuacac

SEQ ID NO: 1286882 - RNA, 19 nt, Artificial Sequence
  Description of Artificial Sequence: Synthetic oligonucleotide
  Sense strand starting at position 2126 of SEQ ID NO: 1241624
gggcaugauuggguuagau

SEQ ID NO: 1286883 - RNA, 19 nt, Artificial Sequence
  Description of Artificial Sequence: Synthetic oligonucleotide
  Antisense strand to SEQ ID NO: 1286882
aucuaacccaaucaugccc

SEQ ID NO: 1286884 - RNA, 19 nt, Artificial Sequence
  Description of Artificial Sequence: Synthetic oligonucleotide
  Sense strand starting at position 2128 of SEQ ID NO: 1241624
gcaugauuggguuagauau

SEQ ID NO: 1286885 - RNA, 19 nt, Artificial Sequence
  Description of Artificial Sequence: Synthetic oligonucleotide
  Antisense strand to SEQ ID NO: 1286884
auaucuaacccaaucaugc

SEQ ID NO: 1286886 - RNA, 19 nt, Artificial Sequence
  Description of Artificial Sequence: Synthetic oligonucleotide
  Sense strand starting at position 2155 of SEQ ID NO: 1241624
cugaauggauuagagauuu

SEQ ID NO: 1286887 - RNA, 19 nt, Artificial Sequence
  Description of Artificial Sequence: Synthetic oligonucleotide
  Antisense strand to SEQ ID NO: 1286886
aaaucucuaauccauucag

SEQ ID NO: 1286888 - RNA, 19 nt, Artificial Sequence
  Description of Artificial Sequence: Synthetic oligonucleotide
  Sense strand starting at position 2166 of SEQ ID NO: 1241624
agagauuuguucuggaaga

SEQ ID NO: 1286889 - RNA, 19 nt, Artificial Sequence
  Description of Artificial Sequence: Synthetic oligonucleotide
  Antisense strand to SEQ ID NO: 1286888
ucuuccagaacaaaucucu

SEQ ID NO: 1286890 - RNA, 19 nt, Artificial Sequence
  Description of Artificial Sequence: Synthetic oligonucleotide
  Sense strand starting at position 2189 of SEQ ID NO: 1241624
guuugagaaacauggccuu

SEQ ID NO: 1286891 - RNA, 19 nt, Artificial Sequence
  Description of Artificial Sequence: Synthetic oligonucleotide
  Antisense strand to SEQ ID NO: 1286890
aaggccauguuucucaaac

SEQ ID NO: 1286892 - RNA, 19 nt, Artificial Sequence
  Description of Artificial Sequence: Synthetic oligonucleotide
  Sense strand starting at position 2264 of SEQ ID NO: 1241624
gacugagguuucccuauuc

SEQ ID NO: 1286893 - RNA, 19 nt, Artificial Sequence
  Description of Artificial Sequence: Synthetic oligonucleotide
  Antisense strand to SEQ ID NO: 1286892
gaauagggaaaccucaguc

SEQ ID NO: 1286894 - RNA, 19 nt, Artificial Sequence
  Description of Artificial Sequence: Synthetic oligonucleotide
  Sense strand starting at position 2338 of SEQ ID NO: 1241624
caagaacugccuuggaaga

SEQ ID NO: 1286895 - RNA, 19 nt, Artificial Sequence
  Description of Artificial Sequence: Synthetic oligonucleotide
  Antisense strand to SEQ ID NO: 1286894
ucuuccaaggcaguucuug

SEQ ID NO: 1286896 - RNA, 19 nt, Artificial Sequence
  Description of Artificial Sequence: Synthetic oligonucleotide
  Sense strand starting at position 2339 of SEQ ID NO: 1241624
aagaacugccuuggaagau

SEQ ID NO: 1286897 - RNA, 19 nt, Artificial Sequence
  Description of Artificial Sequence: Synthetic oligonucleotide
  Antisense strand to SEQ ID NO: 1286896
aucuuccaaggcaguucuu

SEQ ID NO: 1286898 - RNA, 19 nt, Artificial Sequence
  Description of Artificial Sequence: Synthetic oligonucleotide
  Sense strand starting at position 2345 of SEQ ID NO: 1241624
ugccuuggaagaugucaca

SEQ ID NO: 1286899 - RNA, 19 nt, Artificial Sequence
  Description of Artificial Sequence: Synthetic oligonucleotide
  Antisense strand to SEQ ID NO: 1286898
ugugacaucuuccaaggca

SEQ ID NO: 1286900 - RNA, 19 nt, Artificial Sequence
  Description of Artificial Sequence: Synthetic oligonucleotide
  Sense strand starting at position 2368 of SEQ ID NO: 1241624
aagauauggucuuccagua

SEQ ID NO: 1286901 - RNA, 19 nt, Artificial Sequence
  Description of Artificial Sequence: Synthetic oligonucleotide
  Antisense strand to SEQ ID NO: 1286900
uacuggaagaccauaucuu

SEQ ID NO: 1286902 - RNA, 19 nt, Artificial Sequence
  Description of Artificial Sequence: Synthetic oligonucleotide
  Sense strand starting at position 2373 of SEQ ID NO: 1241624
auggucuuccaguaggaug

SEQ ID NO: 1286903 - RNA, 19 nt, Artificial Sequence
  Description of Artificial Sequence: Synthetic oligonucleotide
  Antisense strand to SEQ ID NO: 1286902
cauccuacuggaagaccau

SEQ ID NO: 1286904 - RNA, 19 nt, Artificial Sequence
  Description of Artificial Sequence: Synthetic oligonucleotide
  Sense strand starting at position 2477 of SEQ ID NO: 1241624
acguuauuccaucgauuuc

SEQ ID NO: 1286905 - RNA, 19 nt, Artificial Sequence
  Description of Artificial Sequence: Synthetic oligonucleotide
  Antisense strand to SEQ ID NO: 1286904
gaaaucgauggaauaacgu

SEQ ID NO: 1286906 - RNA, 19 nt, Artificial Sequence
  Description of Artificial Sequence: Synthetic oligonucleotide
  Sense strand starting at position 2509 of SEQ ID NO: 1241624
agcacuuccagagaagguu

SEQ ID NO: 1286907 - RNA, 19 nt, Artificial Sequence
  Description of Artificial Sequence: Synthetic oligonucleotide
  Antisense strand to SEQ ID NO: 1286906
aaccuucucuggaagugcu

SEQ ID NO: 1286908 - RNA, 19 nt, Artificial Sequence
  Description of Artificial Sequence: Synthetic oligonucleotide
  Sense strand starting at position 2515 of SEQ ID NO: 1241624
uccagagaagguuguguga

SEQ ID NO: 1286909 - RNA, 19 nt, Artificial Sequence
  Description of Artificial Sequence: Synthetic oligonucleotide
  Antisense strand to SEQ ID NO: 1286908
ucacacaaccuucucugga

SEQ ID NO: 1286910 - RNA, 19 nt, Artificial Sequence
  Description of Artificial Sequence: Synthetic oligonucleotide
  Sense strand starting at position 2759 of SEQ ID NO: 1241624
ggccaaaggucaccaggau

SEQ ID NO: 1286911 - RNA, 19 nt, Artificial Sequence
  Description of Artificial Sequence: Synthetic oligonucleotide
  Antisense strand to SEQ ID NO: 1286910
auccuggugaccuuuggcc

SEQ ID NO: 1286912 - RNA, 19 nt, Artificial Sequence
  Description of Artificial Sequence: Synthetic oligonucleotide
  Sense strand starting at position 2868 of SEQ ID NO: 1241624
gaucuaggacaguguuauc

SEQ ID NO: 1286913 - RNA, 19 nt, Artificial Sequence
  Description of Artificial Sequence: Synthetic oligonucleotide
  Antisense strand to SEQ ID NO: 1286912
gauaacacuguccuagauc

SEQ ID NO: 1286914 - RNA, 19 nt, Artificial Sequence
  Description of Artificial Sequence: Synthetic oligonucleotide
  Sense strand starting at position 3092 of SEQ ID NO: 1241624
gugugagguaggcauuaug

SEQ ID NO: 1286915 - RNA, 19 nt, Artificial Sequence
  Description of Artificial Sequence: Synthetic oligonucleotide
  Antisense strand to SEQ ID NO: 1286914
cauaaugccuaccucacac

SEQ ID NO: 1286916 - RNA, 19 nt, Artificial Sequence
  Description of Artificial Sequence: Synthetic oligonucleotide
  Sense strand starting at position 3095 of SEQ ID NO: 1241624
ugagguaggcauuauguaa

SEQ ID NO: 1286917 - RNA, 19 nt, Artificial Sequence
  Description of Artificial Sequence: Synthetic oligonucleotide
  Antisense strand to SEQ ID NO: 1286916
uuacauaaugccuaccuca

SEQ ID NO: 1286918 - RNA, 19 nt, Artificial Sequence
  Description of Artificial Sequence: Synthetic oligonucleotide
  Sense strand starting at position 3117 of SEQ ID NO: 1241624
ugcucugcucaugaggaaa

SEQ ID NO: 1286919 - RNA, 19 nt, Artificial Sequence
  Description of Artificial Sequence: Synthetic oligonucleotide
  Antisense strand to SEQ ID NO: 1286918
uuuccucaugagcagagca

SEQ ID NO: 1286920 - RNA, 19 nt, Artificial Sequence
  Description of Artificial Sequence: Synthetic oligonucleotide
  Sense strand starting at position 3653 of SEQ ID NO: 1241624
aucacaucuuugucaguaa

SEQ ID NO: 1286921 - RNA, 19 nt, Artificial Sequence
  Description of Artificial Sequence: Synthetic oligonucleotide
  Antisense strand to SEQ ID NO: 1286920
uuacugacaaagaugugau

SEQ ID NO: 1286922 - RNA, 19 nt, Artificial Sequence
  Description of Artificial Sequence: Synthetic oligonucleotide
  Sense strand starting at position 3891 of SEQ ID NO: 1241624
guaucauucugucuuagga

SEQ ID NO: 1286923 - RNA, 19 nt, Artificial Sequence
  Description of Artificial Sequence: Synthetic oligonucleotide
  Antisense strand to SEQ ID NO: 1286922
uccuaagacagaaugauac

SEQ ID NO: 1286924 - RNA, 19 nt, Artificial Sequence
  Description of Artificial Sequence: Synthetic oligonucleotide
  Sense strand starting at position 3899 of SEQ ID NO: 1241624
cugucuuaggacuaauuau

SEQ ID NO: 1286925 - RNA, 19 nt, Artificial Sequence
  Description of Artificial Sequence: Synthetic oligonucleotide
  Antisense strand to SEQ ID NO: 1286924
auaauuaguccuaagacag

SEQ ID NO: 1286926 - RNA, 19 nt, Artificial Sequence
  Description of Artificial Sequence: Synthetic oligonucleotide
  Sense strand starting at position 3921 of SEQ ID NO: 1241624
auuagaugaugggaagaau

SEQ ID NO: 1286927 - RNA, 19 nt, Artificial Sequence
  Description of Artificial Sequence: Synthetic oligonucleotide
  Antisense strand to SEQ ID NO: 1286926
auucuucccaucaucuaau

SEQ ID NO: 1286928 - RNA, 19 nt, Artificial Sequence
  Description of Artificial Sequence: Synthetic oligonucleotide
  Sense strand starting at position 3980 of SEQ ID NO: 1241624
uuaggucuauaagcaugaa

SEQ ID NO: 1286929 - RNA, 19 nt, Artificial Sequence
  Description of Artificial Sequence: Synthetic oligonucleotide
  Antisense strand to SEQ ID NO: 1286928
uucaugcuuauagaccuaa

SEQ ID NO: 1286930 - RNA, 19 nt, Artificial Sequence
  Description of Artificial Sequence: Synthetic oligonucleotide
  Sense strand starting at position 3983 of SEQ ID NO: 1241624
ggucuauaagcaugaacuu

SEQ ID NO: 1286931 - RNA, 19 nt, Artificial Sequence
  Description of Artificial Sequence: Synthetic oligonucleotide
  Antisense strand to SEQ ID NO: 1286930
aaguucaugcuuauagacc

SEQ ID NO: 1286932 - RNA, 19 nt, Artificial Sequence
  Description of Artificial Sequence: Synthetic oligonucleotide
  Sense strand starting at position 197 of SEQ ID NO: 1241625
agguuacuacaauggauua

SEQ ID NO: 1286933 - RNA, 19 nt, Artificial Sequence
  Description of Artificial Sequence: Synthetic oligonucleotide
  Antisense strand to SEQ ID NO: 1286932
uaauccauuguaguaaccu

SEQ ID NO: 1286934 - RNA, 19 nt, Artificial Sequence
  Description of Artificial Sequence: Synthetic oligonucleotide
  Sense strand starting at position 301 of SEQ ID NO: 1241625
ucaguugccagugacagaa

SEQ ID NO: 1286935 - RNA, 19 nt, Artificial Sequence
  Description of Artificial Sequence: Synthetic oligonucleotide
  Antisense strand to SEQ ID NO: 1286934
uucugucacuggcaacuga

SEQ ID NO: 1286936 - RNA, 19 nt, Artificial Sequence
  Description of Artificial Sequence: Synthetic oligonucleotide
  Sense strand starting at position 313 of SEQ ID NO: 1241625
gacagaaucuaugugugag

SEQ ID NO: 1286937 - RNA, 19 nt, Artificial Sequence
  Description of Artificial Sequence: Synthetic oligonucleotide
  Antisense strand to SEQ ID NO: 1286936
cucacacauagauucuguc

SEQ ID NO: 1286938 - RNA, 19 nt, Artificial Sequence
  Description of Artificial Sequence: Synthetic oligonucleotide
  Sense strand starting at position 314 of SEQ ID NO: 1241625
acagaaucuaugugugagu

SEQ ID NO: 1286939 - RNA, 19 nt, Artificial Sequence
  Description of Artificial Sequence: Synthetic oligonucleotide
  Antisense strand to SEQ ID NO: 1286938
acucacacauagauucugu

SEQ ID NO: 1286940 - RNA, 19 nt, Artificial Sequence
  Description of Artificial Sequence: Synthetic oligonucleotide
  Sense strand starting at position 315 of SEQ ID NO: 1241625
cagaaucuaugugugaguu

SEQ ID NO: 1286941 - RNA, 19 nt, Artificial Sequence
  Description of Artificial Sequence: Synthetic oligonucleotide
  Antisense strand to SEQ ID NO: 1286940
aacucacacauagauucug

SEQ ID NO: 1286942 - RNA, 19 nt, Artificial Sequence
  Description of Artificial Sequence: Synthetic oligonucleotide
  Sense strand starting at position 316 of SEQ ID NO: 1241625
agaaucuaugugugaguua

SEQ ID NO: 1286943 - RNA, 19 nt, Artificial Sequence
  Description of Artificial Sequence: Synthetic oligonucleotide
  Antisense strand to SEQ ID NO: 1286942
uaacucacacauagauucu

SEQ ID NO: 1286944 - RNA, 19 nt, Artificial Sequence
  Description of Artificial Sequence: Synthetic oligonucleotide
  Sense strand starting at position 321 of SEQ ID NO: 1241625
cuaugugugaguuaucauc

SEQ ID NO: 1286945 - RNA, 19 nt, Artificial Sequence
  Description of Artificial Sequence: Synthetic oligonucleotide
  Antisense strand to SEQ ID NO: 1286944
gaugauaacucacacauag

SEQ ID NO: 1286946 - RNA, 19 nt, Artificial Sequence
  Description of Artificial Sequence: Synthetic oligonucleotide
  Sense strand starting at position 323 of SEQ ID NO: 1241625
augugugaguuaucaucaa

SEQ ID NO: 1286947 - RNA, 19 nt, Artificial Sequence
  Description of Artificial Sequence: Synthetic oligonucleotide
  Antisense strand to SEQ ID NO: 1286946
uugaugauaacucacacau

SEQ ID NO: 1286948 - RNA, 19 nt, Artificial Sequence
  Description of Artificial Sequence: Synthetic oligonucleotide
  Sense strand starting at position 327 of SEQ ID NO: 1241625
gugaguuaucaucaacugu

SEQ ID NO: 1286949 - RNA, 19 nt, Artificial Sequence
  Description of Artificial Sequence: Synthetic oligonucleotide
  Antisense strand to SEQ ID NO: 1286948
acaguugaugauaacucac

SEQ ID NO: 1286950 - RNA, 19 nt, Artificial Sequence
  Description of Artificial Sequence: Synthetic oligonucleotide
  Sense strand starting at position 336 of SEQ ID NO: 1241625
caucaacugucuuugaggu

SEQ ID NO: 1286951 - RNA, 19 nt, Artificial Sequence
  Description of Artificial Sequence: Synthetic oligonucleotide
  Antisense strand to SEQ ID NO: 1286950
accucaaagacaguugaug

SEQ ID NO: 1286952 - RNA, 19 nt, Artificial Sequence
  Description of Artificial Sequence: Synthetic oligonucleotide
  Sense strand starting at position 337 of SEQ ID NO: 1241625
aucaacugucuuugaggua

SEQ ID NO: 1286953 - RNA, 19 nt, Artificial Sequence
  Description of Artificial Sequence: Synthetic oligonucleotide
  Antisense strand to SEQ ID NO: 1286952
uaccucaaagacaguugau

SEQ ID NO: 1286954 - RNA, 19 nt, Artificial Sequence
  Description of Artificial Sequence: Synthetic oligonucleotide
  Sense strand starting at position 342 of SEQ ID NO: 1241625
cugucuuugagguaucagu

SEQ ID NO: 1286955 - RNA, 19 nt, Artificial Sequence
  Description of Artificial Sequence: Synthetic oligonucleotide
  Antisense strand to SEQ ID NO: 1286954
acugauaccucaaagacag

SEQ ID NO: 1286956 - RNA, 19 nt, Artificial Sequence
  Description of Artificial Sequence: Synthetic oligonucleotide
  Sense strand starting at position 405 of SEQ ID NO: 1241625
uaaagucaugagcagaguu

SEQ ID NO: 1286957 - RNA, 19 nt, Artificial Sequence
  Description of Artificial Sequence: Synthetic oligonucleotide
  Antisense strand to SEQ ID NO: 1286956
aacucugcucaugacuuua

SEQ ID NO: 1286958 - RNA, 19 nt, Artificial Sequence
  Description of Artificial Sequence: Synthetic oligonucleotide
  Sense strand starting at position 412 of SEQ ID NO: 1241625
augagcagaguuugaagaa

SEQ ID NO: 1286959 - RNA, 19 nt, Artificial Sequence
  Description of Artificial Sequence: Synthetic oligonucleotide
  Antisense strand to SEQ ID NO: 1286958
uucuucaaacucugcucau

SEQ ID NO: 1286960 - RNA, 19 nt, Artificial Sequence
  Description of Artificial Sequence: Synthetic oligonucleotide
  Sense strand starting at position 535 of SEQ ID NO: 1241625
cugaguaccggucaacaau

SEQ ID NO: 1286961 - RNA, 19 nt, Artificial Sequence
  Description of Artificial Sequence: Synthetic oligonucleotide
  Antisense strand to SEQ ID NO: 1286960
auuguugaccgguacucag

SEQ ID NO: 1286962 - RNA, 19 nt, Artificial Sequence
  Description of Artificial Sequence: Synthetic oligonucleotide
  Sense strand starting at position 544 of SEQ ID NO: 1241625
ggucaacaaugcuuugaaa

SEQ ID NO: 1286963 - RNA, 19 nt, Artificial Sequence
  Description of Artificial Sequence: Synthetic oligonucleotide
  Antisense strand to SEQ ID NO: 1286962
uuucaaagcauuguugacc

SEQ ID NO: 1286964 - RNA, 19 nt, Artificial Sequence
  Description of Artificial Sequence: Synthetic oligonucleotide
  Sense strand starting at position 1543 of SEQ ID NO: 1241625
cuuugauuggcauauccca

SEQ ID NO: 1286965 - RNA, 19 nt, Artificial Sequence
  Description of Artificial Sequence: Synthetic oligonucleotide
  Antisense strand to SEQ ID NO: 1286964
ugggauaugccaaucaaag

SEQ ID NO: 1286966 - RNA, 19 nt, Artificial Sequence
  Description of Artificial Sequence: Synthetic oligonucleotide
  Sense strand starting at position 1582 of SEQ ID NO: 1241625
ugcauuugauggcugucau

SEQ ID NO: 1286967 - RNA, 19 nt, Artificial Sequence
  Description of Artificial Sequence: Synthetic oligonucleotide
  Antisense strand to SEQ ID NO: 1286966
augacagccaucaaaugca

SEQ ID NO: 1286968 - RNA, 19 nt, Artificial Sequence
  Description of Artificial Sequence: Synthetic oligonucleotide
  Sense strand starting at position 1583 of SEQ ID NO: 1241625
gcauuugauggcugucaua

SEQ ID NO: 1286969 - RNA, 19 nt, Artificial Sequence
  Description of Artificial Sequence: Synthetic oligonucleotide
  Antisense strand to SEQ ID NO: 1286968
uaugacagccaucaaaugc

SEQ ID NO: 1286970 - RNA, 19 nt, Artificial Sequence
  Description of Artificial Sequence: Synthetic oligonucleotide
  Sense strand starting at position 2091 of SEQ ID NO: 1241625
ugauuccuguuucuuaaga

SEQ ID NO: 1286971 - RNA, 19 nt, Artificial Sequence
  Description of Artificial Sequence: Synthetic oligonucleotide
  Antisense strand to SEQ ID NO: 1286970
ucuuaagaaacaggaauca

SEQ ID NO: 1286972 - RNA, 19 nt, Artificial Sequence
  Description of Artificial Sequence: Synthetic oligonucleotide
  Sense strand starting at position 2092 of SEQ ID NO: 1241625
gauuccuguuucuuaagag

SEQ ID NO: 1286973 - RNA, 19 nt, Artificial Sequence
  Description of Artificial Sequence: Synthetic oligonucleotide
  Antisense strand to SEQ ID NO: 1286972
cucuuaagaaacaggaauc

SEQ ID NO: 1286974 - RNA, 19 nt, Artificial Sequence
  Description of Artificial Sequence: Synthetic oligonucleotide
  Sense strand starting at position 2130 of SEQ ID NO: 1241625
ugauauaaugccugccaca

SEQ ID NO: 1286975 - RNA, 19 nt, Artificial Sequence
  Description of Artificial Sequence: Synthetic oligonucleotide
  Antisense strand to SEQ ID NO: 1286974
uguggcaggcauuauauca

SEQ ID NO: 1286976 - RNA, 19 nt, Artificial Sequence
  Description of Artificial Sequence: Synthetic oligonucleotide
  Sense strand starting at position 2222 of SEQ ID NO: 1241625
gguacuaggcuacacaaau

SEQ ID NO: 1286977 - RNA, 19 nt, Artificial Sequence
  Description of Artificial Sequence: Synthetic oligonucleotide
  Antisense strand to SEQ ID NO: 1286976
auuuguguagccuaguacc

SEQ ID NO: 1286978 - RNA, 19 nt, Artificial Sequence
  Description of Artificial Sequence: Synthetic oligonucleotide
  Sense strand starting at position 2499 of SEQ ID NO: 1241625
cugccaggagcucaugauu

SEQ ID NO: 1286979 - RNA, 19 nt, Artificial Sequence
  Description of Artificial Sequence: Synthetic oligonucleotide
  Antisense strand to SEQ ID NO: 1286978
aaucaugagcuccuggcag

SEQ ID NO: 1286980 - RNA, 19 nt, Artificial Sequence
  Description of Artificial Sequence: Synthetic oligonucleotide
  Sense strand starting at position 2533 of SEQ ID NO: 1241625
gagacaggcagguaaguau

SEQ ID NO: 1286981 - RNA, 19 nt, Artificial Sequence
  Description of Artificial Sequence: Synthetic oligonucleotide
  Antisense strand to SEQ ID NO: 1286980
auacuuaccugccugucuc

SEQ ID NO: 1286982 - RNA, 19 nt, Artificial Sequence
  Description of Artificial Sequence: Synthetic oligonucleotide
  Sense strand starting at position 2685 of SEQ ID NO: 1241625
uuagaaguuaggugaagag

SEQ ID NO: 1286983 - RNA, 19 nt, Artificial Sequence
  Description of Artificial Sequence: Synthetic oligonucleotide
  Antisense strand to SEQ ID NO: 1286982
cucuucaccuaacuucuaa

SEQ ID NO: 1286984 - RNA, 19 nt, Artificial Sequence
  Description of Artificial Sequence: Synthetic oligonucleotide
  Sense strand starting at position 2694 of SEQ ID NO: 1241625
aggugaagagaguguuaag

SEQ ID NO: 1286985 - RNA, 19 nt, Artificial Sequence
  Description of Artificial Sequence: Synthetic oligonucleotide
  Antisense strand to SEQ ID NO: 1286984
cuuaacacucucuucaccu

SEQ ID NO: 1286986 - RNA, 19 nt, Artificial Sequence
  Description of Artificial Sequence: Synthetic oligonucleotide
  Sense strand starting at position 2704 of SEQ ID NO: 1241625
aguguuaagcgccucccaa

SEQ ID NO: 1286987 - RNA, 19 nt, Artificial Sequence
  Description of Artificial Sequence: Synthetic oligonucleotide
  Antisense strand to SEQ ID NO: 1286986
uugggaggcgcuuaacacu

SEQ ID NO: 1286988 - RNA, 19 nt, Artificial Sequence
  Description of Artificial Sequence: Synthetic oligonucleotide
  Sense strand starting at position 2705 of SEQ ID NO: 1241625
guguuaagcgccucccaaa

SEQ ID NO: 1286989 - RNA, 19 nt, Artificial Sequence
  Description of Artificial Sequence: Synthetic oligonucleotide
  Antisense strand to SEQ ID NO: 1286988
uuugggaggcgcuuaacac

SEQ ID NO: 1286990 - RNA, 19 nt, Artificial Sequence
  Description of Artificial Sequence: Synthetic oligonucleotide
  Sense strand starting at position 2766 of SEQ ID NO: 1241625
ggccgaauuuaggauauuu

SEQ ID NO: 1286991 - RNA, 19 nt, Artificial Sequence
  Description of Artificial Sequence: Synthetic oligonucleotide
  Antisense strand to SEQ ID NO: 1286990
aaauauccuaaauucggcc

SEQ ID NO: 1286992 - RNA, 19 nt, Artificial Sequence
  Description of Artificial Sequence: Synthetic oligonucleotide
  Sense strand starting at position 2996 of SEQ ID NO: 1241625
cuccaaaugucugcagaau

SEQ ID NO: 1286993 - RNA, 19 nt, Artificial Sequence
  Description of Artificial Sequence: Synthetic oligonucleotide
  Antisense strand to SEQ ID NO: 1286992
auucugcagacauuuggag

SEQ ID NO: 1286994 - RNA, 19 nt, Artificial Sequence
  Description of Artificial Sequence: Synthetic oligonucleotide
  Sense strand starting at position 2997 of SEQ ID NO: 1241625
uccaaaugucugcagaaua

SEQ ID NO: 1286995 - RNA, 19 nt, Artificial Sequence
  Description of Artificial Sequence: Synthetic oligonucleotide
  Antisense strand to SEQ ID NO: 1286994
uauucugcagacauuugga

SEQ ID NO: 1286996 - RNA, 19 nt, Artificial Sequence
  Description of Artificial Sequence: Synthetic oligonucleotide
  Sense strand starting at position 3002 of SEQ ID NO: 1241625
augucugcagaauaaacau

SEQ ID NO: 1286997 - RNA, 19 nt, Artificial Sequence
  Description of Artificial Sequence: Synthetic oligonucleotide
  Antisense strand to SEQ ID NO: 1286996
auguuuauucugcagacau

SEQ ID NO: 1286998 - RNA, 19 nt, Artificial Sequence
  Description of Artificial Sequence: Synthetic oligonucleotide
  Sense strand starting at position 3241 of SEQ ID NO: 1241625
acagauauuccauguacau

SEQ ID NO: 1286999 - RNA, 19 nt, Artificial Sequence
  Description of Artificial Sequence: Synthetic oligonucleotide
  Antisense strand to SEQ ID NO: 1286998
auguacauggaauaucugu

SEQ ID NO: 1287000 - RNA, 19 nt, Artificial Sequence
  Description of Artificial Sequence: Synthetic oligonucleotide
  Sense strand starting at position 3250 of SEQ ID NO: 1241625
ccauguacaugaguaggaa

SEQ ID NO: 1287001 - RNA, 19 nt, Artificial Sequence
  Description of Artificial Sequence: Synthetic oligonucleotide
  Antisense strand to SEQ ID NO: 1287000
uuccuacucauguacaugg

SEQ ID NO: 1287002 - RNA, 19 nt, Artificial Sequence
  Description of Artificial Sequence: Synthetic oligonucleotide
  Sense strand starting at position 3361 of SEQ ID NO: 1241625
gugacaaacugacucugaa

SEQ ID NO: 1287003 - RNA, 19 nt, Artificial Sequence
  Description of Artificial Sequence: Synthetic oligonucleotide
  Antisense strand to SEQ ID NO: 1287002
uucagagucaguuugucac

SEQ ID NO: 1287004 - RNA, 19 nt, Artificial Sequence
  Description of Artificial Sequence: Synthetic oligonucleotide
  Sense strand starting at position 3364 of SEQ ID NO: 1241625
acaaacugacucugaaguu

SEQ ID NO: 1287005 - RNA, 19 nt, Artificial Sequence
  Description of Artificial Sequence: Synthetic oligonucleotide
  Antisense strand to SEQ ID NO: 1287004
aacuucagagucaguuugu

SEQ ID NO: 1287006 - RNA, 19 nt, Artificial Sequence
  Description of Artificial Sequence: Synthetic oligonucleotide
  Sense strand starting at position 3787 of SEQ ID NO: 1241625
caauuaagacaguguguua

SEQ ID NO: 1287007 - RNA, 19 nt, Artificial Sequence
  Description of Artificial Sequence: Synthetic oligonucleotide
  Antisense strand to SEQ ID NO: 1287006
uaacacacugucuuaauug

SEQ ID NO: 1287008 - RNA, 19 nt, Artificial Sequence
  Description of Artificial Sequence: Synthetic oligonucleotide
  Sense strand starting at position 3876 of SEQ ID NO: 1241625
gugaacuaaucugugacaa

SEQ ID NO: 1287009 - RNA, 19 nt, Artificial Sequence
  Description of Artificial Sequence: Synthetic oligonucleotide
  Antisense strand to SEQ ID NO: 1287008
uugucacagauuaguucac

SEQ ID NO: 1287010 - RNA, 19 nt, Artificial Sequence
  Description of Artificial Sequence: Synthetic oligonucleotide
  Sense strand starting at position 3938 of SEQ ID NO: 1241625
gguaguagaacugaaugua

SEQ ID NO: 1287011 - RNA, 19 nt, Artificial Sequence
  Description of Artificial Sequence: Synthetic oligonucleotide
  Antisense strand to SEQ ID NO: 1287010
uacauucaguucuacuacc

SEQ ID NO: 1287012 - RNA, 19 nt, Artificial Sequence
  Description of Artificial Sequence: Synthetic oligonucleotide
  Sense strand starting at position 1279 of SEQ ID NO: 1241626
gacagagguguucaguuga

SEQ ID NO: 1287013 - RNA, 19 nt, Artificial Sequence
  Description of Artificial Sequence: Synthetic oligonucleotide
  Antisense strand to SEQ ID NO: 1287012
ucaacugaacaccucuguc

SEQ ID NO: 1287014 - RNA, 19 nt, Artificial Sequence
  Description of Artificial Sequence: Synthetic oligonucleotide
  Sense strand starting at position 1284 of SEQ ID NO: 1241626
agguguucaguugagaaau

SEQ ID NO: 1287015 - RNA, 19 nt, Artificial Sequence
  Description of Artificial Sequence: Synthetic oligonucleotide
  Antisense strand to SEQ ID NO: 1287014
auuucucaacugaacaccu

SEQ ID NO: 1287016 - RNA, 19 nt, Artificial Sequence
  Description of Artificial Sequence: Synthetic oligonucleotide
  Sense strand starting at position 1294 of SEQ ID NO: 1241626
uugagaaauuaguccucuu

SEQ ID NO: 1287017 - RNA, 19 nt, Artificial Sequence
  Description of Artificial Sequence: Synthetic oligonucleotide
  Antisense strand to SEQ ID NO: 1287016
aagaggacuaauuucucaa

SEQ ID NO: 1287018 - RNA, 19 nt, Artificial Sequence
  Description of Artificial Sequence: Synthetic oligonucleotide
  Sense strand starting at position 1712 of SEQ ID NO: 1241626
guguacucucaggaucaga

SEQ ID NO: 1287019 - RNA, 19 nt, Artificial Sequence
  Description of Artificial Sequence: Synthetic oligonucleotide
  Antisense strand to SEQ ID NO: 1287018
ucugauccugagaguacac

SEQ ID NO: 1287020 - RNA, 19 nt, Artificial Sequence
  Description of Artificial Sequence: Synthetic oligonucleotide
  Sense strand starting at position 2050 of SEQ ID NO: 1241626
ggaagcuugaaucgucaca

SEQ ID NO: 1287021 - RNA, 19 nt, Artificial Sequence
  Description of Artificial Sequence: Synthetic oligonucleotide
  Antisense strand to SEQ ID NO: 1287020
ugugacgauucaagcuucc

SEQ ID NO: 1287022 - RNA, 19 nt, Artificial Sequence
  Description of Artificial Sequence: Synthetic oligonucleotide
  Sense strand starting at position 2052 of SEQ ID NO: 1241626
aagcuugaaucgucacauu

SEQ ID NO: 1287023 - RNA, 19 nt, Artificial Sequence
  Description of Artificial Sequence: Synthetic oligonucleotide
  Antisense strand to SEQ ID NO: 1287022
aaugugacgauucaagcuu

SEQ ID NO: 1287024 - RNA, 19 nt, Artificial Sequence
  Description of Artificial Sequence: Synthetic oligonucleotide
  Sense strand starting at position 2063 of SEQ ID NO: 1241626
gucacauucgaagacugua

SEQ ID NO: 1287025 - RNA, 19 nt, Artificial Sequence
  Description of Artificial Sequence: Synthetic oligonucleotide
  Antisense strand to SEQ ID NO: 1287024
uacagucuucgaaugugac

SEQ ID NO: 1287026 - RNA, 19 nt, Artificial Sequence
  Description of Artificial Sequence: Synthetic oligonucleotide
  Sense strand starting at position 2078 of SEQ ID NO: 1241626
uguauuuguucccuggcca

SEQ ID NO: 1287027 - RNA, 19 nt, Artificial Sequence
  Description of Artificial Sequence: Synthetic oligonucleotide
  Antisense strand to SEQ ID NO: 1287026
uggccagggaacaaauaca

SEQ ID NO: 1287028 - RNA, 19 nt, Artificial Sequence
  Description of Artificial Sequence: Synthetic oligonucleotide
  Sense strand starting at position 2085 of SEQ ID NO: 1241626
guucccuggccacaugauu

SEQ ID NO: 1287029 - RNA, 19 nt, Artificial Sequence
  Description of Artificial Sequence: Synthetic oligonucleotide
  Antisense strand to SEQ ID NO: 1287028
aaucauguggccagggaac

SEQ ID NO: 1287030 - RNA, 19 nt, Artificial Sequence
  Description of Artificial Sequence: Synthetic oligonucleotide
  Sense strand starting at position 2197 of SEQ ID NO: 1241626
gcccuugauccugggaaga

SEQ ID NO: 1287031 - RNA, 19 nt, Artificial Sequence
  Description of Artificial Sequence: Synthetic oligonucleotide
  Antisense strand to SEQ ID NO: 1287030
ucuucccaggaucaagggc

SEQ ID NO: 1287032 - RNA, 19 nt, Artificial Sequence
  Description of Artificial Sequence: Synthetic oligonucleotide
  Sense strand starting at position 2235 of SEQ ID NO: 1241626
aggguugcuucuucucuga

SEQ ID NO: 1287033 - RNA, 19 nt, Artificial Sequence
  Description of Artificial Sequence: Synthetic oligonucleotide
  Antisense strand to SEQ ID NO: 1287032
ucagagaagaagcaacccu

SEQ ID NO: 1287034 - RNA, 19 nt, Artificial Sequence
  Description of Artificial Sequence: Synthetic oligonucleotide
  Sense strand starting at position 2276 of SEQ ID NO: 1241626
cuagaaagaugcuuugucu

SEQ ID NO: 1287035 - RNA, 19 nt, Artificial Sequence
  Description of Artificial Sequence: Synthetic oligonucleotide
  Antisense strand to SEQ ID NO: 1287034
agacaaagcaucuuucuag

SEQ ID NO: 1287036 - RNA, 19 nt, Artificial Sequence
  Description of Artificial Sequence: Synthetic oligonucleotide
  Sense strand starting at position 2279 of SEQ ID NO: 1241626
gaaagaugcuuugucuggu

SEQ ID NO: 1287037 - RNA, 19 nt, Artificial Sequence
  Description of Artificial Sequence: Synthetic oligonucleotide
  Antisense strand to SEQ ID NO: 1287036
accagacaaagcaucuuuc

SEQ ID NO: 1287038 - RNA, 19 nt, Artificial Sequence
  Description of Artificial Sequence: Synthetic oligonucleotide
  Sense strand starting at position 2280 of SEQ ID NO: 1241626
aaagaugcuuugucugguu

SEQ ID NO: 1287039 - RNA, 19 nt, Artificial Sequence
  Description of Artificial Sequence: Synthetic oligonucleotide
  Antisense strand to SEQ ID NO: 1287038
aaccagacaaagcaucuuu

SEQ ID NO: 1287040 - RNA, 19 nt, Artificial Sequence
  Description of Artificial Sequence: Synthetic oligonucleotide
  Sense strand starting at position 2299 of SEQ ID NO: 1241626
ccuugucaucuggagauac

SEQ ID NO: 1287041 - RNA, 19 nt, Artificial Sequence
  Description of Artificial Sequence: Synthetic oligonucleotide
  Antisense strand to SEQ ID NO: 1287040
guaucuccagaugacaagg

SEQ ID NO: 1287042 - RNA, 19 nt, Artificial Sequence
  Description of Artificial Sequence: Synthetic oligonucleotide
  Sense strand starting at position 2307 of SEQ ID NO: 1241626
ucuggagauacugguuauc

SEQ ID NO: 1287043 - RNA, 19 nt, Artificial Sequence
  Description of Artificial Sequence: Synthetic oligonucleotide
  Antisense strand to SEQ ID NO: 1287042
gauaaccaguaucuccaga

SEQ ID NO: 1287044 - RNA, 19 nt, Artificial Sequence
  Description of Artificial Sequence: Synthetic oligonucleotide
  Sense strand starting at position 2309 of SEQ ID NO: 1241626
uggagauacugguuaucuu

SEQ ID NO: 1287045 - RNA, 19 nt, Artificial Sequence
  Description of Artificial Sequence: Synthetic oligonucleotide
  Antisense strand to SEQ ID NO: 1287044
aagauaaccaguaucucca

SEQ ID NO: 1287046 - RNA, 19 nt, Artificial Sequence
  Description of Artificial Sequence: Synthetic oligonucleotide
  Sense strand starting at position 2321 of SEQ ID NO: 1241626
uuaucuuucggaggagaug

SEQ ID NO: 1287047 - RNA, 19 nt, Artificial Sequence
  Description of Artificial Sequence: Synthetic oligonucleotide
  Antisense strand to SEQ ID NO: 1287046
caucuccuccgaaagauaa

SEQ ID NO: 1287048 - RNA, 19 nt, Artificial Sequence
  Description of Artificial Sequence: Synthetic oligonucleotide
  Sense strand starting at position 2555 of SEQ ID NO: 1241626
ccaaauguuuguguuuaaa

SEQ ID NO: 1287049 - RNA, 19 nt, Artificial Sequence
  Description of Artificial Sequence: Synthetic oligonucleotide
  Antisense strand to SEQ ID NO: 1287048
uuuaaacacaaacauuugg

SEQ ID NO: 1287050 - RNA, 19 nt, Artificial Sequence
  Description of Artificial Sequence: Synthetic oligonucleotide
  Sense strand starting at position 2685 of SEQ ID NO: 1241626
ucuugugagcuuggaauau

SEQ ID NO: 1287051 - RNA, 19 nt, Artificial Sequence
  Description of Artificial Sequence: Synthetic oligonucleotide
  Antisense strand to SEQ ID NO: 1287050
auauuccaagcucacaaga

SEQ ID NO: 1287052 - RNA, 19 nt, Artificial Sequence
  Description of Artificial Sequence: Synthetic oligonucleotide
  Sense strand starting at position 2887 of SEQ ID NO: 1241626
gugucaagauacuugggau

SEQ ID NO: 1287053 - RNA, 19 nt, Artificial Sequence
  Description of Artificial Sequence: Synthetic oligonucleotide
  Antisense strand to SEQ ID NO: 1287052
aucccaaguaucuugacac

SEQ ID NO: 1287054 - RNA, 19 nt, Artificial Sequence
  Description of Artificial Sequence: Synthetic oligonucleotide
  Sense strand starting at position 2888 of SEQ ID NO: 1241626
ugucaagauacuugggaua

SEQ ID NO: 1287055 - RNA, 19 nt, Artificial Sequence
  Description of Artificial Sequence: Synthetic oligonucleotide
  Antisense strand to SEQ ID NO: 1287054
uaucccaaguaucuugaca

SEQ ID NO: 1287056 - RNA, 19 nt, Artificial Sequence
  Description of Artificial Sequence: Synthetic oligonucleotide
  Sense strand starting at position 3128 of SEQ ID NO: 1241626
auugcuugagcuugagaga

SEQ ID NO: 1287057 - RNA, 19 nt, Artificial Sequence
  Description of Artificial Sequence: Synthetic oligonucleotide
  Antisense strand to SEQ ID NO: 1287056
ucucucaagcucaagcaau

SEQ ID NO: 1287058 - RNA, 19 nt, Artificial Sequence
  Description of Artificial Sequence: Synthetic oligonucleotide
  Sense strand starting at position 3129 of SEQ ID NO: 1241626
uugcuugagcuugagagau

SEQ ID NO: 1287059 - RNA, 19 nt, Artificial Sequence
  Description of Artificial Sequence: Synthetic oligonucleotide
  Antisense strand to SEQ ID NO: 1287058
aucucucaagcucaagcaa

SEQ ID NO: 1287060 - RNA, 19 nt, Artificial Sequence
  Description of Artificial Sequence: Synthetic oligonucleotide
  Sense strand starting at position 3320 of SEQ ID NO: 1241626
auacguauacuuugcucaa

SEQ ID NO: 1287061 - RNA, 19 nt, Artificial Sequence
  Description of Artificial Sequence: Synthetic oligonucleotide
  Antisense strand to SEQ ID NO: 1287060
uugagcaaaguauacguau

SEQ ID NO: 1287062 - RNA, 19 nt, Artificial Sequence
  Description of Artificial Sequence: Synthetic oligonucleotide
  Sense strand starting at position 3324 of SEQ ID NO: 1241626
guauacuuugcucaaagug

SEQ ID NO: 1287063 - RNA, 19 nt, Artificial Sequence
  Description of Artificial Sequence: Synthetic oligonucleotide
  Antisense strand to SEQ ID NO: 1287062
cacuuugagcaaaguauac

SEQ ID NO: 1287064 - RNA, 19 nt, Artificial Sequence
  Description of Artificial Sequence: Synthetic oligonucleotide
  Sense strand starting at position 3338 of SEQ ID NO: 1241626
aagugauaauggcuaggga

SEQ ID NO: 1287065 - RNA, 19 nt, Artificial Sequence
  Description of Artificial Sequence: Synthetic oligonucleotide
  Antisense strand to SEQ ID NO: 1287064
ucccuagccauuaucacuu

SEQ ID NO: 1287066 - RNA, 19 nt, Artificial Sequence
  Description of Artificial Sequence: Synthetic oligonucleotide
  Sense strand starting at position 3396 of SEQ ID NO: 1241626
uacguaacaucguugaaau

SEQ ID NO: 1287067 - RNA, 19 nt, Artificial Sequence
  Description of Artificial Sequence: Synthetic oligonucleotide
  Antisense strand to SEQ ID NO: 1287066
auuucaacgauguuacgua

SEQ ID NO: 1287068 - RNA, 19 nt, Artificial Sequence
  Description of Artificial Sequence: Synthetic oligonucleotide
  Sense strand starting at position 3397 of SEQ ID NO: 1241626
acguaacaucguugaaauc

SEQ ID NO: 1287069 - RNA, 19 nt, Artificial Sequence
  Description of Artificial Sequence: Synthetic oligonucleotide
  Antisense strand to SEQ ID NO: 1287068
gauuucaacgauguuacgu

SEQ ID NO: 1287070 - RNA, 19 nt, Artificial Sequence
  Description of Artificial Sequence: Synthetic oligonucleotide
  Sense strand starting at position 3407 of SEQ ID NO: 1241626
guugaaaucgcugacucug

SEQ ID NO: 1287071 - RNA, 19 nt, Artificial Sequence
  Description of Artificial Sequence: Synthetic oligonucleotide
  Antisense strand to SEQ ID NO: 1287070
cagagucagcgauuucaac

SEQ ID NO: 1287072 - RNA, 19 nt, Artificial Sequence
  Description of Artificial Sequence: Synthetic oligonucleotide
  Sense strand starting at position 3467 of SEQ ID NO: 1241626
gaggaagaauguuccaagu

SEQ ID NO: 1287073 - RNA, 19 nt, Artificial Sequence
  Description of Artificial Sequence: Synthetic oligonucleotide
  Antisense strand to SEQ ID NO: 1287072
acuuggaacauucuuccuc

SEQ ID NO: 1287074 - RNA, 19 nt, Artificial Sequence
  Description of Artificial Sequence: Synthetic oligonucleotide
  Sense strand starting at position 3525 of SEQ ID NO: 1241626
gccugagguguuggaggaa

SEQ ID NO: 1287075 - RNA, 19 nt, Artificial Sequence
  Description of Artificial Sequence: Synthetic oligonucleotide
  Antisense strand to SEQ ID NO: 1287074
uuccuccaacaccucaggc

SEQ ID NO: 1287076 - RNA, 19 nt, Artificial Sequence
  Description of Artificial Sequence: Synthetic oligonucleotide
  Sense strand starting at position 3699 of SEQ ID NO: 1241626
aagaacgugucagcuuaaa

SEQ ID NO: 1287077 - RNA, 19 nt, Artificial Sequence
  Description of Artificial Sequence: Synthetic oligonucleotide
  Antisense strand to SEQ ID NO: 1287076
uuuaagcugacacguucuu

SEQ ID NO: 1287078 - RNA, 19 nt, Artificial Sequence
  Description of Artificial Sequence: Synthetic oligonucleotide
  Sense strand starting at position 3715 of SEQ ID NO: 1241626
aaaggauuaccuggcuguu

SEQ ID NO: 1287079 - RNA, 19 nt, Artificial Sequence
  Description of Artificial Sequence: Synthetic oligonucleotide
  Antisense strand to SEQ ID NO: 1287078
aacagccagguaauccuuu

SEQ ID NO: 1287080 - RNA, 19 nt, Artificial Sequence
  Description of Artificial Sequence: Synthetic oligonucleotide
  Sense strand starting at position 3727 of SEQ ID NO: 1241626
ggcuguuguguggauuaua

SEQ ID NO: 1287081 - RNA, 19 nt, Artificial Sequence
  Description of Artificial Sequence: Synthetic oligonucleotide
  Antisense strand to SEQ ID NO: 1287080
uauaauccacacaacagcc

SEQ ID NO: 1287082 - RNA, 19 nt, Artificial Sequence
  Description of Artificial Sequence: Synthetic oligonucleotide
  Sense strand starting at position 3730 of SEQ ID NO: 1241626
uguuguguggauuauaacu

SEQ ID NO: 1287083 - RNA, 19 nt, Artificial Sequence
  Description of Artificial Sequence: Synthetic oligonucleotide
  Antisense strand to SEQ ID NO: 1287082
aguuauaauccacacaaca

SEQ ID NO: 1287084 - RNA, 19 nt, Artificial Sequence
  Description of Artificial Sequence: Synthetic oligonucleotide
  Sense strand starting at position 3735 of SEQ ID NO: 1241626
uguggauuauaacugugga

SEQ ID NO: 1287085 - RNA, 19 nt, Artificial Sequence
  Description of Artificial Sequence: Synthetic oligonucleotide
  Antisense strand to SEQ ID NO: 1287084
uccacaguuauaauccaca

SEQ ID NO: 1287086 - RNA, 19 nt, Artificial Sequence
  Description of Artificial Sequence: Synthetic oligonucleotide
  Sense strand starting at position 3786 of SEQ ID NO: 1241626
uguguucugguccagaauu

SEQ ID NO: 1287087 - RNA, 19 nt, Artificial Sequence
  Description of Artificial Sequence: Synthetic oligonucleotide
  Antisense strand to SEQ ID NO: 1287086
aauucuggaccagaacaca

SEQ ID NO: 1287088 - RNA, 19 nt, Artificial Sequence
  Description of Artificial Sequence: Synthetic oligonucleotide
  Sense strand starting at position 3804 of SEQ ID NO: 1241626
uuaugauucuaagucagga

SEQ ID NO: 1287089 - RNA, 19 nt, Artificial Sequence
  Description of Artificial Sequence: Synthetic oligonucleotide
  Antisense strand to SEQ ID NO: 1287088
uccugacuuagaaucauaa

SEQ ID NO: 1287090 - RNA, 19 nt, Artificial Sequence
  Description of Artificial Sequence: Synthetic oligonucleotide
  Sense strand starting at position 3924 of SEQ ID NO: 1241626
uggugcuggagaugagaaa

SEQ ID NO: 1287091 - RNA, 19 nt, Artificial Sequence
  Description of Artificial Sequence: Synthetic oligonucleotide
  Antisense strand to SEQ ID NO: 1287090
uuucucaucuccagcacca

SEQ ID NO: 1287092 - RNA, 19 nt, Artificial Sequence
  Description of Artificial Sequence: Synthetic oligonucleotide
  Sense strand starting at position 361 of SEQ ID NO: 1241627
auggcaauuugacagagua

SEQ ID NO: 1287093 - RNA, 19 nt, Artificial Sequence
  Description of Artificial Sequence: Synthetic oligonucleotide
  Antisense strand to SEQ ID NO: 1287092
uacucugucaaauugccau

SEQ ID NO: 1287094 - RNA, 19 nt, Artificial Sequence
  Description of Artificial Sequence: Synthetic oligonucleotide
  Sense strand starting at position 541 of SEQ ID NO: 1241627
agcaaugauuaagaccaga

SEQ ID NO: 1287095 - RNA, 19 nt, Artificial Sequence
  Description of Artificial Sequence: Synthetic oligonucleotide
  Antisense strand to SEQ ID NO: 1287094
ucuggucuuaaucauugcu

SEQ ID NO: 1287096 - RNA, 19 nt, Artificial Sequence
  Description of Artificial Sequence: Synthetic oligonucleotide
  Sense strand starting at position 636 of SEQ ID NO: 1241627
cugggucacgucgaugaaa

SEQ ID NO: 1287097 - RNA, 19 nt, Artificial Sequence
  Description of Artificial Sequence: Synthetic oligonucleotide
  Antisense strand to SEQ ID NO: 1287096
uuucaucgacgugacccag

SEQ ID NO: 1287098 - RNA, 19 nt, Artificial Sequence
  Description of Artificial Sequence: Synthetic oligonucleotide
  Sense strand starting at position 638 of SEQ ID NO: 1241627
gggucacgucgaugaaaca

SEQ ID NO: 1287099 - RNA, 19 nt, Artificial Sequence
  Description of Artificial Sequence: Synthetic oligonucleotide
  Antisense strand to SEQ ID NO: 1287098
uguuucaucgacgugaccc

SEQ ID NO: 1287100 - RNA, 19 nt, Artificial Sequence
  Description of Artificial Sequence: Synthetic oligonucleotide
  Sense strand starting at position 639 of SEQ ID NO: 1241627
ggucacgucgaugaaacau

SEQ ID NO: 1287101 - RNA, 19 nt, Artificial Sequence
  Description of Artificial Sequence: Synthetic oligonucleotide
  Antisense strand to SEQ ID NO: 1287100
auguuucaucgacgugacc

SEQ ID NO: 1287102 - RNA, 19 nt, Artificial Sequence
  Description of Artificial Sequence: Synthetic oligonucleotide
  Sense strand starting at position 975 of SEQ ID NO: 1241627
acagcagagucuuuauuac

SEQ ID NO: 1287103 - RNA, 19 nt, Artificial Sequence
  Description of Artificial Sequence: Synthetic oligonucleotide
  Antisense strand to SEQ ID NO: 1287102
guaauaaagacucugcugu

SEQ ID NO: 1287104 - RNA, 19 nt, Artificial Sequence
  Description of Artificial Sequence: Synthetic oligonucleotide
  Sense strand starting at position 1123 of SEQ ID NO: 1241627
ugacuuauuuacguuugua

SEQ ID NO: 1287105 - RNA, 19 nt, Artificial Sequence
  Description of Artificial Sequence: Synthetic oligonucleotide
  Antisense strand to SEQ ID NO: 1287104
uacaaacguaaauaaguca

SEQ ID NO: 1287106 - RNA, 19 nt, Artificial Sequence
  Description of Artificial Sequence: Synthetic oligonucleotide
  Sense strand starting at position 1160 of SEQ ID NO: 1241627
uuaagagggucuuugguga

SEQ ID NO: 1287107 - RNA, 19 nt, Artificial Sequence
  Description of Artificial Sequence: Synthetic oligonucleotide
  Antisense strand to SEQ ID NO: 1287106
ucaccaaagacccucuuaa

SEQ ID NO: 1287108 - RNA, 19 nt, Artificial Sequence
  Description of Artificial Sequence: Synthetic oligonucleotide
  Sense strand starting at position 1296 of SEQ ID NO: 1241627
ucguuuggagcgucuguaa

SEQ ID NO: 1287109 - RNA, 19 nt, Artificial Sequence
  Description of Artificial Sequence: Synthetic oligonucleotide
  Antisense strand to SEQ ID NO: 1287108
uuacagacgcuccaaacga

SEQ ID NO: 1287110 - RNA, 19 nt, Artificial Sequence
  Description of Artificial Sequence: Synthetic oligonucleotide
  Sense strand starting at position 1347 of SEQ ID NO: 1241627
gagugugugggagggaaau

SEQ ID NO: 1287111 - RNA, 19 nt, Artificial Sequence
  Description of Artificial Sequence: Synthetic oligonucleotide
  Antisense strand to SEQ ID NO: 1287110
auuucccucccacacacuc

SEQ ID NO: 1287112 - RNA, 19 nt, Artificial Sequence
  Description of Artificial Sequence: Synthetic oligonucleotide
  Sense strand starting at position 1997 of SEQ ID NO: 1241627
ucuuguuaguccuucuaag

SEQ ID NO: 1287113 - RNA, 19 nt, Artificial Sequence
  Description of Artificial Sequence: Synthetic oligonucleotide
  Antisense strand to SEQ ID NO: 1287112
cuuagaaggacuaacaaga

SEQ ID NO: 1287114 - RNA, 19 nt, Artificial Sequence
  Description of Artificial Sequence: Synthetic oligonucleotide
  Sense strand starting at position 2032 of SEQ ID NO: 1241627
ccaguuauugcagggcaau

SEQ ID NO: 1287115 - RNA, 19 nt, Artificial Sequence
  Description of Artificial Sequence: Synthetic oligonucleotide
  Antisense strand to SEQ ID NO: 1287114
auugcccugcaauaacugg

SEQ ID NO: 1287116 - RNA, 19 nt, Artificial Sequence
  Description of Artificial Sequence: Synthetic oligonucleotide
  Sense strand starting at position 2033 of SEQ ID NO: 1241627
caguuauugcagggcaaug

SEQ ID NO: 1287117 - RNA, 19 nt, Artificial Sequence
  Description of Artificial Sequence: Synthetic oligonucleotide
  Antisense strand to SEQ ID NO: 1287116
cauugcccugcaauaacug

SEQ ID NO: 1287118 - RNA, 19 nt, Artificial Sequence
  Description of Artificial Sequence: Synthetic oligonucleotide
  Sense strand starting at position 2047 of SEQ ID NO: 1241627
caaugugcagccuaagaua

SEQ ID NO: 1287119 - RNA, 19 nt, Artificial Sequence
  Description of Artificial Sequence: Synthetic oligonucleotide
  Antisense strand to SEQ ID NO: 1287118
uaucuuaggcugcacauug

SEQ ID NO: 1287120 - RNA, 19 nt, Artificial Sequence
  Description of Artificial Sequence: Synthetic oligonucleotide
  Sense strand starting at position 2078 of SEQ ID NO: 1241627
ggcauucuauuguuuagua

SEQ ID NO: 1287121 - RNA, 19 nt, Artificial Sequence
  Description of Artificial Sequence: Synthetic oligonucleotide
  Antisense strand to SEQ ID NO: 1287120
uacuaaacaauagaaugcc

SEQ ID NO: 1287122 - RNA, 19 nt, Artificial Sequence
  Description of Artificial Sequence: Synthetic oligonucleotide
  Sense strand starting at position 2167 of SEQ ID NO: 1241627
ggguaugauuaccuucuca

SEQ ID NO: 1287123 - RNA, 19 nt, Artificial Sequence
  Description of Artificial Sequence: Synthetic oligonucleotide
  Antisense strand to SEQ ID NO: 1287122
ugagaagguaaucauaccc

SEQ ID NO: 1287124 - RNA, 19 nt, Artificial Sequence
  Description of Artificial Sequence: Synthetic oligonucleotide
  Sense strand starting at position 2259 of SEQ ID NO: 1241627
gcgugucaaauacaagauu

SEQ ID NO: 1287125 - RNA, 19 nt, Artificial Sequence
  Description of Artificial Sequence: Synthetic oligonucleotide
  Antisense strand to SEQ ID NO: 1287124
aaucuuguauuugacacgc

SEQ ID NO: 1287126 - RNA, 19 nt, Artificial Sequence
  Description of Artificial Sequence: Synthetic oligonucleotide
  Sense strand starting at position 2730 of SEQ ID NO: 1241627
uagcuuaggugucccugaa

SEQ ID NO: 1287127 - RNA, 19 nt, Artificial Sequence
  Description of Artificial Sequence: Synthetic oligonucleotide
  Antisense strand to SEQ ID NO: 1287126
uucagggacaccuaagcua

SEQ ID NO: 1287128 - RNA, 19 nt, Artificial Sequence
  Description of Artificial Sequence: Synthetic oligonucleotide
  Sense strand starting at position 2734 of SEQ ID NO: 1241627
uuaggugucccugaaagag

SEQ ID NO: 1287129 - RNA, 19 nt, Artificial Sequence
  Description of Artificial Sequence: Synthetic oligonucleotide
  Antisense strand to SEQ ID NO: 1287128
cucuuucagggacaccuaa

SEQ ID NO: 1287130 - RNA, 19 nt, Artificial Sequence
  Description of Artificial Sequence: Synthetic oligonucleotide
  Sense strand starting at position 2744 of SEQ ID NO: 1241627
cugaaagaguuguuauuaa

SEQ ID NO: 1287131 - RNA, 19 nt, Artificial Sequence
  Description of Artificial Sequence: Synthetic oligonucleotide
  Antisense strand to SEQ ID NO: 1287130
uuaauaacaacucuuucag

SEQ ID NO: 1287132 - RNA, 19 nt, Artificial Sequence
  Description of Artificial Sequence: Synthetic oligonucleotide
  Sense strand starting at position 2800 of SEQ ID NO: 1241627
cccaguuucucacugaagu

SEQ ID NO: 1287133 - RNA, 19 nt, Artificial Sequence
  Description of Artificial Sequence: Synthetic oligonucleotide
  Antisense strand to SEQ ID NO: 1287132
acuucagugagaaacuggg

SEQ ID NO: 1287134 - RNA, 19 nt, Artificial Sequence
  Description of Artificial Sequence: Synthetic oligonucleotide
  Sense strand starting at position 2801 of SEQ ID NO: 1241627
ccaguuucucacugaaguu

SEQ ID NO: 1287135 - RNA, 19 nt, Artificial Sequence
  Description of Artificial Sequence: Synthetic oligonucleotide
  Antisense strand to SEQ ID NO: 1287134
aacuucagugagaaacugg

SEQ ID NO: 1287136 - RNA, 19 nt, Artificial Sequence
  Description of Artificial Sequence: Synthetic oligonucleotide
  Sense strand starting at position 2884 of SEQ ID NO: 1241627
ggguucuuuccaugccuga

SEQ ID NO: 1287137 - RNA, 19 nt, Artificial Sequence
  Description of Artificial Sequence: Synthetic oligonucleotide
  Antisense strand to SEQ ID NO: 1287136
ucaggcauggaaagaaccc

SEQ ID NO: 1287138 - RNA, 19 nt, Artificial Sequence
  Description of Artificial Sequence: Synthetic oligonucleotide
  Sense strand starting at position 2914 of SEQ ID NO: 1241627
gcuggagaaugucuuggaa

SEQ ID NO: 1287139 - RNA, 19 nt, Artificial Sequence
  Description of Artificial Sequence: Synthetic oligonucleotide
  Antisense strand to SEQ ID NO: 1287138
uuccaagacauucuccagc

SEQ ID NO: 1287140 - RNA, 19 nt, Artificial Sequence
  Description of Artificial Sequence: Synthetic oligonucleotide
  Sense strand starting at position 2918 of SEQ ID NO: 1241627
gagaaugucuuggaaggau

SEQ ID NO: 1287141 - RNA, 19 nt, Artificial Sequence
  Description of Artificial Sequence: Synthetic oligonucleotide
  Antisense strand to SEQ ID NO: 1287140
auccuuccaagacauucuc

SEQ ID NO: 1287142 - RNA, 19 nt, Artificial Sequence
  Description of Artificial Sequence: Synthetic oligonucleotide
  Sense strand starting at position 3132 of SEQ ID NO: 1241627
aagaguuucccauaggagc

SEQ ID NO: 1287143 - RNA, 19 nt, Artificial Sequence
  Description of Artificial Sequence: Synthetic oligonucleotide
  Antisense strand to SEQ ID NO: 1287142
gcuccuaugggaaacucuu

SEQ ID NO: 1287144 - RNA, 19 nt, Artificial Sequence
  Description of Artificial Sequence: Synthetic oligonucleotide
  Sense strand starting at position 3239 of SEQ ID NO: 1241627
gagaaagucuccucuuaga

SEQ ID NO: 1287145 - RNA, 19 nt, Artificial Sequence
  Description of Artificial Sequence: Synthetic oligonucleotide
  Antisense strand to SEQ ID NO: 1287144
ucuaagaggagacuuucuc

SEQ ID NO: 1287146 - RNA, 19 nt, Artificial Sequence
  Description of Artificial Sequence: Synthetic oligonucleotide
  Sense strand starting at position 3278 of SEQ ID NO: 1241627
acacuuucccguguuuguu

SEQ ID NO: 1287147 - RNA, 19 nt, Artificial Sequence
  Description of Artificial Sequence: Synthetic oligonucleotide
  Antisense strand to SEQ ID NO: 1287146
aacaaacacgggaaagugu

SEQ ID NO: 1287148 - RNA, 19 nt, Artificial Sequence
  Description of Artificial Sequence: Synthetic oligonucleotide
  Sense strand starting at position 3425 of SEQ ID NO: 1241627
acuaguauucuuugaaaga

SEQ ID NO: 1287149 - RNA, 19 nt, Artificial Sequence
  Description of Artificial Sequence: Synthetic oligonucleotide
  Antisense strand to SEQ ID NO: 1287148
ucuuucaaagaauacuagu

SEQ ID NO: 1287150 - RNA, 19 nt, Artificial Sequence
  Description of Artificial Sequence: Synthetic oligonucleotide
  Sense strand starting at position 3642 of SEQ ID NO: 1241627
ucucucaaccucugggauu

SEQ ID NO: 1287151 - RNA, 19 nt, Artificial Sequence
  Description of Artificial Sequence: Synthetic oligonucleotide
  Antisense strand to SEQ ID NO: 1287150
aaucccagagguugagaga

SEQ ID NO: 1287152 - RNA, 19 nt, Artificial Sequence
  Description of Artificial Sequence: Synthetic oligonucleotide
  Sense strand starting at position 3643 of SEQ ID NO: 1241627
cucucaaccucugggauuu

SEQ ID NO: 1287153 - RNA, 19 nt, Artificial Sequence
  Description of Artificial Sequence: Synthetic oligonucleotide
  Antisense strand to SEQ ID NO: 1287152
aaaucccagagguugagag

SEQ ID NO: 1287154 - RNA, 19 nt, Artificial Sequence
  Description of Artificial Sequence: Synthetic oligonucleotide
  Sense strand starting at position 3661 of SEQ ID NO: 1241627
uguguaacuucuccaccuu

SEQ ID NO: 1287155 - RNA, 19 nt, Artificial Sequence
  Description of Artificial Sequence: Synthetic oligonucleotide
  Antisense strand to SEQ ID NO: 1287154
aagguggagaaguuacaca

SEQ ID NO: 1287156 - RNA, 19 nt, Artificial Sequence
  Description of Artificial Sequence: Synthetic oligonucleotide
  Sense strand starting at position 3662 of SEQ ID NO: 1241627
guguaacuucuccaccuuu

SEQ ID NO: 1287157 - RNA, 19 nt, Artificial Sequence
  Description of Artificial Sequence: Synthetic oligonucleotide
  Antisense strand to SEQ ID NO: 1287156
aaagguggagaaguuacac

SEQ ID NO: 1287158 - RNA, 19 nt, Artificial Sequence
  Description of Artificial Sequence: Synthetic oligonucleotide
  Sense strand starting at position 3668 of SEQ ID NO: 1241627
cuucuccaccuuugggaua

SEQ ID NO: 1287159 - RNA, 19 nt, Artificial Sequence
  Description of Artificial Sequence: Synthetic oligonucleotide
  Antisense strand to SEQ ID NO: 1287158
uaucccaaagguggagaag

SEQ ID NO: 1287160 - RNA, 19 nt, Artificial Sequence
  Description of Artificial Sequence: Synthetic oligonucleotide
  Sense strand starting at position 3681 of SEQ ID NO: 1241627
gggauaaagugcucuccaa

SEQ ID NO: 1287161 - RNA, 19 nt, Artificial Sequence
  Description of Artificial Sequence: Synthetic oligonucleotide
  Antisense strand to SEQ ID NO: 1287160
uuggagagcacuuuauccc

SEQ ID NO: 1287162 - RNA, 19 nt, Artificial Sequence
  Description of Artificial Sequence: Synthetic oligonucleotide
  Sense strand starting at position 3753 of SEQ ID NO: 1241627
cugagauguuugucaucuc

SEQ ID NO: 1287163 - RNA, 19 nt, Artificial Sequence
  Description of Artificial Sequence: Synthetic oligonucleotide
  Antisense strand to SEQ ID NO: 1287162
gagaugacaaacaucucag

SEQ ID NO: 1287164 - RNA, 19 nt, Artificial Sequence
  Description of Artificial Sequence: Synthetic oligonucleotide
  Sense strand starting at position 3756 of SEQ ID NO: 1241627
agauguuugucaucucagg

SEQ ID NO: 1287165 - RNA, 19 nt, Artificial Sequence
  Description of Artificial Sequence: Synthetic oligonucleotide
  Antisense strand to SEQ ID NO: 1287164
ccugagaugacaaacaucu

SEQ ID NO: 1287166 - RNA, 19 nt, Artificial Sequence
  Description of Artificial Sequence: Synthetic oligonucleotide
  Sense strand starting at position 3785 of SEQ ID NO: 1241627
ggaggagccuuguuugcca

SEQ ID NO: 1287167 - RNA, 19 nt, Artificial Sequence
  Description of Artificial Sequence: Synthetic oligonucleotide
  Antisense strand to SEQ ID NO: 1287166
uggcaaacaaggcuccucc

SEQ ID NO: 1287168 - RNA, 19 nt, Artificial Sequence
  Description of Artificial Sequence: Synthetic oligonucleotide
  Sense strand starting at position 3793 of SEQ ID NO: 1241627
cuuguuugccaguagaacu

SEQ ID NO: 1287169 - RNA, 19 nt, Artificial Sequence
  Description of Artificial Sequence: Synthetic oligonucleotide
  Antisense strand to SEQ ID NO: 1287168
aguucuacuggcaaacaag

SEQ ID NO: 1287170 - RNA, 19 nt, Artificial Sequence
  Description of Artificial Sequence: Synthetic oligonucleotide
  Sense strand starting at position 3980 of SEQ ID NO: 1241627
agucauuucucucuugcag

SEQ ID NO: 1287171 - RNA, 19 nt, Artificial Sequence
  Description of Artificial Sequence: Synthetic oligonucleotide
  Antisense strand to SEQ ID NO: 1287170
cugcaagagagaaaugacu

SEQ ID NO: 1287172 - RNA, 19 nt, Artificial Sequence
  Description of Artificial Sequence: Synthetic oligonucleotide
  Sense strand starting at position 122 of SEQ ID NO: 1241628
ucuguuucugaacaguuua

SEQ ID NO: 1287173 - RNA, 19 nt, Artificial Sequence
  Description of Artificial Sequence: Synthetic oligonucleotide
  Antisense strand to SEQ ID NO: 1287172
uaaacuguucagaaacaga

SEQ ID NO: 1287174 - RNA, 19 nt, Artificial Sequence
  Description of Artificial Sequence: Synthetic oligonucleotide
  Sense strand starting at position 576 of SEQ ID NO: 1241628
guugaaacaugaucacuca

SEQ ID NO: 1287175 - RNA, 19 nt, Artificial Sequence
  Description of Artificial Sequence: Synthetic oligonucleotide
  Antisense strand to SEQ ID NO: 1287174
ugagugaucauguuucaac

SEQ ID NO: 1287176 - RNA, 19 nt, Artificial Sequence
  Description of Artificial Sequence: Synthetic oligonucleotide
  Sense strand starting at position 579 of SEQ ID NO: 1241628
gaaacaugaucacucagug

SEQ ID NO: 1287177 - RNA, 19 nt, Artificial Sequence
  Description of Artificial Sequence: Synthetic oligonucleotide
  Antisense strand to SEQ ID NO: 1287176
cacugagugaucauguuuc

SEQ ID NO: 1287178 - RNA, 19 nt, Artificial Sequence
  Description of Artificial Sequence: Synthetic oligonucleotide
  Sense strand starting at position 587 of SEQ ID NO: 1241628
aucacucaguguuucugaa

SEQ ID NO: 1287179 - RNA, 19 nt, Artificial Sequence
  Description of Artificial Sequence: Synthetic oligonucleotide
  Antisense strand to SEQ ID NO: 1287178
uucagaaacacugagugau

SEQ ID NO: 1287180 - RNA, 19 nt, Artificial Sequence
  Description of Artificial Sequence: Synthetic oligonucleotide
  Sense strand starting at position 695 of SEQ ID NO: 1241628
ugaaauuucuguggaugaa

SEQ ID NO: 1287181 - RNA, 19 nt, Artificial Sequence
  Description of Artificial Sequence: Synthetic oligonucleotide
  Antisense strand to SEQ ID NO: 1287180
uucauccacagaaauuuca

SEQ ID NO: 1287182 - RNA, 19 nt, Artificial Sequence
  Description of Artificial Sequence: Synthetic oligonucleotide
  Sense strand starting at position 744 of SEQ ID NO: 1241628
aggugauucuuagcucacu

SEQ ID NO: 1287183 - RNA, 19 nt, Artificial Sequence
  Description of Artificial Sequence: Synthetic oligonucleotide
  Antisense strand to SEQ ID NO: 1287182
agugagcuaagaaucaccu

SEQ ID NO: 1287184 - RNA, 19 nt, Artificial Sequence
  Description of Artificial Sequence: Synthetic oligonucleotide
  Sense strand starting at position 745 of SEQ ID NO: 1241628
ggugauucuuagcucacua

SEQ ID NO: 1287185 - RNA, 19 nt, Artificial Sequence
  Description of Artificial Sequence: Synthetic oligonucleotide
  Antisense strand to SEQ ID NO: 1287184
uagugagcuaagaaucacc

SEQ ID NO: 1287186 - RNA, 19 nt, Artificial Sequence
  Description of Artificial Sequence: Synthetic oligonucleotide
  Sense strand starting at position 775 of SEQ ID NO: 1241628
ggaauuucuuaauaugcau

SEQ ID NO: 1287187 - RNA, 19 nt, Artificial Sequence
  Description of Artificial Sequence: Synthetic oligonucleotide
  Antisense strand to SEQ ID NO: 1287186
augcauauuaagaaauucc

SEQ ID NO: 1287188 - RNA, 19 nt, Artificial Sequence
  Description of Artificial Sequence: Synthetic oligonucleotide
  Sense strand starting at position 854 of SEQ ID NO: 1241628
cagcaaauguucuuggaag

SEQ ID NO: 1287189 - RNA, 19 nt, Artificial Sequence
  Description of Artificial Sequence: Synthetic oligonucleotide
  Antisense strand to SEQ ID NO: 1287188
cuuccaagaacauuugcug

SEQ ID NO: 1287190 - RNA, 19 nt, Artificial Sequence
  Description of Artificial Sequence: Synthetic oligonucleotide
  Sense strand starting at position 856 of SEQ ID NO: 1241628
gcaaauguucuuggaagaa

SEQ ID NO: 1287191 - RNA, 19 nt, Artificial Sequence
  Description of Artificial Sequence: Synthetic oligonucleotide
  Antisense strand to SEQ ID NO: 1287190
uucuuccaagaacauuugc

SEQ ID NO: 1287192 - RNA, 19 nt, Artificial Sequence
  Description of Artificial Sequence: Synthetic oligonucleotide
  Sense strand starting at position 993 of SEQ ID NO: 1241628
gguuuauuguaacuuagaa

SEQ ID NO: 1287193 - RNA, 19 nt, Artificial Sequence
  Description of Artificial Sequence: Synthetic oligonucleotide
  Antisense strand to SEQ ID NO: 1287192
uucuaaguuacaauaaacc

SEQ ID NO: 1287194 - RNA, 19 nt, Artificial Sequence
  Description of Artificial Sequence: Synthetic oligonucleotide
  Sense strand starting at position 1144 of SEQ ID NO: 1241628
gaaugaguuaugggcuugu

SEQ ID NO: 1287195 - RNA, 19 nt, Artificial Sequence
  Description of Artificial Sequence: Synthetic oligonucleotide
  Antisense strand to SEQ ID NO: 1287194
acaagcccauaacucauuc

SEQ ID NO: 1287196 - RNA, 19 nt, Artificial Sequence
  Description of Artificial Sequence: Synthetic oligonucleotide
  Sense strand starting at position 1184 of SEQ ID NO: 1241628
aaggauuauuaagugguau

SEQ ID NO: 1287197 - RNA, 19 nt, Artificial Sequence
  Description of Artificial Sequence: Synthetic oligonucleotide
  Antisense strand to SEQ ID NO: 1287196
auaccacuuaauaauccuu

SEQ ID NO: 1287198 - RNA, 19 nt, Artificial Sequence
  Description of Artificial Sequence: Synthetic oligonucleotide
  Sense strand starting at position 1414 of SEQ ID NO: 1241628
ugcugauaagagugugaug

SEQ ID NO: 1287199 - RNA, 19 nt, Artificial Sequence
  Description of Artificial Sequence: Synthetic oligonucleotide
  Antisense strand to SEQ ID NO: 1287198
caucacacucuuaucagca

SEQ ID NO: 1287200 - RNA, 19 nt, Artificial Sequence
  Description of Artificial Sequence: Synthetic oligonucleotide
  Sense strand starting at position 1416 of SEQ ID NO: 1241628
cugauaagagugugaugag

SEQ ID NO: 1287201 - RNA, 19 nt, Artificial Sequence
  Description of Artificial Sequence: Synthetic oligonucleotide
  Antisense strand to SEQ ID NO: 1287200
cucaucacacucuuaucag

SEQ ID NO: 1287202 - RNA, 19 nt, Artificial Sequence
  Description of Artificial Sequence: Synthetic oligonucleotide
  Sense strand starting at position 1431 of SEQ ID NO: 1241628
ugagauguuucugcagaaa

SEQ ID NO: 1287203 - RNA, 19 nt, Artificial Sequence
  Description of Artificial Sequence: Synthetic oligonucleotide
  Antisense strand to SEQ ID NO: 1287202
uuucugcagaaacaucuca

SEQ ID NO: 1287204 - RNA, 19 nt, Artificial Sequence
  Description of Artificial Sequence: Synthetic oligonucleotide
  Sense strand starting at position 1530 of SEQ ID NO: 1241628
cuagaauucuaaguugcaa

SEQ ID NO: 1287205 - RNA, 19 nt, Artificial Sequence
  Description of Artificial Sequence: Synthetic oligonucleotide
  Antisense strand to SEQ ID NO: 1287204
uugcaacuuagaauucuag

SEQ ID NO: 1287206 - RNA, 19 nt, Artificial Sequence
  Description of Artificial Sequence: Synthetic oligonucleotide
  Sense strand starting at position 1655 of SEQ ID NO: 1241628
gucugauguguuuauagaa

SEQ ID NO: 1287207 - RNA, 19 nt, Artificial Sequence
  Description of Artificial Sequence: Synthetic oligonucleotide
  Antisense strand to SEQ ID NO: 1287206
uucuauaaacacaucagac

SEQ ID NO: 1287208 - RNA, 19 nt, Artificial Sequence
  Description of Artificial Sequence: Synthetic oligonucleotide
  Sense strand starting at position 1755 of SEQ ID NO: 1241628
auauucuuagaaugggcua

SEQ ID NO: 1287209 - RNA, 19 nt, Artificial Sequence
  Description of Artificial Sequence: Synthetic oligonucleotide
  Antisense strand to SEQ ID NO: 1287208
uagcccauucuaagaauau

SEQ ID NO: 1287210 - RNA, 19 nt, Artificial Sequence
  Description of Artificial Sequence: Synthetic oligonucleotide
  Sense strand starting at position 1901 of SEQ ID NO: 1241628
ggacucucugguugacagu

SEQ ID NO: 1287211 - RNA, 19 nt, Artificial Sequence
  Description of Artificial Sequence: Synthetic oligonucleotide
  Antisense strand to SEQ ID NO: 1287210
acugucaaccagagagucc

SEQ ID NO: 1287212 - RNA, 19 nt, Artificial Sequence
  Description of Artificial Sequence: Synthetic oligonucleotide
  Sense strand starting at position 1907 of SEQ ID NO: 1241628
ucugguugacagugagaaa

SEQ ID NO: 1287213 - RNA, 19 nt, Artificial Sequence
  Description of Artificial Sequence: Synthetic oligonucleotide
  Antisense strand to SEQ ID NO: 1287212
uuucucacugucaaccaga

SEQ ID NO: 1287214 - RNA, 19 nt, Artificial Sequence
  Description of Artificial Sequence: Synthetic oligonucleotide
  Sense strand starting at position 1963 of SEQ ID NO: 1241628
uguugacucacagaaguug

SEQ ID NO: 1287215 - RNA, 19 nt, Artificial Sequence
  Description of Artificial Sequence: Synthetic oligonucleotide
  Antisense strand to SEQ ID NO: 1287214
caacuucugugagucaaca

SEQ ID NO: 1287216 - RNA, 19 nt, Artificial Sequence
  Description of Artificial Sequence: Synthetic oligonucleotide
  Sense strand starting at position 2277 of SEQ ID NO: 1241628
acauguccucuuugagaag

SEQ ID NO: 1287217 - RNA, 19 nt, Artificial Sequence
  Description of Artificial Sequence: Synthetic oligonucleotide
  Antisense strand to SEQ ID NO: 1287216
cuucucaaagaggacaugu

SEQ ID NO: 1287218 - RNA, 19 nt, Artificial Sequence
  Description of Artificial Sequence: Synthetic oligonucleotide
  Sense strand starting at position 2330 of SEQ ID NO: 1241628
auuccaauugucgauagaa

SEQ ID NO: 1287219 - RNA, 19 nt, Artificial Sequence
  Description of Artificial Sequence: Synthetic oligonucleotide
  Antisense strand to SEQ ID NO: 1287218
uucuaucgacaauuggaau

SEQ ID NO: 1287220 - RNA, 19 nt, Artificial Sequence
  Description of Artificial Sequence: Synthetic oligonucleotide
  Sense strand starting at position 2348 of SEQ ID NO: 1241628
agggcuguucccuauuaca

SEQ ID NO: 1287221 - RNA, 19 nt, Artificial Sequence
  Description of Artificial Sequence: Synthetic oligonucleotide
  Antisense strand to SEQ ID NO: 1287220
uguaauagggaacagcccu

SEQ ID NO: 1287222 - RNA, 19 nt, Artificial Sequence
  Description of Artificial Sequence: Synthetic oligonucleotide
  Sense strand starting at position 2396 of SEQ ID NO: 1241628
guaauaaacgugcuuugcu

SEQ ID NO: 1287223 - RNA, 19 nt, Artificial Sequence
  Description of Artificial Sequence: Synthetic oligonucleotide
  Antisense strand to SEQ ID NO: 1287222
agcaaagcacguuuauuac

SEQ ID NO: 1287224 - RNA, 19 nt, Artificial Sequence
  Description of Artificial Sequence: Synthetic oligonucleotide
  Sense strand starting at position 2639 of SEQ ID NO: 1241628
uuggccauguucuuaaaua

SEQ ID NO: 1287225 - RNA, 19 nt, Artificial Sequence
  Description of Artificial Sequence: Synthetic oligonucleotide
  Antisense strand to SEQ ID NO: 1287224
uauuuaagaacauggccaa

SEQ ID NO: 1287226 - RNA, 19 nt, Artificial Sequence
  Description of Artificial Sequence: Synthetic oligonucleotide
  Sense strand starting at position 2672 of SEQ ID NO: 1241628
uccagacucccacauguuu

SEQ ID NO: 1287227 - RNA, 19 nt, Artificial Sequence
  Description of Artificial Sequence: Synthetic oligonucleotide
  Antisense strand to SEQ ID NO: 1287226
aaacaugugggagucugga

SEQ ID NO: 1287228 - RNA, 19 nt, Artificial Sequence
  Description of Artificial Sequence: Synthetic oligonucleotide
  Sense strand starting at position 2686 of SEQ ID NO: 1241628
uguuuauaucaguaaacuc

SEQ ID NO: 1287229 - RNA, 19 nt, Artificial Sequence
  Description of Artificial Sequence: Synthetic oligonucleotide
  Antisense strand to SEQ ID NO: 1287228
gaguuuacugauauaaaca

SEQ ID NO: 1287230 - RNA, 19 nt, Artificial Sequence
  Description of Artificial Sequence: Synthetic oligonucleotide
  Sense strand starting at position 2737 of SEQ ID NO: 1241628
uaguuugagugguugagaa

SEQ ID NO: 1287231 - RNA, 19 nt, Artificial Sequence
  Description of Artificial Sequence: Synthetic oligonucleotide
  Antisense strand to SEQ ID NO: 1287230
uucucaaccacucaaacua

SEQ ID NO: 1287232 - RNA, 19 nt, Artificial Sequence
  Description of Artificial Sequence: Synthetic oligonucleotide
  Sense strand starting at position 2789 of SEQ ID NO: 1241628
agacuaaccuuugugaaua

SEQ ID NO: 1287233 - RNA, 19 nt, Artificial Sequence
  Description of Artificial Sequence: Synthetic oligonucleotide
  Antisense strand to SEQ ID NO: 1287232
uauucacaaagguuagucu

SEQ ID NO: 1287234 - RNA, 19 nt, Artificial Sequence
  Description of Artificial Sequence: Synthetic oligonucleotide
  Sense strand starting at position 2803 of SEQ ID NO: 1241628
gaauaaaucccaggguauc

SEQ ID NO: 1287235 - RNA, 19 nt, Artificial Sequence
  Description of Artificial Sequence: Synthetic oligonucleotide
  Antisense strand to SEQ ID NO: 1287234
gauacccugggauuuauuc

SEQ ID NO: 1287236 - RNA, 19 nt, Artificial Sequence
  Description of Artificial Sequence: Synthetic oligonucleotide
  Sense strand starting at position 2815 of SEQ ID NO: 1241628
ggguaucucuuaguuaaau

SEQ ID NO: 1287237 - RNA, 19 nt, Artificial Sequence
  Description of Artificial Sequence: Synthetic oligonucleotide
  Antisense strand to SEQ ID NO: 1287236
auuuaacuaagagauaccc

SEQ ID NO: 1287238 - RNA, 19 nt, Artificial Sequence
  Description of Artificial Sequence: Synthetic oligonucleotide
  Sense strand starting at position 2816 of SEQ ID NO: 1241628
gguaucucuuaguuaaauc

SEQ ID NO: 1287239 - RNA, 19 nt, Artificial Sequence
  Description of Artificial Sequence: Synthetic oligonucleotide
  Antisense strand to SEQ ID NO: 1287238
gauuuaacuaagagauacc

SEQ ID NO: 1287240 - RNA, 19 nt, Artificial Sequence
  Description of Artificial Sequence: Synthetic oligonucleotide
  Sense strand starting at position 2968 of SEQ ID NO: 1241628
aaauguuauccuugugagu

SEQ ID NO: 1287241 - RNA, 19 nt, Artificial Sequence
  Description of Artificial Sequence: Synthetic oligonucleotide
  Antisense strand to SEQ ID NO: 1287240
acucacaaggauaacauuu

SEQ ID NO: 1287242 - RNA, 19 nt, Artificial Sequence
  Description of Artificial Sequence: Synthetic oligonucleotide
  Sense strand starting at position 2973 of SEQ ID NO: 1241628
uuauccuugugaguaaaua

SEQ ID NO: 1287243 - RNA, 19 nt, Artificial Sequence
  Description of Artificial Sequence: Synthetic oligonucleotide
  Antisense strand to SEQ ID NO: 1287242
uauuuacucacaaggauaa

SEQ ID NO: 1287244 - RNA, 19 nt, Artificial Sequence
  Description of Artificial Sequence: Synthetic oligonucleotide
  Sense strand starting at position 3397 of SEQ ID NO: 1241628
uuguuugauuuccuaaguu

SEQ ID NO: 1287245 - RNA, 19 nt, Artificial Sequence
  Description of Artificial Sequence: Synthetic oligonucleotide
  Antisense strand to SEQ ID NO: 1287244
aacuuaggaaaucaaacaa

SEQ ID NO: 1287246 - RNA, 19 nt, Artificial Sequence
  Description of Artificial Sequence: Synthetic oligonucleotide
  Sense strand starting at position 3515 of SEQ ID NO: 1241628
ggugaaacaguagguucua

SEQ ID NO: 1287247 - RNA, 19 nt, Artificial Sequence
  Description of Artificial Sequence: Synthetic oligonucleotide
  Antisense strand to SEQ ID NO: 1287246
uagaaccuacuguuucacc

SEQ ID NO: 1287248 - RNA, 19 nt, Artificial Sequence
  Description of Artificial Sequence: Synthetic oligonucleotide
  Sense strand starting at position 3516 of SEQ ID NO: 1241628
gugaaacaguagguucuau

SEQ ID NO: 1287249 - RNA, 19 nt, Artificial Sequence
  Description of Artificial Sequence: Synthetic oligonucleotide
  Antisense strand to SEQ ID NO: 1287248
auagaaccuacuguuucac

SEQ ID NO: 1287250 - RNA, 19 nt, Artificial Sequence
  Description of Artificial Sequence: Synthetic oligonucleotide
  Sense strand starting at position 3594 of SEQ ID NO: 1241628
gucuacaauuuaugaugaa

SEQ ID NO: 1287251 - RNA, 19 nt, Artificial Sequence
  Description of Artificial Sequence: Synthetic oligonucleotide
  Antisense strand to SEQ ID NO: 1287250
uucaucauaaauuguagac

SEQ ID NO: 1287252 - RNA, 19 nt, Artificial Sequence
  Description of Artificial Sequence: Synthetic oligonucleotide
  Sense strand starting at position 945 of SEQ ID NO: 1241629
uuaaaugacuugucgaaag

SEQ ID NO: 1287253 - RNA, 19 nt, Artificial Sequence
  Description of Artificial Sequence: Synthetic oligonucleotide
  Antisense strand to SEQ ID NO: 1287252
cuuucgacaagucauuuaa

SEQ ID NO: 1287254 - RNA, 19 nt, Artificial Sequence
  Description of Artificial Sequence: Synthetic oligonucleotide
  Sense strand starting at position 947 of SEQ ID NO: 1241629
aaaugacuugucgaaaguu

SEQ ID NO: 1287255 - RNA, 19 nt, Artificial Sequence
  Description of Artificial Sequence: Synthetic oligonucleotide
  Antisense strand to SEQ ID NO: 1287254
aacuuucgacaagucauuu

SEQ ID NO: 1287256 - RNA, 19 nt, Artificial Sequence
  Description of Artificial Sequence: Synthetic oligonucleotide
  Sense strand starting at position 974 of SEQ ID NO: 1241629
aguuauuggucuccugauu

SEQ ID NO: 1287257 - RNA, 19 nt, Artificial Sequence
  Description of Artificial Sequence: Synthetic oligonucleotide
  Antisense strand to SEQ ID NO: 1287256
aaucaggagaccaauaacu

SEQ ID NO: 1287258 - RNA, 19 nt, Artificial Sequence
  Description of Artificial Sequence: Synthetic oligonucleotide
  Sense strand starting at position 1031 of SEQ ID NO: 1241629
uguguuagacaugguaauc

SEQ ID NO: 1287259 - RNA, 19 nt, Artificial Sequence
  Description of Artificial Sequence: Synthetic oligonucleotide
  Antisense strand to SEQ ID NO: 1287258
gauuaccaugucuaacaca

SEQ ID NO: 1287260 - RNA, 19 nt, Artificial Sequence
  Description of Artificial Sequence: Synthetic oligonucleotide
  Sense strand starting at position 1044 of SEQ ID NO: 1241629
guaaucauauagccuguau

SEQ ID NO: 1287261 - RNA, 19 nt, Artificial Sequence
  Description of Artificial Sequence: Synthetic oligonucleotide
  Antisense strand to SEQ ID NO: 1287260
auacaggcuauaugauuac

SEQ ID NO: 1287262 - RNA, 19 nt, Artificial Sequence
  Description of Artificial Sequence: Synthetic oligonucleotide
  Sense strand starting at position 1103 of SEQ ID NO: 1241629
gaguaaaugugacuuugua

SEQ ID NO: 1287263 - RNA, 19 nt, Artificial Sequence
  Description of Artificial Sequence: Synthetic oligonucleotide
  Antisense strand to SEQ ID NO: 1287262
uacaaagucacauuuacuc

SEQ ID NO: 1287264 - RNA, 19 nt, Artificial Sequence
  Description of Artificial Sequence: Synthetic oligonucleotide
  Sense strand starting at position 1120 of SEQ ID NO: 1241629
uaagguuucuuugugggau

SEQ ID NO: 1287265 - RNA, 19 nt, Artificial Sequence
  Description of Artificial Sequence: Synthetic oligonucleotide
  Antisense strand to SEQ ID NO: 1287264
aucccacaaagaaaccuua

SEQ ID NO: 1287266 - RNA, 19 nt, Artificial Sequence
  Description of Artificial Sequence: Synthetic oligonucleotide
  Sense strand starting at position 1123 of SEQ ID NO: 1241629
gguuucuuugugggauuau

SEQ ID NO: 1287267 - RNA, 19 nt, Artificial Sequence
  Description of Artificial Sequence: Synthetic oligonucleotide
  Antisense strand to SEQ ID NO: 1287266
auaaucccacaaagaaacc

SEQ ID NO: 1287268 - RNA, 19 nt, Artificial Sequence
  Description of Artificial Sequence: Synthetic oligonucleotide
  Sense strand starting at position 1494 of SEQ ID NO: 1241629
guguguaaccgcugaggga

SEQ ID NO: 1287269 - RNA, 19 nt, Artificial Sequence
  Description of Artificial Sequence: Synthetic oligonucleotide
  Antisense strand to SEQ ID NO: 1287268
ucccucagcgguuacacac

SEQ ID NO: 1287270 - RNA, 19 nt, Artificial Sequence
  Description of Artificial Sequence: Synthetic oligonucleotide
  Sense strand starting at position 1495 of SEQ ID NO: 1241629
uguguaaccgcugagggau

SEQ ID NO: 1287271 - RNA, 19 nt, Artificial Sequence
  Description of Artificial Sequence: Synthetic oligonucleotide
  Antisense strand to SEQ ID NO: 1287270
aucccucagcgguuacaca

SEQ ID NO: 1287272 - RNA, 19 nt, Artificial Sequence
  Description of Artificial Sequence: Synthetic oligonucleotide
  Sense strand starting at position 1503 of SEQ ID NO: 1241629
cgcugagggauacaaacuu

SEQ ID NO: 1287273 - RNA, 19 nt, Artificial Sequence
  Description of Artificial Sequence: Synthetic oligonucleotide
  Antisense strand to SEQ ID NO: 1287272
aaguuuguaucccucagcg

SEQ ID NO: 1287274 - RNA, 19 nt, Artificial Sequence
  Description of Artificial Sequence: Synthetic oligonucleotide
  Sense strand starting at position 1510 of SEQ ID NO: 1241629
ggauacaaacuucguaaga

SEQ ID NO: 1287275 - RNA, 19 nt, Artificial Sequence
  Description of Artificial Sequence: Synthetic oligonucleotide
  Antisense strand to SEQ ID NO: 1287274
ucuuacgaaguuuguaucc

SEQ ID NO: 1287276 - RNA, 19 nt, Artificial Sequence
  Description of Artificial Sequence: Synthetic oligonucleotide
  Sense strand starting at position 1511 of SEQ ID NO: 1241629
gauacaaacuucguaagau

SEQ ID NO: 1287277 - RNA, 19 nt, Artificial Sequence
  Description of Artificial Sequence: Synthetic oligonucleotide
  Antisense strand to SEQ ID NO: 1287276
aucuuacgaaguuuguauc

SEQ ID NO: 1287278 - RNA, 19 nt, Artificial Sequence
  Description of Artificial Sequence: Synthetic oligonucleotide
  Sense strand starting at position 1521 of SEQ ID NO: 1241629
ucguaagauuuacgauaaa

SEQ ID NO: 1287279 - RNA, 19 nt, Artificial Sequence
  Description of Artificial Sequence: Synthetic oligonucleotide
  Antisense strand to SEQ ID NO: 1287278
uuuaucguaaaucuuacga

SEQ ID NO: 1287280 - RNA, 19 nt, Artificial Sequence
  Description of Artificial Sequence: Synthetic oligonucleotide
  Sense strand starting at position 1588 of SEQ ID NO: 1241629
gagcuucguuguccuauuu

SEQ ID NO: 1287281 - RNA, 19 nt, Artificial Sequence
  Description of Artificial Sequence: Synthetic oligonucleotide
  Antisense strand to SEQ ID NO: 1287280
aaauaggacaacgaagcuc

SEQ ID NO: 1287282 - RNA, 19 nt, Artificial Sequence
  Description of Artificial Sequence: Synthetic oligonucleotide
  Sense strand starting at position 1598 of SEQ ID NO: 1241629
guccuauuuguucgaucgu

SEQ ID NO: 1287283 - RNA, 19 nt, Artificial Sequence
  Description of Artificial Sequence: Synthetic oligonucleotide
  Antisense strand to SEQ ID NO: 1287282
acgaucgaacaaauaggac

SEQ ID NO: 1287284 - RNA, 19 nt, Artificial Sequence
  Description of Artificial Sequence: Synthetic oligonucleotide
  Sense strand starting at position 1670 of SEQ ID NO: 1241629
guucuauaugcccagguuu

SEQ ID NO: 1287285 - RNA, 19 nt, Artificial Sequence
  Description of Artificial Sequence: Synthetic oligonucleotide
  Antisense strand to SEQ ID NO: 1287284
aaaccugggcauauagaac

SEQ ID NO: 1287286 - RNA, 19 nt, Artificial Sequence
  Description of Artificial Sequence: Synthetic oligonucleotide
  Sense strand starting at position 1748 of SEQ ID NO: 1241629
ggcagugaacagggugauu

SEQ ID NO: 1287287 - RNA, 19 nt, Artificial Sequence
  Description of Artificial Sequence: Synthetic oligonucleotide
  Antisense strand to SEQ ID NO: 1287286
aaucacccuguucacugcc

SEQ ID NO: 1287288 - RNA, 19 nt, Artificial Sequence
  Description of Artificial Sequence: Synthetic oligonucleotide
  Sense strand starting at position 1750 of SEQ ID NO: 1241629
cagugaacagggugauuaa

SEQ ID NO: 1287289 - RNA, 19 nt, Artificial Sequence
  Description of Artificial Sequence: Synthetic oligonucleotide
  Antisense strand to SEQ ID NO: 1287288
uuaaucacccuguucacug

SEQ ID NO: 1287290 - RNA, 19 nt, Artificial Sequence
  Description of Artificial Sequence: Synthetic oligonucleotide
  Sense strand starting at position 2274 of SEQ ID NO: 1241629
aaacgaugagaacgcaaua

SEQ ID NO: 1287291 - RNA, 19 nt, Artificial Sequence
  Description of Artificial Sequence: Synthetic oligonucleotide
  Antisense strand to SEQ ID NO: 1287290
uauugcguucucaucguuu

SEQ ID NO: 1287292 - RNA, 19 nt, Artificial Sequence
  Description of Artificial Sequence: Synthetic oligonucleotide
  Sense strand starting at position 2301 of SEQ ID NO: 1241629
ggucauaaagugggcgaaa

SEQ ID NO: 1287293 - RNA, 19 nt, Artificial Sequence
  Description of Artificial Sequence: Synthetic oligonucleotide
  Antisense strand to SEQ ID NO: 1287292
uuucgcccacuuuaugacc

SEQ ID NO: 1287294 - RNA, 19 nt, Artificial Sequence
  Description of Artificial Sequence: Synthetic oligonucleotide
  Sense strand starting at position 2351 of SEQ ID NO: 1241629
aauaaugggugcuuugaaa

SEQ ID NO: 1287295 - RNA, 19 nt, Artificial Sequence
  Description of Artificial Sequence: Synthetic oligonucleotide
  Antisense strand to SEQ ID NO: 1287294
uuucaaagcacccauuauu

SEQ ID NO: 1287296 - RNA, 19 nt, Artificial Sequence
  Description of Artificial Sequence: Synthetic oligonucleotide
  Sense strand starting at position 2415 of SEQ ID NO: 1241629
caaagaacagugugauauu

SEQ ID NO: 1287297 - RNA, 19 nt, Artificial Sequence
  Description of Artificial Sequence: Synthetic oligonucleotide
  Antisense strand to SEQ ID NO: 1287296
aauaucacacuguucuuug

SEQ ID NO: 1287298 - RNA, 19 nt, Artificial Sequence
  Description of Artificial Sequence: Synthetic oligonucleotide
  Sense strand starting at position 2416 of SEQ ID NO: 1241629
aaagaacagugugauauua

SEQ ID NO: 1287299 - RNA, 19 nt, Artificial Sequence
  Description of Artificial Sequence: Synthetic oligonucleotide
  Antisense strand to SEQ ID NO: 1287298
uaauaucacacuguucuuu

SEQ ID NO: 1287300 - RNA, 19 nt, Artificial Sequence
  Description of Artificial Sequence: Synthetic oligonucleotide
  Sense strand starting at position 2418 of SEQ ID NO: 1241629
agaacagugugauauuaau

SEQ ID NO: 1287301 - RNA, 19 nt, Artificial Sequence
  Description of Artificial Sequence: Synthetic oligonucleotide
  Antisense strand to SEQ ID NO: 1287300
auuaauaucacacuguucu

SEQ ID NO: 1287302 - RNA, 19 nt, Artificial Sequence
  Description of Artificial Sequence: Synthetic oligonucleotide
  Sense strand starting at position 2424 of SEQ ID NO: 1241629
gugugauauuaauugagaa

SEQ ID NO: 1287303 - RNA, 19 nt, Artificial Sequence
  Description of Artificial Sequence: Synthetic oligonucleotide
  Antisense strand to SEQ ID NO: 1287302
uucucaauuaauaucacac

SEQ ID NO: 1287304 - RNA, 19 nt, Artificial Sequence
  Description of Artificial Sequence: Synthetic oligonucleotide
  Sense strand starting at position 2842 of SEQ ID NO: 1241629
gcagguguaucacuuaauc

SEQ ID NO: 1287305 - RNA, 19 nt, Artificial Sequence
  Description of Artificial Sequence: Synthetic oligonucleotide
  Antisense strand to SEQ ID NO: 1287304
gauuaagugauacaccugc

SEQ ID NO: 1287306 - RNA, 19 nt, Artificial Sequence
  Description of Artificial Sequence: Synthetic oligonucleotide
  Sense strand starting at position 2968 of SEQ ID NO: 1241629
gaauaagauuggcaucaga

SEQ ID NO: 1287307 - RNA, 19 nt, Artificial Sequence
  Description of Artificial Sequence: Synthetic oligonucleotide
  Antisense strand to SEQ ID NO: 1287306
ucugaugccaaucuuauuc

SEQ ID NO: 1287308 - RNA, 19 nt, Artificial Sequence
  Description of Artificial Sequence: Synthetic oligonucleotide
  Sense strand starting at position 2994 of SEQ ID NO: 1241629
acagaagcauucuagauaa

SEQ ID NO: 1287309 - RNA, 19 nt, Artificial Sequence
  Description of Artificial Sequence: Synthetic oligonucleotide
  Antisense strand to SEQ ID NO: 1287308
uuaucuagaaugcuucugu

SEQ ID NO: 1287310 - RNA, 19 nt, Artificial Sequence
  Description of Artificial Sequence: Synthetic oligonucleotide
  Sense strand starting at position 3041 of SEQ ID NO: 1241629
cggaaacuaugaucccaga

SEQ ID NO: 1287311 - RNA, 19 nt, Artificial Sequence
  Description of Artificial Sequence: Synthetic oligonucleotide
  Antisense strand to SEQ ID NO: 1287310
ucugggaucauaguuuccg

SEQ ID NO: 1287312 - RNA, 19 nt, Artificial Sequence
  Description of Artificial Sequence: Synthetic oligonucleotide
  Sense strand starting at position 3133 of SEQ ID NO: 1241629
ggaauccacuuagaguagu

SEQ ID NO: 1287313 - RNA, 19 nt, Artificial Sequence
  Description of Artificial Sequence: Synthetic oligonucleotide
  Antisense strand to SEQ ID NO: 1287312
acuacucuaaguggauucc

SEQ ID NO: 1287314 - RNA, 19 nt, Artificial Sequence
  Description of Artificial Sequence: Synthetic oligonucleotide
  Sense strand starting at position 3331 of SEQ ID NO: 1241629
ccauuaaauguguguuugu

SEQ ID NO: 1287315 - RNA, 19 nt, Artificial Sequence
  Description of Artificial Sequence: Synthetic oligonucleotide
  Antisense strand to SEQ ID NO: 1287314
acaaacacacauuuaaugg

SEQ ID NO: 1287316 - RNA, 19 nt, Artificial Sequence
  Description of Artificial Sequence: Synthetic oligonucleotide
  Sense strand starting at position 3332 of SEQ ID NO: 1241629
cauuaaauguguguuuguu

SEQ ID NO: 1287317 - RNA, 19 nt, Artificial Sequence
  Description of Artificial Sequence: Synthetic oligonucleotide
  Antisense strand to SEQ ID NO: 1287316
aacaaacacacauuuaaug

SEQ ID NO: 1287318 - RNA, 19 nt, Artificial Sequence
  Description of Artificial Sequence: Synthetic oligonucleotide
  Sense strand starting at position 3336 of SEQ ID NO: 1241629
aaauguguguuuguuuguu

SEQ ID NO: 1287319 - RNA, 19 nt, Artificial Sequence
  Description of Artificial Sequence: Synthetic oligonucleotide
  Antisense strand to SEQ ID NO: 1287318
aacaaacaaacacacauuu

SEQ ID NO: 1287320 - RNA, 19 nt, Artificial Sequence
  Description of Artificial Sequence: Synthetic oligonucleotide
  Sense strand starting at position 3773 of SEQ ID NO: 1241629
uguaaucucuugcuaugua

SEQ ID NO: 1287321 - RNA, 19 nt, Artificial Sequence
  Description of Artificial Sequence: Synthetic oligonucleotide
  Antisense strand to SEQ ID NO: 1287320
uacauagcaagagauuaca

SEQ ID NO: 1287322 - RNA, 19 nt, Artificial Sequence
  Description of Artificial Sequence: Synthetic oligonucleotide
  Sense strand starting at position 3781 of SEQ ID NO: 1241629
cuugcuauguagcuuaaua

SEQ ID NO: 1287323 - RNA, 19 nt, Artificial Sequence
  Description of Artificial Sequence: Synthetic oligonucleotide
  Antisense strand to SEQ ID NO: 1287322
uauuaagcuacauagcaag

SEQ ID NO: 1287324 - RNA, 19 nt, Artificial Sequence
  Description of Artificial Sequence: Synthetic oligonucleotide
  Sense strand starting at position 3783 of SEQ ID NO: 1241629
ugcuauguagcuuaauaga

SEQ ID NO: 1287325 - RNA, 19 nt, Artificial Sequence
  Description of Artificial Sequence: Synthetic oligonucleotide
  Antisense strand to SEQ ID NO: 1287324
ucuauuaagcuacauagca

SEQ ID NO: 1287326 - RNA, 19 nt, Artificial Sequence
  Description of Artificial Sequence: Synthetic oligonucleotide
  Sense strand starting at position 3786 of SEQ ID NO: 1241629
uauguagcuuaauagaaag

SEQ ID NO: 1287327 - RNA, 19 nt, Artificial Sequence
  Description of Artificial Sequence: Synthetic oligonucleotide
  Antisense strand to SEQ ID NO: 1287326
cuuucuauuaagcuacaua

SEQ ID NO: 1287328 - RNA, 19 nt, Artificial Sequence
  Description of Artificial Sequence: Synthetic oligonucleotide
  Sense strand starting at position 3857 of SEQ ID NO: 1241629
gguuggagugugugaagaa

SEQ ID NO: 1287329 - RNA, 19 nt, Artificial Sequence
  Description of Artificial Sequence: Synthetic oligonucleotide
  Antisense strand to SEQ ID NO: 1287328
uucuucacacacuccaacc

SEQ ID NO: 1287330 - RNA, 19 nt, Artificial Sequence
  Description of Artificial Sequence: Synthetic oligonucleotide
  Sense strand starting at position 3930 of SEQ ID NO: 1241629
ucagauaauugugaacauu

SEQ ID NO: 1287331 - RNA, 19 nt, Artificial Sequence
  Description of Artificial Sequence: Synthetic oligonucleotide
  Antisense strand to SEQ ID NO: 1287330
aauguucacaauuaucuga

SEQ ID NO: 1287332 - RNA, 19 nt, Artificial Sequence
  Description of Artificial Sequence: Synthetic oligonucleotide
  Sense strand starting at position 202 of SEQ ID NO: 1241630
ggcucaugcagguaaucuu

SEQ ID NO: 1287333 - RNA, 19 nt, Artificial Sequence
  Description of Artificial Sequence: Synthetic oligonucleotide
  Antisense strand to SEQ ID NO: 1287332
aagauuaccugcaugagcc

SEQ ID NO: 1287334 - RNA, 19 nt, Artificial Sequence
  Description of Artificial Sequence: Synthetic oligonucleotide
  Sense strand starting at position 508 of SEQ ID NO: 1241630
agaggagcaucccaaauuu

SEQ ID NO: 1287335 - RNA, 19 nt, Artificial Sequence
  Description of Artificial Sequence: Synthetic oligonucleotide
  Antisense strand to SEQ ID NO: 1287334
aaauuugggaugcuccucu

SEQ ID NO: 1287336 - RNA, 19 nt, Artificial Sequence
  Description of Artificial Sequence: Synthetic oligonucleotide
  Sense strand starting at position 668 of SEQ ID NO: 1241630
gggaaugaauaaggguuua

SEQ ID NO: 1287337 - RNA, 19 nt, Artificial Sequence
  Description of Artificial Sequence: Synthetic oligonucleotide
  Antisense strand to SEQ ID NO: 1287336
uaaacccuuauucauuccc

SEQ ID NO: 1287338 - RNA, 19 nt, Artificial Sequence
  Description of Artificial Sequence: Synthetic oligonucleotide
  Sense strand starting at position 801 of SEQ ID NO: 1241630
augaguauucugcaauaau

SEQ ID NO: 1287339 - RNA, 19 nt, Artificial Sequence
  Description of Artificial Sequence: Synthetic oligonucleotide
  Antisense strand to SEQ ID NO: 1287338
auuauugcagaauacucau

SEQ ID NO: 1287340 - RNA, 19 nt, Artificial Sequence
  Description of Artificial Sequence: Synthetic oligonucleotide
  Sense strand starting at position 917 of SEQ ID NO: 1241630
cucccagaaugcugaacua

SEQ ID NO: 1287341 - RNA, 19 nt, Artificial Sequence
  Description of Artificial Sequence: Synthetic oligonucleotide
  Antisense strand to SEQ ID NO: 1287340
uaguucagcauucugggag

SEQ ID NO: 1287342 - RNA, 19 nt, Artificial Sequence
  Description of Artificial Sequence: Synthetic oligonucleotide
  Sense strand starting at position 927 of SEQ ID NO: 1241630
gcugaacuaugcccauagu

SEQ ID NO: 1287343 - RNA, 19 nt, Artificial Sequence
  Description of Artificial Sequence: Synthetic oligonucleotide
  Antisense strand to SEQ ID NO: 1287342
acuaugggcauaguucagc

SEQ ID NO: 1287344 - RNA, 19 nt, Artificial Sequence
  Description of Artificial Sequence: Synthetic oligonucleotide
  Sense strand starting at position 928 of SEQ ID NO: 1241630
cugaacuaugcccauaguu

SEQ ID NO: 1287345 - RNA, 19 nt, Artificial Sequence
  Description of Artificial Sequence: Synthetic oligonucleotide
  Antisense strand to SEQ ID NO: 1287344
aacuaugggcauaguucag

SEQ ID NO: 1287346 - RNA, 19 nt, Artificial Sequence
  Description of Artificial Sequence: Synthetic oligonucleotide
  Sense strand starting at position 1004 of SEQ ID NO: 1241630
gcauaaguccaucaagacu

SEQ ID NO: 1287347 - RNA, 19 nt, Artificial Sequence
  Description of Artificial Sequence: Synthetic oligonucleotide
  Antisense strand to SEQ ID NO: 1287346
agucuugauggacuuaugc

SEQ ID NO: 1287348 - RNA, 19 nt, Artificial Sequence
  Description of Artificial Sequence: Synthetic oligonucleotide
  Sense strand starting at position 1221 of SEQ ID NO: 1241630
ccaggagguuuccugccua

SEQ ID NO: 1287349 - RNA, 19 nt, Artificial Sequence
  Description of Artificial Sequence: Synthetic oligonucleotide
  Antisense strand to SEQ ID NO: 1287348
uaggcaggaaaccuccugg

SEQ ID NO: 1287350 - RNA, 19 nt, Artificial Sequence
  Description of Artificial Sequence: Synthetic oligonucleotide
  Sense strand starting at position 1225 of SEQ ID NO: 1241630
gagguuuccugccuaguag

SEQ ID NO: 1287351 - RNA, 19 nt, Artificial Sequence
  Description of Artificial Sequence: Synthetic oligonucleotide
  Antisense strand to SEQ ID NO: 1287350
cuacuaggcaggaaaccuc

SEQ ID NO: 1287352 - RNA, 19 nt, Artificial Sequence
  Description of Artificial Sequence: Synthetic oligonucleotide
  Sense strand starting at position 2558 of SEQ ID NO: 1241630
uccaguuggcccuagcuau

SEQ ID NO: 1287353 - RNA, 19 nt, Artificial Sequence
  Description of Artificial Sequence: Synthetic oligonucleotide
  Antisense strand to SEQ ID NO: 1287352
auagcuagggccaacugga

SEQ ID NO: 1287354 - RNA, 19 nt, Artificial Sequence
  Description of Artificial Sequence: Synthetic oligonucleotide
  Sense strand starting at position 2849 of SEQ ID NO: 1241630
agaucuagcgacugaagca

SEQ ID NO: 1287355 - RNA, 19 nt, Artificial Sequence
  Description of Artificial Sequence: Synthetic oligonucleotide
  Antisense strand to SEQ ID NO: 1287354
ugcuucagucgcuagaucu

SEQ ID NO: 1287356 - RNA, 19 nt, Artificial Sequence
  Description of Artificial Sequence: Synthetic oligonucleotide
  Sense strand starting at position 3051 of SEQ ID NO: 1241630
ccagauuccugccuucuga

SEQ ID NO: 1287357 - RNA, 19 nt, Artificial Sequence
  Description of Artificial Sequence: Synthetic oligonucleotide
  Antisense strand to SEQ ID NO: 1287356
ucagaaggcaggaaucugg

SEQ ID NO: 1287358 - RNA, 19 nt, Artificial Sequence
  Description of Artificial Sequence: Synthetic oligonucleotide
  Sense strand starting at position 3082 of SEQ ID NO: 1241630
ggagcuuccagggaaagcu

SEQ ID NO: 1287359 - RNA, 19 nt, Artificial Sequence
  Description of Artificial Sequence: Synthetic oligonucleotide
  Antisense strand to SEQ ID NO: 1287358
agcuuucccuggaagcucc

SEQ ID NO: 1287360 - RNA, 19 nt, Artificial Sequence
  Description of Artificial Sequence: Synthetic oligonucleotide
  Sense strand starting at position 3094 of SEQ ID NO: 1241630
gaaagcuaguuugugguga

SEQ ID NO: 1287361 - RNA, 19 nt, Artificial Sequence
  Description of Artificial Sequence: Synthetic oligonucleotide
  Antisense strand to SEQ ID NO: 1287360
ucaccacaaacuagcuuuc

SEQ ID NO: 1287362 - RNA, 19 nt, Artificial Sequence
  Description of Artificial Sequence: Synthetic oligonucleotide
  Sense strand starting at position 3096 of SEQ ID NO: 1241630
aagcuaguuuguggugaga

SEQ ID NO: 1287363 - RNA, 19 nt, Artificial Sequence
  Description of Artificial Sequence: Synthetic oligonucleotide
  Antisense strand to SEQ ID NO: 1287362
ucucaccacaaacuagcuu

SEQ ID NO: 1287364 - RNA, 19 nt, Artificial Sequence
  Description of Artificial Sequence: Synthetic oligonucleotide
  Sense strand starting at position 3098 of SEQ ID NO: 1241630
gcuaguuuguggugagaaa

SEQ ID NO: 1287365 - RNA, 19 nt, Artificial Sequence
  Description of Artificial Sequence: Synthetic oligonucleotide
  Antisense strand to SEQ ID NO: 1287364
uuucucaccacaaacuagc

SEQ ID NO: 1287366 - RNA, 19 nt, Artificial Sequence
  Description of Artificial Sequence: Synthetic oligonucleotide
  Sense strand starting at position 3099 of SEQ ID NO: 1241630
cuaguuuguggugagaaag

SEQ ID NO: 1287367 - RNA, 19 nt, Artificial Sequence
  Description of Artificial Sequence: Synthetic oligonucleotide
  Antisense strand to SEQ ID NO: 1287366
cuuucucaccacaaacuag

SEQ ID NO: 1287368 - RNA, 19 nt, Artificial Sequence
  Description of Artificial Sequence: Synthetic oligonucleotide
  Sense strand starting at position 3191 of SEQ ID NO: 1241630
ggguacugcucucugugua

SEQ ID NO: 1287369 - RNA, 19 nt, Artificial Sequence
  Description of Artificial Sequence: Synthetic oligonucleotide
  Antisense strand to SEQ ID NO: 1287368
uacacagagagcaguaccc

SEQ ID NO: 1287370 - RNA, 19 nt, Artificial Sequence
  Description of Artificial Sequence: Synthetic oligonucleotide
  Sense strand starting at position 3240 of SEQ ID NO: 1241630
ggagguaagucucuggauu

SEQ ID NO: 1287371 - RNA, 19 nt, Artificial Sequence
  Description of Artificial Sequence: Synthetic oligonucleotide
  Antisense strand to SEQ ID NO: 1287370
aauccagagacuuaccucc

SEQ ID NO: 1287372 - RNA, 19 nt, Artificial Sequence
  Description of Artificial Sequence: Synthetic oligonucleotide
  Sense strand starting at position 3242 of SEQ ID NO: 1241630
agguaagucucuggauuug

SEQ ID NO: 1287373 - RNA, 19 nt, Artificial Sequence
  Description of Artificial Sequence: Synthetic oligonucleotide
  Antisense strand to SEQ ID NO: 1287372
caaauccagagacuuaccu

SEQ ID NO: 1287374 - RNA, 19 nt, Artificial Sequence
  Description of Artificial Sequence: Synthetic oligonucleotide
  Sense strand starting at position 3271 of SEQ ID NO: 1241630
cccagaaucuuggaccaau

SEQ ID NO: 1287375 - RNA, 19 nt, Artificial Sequence
  Description of Artificial Sequence: Synthetic oligonucleotide
  Antisense strand to SEQ ID NO: 1287374
auugguccaagauucuggg

SEQ ID NO: 1287376 - RNA, 19 nt, Artificial Sequence
  Description of Artificial Sequence: Synthetic oligonucleotide
  Sense strand starting at position 3379 of SEQ ID NO: 1241630
cccggaauuauugauagcu

SEQ ID NO: 1287377 - RNA, 19 nt, Artificial Sequence
  Description of Artificial Sequence: Synthetic oligonucleotide
  Antisense strand to SEQ ID NO: 1287376
agcuaucaauaauuccggg

SEQ ID NO: 1287378 - RNA, 19 nt, Artificial Sequence
  Description of Artificial Sequence: Synthetic oligonucleotide
  Sense strand starting at position 3381 of SEQ ID NO: 1241630
cggaauuauugauagcuac

SEQ ID NO: 1287379 - RNA, 19 nt, Artificial Sequence
  Description of Artificial Sequence: Synthetic oligonucleotide
  Antisense strand to SEQ ID NO: 1287378
guagcuaucaauaauuccg

SEQ ID NO: 1287380 - RNA, 19 nt, Artificial Sequence
  Description of Artificial Sequence: Synthetic oligonucleotide
  Sense strand starting at position 3487 of SEQ ID NO: 1241630
gcaggaauaucacaguccu

SEQ ID NO: 1287381 - RNA, 19 nt, Artificial Sequence
  Description of Artificial Sequence: Synthetic oligonucleotide
  Antisense strand to SEQ ID NO: 1287380
aggacugugauauuccugc

SEQ ID NO: 1287382 - RNA, 19 nt, Artificial Sequence
  Description of Artificial Sequence: Synthetic oligonucleotide
  Sense strand starting at position 3611 of SEQ ID NO: 1241630
aguuccauuugucagacau

SEQ ID NO: 1287383 - RNA, 19 nt, Artificial Sequence
  Description of Artificial Sequence: Synthetic oligonucleotide
  Antisense strand to SEQ ID NO: 1287382
augucugacaaauggaacu

SEQ ID NO: 1287384 - RNA, 19 nt, Artificial Sequence
  Description of Artificial Sequence: Synthetic oligonucleotide
  Sense strand starting at position 3613 of SEQ ID NO: 1241630
uuccauuugucagacaucu

SEQ ID NO: 1287385 - RNA, 19 nt, Artificial Sequence
  Description of Artificial Sequence: Synthetic oligonucleotide
  Antisense strand to SEQ ID NO: 1287384
agaugucugacaaauggaa

SEQ ID NO: 1287386 - RNA, 19 nt, Artificial Sequence
  Description of Artificial Sequence: Synthetic oligonucleotide
  Sense strand starting at position 3622 of SEQ ID NO: 1241630
ucagacaucucauugagca

SEQ ID NO: 1287387 - RNA, 19 nt, Artificial Sequence
  Description of Artificial Sequence: Synthetic oligonucleotide
  Antisense strand to SEQ ID NO: 1287386
ugcucaaugagaugucuga

SEQ ID NO: 1287388 - RNA, 19 nt, Artificial Sequence
  Description of Artificial Sequence: Synthetic oligonucleotide
  Sense strand starting at position 3634 of SEQ ID NO: 1241630
uugagcauauucugugauu

SEQ ID NO: 1287389 - RNA, 19 nt, Artificial Sequence
  Description of Artificial Sequence: Synthetic oligonucleotide
  Antisense strand to SEQ ID NO: 1287388
aaucacagaauaugcucaa

SEQ ID NO: 1287390 - RNA, 19 nt, Artificial Sequence
  Description of Artificial Sequence: Synthetic oligonucleotide
  Sense strand starting at position 3635 of SEQ ID NO: 1241630
ugagcauauucugugauuc

SEQ ID NO: 1287391 - RNA, 19 nt, Artificial Sequence
  Description of Artificial Sequence: Synthetic oligonucleotide
  Antisense strand to SEQ ID NO: 1287390
gaaucacagaauaugcuca

SEQ ID NO: 1287392 - RNA, 19 nt, Artificial Sequence
  Description of Artificial Sequence: Synthetic oligonucleotide
  Sense strand starting at position 3636 of SEQ ID NO: 1241630
gagcauauucugugauucc

SEQ ID NO: 1287393 - RNA, 19 nt, Artificial Sequence
  Description of Artificial Sequence: Synthetic oligonucleotide
  Antisense strand to SEQ ID NO: 1287392
ggaaucacagaauaugcuc

SEQ ID NO: 1287394 - RNA, 19 nt, Artificial Sequence
  Description of Artificial Sequence: Synthetic oligonucleotide
  Sense strand starting at position 3725 of SEQ ID NO: 1241630
ugaaucagcucuugcaagu

SEQ ID NO: 1287395 - RNA, 19 nt, Artificial Sequence
  Description of Artificial Sequence: Synthetic oligonucleotide
  Antisense strand to SEQ ID NO: 1287394
acuugcaagagcugauuca

SEQ ID NO: 1287396 - RNA, 19 nt, Artificial Sequence
  Description of Artificial Sequence: Synthetic oligonucleotide
  Sense strand starting at position 3820 of SEQ ID NO: 1241630
ucagcaugcagagaauagu

SEQ ID NO: 1287397 - RNA, 19 nt, Artificial Sequence
  Description of Artificial Sequence: Synthetic oligonucleotide
  Antisense strand to SEQ ID NO: 1287396
acuauucucugcaugcuga

SEQ ID NO: 1287398 - RNA, 19 nt, Artificial Sequence
  Description of Artificial Sequence: Synthetic oligonucleotide
  Sense strand starting at position 3899 of SEQ ID NO: 1241630
gagugcaagugggauguau

SEQ ID NO: 1287399 - RNA, 19 nt, Artificial Sequence
  Description of Artificial Sequence: Synthetic oligonucleotide
  Antisense strand to SEQ ID NO: 1287398
auacaucccacuugcacuc

SEQ ID NO: 1287400 - RNA, 19 nt, Artificial Sequence
  Description of Artificial Sequence: Synthetic oligonucleotide
  Sense strand starting at position 3919 of SEQ ID NO: 1241630
gagggaaggcugugaccua

SEQ ID NO: 1287401 - RNA, 19 nt, Artificial Sequence
  Description of Artificial Sequence: Synthetic oligonucleotide
  Antisense strand to SEQ ID NO: 1287400
uaggucacagccuucccuc

SEQ ID NO: 1287402 - RNA, 19 nt, Artificial Sequence
  Description of Artificial Sequence: Synthetic oligonucleotide
  Sense strand starting at position 3926 of SEQ ID NO: 1241630
ggcugugaccuaggaugaa

SEQ ID NO: 1287403 - RNA, 19 nt, Artificial Sequence
  Description of Artificial Sequence: Synthetic oligonucleotide
  Antisense strand to SEQ ID NO: 1287402
uucauccuaggucacagcc

SEQ ID NO: 1287404 - RNA, 19 nt, Artificial Sequence
  Description of Artificial Sequence: Synthetic oligonucleotide
  Sense strand starting at position 3969 of SEQ ID NO: 1241630
cagugagcucugugcagga

SEQ ID NO: 1287405 - RNA, 19 nt, Artificial Sequence
  Description of Artificial Sequence: Synthetic oligonucleotide
  Antisense strand to SEQ ID NO: 1287404
uccugcacagagcucacug

SEQ ID NO: 1287406 - RNA, 19 nt, Artificial Sequence
  Description of Artificial Sequence: Synthetic oligonucleotide
  Sense strand starting at position 129 of SEQ ID NO: 1241631
cugguaaugucuccuggua

SEQ ID NO: 1287407 - RNA, 19 nt, Artificial Sequence
  Description of Artificial Sequence: Synthetic oligonucleotide
  Antisense strand to SEQ ID NO: 1287406
uaccaggagacauuaccag

SEQ ID NO: 1287408 - RNA, 19 nt, Artificial Sequence
  Description of Artificial Sequence: Synthetic oligonucleotide
  Sense strand starting at position 142 of SEQ ID NO: 1241631
cugguauauaugggcaaga

SEQ ID NO: 1287409 - RNA, 19 nt, Artificial Sequence
  Description of Artificial Sequence: Synthetic oligonucleotide
  Antisense strand to SEQ ID NO: 1287408
ucuugcccauauauaccag

SEQ ID NO: 1287410 - RNA, 19 nt, Artificial Sequence
  Description of Artificial Sequence: Synthetic oligonucleotide
  Sense strand starting at position 144 of SEQ ID NO: 1241631
gguauauaugggcaagagu

SEQ ID NO: 1287411 - RNA, 19 nt, Artificial Sequence
  Description of Artificial Sequence: Synthetic oligonucleotide
  Antisense strand to SEQ ID NO: 1287410
acucuugcccauauauacc

SEQ ID NO: 1287412 - RNA, 19 nt, Artificial Sequence
  Description of Artificial Sequence: Synthetic oligonucleotide
  Sense strand starting at position 306 of SEQ ID NO: 1241631
acuagauaauggcaaauau

SEQ ID NO: 1287413 - RNA, 19 nt, Artificial Sequence
  Description of Artificial Sequence: Synthetic oligonucleotide
  Antisense strand to SEQ ID NO: 1287412
auauuugccauuaucuagu

SEQ ID NO: 1287414 - RNA, 19 nt, Artificial Sequence
  Description of Artificial Sequence: Synthetic oligonucleotide
  Sense strand starting at position 333 of SEQ ID NO: 1241631
gugguugcaucauuuauac

SEQ ID NO: 1287415 - RNA, 19 nt, Artificial Sequence
  Description of Artificial Sequence: Synthetic oligonucleotide
  Antisense strand to SEQ ID NO: 1287414
guauaaaugaugcaaccac

SEQ ID NO: 1287416 - RNA, 19 nt, Artificial Sequence
  Description of Artificial Sequence: Synthetic oligonucleotide
  Sense strand starting at position 431 of SEQ ID NO: 1241631
gguagccaugauugggauu

SEQ ID NO: 1287417 - RNA, 19 nt, Artificial Sequence
  Description of Artificial Sequence: Synthetic oligonucleotide
  Antisense strand to SEQ ID NO: 1287416
aaucccaaucauggcuacc

SEQ ID NO: 1287418 - RNA, 19 nt, Artificial Sequence
  Description of Artificial Sequence: Synthetic oligonucleotide
  Sense strand starting at position 944 of SEQ ID NO: 1241631
uuaaauaauguguggaaga

SEQ ID NO: 1287419 - RNA, 19 nt, Artificial Sequence
  Description of Artificial Sequence: Synthetic oligonucleotide
  Antisense strand to SEQ ID NO: 1287418
ucuuccacacauuauuuaa

SEQ ID NO: 1287420 - RNA, 19 nt, Artificial Sequence
  Description of Artificial Sequence: Synthetic oligonucleotide
  Sense strand starting at position 998 of SEQ ID NO: 1241631
gaacacuucugcuuaguga

SEQ ID NO: 1287421 - RNA, 19 nt, Artificial Sequence
  Description of Artificial Sequence: Synthetic oligonucleotide
  Antisense strand to SEQ ID NO: 1287420
ucacuaagcagaaguguuc

SEQ ID NO: 1287422 - RNA, 19 nt, Artificial Sequence
  Description of Artificial Sequence: Synthetic oligonucleotide
  Sense strand starting at position 1053 of SEQ ID NO: 1241631
agugaaacccacuaguugu

SEQ ID NO: 1287423 - RNA, 19 nt, Artificial Sequence
  Description of Artificial Sequence: Synthetic oligonucleotide
  Antisense strand to SEQ ID NO: 1287422
acaacuaguggguuucacu

SEQ ID NO: 1287424 - RNA, 19 nt, Artificial Sequence
  Description of Artificial Sequence: Synthetic oligonucleotide
  Sense strand starting at position 1097 of SEQ ID NO: 1241631
ggugguaguauuuagcuuu

SEQ ID NO: 1287425 - RNA, 19 nt, Artificial Sequence
  Description of Artificial Sequence: Synthetic oligonucleotide
  Antisense strand to SEQ ID NO: 1287424
aaagcuaaauacuaccacc

SEQ ID NO: 1287426 - RNA, 19 nt, Artificial Sequence
  Description of Artificial Sequence: Synthetic oligonucleotide
  Sense strand starting at position 1148 of SEQ ID NO: 1241631
guaagaauuuaagacuaag

SEQ ID NO: 1287427 - RNA, 19 nt, Artificial Sequence
  Description of Artificial Sequence: Synthetic oligonucleotide
  Antisense strand to SEQ ID NO: 1287426
cuuagucuuaaauucuuac

SEQ ID NO: 1287428 - RNA, 19 nt, Artificial Sequence
  Description of Artificial Sequence: Synthetic oligonucleotide
  Sense strand starting at position 1826 of SEQ ID NO: 1241631
guaaaucagucucugugaa

SEQ ID NO: 1287429 - RNA, 19 nt, Artificial Sequence
  Description of Artificial Sequence: Synthetic oligonucleotide
  Antisense strand to SEQ ID NO: 1287428
uucacagagacugauuuac

SEQ ID NO: 1287430 - RNA, 19 nt, Artificial Sequence
  Description of Artificial Sequence: Synthetic oligonucleotide
  Sense strand starting at position 1827 of SEQ ID NO: 1241631
uaaaucagucucugugaag

SEQ ID NO: 1287431 - RNA, 19 nt, Artificial Sequence
  Description of Artificial Sequence: Synthetic oligonucleotide
  Antisense strand to SEQ ID NO: 1287430
cuucacagagacugauuua

SEQ ID NO: 1287432 - RNA, 19 nt, Artificial Sequence
  Description of Artificial Sequence: Synthetic oligonucleotide
  Sense strand starting at position 1854 of SEQ ID NO: 1241631
gauguuccacagugagagu

SEQ ID NO: 1287433 - RNA, 19 nt, Artificial Sequence
  Description of Artificial Sequence: Synthetic oligonucleotide
  Antisense strand to SEQ ID NO: 1287432
acucucacuguggaacauc

SEQ ID NO: 1287434 - RNA, 19 nt, Artificial Sequence
  Description of Artificial Sequence: Synthetic oligonucleotide
  Sense strand starting at position 1897 of SEQ ID NO: 1241631
uccucaggcguagaaguua

SEQ ID NO: 1287435 - RNA, 19 nt, Artificial Sequence
  Description of Artificial Sequence: Synthetic oligonucleotide
  Antisense strand to SEQ ID NO: 1287434
uaacuucuacgccugagga

SEQ ID NO: 1287436 - RNA, 19 nt, Artificial Sequence
  Description of Artificial Sequence: Synthetic oligonucleotide
  Sense strand starting at position 2009 of SEQ ID NO: 1241631
guucccaagcuguaagaga

SEQ ID NO: 1287437 - RNA, 19 nt, Artificial Sequence
  Description of Artificial Sequence: Synthetic oligonucleotide
  Antisense strand to SEQ ID NO: 1287436
ucucuuacagcuugggaac

SEQ ID NO: 1287438 - RNA, 19 nt, Artificial Sequence
  Description of Artificial Sequence: Synthetic oligonucleotide
  Sense strand starting at position 2090 of SEQ ID NO: 1241631
cugaaacguguacauaagu

SEQ ID NO: 1287439 - RNA, 19 nt, Artificial Sequence
  Description of Artificial Sequence: Synthetic oligonucleotide
  Antisense strand to SEQ ID NO: 1287438
acuuauguacacguuucag

SEQ ID NO: 1287440 - RNA, 19 nt, Artificial Sequence
  Description of Artificial Sequence: Synthetic oligonucleotide
  Sense strand starting at position 2113 of SEQ ID NO: 1241631
gcaggaauuucucagcacu

SEQ ID NO: 1287441 - RNA, 19 nt, Artificial Sequence
  Description of Artificial Sequence: Synthetic oligonucleotide
  Antisense strand to SEQ ID NO: 1287440
agugcugagaaauuccugc

SEQ ID NO: 1287442 - RNA, 19 nt, Artificial Sequence
  Description of Artificial Sequence: Synthetic oligonucleotide
  Sense strand starting at position 2139 of SEQ ID NO: 1241631
ugguauaugacaugucaga

SEQ ID NO: 1287443 - RNA, 19 nt, Artificial Sequence
  Description of Artificial Sequence: Synthetic oligonucleotide
  Antisense strand to SEQ ID NO: 1287442
ucugacaugucauauacca

SEQ ID NO: 1287444 - RNA, 19 nt, Artificial Sequence
  Description of Artificial Sequence: Synthetic oligonucleotide
  Sense strand starting at position 2150 of SEQ ID NO: 1241631
augucagagucauucucau

SEQ ID NO: 1287445 - RNA, 19 nt, Artificial Sequence
  Description of Artificial Sequence: Synthetic oligonucleotide
  Antisense strand to SEQ ID NO: 1287444
augagaaugacucugacau

SEQ ID NO: 1287446 - RNA, 19 nt, Artificial Sequence
  Description of Artificial Sequence: Synthetic oligonucleotide
  Sense strand starting at position 2214 of SEQ ID NO: 1241631
guaggaaugacuugaucca

SEQ ID NO: 1287447 - RNA, 19 nt, Artificial Sequence
  Description of Artificial Sequence: Synthetic oligonucleotide
  Antisense strand to SEQ ID NO: 1287446
uggaucaagucauuccuac

SEQ ID NO: 1287448 - RNA, 19 nt, Artificial Sequence
  Description of Artificial Sequence: Synthetic oligonucleotide
  Sense strand starting at position 2267 of SEQ ID NO: 1241631
uggauaucauuucggauca

SEQ ID NO: 1287449 - RNA, 19 nt, Artificial Sequence
  Description of Artificial Sequence: Synthetic oligonucleotide
  Antisense strand to SEQ ID NO: 1287448
ugauccgaaaugauaucca

SEQ ID NO: 1287450 - RNA, 19 nt, Artificial Sequence
  Description of Artificial Sequence: Synthetic oligonucleotide
  Sense strand starting at position 2268 of SEQ ID NO: 1241631
ggauaucauuucggaucau

SEQ ID NO: 1287451 - RNA, 19 nt, Artificial Sequence
  Description of Artificial Sequence: Synthetic oligonucleotide
  Antisense strand to SEQ ID NO: 1287450
augauccgaaaugauaucc

SEQ ID NO: 1287452 - RNA, 19 nt, Artificial Sequence
  Description of Artificial Sequence: Synthetic oligonucleotide
  Sense strand starting at position 2269 of SEQ ID NO: 1241631
gauaucauuucggaucauu

SEQ ID NO: 1287453 - RNA, 19 nt, Artificial Sequence
  Description of Artificial Sequence: Synthetic oligonucleotide
  Antisense strand to SEQ ID NO: 1287452
aaugauccgaaaugauauc

SEQ ID NO: 1287454 - RNA, 19 nt, Artificial Sequence
  Description of Artificial Sequence: Synthetic oligonucleotide
  Sense strand starting at position 2433 of SEQ ID NO: 1241631
cugauuggaccaggguuaa

SEQ ID NO: 1287455 - RNA, 19 nt, Artificial Sequence
  Description of Artificial Sequence: Synthetic oligonucleotide
  Antisense strand to SEQ ID NO: 1287454
uuaacccugguccaaucag

SEQ ID NO: 1287456 - RNA, 19 nt, Artificial Sequence
  Description of Artificial Sequence: Synthetic oligonucleotide
  Sense strand starting at position 2445 of SEQ ID NO: 1241631
ggguuaaucgaaugaccca

SEQ ID NO: 1287457 - RNA, 19 nt, Artificial Sequence
  Description of Artificial Sequence: Synthetic oligonucleotide
  Antisense strand to SEQ ID NO: 1287456
ugggucauucgauuaaccc

SEQ ID NO: 1287458 - RNA, 19 nt, Artificial Sequence
  Description of Artificial Sequence: Synthetic oligonucleotide
  Sense strand starting at position 2466 of SEQ ID NO: 1241631
acaaaugacccucgcugaa

SEQ ID NO: 1287459 - RNA, 19 nt, Artificial Sequence
  Description of Artificial Sequence: Synthetic oligonucleotide
  Antisense strand to SEQ ID NO: 1287458
uucagcgagggucauuugu

SEQ ID NO: 1287460 - RNA, 19 nt, Artificial Sequence
  Description of Artificial Sequence: Synthetic oligonucleotide
  Sense strand starting at position 2494 of SEQ ID NO: 1241631
uucuaucuccuaggagguu

SEQ ID NO: 1287461 - RNA, 19 nt, Artificial Sequence
  Description of Artificial Sequence: Synthetic oligonucleotide
  Antisense strand to SEQ ID NO: 1287460
aaccuccuaggagauagaa

SEQ ID NO: 1287462 - RNA, 19 nt, Artificial Sequence
  Description of Artificial Sequence: Synthetic oligonucleotide
  Sense strand starting at position 2576 of SEQ ID NO: 1241631
ggagcucugaaaugaccau

SEQ ID NO: 1287463 - RNA, 19 nt, Artificial Sequence
  Description of Artificial Sequence: Synthetic oligonucleotide
  Antisense strand to SEQ ID NO: 1287462
auggucauuucagagcucc

SEQ ID NO: 1287464 - RNA, 19 nt, Artificial Sequence
  Description of Artificial Sequence: Synthetic oligonucleotide
  Sense strand starting at position 2597 of SEQ ID NO: 1241631
ucagcucuguggccugaau

SEQ ID NO: 1287465 - RNA, 19 nt, Artificial Sequence
  Description of Artificial Sequence: Synthetic oligonucleotide
  Antisense strand to SEQ ID NO: 1287464
auucaggccacagagcuga

SEQ ID NO: 1287466 - RNA, 19 nt, Artificial Sequence
  Description of Artificial Sequence: Synthetic oligonucleotide
  Sense strand starting at position 2599 of SEQ ID NO: 1241631
agcucuguggccugaauaa

SEQ ID NO: 1287467 - RNA, 19 nt, Artificial Sequence
  Description of Artificial Sequence: Synthetic oligonucleotide
  Antisense strand to SEQ ID NO: 1287466
uuauucaggccacagagcu

SEQ ID NO: 1287468 - RNA, 19 nt, Artificial Sequence
  Description of Artificial Sequence: Synthetic oligonucleotide
  Sense strand starting at position 2606 of SEQ ID NO: 1241631
uggccugaauaaucaggaa

SEQ ID NO: 1287469 - RNA, 19 nt, Artificial Sequence
  Description of Artificial Sequence: Synthetic oligonucleotide
  Antisense strand to SEQ ID NO: 1287468
uuccugauuauucaggcca

SEQ ID NO: 1287470 - RNA, 19 nt, Artificial Sequence
  Description of Artificial Sequence: Synthetic oligonucleotide
  Sense strand starting at position 2609 of SEQ ID NO: 1241631
ccugaauaaucaggaaauc

SEQ ID NO: 1287471 - RNA, 19 nt, Artificial Sequence
  Description of Artificial Sequence: Synthetic oligonucleotide
  Antisense strand to SEQ ID NO: 1287470
gauuuccugauuauucagg

SEQ ID NO: 1287472 - RNA, 19 nt, Artificial Sequence
  Description of Artificial Sequence: Synthetic oligonucleotide
  Sense strand starting at position 2620 of SEQ ID NO: 1241631
aggaaauccugucuauaga

SEQ ID NO: 1287473 - RNA, 19 nt, Artificial Sequence
  Description of Artificial Sequence: Synthetic oligonucleotide
  Antisense strand to SEQ ID NO: 1287472
ucuauagacaggauuuccu

SEQ ID NO: 1287474 - RNA, 19 nt, Artificial Sequence
  Description of Artificial Sequence: Synthetic oligonucleotide
  Sense strand starting at position 2631 of SEQ ID NO: 1241631
ucuauagaguugccucaua

SEQ ID NO: 1287475 - RNA, 19 nt, Artificial Sequence
  Description of Artificial Sequence: Synthetic oligonucleotide
  Antisense strand to SEQ ID NO: 1287474
uaugaggcaacucuauaga

SEQ ID NO: 1287476 - RNA, 19 nt, Artificial Sequence
  Description of Artificial Sequence: Synthetic oligonucleotide
  Sense strand starting at position 2673 of SEQ ID NO: 1241631
ggaugauaguauccagucu

SEQ ID NO: 1287477 - RNA, 19 nt, Artificial Sequence
  Description of Artificial Sequence: Synthetic oligonucleotide
  Antisense strand to SEQ ID NO: 1287476
agacuggauacuaucaucc

SEQ ID NO: 1287478 - RNA, 19 nt, Artificial Sequence
  Description of Artificial Sequence: Synthetic oligonucleotide
  Sense strand starting at position 2684 of SEQ ID NO: 1241631
uccagucuagccgggauua

SEQ ID NO: 1287479 - RNA, 19 nt, Artificial Sequence
  Description of Artificial Sequence: Synthetic oligonucleotide
  Antisense strand to SEQ ID NO: 1287478
uaaucccggcuagacugga

SEQ ID NO: 1287480 - RNA, 19 nt, Artificial Sequence
  Description of Artificial Sequence: Synthetic oligonucleotide
  Sense strand starting at position 2686 of SEQ ID NO: 1241631
cagucuagccgggauuaca

SEQ ID NO: 1287481 - RNA, 19 nt, Artificial Sequence
  Description of Artificial Sequence: Synthetic oligonucleotide
  Antisense strand to SEQ ID NO: 1287480
uguaaucccggcuagacug

SEQ ID NO: 1287482 - RNA, 19 nt, Artificial Sequence
  Description of Artificial Sequence: Synthetic oligonucleotide
  Sense strand starting at position 3540 of SEQ ID NO: 1241631
uuugauuuaucuuaccagu

SEQ ID NO: 1287483 - RNA, 19 nt, Artificial Sequence
  Description of Artificial Sequence: Synthetic oligonucleotide
  Antisense strand to SEQ ID NO: 1287482
acugguaagauaaaucaaa

SEQ ID NO: 1287484 - RNA, 19 nt, Artificial Sequence
  Description of Artificial Sequence: Synthetic oligonucleotide
  Sense strand starting at position 3573 of SEQ ID NO: 1241631
gucuuucccuagguccaua

SEQ ID NO: 1287485 - RNA, 19 nt, Artificial Sequence
  Description of Artificial Sequence: Synthetic oligonucleotide
  Antisense strand to SEQ ID NO: 1287484
uauggaccuagggaaagac

SEQ ID NO: 1287486 - RNA, 19 nt, Artificial Sequence
  Description of Artificial Sequence: Synthetic oligonucleotide
  Sense strand starting at position 5 of SEQ ID NO: 1241632
augguuguacuagaagcua

SEQ ID NO: 1287487 - RNA, 19 nt, Artificial Sequence
  Description of Artificial Sequence: Synthetic oligonucleotide
  Antisense strand to SEQ ID NO: 1287486
uagcuucuaguacaaccau

SEQ ID NO: 1287488 - RNA, 19 nt, Artificial Sequence
  Description of Artificial Sequence: Synthetic oligonucleotide
  Sense strand starting at position 326 of SEQ ID NO: 1241632
aaagaaccguuagucuaaa

SEQ ID NO: 1287489 - RNA, 19 nt, Artificial Sequence
  Description of Artificial Sequence: Synthetic oligonucleotide
  Antisense strand to SEQ ID NO: 1287488
uuuagacuaacgguucuuu

SEQ ID NO: 1287490 - RNA, 19 nt, Artificial Sequence
  Description of Artificial Sequence: Synthetic oligonucleotide
  Sense strand starting at position 383 of SEQ ID NO: 1241632
ggcuaagucaauuguaaag

SEQ ID NO: 1287491 - RNA, 19 nt, Artificial Sequence
  Description of Artificial Sequence: Synthetic oligonucleotide
  Antisense strand to SEQ ID NO: 1287490
cuuuacaauugacuuagcc

SEQ ID NO: 1287492 - RNA, 19 nt, Artificial Sequence
  Description of Artificial Sequence: Synthetic oligonucleotide
  Sense strand starting at position 423 of SEQ ID NO: 1241632
aguacaaacucaggaauuu

SEQ ID NO: 1287493 - RNA, 19 nt, Artificial Sequence
  Description of Artificial Sequence: Synthetic oligonucleotide
  Antisense strand to SEQ ID NO: 1287492
aaauuccugaguuuguacu

SEQ ID NO: 1287494 - RNA, 19 nt, Artificial Sequence
  Description of Artificial Sequence: Synthetic oligonucleotide
  Sense strand starting at position 638 of SEQ ID NO: 1241632
augaccuuucuaugaugaa

SEQ ID NO: 1287495 - RNA, 19 nt, Artificial Sequence
  Description of Artificial Sequence: Synthetic oligonucleotide
  Antisense strand to SEQ ID NO: 1287494
uucaucauagaaaggucau

SEQ ID NO: 1287496 - RNA, 19 nt, Artificial Sequence
  Description of Artificial Sequence: Synthetic oligonucleotide
  Sense strand starting at position 672 of SEQ ID NO: 1241632
uuaucucuugacugugaga

SEQ ID NO: 1287497 - RNA, 19 nt, Artificial Sequence
  Description of Artificial Sequence: Synthetic oligonucleotide
  Antisense strand to SEQ ID NO: 1287496
ucucacagucaagagauaa

SEQ ID NO: 1287498 - RNA, 19 nt, Artificial Sequence
  Description of Artificial Sequence: Synthetic oligonucleotide
  Sense strand starting at position 674 of SEQ ID NO: 1241632
aucucuugacugugagaca

SEQ ID NO: 1287499 - RNA, 19 nt, Artificial Sequence
  Description of Artificial Sequence: Synthetic oligonucleotide
  Antisense strand to SEQ ID NO: 1287498
ugucucacagucaagagau

SEQ ID NO: 1287500 - RNA, 19 nt, Artificial Sequence
  Description of Artificial Sequence: Synthetic oligonucleotide
  Sense strand starting at position 736 of SEQ ID NO: 1241632
uguccuaaggcugauaauc

SEQ ID NO: 1287501 - RNA, 19 nt, Artificial Sequence
  Description of Artificial Sequence: Synthetic oligonucleotide
  Antisense strand to SEQ ID NO: 1287500
gauuaucagccuuaggaca

SEQ ID NO: 1287502 - RNA, 19 nt, Artificial Sequence
  Description of Artificial Sequence: Synthetic oligonucleotide
  Sense strand starting at position 746 of SEQ ID NO: 1241632
cugauaaucagacguguaa

SEQ ID NO: 1287503 - RNA, 19 nt, Artificial Sequence
  Description of Artificial Sequence: Synthetic oligonucleotide
  Antisense strand to SEQ ID NO: 1287502
uuacacgucugauuaucag

SEQ ID NO: 1287504 - RNA, 19 nt, Artificial Sequence
  Description of Artificial Sequence: Synthetic oligonucleotide
  Sense strand starting at position 748 of SEQ ID NO: 1241632
gauaaucagacguguaagg

SEQ ID NO: 1287505 - RNA, 19 nt, Artificial Sequence
  Description of Artificial Sequence: Synthetic oligonucleotide
  Antisense strand to SEQ ID NO: 1287504
ccuuacacgucugauuauc

SEQ ID NO: 1287506 - RNA, 19 nt, Artificial Sequence
  Description of Artificial Sequence: Synthetic oligonucleotide
  Sense strand starting at position 750 of SEQ ID NO: 1241632
uaaucagacguguaaggua

SEQ ID NO: 1287507 - RNA, 19 nt, Artificial Sequence
  Description of Artificial Sequence: Synthetic oligonucleotide
  Antisense strand to SEQ ID NO: 1287506
uaccuuacacgucugauua

SEQ ID NO: 1287508 - RNA, 19 nt, Artificial Sequence
  Description of Artificial Sequence: Synthetic oligonucleotide
  Sense strand starting at position 755 of SEQ ID NO: 1241632
agacguguaagguaauucu

SEQ ID NO: 1287509 - RNA, 19 nt, Artificial Sequence
  Description of Artificial Sequence: Synthetic oligonucleotide
  Antisense strand to SEQ ID NO: 1287508
agaauuaccuuacacgucu

SEQ ID NO: 1287510 - RNA, 19 nt, Artificial Sequence
  Description of Artificial Sequence: Synthetic oligonucleotide
  Sense strand starting at position 841 of SEQ ID NO: 1241632
agaggcugugggugaaaua

SEQ ID NO: 1287511 - RNA, 19 nt, Artificial Sequence
  Description of Artificial Sequence: Synthetic oligonucleotide
  Antisense strand to SEQ ID NO: 1287510
uauuucacccacagccucu

SEQ ID NO: 1287512 - RNA, 19 nt, Artificial Sequence
  Description of Artificial Sequence: Synthetic oligonucleotide
  Sense strand starting at position 842 of SEQ ID NO: 1241632
gaggcugugggugaaauau

SEQ ID NO: 1287513 - RNA, 19 nt, Artificial Sequence
  Description of Artificial Sequence: Synthetic oligonucleotide
  Antisense strand to SEQ ID NO: 1287512
auauuucacccacagccuc

SEQ ID NO: 1287514 - RNA, 19 nt, Artificial Sequence
  Description of Artificial Sequence: Synthetic oligonucleotide
  Sense strand starting at position 851 of SEQ ID NO: 1241632
ggugaaauaucacuaaugc

SEQ ID NO: 1287515 - RNA, 19 nt, Artificial Sequence
  Description of Artificial Sequence: Synthetic oligonucleotide
  Antisense strand to SEQ ID NO: 1287514
gcauuagugauauuucacc

SEQ ID NO: 1287516 - RNA, 19 nt, Artificial Sequence
  Description of Artificial Sequence: Synthetic oligonucleotide
  Sense strand starting at position 946 of SEQ ID NO: 1241632
aaggaaugauagcugcaua

SEQ ID NO: 1287517 - RNA, 19 nt, Artificial Sequence
  Description of Artificial Sequence: Synthetic oligonucleotide
  Antisense strand to SEQ ID NO: 1287516
uaugcagcuaucauuccuu

SEQ ID NO: 1287518 - RNA, 19 nt, Artificial Sequence
  Description of Artificial Sequence: Synthetic oligonucleotide
  Sense strand starting at position 951 of SEQ ID NO: 1241632
augauagcugcauaacuua

SEQ ID NO: 1287519 - RNA, 19 nt, Artificial Sequence
  Description of Artificial Sequence: Synthetic oligonucleotide
  Antisense strand to SEQ ID NO: 1287518
uaaguuaugcagcuaucau

SEQ ID NO: 1287520 - RNA, 19 nt, Artificial Sequence
  Description of Artificial Sequence: Synthetic oligonucleotide
  Sense strand starting at position 1125 of SEQ ID NO: 1241632
ucuaguagucuauauucua

SEQ ID NO: 1287521 - RNA, 19 nt, Artificial Sequence
  Description of Artificial Sequence: Synthetic oligonucleotide
  Antisense strand to SEQ ID NO: 1287520
uagaauauagacuacuaga

SEQ ID NO: 1287522 - RNA, 19 nt, Artificial Sequence
  Description of Artificial Sequence: Synthetic oligonucleotide
  Sense strand starting at position 1311 of SEQ ID NO: 1241632
gaacguacuugacuccaca

SEQ ID NO: 1287523 - RNA, 19 nt, Artificial Sequence
  Description of Artificial Sequence: Synthetic oligonucleotide
  Antisense strand to SEQ ID NO: 1287522
uguggagucaaguacguuc

SEQ ID NO: 1287524 - RNA, 19 nt, Artificial Sequence
  Description of Artificial Sequence: Synthetic oligonucleotide
  Sense strand starting at position 1371 of SEQ ID NO: 1241632
auucgucagcauuaaacuu

SEQ ID NO: 1287525 - RNA, 19 nt, Artificial Sequence
  Description of Artificial Sequence: Synthetic oligonucleotide
  Antisense strand to SEQ ID NO: 1287524
aaguuuaaugcugacgaau

SEQ ID NO: 1287526 - RNA, 19 nt, Artificial Sequence
  Description of Artificial Sequence: Synthetic oligonucleotide
  Sense strand starting at position 1609 of SEQ ID NO: 1241632
cuuguugaugcggaugaca

SEQ ID NO: 1287527 - RNA, 19 nt, Artificial Sequence
  Description of Artificial Sequence: Synthetic oligonucleotide
  Antisense strand to SEQ ID NO: 1287526
ugucauccgcaucaacaag

SEQ ID NO: 1287528 - RNA, 19 nt, Artificial Sequence
  Description of Artificial Sequence: Synthetic oligonucleotide
  Sense strand starting at position 1684 of SEQ ID NO: 1241632
cauguauuuguuggcacaa

SEQ ID NO: 1287529 - RNA, 19 nt, Artificial Sequence
  Description of Artificial Sequence: Synthetic oligonucleotide
  Antisense strand to SEQ ID NO: 1287528
uugugccaacaaauacaug

SEQ ID NO: 1287530 - RNA, 19 nt, Artificial Sequence
  Description of Artificial Sequence: Synthetic oligonucleotide
  Sense strand starting at position 2687 of SEQ ID NO: 1241632
ggccaccuucccuggauaa

SEQ ID NO: 1287531 - RNA, 19 nt, Artificial Sequence
  Description of Artificial Sequence: Synthetic oligonucleotide
  Antisense strand to SEQ ID NO: 1287530
uuauccagggaagguggcc

SEQ ID NO: 1287532 - RNA, 19 nt, Artificial Sequence
  Description of Artificial Sequence: Synthetic oligonucleotide
  Sense strand starting at position 2688 of SEQ ID NO: 1241632
gccaccuucccuggauaaa

SEQ ID NO: 1287533 - RNA, 19 nt, Artificial Sequence
  Description of Artificial Sequence: Synthetic oligonucleotide
  Antisense strand to SEQ ID NO: 1287532
uuuauccagggaagguggc

SEQ ID NO: 1287534 - RNA, 19 nt, Artificial Sequence
  Description of Artificial Sequence: Synthetic oligonucleotide
  Sense strand starting at position 2776 of SEQ ID NO: 1241632
aagagaagauaucuguugu

SEQ ID NO: 1287535 - RNA, 19 nt, Artificial Sequence
  Description of Artificial Sequence: Synthetic oligonucleotide
  Antisense strand to SEQ ID NO: 1287534
acaacagauaucuucucuu

SEQ ID NO: 1287536 - RNA, 19 nt, Artificial Sequence
  Description of Artificial Sequence: Synthetic oligonucleotide
  Sense strand starting at position 2777 of SEQ ID NO: 1241632
agagaagauaucuguugua

SEQ ID NO: 1287537 - RNA, 19 nt, Artificial Sequence
  Description of Artificial Sequence: Synthetic oligonucleotide
  Antisense strand to SEQ ID NO: 1287536
uacaacagauaucuucucu

SEQ ID NO: 1287538 - RNA, 19 nt, Artificial Sequence
  Description of Artificial Sequence: Synthetic oligonucleotide
  Sense strand starting at position 3057 of SEQ ID NO: 1241632
cagggaucagaguguagga

SEQ ID NO: 1287539 - RNA, 19 nt, Artificial Sequence
  Description of Artificial Sequence: Synthetic oligonucleotide
  Antisense strand to SEQ ID NO: 1287538
uccuacacucugaucccug

SEQ ID NO: 1287540 - RNA, 19 nt, Artificial Sequence
  Description of Artificial Sequence: Synthetic oligonucleotide
  Sense strand starting at position 3201 of SEQ ID NO: 1241632
augugaauauauucuguca

SEQ ID NO: 1287541 - RNA, 19 nt, Artificial Sequence
  Description of Artificial Sequence: Synthetic oligonucleotide
  Antisense strand to SEQ ID NO: 1287540
ugacagaauauauucacau

SEQ ID NO: 1287542 - RNA, 19 nt, Artificial Sequence
  Description of Artificial Sequence: Synthetic oligonucleotide
  Sense strand starting at position 3255 of SEQ ID NO: 1241632
cccuuaaagugaguggauu

SEQ ID NO: 1287543 - RNA, 19 nt, Artificial Sequence
  Description of Artificial Sequence: Synthetic oligonucleotide
  Antisense strand to SEQ ID NO: 1287542
aauccacucacuuuaaggg

SEQ ID NO: 1287544 - RNA, 19 nt, Artificial Sequence
  Description of Artificial Sequence: Synthetic oligonucleotide
  Sense strand starting at position 3393 of SEQ ID NO: 1241632
cuaguuccuguuuaacaua

SEQ ID NO: 1287545 - RNA, 19 nt, Artificial Sequence
  Description of Artificial Sequence: Synthetic oligonucleotide
  Antisense strand to SEQ ID NO: 1287544
uauguuaaacaggaacuag

SEQ ID NO: 1287546 - RNA, 19 nt, Artificial Sequence
  Description of Artificial Sequence: Synthetic oligonucleotide
  Sense strand starting at position 3531 of SEQ ID NO: 1241632
caaaguaagcccugagacu

SEQ ID NO: 1287547 - RNA, 19 nt, Artificial Sequence
  Description of Artificial Sequence: Synthetic oligonucleotide
  Antisense strand to SEQ ID NO: 1287546
agucucagggcuuacuuug

SEQ ID NO: 1287548 - RNA, 19 nt, Artificial Sequence
  Description of Artificial Sequence: Synthetic oligonucleotide
  Sense strand starting at position 3666 of SEQ ID NO: 1241632
gccugaagcaggcagaaau

SEQ ID NO: 1287549 - RNA, 19 nt, Artificial Sequence
  Description of Artificial Sequence: Synthetic oligonucleotide
  Antisense strand to SEQ ID NO: 1287548
auuucugccugcuucaggc

SEQ ID NO: 1287550 - RNA, 19 nt, Artificial Sequence
  Description of Artificial Sequence: Synthetic oligonucleotide
  Sense strand starting at position 3718 of SEQ ID NO: 1241632
augugacugugagugagaa

SEQ ID NO: 1287551 - RNA, 19 nt, Artificial Sequence
  Description of Artificial Sequence: Synthetic oligonucleotide
  Antisense strand to SEQ ID NO: 1287550
uucucacucacagucacau

SEQ ID NO: 1287552 - RNA, 19 nt, Artificial Sequence
  Description of Artificial Sequence: Synthetic oligonucleotide
  Sense strand starting at position 3719 of SEQ ID NO: 1241632
ugugacugugagugagaaa

SEQ ID NO: 1287553 - RNA, 19 nt, Artificial Sequence
  Description of Artificial Sequence: Synthetic oligonucleotide
  Antisense strand to SEQ ID NO: 1287552
uuucucacucacagucaca

SEQ ID NO: 1287554 - RNA, 19 nt, Artificial Sequence
  Description of Artificial Sequence: Synthetic oligonucleotide
  Sense strand starting at position 3826 of SEQ ID NO: 1241632
ggauccugaucuuuaaugu

SEQ ID NO: 1287555 - RNA, 19 nt, Artificial Sequence
  Description of Artificial Sequence: Synthetic oligonucleotide
  Antisense strand to SEQ ID NO: 1287554
acauuaaagaucaggaucc

SEQ ID NO: 1287556 - RNA, 19 nt, Artificial Sequence
  Description of Artificial Sequence: Synthetic oligonucleotide
  Sense strand starting at position 3827 of SEQ ID NO: 1241632
gauccugaucuuuaaugug

SEQ ID NO: 1287557 - RNA, 19 nt, Artificial Sequence
  Description of Artificial Sequence: Synthetic oligonucleotide
  Antisense strand to SEQ ID NO: 1287556
cacauuaaagaucaggauc

SEQ ID NO: 1287558 - RNA, 19 nt, Artificial Sequence
  Description of Artificial Sequence: Synthetic oligonucleotide
  Sense strand starting at position 3853 of SEQ ID NO: 1241632
uaaagagcuuuacuuaggu

SEQ ID NO: 1287559 - RNA, 19 nt, Artificial Sequence
  Description of Artificial Sequence: Synthetic oligonucleotide
  Antisense strand to SEQ ID NO: 1287558
accuaaguaaagcucuuua

SEQ ID NO: 1287560 - RNA, 19 nt, Artificial Sequence
  Description of Artificial Sequence: Synthetic oligonucleotide
  Sense strand starting at position 3874 of SEQ ID NO: 1241632
caucacucugguuauggua

SEQ ID NO: 1287561 - RNA, 19 nt, Artificial Sequence
  Description of Artificial Sequence: Synthetic oligonucleotide
  Antisense strand to SEQ ID NO: 1287560
uaccauaaccagagugaug

SEQ ID NO: 1287562 - RNA, 19 nt, Artificial Sequence
  Description of Artificial Sequence: Synthetic oligonucleotide
  Sense strand starting at position 3941 of SEQ ID NO: 1241632
aaaggaagacuucgcaaua

SEQ ID NO: 1287563 - RNA, 19 nt, Artificial Sequence
  Description of Artificial Sequence: Synthetic oligonucleotide
  Antisense strand to SEQ ID NO: 1287562
uauugcgaagucuuccuuu

SEQ ID NO: 1287564 - RNA, 19 nt, Artificial Sequence
  Description of Artificial Sequence: Synthetic oligonucleotide
  Sense strand starting at position 3942 of SEQ ID NO: 1241632
aaggaagacuucgcaauac

SEQ ID NO: 1287565 - RNA, 19 nt, Artificial Sequence
  Description of Artificial Sequence: Synthetic oligonucleotide
  Antisense strand to SEQ ID NO: 1287564
guauugcgaagucuuccuu

SEQ ID NO: 1287566 - RNA, 19 nt, Artificial Sequence
  Description of Artificial Sequence: Synthetic oligonucleotide
  Sense strand starting at position 6 of SEQ ID NO: 1241633
gcguaagaauaucacugua

SEQ ID NO: 1287567 - RNA, 19 nt, Artificial Sequence
  Description of Artificial Sequence: Synthetic oligonucleotide
  Antisense strand to SEQ ID NO: 1287566
uacagugauauucuuacgc

SEQ ID NO: 1287568 - RNA, 19 nt, Artificial Sequence
  Description of Artificial Sequence: Synthetic oligonucleotide
  Sense strand starting at position 8 of SEQ ID NO: 1241633
guaagaauaucacuguauu

SEQ ID NO: 1287569 - RNA, 19 nt, Artificial Sequence
  Description of Artificial Sequence: Synthetic oligonucleotide
  Antisense strand to SEQ ID NO: 1287568
aauacagugauauucuuac

SEQ ID NO: 1287570 - RNA, 19 nt, Artificial Sequence
  Description of Artificial Sequence: Synthetic oligonucleotide
  Sense strand starting at position 479 of SEQ ID NO: 1241633
gauagcagacguuaaacau

SEQ ID NO: 1287571 - RNA, 19 nt, Artificial Sequence
  Description of Artificial Sequence: Synthetic oligonucleotide
  Antisense strand to SEQ ID NO: 1287570
auguuuaacgucugcuauc

SEQ ID NO: 1287572 - RNA, 19 nt, Artificial Sequence
  Description of Artificial Sequence: Synthetic oligonucleotide
  Sense strand starting at position 506 of SEQ ID NO: 1241633
gugaaagugcuauacaagu

SEQ ID NO: 1287573 - RNA, 19 nt, Artificial Sequence
  Description of Artificial Sequence: Synthetic oligonucleotide
  Antisense strand to SEQ ID NO: 1287572
acuuguauagcacuuucac

SEQ ID NO: 1287574 - RNA, 19 nt, Artificial Sequence
  Description of Artificial Sequence: Synthetic oligonucleotide
  Sense strand starting at position 620 of SEQ ID NO: 1241633
uuugaaacacuucguuuaa

SEQ ID NO: 1287575 - RNA, 19 nt, Artificial Sequence
  Description of Artificial Sequence: Synthetic oligonucleotide
  Antisense strand to SEQ ID NO: 1287574
uuaaacgaaguguuucaaa

SEQ ID NO: 1287576 - RNA, 19 nt, Artificial Sequence
  Description of Artificial Sequence: Synthetic oligonucleotide
  Sense strand starting at position 621 of SEQ ID NO: 1241633
uugaaacacuucguuuaaa

SEQ ID NO: 1287577 - RNA, 19 nt, Artificial Sequence
  Description of Artificial Sequence: Synthetic oligonucleotide
  Antisense strand to SEQ ID NO: 1287576
uuuaaacgaaguguuucaa

SEQ ID NO: 1287578 - RNA, 19 nt, Artificial Sequence
  Description of Artificial Sequence: Synthetic oligonucleotide
  Sense strand starting at position 622 of SEQ ID NO: 1241633
ugaaacacuucguuuaaau

SEQ ID NO: 1287579 - RNA, 19 nt, Artificial Sequence
  Description of Artificial Sequence: Synthetic oligonucleotide
  Antisense strand to SEQ ID NO: 1287578
auuuaaacgaaguguuuca

SEQ ID NO: 1287580 - RNA, 19 nt, Artificial Sequence
  Description of Artificial Sequence: Synthetic oligonucleotide
  Sense strand starting at position 632 of SEQ ID NO: 1241633
cguuuaaauuacuggagga

SEQ ID NO: 1287581 - RNA, 19 nt, Artificial Sequence
  Description of Artificial Sequence: Synthetic oligonucleotide
  Antisense strand to SEQ ID NO: 1287580
uccuccaguaauuuaaacg

SEQ ID NO: 1287582 - RNA, 19 nt, Artificial Sequence
  Description of Artificial Sequence: Synthetic oligonucleotide
  Sense strand starting at position 633 of SEQ ID NO: 1241633
guuuaaauuacuggaggac

SEQ ID NO: 1287583 - RNA, 19 nt, Artificial Sequence
  Description of Artificial Sequence: Synthetic oligonucleotide
  Antisense strand to SEQ ID NO: 1287582
guccuccaguaauuuaaac

SEQ ID NO: 1287584 - RNA, 19 nt, Artificial Sequence
  Description of Artificial Sequence: Synthetic oligonucleotide
  Sense strand starting at position 648 of SEQ ID NO: 1241633
ggacuaauuugucgaccua

SEQ ID NO: 1287585 - RNA, 19 nt, Artificial Sequence
  Description of Artificial Sequence: Synthetic oligonucleotide
  Antisense strand to SEQ ID NO: 1287584
uaggucgacaaauuagucc

SEQ ID NO: 1287586 - RNA, 19 nt, Artificial Sequence
  Description of Artificial Sequence: Synthetic oligonucleotide
  Sense strand starting at position 831 of SEQ ID NO: 1241633
ggugcauaccuguaaggag

SEQ ID NO: 1287587 - RNA, 19 nt, Artificial Sequence
  Description of Artificial Sequence: Synthetic oligonucleotide
  Antisense strand to SEQ ID NO: 1287586
cuccuuacagguaugcacc

SEQ ID NO: 1287588 - RNA, 19 nt, Artificial Sequence
  Description of Artificial Sequence: Synthetic oligonucleotide
  Sense strand starting at position 834 of SEQ ID NO: 1241633
gcauaccuguaaggagaau

SEQ ID NO: 1287589 - RNA, 19 nt, Artificial Sequence
  Description of Artificial Sequence: Synthetic oligonucleotide
  Antisense strand to SEQ ID NO: 1287588
auucuccuuacagguaugc

SEQ ID NO: 1287590 - RNA, 19 nt, Artificial Sequence
  Description of Artificial Sequence: Synthetic oligonucleotide
  Sense strand starting at position 1088 of SEQ ID NO: 1241633
guuccuaaauugucuacca

SEQ ID NO: 1287591 - RNA, 19 nt, Artificial Sequence
  Description of Artificial Sequence: Synthetic oligonucleotide
  Antisense strand to SEQ ID NO: 1287590
ugguagacaauuuaggaac

SEQ ID NO: 1287592 - RNA, 19 nt, Artificial Sequence
  Description of Artificial Sequence: Synthetic oligonucleotide
  Sense strand starting at position 1134 of SEQ ID NO: 1241633
auugauuggcuauacauca

SEQ ID NO: 1287593 - RNA, 19 nt, Artificial Sequence
  Description of Artificial Sequence: Synthetic oligonucleotide
  Antisense strand to SEQ ID NO: 1287592
ugauguauagccaaucaau

SEQ ID NO: 1287594 - RNA, 19 nt, Artificial Sequence
  Description of Artificial Sequence: Synthetic oligonucleotide
  Sense strand starting at position 1181 of SEQ ID NO: 1241633
ggacauaaugggugaagca

SEQ ID NO: 1287595 - RNA, 19 nt, Artificial Sequence
  Description of Artificial Sequence: Synthetic oligonucleotide
  Antisense strand to SEQ ID NO: 1287594
ugcuucacccauuaugucc

SEQ ID NO: 1287596 - RNA, 19 nt, Artificial Sequence
  Description of Artificial Sequence: Synthetic oligonucleotide
  Sense strand starting at position 1196 of SEQ ID NO: 1241633
agcagcuagucaggaauaa

SEQ ID NO: 1287597 - RNA, 19 nt, Artificial Sequence
  Description of Artificial Sequence: Synthetic oligonucleotide
  Antisense strand to SEQ ID NO: 1287596
uuauuccugacuagcugcu

SEQ ID NO: 1287598 - RNA, 19 nt, Artificial Sequence
  Description of Artificial Sequence: Synthetic oligonucleotide
  Sense strand starting at position 1197 of SEQ ID NO: 1241633
gcagcuagucaggaauaaa

SEQ ID NO: 1287599 - RNA, 19 nt, Artificial Sequence
  Description of Artificial Sequence: Synthetic oligonucleotide
  Antisense strand to SEQ ID NO: 1287598
uuuauuccugacuagcugc

SEQ ID NO: 1287600 - RNA, 19 nt, Artificial Sequence
  Description of Artificial Sequence: Synthetic oligonucleotide
  Sense strand starting at position 1393 of SEQ ID NO: 1241633
uuccguacgaaaugaguuu

SEQ ID NO: 1287601 - RNA, 19 nt, Artificial Sequence
  Description of Artificial Sequence: Synthetic oligonucleotide
  Antisense strand to SEQ ID NO: 1287600
aaacucauuucguacggaa

SEQ ID NO: 1287602 - RNA, 19 nt, Artificial Sequence
  Description of Artificial Sequence: Synthetic oligonucleotide
  Sense strand starting at position 1666 of SEQ ID NO: 1241633
gcugacguguccuuaucaa

SEQ ID NO: 1287603 - RNA, 19 nt, Artificial Sequence
  Description of Artificial Sequence: Synthetic oligonucleotide
  Antisense strand to SEQ ID NO: 1287602
uugauaaggacacgucagc

SEQ ID NO: 1287604 - RNA, 19 nt, Artificial Sequence
  Description of Artificial Sequence: Synthetic oligonucleotide
  Sense strand starting at position 1739 of SEQ ID NO: 1241633
ggagaagccugcucucgaa

SEQ ID NO: 1287605 - RNA, 19 nt, Artificial Sequence
  Description of Artificial Sequence: Synthetic oligonucleotide
  Antisense strand to SEQ ID NO: 1287604
uucgagagcaggcuucucc

SEQ ID NO: 1287606 - RNA, 19 nt, Artificial Sequence
  Description of Artificial Sequence: Synthetic oligonucleotide
  Sense strand starting at position 1742 of SEQ ID NO: 1241633
gaagccugcucucgaacua

SEQ ID NO: 1287607 - RNA, 19 nt, Artificial Sequence
  Description of Artificial Sequence: Synthetic oligonucleotide
  Antisense strand to SEQ ID NO: 1287606
uaguucgagagcaggcuuc

SEQ ID NO: 1287608 - RNA, 19 nt, Artificial Sequence
  Description of Artificial Sequence: Synthetic oligonucleotide
  Sense strand starting at position 1784 of SEQ ID NO: 1241633
cgccuucccuuuccuaaga

SEQ ID NO: 1287609 - RNA, 19 nt, Artificial Sequence
  Description of Artificial Sequence: Synthetic oligonucleotide
  Antisense strand to SEQ ID NO: 1287608
ucuuaggaaagggaaggcg

SEQ ID NO: 1287610 - RNA, 19 nt, Artificial Sequence
  Description of Artificial Sequence: Synthetic oligonucleotide
  Sense strand starting at position 1864 of SEQ ID NO: 1241633
guucuuagcuuaccgagaa

SEQ ID NO: 1287611 - RNA, 19 nt, Artificial Sequence
  Description of Artificial Sequence: Synthetic oligonucleotide
  Antisense strand to SEQ ID NO: 1287610
uucucgguaagcuaagaac

SEQ ID NO: 1287612 - RNA, 19 nt, Artificial Sequence
  Description of Artificial Sequence: Synthetic oligonucleotide
  Sense strand starting at position 1865 of SEQ ID NO: 1241633
uucuuagcuuaccgagaaa

SEQ ID NO: 1287613 - RNA, 19 nt, Artificial Sequence
  Description of Artificial Sequence: Synthetic oligonucleotide
  Antisense strand to SEQ ID NO: 1287612
uuucucgguaagcuaagaa

SEQ ID NO: 1287614 - RNA, 19 nt, Artificial Sequence
  Description of Artificial Sequence: Synthetic oligonucleotide
  Sense strand starting at position 2028 of SEQ ID NO: 1241633
cuucggucgcgucuggaaa

SEQ ID NO: 1287615 - RNA, 19 nt, Artificial Sequence
  Description of Artificial Sequence: Synthetic oligonucleotide
  Antisense strand to SEQ ID NO: 1287614
uuuccagacgcgaccgaag

SEQ ID NO: 1287616 - RNA, 19 nt, Artificial Sequence
  Description of Artificial Sequence: Synthetic oligonucleotide
  Sense strand starting at position 121 of SEQ ID NO: 1241634
ggcccaucuccugagguca

SEQ ID NO: 1287617 - RNA, 19 nt, Artificial Sequence
  Description of Artificial Sequence: Synthetic oligonucleotide
  Antisense strand to SEQ ID NO: 1287616
ugaccucaggagaugggcc

SEQ ID NO: 1287618 - RNA, 19 nt, Artificial Sequence
  Description of Artificial Sequence: Synthetic oligonucleotide
  Sense strand starting at position 403 of SEQ ID NO: 1241634
ugaucagaaagcuggugau

SEQ ID NO: 1287619 - RNA, 19 nt, Artificial Sequence
  Description of Artificial Sequence: Synthetic oligonucleotide
  Antisense strand to SEQ ID NO: 1287618
aucaccagcuuucugauca

SEQ ID NO: 1287620 - RNA, 19 nt, Artificial Sequence
  Description of Artificial Sequence: Synthetic oligonucleotide
  Sense strand starting at position 536 of SEQ ID NO: 1241634
acacuagcuugacuaagau

SEQ ID NO: 1287621 - RNA, 19 nt, Artificial Sequence
  Description of Artificial Sequence: Synthetic oligonucleotide
  Antisense strand to SEQ ID NO: 1287620
aucuuagucaagcuagugu

SEQ ID NO: 1287622 - RNA, 19 nt, Artificial Sequence
  Description of Artificial Sequence: Synthetic oligonucleotide
  Sense strand starting at position 581 of SEQ ID NO: 1241634
cagaccauuguuugcugaa

SEQ ID NO: 1287623 - RNA, 19 nt, Artificial Sequence
  Description of Artificial Sequence: Synthetic oligonucleotide
  Antisense strand to SEQ ID NO: 1287622
uucagcaaacaauggucug

SEQ ID NO: 1287624 - RNA, 19 nt, Artificial Sequence
  Description of Artificial Sequence: Synthetic oligonucleotide
  Sense strand starting at position 582 of SEQ ID NO: 1241634
agaccauuguuugcugaau

SEQ ID NO: 1287625 - RNA, 19 nt, Artificial Sequence
  Description of Artificial Sequence: Synthetic oligonucleotide
  Antisense strand to SEQ ID NO: 1287624
auucagcaaacaauggucu

SEQ ID NO: 1287626 - RNA, 19 nt, Artificial Sequence
  Description of Artificial Sequence: Synthetic oligonucleotide
  Sense strand starting at position 1286 of SEQ ID NO: 1241634
ggcuaagcuaucuagguaa

SEQ ID NO: 1287627 - RNA, 19 nt, Artificial Sequence
  Description of Artificial Sequence: Synthetic oligonucleotide
  Antisense strand to SEQ ID NO: 1287626
uuaccuagauagcuuagcc

SEQ ID NO: 1287628 - RNA, 19 nt, Artificial Sequence
  Description of Artificial Sequence: Synthetic oligonucleotide
  Sense strand starting at position 1524 of SEQ ID NO: 1241634
agacgccuaccuuaaugaa

SEQ ID NO: 1287629 - RNA, 19 nt, Artificial Sequence
  Description of Artificial Sequence: Synthetic oligonucleotide
  Antisense strand to SEQ ID NO: 1287628
uucauuaagguaggcgucu

SEQ ID NO: 1287630 - RNA, 19 nt, Artificial Sequence
  Description of Artificial Sequence: Synthetic oligonucleotide
  Sense strand starting at position 1792 of SEQ ID NO: 1241634
ggccuccucuacuugagau

SEQ ID NO: 1287631 - RNA, 19 nt, Artificial Sequence
  Description of Artificial Sequence: Synthetic oligonucleotide
  Antisense strand to SEQ ID NO: 1287630
aucucaaguagaggaggcc

SEQ ID NO: 1287632 - RNA, 19 nt, Artificial Sequence
  Description of Artificial Sequence: Synthetic oligonucleotide
  Sense strand starting at position 1998 of SEQ ID NO: 1241634
gagacaguuuacccagaau

SEQ ID NO: 1287633 - RNA, 19 nt, Artificial Sequence
  Description of Artificial Sequence: Synthetic oligonucleotide
  Antisense strand to SEQ ID NO: 1287632
auucuggguaaacugucuc

SEQ ID NO: 1287634 - RNA, 19 nt, Artificial Sequence
  Description of Artificial Sequence: Synthetic oligonucleotide
  Sense strand starting at position 2001 of SEQ ID NO: 1241634
acaguuuacccagaaugca

SEQ ID NO: 1287635 - RNA, 19 nt, Artificial Sequence
  Description of Artificial Sequence: Synthetic oligonucleotide
  Antisense strand to SEQ ID NO: 1287634
ugcauucuggguaaacugu

SEQ ID NO: 1287636 - RNA, 19 nt, Artificial Sequence
  Description of Artificial Sequence: Synthetic oligonucleotide
  Sense strand starting at position 2013 of SEQ ID NO: 1241634
gaaugcagugcucaaagga

SEQ ID NO: 1287637 - RNA, 19 nt, Artificial Sequence
  Description of Artificial Sequence: Synthetic oligonucleotide
  Antisense strand to SEQ ID NO: 1287636
uccuuugagcacugcauuc

SEQ ID NO: 1287638 - RNA, 19 nt, Artificial Sequence
  Description of Artificial Sequence: Synthetic oligonucleotide
  Sense strand starting at position 2107 of SEQ ID NO: 1241634
aguugaugacgucaccaua

SEQ ID NO: 1287639 - RNA, 19 nt, Artificial Sequence
  Description of Artificial Sequence: Synthetic oligonucleotide
  Antisense strand to SEQ ID NO: 1287638
uauggugacgucaucaacu

SEQ ID NO: 1287640 - RNA, 19 nt, Artificial Sequence
  Description of Artificial Sequence: Synthetic oligonucleotide
  Sense strand starting at position 2499 of SEQ ID NO: 1241634
agaugaauauucucauagu

SEQ ID NO: 1287641 - RNA, 19 nt, Artificial Sequence
  Description of Artificial Sequence: Synthetic oligonucleotide
  Antisense strand to SEQ ID NO: 1287640
acuaugagaauauucaucu

SEQ ID NO: 1287642 - RNA, 19 nt, Artificial Sequence
  Description of Artificial Sequence: Synthetic oligonucleotide
  Sense strand starting at position 2638 of SEQ ID NO: 1241634
agcuguaaugaucacgagu

SEQ ID NO: 1287643 - RNA, 19 nt, Artificial Sequence
  Description of Artificial Sequence: Synthetic oligonucleotide
  Antisense strand to SEQ ID NO: 1287642
acucgugaucauuacagcu

SEQ ID NO: 1287644 - RNA, 19 nt, Artificial Sequence
  Description of Artificial Sequence: Synthetic oligonucleotide
  Sense strand starting at position 2641 of SEQ ID NO: 1241634
uguaaugaucacgagucaa

SEQ ID NO: 1287645 - RNA, 19 nt, Artificial Sequence
  Description of Artificial Sequence: Synthetic oligonucleotide
  Antisense strand to SEQ ID NO: 1287644
uugacucgugaucauuaca

SEQ ID NO: 1287646 - RNA, 19 nt, Artificial Sequence
  Description of Artificial Sequence: Synthetic oligonucleotide
  Sense strand starting at position 2652 of SEQ ID NO: 1241634
cgagucaacgguaggguuu

SEQ ID NO: 1287647 - RNA, 19 nt, Artificial Sequence
  Description of Artificial Sequence: Synthetic oligonucleotide
  Antisense strand to SEQ ID NO: 1287646
aaacccuaccguugacucg

SEQ ID NO: 1287648 - RNA, 19 nt, Artificial Sequence
  Description of Artificial Sequence: Synthetic oligonucleotide
  Sense strand starting at position 2681 of SEQ ID NO: 1241634
uguuaaagagaguacguuu

SEQ ID NO: 1287649 - RNA, 19 nt, Artificial Sequence
  Description of Artificial Sequence: Synthetic oligonucleotide
  Antisense strand to SEQ ID NO: 1287648
aaacguacucucuuuaaca

SEQ ID NO: 1287650 - RNA, 19 nt, Artificial Sequence
  Description of Artificial Sequence: Synthetic oligonucleotide
  Sense strand starting at position 2795 of SEQ ID NO: 1241634
aaauguaauuggcugaaug

SEQ ID NO: 1287651 - RNA, 19 nt, Artificial Sequence
  Description of Artificial Sequence: Synthetic oligonucleotide
  Antisense strand to SEQ ID NO: 1287650
cauucagccaauuacauuu

SEQ ID NO: 1287652 - RNA, 19 nt, Artificial Sequence
  Description of Artificial Sequence: Synthetic oligonucleotide
  Sense strand starting at position 2796 of SEQ ID NO: 1241634
aauguaauuggcugaaugu

SEQ ID NO: 1287653 - RNA, 19 nt, Artificial Sequence
  Description of Artificial Sequence: Synthetic oligonucleotide
  Antisense strand to SEQ ID NO: 1287652
acauucagccaauuacauu

SEQ ID NO: 1287654 - RNA, 19 nt, Artificial Sequence
  Description of Artificial Sequence: Synthetic oligonucleotide
  Sense strand starting at position 2797 of SEQ ID NO: 1241634
auguaauuggcugaaugua

SEQ ID NO: 1287655 - RNA, 19 nt, Artificial Sequence
  Description of Artificial Sequence: Synthetic oligonucleotide
  Antisense strand to SEQ ID NO: 1287654
uacauucagccaauuacau

SEQ ID NO: 1287656 - RNA, 19 nt, Artificial Sequence
  Description of Artificial Sequence: Synthetic oligonucleotide
  Sense strand starting at position 2844 of SEQ ID NO: 1241634
uguugcuuugaccagauaa

SEQ ID NO: 1287657 - RNA, 19 nt, Artificial Sequence
  Description of Artificial Sequence: Synthetic oligonucleotide
  Antisense strand to SEQ ID NO: 1287656
uuaucuggucaaagcaaca

SEQ ID NO: 1287658 - RNA, 19 nt, Artificial Sequence
  Description of Artificial Sequence: Synthetic oligonucleotide
  Sense strand starting at position 2846 of SEQ ID NO: 1241634
uugcuuugaccagauaauu

SEQ ID NO: 1287659 - RNA, 19 nt, Artificial Sequence
  Description of Artificial Sequence: Synthetic oligonucleotide
  Antisense strand to SEQ ID NO: 1287658
aauuaucuggucaaagcaa

SEQ ID NO: 1287660 - RNA, 19 nt, Artificial Sequence
  Description of Artificial Sequence: Synthetic oligonucleotide
  Sense strand starting at position 2854 of SEQ ID NO: 1241634
accagauaauuuggugaca

SEQ ID NO: 1287661 - RNA, 19 nt, Artificial Sequence
  Description of Artificial Sequence: Synthetic oligonucleotide
  Antisense strand to SEQ ID NO: 1287660
ugucaccaaauuaucuggu

SEQ ID NO: 1287662 - RNA, 19 nt, Artificial Sequence
  Description of Artificial Sequence: Synthetic oligonucleotide
  Sense strand starting at position 2856 of SEQ ID NO: 1241634
cagauaauuuggugacaaa

SEQ ID NO: 1287663 - RNA, 19 nt, Artificial Sequence
  Description of Artificial Sequence: Synthetic oligonucleotide
  Antisense strand to SEQ ID NO: 1287662
uuugucaccaaauuaucug

SEQ ID NO: 1287664 - RNA, 19 nt, Artificial Sequence
  Description of Artificial Sequence: Synthetic oligonucleotide
  Sense strand starting at position 2934 of SEQ ID NO: 1241634
gcugaaagauaccuacauu

SEQ ID NO: 1287665 - RNA, 19 nt, Artificial Sequence
  Description of Artificial Sequence: Synthetic oligonucleotide
  Antisense strand to SEQ ID NO: 1287664
aauguagguaucuuucagc

SEQ ID NO: 1287666 - RNA, 19 nt, Artificial Sequence
  Description of Artificial Sequence: Synthetic oligonucleotide
  Sense strand starting at position 3183 of SEQ ID NO: 1241634
gucagagauuuguaaacua

SEQ ID NO: 1287667 - RNA, 19 nt, Artificial Sequence
  Description of Artificial Sequence: Synthetic oligonucleotide
  Antisense strand to SEQ ID NO: 1287666
uaguuuacaaaucucugac

SEQ ID NO: 1287668 - RNA, 19 nt, Artificial Sequence
  Description of Artificial Sequence: Synthetic oligonucleotide
  Sense strand starting at position 3231 of SEQ ID NO: 1241634
uucuaaucugugggaaaca

SEQ ID NO: 1287669 - RNA, 19 nt, Artificial Sequence
  Description of Artificial Sequence: Synthetic oligonucleotide
  Antisense strand to SEQ ID NO: 1287668
uguuucccacagauuagaa

SEQ ID NO: 1287670 - RNA, 19 nt, Artificial Sequence
  Description of Artificial Sequence: Synthetic oligonucleotide
  Sense strand starting at position 3322 of SEQ ID NO: 1241634
guauuaaaucaugggugug

SEQ ID NO: 1287671 - RNA, 19 nt, Artificial Sequence
  Description of Artificial Sequence: Synthetic oligonucleotide
  Antisense strand to SEQ ID NO: 1287670
cacacccaugauuuaauac

SEQ ID NO: 1287672 - RNA, 19 nt, Artificial Sequence
  Description of Artificial Sequence: Synthetic oligonucleotide
  Sense strand starting at position 3334 of SEQ ID NO: 1241634
gggugugcucaugaaguac

SEQ ID NO: 1287673 - RNA, 19 nt, Artificial Sequence
  Description of Artificial Sequence: Synthetic oligonucleotide
  Antisense strand to SEQ ID NO: 1287672
guacuucaugagcacaccc

SEQ ID NO: 1287674 - RNA, 19 nt, Artificial Sequence
  Description of Artificial Sequence: Synthetic oligonucleotide
  Sense strand starting at position 3338 of SEQ ID NO: 1241634
gugcucaugaaguacgaaa

SEQ ID NO: 1287675 - RNA, 19 nt, Artificial Sequence
  Description of Artificial Sequence: Synthetic oligonucleotide
  Antisense strand to SEQ ID NO: 1287674
uuucguacuucaugagcac

SEQ ID NO: 1287676 - RNA, 19 nt, Artificial Sequence
  Description of Artificial Sequence: Synthetic oligonucleotide
  Sense strand starting at position 3396 of SEQ ID NO: 1241634
uugagagaccuuugaggua

SEQ ID NO: 1287677 - RNA, 19 nt, Artificial Sequence
  Description of Artificial Sequence: Synthetic oligonucleotide
  Antisense strand to SEQ ID NO: 1287676
uaccucaaaggucucucaa

SEQ ID NO: 1287678 - RNA, 19 nt, Artificial Sequence
  Description of Artificial Sequence: Synthetic oligonucleotide
  Sense strand starting at position 3455 of SEQ ID NO: 1241634
aagggaaugccuggugaaa

SEQ ID NO: 1287679 - RNA, 19 nt, Artificial Sequence
  Description of Artificial Sequence: Synthetic oligonucleotide
  Antisense strand to SEQ ID NO: 1287678
uuucaccaggcauucccuu

SEQ ID NO: 1287680 - RNA, 19 nt, Artificial Sequence
  Description of Artificial Sequence: Synthetic oligonucleotide
  Sense strand starting at position 3496 of SEQ ID NO: 1241634
ggugaacaacuuuguguaa

SEQ ID NO: 1287681 - RNA, 19 nt, Artificial Sequence
  Description of Artificial Sequence: Synthetic oligonucleotide
  Antisense strand to SEQ ID NO: 1287680
uuacacaaaguuguucacc

SEQ ID NO: 1287682 - RNA, 19 nt, Artificial Sequence
  Description of Artificial Sequence: Synthetic oligonucleotide
  Sense strand starting at position 3537 of SEQ ID NO: 1241634
ggccuagugauaggaauga

SEQ ID NO: 1287683 - RNA, 19 nt, Artificial Sequence
  Description of Artificial Sequence: Synthetic oligonucleotide
  Antisense strand to SEQ ID NO: 1287682
ucauuccuaucacuaggcc

SEQ ID NO: 1287684 - RNA, 19 nt, Artificial Sequence
  Description of Artificial Sequence: Synthetic oligonucleotide
  Sense strand starting at position 3573 of SEQ ID NO: 1241634
aagccucauugggcaagau

SEQ ID NO: 1287685 - RNA, 19 nt, Artificial Sequence
  Description of Artificial Sequence: Synthetic oligonucleotide
  Antisense strand to SEQ ID NO: 1287684
aucuugcccaaugaggcuu

SEQ ID NO: 1287686 - RNA, 19 nt, Artificial Sequence
  Description of Artificial Sequence: Synthetic oligonucleotide
  Sense strand starting at position 3624 of SEQ ID NO: 1241634
uuauaucagucacuaaugu

SEQ ID NO: 1287687 - RNA, 19 nt, Artificial Sequence
  Description of Artificial Sequence: Synthetic oligonucleotide
  Antisense strand to SEQ ID NO: 1287686
acauuagugacugauauaa

SEQ ID NO: 1287688 - RNA, 19 nt, Artificial Sequence
  Description of Artificial Sequence: Synthetic oligonucleotide
  Sense strand starting at position 3712 of SEQ ID NO: 1241634
cuaguuggucuccacaaua

SEQ ID NO: 1287689 - RNA, 19 nt, Artificial Sequence
  Description of Artificial Sequence: Synthetic oligonucleotide
  Antisense strand to SEQ ID NO: 1287688
uauuguggagaccaacuag

SEQ ID NO: 1287690 - RNA, 19 nt, Artificial Sequence
  Description of Artificial Sequence: Synthetic oligonucleotide
  Sense strand starting at position 3793 of SEQ ID NO: 1241634
agccuuugggccuaaagaa

SEQ ID NO: 1287691 - RNA, 19 nt, Artificial Sequence
  Description of Artificial Sequence: Synthetic oligonucleotide
  Antisense strand to SEQ ID NO: 1287690
uucuuuaggcccaaaggcu

SEQ ID NO: 1287692 - RNA, 19 nt, Artificial Sequence
  Description of Artificial Sequence: Synthetic oligonucleotide
  Sense strand starting at position 3801 of SEQ ID NO: 1241634
ggccuaaagaagugaauuc

SEQ ID NO: 1287693 - RNA, 19 nt, Artificial Sequence
  Description of Artificial Sequence: Synthetic oligonucleotide
  Antisense strand to SEQ ID NO: 1287692
gaauucacuucuuuaggcc

SEQ ID NO: 1287694 - RNA, 19 nt, Artificial Sequence
  Description of Artificial Sequence: Synthetic oligonucleotide
  Sense strand starting at position 3953 of SEQ ID NO: 1241634
gcagcuaagacgucguacu

SEQ ID NO: 1287695 - RNA, 19 nt, Artificial Sequence
  Description of Artificial Sequence: Synthetic oligonucleotide
  Antisense strand to SEQ ID NO: 1287694
aguacgacgucuuagcugc

SEQ ID NO: 1287696 - RNA, 19 nt, Artificial Sequence
  Description of Artificial Sequence: Synthetic oligonucleotide
  Sense strand starting at position 32 of SEQ ID NO: 1241635
auaucaguugucuaugaaa

SEQ ID NO: 1287697 - RNA, 19 nt, Artificial Sequence
  Description of Artificial Sequence: Synthetic oligonucleotide
  Antisense strand to SEQ ID NO: 1287696
uuucauagacaacugauau

SEQ ID NO: 1287698 - RNA, 19 nt, Artificial Sequence
  Description of Artificial Sequence: Synthetic oligonucleotide
  Sense strand starting at position 34 of SEQ ID NO: 1241635
aucaguugucuaugaaauu

SEQ ID NO: 1287699 - RNA, 19 nt, Artificial Sequence
  Description of Artificial Sequence: Synthetic oligonucleotide
  Antisense strand to SEQ ID NO: 1287698
aauuucauagacaacugau

SEQ ID NO: 1287700 - RNA, 19 nt, Artificial Sequence
  Description of Artificial Sequence: Synthetic oligonucleotide
  Sense strand starting at position 43 of SEQ ID NO: 1241635
cuaugaaauugagagaaga

SEQ ID NO: 1287701 - RNA, 19 nt, Artificial Sequence
  Description of Artificial Sequence: Synthetic oligonucleotide
  Antisense strand to SEQ ID NO: 1287700
ucuucucucaauuucauag

SEQ ID NO: 1287702 - RNA, 19 nt, Artificial Sequence
  Description of Artificial Sequence: Synthetic oligonucleotide
  Sense strand starting at position 119 of SEQ ID NO: 1241635
gcuggcucaagauguauaa

SEQ ID NO: 1287703 - RNA, 19 nt, Artificial Sequence
  Description of Artificial Sequence: Synthetic oligonucleotide
  Antisense strand to SEQ ID NO: 1287702
uuauacaucuugagccagc

SEQ ID NO: 1287704 - RNA, 19 nt, Artificial Sequence
  Description of Artificial Sequence: Synthetic oligonucleotide
  Sense strand starting at position 188 of SEQ ID NO: 1241635
gcaugaauuugacaucucu

SEQ ID NO: 1287705 - RNA, 19 nt, Artificial Sequence
  Description of Artificial Sequence: Synthetic oligonucleotide
  Antisense strand to SEQ ID NO: 1287704
agagaugucaaauucaugc

SEQ ID NO: 1287706 - RNA, 19 nt, Artificial Sequence
  Description of Artificial Sequence: Synthetic oligonucleotide
  Sense strand starting at position 248 of SEQ ID NO: 1241635
uaggcaaucucaguagaaa

SEQ ID NO: 1287707 - RNA, 19 nt, Artificial Sequence
  Description of Artificial Sequence: Synthetic oligonucleotide
  Antisense strand to SEQ ID NO: 1287706
uuucuacugagauugccua

SEQ ID NO: 1287708 - RNA, 19 nt, Artificial Sequence
  Description of Artificial Sequence: Synthetic oligonucleotide
  Sense strand starting at position 765 of SEQ ID NO: 1241635
guaauaacgaacgacucau

SEQ ID NO: 1287709 - RNA, 19 nt, Artificial Sequence
  Description of Artificial Sequence: Synthetic oligonucleotide
  Antisense strand to SEQ ID NO: 1287708
augagucguucguuauuac

SEQ ID NO: 1287710 - RNA, 19 nt, Artificial Sequence
  Description of Artificial Sequence: Synthetic oligonucleotide
  Sense strand starting at position 865 of SEQ ID NO: 1241635
uguacugauuggucugaau

SEQ ID NO: 1287711 - RNA, 19 nt, Artificial Sequence
  Description of Artificial Sequence: Synthetic oligonucleotide
  Antisense strand to SEQ ID NO: 1287710
auucagaccaaucaguaca

SEQ ID NO: 1287712 - RNA, 19 nt, Artificial Sequence
  Description of Artificial Sequence: Synthetic oligonucleotide
  Sense strand starting at position 867 of SEQ ID NO: 1241635
uacugauuggucugaauaa

SEQ ID NO: 1287713 - RNA, 19 nt, Artificial Sequence
  Description of Artificial Sequence: Synthetic oligonucleotide
  Antisense strand to SEQ ID NO: 1287712
uuauucagaccaaucagua

SEQ ID NO: 1287714 - RNA, 19 nt, Artificial Sequence
  Description of Artificial Sequence: Synthetic oligonucleotide
  Sense strand starting at position 947 of SEQ ID NO: 1241635
uuaggacaacgcuagugau

SEQ ID NO: 1287715 - RNA, 19 nt, Artificial Sequence
  Description of Artificial Sequence: Synthetic oligonucleotide
  Antisense strand to SEQ ID NO: 1287714
aucacuagcguuguccuaa

SEQ ID NO: 1287716 - RNA, 19 nt, Artificial Sequence
  Description of Artificial Sequence: Synthetic oligonucleotide
  Sense strand starting at position 953 of SEQ ID NO: 1241635
caacgcuagugaucucaaa

SEQ ID NO: 1287717 - RNA, 19 nt, Artificial Sequence
  Description of Artificial Sequence: Synthetic oligonucleotide
  Antisense strand to SEQ ID NO: 1287716
uuugagaucacuagcguug

SEQ ID NO: 1287718 - RNA, 19 nt, Artificial Sequence
  Description of Artificial Sequence: Synthetic oligonucleotide
  Sense strand starting at position 986 of SEQ ID NO: 1241635
cgcugaagccugcucguua

SEQ ID NO: 1287719 - RNA, 19 nt, Artificial Sequence
  Description of Artificial Sequence: Synthetic oligonucleotide
  Antisense strand to SEQ ID NO: 1287718
uaacgagcaggcuucagcg

SEQ ID NO: 1287720 - RNA, 19 nt, Artificial Sequence
  Description of Artificial Sequence: Synthetic oligonucleotide
  Sense strand starting at position 1127 of SEQ ID NO: 1241635
cggcgauuccuguuccugu

SEQ ID NO: 1287721 - RNA, 19 nt, Artificial Sequence
  Description of Artificial Sequence: Synthetic oligonucleotide
  Antisense strand to SEQ ID NO: 1287720
acaggaacaggaaucgccg

SEQ ID NO: 1287722 - RNA, 19 nt, Artificial Sequence
  Description of Artificial Sequence: Synthetic oligonucleotide
  Sense strand starting at position 1148 of SEQ ID NO: 1241635
cuagacuggacucgguaaa

SEQ ID NO: 1287723 - RNA, 19 nt, Artificial Sequence
  Description of Artificial Sequence: Synthetic oligonucleotide
  Antisense strand to SEQ ID NO: 1287722
uuuaccgaguccagucuag

SEQ ID NO: 1287724 - RNA, 19 nt, Artificial Sequence
  Description of Artificial Sequence: Synthetic oligonucleotide
  Sense strand starting at position 2171 of SEQ ID NO: 1241635
ccucgaauuguuguugcuu

SEQ ID NO: 1287725 - RNA, 19 nt, Artificial Sequence
  Description of Artificial Sequence: Synthetic oligonucleotide
  Antisense strand to SEQ ID NO: 1287724
aagcaacaacaauucgagg

SEQ ID NO: 1287726 - RNA, 19 nt, Artificial Sequence
  Description of Artificial Sequence: Synthetic oligonucleotide
  Sense strand starting at position 2338 of SEQ ID NO: 1241635
uucgaucuguuaguaaaca

SEQ ID NO: 1287727 - RNA, 19 nt, Artificial Sequence
  Description of Artificial Sequence: Synthetic oligonucleotide
  Antisense strand to SEQ ID NO: 1287726
uguuuacuaacagaucgaa

SEQ ID NO: 1287728 - RNA, 19 nt, Artificial Sequence
  Description of Artificial Sequence: Synthetic oligonucleotide
  Sense strand starting at position 2350 of SEQ ID NO: 1241635
guaaacagugucuaguagu

SEQ ID NO: 1287729 - RNA, 19 nt, Artificial Sequence
  Description of Artificial Sequence: Synthetic oligonucleotide
  Antisense strand to SEQ ID NO: 1287728
acuacuagacacuguuuac

SEQ ID NO: 1287730 - RNA, 19 nt, Artificial Sequence
  Description of Artificial Sequence: Synthetic oligonucleotide
  Sense strand starting at position 2417 of SEQ ID NO: 1241635
agggaugauuggaacguuu

SEQ ID NO: 1287731 - RNA, 19 nt, Artificial Sequence
  Description of Artificial Sequence: Synthetic oligonucleotide
  Antisense strand to SEQ ID NO: 1287730
aaacguuccaaucaucccu

SEQ ID NO: 1287732 - RNA, 19 nt, Artificial Sequence
  Description of Artificial Sequence: Synthetic oligonucleotide
  Sense strand starting at position 2430 of SEQ ID NO: 1241635
acguuugguccgccaauca

SEQ ID NO: 1287733 - RNA, 19 nt, Artificial Sequence
  Description of Artificial Sequence: Synthetic oligonucleotide
  Antisense strand to SEQ ID NO: 1287732
ugauuggcggaccaaacgu

SEQ ID NO: 1287734 - RNA, 19 nt, Artificial Sequence
  Description of Artificial Sequence: Synthetic oligonucleotide
  Sense strand starting at position 2441 of SEQ ID NO: 1241635
gccaaucaccguggacaga

SEQ ID NO: 1287735 - RNA, 19 nt, Artificial Sequence
  Description of Artificial Sequence: Synthetic oligonucleotide
  Antisense strand to SEQ ID NO: 1287734
ucuguccacggugauuggc

SEQ ID NO: 1287736 - RNA, 19 nt, Artificial Sequence
  Description of Artificial Sequence: Synthetic oligonucleotide
  Sense strand starting at position 2573 of SEQ ID NO: 1241635
ucuuacucgcucuagugaa

SEQ ID NO: 1287737 - RNA, 19 nt, Artificial Sequence
  Description of Artificial Sequence: Synthetic oligonucleotide
  Antisense strand to SEQ ID NO: 1287736
uucacuagagcgaguaaga

SEQ ID NO: 1287738 - RNA, 19 nt, Artificial Sequence
  Description of Artificial Sequence: Synthetic oligonucleotide
  Sense strand starting at position 2598 of SEQ ID NO: 1241635
acaaguuaagcagaguguu

SEQ ID NO: 1287739 - RNA, 19 nt, Artificial Sequence
  Description of Artificial Sequence: Synthetic oligonucleotide
  Antisense strand to SEQ ID NO: 1287738
aacacucugcuuaacuugu

SEQ ID NO: 1287740 - RNA, 19 nt, Artificial Sequence
  Description of Artificial Sequence: Synthetic oligonucleotide
  Sense strand starting at position 2608 of SEQ ID NO: 1241635
cagaguguuuguucuuaaa

SEQ ID NO: 1287741 - RNA, 19 nt, Artificial Sequence
  Description of Artificial Sequence: Synthetic oligonucleotide
  Antisense strand to SEQ ID NO: 1287740
uuuaagaacaaacacucug

SEQ ID NO: 1287742 - RNA, 19 nt, Artificial Sequence
  Description of Artificial Sequence: Synthetic oligonucleotide
  Sense strand starting at position 2610 of SEQ ID NO: 1241635
gaguguuuguucuuaaaua

SEQ ID NO: 1287743 - RNA, 19 nt, Artificial Sequence
  Description of Artificial Sequence: Synthetic oligonucleotide
  Antisense strand to SEQ ID NO: 1287742
uauuuaagaacaaacacuc

SEQ ID NO: 1287744 - RNA, 19 nt, Artificial Sequence
  Description of Artificial Sequence: Synthetic oligonucleotide
  Sense strand starting at position 2628 of SEQ ID NO: 1241635
aacagauaguucuuaaacg

SEQ ID NO: 1287745 - RNA, 19 nt, Artificial Sequence
  Description of Artificial Sequence: Synthetic oligonucleotide
  Antisense strand to SEQ ID NO: 1287744
cguuuaagaacuaucuguu

SEQ ID NO: 1287746 - RNA, 19 nt, Artificial Sequence
  Description of Artificial Sequence: Synthetic oligonucleotide
  Sense strand starting at position 2694 of SEQ ID NO: 1241635
agagacauuucuguuucgu

SEQ ID NO: 1287747 - RNA, 19 nt, Artificial Sequence
  Description of Artificial Sequence: Synthetic oligonucleotide
  Antisense strand to SEQ ID NO: 1287746
acgaaacagaaaugucucu

SEQ ID NO: 1287748 - RNA, 19 nt, Artificial Sequence
  Description of Artificial Sequence: Synthetic oligonucleotide
  Sense strand starting at position 2696 of SEQ ID NO: 1241635
agacauuucuguuucguac

SEQ ID NO: 1287749 - RNA, 19 nt, Artificial Sequence
  Description of Artificial Sequence: Synthetic oligonucleotide
  Antisense strand to SEQ ID NO: 1287748
guacgaaacagaaaugucu

SEQ ID NO: 1287750 - RNA, 19 nt, Artificial Sequence
  Description of Artificial Sequence: Synthetic oligonucleotide
  Sense strand starting at position 2702 of SEQ ID NO: 1241635
uucuguuucguacaagacu

SEQ ID NO: 1287751 - RNA, 19 nt, Artificial Sequence
  Description of Artificial Sequence: Synthetic oligonucleotide
  Antisense strand to SEQ ID NO: 1287750
agucuuguacgaaacagaa

SEQ ID NO: 1287752 - RNA, 19 nt, Artificial Sequence
  Description of Artificial Sequence: Synthetic oligonucleotide
  Sense strand starting at position 2731 of SEQ ID NO: 1241635
gccgaaaggaugcagagau

SEQ ID NO: 1287753 - RNA, 19 nt, Artificial Sequence
  Description of Artificial Sequence: Synthetic oligonucleotide
  Antisense strand to SEQ ID NO: 1287752
aucucugcauccuuucggc

SEQ ID NO: 1287754 - RNA, 19 nt, Artificial Sequence
  Description of Artificial Sequence: Synthetic oligonucleotide
  Sense strand starting at position 2798 of SEQ ID NO: 1241635
ugagaaacaaucugugugu

SEQ ID NO: 1287755 - RNA, 19 nt, Artificial Sequence
  Description of Artificial Sequence: Synthetic oligonucleotide
  Antisense strand to SEQ ID NO: 1287754
acacacagauuguuucuca

SEQ ID NO: 1287756 - RNA, 19 nt, Artificial Sequence
  Description of Artificial Sequence: Synthetic oligonucleotide
  Sense strand starting at position 2859 of SEQ ID NO: 1241635
cguacaaagcguuagagaa

SEQ ID NO: 1287757 - RNA, 19 nt, Artificial Sequence
  Description of Artificial Sequence: Synthetic oligonucleotide
  Antisense strand to SEQ ID NO: 1287756
uucucuaacgcuuuguacg

SEQ ID NO: 1287758 - RNA, 19 nt, Artificial Sequence
  Description of Artificial Sequence: Synthetic oligonucleotide
  Sense strand starting at position 2883 of SEQ ID NO: 1241635
cacggauggcaauaauuau

SEQ ID NO: 1287759 - RNA, 19 nt, Artificial Sequence
  Description of Artificial Sequence: Synthetic oligonucleotide
  Antisense strand to SEQ ID NO: 1287758
auaauuauugccauccgug

SEQ ID NO: 1287760 - RNA, 19 nt, Artificial Sequence
  Description of Artificial Sequence: Synthetic oligonucleotide
  Sense strand starting at position 2890 of SEQ ID NO: 1241635
ggcaauaauuauucccaga

SEQ ID NO: 1287761 - RNA, 19 nt, Artificial Sequence
  Description of Artificial Sequence: Synthetic oligonucleotide
  Antisense strand to SEQ ID NO: 1287760
ucugggaauaauuauugcc

SEQ ID NO: 1287762 - RNA, 19 nt, Artificial Sequence
  Description of Artificial Sequence: Synthetic oligonucleotide
  Sense strand starting at position 2897 of SEQ ID NO: 1241635
auuauucccagacgaggaa

SEQ ID NO: 1287763 - RNA, 19 nt, Artificial Sequence
  Description of Artificial Sequence: Synthetic oligonucleotide
  Antisense strand to SEQ ID NO: 1287762
uuccucgucugggaauaau

SEQ ID NO: 1287764 - RNA, 19 nt, Artificial Sequence
  Description of Artificial Sequence: Synthetic oligonucleotide
  Sense strand starting at position 2947 of SEQ ID NO: 1241635
ugagauaaccaacguaaag

SEQ ID NO: 1287765 - RNA, 19 nt, Artificial Sequence
  Description of Artificial Sequence: Synthetic oligonucleotide
  Antisense strand to SEQ ID NO: 1287764
cuuuacguugguuaucuca

SEQ ID NO: 1287766 - RNA, 19 nt, Artificial Sequence
  Description of Artificial Sequence: Synthetic oligonucleotide
  Sense strand starting at position 3052 of SEQ ID NO: 1241635
uggguuaagugauugauaa

SEQ ID NO: 1287767 - RNA, 19 nt, Artificial Sequence
  Description of Artificial Sequence: Synthetic oligonucleotide
  Antisense strand to SEQ ID NO: 1287766
uuaucaaucacuuaaccca

SEQ ID NO: 1287768 - RNA, 19 nt, Artificial Sequence
  Description of Artificial Sequence: Synthetic oligonucleotide
  Sense strand starting at position 3053 of SEQ ID NO: 1241635
ggguuaagugauugauaag

SEQ ID NO: 1287769 - RNA, 19 nt, Artificial Sequence
  Description of Artificial Sequence: Synthetic oligonucleotide
  Antisense strand to SEQ ID NO: 1287768
cuuaucaaucacuuaaccc

SEQ ID NO: 1287770 - RNA, 19 nt, Artificial Sequence
  Description of Artificial Sequence: Synthetic oligonucleotide
  Sense strand starting at position 3141 of SEQ ID NO: 1241635
ggaugcugugcugaagagu

SEQ ID NO: 1287771 - RNA, 19 nt, Artificial Sequence
  Description of Artificial Sequence: Synthetic oligonucleotide
  Antisense strand to SEQ ID NO: 1287770
acucuucagcacagcaucc

SEQ ID NO: 1287772 - RNA, 19 nt, Artificial Sequence
  Description of Artificial Sequence: Synthetic oligonucleotide
  Sense strand starting at position 3170 of SEQ ID NO: 1241635
uuuaguacacagugaugaa

SEQ ID NO: 1287773 - RNA, 19 nt, Artificial Sequence
  Description of Artificial Sequence: Synthetic oligonucleotide
  Antisense strand to SEQ ID NO: 1287772
uucaucacuguguacuaaa

SEQ ID NO: 1287774 - RNA, 19 nt, Artificial Sequence
  Description of Artificial Sequence: Synthetic oligonucleotide
  Sense strand starting at position 3217 of SEQ ID NO: 1241635
ggaauccugcugcaaggau

SEQ ID NO: 1287775 - RNA, 19 nt, Artificial Sequence
  Description of Artificial Sequence: Synthetic oligonucleotide
  Antisense strand to SEQ ID NO: 1287774
auccuugcagcaggauucc

SEQ ID NO: 1287776 - RNA, 19 nt, Artificial Sequence
  Description of Artificial Sequence: Synthetic oligonucleotide
  Sense strand starting at position 138 of SEQ ID NO: 1241636
gccucuaggccuugaaugu

SEQ ID NO: 1287777 - RNA, 19 nt, Artificial Sequence
  Description of Artificial Sequence: Synthetic oligonucleotide
  Antisense strand to SEQ ID NO: 1287776
acauucaaggccuagaggc

SEQ ID NO: 1287778 - RNA, 19 nt, Artificial Sequence
  Description of Artificial Sequence: Synthetic oligonucleotide
  Sense strand starting at position 139 of SEQ ID NO: 1241636
ccucuaggccuugaauguu

SEQ ID NO: 1287779 - RNA, 19 nt, Artificial Sequence
  Description of Artificial Sequence: Synthetic oligonucleotide
  Antisense strand to SEQ ID NO: 1287778
aacauucaaggccuagagg

SEQ ID NO: 1287780 - RNA, 19 nt, Artificial Sequence
  Description of Artificial Sequence: Synthetic oligonucleotide
  Sense strand starting at position 148 of SEQ ID NO: 1241636
cuugaauguucuuucugga

SEQ ID NO: 1287781 - RNA, 19 nt, Artificial Sequence
  Description of Artificial Sequence: Synthetic oligonucleotide
  Antisense strand to SEQ ID NO: 1287780
uccagaaagaacauucaag

SEQ ID NO: 1287782 - RNA, 19 nt, Artificial Sequence
  Description of Artificial Sequence: Synthetic oligonucleotide
  Sense strand starting at position 151 of SEQ ID NO: 1241636
gaauguucuuucuggaacu

SEQ ID NO: 1287783 - RNA, 19 nt, Artificial Sequence
  Description of Artificial Sequence: Synthetic oligonucleotide
  Antisense strand to SEQ ID NO: 1287782
aguuccagaaagaacauuc

SEQ ID NO: 1287784 - RNA, 19 nt, Artificial Sequence
  Description of Artificial Sequence: Synthetic oligonucleotide
  Sense strand starting at position 204 of SEQ ID NO: 1241636
auucuccagugcucagauu

SEQ ID NO: 1287785 - RNA, 19 nt, Artificial Sequence
  Description of Artificial Sequence: Synthetic oligonucleotide
  Antisense strand to SEQ ID NO: 1287784
aaucugagcacuggagaau

SEQ ID NO: 1287786 - RNA, 19 nt, Artificial Sequence
  Description of Artificial Sequence: Synthetic oligonucleotide
  Sense strand starting at position 205 of SEQ ID NO: 1241636
uucuccagugcucagauua

SEQ ID NO: 1287787 - RNA, 19 nt, Artificial Sequence
  Description of Artificial Sequence: Synthetic oligonucleotide
  Antisense strand to SEQ ID NO: 1287786
uaaucugagcacuggagaa

SEQ ID NO: 1287788 - RNA, 19 nt, Artificial Sequence
  Description of Artificial Sequence: Synthetic oligonucleotide
  Sense strand starting at position 405 of SEQ ID NO: 1241636
ggaacagucagguguagug

SEQ ID NO: 1287789 - RNA, 19 nt, Artificial Sequence
  Description of Artificial Sequence: Synthetic oligonucleotide
  Antisense strand to SEQ ID NO: 1287788
cacuacaccugacuguucc

SEQ ID NO: 1287790 - RNA, 19 nt, Artificial Sequence
  Description of Artificial Sequence: Synthetic oligonucleotide
  Sense strand starting at position 462 of SEQ ID NO: 1241636
gccauuugauagcugugga

SEQ ID NO: 1287791 - RNA, 19 nt, Artificial Sequence
  Description of Artificial Sequence: Synthetic oligonucleotide
  Antisense strand to SEQ ID NO: 1287790
uccacagcuaucaaauggc

SEQ ID NO: 1287792 - RNA, 19 nt, Artificial Sequence
  Description of Artificial Sequence: Synthetic oligonucleotide
  Sense strand starting at position 525 of SEQ ID NO: 1241636
ucuggaacaugagaaugua

SEQ ID NO: 1287793 - RNA, 19 nt, Artificial Sequence
  Description of Artificial Sequence: Synthetic oligonucleotide
  Antisense strand to SEQ ID NO: 1287792
uacauucucauguuccaga

SEQ ID NO: 1287794 - RNA, 19 nt, Artificial Sequence
  Description of Artificial Sequence: Synthetic oligonucleotide
  Sense strand starting at position 553 of SEQ ID NO: 1241636
uccugugugcuuggaacaa

SEQ ID NO: 1287795 - RNA, 19 nt, Artificial Sequence
  Description of Artificial Sequence: Synthetic oligonucleotide
  Antisense strand to SEQ ID NO: 1287794
uuguuccaagcacacagga

SEQ ID NO: 1287796 - RNA, 19 nt, Artificial Sequence
  Description of Artificial Sequence: Synthetic oligonucleotide
  Sense strand starting at position 557 of SEQ ID NO: 1241636
gugugcuuggaacaacaua

SEQ ID NO: 1287797 - RNA, 19 nt, Artificial Sequence
  Description of Artificial Sequence: Synthetic oligonucleotide
  Antisense strand to SEQ ID NO: 1287796
uauguuguuccaagcacac

SEQ ID NO: 1287798 - RNA, 19 nt, Artificial Sequence
  Description of Artificial Sequence: Synthetic oligonucleotide
  Sense strand starting at position 594 of SEQ ID NO: 1241636
uuucuauuacugugacacu

SEQ ID NO: 1287799 - RNA, 19 nt, Artificial Sequence
  Description of Artificial Sequence: Synthetic oligonucleotide
  Antisense strand to SEQ ID NO: 1287798
agugucacaguaauagaaa

SEQ ID NO: 1287800 - RNA, 19 nt, Artificial Sequence
  Description of Artificial Sequence: Synthetic oligonucleotide
  Sense strand starting at position 657 of SEQ ID NO: 1241636
uguagaaacugcuuaauaa

SEQ ID NO: 1287801 - RNA, 19 nt, Artificial Sequence
  Description of Artificial Sequence: Synthetic oligonucleotide
  Antisense strand to SEQ ID NO: 1287800
uuauuaagcaguuucuaca

SEQ ID NO: 1287802 - RNA, 19 nt, Artificial Sequence
  Description of Artificial Sequence: Synthetic oligonucleotide
  Sense strand starting at position 678 of SEQ ID NO: 1241636
gccagcuaucauugucuuu

SEQ ID NO: 1287803 - RNA, 19 nt, Artificial Sequence
  Description of Artificial Sequence: Synthetic oligonucleotide
  Antisense strand to SEQ ID NO: 1287802
aaagacaaugauagcuggc

SEQ ID NO: 1287804 - RNA, 19 nt, Artificial Sequence
  Description of Artificial Sequence: Synthetic oligonucleotide
  Sense strand starting at position 726 of SEQ ID NO: 1241636
cgugcucacucaguacaaa

SEQ ID NO: 1287805 - RNA, 19 nt, Artificial Sequence
  Description of Artificial Sequence: Synthetic oligonucleotide
  Antisense strand to SEQ ID NO: 1287804
uuuguacugagugagcacg

SEQ ID NO: 1287806 - RNA, 19 nt, Artificial Sequence
  Description of Artificial Sequence: Synthetic oligonucleotide
  Sense strand starting at position 727 of SEQ ID NO: 1241636
gugcucacucaguacaaau

SEQ ID NO: 1287807 - RNA, 19 nt, Artificial Sequence
  Description of Artificial Sequence: Synthetic oligonucleotide
  Antisense strand to SEQ ID NO: 1287806
auuuguacugagugagcac

SEQ ID NO: 1287808 - RNA, 19 nt, Artificial Sequence
  Description of Artificial Sequence: Synthetic oligonucleotide
  Sense strand starting at position 1295 of SEQ ID NO: 1241636
augauagaaucauaaccag

SEQ ID NO: 1287809 - RNA, 19 nt, Artificial Sequence
  Description of Artificial Sequence: Synthetic oligonucleotide
  Antisense strand to SEQ ID NO: 1287808
cugguuaugauucuaucau

SEQ ID NO: 1287810 - RNA, 19 nt, Artificial Sequence
  Description of Artificial Sequence: Synthetic oligonucleotide
  Sense strand starting at position 1304 of SEQ ID NO: 1241636
ucauaaccagcucaggauu

SEQ ID NO: 1287811 - RNA, 19 nt, Artificial Sequence
  Description of Artificial Sequence: Synthetic oligonucleotide
  Antisense strand to SEQ ID NO: 1287810
aauccugagcugguuauga

SEQ ID NO: 1287812 - RNA, 19 nt, Artificial Sequence
  Description of Artificial Sequence: Synthetic oligonucleotide
  Sense strand starting at position 1356 of SEQ ID NO: 1241636
gucagagucucgcuauguc

SEQ ID NO: 1287813 - RNA, 19 nt, Artificial Sequence
  Description of Artificial Sequence: Synthetic oligonucleotide
  Antisense strand to SEQ ID NO: 1287812
gacauagcgagacucugac

SEQ ID NO: 1287814 - RNA, 19 nt, Artificial Sequence
  Description of Artificial Sequence: Synthetic oligonucleotide
  Sense strand starting at position 1673 of SEQ ID NO: 1241636
gcaaacauuucuggagcau

SEQ ID NO: 1287815 - RNA, 19 nt, Artificial Sequence
  Description of Artificial Sequence: Synthetic oligonucleotide
  Antisense strand to SEQ ID NO: 1287814
augcuccagaaauguuugc

SEQ ID NO: 1287816 - RNA, 19 nt, Artificial Sequence
  Description of Artificial Sequence: Synthetic oligonucleotide
  Sense strand starting at position 1699 of SEQ ID NO: 1241636
uguguugagcucuggagag

SEQ ID NO: 1287817 - RNA, 19 nt, Artificial Sequence
  Description of Artificial Sequence: Synthetic oligonucleotide
  Antisense strand to SEQ ID NO: 1287816
cucuccagagcucaacaca

SEQ ID NO: 1287818 - RNA, 19 nt, Artificial Sequence
  Description of Artificial Sequence: Synthetic oligonucleotide
  Sense strand starting at position 1718 of SEQ ID NO: 1241636
agcugaggauaucugugau

SEQ ID NO: 1287819 - RNA, 19 nt, Artificial Sequence
  Description of Artificial Sequence: Synthetic oligonucleotide
  Antisense strand to SEQ ID NO: 1287818
aucacagauauccucagcu

SEQ ID NO: 1287820 - RNA, 19 nt, Artificial Sequence
  Description of Artificial Sequence: Synthetic oligonucleotide
  Sense strand starting at position 1721 of SEQ ID NO: 1241636
ugaggauaucugugaucca

SEQ ID NO: 1287821 - RNA, 19 nt, Artificial Sequence
  Description of Artificial Sequence: Synthetic oligonucleotide
  Antisense strand to SEQ ID NO: 1287820
uggaucacagauauccuca

SEQ ID NO: 1287822 - RNA, 19 nt, Artificial Sequence
  Description of Artificial Sequence: Synthetic oligonucleotide
  Sense strand starting at position 1722 of SEQ ID NO: 1241636
gaggauaucugugauccac

SEQ ID NO: 1287823 - RNA, 19 nt, Artificial Sequence
  Description of Artificial Sequence: Synthetic oligonucleotide
  Antisense strand to SEQ ID NO: 1287822
guggaucacagauauccuc

SEQ ID NO: 1287824 - RNA, 19 nt, Artificial Sequence
  Description of Artificial Sequence: Synthetic oligonucleotide
  Sense strand starting at position 1724 of SEQ ID NO: 1241636
ggauaucugugauccacag

SEQ ID NO: 1287825 - RNA, 19 nt, Artificial Sequence
  Description of Artificial Sequence: Synthetic oligonucleotide
  Antisense strand to SEQ ID NO: 1287824
cuguggaucacagauaucc

SEQ ID NO: 1287826 - RNA, 19 nt, Artificial Sequence
  Description of Artificial Sequence: Synthetic oligonucleotide
  Sense strand starting at position 1772 of SEQ ID NO: 1241636
cuugguauccaguacgcau

SEQ ID NO: 1287827 - RNA, 19 nt, Artificial Sequence
  Description of Artificial Sequence: Synthetic oligonucleotide
  Antisense strand to SEQ ID NO: 1287826
augcguacuggauaccaag

SEQ ID NO: 1287828 - RNA, 19 nt, Artificial Sequence
  Description of Artificial Sequence: Synthetic oligonucleotide
  Sense strand starting at position 1871 of SEQ ID NO: 1241636
cugcuccuccugugggaau

SEQ ID NO: 1287829 - RNA, 19 nt, Artificial Sequence
  Description of Artificial Sequence: Synthetic oligonucleotide
  Antisense strand to SEQ ID NO: 1287828
auucccacaggaggagcag

SEQ ID NO: 1287830 - RNA, 19 nt, Artificial Sequence
  Description of Artificial Sequence: Synthetic oligonucleotide
  Sense strand starting at position 1971 of SEQ ID NO: 1241636
gucaguguggucagcgagu

SEQ ID NO: 1287831 - RNA, 19 nt, Artificial Sequence
  Description of Artificial Sequence: Synthetic oligonucleotide
  Antisense strand to SEQ ID NO: 1287830
acucgcugaccacacugac

SEQ ID NO: 1287832 - RNA, 19 nt, Artificial Sequence
  Description of Artificial Sequence: Synthetic oligonucleotide
  Sense strand starting at position 2196 of SEQ ID NO: 1241636
gcuucuuccugagcaaugu

SEQ ID NO: 1287833 - RNA, 19 nt, Artificial Sequence
  Description of Artificial Sequence: Synthetic oligonucleotide
  Antisense strand to SEQ ID NO: 1287832
acauugcucaggaagaagc

SEQ ID NO: 1287834 - RNA, 19 nt, Artificial Sequence
  Description of Artificial Sequence: Synthetic oligonucleotide
  Sense strand starting at position 2200 of SEQ ID NO: 1241636
cuuccugagcaauguguga

SEQ ID NO: 1287835 - RNA, 19 nt, Artificial Sequence
  Description of Artificial Sequence: Synthetic oligonucleotide
  Antisense strand to SEQ ID NO: 1287834
ucacacauugcucaggaag

SEQ ID NO: 1287836 - RNA, 19 nt, Artificial Sequence
  Description of Artificial Sequence: Synthetic oligonucleotide
  Sense strand starting at position 2873 of SEQ ID NO: 1241636
ugcggaugagcucauacuu

SEQ ID NO: 1287837 - RNA, 19 nt, Artificial Sequence
  Description of Artificial Sequence: Synthetic oligonucleotide
  Antisense strand to SEQ ID NO: 1287836
aaguaugagcucauccgca

SEQ ID NO: 1287838 - RNA, 19 nt, Artificial Sequence
  Description of Artificial Sequence: Synthetic oligonucleotide
  Sense strand starting at position 2888 of SEQ ID NO: 1241636
acuugagccuuagaauaaa

SEQ ID NO: 1287839 - RNA, 19 nt, Artificial Sequence
  Description of Artificial Sequence: Synthetic oligonucleotide
  Antisense strand to SEQ ID NO: 1287838
uuuauucuaaggcucaagu

SEQ ID NO: 1287840 - RNA, 19 nt, Artificial Sequence
  Description of Artificial Sequence: Synthetic oligonucleotide
  Sense strand starting at position 3088 of SEQ ID NO: 1241636
gugccacuucuaggacuuu

SEQ ID NO: 1287841 - RNA, 19 nt, Artificial Sequence
  Description of Artificial Sequence: Synthetic oligonucleotide
  Antisense strand to SEQ ID NO: 1287840
aaaguccuagaaguggcac

SEQ ID NO: 1287842 - RNA, 19 nt, Artificial Sequence
  Description of Artificial Sequence: Synthetic oligonucleotide
  Sense strand starting at position 3156 of SEQ ID NO: 1241636
gagagucucccaugcauga

SEQ ID NO: 1287843 - RNA, 19 nt, Artificial Sequence
  Description of Artificial Sequence: Synthetic oligonucleotide
  Antisense strand to SEQ ID NO: 1287842
ucaugcaugggagacucuc

SEQ ID NO: 1287844 - RNA, 19 nt, Artificial Sequence
  Description of Artificial Sequence: Synthetic oligonucleotide
  Sense strand starting at position 3175 of SEQ ID NO: 1241636
ggagcuggauguugagaua

SEQ ID NO: 1287845 - RNA, 19 nt, Artificial Sequence
  Description of Artificial Sequence: Synthetic oligonucleotide
  Antisense strand to SEQ ID NO: 1287844
uaucucaacauccagcucc

SEQ ID NO: 1287846 - RNA, 19 nt, Artificial Sequence
  Description of Artificial Sequence: Synthetic oligonucleotide
  Sense strand starting at position 3188 of SEQ ID NO: 1241636
gagauacagccgugaacua

SEQ ID NO: 1287847 - RNA, 19 nt, Artificial Sequence
  Description of Artificial Sequence: Synthetic oligonucleotide
  Antisense strand to SEQ ID NO: 1287846
uaguucacggcuguaucuc

SEQ ID NO: 1287848 - RNA, 19 nt, Artificial Sequence
  Description of Artificial Sequence: Synthetic oligonucleotide
  Sense strand starting at position 3247 of SEQ ID NO: 1241636
gagggcuaccgagaguaaa

SEQ ID NO: 1287849 - RNA, 19 nt, Artificial Sequence
  Description of Artificial Sequence: Synthetic oligonucleotide
  Antisense strand to SEQ ID NO: 1287848
uuuacucucgguagcccuc

SEQ ID NO: 1287850 - RNA, 19 nt, Artificial Sequence
  Description of Artificial Sequence: Synthetic oligonucleotide
  Sense strand starting at position 3342 of SEQ ID NO: 1241636
gccuguaaucucugcauua

SEQ ID NO: 1287851 - RNA, 19 nt, Artificial Sequence
  Description of Artificial Sequence: Synthetic oligonucleotide
  Antisense strand to SEQ ID NO: 1287850
uaaugcagagauuacaggc

SEQ ID NO: 1287852 - RNA, 19 nt, Artificial Sequence
  Description of Artificial Sequence: Synthetic oligonucleotide
  Sense strand starting at position 3344 of SEQ ID NO: 1241636
cuguaaucucugcauuaug

SEQ ID NO: 1287853 - RNA, 19 nt, Artificial Sequence
  Description of Artificial Sequence: Synthetic oligonucleotide
  Antisense strand to SEQ ID NO: 1287852
cauaaugcagagauuacag

SEQ ID NO: 1287854 - RNA, 19 nt, Artificial Sequence
  Description of Artificial Sequence: Synthetic oligonucleotide
  Sense strand starting at position 3954 of SEQ ID NO: 1241636
cgucucucccacuagauaa

SEQ ID NO: 1287855 - RNA, 19 nt, Artificial Sequence
  Description of Artificial Sequence: Synthetic oligonucleotide
  Antisense strand to SEQ ID NO: 1287854
uuaucuagugggagagacg

SEQ ID NO: 1287856 - RNA, 19 nt, Artificial Sequence
  Description of Artificial Sequence: Synthetic oligonucleotide
  Sense strand starting at position 436 of SEQ ID NO: 1241637
cacagagaaguucggugaa

SEQ ID NO: 1287857 - RNA, 19 nt, Artificial Sequence
  Description of Artificial Sequence: Synthetic oligonucleotide
  Antisense strand to SEQ ID NO: 1287856
uucaccgaacuucucugug

SEQ ID NO: 1287858 - RNA, 19 nt, Artificial Sequence
  Description of Artificial Sequence: Synthetic oligonucleotide
  Sense strand starting at position 439 of SEQ ID NO: 1241637
agagaaguucggugaaggu

SEQ ID NO: 1287859 - RNA, 19 nt, Artificial Sequence
  Description of Artificial Sequence: Synthetic oligonucleotide
  Antisense strand to SEQ ID NO: 1287858
accuucaccgaacuucucu

SEQ ID NO: 1287860 - RNA, 19 nt, Artificial Sequence
  Description of Artificial Sequence: Synthetic oligonucleotide
  Sense strand starting at position 462 of SEQ ID NO: 1241637
ugucaaauucgauggacuc

SEQ ID NO: 1287861 - RNA, 19 nt, Artificial Sequence
  Description of Artificial Sequence: Synthetic oligonucleotide
  Antisense strand to SEQ ID NO: 1287860
gaguccaucgaauuugaca

SEQ ID NO: 1287862 - RNA, 19 nt, Artificial Sequence
  Description of Artificial Sequence: Synthetic oligonucleotide
  Sense strand starting at position 573 of SEQ ID NO: 1241637
guggguacggcuucucgua

SEQ ID NO: 1287863 - RNA, 19 nt, Artificial Sequence
  Description of Artificial Sequence: Synthetic oligonucleotide
  Antisense strand to SEQ ID NO: 1287862
uacgagaagccguacccac

SEQ ID NO: 1287864 - RNA, 19 nt, Artificial Sequence
  Description of Artificial Sequence: Synthetic oligonucleotide
  Sense strand starting at position 722 of SEQ ID NO: 1241637
gcgcgauugauguccggau

SEQ ID NO: 1287865 - RNA, 19 nt, Artificial Sequence
  Description of Artificial Sequence: Synthetic oligonucleotide
  Antisense strand to SEQ ID NO: 1287864
auccggacaucaaucgcgc

SEQ ID NO: 1287866 - RNA, 19 nt, Artificial Sequence
  Description of Artificial Sequence: Synthetic oligonucleotide
  Sense strand starting at position 726 of SEQ ID NO: 1241637
gauugauguccggauggac

SEQ ID NO: 1287867 - RNA, 19 nt, Artificial Sequence
  Description of Artificial Sequence: Synthetic oligonucleotide
  Antisense strand to SEQ ID NO: 1287866
guccauccggacaucaauc

SEQ ID NO: 1287868 - RNA, 19 nt, Artificial Sequence
  Description of Artificial Sequence: Synthetic oligonucleotide
  Sense strand starting at position 926 of SEQ ID NO: 1241637
aauagauagugccugaucu

SEQ ID NO: 1287869 - RNA, 19 nt, Artificial Sequence
  Description of Artificial Sequence: Synthetic oligonucleotide
  Antisense strand to SEQ ID NO: 1287868
agaucaggcacuaucuauu

SEQ ID NO: 1287870 - RNA, 19 nt, Artificial Sequence
  Description of Artificial Sequence: Synthetic oligonucleotide
  Sense strand starting at position 1014 of SEQ ID NO: 1241637
ucuggaacucaucgaugua

SEQ ID NO: 1287871 - RNA, 19 nt, Artificial Sequence
  Description of Artificial Sequence: Synthetic oligonucleotide
  Antisense strand to SEQ ID NO: 1287870
uacaucgaugaguuccaga

SEQ ID NO: 1287872 - RNA, 19 nt, Artificial Sequence
  Description of Artificial Sequence: Synthetic oligonucleotide
  Sense strand starting at position 1017 of SEQ ID NO: 1241637
ggaacucaucgauguacuc

SEQ ID NO: 1287873 - RNA, 19 nt, Artificial Sequence
  Description of Artificial Sequence: Synthetic oligonucleotide
  Antisense strand to SEQ ID NO: 1287872
gaguacaucgaugaguucc

SEQ ID NO: 1287874 - RNA, 19 nt, Artificial Sequence
  Description of Artificial Sequence: Synthetic oligonucleotide
  Sense strand starting at position 1175 of SEQ ID NO: 1241637
agagcuuuggcccauucua

SEQ ID NO: 1287875 - RNA, 19 nt, Artificial Sequence
  Description of Artificial Sequence: Synthetic oligonucleotide
  Antisense strand to SEQ ID NO: 1287874
uagaaugggccaaagcucu

SEQ ID NO: 1287876 - RNA, 19 nt, Artificial Sequence
  Description of Artificial Sequence: Synthetic oligonucleotide
  Sense strand starting at position 1233 of SEQ ID NO: 1241637
ucagacggucguuauagaa

SEQ ID NO: 1287877 - RNA, 19 nt, Artificial Sequence
  Description of Artificial Sequence: Synthetic oligonucleotide
  Antisense strand to SEQ ID NO: 1287876
uucuauaacgaccgucuga

SEQ ID NO: 1287878 - RNA, 19 nt, Artificial Sequence
  Description of Artificial Sequence: Synthetic oligonucleotide
  Sense strand starting at position 1240 of SEQ ID NO: 1241637
gucguuauagaacauucuu

SEQ ID NO: 1287879 - RNA, 19 nt, Artificial Sequence
  Description of Artificial Sequence: Synthetic oligonucleotide
  Antisense strand to SEQ ID NO: 1287878
aagaauguucuauaacgac

SEQ ID NO: 1287880 - RNA, 19 nt, Artificial Sequence
  Description of Artificial Sequence: Synthetic oligonucleotide
  Sense strand starting at position 1245 of SEQ ID NO: 1241637
uauagaacauucuugggua

SEQ ID NO: 1287881 - RNA, 19 nt, Artificial Sequence
  Description of Artificial Sequence: Synthetic oligonucleotide
  Antisense strand to SEQ ID NO: 1287880
uacccaagaauguucuaua

SEQ ID NO: 1287882 - RNA, 19 nt, Artificial Sequence
  Description of Artificial Sequence: Synthetic oligonucleotide
  Sense strand starting at position 1291 of SEQ ID NO: 1241637
gaugaacucguggaauucu

SEQ ID NO: 1287883 - RNA, 19 nt, Artificial Sequence
  Description of Artificial Sequence: Synthetic oligonucleotide
  Antisense strand to SEQ ID NO: 1287882
agaauuccacgaguucauc

SEQ ID NO: 1287884 - RNA, 19 nt, Artificial Sequence
  Description of Artificial Sequence: Synthetic oligonucleotide
  Sense strand starting at position 1311 of SEQ ID NO: 1241637
ugcgaucgccagagaagug

SEQ ID NO: 1287885 - RNA, 19 nt, Artificial Sequence
  Description of Artificial Sequence: Synthetic oligonucleotide
  Antisense strand to SEQ ID NO: 1287884
cacuucucuggcgaucgca

SEQ ID NO: 1287886 - RNA, 19 nt, Artificial Sequence
  Description of Artificial Sequence: Synthetic oligonucleotide
  Sense strand starting at position 1356 of SEQ ID NO: 1241637
ugaucccuuugaucaagau

SEQ ID NO: 1287887 - RNA, 19 nt, Artificial Sequence
  Description of Artificial Sequence: Synthetic oligonucleotide
  Antisense strand to SEQ ID NO: 1287886
aucuugaucaaagggauca

SEQ ID NO: 1287888 - RNA, 19 nt, Artificial Sequence
  Description of Artificial Sequence: Synthetic oligonucleotide
  Sense strand starting at position 1464 of SEQ ID NO: 1241637
uugagugcucggucugguu

SEQ ID NO: 1287889 - RNA, 19 nt, Artificial Sequence
  Description of Artificial Sequence: Synthetic oligonucleotide
  Antisense strand to SEQ ID NO: 1287888
aaccagaccgagcacucaa

SEQ ID NO: 1287890 - RNA, 19 nt, Artificial Sequence
  Description of Artificial Sequence: Synthetic oligonucleotide
  Sense strand starting at position 1552 of SEQ ID NO: 1241637
ucccgauggguugacugau

SEQ ID NO: 1287891 - RNA, 19 nt, Artificial Sequence
  Description of Artificial Sequence: Synthetic oligonucleotide
  Antisense strand to SEQ ID NO: 1287890
aucagucaacccaucggga

SEQ ID NO: 1287892 - RNA, 19 nt, Artificial Sequence
  Description of Artificial Sequence: Synthetic oligonucleotide
  Sense strand starting at position 1633 of SEQ ID NO: 1241637
gcaugacuccuccaggucu

SEQ ID NO: 1287893 - RNA, 19 nt, Artificial Sequence
  Description of Artificial Sequence: Synthetic oligonucleotide
  Antisense strand to SEQ ID NO: 1287892
agaccuggaggagucaugc

SEQ ID NO: 1287894 - RNA, 19 nt, Artificial Sequence
  Description of Artificial Sequence: Synthetic oligonucleotide
  Sense strand starting at position 1936 of SEQ ID NO: 1241637
uaucauuucgucggaugga

SEQ ID NO: 1287895 - RNA, 19 nt, Artificial Sequence
  Description of Artificial Sequence: Synthetic oligonucleotide
  Antisense strand to SEQ ID NO: 1287894
uccauccgacgaaaugaua

SEQ ID NO: 1287896 - RNA, 19 nt, Artificial Sequence
  Description of Artificial Sequence: Synthetic oligonucleotide
  Sense strand starting at position 1954 of SEQ ID NO: 1241637
aaaggaguguauucugaag

SEQ ID NO: 1287897 - RNA, 19 nt, Artificial Sequence
  Description of Artificial Sequence: Synthetic oligonucleotide
  Antisense strand to SEQ ID NO: 1287896
cuucagaauacacuccuuu

SEQ ID NO: 1287898 - RNA, 19 nt, Artificial Sequence
  Description of Artificial Sequence: Synthetic oligonucleotide
  Sense strand starting at position 1960 of SEQ ID NO: 1241637
guguauucugaagauuggu

SEQ ID NO: 1287899 - RNA, 19 nt, Artificial Sequence
  Description of Artificial Sequence: Synthetic oligonucleotide
  Antisense strand to SEQ ID NO: 1287898
accaaucuucagaauacac

SEQ ID NO: 1287900 - RNA, 19 nt, Artificial Sequence
  Description of Artificial Sequence: Synthetic oligonucleotide
  Sense strand starting at position 1965 of SEQ ID NO: 1241637
uucugaagauugguaaggu

SEQ ID NO: 1287901 - RNA, 19 nt, Artificial Sequence
  Description of Artificial Sequence: Synthetic oligonucleotide
  Antisense strand to SEQ ID NO: 1287900
accuuaccaaucuucagaa

SEQ ID NO: 1287902 - RNA, 19 nt, Artificial Sequence
  Description of Artificial Sequence: Synthetic oligonucleotide
  Sense strand starting at position 2052 of SEQ ID NO: 1241637
gaguaaaggcaguaguuua

SEQ ID NO: 1287903 - RNA, 19 nt, Artificial Sequence
  Description of Artificial Sequence: Synthetic oligonucleotide
  Antisense strand to SEQ ID NO: 1287902
uaaacuacugccuuuacuc

SEQ ID NO: 1287904 - RNA, 19 nt, Artificial Sequence
  Description of Artificial Sequence: Synthetic oligonucleotide
  Sense strand starting at position 2524 of SEQ ID NO: 1241637
agcaaagaugccuacuguu

SEQ ID NO: 1287905 - RNA, 19 nt, Artificial Sequence
  Description of Artificial Sequence: Synthetic oligonucleotide
  Antisense strand to SEQ ID NO: 1287904
aacaguaggcaucuuugcu

SEQ ID NO: 1287906 - RNA, 19 nt, Artificial Sequence
  Description of Artificial Sequence: Synthetic oligonucleotide
  Sense strand starting at position 2714 of SEQ ID NO: 1241637
uacuaugugcuggauaacu

SEQ ID NO: 1287907 - RNA, 19 nt, Artificial Sequence
  Description of Artificial Sequence: Synthetic oligonucleotide
  Antisense strand to SEQ ID NO: 1287906
aguuauccagcacauagua

SEQ ID NO: 1287908 - RNA, 19 nt, Artificial Sequence
  Description of Artificial Sequence: Synthetic oligonucleotide
  Sense strand starting at position 2733 of SEQ ID NO: 1241637
gcauauuuguuacuugauu

SEQ ID NO: 1287909 - RNA, 19 nt, Artificial Sequence
  Description of Artificial Sequence: Synthetic oligonucleotide
  Antisense strand to SEQ ID NO: 1287908
aaucaaguaacaaauaugc

SEQ ID NO: 1287910 - RNA, 19 nt, Artificial Sequence
  Description of Artificial Sequence: Synthetic oligonucleotide
  Sense strand starting at position 2768 of SEQ ID NO: 1241637
gccaauuucucuuucucga

SEQ ID NO: 1287911 - RNA, 19 nt, Artificial Sequence
  Description of Artificial Sequence: Synthetic oligonucleotide
  Antisense strand to SEQ ID NO: 1287910
ucgagaaagagaaauuggc

SEQ ID NO: 1287912 - RNA, 19 nt, Artificial Sequence
  Description of Artificial Sequence: Synthetic oligonucleotide
  Sense strand starting at position 2783 of SEQ ID NO: 1241637
ucgauuuggucuccuucca

SEQ ID NO: 1287913 - RNA, 19 nt, Artificial Sequence
  Description of Artificial Sequence: Synthetic oligonucleotide
  Antisense strand to SEQ ID NO: 1287912
uggaaggagaccaaaucga

SEQ ID NO: 1287914 - RNA, 19 nt, Artificial Sequence
  Description of Artificial Sequence: Synthetic oligonucleotide
  Sense strand starting at position 2820 of SEQ ID NO: 1241637
cucugagcuguugaggaga

SEQ ID NO: 1287915 - RNA, 19 nt, Artificial Sequence
  Description of Artificial Sequence: Synthetic oligonucleotide
  Antisense strand to SEQ ID NO: 1287914
ucuccucaacagcucagag

SEQ ID NO: 1287916 - RNA, 19 nt, Artificial Sequence
  Description of Artificial Sequence: Synthetic oligonucleotide
  Sense strand starting at position 3117 of SEQ ID NO: 1241637
augugacaucuuuggaauc

SEQ ID NO: 1287917 - RNA, 19 nt, Artificial Sequence
  Description of Artificial Sequence: Synthetic oligonucleotide
  Antisense strand to SEQ ID NO: 1287916
gauuccaaagaugucacau

SEQ ID NO: 1287918 - RNA, 19 nt, Artificial Sequence
  Description of Artificial Sequence: Synthetic oligonucleotide
  Sense strand starting at position 3262 of SEQ ID NO: 1241637
uuaagcuuugauuaucuga

SEQ ID NO: 1287919 - RNA, 19 nt, Artificial Sequence
  Description of Artificial Sequence: Synthetic oligonucleotide
  Antisense strand to SEQ ID NO: 1287918
ucagauaaucaaagcuuaa

SEQ ID NO: 1287920 - RNA, 19 nt, Artificial Sequence
  Description of Artificial Sequence: Synthetic oligonucleotide
  Sense strand starting at position 3265 of SEQ ID NO: 1241637
agcuuugauuaucugauag

SEQ ID NO: 1287921 - RNA, 19 nt, Artificial Sequence
  Description of Artificial Sequence: Synthetic oligonucleotide
  Antisense strand to SEQ ID NO: 1287920
cuaucagauaaucaaagcu

SEQ ID NO: 1287922 - RNA, 19 nt, Artificial Sequence
  Description of Artificial Sequence: Synthetic oligonucleotide
  Sense strand starting at position 3280 of SEQ ID NO: 1241637
auagauuaacuguaaagcu

SEQ ID NO: 1287923 - RNA, 19 nt, Artificial Sequence
  Description of Artificial Sequence: Synthetic oligonucleotide
  Antisense strand to SEQ ID NO: 1287922
agcuuuacaguuaaucuau

SEQ ID NO: 1287924 - RNA, 19 nt, Artificial Sequence
  Description of Artificial Sequence: Synthetic oligonucleotide
  Sense strand starting at position 3480 of SEQ ID NO: 1241637
ccuuguuagcaugacacuu

SEQ ID NO: 1287925 - RNA, 19 nt, Artificial Sequence
  Description of Artificial Sequence: Synthetic oligonucleotide
  Antisense strand to SEQ ID NO: 1287924
aagugucaugcuaacaagg

SEQ ID NO: 1287926 - RNA, 19 nt, Artificial Sequence
  Description of Artificial Sequence: Synthetic oligonucleotide
  Sense strand starting at position 3529 of SEQ ID NO: 1241637
gccuuccacuguuuauuua

SEQ ID NO: 1287927 - RNA, 19 nt, Artificial Sequence
  Description of Artificial Sequence: Synthetic oligonucleotide
  Antisense strand to SEQ ID NO: 1287926
uaaauaaacaguggaaggc

SEQ ID NO: 1287928 - RNA, 19 nt, Artificial Sequence
  Description of Artificial Sequence: Synthetic oligonucleotide
  Sense strand starting at position 3628 of SEQ ID NO: 1241637
auguaagggccuuaauaua

SEQ ID NO: 1287929 - RNA, 19 nt, Artificial Sequence
  Description of Artificial Sequence: Synthetic oligonucleotide
  Antisense strand to SEQ ID NO: 1287928
uauauuaaggcccuuacau

SEQ ID NO: 1287930 - RNA, 19 nt, Artificial Sequence
  Description of Artificial Sequence: Synthetic oligonucleotide
  Sense strand starting at position 3662 of SEQ ID NO: 1241637
uuugucauuccucaaggua

SEQ ID NO: 1287931 - RNA, 19 nt, Artificial Sequence
  Description of Artificial Sequence: Synthetic oligonucleotide
  Antisense strand to SEQ ID NO: 1287930
uaccuugaggaaugacaaa

SEQ ID NO: 1287932 - RNA, 19 nt, Artificial Sequence
  Description of Artificial Sequence: Synthetic oligonucleotide
  Sense strand starting at position 3665 of SEQ ID NO: 1241637
gucauuccucaagguagag

SEQ ID NO: 1287933 - RNA, 19 nt, Artificial Sequence
  Description of Artificial Sequence: Synthetic oligonucleotide
  Antisense strand to SEQ ID NO: 1287932
cucuaccuugaggaaugac

SEQ ID NO: 1287934 - RNA, 19 nt, Artificial Sequence
  Description of Artificial Sequence: Synthetic oligonucleotide
  Sense strand starting at position 3813 of SEQ ID NO: 1241637
ugagauaugcauuauuacu

SEQ ID NO: 1287935 - RNA, 19 nt, Artificial Sequence
  Description of Artificial Sequence: Synthetic oligonucleotide
  Antisense strand to SEQ ID NO: 1287934
aguaauaaugcauaucuca

SEQ ID NO: 1287936 - RNA, 19 nt, Artificial Sequence
  Description of Artificial Sequence: Synthetic oligonucleotide
  Sense strand starting at position 34 of SEQ ID NO: 1241638
ugucuauuaucauuugcca

SEQ ID NO: 1287937 - RNA, 19 nt, Artificial Sequence
  Description of Artificial Sequence: Synthetic oligonucleotide
  Antisense strand to SEQ ID NO: 1287936
uggcaaaugauaauagaca

SEQ ID NO: 1287938 - RNA, 19 nt, Artificial Sequence
  Description of Artificial Sequence: Synthetic oligonucleotide
  Sense strand starting at position 337 of SEQ ID NO: 1241638
agggcaguuaauuacgauu

SEQ ID NO: 1287939 - RNA, 19 nt, Artificial Sequence
  Description of Artificial Sequence: Synthetic oligonucleotide
  Antisense strand to SEQ ID NO: 1287938
aaucguaauuaacugcccu

SEQ ID NO: 1287940 - RNA, 19 nt, Artificial Sequence
  Description of Artificial Sequence: Synthetic oligonucleotide
  Sense strand starting at position 343 of SEQ ID NO: 1241638
guuaauuacgauuaccuua

SEQ ID NO: 1287941 - RNA, 19 nt, Artificial Sequence
  Description of Artificial Sequence: Synthetic oligonucleotide
  Antisense strand to SEQ ID NO: 1287940
uaagguaaucguaauuaac

SEQ ID NO: 1287942 - RNA, 19 nt, Artificial Sequence
  Description of Artificial Sequence: Synthetic oligonucleotide
  Sense strand starting at position 676 of SEQ ID NO: 1241638
gcgcgcucagacuuugaau

SEQ ID NO: 1287943 - RNA, 19 nt, Artificial Sequence
  Description of Artificial Sequence: Synthetic oligonucleotide
  Antisense strand to SEQ ID NO: 1287942
auucaaagucugagcgcgc

SEQ ID NO: 1287944 - RNA, 19 nt, Artificial Sequence
  Description of Artificial Sequence: Synthetic oligonucleotide
  Sense strand starting at position 752 of SEQ ID NO: 1241638
ggcgcuuagacugcuggua

SEQ ID NO: 1287945 - RNA, 19 nt, Artificial Sequence
  Description of Artificial Sequence: Synthetic oligonucleotide
  Antisense strand to SEQ ID NO: 1287944
uaccagcagucuaagcgcc

SEQ ID NO: 1287946 - RNA, 19 nt, Artificial Sequence
  Description of Artificial Sequence: Synthetic oligonucleotide
  Sense strand starting at position 753 of SEQ ID NO: 1241638
gcgcuuagacugcugguaa

SEQ ID NO: 1287947 - RNA, 19 nt, Artificial Sequence
  Description of Artificial Sequence: Synthetic oligonucleotide
  Antisense strand to SEQ ID NO: 1287946
uuaccagcagucuaagcgc

SEQ ID NO: 1287948 - RNA, 19 nt, Artificial Sequence
  Description of Artificial Sequence: Synthetic oligonucleotide
  Sense strand starting at position 829 of SEQ ID NO: 1241638
gcacuuaggacuugaaguu

SEQ ID NO: 1287949 - RNA, 19 nt, Artificial Sequence
  Description of Artificial Sequence: Synthetic oligonucleotide
  Antisense strand to SEQ ID NO: 1287948
aacuucaaguccuaagugc

SEQ ID NO: 1287950 - RNA, 19 nt, Artificial Sequence
  Description of Artificial Sequence: Synthetic oligonucleotide
  Sense strand starting at position 1233 of SEQ ID NO: 1241638
agaaacuuguacccagacu

SEQ ID NO: 1287951 - RNA, 19 nt, Artificial Sequence
  Description of Artificial Sequence: Synthetic oligonucleotide
  Antisense strand to SEQ ID NO: 1287950
agucuggguacaaguuucu

SEQ ID NO: 1287952 - RNA, 19 nt, Artificial Sequence
  Description of Artificial Sequence: Synthetic oligonucleotide
  Sense strand starting at position 2346 of SEQ ID NO: 1241638
uucugagagugaccaguau

SEQ ID NO: 1287953 - RNA, 19 nt, Artificial Sequence
  Description of Artificial Sequence: Synthetic oligonucleotide
  Antisense strand to SEQ ID NO: 1287952
auacuggucacucucagaa

SEQ ID NO: 1287954 - RNA, 19 nt, Artificial Sequence
  Description of Artificial Sequence: Synthetic oligonucleotide
  Sense strand starting at position 2350 of SEQ ID NO: 1241638
gagagugaccaguaugagu

SEQ ID NO: 1287955 - RNA, 19 nt, Artificial Sequence
  Description of Artificial Sequence: Synthetic oligonucleotide
  Antisense strand to SEQ ID NO: 1287954
acucauacuggucacucuc

SEQ ID NO: 1287956 - RNA, 19 nt, Artificial Sequence
  Description of Artificial Sequence: Synthetic oligonucleotide
  Sense strand starting at position 2352 of SEQ ID NO: 1241638
gagugaccaguaugaguug

SEQ ID NO: 1287957 - RNA, 19 nt, Artificial Sequence
  Description of Artificial Sequence: Synthetic oligonucleotide
  Antisense strand to SEQ ID NO: 1287956
caacucauacuggucacuc

SEQ ID NO: 1287958 - RNA, 19 nt, Artificial Sequence
  Description of Artificial Sequence: Synthetic oligonucleotide
  Sense strand starting at position 2408 of SEQ ID NO: 1241638
auggguucugauggcagau

SEQ ID NO: 1287959 - RNA, 19 nt, Artificial Sequence
  Description of Artificial Sequence: Synthetic oligonucleotide
  Antisense strand to SEQ ID NO: 1287958
aucugccaucagaacccau

SEQ ID NO: 1287960 - RNA, 19 nt, Artificial Sequence
  Description of Artificial Sequence: Synthetic oligonucleotide
  Sense strand starting at position 2452 of SEQ ID NO: 1241638
cgguuaaauccugcguuuc

SEQ ID NO: 1287961 - RNA, 19 nt, Artificial Sequence
  Description of Artificial Sequence: Synthetic oligonucleotide
  Antisense strand to SEQ ID NO: 1287960
gaaacgcaggauuuaaccg

SEQ ID NO: 1287962 - RNA, 19 nt, Artificial Sequence
  Description of Artificial Sequence: Synthetic oligonucleotide
  Sense strand starting at position 2563 of SEQ ID NO: 1241638
gggcaaacagggugucaau

SEQ ID NO: 1287963 - RNA, 19 nt, Artificial Sequence
  Description of Artificial Sequence: Synthetic oligonucleotide
  Antisense strand to SEQ ID NO: 1287962
auugacacccuguuugccc

SEQ ID NO: 1287964 - RNA, 19 nt, Artificial Sequence
  Description of Artificial Sequence: Synthetic oligonucleotide
  Sense strand starting at position 2628 of SEQ ID NO: 1241638
aggccauccuaaucauaag

SEQ ID NO: 1287965 - RNA, 19 nt, Artificial Sequence
  Description of Artificial Sequence: Synthetic oligonucleotide
  Antisense strand to SEQ ID NO: 1287964
cuuaugauuaggauggccu

SEQ ID NO: 1287966 - RNA, 19 nt, Artificial Sequence
  Description of Artificial Sequence: Synthetic oligonucleotide
  Sense strand starting at position 2651 of SEQ ID NO: 1241638
cugugcaguccguuguauu

SEQ ID NO: 1287967 - RNA, 19 nt, Artificial Sequence
  Description of Artificial Sequence: Synthetic oligonucleotide
  Antisense strand to SEQ ID NO: 1287966
aauacaacggacugcacag

SEQ ID NO: 1287968 - RNA, 19 nt, Artificial Sequence
  Description of Artificial Sequence: Synthetic oligonucleotide
  Sense strand starting at position 2678 of SEQ ID NO: 1241638
uggacauuccaugaagcuu

SEQ ID NO: 1287969 - RNA, 19 nt, Artificial Sequence
  Description of Artificial Sequence: Synthetic oligonucleotide
  Antisense strand to SEQ ID NO: 1287968
aagcuucauggaaugucca

SEQ ID NO: 1287970 - RNA, 19 nt, Artificial Sequence
  Description of Artificial Sequence: Synthetic oligonucleotide
  Sense strand starting at position 2766 of SEQ ID NO: 1241638
aggaaagugacuugccuua

SEQ ID NO: 1287971 - RNA, 19 nt, Artificial Sequence
  Description of Artificial Sequence: Synthetic oligonucleotide
  Antisense strand to SEQ ID NO: 1287970
uaaggcaagucacuuuccu

SEQ ID NO: 1287972 - RNA, 19 nt, Artificial Sequence
  Description of Artificial Sequence: Synthetic oligonucleotide
  Sense strand starting at position 2768 of SEQ ID NO: 1241638
gaaagugacuugccuuauc

SEQ ID NO: 1287973 - RNA, 19 nt, Artificial Sequence
  Description of Artificial Sequence: Synthetic oligonucleotide
  Antisense strand to SEQ ID NO: 1287972
gauaaggcaagucacuuuc

SEQ ID NO: 1287974 - RNA, 19 nt, Artificial Sequence
  Description of Artificial Sequence: Synthetic oligonucleotide
  Sense strand starting at position 2771 of SEQ ID NO: 1241638
agugacuugccuuaucaua

SEQ ID NO: 1287975 - RNA, 19 nt, Artificial Sequence
  Description of Artificial Sequence: Synthetic oligonucleotide
  Antisense strand to SEQ ID NO: 1287974
uaugauaaggcaagucacu

SEQ ID NO: 1287976 - RNA, 19 nt, Artificial Sequence
  Description of Artificial Sequence: Synthetic oligonucleotide
  Sense strand starting at position 2773 of SEQ ID NO: 1241638
ugacuugccuuaucauaug

SEQ ID NO: 1287977 - RNA, 19 nt, Artificial Sequence
  Description of Artificial Sequence: Synthetic oligonucleotide
  Antisense strand to SEQ ID NO: 1287976
cauaugauaaggcaaguca

SEQ ID NO: 1287978 - RNA, 19 nt, Artificial Sequence
  Description of Artificial Sequence: Synthetic oligonucleotide
  Sense strand starting at position 2842 of SEQ ID NO: 1241638
ucccaaguuguuuauauaa

SEQ ID NO: 1287979 - RNA, 19 nt, Artificial Sequence
  Description of Artificial Sequence: Synthetic oligonucleotide
  Antisense strand to SEQ ID NO: 1287978
uuauauaaacaacuuggga

SEQ ID NO: 1287980 - RNA, 19 nt, Artificial Sequence
  Description of Artificial Sequence: Synthetic oligonucleotide
  Sense strand starting at position 2928 of SEQ ID NO: 1241638
cuguuucuucucuaggaaa

SEQ ID NO: 1287981 - RNA, 19 nt, Artificial Sequence
  Description of Artificial Sequence: Synthetic oligonucleotide
  Antisense strand to SEQ ID NO: 1287980
uuuccuagagaagaaacag

SEQ ID NO: 1287982 - RNA, 19 nt, Artificial Sequence
  Description of Artificial Sequence: Synthetic oligonucleotide
  Sense strand starting at position 3064 of SEQ ID NO: 1241638
ucaggugcuccucaauaau

SEQ ID NO: 1287983 - RNA, 19 nt, Artificial Sequence
  Description of Artificial Sequence: Synthetic oligonucleotide
  Antisense strand to SEQ ID NO: 1287982
auuauugaggagcaccuga

SEQ ID NO: 1287984 - RNA, 19 nt, Artificial Sequence
  Description of Artificial Sequence: Synthetic oligonucleotide
  Sense strand starting at position 3203 of SEQ ID NO: 1241638
gccagauaucccuggaaau

SEQ ID NO: 1287985 - RNA, 19 nt, Artificial Sequence
  Description of Artificial Sequence: Synthetic oligonucleotide
  Antisense strand to SEQ ID NO: 1287984
auuuccagggauaucuggc

SEQ ID NO: 1287986 - RNA, 19 nt, Artificial Sequence
  Description of Artificial Sequence: Synthetic oligonucleotide
  Sense strand starting at position 3204 of SEQ ID NO: 1241638
ccagauaucccuggaaauc

SEQ ID NO: 1287987 - RNA, 19 nt, Artificial Sequence
  Description of Artificial Sequence: Synthetic oligonucleotide
  Antisense strand to SEQ ID NO: 1287986
gauuuccagggauaucugg

SEQ ID NO: 1287988 - RNA, 19 nt, Artificial Sequence
  Description of Artificial Sequence: Synthetic oligonucleotide
  Sense strand starting at position 3217 of SEQ ID NO: 1241638
gaaaucugauggucaccaa

SEQ ID NO: 1287989 - RNA, 19 nt, Artificial Sequence
  Description of Artificial Sequence: Synthetic oligonucleotide
  Antisense strand to SEQ ID NO: 1287988
uuggugaccaucagauuuc

SEQ ID NO: 1287990 - RNA, 19 nt, Artificial Sequence
  Description of Artificial Sequence: Synthetic oligonucleotide
  Sense strand starting at position 3265 of SEQ ID NO: 1241638
augucucaugauggaaaua

SEQ ID NO: 1287991 - RNA, 19 nt, Artificial Sequence
  Description of Artificial Sequence: Synthetic oligonucleotide
  Antisense strand to SEQ ID NO: 1287990
uauuuccaucaugagacau

SEQ ID NO: 1287992 - RNA, 19 nt, Artificial Sequence
  Description of Artificial Sequence: Synthetic oligonucleotide
  Sense strand starting at position 3292 of SEQ ID NO: 1241638
cuagauugugguuauagcu

SEQ ID NO: 1287993 - RNA, 19 nt, Artificial Sequence
  Description of Artificial Sequence: Synthetic oligonucleotide
  Antisense strand to SEQ ID NO: 1287992
agcuauaaccacaaucuag

SEQ ID NO: 1287994 - RNA, 19 nt, Artificial Sequence
  Description of Artificial Sequence: Synthetic oligonucleotide
  Sense strand starting at position 3526 of SEQ ID NO: 1241638
gcuguauuuccauggagcu

SEQ ID NO: 1287995 - RNA, 19 nt, Artificial Sequence
  Description of Artificial Sequence: Synthetic oligonucleotide
  Antisense strand to SEQ ID NO: 1287994
agcuccauggaaauacagc

SEQ ID NO: 1287996 - RNA, 19 nt, Artificial Sequence
  Description of Artificial Sequence: Synthetic oligonucleotide
  Sense strand starting at position 3527 of SEQ ID NO: 1241638
cuguauuuccauggagcuu

SEQ ID NO: 1287997 - RNA, 19 nt, Artificial Sequence
  Description of Artificial Sequence: Synthetic oligonucleotide
  Antisense strand to SEQ ID NO: 1287996
aagcuccauggaaauacag

SEQ ID NO: 1287998 - RNA, 19 nt, Artificial Sequence
  Description of Artificial Sequence: Synthetic oligonucleotide
  Sense strand starting at position 3628 of SEQ ID NO: 1241638
augggaauuucucaugguu

SEQ ID NO: 1287999 - RNA, 19 nt, Artificial Sequence
  Description of Artificial Sequence: Synthetic oligonucleotide
  Antisense strand to SEQ ID NO: 1287998
aaccaugagaaauucccau

SEQ ID NO: 1288000 - RNA, 19 nt, Artificial Sequence
  Description of Artificial Sequence: Synthetic oligonucleotide
  Sense strand starting at position 3693 of SEQ ID NO: 1241638
accuuaaagugguuauuga

SEQ ID NO: 1288001 - RNA, 19 nt, Artificial Sequence
  Description of Artificial Sequence: Synthetic oligonucleotide
  Antisense strand to SEQ ID NO: 1288000
ucaauaaccacuuuaaggu

SEQ ID NO: 1288002 - RNA, 19 nt, Artificial Sequence
  Description of Artificial Sequence: Synthetic oligonucleotide
  Sense strand starting at position 3694 of SEQ ID NO: 1241638
ccuuaaagugguuauugau

SEQ ID NO: 1288003 - RNA, 19 nt, Artificial Sequence
  Description of Artificial Sequence: Synthetic oligonucleotide
  Antisense strand to SEQ ID NO: 1288002
aucaauaaccacuuuaagg

SEQ ID NO: 1288004 - RNA, 19 nt, Artificial Sequence
  Description of Artificial Sequence: Synthetic oligonucleotide
  Sense strand starting at position 3701 of SEQ ID NO: 1241638
gugguuauugaugaauacu

SEQ ID NO: 1288005 - RNA, 19 nt, Artificial Sequence
  Description of Artificial Sequence: Synthetic oligonucleotide
  Antisense strand to SEQ ID NO: 1288004
aguauucaucaauaaccac

SEQ ID NO: 1288006 - RNA, 19 nt, Artificial Sequence
  Description of Artificial Sequence: Synthetic oligonucleotide
  Sense strand starting at position 3726 of SEQ ID NO: 1241638
ugagaauugcuaugcaaag

SEQ ID NO: 1288007 - RNA, 19 nt, Artificial Sequence
  Description of Artificial Sequence: Synthetic oligonucleotide
  Antisense strand to SEQ ID NO: 1288006
cuuugcauagcaauucuca

SEQ ID NO: 1288008 - RNA, 19 nt, Artificial Sequence
  Description of Artificial Sequence: Synthetic oligonucleotide
  Sense strand starting at position 3727 of SEQ ID NO: 1241638
gagaauugcuaugcaaagg

SEQ ID NO: 1288009 - RNA, 19 nt, Artificial Sequence
  Description of Artificial Sequence: Synthetic oligonucleotide
  Antisense strand to SEQ ID NO: 1288008
ccuuugcauagcaauucuc

SEQ ID NO: 1288010 - RNA, 19 nt, Artificial Sequence
  Description of Artificial Sequence: Synthetic oligonucleotide
  Sense strand starting at position 3846 of SEQ ID NO: 1241638
guuuccuuaugauuaauag

SEQ ID NO: 1288011 - RNA, 19 nt, Artificial Sequence
  Description of Artificial Sequence: Synthetic oligonucleotide
  Antisense strand to SEQ ID NO: 1288010
cuauuaaucauaaggaaac

SEQ ID NO: 1288012 - RNA, 19 nt, Artificial Sequence
  Description of Artificial Sequence: Synthetic oligonucleotide
  Sense strand starting at position 3925 of SEQ ID NO: 1241638
ucucauugagaauguguga

SEQ ID NO: 1288013 - RNA, 19 nt, Artificial Sequence
  Description of Artificial Sequence: Synthetic oligonucleotide
  Antisense strand to SEQ ID NO: 1288012
ucacacauucucaaugaga

SEQ ID NO: 1288014 - RNA, 19 nt, Artificial Sequence
  Description of Artificial Sequence: Synthetic oligonucleotide
  Sense strand starting at position 3974 of SEQ ID NO: 1241638
guaguuguuaaaggaaauu

SEQ ID NO: 1288015 - RNA, 19 nt, Artificial Sequence
  Description of Artificial Sequence: Synthetic oligonucleotide
  Antisense strand to SEQ ID NO: 1288014
aauuuccuuuaacaacuac

SEQ ID NO: 1288016 - RNA, 19 nt, Artificial Sequence
  Description of Artificial Sequence: Synthetic oligonucleotide
  Sense strand starting at position 65 of SEQ ID NO: 1241639
accugccaucuuuggauau

SEQ ID NO: 1288017 - RNA, 19 nt, Artificial Sequence
  Description of Artificial Sequence: Synthetic oligonucleotide
  Antisense strand to SEQ ID NO: 1288016
auauccaaagauggcaggu

SEQ ID NO: 1288018 - RNA, 19 nt, Artificial Sequence
  Description of Artificial Sequence: Synthetic oligonucleotide
  Sense strand starting at position 132 of SEQ ID NO: 1241639
aguguuuauguccaacuaa

SEQ ID NO: 1288019 - RNA, 19 nt, Artificial Sequence
  Description of Artificial Sequence: Synthetic oligonucleotide
  Antisense strand to SEQ ID NO: 1288018
uuaguuggacauaaacacu

SEQ ID NO: 1288020 - RNA, 19 nt, Artificial Sequence
  Description of Artificial Sequence: Synthetic oligonucleotide
  Sense strand starting at position 174 of SEQ ID NO: 1241639
guuguuugucaggugugua

SEQ ID NO: 1288021 - RNA, 19 nt, Artificial Sequence
  Description of Artificial Sequence: Synthetic oligonucleotide
  Antisense strand to SEQ ID NO: 1288020
uacacaccugacaaacaac

SEQ ID NO: 1288022 - RNA, 19 nt, Artificial Sequence
  Description of Artificial Sequence: Synthetic oligonucleotide
  Sense strand starting at position 569 of SEQ ID NO: 1241639
cuauccuuccugugauaua

SEQ ID NO: 1288023 - RNA, 19 nt, Artificial Sequence
  Description of Artificial Sequence: Synthetic oligonucleotide
  Antisense strand to SEQ ID NO: 1288022
uauaucacaggaaggauag

SEQ ID NO: 1288024 - RNA, 19 nt, Artificial Sequence
  Description of Artificial Sequence: Synthetic oligonucleotide
  Sense strand starting at position 728 of SEQ ID NO: 1241639
agacacuaccuccgacaaa

SEQ ID NO: 1288025 - RNA, 19 nt, Artificial Sequence
  Description of Artificial Sequence: Synthetic oligonucleotide
  Antisense strand to SEQ ID NO: 1288024
uuugucggagguagugucu

SEQ ID NO: 1288026 - RNA, 19 nt, Artificial Sequence
  Description of Artificial Sequence: Synthetic oligonucleotide
  Sense strand starting at position 836 of SEQ ID NO: 1241639
agagauggaugugugaagu

SEQ ID NO: 1288027 - RNA, 19 nt, Artificial Sequence
  Description of Artificial Sequence: Synthetic oligonucleotide
  Antisense strand to SEQ ID NO: 1288026
acuucacacauccaucucu

SEQ ID NO: 1288028 - RNA, 19 nt, Artificial Sequence
  Description of Artificial Sequence: Synthetic oligonucleotide
  Sense strand starting at position 846 of SEQ ID NO: 1241639
gugugaagugugaggcuga

SEQ ID NO: 1288029 - RNA, 19 nt, Artificial Sequence
  Description of Artificial Sequence: Synthetic oligonucleotide
  Antisense strand to SEQ ID NO: 1288028
ucagccucacacuucacac

SEQ ID NO: 1288030 - RNA, 19 nt, Artificial Sequence
  Description of Artificial Sequence: Synthetic oligonucleotide
  Sense strand starting at position 919 of SEQ ID NO: 1241639
gcuaauauggacuauucca

SEQ ID NO: 1288031 - RNA, 19 nt, Artificial Sequence
  Description of Artificial Sequence: Synthetic oligonucleotide
  Antisense strand to SEQ ID NO: 1288030
uggaauaguccauauuagc

SEQ ID NO: 1288032 - RNA, 19 nt, Artificial Sequence
  Description of Artificial Sequence: Synthetic oligonucleotide
  Sense strand starting at position 1020 of SEQ ID NO: 1241639
auaguagucacagguuacu

SEQ ID NO: 1288033 - RNA, 19 nt, Artificial Sequence
  Description of Artificial Sequence: Synthetic oligonucleotide
  Antisense strand to SEQ ID NO: 1288032
aguaaccugugacuacuau

SEQ ID NO: 1288034 - RNA, 19 nt, Artificial Sequence
  Description of Artificial Sequence: Synthetic oligonucleotide
  Sense strand starting at position 1031 of SEQ ID NO: 1241639
agguuacuccaaugacaga

SEQ ID NO: 1288035 - RNA, 19 nt, Artificial Sequence
  Description of Artificial Sequence: Synthetic oligonucleotide
  Antisense strand to SEQ ID NO: 1288034
ucugucauuggaguaaccu

SEQ ID NO: 1288036 - RNA, 19 nt, Artificial Sequence
  Description of Artificial Sequence: Synthetic oligonucleotide
  Sense strand starting at position 1090 of SEQ ID NO: 1241639
uggcuacgccaucauauuu

SEQ ID NO: 1288037 - RNA, 19 nt, Artificial Sequence
  Description of Artificial Sequence: Synthetic oligonucleotide
  Antisense strand to SEQ ID NO: 1288036
aaauaugauggcguagcca

SEQ ID NO: 1288038 - RNA, 19 nt, Artificial Sequence
  Description of Artificial Sequence: Synthetic oligonucleotide
  Sense strand starting at position 1143 of SEQ ID NO: 1241639
uccuuugugugaccacaaa

SEQ ID NO: 1288039 - RNA, 19 nt, Artificial Sequence
  Description of Artificial Sequence: Synthetic oligonucleotide
  Antisense strand to SEQ ID NO: 1288038
uuuguggucacacaaagga

SEQ ID NO: 1288040 - RNA, 19 nt, Artificial Sequence
  Description of Artificial Sequence: Synthetic oligonucleotide
  Sense strand starting at position 1221 of SEQ ID NO: 1241639
augguucugccaggagauu

SEQ ID NO: 1288041 - RNA, 19 nt, Artificial Sequence
  Description of Artificial Sequence: Synthetic oligonucleotide
  Antisense strand to SEQ ID NO: 1288040
aaucuccuggcagaaccau

SEQ ID NO: 1288042 - RNA, 19 nt, Artificial Sequence
  Description of Artificial Sequence: Synthetic oligonucleotide
  Sense strand starting at position 1323 of SEQ ID NO: 1241639
acaaguacugaaugaugca

SEQ ID NO: 1288043 - RNA, 19 nt, Artificial Sequence
  Description of Artificial Sequence: Synthetic oligonucleotide
  Antisense strand to SEQ ID NO: 1288042
ugcaucauucaguacuugu

SEQ ID NO: 1288044 - RNA, 19 nt, Artificial Sequence
  Description of Artificial Sequence: Synthetic oligonucleotide
  Sense strand starting at position 1367 of SEQ ID NO: 1241639
aggcgauugaugcauuauu

SEQ ID NO: 1288045 - RNA, 19 nt, Artificial Sequence
  Description of Artificial Sequence: Synthetic oligonucleotide
  Antisense strand to SEQ ID NO: 1288044
aauaaugcaucaaucgccu

SEQ ID NO: 1288046 - RNA, 19 nt, Artificial Sequence
  Description of Artificial Sequence: Synthetic oligonucleotide
  Sense strand starting at position 1658 of SEQ ID NO: 1241639
caguccaucuugguggaau

SEQ ID NO: 1288047 - RNA, 19 nt, Artificial Sequence
  Description of Artificial Sequence: Synthetic oligonucleotide
  Antisense strand to SEQ ID NO: 1288046
auuccaccaagauggacug

SEQ ID NO: 1288048 - RNA, 19 nt, Artificial Sequence
  Description of Artificial Sequence: Synthetic oligonucleotide
  Sense strand starting at position 2126 of SEQ ID NO: 1241639
cgaggugcauauucuagaa

SEQ ID NO: 1288049 - RNA, 19 nt, Artificial Sequence
  Description of Artificial Sequence: Synthetic oligonucleotide
  Antisense strand to SEQ ID NO: 1288048
uucuagaauaugcaccucg

SEQ ID NO: 1288050 - RNA, 19 nt, Artificial Sequence
  Description of Artificial Sequence: Synthetic oligonucleotide
  Sense strand starting at position 2138 of SEQ ID NO: 1241639
ucuagaaauuucugagaaa

SEQ ID NO: 1288051 - RNA, 19 nt, Artificial Sequence
  Description of Artificial Sequence: Synthetic oligonucleotide
  Antisense strand to SEQ ID NO: 1288050
uuucucagaaauuucuaga

SEQ ID NO: 1288052 - RNA, 19 nt, Artificial Sequence
  Description of Artificial Sequence: Synthetic oligonucleotide
  Sense strand starting at position 2139 of SEQ ID NO: 1241639
cuagaaauuucugagaaac

SEQ ID NO: 1288053 - RNA, 19 nt, Artificial Sequence
  Description of Artificial Sequence: Synthetic oligonucleotide
  Antisense strand to SEQ ID NO: 1288052
guuucucagaaauuucuag

SEQ ID NO: 1288054 - RNA, 19 nt, Artificial Sequence
  Description of Artificial Sequence: Synthetic oligonucleotide
  Sense strand starting at position 2141 of SEQ ID NO: 1241639
agaaauuucugagaaaccc

SEQ ID NO: 1288055 - RNA, 19 nt, Artificial Sequence
  Description of Artificial Sequence: Synthetic oligonucleotide
  Antisense strand to SEQ ID NO: 1288054
ggguuucucagaaauuucu

SEQ ID NO: 1288056 - RNA, 19 nt, Artificial Sequence
  Description of Artificial Sequence: Synthetic oligonucleotide
  Sense strand starting at position 2180 of SEQ ID NO: 1241639
ccaagucaacggcaucaua

SEQ ID NO: 1288057 - RNA, 19 nt, Artificial Sequence
  Description of Artificial Sequence: Synthetic oligonucleotide
  Antisense strand to SEQ ID NO: 1288056
uaugaugccguugacuugg

SEQ ID NO: 1288058 - RNA, 19 nt, Artificial Sequence
  Description of Artificial Sequence: Synthetic oligonucleotide
  Sense strand starting at position 2183 of SEQ ID NO: 1241639
agucaacggcaucauaaau

SEQ ID NO: 1288059 - RNA, 19 nt, Artificial Sequence
  Description of Artificial Sequence: Synthetic oligonucleotide
  Antisense strand to SEQ ID NO: 1288058
auuuaugaugccguugacu

SEQ ID NO: 1288060 - RNA, 19 nt, Artificial Sequence
  Description of Artificial Sequence: Synthetic oligonucleotide
  Sense strand starting at position 2422 of SEQ ID NO: 1241639
uguguauuucuuggguuac

SEQ ID NO: 1288061 - RNA, 19 nt, Artificial Sequence
  Description of Artificial Sequence: Synthetic oligonucleotide
  Antisense strand to SEQ ID NO: 1288060
guaacccaagaaauacaca

SEQ ID NO: 1288062 - RNA, 19 nt, Artificial Sequence
  Description of Artificial Sequence: Synthetic oligonucleotide
  Sense strand starting at position 2449 of SEQ ID NO: 1241639
guuuguggguugaaggaau

SEQ ID NO: 1288063 - RNA, 19 nt, Artificial Sequence
  Description of Artificial Sequence: Synthetic oligonucleotide
  Antisense strand to SEQ ID NO: 1288062
auuccuucaacccacaaac

SEQ ID NO: 1288064 - RNA, 19 nt, Artificial Sequence
  Description of Artificial Sequence: Synthetic oligonucleotide
  Sense strand starting at position 2526 of SEQ ID NO: 1241639
ggagucauuggucaaugca

SEQ ID NO: 1288065 - RNA, 19 nt, Artificial Sequence
  Description of Artificial Sequence: Synthetic oligonucleotide
  Antisense strand to SEQ ID NO: 1288064
ugcauugaccaaugacucc

SEQ ID NO: 1288066 - RNA, 19 nt, Artificial Sequence
  Description of Artificial Sequence: Synthetic oligonucleotide
  Sense strand starting at position 2535 of SEQ ID NO: 1241639
ggucaaugcagugacaauc

SEQ ID NO: 1288067 - RNA, 19 nt, Artificial Sequence
  Description of Artificial Sequence: Synthetic oligonucleotide
  Antisense strand to SEQ ID NO: 1288066
gauugucacugcauugacc

SEQ ID NO: 1288068 - RNA, 19 nt, Artificial Sequence
  Description of Artificial Sequence: Synthetic oligonucleotide
  Sense strand starting at position 2601 of SEQ ID NO: 1241639
agggcauucugucucaaca

SEQ ID NO: 1288069 - RNA, 19 nt, Artificial Sequence
  Description of Artificial Sequence: Synthetic oligonucleotide
  Antisense strand to SEQ ID NO: 1288068
uguugagacagaaugcccu

SEQ ID NO: 1288070 - RNA, 19 nt, Artificial Sequence
  Description of Artificial Sequence: Synthetic oligonucleotide
  Sense strand starting at position 2835 of SEQ ID NO: 1241639
aggaauggaugggauaaau

SEQ ID NO: 1288071 - RNA, 19 nt, Artificial Sequence
  Description of Artificial Sequence: Synthetic oligonucleotide
  Antisense strand to SEQ ID NO: 1288070
auuuaucccauccauuccu

SEQ ID NO: 1288072 - RNA, 19 nt, Artificial Sequence
  Description of Artificial Sequence: Synthetic oligonucleotide
  Sense strand starting at position 3186 of SEQ ID NO: 1241639
caguaaucucaagguuaug

SEQ ID NO: 1288073 - RNA, 19 nt, Artificial Sequence
  Description of Artificial Sequence: Synthetic oligonucleotide
  Antisense strand to SEQ ID NO: 1288072
cauaaccuugagauuacug

SEQ ID NO: 1288074 - RNA, 19 nt, Artificial Sequence
  Description of Artificial Sequence: Synthetic oligonucleotide
  Sense strand starting at position 3262 of SEQ ID NO: 1241639
gaucuuugggaucaugugu

SEQ ID NO: 1288075 - RNA, 19 nt, Artificial Sequence
  Description of Artificial Sequence: Synthetic oligonucleotide
  Antisense strand to SEQ ID NO: 1288074
acacaugaucccaaagauc

SEQ ID NO: 1288076 - RNA, 19 nt, Artificial Sequence
  Description of Artificial Sequence: Synthetic oligonucleotide
  Sense strand starting at position 3454 of SEQ ID NO: 1241639
acucuaagguuauucuuga

SEQ ID NO: 1288077 - RNA, 19 nt, Artificial Sequence
  Description of Artificial Sequence: Synthetic oligonucleotide
  Antisense strand to SEQ ID NO: 1288076
ucaagaauaaccuuagagu

SEQ ID NO: 1288078 - RNA, 19 nt, Artificial Sequence
  Description of Artificial Sequence: Synthetic oligonucleotide
  Sense strand starting at position 3455 of SEQ ID NO: 1241639
cucuaagguuauucuugau

SEQ ID NO: 1288079 - RNA, 19 nt, Artificial Sequence
  Description of Artificial Sequence: Synthetic oligonucleotide
  Antisense strand to SEQ ID NO: 1288078
aucaagaauaaccuuagag

SEQ ID NO: 1288080 - RNA, 19 nt, Artificial Sequence
  Description of Artificial Sequence: Synthetic oligonucleotide
  Sense strand starting at position 3544 of SEQ ID NO: 1241639
ggaauucugucaguuaaau

SEQ ID NO: 1288081 - RNA, 19 nt, Artificial Sequence
  Description of Artificial Sequence: Synthetic oligonucleotide
  Antisense strand to SEQ ID NO: 1288080
auuuaacugacagaauucc

SEQ ID NO: 1288082 - RNA, 19 nt, Artificial Sequence
  Description of Artificial Sequence: Synthetic oligonucleotide
  Sense strand starting at position 3625 of SEQ ID NO: 1241639
ggacaagacugagaagaaa

SEQ ID NO: 1288083 - RNA, 19 nt, Artificial Sequence
  Description of Artificial Sequence: Synthetic oligonucleotide
  Antisense strand to SEQ ID NO: 1288082
uuucuucucagucuugucc

SEQ ID NO: 1288084 - RNA, 19 nt, Artificial Sequence
  Description of Artificial Sequence: Synthetic oligonucleotide
  Sense strand starting at position 3796 of SEQ ID NO: 1241639
gguaccuuuacugaugagu

SEQ ID NO: 1288085 - RNA, 19 nt, Artificial Sequence
  Description of Artificial Sequence: Synthetic oligonucleotide
  Antisense strand to SEQ ID NO: 1288084
acucaucaguaaagguacc

SEQ ID NO: 1288086 - RNA, 19 nt, Artificial Sequence
  Description of Artificial Sequence: Synthetic oligonucleotide
  Sense strand starting at position 3799 of SEQ ID NO: 1241639
accuuuacugaugaguauu

SEQ ID NO: 1288087 - RNA, 19 nt, Artificial Sequence
  Description of Artificial Sequence: Synthetic oligonucleotide
  Antisense strand to SEQ ID NO: 1288086
aauacucaucaguaaaggu

SEQ ID NO: 1288088 - RNA, 19 nt, Artificial Sequence
  Description of Artificial Sequence: Synthetic oligonucleotide
  Sense strand starting at position 3811 of SEQ ID NO: 1241639
gaguauuguguccaccaca

SEQ ID NO: 1288089 - RNA, 19 nt, Artificial Sequence
  Description of Artificial Sequence: Synthetic oligonucleotide
  Antisense strand to SEQ ID NO: 1288088
ugugguggacacaauacuc

SEQ ID NO: 1288090 - RNA, 19 nt, Artificial Sequence
  Description of Artificial Sequence: Synthetic oligonucleotide
  Sense strand starting at position 3874 of SEQ ID NO: 1241639
guguauggugaauacacaa

SEQ ID NO: 1288091 - RNA, 19 nt, Artificial Sequence
  Description of Artificial Sequence: Synthetic oligonucleotide
  Antisense strand to SEQ ID NO: 1288090
uuguguauucaccauacac

SEQ ID NO: 1288092 - RNA, 19 nt, Artificial Sequence
  Description of Artificial Sequence: Synthetic oligonucleotide
  Sense strand starting at position 3918 of SEQ ID NO: 1241639
gcaagcucucuuuaaagug

SEQ ID NO: 1288093 - RNA, 19 nt, Artificial Sequence
  Description of Artificial Sequence: Synthetic oligonucleotide
  Antisense strand to SEQ ID NO: 1288092
cacuuuaaagagagcuugc

SEQ ID NO: 1288094 - RNA, 19 nt, Artificial Sequence
  Description of Artificial Sequence: Synthetic oligonucleotide
  Sense strand starting at position 3924 of SEQ ID NO: 1241639
ucucuuuaaaguggaggau

SEQ ID NO: 1288095 - RNA, 19 nt, Artificial Sequence
  Description of Artificial Sequence: Synthetic oligonucleotide
  Antisense strand to SEQ ID NO: 1288094
auccuccacuuuaaagaga

SEQ ID NO: 1288096 - RNA, 19 nt, Artificial Sequence
  Description of Artificial Sequence: Synthetic oligonucleotide
  Sense strand starting at position 65 of SEQ ID NO: 1241640
cgggcagugagccaagauu

SEQ ID NO: 1288097 - RNA, 19 nt, Artificial Sequence
  Description of Artificial Sequence: Synthetic oligonucleotide
  Antisense strand to SEQ ID NO: 1288096
aaucuuggcucacugcccg

SEQ ID NO: 1288098 - RNA, 19 nt, Artificial Sequence
  Description of Artificial Sequence: Synthetic oligonucleotide
  Sense strand starting at position 287 of SEQ ID NO: 1241640
gcacuuauuuaugcuaggu

SEQ ID NO: 1288099 - RNA, 19 nt, Artificial Sequence
  Description of Artificial Sequence: Synthetic oligonucleotide
  Antisense strand to SEQ ID NO: 1288098
accuagcauaaauaagugc

SEQ ID NO: 1288100 - RNA, 19 nt, Artificial Sequence
  Description of Artificial Sequence: Synthetic oligonucleotide
  Sense strand starting at position 518 of SEQ ID NO: 1241640
uacuguuggguguaucaac

SEQ ID NO: 1288101 - RNA, 19 nt, Artificial Sequence
  Description of Artificial Sequence: Synthetic oligonucleotide
  Antisense strand to SEQ ID NO: 1288100
guugauacacccaacagua

SEQ ID NO: 1288102 - RNA, 19 nt, Artificial Sequence
  Description of Artificial Sequence: Synthetic oligonucleotide
  Sense strand starting at position 529 of SEQ ID NO: 1241640
guaucaacuguaugcuaaa

SEQ ID NO: 1288103 - RNA, 19 nt, Artificial Sequence
  Description of Artificial Sequence: Synthetic oligonucleotide
  Antisense strand to SEQ ID NO: 1288102
uuuagcauacaguugauac

SEQ ID NO: 1288104 - RNA, 19 nt, Artificial Sequence
  Description of Artificial Sequence: Synthetic oligonucleotide
  Sense strand starting at position 608 of SEQ ID NO: 1241640
acugacaaguauguccaaa

SEQ ID NO: 1288105 - RNA, 19 nt, Artificial Sequence
  Description of Artificial Sequence: Synthetic oligonucleotide
  Antisense strand to SEQ ID NO: 1288104
uuuggacauacuugucagu

SEQ ID NO: 1288106 - RNA, 19 nt, Artificial Sequence
  Description of Artificial Sequence: Synthetic oligonucleotide
  Sense strand starting at position 758 of SEQ ID NO: 1241640
agcccugagcauuaggaaa

SEQ ID NO: 1288107 - RNA, 19 nt, Artificial Sequence
  Description of Artificial Sequence: Synthetic oligonucleotide
  Antisense strand to SEQ ID NO: 1288106
uuuccuaaugcucagggcu

SEQ ID NO: 1288108 - RNA, 19 nt, Artificial Sequence
  Description of Artificial Sequence: Synthetic oligonucleotide
  Sense strand starting at position 766 of SEQ ID NO: 1241640
gcauuaggaaauugaaguu

SEQ ID NO: 1288109 - RNA, 19 nt, Artificial Sequence
  Description of Artificial Sequence: Synthetic oligonucleotide
  Antisense strand to SEQ ID NO: 1288108
aacuucaauuuccuaaugc

SEQ ID NO: 1288110 - RNA, 19 nt, Artificial Sequence
  Description of Artificial Sequence: Synthetic oligonucleotide
  Sense strand starting at position 863 of SEQ ID NO: 1241640
ugucacuuaacggaauguu

SEQ ID NO: 1288111 - RNA, 19 nt, Artificial Sequence
  Description of Artificial Sequence: Synthetic oligonucleotide
  Antisense strand to SEQ ID NO: 1288110
aacauuccguuaagugaca

SEQ ID NO: 1288112 - RNA, 19 nt, Artificial Sequence
  Description of Artificial Sequence: Synthetic oligonucleotide
  Sense strand starting at position 866 of SEQ ID NO: 1241640
cacuuaacggaauguuaca

SEQ ID NO: 1288113 - RNA, 19 nt, Artificial Sequence
  Description of Artificial Sequence: Synthetic oligonucleotide
  Antisense strand to SEQ ID NO: 1288112
uguaacauuccguuaagug

SEQ ID NO: 1288114 - RNA, 19 nt, Artificial Sequence
  Description of Artificial Sequence: Synthetic oligonucleotide
  Sense strand starting at position 951 of SEQ ID NO: 1241640
aaaugauaugcauguagua

SEQ ID NO: 1288115 - RNA, 19 nt, Artificial Sequence
  Description of Artificial Sequence: Synthetic oligonucleotide
  Antisense strand to SEQ ID NO: 1288114
uacuacaugcauaucauuu

SEQ ID NO: 1288116 - RNA, 19 nt, Artificial Sequence
  Description of Artificial Sequence: Synthetic oligonucleotide
  Sense strand starting at position 963 of SEQ ID NO: 1241640
uguaguaacagguguauuu

SEQ ID NO: 1288117 - RNA, 19 nt, Artificial Sequence
  Description of Artificial Sequence: Synthetic oligonucleotide
  Antisense strand to SEQ ID NO: 1288116
aaauacaccuguuacuaca

SEQ ID NO: 1288118 - RNA, 19 nt, Artificial Sequence
  Description of Artificial Sequence: Synthetic oligonucleotide
  Sense strand starting at position 1301 of SEQ ID NO: 1241640
ugaggacguuacuuagcaa

SEQ ID NO: 1288119 - RNA, 19 nt, Artificial Sequence
  Description of Artificial Sequence: Synthetic oligonucleotide
  Antisense strand to SEQ ID NO: 1288118
uugcuaaguaacguccuca

SEQ ID NO: 1288120 - RNA, 19 nt, Artificial Sequence
  Description of Artificial Sequence: Synthetic oligonucleotide
  Sense strand starting at position 1698 of SEQ ID NO: 1241640
cgagacauucccggguaga

SEQ ID NO: 1288121 - RNA, 19 nt, Artificial Sequence
  Description of Artificial Sequence: Synthetic oligonucleotide
  Antisense strand to SEQ ID NO: 1288120
ucuacccgggaaugucucg

SEQ ID NO: 1288122 - RNA, 19 nt, Artificial Sequence
  Description of Artificial Sequence: Synthetic oligonucleotide
  Sense strand starting at position 1699 of SEQ ID NO: 1241640
gagacauucccggguagag

SEQ ID NO: 1288123 - RNA, 19 nt, Artificial Sequence
  Description of Artificial Sequence: Synthetic oligonucleotide
  Antisense strand to SEQ ID NO: 1288122
cucuacccgggaaugucuc

SEQ ID NO: 1288124 - RNA, 19 nt, Artificial Sequence
  Description of Artificial Sequence: Synthetic oligonucleotide
  Sense strand starting at position 1840 of SEQ ID NO: 1241640
uguucuucuuucccagaga

SEQ ID NO: 1288125 - RNA, 19 nt, Artificial Sequence
  Description of Artificial Sequence: Synthetic oligonucleotide
  Antisense strand to SEQ ID NO: 1288124
ucucugggaaagaagaaca

SEQ ID NO: 1288126 - RNA, 19 nt, Artificial Sequence
  Description of Artificial Sequence: Synthetic oligonucleotide
  Sense strand starting at position 2237 of SEQ ID NO: 1241640
ucugauaugcccugauuau

SEQ ID NO: 1288127 - RNA, 19 nt, Artificial Sequence
  Description of Artificial Sequence: Synthetic oligonucleotide
  Antisense strand to SEQ ID NO: 1288126
auaaucagggcauaucaga

SEQ ID NO: 1288128 - RNA, 19 nt, Artificial Sequence
  Description of Artificial Sequence: Synthetic oligonucleotide
  Sense strand starting at position 2238 of SEQ ID NO: 1241640
cugauaugcccugauuaug

SEQ ID NO: 1288129 - RNA, 19 nt, Artificial Sequence
  Description of Artificial Sequence: Synthetic oligonucleotide
  Antisense strand to SEQ ID NO: 1288128
cauaaucagggcauaucag

SEQ ID NO: 1288130 - RNA, 19 nt, Artificial Sequence
  Description of Artificial Sequence: Synthetic oligonucleotide
  Sense strand starting at position 2246 of SEQ ID NO: 1241640
cccugauuaugaguaauau

SEQ ID NO: 1288131 - RNA, 19 nt, Artificial Sequence
  Description of Artificial Sequence: Synthetic oligonucleotide
  Antisense strand to SEQ ID NO: 1288130
auauuacucauaaucaggg

SEQ ID NO: 1288132 - RNA, 19 nt, Artificial Sequence
  Description of Artificial Sequence: Synthetic oligonucleotide
  Sense strand starting at position 2258 of SEQ ID NO: 1241640
guaauauauguauagcucu

SEQ ID NO: 1288133 - RNA, 19 nt, Artificial Sequence
  Description of Artificial Sequence: Synthetic oligonucleotide
  Antisense strand to SEQ ID NO: 1288132
agagcuauacauauauuac

SEQ ID NO: 1288134 - RNA, 19 nt, Artificial Sequence
  Description of Artificial Sequence: Synthetic oligonucleotide
  Sense strand starting at position 2317 of SEQ ID NO: 1241640
auguuauaacucugagaug

SEQ ID NO: 1288135 - RNA, 19 nt, Artificial Sequence
  Description of Artificial Sequence: Synthetic oligonucleotide
  Antisense strand to SEQ ID NO: 1288134
caucucagaguuauaacau

SEQ ID NO: 1288136 - RNA, 19 nt, Artificial Sequence
  Description of Artificial Sequence: Synthetic oligonucleotide
  Sense strand starting at position 2364 of SEQ ID NO: 1241640
auagcugagucccuuuaua

SEQ ID NO: 1288137 - RNA, 19 nt, Artificial Sequence
  Description of Artificial Sequence: Synthetic oligonucleotide
  Antisense strand to SEQ ID NO: 1288136
uauaaagggacucagcuau

SEQ ID NO: 1288138 - RNA, 19 nt, Artificial Sequence
  Description of Artificial Sequence: Synthetic oligonucleotide
  Sense strand starting at position 2430 of SEQ ID NO: 1241640
acagcugugauguaucaga

SEQ ID NO: 1288139 - RNA, 19 nt, Artificial Sequence
  Description of Artificial Sequence: Synthetic oligonucleotide
  Antisense strand to SEQ ID NO: 1288138
ucugauacaucacagcugu

SEQ ID NO: 1288140 - RNA, 19 nt, Artificial Sequence
  Description of Artificial Sequence: Synthetic oligonucleotide
  Sense strand starting at position 2473 of SEQ ID NO: 1241640
cugacaguagccuaacauu

SEQ ID NO: 1288141 - RNA, 19 nt, Artificial Sequence
  Description of Artificial Sequence: Synthetic oligonucleotide
  Antisense strand to SEQ ID NO: 1288140
aauguuaggcuacugucag

SEQ ID NO: 1288142 - RNA, 19 nt, Artificial Sequence
  Description of Artificial Sequence: Synthetic oligonucleotide
  Sense strand starting at position 2490 of SEQ ID NO: 1241640
uuguuuccucuauaucagu

SEQ ID NO: 1288143 - RNA, 19 nt, Artificial Sequence
  Description of Artificial Sequence: Synthetic oligonucleotide
  Antisense strand to SEQ ID NO: 1288142
acugauauagaggaaacaa

SEQ ID NO: 1288144 - RNA, 19 nt, Artificial Sequence
  Description of Artificial Sequence: Synthetic oligonucleotide
  Sense strand starting at position 3052 of SEQ ID NO: 1241640
acaauacacuguuuggcaa

SEQ ID NO: 1288145 - RNA, 19 nt, Artificial Sequence
  Description of Artificial Sequence: Synthetic oligonucleotide
  Antisense strand to SEQ ID NO: 1288144
uugccaaacaguguauugu

SEQ ID NO: 1288146 - RNA, 19 nt, Artificial Sequence
  Description of Artificial Sequence: Synthetic oligonucleotide
  Sense strand starting at position 3136 of SEQ ID NO: 1241640
ugauguuccuaccuauauu

SEQ ID NO: 1288147 - RNA, 19 nt, Artificial Sequence
  Description of Artificial Sequence: Synthetic oligonucleotide
  Antisense strand to SEQ ID NO: 1288146
aauauagguaggaacauca

SEQ ID NO: 1288148 - RNA, 19 nt, Artificial Sequence
  Description of Artificial Sequence: Synthetic oligonucleotide
  Sense strand starting at position 3167 of SEQ ID NO: 1241640
agcuacugggcauagaaua

SEQ ID NO: 1288149 - RNA, 19 nt, Artificial Sequence
  Description of Artificial Sequence: Synthetic oligonucleotide
  Antisense strand to SEQ ID NO: 1288148
uauucuaugcccaguagcu

SEQ ID NO: 1288150 - RNA, 19 nt, Artificial Sequence
  Description of Artificial Sequence: Synthetic oligonucleotide
  Sense strand starting at position 3175 of SEQ ID NO: 1241640
ggcauagaauauucuggau

SEQ ID NO: 1288151 - RNA, 19 nt, Artificial Sequence
  Description of Artificial Sequence: Synthetic oligonucleotide
  Antisense strand to SEQ ID NO: 1288150
auccagaauauucuaugcc

SEQ ID NO: 1288152 - RNA, 19 nt, Artificial Sequence
  Description of Artificial Sequence: Synthetic oligonucleotide
  Sense strand starting at position 3252 of SEQ ID NO: 1241640
uauucuucuggcugagaua

SEQ ID NO: 1288153 - RNA, 19 nt, Artificial Sequence
  Description of Artificial Sequence: Synthetic oligonucleotide
  Antisense strand to SEQ ID NO: 1288152
uaucucagccagaagaaua

SEQ ID NO: 1288154 - RNA, 19 nt, Artificial Sequence
  Description of Artificial Sequence: Synthetic oligonucleotide
  Sense strand starting at position 3253 of SEQ ID NO: 1241640
auucuucuggcugagauag

SEQ ID NO: 1288155 - RNA, 19 nt, Artificial Sequence
  Description of Artificial Sequence: Synthetic oligonucleotide
  Antisense strand to SEQ ID NO: 1288154
cuaucucagccagaagaau

SEQ ID NO: 1288156 - RNA, 19 nt, Artificial Sequence
  Description of Artificial Sequence: Synthetic oligonucleotide
  Sense strand starting at position 3494 of SEQ ID NO: 1241640
gcuagugauaauugaagca

SEQ ID NO: 1288157 - RNA, 19 nt, Artificial Sequence
  Description of Artificial Sequence: Synthetic oligonucleotide
  Antisense strand to SEQ ID NO: 1288156
ugcuucaauuaucacuagc

SEQ ID NO: 1288158 - RNA, 19 nt, Artificial Sequence
  Description of Artificial Sequence: Synthetic oligonucleotide
  Sense strand starting at position 3645 of SEQ ID NO: 1241640
acucuuguugcugacauua

SEQ ID NO: 1288159 - RNA, 19 nt, Artificial Sequence
  Description of Artificial Sequence: Synthetic oligonucleotide
  Antisense strand to SEQ ID NO: 1288158
uaaugucagcaacaagagu

SEQ ID NO: 1288160 - RNA, 19 nt, Artificial Sequence
  Description of Artificial Sequence: Synthetic oligonucleotide
  Sense strand starting at position 3650 of SEQ ID NO: 1241640
uguugcugacauuauguaa

SEQ ID NO: 1288161 - RNA, 19 nt, Artificial Sequence
  Description of Artificial Sequence: Synthetic oligonucleotide
  Antisense strand to SEQ ID NO: 1288160
uuacauaaugucagcaaca

SEQ ID NO: 1288162 - RNA, 19 nt, Artificial Sequence
  Description of Artificial Sequence: Synthetic oligonucleotide
  Sense strand starting at position 3713 of SEQ ID NO: 1241640
uuacuagaccauuguagga

SEQ ID NO: 1288163 - RNA, 19 nt, Artificial Sequence
  Description of Artificial Sequence: Synthetic oligonucleotide
  Antisense strand to SEQ ID NO: 1288162
uccuacaauggucuaguaa

SEQ ID NO: 1288164 - RNA, 19 nt, Artificial Sequence
  Description of Artificial Sequence: Synthetic oligonucleotide
  Sense strand starting at position 3762 of SEQ ID NO: 1241640
cugauuccuccguggaaua

SEQ ID NO: 1288165 - RNA, 19 nt, Artificial Sequence
  Description of Artificial Sequence: Synthetic oligonucleotide
  Antisense strand to SEQ ID NO: 1288164
uauuccacggaggaaucag

SEQ ID NO: 1288166 - RNA, 19 nt, Artificial Sequence
  Description of Artificial Sequence: Synthetic oligonucleotide
  Sense strand starting at position 3763 of SEQ ID NO: 1241640
ugauuccuccguggaauag

SEQ ID NO: 1288167 - RNA, 19 nt, Artificial Sequence
  Description of Artificial Sequence: Synthetic oligonucleotide
  Antisense strand to SEQ ID NO: 1288166
cuauuccacggaggaauca

SEQ ID NO: 1288168 - RNA, 19 nt, Artificial Sequence
  Description of Artificial Sequence: Synthetic oligonucleotide
  Sense strand starting at position 3764 of SEQ ID NO: 1241640
gauuccuccguggaauaga

SEQ ID NO: 1288169 - RNA, 19 nt, Artificial Sequence
  Description of Artificial Sequence: Synthetic oligonucleotide
  Antisense strand to SEQ ID NO: 1288168
ucuauuccacggaggaauc

SEQ ID NO: 1288170 - RNA, 19 nt, Artificial Sequence
  Description of Artificial Sequence: Synthetic oligonucleotide
  Sense strand starting at position 3821 of SEQ ID NO: 1241640
uuuauuuccuuccaggaag

SEQ ID NO: 1288171 - RNA, 19 nt, Artificial Sequence
  Description of Artificial Sequence: Synthetic oligonucleotide
  Antisense strand to SEQ ID NO: 1288170
cuuccuggaaggaaauaaa

SEQ ID NO: 1288172 - RNA, 19 nt, Artificial Sequence
  Description of Artificial Sequence: Synthetic oligonucleotide
  Sense strand starting at position 3872 of SEQ ID NO: 1241640
uucucaggagucugaaauc

SEQ ID NO: 1288173 - RNA, 19 nt, Artificial Sequence
  Description of Artificial Sequence: Synthetic oligonucleotide
  Antisense strand to SEQ ID NO: 1288172
gauuucagacuccugagaa

SEQ ID NO: 1288174 - RNA, 19 nt, Artificial Sequence
  Description of Artificial Sequence: Synthetic oligonucleotide
  Sense strand starting at position 3884 of SEQ ID NO: 1241640
ugaaaucuccaagggagca

SEQ ID NO: 1288175 - RNA, 19 nt, Artificial Sequence
  Description of Artificial Sequence: Synthetic oligonucleotide
  Antisense strand to SEQ ID NO: 1288174
ugcucccuuggagauuuca

SEQ ID NO: 1288176 - RNA, 19 nt, Artificial Sequence
  Description of Artificial Sequence: Synthetic oligonucleotide
  Sense strand starting at position 46 of SEQ ID NO: 1241641
ucacgaugccgguggaaau

SEQ ID NO: 1288177 - RNA, 19 nt, Artificial Sequence
  Description of Artificial Sequence: Synthetic oligonucleotide
  Antisense strand to SEQ ID NO: 1288176
auuuccaccggcaucguga

SEQ ID NO: 1288178 - RNA, 19 nt, Artificial Sequence
  Description of Artificial Sequence: Synthetic oligonucleotide
  Sense strand starting at position 59 of SEQ ID NO: 1241641
ggaaaugcacuuugagguu

SEQ ID NO: 1288179 - RNA, 19 nt, Artificial Sequence
  Description of Artificial Sequence: Synthetic oligonucleotide
  Antisense strand to SEQ ID NO: 1288178
aaccucaaagugcauuucc

SEQ ID NO: 1288180 - RNA, 19 nt, Artificial Sequence
  Description of Artificial Sequence: Synthetic oligonucleotide
  Sense strand starting at position 158 of SEQ ID NO: 1241641
gggcacugucacugccaaa

SEQ ID NO: 1288181 - RNA, 19 nt, Artificial Sequence
  Description of Artificial Sequence: Synthetic oligonucleotide
  Antisense strand to SEQ ID NO: 1288180
uuuggcagugacagugccc

SEQ ID NO: 1288182 - RNA, 19 nt, Artificial Sequence
  Description of Artificial Sequence: Synthetic oligonucleotide
  Sense strand starting at position 170 of SEQ ID NO: 1241641
ugccaaauacuuuggcaca

SEQ ID NO: 1288183 - RNA, 19 nt, Artificial Sequence
  Description of Artificial Sequence: Synthetic oligonucleotide
  Antisense strand to SEQ ID NO: 1288182
ugugccaaaguauuuggca

SEQ ID NO: 1288184 - RNA, 19 nt, Artificial Sequence
  Description of Artificial Sequence: Synthetic oligonucleotide
  Sense strand starting at position 172 of SEQ ID NO: 1241641
ccaaauacuuuggcacaga

SEQ ID NO: 1288185 - RNA, 19 nt, Artificial Sequence
  Description of Artificial Sequence: Synthetic oligonucleotide
  Antisense strand to SEQ ID NO: 1288184
ucugugccaaaguauuugg

SEQ ID NO: 1288186 - RNA, 19 nt, Artificial Sequence
  Description of Artificial Sequence: Synthetic oligonucleotide
  Sense strand starting at position 549 of SEQ ID NO: 1241641
ggaagaugccagugucuug

SEQ ID NO: 1288187 - RNA, 19 nt, Artificial Sequence
  Description of Artificial Sequence: Synthetic oligonucleotide
  Antisense strand to SEQ ID NO: 1288186
caagacacuggcaucuucc

SEQ ID NO: 1288188 - RNA, 19 nt, Artificial Sequence
  Description of Artificial Sequence: Synthetic oligonucleotide
  Sense strand starting at position 717 of SEQ ID NO: 1241641
cucagucaucugcaucuga

SEQ ID NO: 1288189 - RNA, 19 nt, Artificial Sequence
  Description of Artificial Sequence: Synthetic oligonucleotide
  Antisense strand to SEQ ID NO: 1288188
ucagaugcagaugacugag

SEQ ID NO: 1288190 - RNA, 19 nt, Artificial Sequence
  Description of Artificial Sequence: Synthetic oligonucleotide
  Sense strand starting at position 721 of SEQ ID NO: 1241641
gucaucugcaucugaugga

SEQ ID NO: 1288191 - RNA, 19 nt, Artificial Sequence
  Description of Artificial Sequence: Synthetic oligonucleotide
  Antisense strand to SEQ ID NO: 1288190
uccaucagaugcagaugac

SEQ ID NO: 1288192 - RNA, 19 nt, Artificial Sequence
  Description of Artificial Sequence: Synthetic oligonucleotide
  Sense strand starting at position 757 of SEQ ID NO: 1241641
acccguagcucuuccaaga

SEQ ID NO: 1288193 - RNA, 19 nt, Artificial Sequence
  Description of Artificial Sequence: Synthetic oligonucleotide
  Antisense strand to SEQ ID NO: 1288192
ucuuggaagagcuacgggu

SEQ ID NO: 1288194 - RNA, 19 nt, Artificial Sequence
  Description of Artificial Sequence: Synthetic oligonucleotide
  Sense strand starting at position 848 of SEQ ID NO: 1241641
gggucgauucuggagguaa

SEQ ID NO: 1288195 - RNA, 19 nt, Artificial Sequence
  Description of Artificial Sequence: Synthetic oligonucleotide
  Antisense strand to SEQ ID NO: 1288194
uuaccuccagaaucgaccc

SEQ ID NO: 1288196 - RNA, 19 nt, Artificial Sequence
  Description of Artificial Sequence: Synthetic oligonucleotide
  Sense strand starting at position 849 of SEQ ID NO: 1241641
ggucgauucuggagguaau

SEQ ID NO: 1288197 - RNA, 19 nt, Artificial Sequence
  Description of Artificial Sequence: Synthetic oligonucleotide
  Antisense strand to SEQ ID NO: 1288196
auuaccuccagaaucgacc

SEQ ID NO: 1288198 - RNA, 19 nt, Artificial Sequence
  Description of Artificial Sequence: Synthetic oligonucleotide
  Sense strand starting at position 850 of SEQ ID NO: 1241641
gucgauucuggagguaaug

SEQ ID NO: 1288199 - RNA, 19 nt, Artificial Sequence
  Description of Artificial Sequence: Synthetic oligonucleotide
  Antisense strand to SEQ ID NO: 1288198
cauuaccuccagaaucgac

SEQ ID NO: 1288200 - RNA, 19 nt, Artificial Sequence
  Description of Artificial Sequence: Synthetic oligonucleotide
  Sense strand starting at position 942 of SEQ ID NO: 1241641
caggaaaugcccugaagac

SEQ ID NO: 1288201 - RNA, 19 nt, Artificial Sequence
  Description of Artificial Sequence: Synthetic oligonucleotide
  Antisense strand to SEQ ID NO: 1288200
gucuucagggcauuuccug

SEQ ID NO: 1288202 - RNA, 19 nt, Artificial Sequence
  Description of Artificial Sequence: Synthetic oligonucleotide
  Sense strand starting at position 1039 of SEQ ID NO: 1241641
guguccaugaccugaggau

SEQ ID NO: 1288203 - RNA, 19 nt, Artificial Sequence
  Description of Artificial Sequence: Synthetic oligonucleotide
  Antisense strand to SEQ ID NO: 1288202
auccucaggucauggacac

SEQ ID NO: 1288204 - RNA, 19 nt, Artificial Sequence
  Description of Artificial Sequence: Synthetic oligonucleotide
  Sense strand starting at position 1054 of SEQ ID NO: 1241641
ggauuauugugacccucag

SEQ ID NO: 1288205 - RNA, 19 nt, Artificial Sequence
  Description of Artificial Sequence: Synthetic oligonucleotide
  Antisense strand to SEQ ID NO: 1288204
cugagggucacaauaaucc

SEQ ID NO: 1288206 - RNA, 19 nt, Artificial Sequence
  Description of Artificial Sequence: Synthetic oligonucleotide
  Sense strand starting at position 1177 of SEQ ID NO: 1241641
ucaguugggucagugaauu

SEQ ID NO: 1288207 - RNA, 19 nt, Artificial Sequence
  Description of Artificial Sequence: Synthetic oligonucleotide
  Antisense strand to SEQ ID NO: 1288206
aauucacugacccaacuga

SEQ ID NO: 1288208 - RNA, 19 nt, Artificial Sequence
  Description of Artificial Sequence: Synthetic oligonucleotide
  Sense strand starting at position 1222 of SEQ ID NO: 1241641
gggugauccuccucgcuag

SEQ ID NO: 1288209 - RNA, 19 nt, Artificial Sequence
  Description of Artificial Sequence: Synthetic oligonucleotide
  Antisense strand to SEQ ID NO: 1288208
cuagcgaggaggaucaccc

SEQ ID NO: 1288210 - RNA, 19 nt, Artificial Sequence
  Description of Artificial Sequence: Synthetic oligonucleotide
  Sense strand starting at position 1373 of SEQ ID NO: 1241641
ugcagaagucuagagcuca

SEQ ID NO: 1288211 - RNA, 19 nt, Artificial Sequence
  Description of Artificial Sequence: Synthetic oligonucleotide
  Antisense strand to SEQ ID NO: 1288210
ugagcucuagacuucugca

SEQ ID NO: 1288212 - RNA, 19 nt, Artificial Sequence
  Description of Artificial Sequence: Synthetic oligonucleotide
  Sense strand starting at position 1512 of SEQ ID NO: 1241641
aagcgaguucacggaauag

SEQ ID NO: 1288213 - RNA, 19 nt, Artificial Sequence
  Description of Artificial Sequence: Synthetic oligonucleotide
  Antisense strand to SEQ ID NO: 1288212
cuauuccgugaacucgcuu

SEQ ID NO: 1288214 - RNA, 19 nt, Artificial Sequence
  Description of Artificial Sequence: Synthetic oligonucleotide
  Sense strand starting at position 1544 of SEQ ID NO: 1241641
ggccuacgcagagaaucau

SEQ ID NO: 1288215 - RNA, 19 nt, Artificial Sequence
  Description of Artificial Sequence: Synthetic oligonucleotide
  Antisense strand to SEQ ID NO: 1288214
augauucucugcguaggcc

SEQ ID NO: 1288216 - RNA, 19 nt, Artificial Sequence
  Description of Artificial Sequence: Synthetic oligonucleotide
  Sense strand starting at position 2048 of SEQ ID NO: 1241641
cucagagcucgggagaguu

SEQ ID NO: 1288217 - RNA, 19 nt, Artificial Sequence
  Description of Artificial Sequence: Synthetic oligonucleotide
  Antisense strand to SEQ ID NO: 1288216
aacucucccgagcucugag

SEQ ID NO: 1288218 - RNA, 19 nt, Artificial Sequence
  Description of Artificial Sequence: Synthetic oligonucleotide
  Sense strand starting at position 2060 of SEQ ID NO: 1241641
gagaguuuccggaggcgca

SEQ ID NO: 1288219 - RNA, 19 nt, Artificial Sequence
  Description of Artificial Sequence: Synthetic oligonucleotide
  Antisense strand to SEQ ID NO: 1288218
ugcgccuccggaaacucuc

SEQ ID NO: 1288220 - RNA, 19 nt, Artificial Sequence
  Description of Artificial Sequence: Synthetic oligonucleotide
  Sense strand starting at position 2305 of SEQ ID NO: 1241641
cagagagggucgucugauc

SEQ ID NO: 1288221 - RNA, 19 nt, Artificial Sequence
  Description of Artificial Sequence: Synthetic oligonucleotide
  Antisense strand to SEQ ID NO: 1288220
gaucagacgacccucucug

SEQ ID NO: 1288222 - RNA, 19 nt, Artificial Sequence
  Description of Artificial Sequence: Synthetic oligonucleotide
  Sense strand starting at position 2313 of SEQ ID NO: 1241641
gucgucugaucuccucaga

SEQ ID NO: 1288223 - RNA, 19 nt, Artificial Sequence
  Description of Artificial Sequence: Synthetic oligonucleotide
  Antisense strand to SEQ ID NO: 1288222
ucugaggagaucagacgac

SEQ ID NO: 1288224 - RNA, 19 nt, Artificial Sequence
  Description of Artificial Sequence: Synthetic oligonucleotide
  Sense strand starting at position 2483 of SEQ ID NO: 1241641
gcggcugcaagguagaauu

SEQ ID NO: 1288225 - RNA, 19 nt, Artificial Sequence
  Description of Artificial Sequence: Synthetic oligonucleotide
  Antisense strand to SEQ ID NO: 1288224
aauucuaccuugcagccgc

SEQ ID NO: 1288226 - RNA, 19 nt, Artificial Sequence
  Description of Artificial Sequence: Synthetic oligonucleotide
  Sense strand starting at position 2520 of SEQ ID NO: 1241641
ggacucucugcggaacacu

SEQ ID NO: 1288227 - RNA, 19 nt, Artificial Sequence
  Description of Artificial Sequence: Synthetic oligonucleotide
  Antisense strand to SEQ ID NO: 1288226
aguguuccgcagagagucc

SEQ ID NO: 1288228 - RNA, 19 nt, Artificial Sequence
  Description of Artificial Sequence: Synthetic oligonucleotide
  Sense strand starting at position 2570 of SEQ ID NO: 1241641
ugaauaauagcugaaugca

SEQ ID NO: 1288229 - RNA, 19 nt, Artificial Sequence
  Description of Artificial Sequence: Synthetic oligonucleotide
  Antisense strand to SEQ ID NO: 1288228
ugcauucagcuauuauuca

SEQ ID NO: 1288230 - RNA, 19 nt, Artificial Sequence
  Description of Artificial Sequence: Synthetic oligonucleotide
  Sense strand starting at position 3058 of SEQ ID NO: 1241641
gaccacaaguccuugguuu

SEQ ID NO: 1288231 - RNA, 19 nt, Artificial Sequence
  Description of Artificial Sequence: Synthetic oligonucleotide
  Antisense strand to SEQ ID NO: 1288230
aaaccaaggacuugugguc

SEQ ID NO: 1288232 - RNA, 19 nt, Artificial Sequence
  Description of Artificial Sequence: Synthetic oligonucleotide
  Sense strand starting at position 3148 of SEQ ID NO: 1241641
cugagacaugguggucagu

SEQ ID NO: 1288233 - RNA, 19 nt, Artificial Sequence
  Description of Artificial Sequence: Synthetic oligonucleotide
  Antisense strand to SEQ ID NO: 1288232
acugaccaccaugucucag

SEQ ID NO: 1288234 - RNA, 19 nt, Artificial Sequence
  Description of Artificial Sequence: Synthetic oligonucleotide
  Sense strand starting at position 3150 of SEQ ID NO: 1241641
gagacaugguggucaguca

SEQ ID NO: 1288235 - RNA, 19 nt, Artificial Sequence
  Description of Artificial Sequence: Synthetic oligonucleotide
  Antisense strand to SEQ ID NO: 1288234
ugacugaccaccaugucuc

SEQ ID NO: 1288236 - RNA, 19 nt, Artificial Sequence
  Description of Artificial Sequence: Synthetic oligonucleotide
  Sense strand starting at position 3162 of SEQ ID NO: 1241641
ucagucacaccauguuaua

SEQ ID NO: 1288237 - RNA, 19 nt, Artificial Sequence
  Description of Artificial Sequence: Synthetic oligonucleotide
  Antisense strand to SEQ ID NO: 1288236
uauaacauggugugacuga

SEQ ID NO: 1288238 - RNA, 19 nt, Artificial Sequence
  Description of Artificial Sequence: Synthetic oligonucleotide
  Sense strand starting at position 3759 of SEQ ID NO: 1241641
auauguacaugugagauuu

SEQ ID NO: 1288239 - RNA, 19 nt, Artificial Sequence
  Description of Artificial Sequence: Synthetic oligonucleotide
  Antisense strand to SEQ ID NO: 1288238
aaaucucacauguacauau

SEQ ID NO: 1288240 - RNA, 19 nt, Artificial Sequence
  Description of Artificial Sequence: Synthetic oligonucleotide
  Sense strand starting at position 3817 of SEQ ID NO: 1241641
uuuacauugucaguagcaa

SEQ ID NO: 1288241 - RNA, 19 nt, Artificial Sequence
  Description of Artificial Sequence: Synthetic oligonucleotide
  Antisense strand to SEQ ID NO: 1288240
uugcuacugacaauguaaa

SEQ ID NO: 1288242 - RNA, 19 nt, Artificial Sequence
  Description of Artificial Sequence: Synthetic oligonucleotide
  Sense strand starting at position 3818 of SEQ ID NO: 1241641
uuacauugucaguagcaaa

SEQ ID NO: 1288243 - RNA, 19 nt, Artificial Sequence
  Description of Artificial Sequence: Synthetic oligonucleotide
  Antisense strand to SEQ ID NO: 1288242
uuugcuacugacaauguaa

SEQ ID NO: 1288244 - RNA, 19 nt, Artificial Sequence
  Description of Artificial Sequence: Synthetic oligonucleotide
  Sense strand starting at position 3903 of SEQ ID NO: 1241641
cuuauuaauuucugaggua

SEQ ID NO: 1288245 - RNA, 19 nt, Artificial Sequence
  Description of Artificial Sequence: Synthetic oligonucleotide
  Antisense strand to SEQ ID NO: 1288244
uaccucagaaauuaauaag

SEQ ID NO: 1288246 - RNA, 19 nt, Artificial Sequence
  Description of Artificial Sequence: Synthetic oligonucleotide
  Sense strand starting at position 3906 of SEQ ID NO: 1241641
auuaauuucugagguaaga

SEQ ID NO: 1288247 - RNA, 19 nt, Artificial Sequence
  Description of Artificial Sequence: Synthetic oligonucleotide
  Antisense strand to SEQ ID NO: 1288246
ucuuaccucagaaauuaau

SEQ ID NO: 1288248 - RNA, 19 nt, Artificial Sequence
  Description of Artificial Sequence: Synthetic oligonucleotide
  Sense strand starting at position 3917 of SEQ ID NO: 1241641
agguaagauauuggcuaau

SEQ ID NO: 1288249 - RNA, 19 nt, Artificial Sequence
  Description of Artificial Sequence: Synthetic oligonucleotide
  Antisense strand to SEQ ID NO: 1288248
auuagccaauaucuuaccu

SEQ ID NO: 1288250 - RNA, 19 nt, Artificial Sequence
  Description of Artificial Sequence: Synthetic oligonucleotide
  Sense strand starting at position 3919 of SEQ ID NO: 1241641
guaagauauuggcuaauau

SEQ ID NO: 1288251 - RNA, 19 nt, Artificial Sequence
  Description of Artificial Sequence: Synthetic oligonucleotide
  Antisense strand to SEQ ID NO: 1288250
auauuagccaauaucuuac

SEQ ID NO: 1288252 - RNA, 19 nt, Artificial Sequence
  Description of Artificial Sequence: Synthetic oligonucleotide
  Sense strand starting at position 3928 of SEQ ID NO: 1241641
uggcuaauaucagcagcau

SEQ ID NO: 1288253 - RNA, 19 nt, Artificial Sequence
  Description of Artificial Sequence: Synthetic oligonucleotide
  Antisense strand to SEQ ID NO: 1288252
augcugcugauauuagcca

SEQ ID NO: 1288254 - RNA, 19 nt, Artificial Sequence
  Description of Artificial Sequence: Synthetic oligonucleotide
  Sense strand starting at position 3929 of SEQ ID NO: 1241641
ggcuaauaucagcagcaua

SEQ ID NO: 1288255 - RNA, 19 nt, Artificial Sequence
  Description of Artificial Sequence: Synthetic oligonucleotide
  Antisense strand to SEQ ID NO: 1288254
uaugcugcugauauuagcc

SEQ ID NO: 1288256 - RNA, 19 nt, Artificial Sequence
  Description of Artificial Sequence: Synthetic oligonucleotide
  Sense strand starting at position 71 of SEQ ID NO: 1241642
auugcagagaaguguaauc

SEQ ID NO: 1288257 - RNA, 19 nt, Artificial Sequence
  Description of Artificial Sequence: Synthetic oligonucleotide
  Antisense strand to SEQ ID NO: 1288256
gauuacacuucucugcaau

SEQ ID NO: 1288258 - RNA, 19 nt, Artificial Sequence
  Description of Artificial Sequence: Synthetic oligonucleotide
  Sense strand starting at position 80 of SEQ ID NO: 1241642
aaguguaaucacuggaaga

SEQ ID NO: 1288259 - RNA, 19 nt, Artificial Sequence
  Description of Artificial Sequence: Synthetic oligonucleotide
  Antisense strand to SEQ ID NO: 1288258
ucuuccagugauuacacuu

SEQ ID NO: 1288260 - RNA, 19 nt, Artificial Sequence
  Description of Artificial Sequence: Synthetic oligonucleotide
  Sense strand starting at position 81 of SEQ ID NO: 1241642
aguguaaucacuggaagag

SEQ ID NO: 1288261 - RNA, 19 nt, Artificial Sequence
  Description of Artificial Sequence: Synthetic oligonucleotide
  Antisense strand to SEQ ID NO: 1288260
cucuuccagugauuacacu

SEQ ID NO: 1288262 - RNA, 19 nt, Artificial Sequence
  Description of Artificial Sequence: Synthetic oligonucleotide
  Sense strand starting at position 209 of SEQ ID NO: 1241642
ugauacuccuuccgguaaa

SEQ ID NO: 1288263 - RNA, 19 nt, Artificial Sequence
  Description of Artificial Sequence: Synthetic oligonucleotide
  Antisense strand to SEQ ID NO: 1288262
uuuaccggaaggaguauca

SEQ ID NO: 1288264 - RNA, 19 nt, Artificial Sequence
  Description of Artificial Sequence: Synthetic oligonucleotide
  Sense strand starting at position 210 of SEQ ID NO: 1241642
gauacuccuuccgguaaag

SEQ ID NO: 1288265 - RNA, 19 nt, Artificial Sequence
  Description of Artificial Sequence: Synthetic oligonucleotide
  Antisense strand to SEQ ID NO: 1288264
cuuuaccggaaggaguauc

SEQ ID NO: 1288266 - RNA, 19 nt, Artificial Sequence
  Description of Artificial Sequence: Synthetic oligonucleotide
  Sense strand starting at position 2047 of SEQ ID NO: 1241642
ccgauagcgucucuaugga

SEQ ID NO: 1288267 - RNA, 19 nt, Artificial Sequence
  Description of Artificial Sequence: Synthetic oligonucleotide
  Antisense strand to SEQ ID NO: 1288266
uccauagagacgcuaucgg

SEQ ID NO: 1288268 - RNA, 19 nt, Artificial Sequence
  Description of Artificial Sequence: Synthetic oligonucleotide
  Sense strand starting at position 2674 of SEQ ID NO: 1241642
acucacuccuguuucgaaa

SEQ ID NO: 1288269 - RNA, 19 nt, Artificial Sequence
  Description of Artificial Sequence: Synthetic oligonucleotide
  Antisense strand to SEQ ID NO: 1288268
uuucgaaacaggagugagu

SEQ ID NO: 1288270 - RNA, 19 nt, Artificial Sequence
  Description of Artificial Sequence: Synthetic oligonucleotide
  Sense strand starting at position 2676 of SEQ ID NO: 1241642
ucacuccuguuucgaaaug

SEQ ID NO: 1288271 - RNA, 19 nt, Artificial Sequence
  Description of Artificial Sequence: Synthetic oligonucleotide
  Antisense strand to SEQ ID NO: 1288270
cauuucgaaacaggaguga

SEQ ID NO: 1288272 - RNA, 19 nt, Artificial Sequence
  Description of Artificial Sequence: Synthetic oligonucleotide
  Sense strand starting at position 2687 of SEQ ID NO: 1241642
ucgaaaugccuugauuccu

SEQ ID NO: 1288273 - RNA, 19 nt, Artificial Sequence
  Description of Artificial Sequence: Synthetic oligonucleotide
  Antisense strand to SEQ ID NO: 1288272
aggaaucaaggcauuucga

SEQ ID NO: 1288274 - RNA, 19 nt, Artificial Sequence
  Description of Artificial Sequence: Synthetic oligonucleotide
  Sense strand starting at position 2708 of SEQ ID NO: 1241642
cccgcuuccuuucugagau

SEQ ID NO: 1288275 - RNA, 19 nt, Artificial Sequence
  Description of Artificial Sequence: Synthetic oligonucleotide
  Antisense strand to SEQ ID NO: 1288274
aucucagaaaggaagcggg

SEQ ID NO: 1288276 - RNA, 19 nt, Artificial Sequence
  Description of Artificial Sequence: Synthetic oligonucleotide
  Sense strand starting at position 2709 of SEQ ID NO: 1241642
ccgcuuccuuucugagauc

SEQ ID NO: 1288277 - RNA, 19 nt, Artificial Sequence
  Description of Artificial Sequence: Synthetic oligonucleotide
  Antisense strand to SEQ ID NO: 1288276
gaucucagaaaggaagcgg

SEQ ID NO: 1288278 - RNA, 19 nt, Artificial Sequence
  Description of Artificial Sequence: Synthetic oligonucleotide
  Sense strand starting at position 2958 of SEQ ID NO: 1241642
uugccuuccucugccagaa

SEQ ID NO: 1288279 - RNA, 19 nt, Artificial Sequence
  Description of Artificial Sequence: Synthetic oligonucleotide
  Antisense strand to SEQ ID NO: 1288278
uucuggcagaggaaggcaa

SEQ ID NO: 1288280 - RNA, 19 nt, Artificial Sequence
  Description of Artificial Sequence: Synthetic oligonucleotide
  Sense strand starting at position 3035 of SEQ ID NO: 1241642
caucgcuuagagugggaaa

SEQ ID NO: 1288281 - RNA, 19 nt, Artificial Sequence
  Description of Artificial Sequence: Synthetic oligonucleotide
  Antisense strand to SEQ ID NO: 1288280
uuucccacucuaagcgaug

SEQ ID NO: 1288282 - RNA, 19 nt, Artificial Sequence
  Description of Artificial Sequence: Synthetic oligonucleotide
  Sense strand starting at position 3209 of SEQ ID NO: 1241642
gcgaguuccuccgugugua

SEQ ID NO: 1288283 - RNA, 19 nt, Artificial Sequence
  Description of Artificial Sequence: Synthetic oligonucleotide
  Antisense strand to SEQ ID NO: 1288282
uacacacggaggaacucgc

SEQ ID NO: 1288284 - RNA, 19 nt, Artificial Sequence
  Description of Artificial Sequence: Synthetic oligonucleotide
  Sense strand starting at position 3210 of SEQ ID NO: 1241642
cgaguuccuccguguguau

SEQ ID NO: 1288285 - RNA, 19 nt, Artificial Sequence
  Description of Artificial Sequence: Synthetic oligonucleotide
  Antisense strand to SEQ ID NO: 1288284
auacacacggaggaacucg

SEQ ID NO: 1288286 - RNA, 19 nt, Artificial Sequence
  Description of Artificial Sequence: Synthetic oligonucleotide
  Sense strand starting at position 3211 of SEQ ID NO: 1241642
gaguuccuccguguguauu

SEQ ID NO: 1288287 - RNA, 19 nt, Artificial Sequence
  Description of Artificial Sequence: Synthetic oligonucleotide
  Antisense strand to SEQ ID NO: 1288286
aauacacacggaggaacuc

SEQ ID NO: 1288288 - RNA, 19 nt, Artificial Sequence
  Description of Artificial Sequence: Synthetic oligonucleotide
  Sense strand starting at position 3212 of SEQ ID NO: 1241642
aguuccuccguguguauua

SEQ ID NO: 1288289 - RNA, 19 nt, Artificial Sequence
  Description of Artificial Sequence: Synthetic oligonucleotide
  Antisense strand to SEQ ID NO: 1288288
uaauacacacggaggaacu

SEQ ID NO: 1288290 - RNA, 19 nt, Artificial Sequence
  Description of Artificial Sequence: Synthetic oligonucleotide
  Sense strand starting at position 3213 of SEQ ID NO: 1241642
guuccuccguguguauuau

SEQ ID NO: 1288291 - RNA, 19 nt, Artificial Sequence
  Description of Artificial Sequence: Synthetic oligonucleotide
  Antisense strand to SEQ ID NO: 1288290
auaauacacacggaggaac

SEQ ID NO: 1288292 - RNA, 19 nt, Artificial Sequence
  Description of Artificial Sequence: Synthetic oligonucleotide
  Sense strand starting at position 3219 of SEQ ID NO: 1241642
ccguguguauuauuucagu

SEQ ID NO: 1288293 - RNA, 19 nt, Artificial Sequence
  Description of Artificial Sequence: Synthetic oligonucleotide
  Antisense strand to SEQ ID NO: 1288292
acugaaauaauacacacgg

SEQ ID NO: 1288294 - RNA, 19 nt, Artificial Sequence
  Description of Artificial Sequence: Synthetic oligonucleotide
  Sense strand starting at position 3419 of SEQ ID NO: 1241642
aaguauaaugguugaggca

SEQ ID NO: 1288295 - RNA, 19 nt, Artificial Sequence
  Description of Artificial Sequence: Synthetic oligonucleotide
  Antisense strand to SEQ ID NO: 1288294
ugccucaaccauuauacuu

SEQ ID NO: 1288296 - RNA, 19 nt, Artificial Sequence
  Description of Artificial Sequence: Synthetic oligonucleotide
  Sense strand starting at position 3469 of SEQ ID NO: 1241642
ucugaaacgucaguuuccu

SEQ ID NO: 1288297 - RNA, 19 nt, Artificial Sequence
  Description of Artificial Sequence: Synthetic oligonucleotide
  Antisense strand to SEQ ID NO: 1288296
aggaaacugacguuucaga

SEQ ID NO: 1288298 - RNA, 19 nt, Artificial Sequence
  Description of Artificial Sequence: Synthetic oligonucleotide
  Sense strand starting at position 3549 of SEQ ID NO: 1241642
agcugcuuugucuaaggca

SEQ ID NO: 1288299 - RNA, 19 nt, Artificial Sequence
  Description of Artificial Sequence: Synthetic oligonucleotide
  Antisense strand to SEQ ID NO: 1288298
ugccuuagacaaagcagcu

SEQ ID NO: 1288300 - RNA, 19 nt, Artificial Sequence
  Description of Artificial Sequence: Synthetic oligonucleotide
  Sense strand starting at position 3552 of SEQ ID NO: 1241642
ugcuuugucuaaggcauuu

SEQ ID NO: 1288301 - RNA, 19 nt, Artificial Sequence
  Description of Artificial Sequence: Synthetic oligonucleotide
  Antisense strand to SEQ ID NO: 1288300
aaaugccuuagacaaagca

SEQ ID NO: 1288302 - RNA, 19 nt, Artificial Sequence
  Description of Artificial Sequence: Synthetic oligonucleotide
  Sense strand starting at position 3572 of SEQ ID NO: 1241642
ggguauaguccaugguaca

SEQ ID NO: 1288303 - RNA, 19 nt, Artificial Sequence
  Description of Artificial Sequence: Synthetic oligonucleotide
  Antisense strand to SEQ ID NO: 1288302
uguaccauggacuauaccc

SEQ ID NO: 1288304 - RNA, 19 nt, Artificial Sequence
  Description of Artificial Sequence: Synthetic oligonucleotide
  Sense strand starting at position 3573 of SEQ ID NO: 1241642
gguauaguccaugguacac

SEQ ID NO: 1288305 - RNA, 19 nt, Artificial Sequence
  Description of Artificial Sequence: Synthetic oligonucleotide
  Antisense strand to SEQ ID NO: 1288304
guguaccauggacuauacc

SEQ ID NO: 1288306 - RNA, 19 nt, Artificial Sequence
  Description of Artificial Sequence: Synthetic oligonucleotide
  Sense strand starting at position 3600 of SEQ ID NO: 1241642
cgucucaaccauugugaca

SEQ ID NO: 1288307 - RNA, 19 nt, Artificial Sequence
  Description of Artificial Sequence: Synthetic oligonucleotide
  Antisense strand to SEQ ID NO: 1288306
ugucacaaugguugagacg

SEQ ID NO: 1288308 - RNA, 19 nt, Artificial Sequence
  Description of Artificial Sequence: Synthetic oligonucleotide
  Sense strand starting at position 3602 of SEQ ID NO: 1241642
ucucaaccauugugacagu

SEQ ID NO: 1288309 - RNA, 19 nt, Artificial Sequence
  Description of Artificial Sequence: Synthetic oligonucleotide
  Antisense strand to SEQ ID NO: 1288308
acugucacaaugguugaga

SEQ ID NO: 1288310 - RNA, 19 nt, Artificial Sequence
  Description of Artificial Sequence: Synthetic oligonucleotide
  Sense strand starting at position 3605 of SEQ ID NO: 1241642
caaccauugugacaguaag

SEQ ID NO: 1288311 - RNA, 19 nt, Artificial Sequence
  Description of Artificial Sequence: Synthetic oligonucleotide
  Antisense strand to SEQ ID NO: 1288310
cuuacugucacaaugguug

SEQ ID NO: 1288312 - RNA, 19 nt, Artificial Sequence
  Description of Artificial Sequence: Synthetic oligonucleotide
  Sense strand starting at position 3669 of SEQ ID NO: 1241642
uuggauguauggcuuccaa

SEQ ID NO: 1288313 - RNA, 19 nt, Artificial Sequence
  Description of Artificial Sequence: Synthetic oligonucleotide
  Antisense strand to SEQ ID NO: 1288312
uuggaagccauacauccaa

SEQ ID NO: 1288314 - RNA, 19 nt, Artificial Sequence
  Description of Artificial Sequence: Synthetic oligonucleotide
  Sense strand starting at position 3841 of SEQ ID NO: 1241642
uacgaacucugcuuuguau

SEQ ID NO: 1288315 - RNA, 19 nt, Artificial Sequence
  Description of Artificial Sequence: Synthetic oligonucleotide
  Antisense strand to SEQ ID NO: 1288314
auacaaagcagaguucgua

SEQ ID NO: 1288316 - RNA, 19 nt, Artificial Sequence
  Description of Artificial Sequence: Synthetic oligonucleotide
  Sense strand starting at position 3843 of SEQ ID NO: 1241642
cgaacucugcuuuguauua

SEQ ID NO: 1288317 - RNA, 19 nt, Artificial Sequence
  Description of Artificial Sequence: Synthetic oligonucleotide
  Antisense strand to SEQ ID NO: 1288316
uaauacaaagcagaguucg

SEQ ID NO: 1288318 - RNA, 19 nt, Artificial Sequence
  Description of Artificial Sequence: Synthetic oligonucleotide
  Sense strand starting at position 3940 of SEQ ID NO: 1241642
acagaaagguaagucuuau

SEQ ID NO: 1288319 - RNA, 19 nt, Artificial Sequence
  Description of Artificial Sequence: Synthetic oligonucleotide
  Antisense strand to SEQ ID NO: 1288318
auaagacuuaccuuucugu

SEQ ID NO: 1288320 - RNA, 19 nt, Artificial Sequence
  Description of Artificial Sequence: Synthetic oligonucleotide
  Sense strand starting at position 3946 of SEQ ID NO: 1241642
agguaagucuuauaacacu

SEQ ID NO: 1288321 - RNA, 19 nt, Artificial Sequence
  Description of Artificial Sequence: Synthetic oligonucleotide
  Antisense strand to SEQ ID NO: 1288320
aguguuauaagacuuaccu

SEQ ID NO: 1288322 - RNA, 19 nt, Artificial Sequence
  Description of Artificial Sequence: Synthetic oligonucleotide
  Sense strand starting at position 169 of SEQ ID NO: 1241643
gcaggaucuuucgggugca

SEQ ID NO: 1288323 - RNA, 19 nt, Artificial Sequence
  Description of Artificial Sequence: Synthetic oligonucleotide
  Antisense strand to SEQ ID NO: 1288322
ugcacccgaaagauccugc

SEQ ID NO: 1288324 - RNA, 19 nt, Artificial Sequence
  Description of Artificial Sequence: Synthetic oligonucleotide
  Sense strand starting at position 187 of SEQ ID NO: 1241643
aguccugucuggucaggaa

SEQ ID NO: 1288325 - RNA, 19 nt, Artificial Sequence
  Description of Artificial Sequence: Synthetic oligonucleotide
  Antisense strand to SEQ ID NO: 1288324
uuccugaccagacaggacu

SEQ ID NO: 1288326 - RNA, 19 nt, Artificial Sequence
  Description of Artificial Sequence: Synthetic oligonucleotide
  Sense strand starting at position 255 of SEQ ID NO: 1241643
auggaagcaucccauucua

SEQ ID NO: 1288327 - RNA, 19 nt, Artificial Sequence
  Description of Artificial Sequence: Synthetic oligonucleotide
  Antisense strand to SEQ ID NO: 1288326
uagaaugggaugcuuccau

SEQ ID NO: 1288328 - RNA, 19 nt, Artificial Sequence
  Description of Artificial Sequence: Synthetic oligonucleotide
  Sense strand starting at position 388 of SEQ ID NO: 1241643
acuggaccuugucaucaaa

SEQ ID NO: 1288329 - RNA, 19 nt, Artificial Sequence
  Description of Artificial Sequence: Synthetic oligonucleotide
  Antisense strand to SEQ ID NO: 1288328
uuugaugacaagguccagu

SEQ ID NO: 1288330 - RNA, 19 nt, Artificial Sequence
  Description of Artificial Sequence: Synthetic oligonucleotide
  Sense strand starting at position 390 of SEQ ID NO: 1241643
uggaccuugucaucaaaug

SEQ ID NO: 1288331 - RNA, 19 nt, Artificial Sequence
  Description of Artificial Sequence: Synthetic oligonucleotide
  Antisense strand to SEQ ID NO: 1288330
cauuugaugacaaggucca

SEQ ID NO: 1288332 - RNA, 19 nt, Artificial Sequence
  Description of Artificial Sequence: Synthetic oligonucleotide
  Sense strand starting at position 658 of SEQ ID NO: 1241643
gcuggaccuuucgacuaua

SEQ ID NO: 1288333 - RNA, 19 nt, Artificial Sequence
  Description of Artificial Sequence: Synthetic oligonucleotide
  Antisense strand to SEQ ID NO: 1288332
uauagucgaaagguccagc

SEQ ID NO: 1288334 - RNA, 19 nt, Artificial Sequence
  Description of Artificial Sequence: Synthetic oligonucleotide
  Sense strand starting at position 661 of SEQ ID NO: 1241643
ggaccuuucgacuauauuc

SEQ ID NO: 1288335 - RNA, 19 nt, Artificial Sequence
  Description of Artificial Sequence: Synthetic oligonucleotide
  Antisense strand to SEQ ID NO: 1288334
gaauauagucgaaaggucc

SEQ ID NO: 1288336 - RNA, 19 nt, Artificial Sequence
  Description of Artificial Sequence: Synthetic oligonucleotide
  Sense strand starting at position 692 of SEQ ID NO: 1241643
aguugaggugucuguaaau

SEQ ID NO: 1288337 - RNA, 19 nt, Artificial Sequence
  Description of Artificial Sequence: Synthetic oligonucleotide
  Antisense strand to SEQ ID NO: 1288336
auuuacagacaccucaacu

SEQ ID NO: 1288338 - RNA, 19 nt, Artificial Sequence
  Description of Artificial Sequence: Synthetic oligonucleotide
  Sense strand starting at position 704 of SEQ ID NO: 1241643
uguaaauacuagcagggua

SEQ ID NO: 1288339 - RNA, 19 nt, Artificial Sequence
  Description of Artificial Sequence: Synthetic oligonucleotide
  Antisense strand to SEQ ID NO: 1288338
uacccugcuaguauuuaca

SEQ ID NO: 1288340 - RNA, 19 nt, Artificial Sequence
  Description of Artificial Sequence: Synthetic oligonucleotide
  Sense strand starting at position 706 of SEQ ID NO: 1241643
uaaauacuagcaggguaau

SEQ ID NO: 1288341 - RNA, 19 nt, Artificial Sequence
  Description of Artificial Sequence: Synthetic oligonucleotide
  Antisense strand to SEQ ID NO: 1288340
auuacccugcuaguauuua

SEQ ID NO: 1288342 - RNA, 19 nt, Artificial Sequence
  Description of Artificial Sequence: Synthetic oligonucleotide
  Sense strand starting at position 707 of SEQ ID NO: 1241643
aaauacuagcaggguaaua

SEQ ID NO: 1288343 - RNA, 19 nt, Artificial Sequence
  Description of Artificial Sequence: Synthetic oligonucleotide
  Antisense strand to SEQ ID NO: 1288342
uauuacccugcuaguauuu

SEQ ID NO: 1288344 - RNA, 19 nt, Artificial Sequence
  Description of Artificial Sequence: Synthetic oligonucleotide
  Sense strand starting at position 719 of SEQ ID NO: 1241643
gguaauaugaaacgauucu

SEQ ID NO: 1288345 - RNA, 19 nt, Artificial Sequence
  Description of Artificial Sequence: Synthetic oligonucleotide
  Antisense strand to SEQ ID NO: 1288344
agaaucguuucauauuacc

SEQ ID NO: 1288346 - RNA, 19 nt, Artificial Sequence
  Description of Artificial Sequence: Synthetic oligonucleotide
  Sense strand starting at position 725 of SEQ ID NO: 1241643
augaaacgauucuguucua

SEQ ID NO: 1288347 - RNA, 19 nt, Artificial Sequence
  Description of Artificial Sequence: Synthetic oligonucleotide
  Antisense strand to SEQ ID NO: 1288346
uagaacagaaucguuucau

SEQ ID NO: 1288348 - RNA, 19 nt, Artificial Sequence
  Description of Artificial Sequence: Synthetic oligonucleotide
  Sense strand starting at position 726 of SEQ ID NO: 1241643
ugaaacgauucuguucuau

SEQ ID NO: 1288349 - RNA, 19 nt, Artificial Sequence
  Description of Artificial Sequence: Synthetic oligonucleotide
  Antisense strand to SEQ ID NO: 1288348
auagaacagaaucguuuca

SEQ ID NO: 1288350 - RNA, 19 nt, Artificial Sequence
  Description of Artificial Sequence: Synthetic oligonucleotide
  Sense strand starting at position 746 of SEQ ID NO: 1241643
caguaaaguuuccuaacga

SEQ ID NO: 1288351 - RNA, 19 nt, Artificial Sequence
  Description of Artificial Sequence: Synthetic oligonucleotide
  Antisense strand to SEQ ID NO: 1288350
ucguuaggaaacuuuacug

SEQ ID NO: 1288352 - RNA, 19 nt, Artificial Sequence
  Description of Artificial Sequence: Synthetic oligonucleotide
  Sense strand starting at position 747 of SEQ ID NO: 1241643
aguaaaguuuccuaacgaa

SEQ ID NO: 1288353 - RNA, 19 nt, Artificial Sequence
  Description of Artificial Sequence: Synthetic oligonucleotide
  Antisense strand to SEQ ID NO: 1288352
uucguuaggaaacuuuacu

SEQ ID NO: 1288354 - RNA, 19 nt, Artificial Sequence
  Description of Artificial Sequence: Synthetic oligonucleotide
  Sense strand starting at position 789 of SEQ ID NO: 1241643
gccuguccuuucuccaaga

SEQ ID NO: 1288355 - RNA, 19 nt, Artificial Sequence
  Description of Artificial Sequence: Synthetic oligonucleotide
  Antisense strand to SEQ ID NO: 1288354
ucuuggagaaaggacaggc

SEQ ID NO: 1288356 - RNA, 19 nt, Artificial Sequence
  Description of Artificial Sequence: Synthetic oligonucleotide
  Sense strand starting at position 817 of SEQ ID NO: 1241643
ucuacaagauccguaucaa

SEQ ID NO: 1288357 - RNA, 19 nt, Artificial Sequence
  Description of Artificial Sequence: Synthetic oligonucleotide
  Antisense strand to SEQ ID NO: 1288356
uugauacggaucuuguaga

SEQ ID NO: 1288358 - RNA, 19 nt, Artificial Sequence
  Description of Artificial Sequence: Synthetic oligonucleotide
  Sense strand starting at position 818 of SEQ ID NO: 1241643
cuacaagauccguaucaau

SEQ ID NO: 1288359 - RNA, 19 nt, Artificial Sequence
  Description of Artificial Sequence: Synthetic oligonucleotide
  Antisense strand to SEQ ID NO: 1288358
auugauacggaucuuguag

SEQ ID NO: 1288360 - RNA, 19 nt, Artificial Sequence
  Description of Artificial Sequence: Synthetic oligonucleotide
  Sense strand starting at position 821 of SEQ ID NO: 1241643
caagauccguaucaauaug

SEQ ID NO: 1288361 - RNA, 19 nt, Artificial Sequence
  Description of Artificial Sequence: Synthetic oligonucleotide
  Antisense strand to SEQ ID NO: 1288360
cauauugauacggaucuug

SEQ ID NO: 1288362 - RNA, 19 nt, Artificial Sequence
  Description of Artificial Sequence: Synthetic oligonucleotide
  Sense strand starting at position 827 of SEQ ID NO: 1241643
ccguaucaauauggauaau

SEQ ID NO: 1288363 - RNA, 19 nt, Artificial Sequence
  Description of Artificial Sequence: Synthetic oligonucleotide
  Antisense strand to SEQ ID NO: 1288362
auuauccauauugauacgg

SEQ ID NO: 1288364 - RNA, 19 nt, Artificial Sequence
  Description of Artificial Sequence: Synthetic oligonucleotide
  Sense strand starting at position 838 of SEQ ID NO: 1241643
uggauaaugucacgagcag

SEQ ID NO: 1288365 - RNA, 19 nt, Artificial Sequence
  Description of Artificial Sequence: Synthetic oligonucleotide
  Antisense strand to SEQ ID NO: 1288364
cugcucgugacauuaucca

SEQ ID NO: 1288366 - RNA, 19 nt, Artificial Sequence
  Description of Artificial Sequence: Synthetic oligonucleotide
  Sense strand starting at position 839 of SEQ ID NO: 1241643
ggauaaugucacgagcagu

SEQ ID NO: 1288367 - RNA, 19 nt, Artificial Sequence
  Description of Artificial Sequence: Synthetic oligonucleotide
  Antisense strand to SEQ ID NO: 1288366
acugcucgugacauuaucc

SEQ ID NO: 1288368 - RNA, 19 nt, Artificial Sequence
  Description of Artificial Sequence: Synthetic oligonucleotide
  Sense strand starting at position 860 of SEQ ID NO: 1241643
gcuuaaccgcauuauauau

SEQ ID NO: 1288369 - RNA, 19 nt, Artificial Sequence
  Description of Artificial Sequence: Synthetic oligonucleotide
  Antisense strand to SEQ ID NO: 1288368
auauauaaugcgguuaagc

SEQ ID NO: 1288370 - RNA, 19 nt, Artificial Sequence
  Description of Artificial Sequence: Synthetic oligonucleotide
  Sense strand starting at position 949 of SEQ ID NO: 1241643
uagcgucaccugcauauua

SEQ ID NO: 1288371 - RNA, 19 nt, Artificial Sequence
  Description of Artificial Sequence: Synthetic oligonucleotide
  Antisense strand to SEQ ID NO: 1288370
uaauaugcaggugacgcua

SEQ ID NO: 1288372 - RNA, 19 nt, Artificial Sequence
  Description of Artificial Sequence: Synthetic oligonucleotide
  Sense strand starting at position 951 of SEQ ID NO: 1241643
gcgucaccugcauauuauu

SEQ ID NO: 1288373 - RNA, 19 nt, Artificial Sequence
  Description of Artificial Sequence: Synthetic oligonucleotide
  Antisense strand to SEQ ID NO: 1288372
aauaauaugcaggugacgc

SEQ ID NO: 1288374 - RNA, 19 nt, Artificial Sequence
  Description of Artificial Sequence: Synthetic oligonucleotide
  Sense strand starting at position 957 of SEQ ID NO: 1241643
ccugcauauuauucugaag

SEQ ID NO: 1288375 - RNA, 19 nt, Artificial Sequence
  Description of Artificial Sequence: Synthetic oligonucleotide
  Antisense strand to SEQ ID NO: 1288374
cuucagaauaauaugcagg

SEQ ID NO: 1288376 - RNA, 19 nt, Artificial Sequence
  Description of Artificial Sequence: Synthetic oligonucleotide
  Sense strand starting at position 959 of SEQ ID NO: 1241643
ugcauauuauucugaagac

SEQ ID NO: 1288377 - RNA, 19 nt, Artificial Sequence
  Description of Artificial Sequence: Synthetic oligonucleotide
  Antisense strand to SEQ ID NO: 1288376
gucuucagaauaauaugca

SEQ ID NO: 1288378 - RNA, 19 nt, Artificial Sequence
  Description of Artificial Sequence: Synthetic oligonucleotide
  Sense strand starting at position 960 of SEQ ID NO: 1241643
gcauauuauucugaagacg

SEQ ID NO: 1288379 - RNA, 19 nt, Artificial Sequence
  Description of Artificial Sequence: Synthetic oligonucleotide
  Antisense strand to SEQ ID NO: 1288378
cgucuucagaauaauaugc

SEQ ID NO: 1288380 - RNA, 19 nt, Artificial Sequence
  Description of Artificial Sequence: Synthetic oligonucleotide
  Sense strand starting at position 1085 of SEQ ID NO: 1241643
gggcaucuaucauguguug

SEQ ID NO: 1288381 - RNA, 19 nt, Artificial Sequence
  Description of Artificial Sequence: Synthetic oligonucleotide
  Antisense strand to SEQ ID NO: 1288380
caacacaugauagaugccc

SEQ ID NO: 1288382 - RNA, 19 nt, Artificial Sequence
  Description of Artificial Sequence: Synthetic oligonucleotide
  Sense strand starting at position 1090 of SEQ ID NO: 1241643
ucuaucauguguugcugaa

SEQ ID NO: 1288383 - RNA, 19 nt, Artificial Sequence
  Description of Artificial Sequence: Synthetic oligonucleotide
  Antisense strand to SEQ ID NO: 1288382
uucagcaacacaugauaga

SEQ ID NO: 1288384 - RNA, 19 nt, Artificial Sequence
  Description of Artificial Sequence: Synthetic oligonucleotide
  Sense strand starting at position 1092 of SEQ ID NO: 1241643
uaucauguguugcugaaau

SEQ ID NO: 1288385 - RNA, 19 nt, Artificial Sequence
  Description of Artificial Sequence: Synthetic oligonucleotide
  Antisense strand to SEQ ID NO: 1288384
auuucagcaacacaugaua

SEQ ID NO: 1288386 - RNA, 19 nt, Artificial Sequence
  Description of Artificial Sequence: Synthetic oligonucleotide
  Sense strand starting at position 2020 of SEQ ID NO: 1241643
gcagcuuugggauggugau

SEQ ID NO: 1288387 - RNA, 19 nt, Artificial Sequence
  Description of Artificial Sequence: Synthetic oligonucleotide
  Antisense strand to SEQ ID NO: 1288386
aucaccaucccaaagcugc

SEQ ID NO: 1288388 - RNA, 19 nt, Artificial Sequence
  Description of Artificial Sequence: Synthetic oligonucleotide
  Sense strand starting at position 2021 of SEQ ID NO: 1241643
cagcuuugggauggugauu

SEQ ID NO: 1288389 - RNA, 19 nt, Artificial Sequence
  Description of Artificial Sequence: Synthetic oligonucleotide
  Antisense strand to SEQ ID NO: 1288388
aaucaccaucccaaagcug

SEQ ID NO: 1288390 - RNA, 19 nt, Artificial Sequence
  Description of Artificial Sequence: Synthetic oligonucleotide
  Sense strand starting at position 2228 of SEQ ID NO: 1241643
agguuggguucgccgaaau

SEQ ID NO: 1288391 - RNA, 19 nt, Artificial Sequence
  Description of Artificial Sequence: Synthetic oligonucleotide
  Antisense strand to SEQ ID NO: 1288390
auuucggcgaacccaaccu

SEQ ID NO: 1288392 - RNA, 19 nt, Artificial Sequence
  Description of Artificial Sequence: Synthetic oligonucleotide
  Sense strand starting at position 2229 of SEQ ID NO: 1241643
gguuggguucgccgaaauc

SEQ ID NO: 1288393 - RNA, 19 nt, Artificial Sequence
  Description of Artificial Sequence: Synthetic oligonucleotide
  Antisense strand to SEQ ID NO: 1288392
gauuucggcgaacccaacc

SEQ ID NO: 1288394 - RNA, 19 nt, Artificial Sequence
  Description of Artificial Sequence: Synthetic oligonucleotide
  Sense strand starting at position 2658 of SEQ ID NO: 1241643
ggauuuaggccgugagcag

SEQ ID NO: 1288395 - RNA, 19 nt, Artificial Sequence
  Description of Artificial Sequence: Synthetic oligonucleotide
  Antisense strand to SEQ ID NO: 1288394
cugcucacggccuaaaucc

SEQ ID NO: 1288396 - RNA, 19 nt, Artificial Sequence
  Description of Artificial Sequence: Synthetic oligonucleotide
  Sense strand starting at position 3912 of SEQ ID NO: 1241643
cgcugcuuguccuugggaa

SEQ ID NO: 1288397 - RNA, 19 nt, Artificial Sequence
  Description of Artificial Sequence: Synthetic oligonucleotide
  Antisense strand to SEQ ID NO: 1288396
uucccaaggacaagcagcg

SEQ ID NO: 1288398 - RNA, 19 nt, Artificial Sequence
  Description of Artificial Sequence: Synthetic oligonucleotide
  Sense strand starting at position 3 of SEQ ID NO: 1241644
gccuuuccugggcauauga

SEQ ID NO: 1288399 - RNA, 19 nt, Artificial Sequence
  Description of Artificial Sequence: Synthetic oligonucleotide
  Antisense strand to SEQ ID NO: 1288398
ucauaugcccaggaaaggc

SEQ ID NO: 1288400 - RNA, 19 nt, Artificial Sequence
  Description of Artificial Sequence: Synthetic oligonucleotide
  Sense strand starting at position 104 of SEQ ID NO: 1241644
ccuucccuuuguguaagaa

SEQ ID NO: 1288401 - RNA, 19 nt, Artificial Sequence
  Description of Artificial Sequence: Synthetic oligonucleotide
  Antisense strand to SEQ ID NO: 1288400
uucuuacacaaagggaagg

SEQ ID NO: 1288402 - RNA, 19 nt, Artificial Sequence
  Description of Artificial Sequence: Synthetic oligonucleotide
  Sense strand starting at position 112 of SEQ ID NO: 1241644
uuguguaagaauugggauu

SEQ ID NO: 1288403 - RNA, 19 nt, Artificial Sequence
  Description of Artificial Sequence: Synthetic oligonucleotide
  Antisense strand to SEQ ID NO: 1288402
aaucccaauucuuacacaa

SEQ ID NO: 1288404 - RNA, 19 nt, Artificial Sequence
  Description of Artificial Sequence: Synthetic oligonucleotide
  Sense strand starting at position 262 of SEQ ID NO: 1241644
uaaucuuugcucuaaggug

SEQ ID NO: 1288405 - RNA, 19 nt, Artificial Sequence
  Description of Artificial Sequence: Synthetic oligonucleotide
  Antisense strand to SEQ ID NO: 1288404
caccuuagagcaaagauua

SEQ ID NO: 1288406 - RNA, 19 nt, Artificial Sequence
  Description of Artificial Sequence: Synthetic oligonucleotide
  Sense strand starting at position 502 of SEQ ID NO: 1241644
ggaguuuggacucacucga

SEQ ID NO: 1288407 - RNA, 19 nt, Artificial Sequence
  Description of Artificial Sequence: Synthetic oligonucleotide
  Antisense strand to SEQ ID NO: 1288406
ucgagugaguccaaacucc

SEQ ID NO: 1288408 - RNA, 19 nt, Artificial Sequence
  Description of Artificial Sequence: Synthetic oligonucleotide
  Sense strand starting at position 643 of SEQ ID NO: 1241644
gguauaaggcauuauuacu

SEQ ID NO: 1288409 - RNA, 19 nt, Artificial Sequence
  Description of Artificial Sequence: Synthetic oligonucleotide
  Antisense strand to SEQ ID NO: 1288408
aguaauaaugccuuauacc

SEQ ID NO: 1288410 - RNA, 19 nt, Artificial Sequence
  Description of Artificial Sequence: Synthetic oligonucleotide
  Sense strand starting at position 649 of SEQ ID NO: 1241644
aggcauuauuacuccagaa

SEQ ID NO: 1288411 - RNA, 19 nt, Artificial Sequence
  Description of Artificial Sequence: Synthetic oligonucleotide
  Antisense strand to SEQ ID NO: 1288410
uucuggaguaauaaugccu

SEQ ID NO: 1288412 - RNA, 19 nt, Artificial Sequence
  Description of Artificial Sequence: Synthetic oligonucleotide
  Sense strand starting at position 753 of SEQ ID NO: 1241644
acaagaucuggauguguuu

SEQ ID NO: 1288413 - RNA, 19 nt, Artificial Sequence
  Description of Artificial Sequence: Synthetic oligonucleotide
  Antisense strand to SEQ ID NO: 1288412
aaacacauccagaucuugu

SEQ ID NO: 1288414 - RNA, 19 nt, Artificial Sequence
  Description of Artificial Sequence: Synthetic oligonucleotide
  Sense strand starting at position 755 of SEQ ID NO: 1241644
aagaucuggauguguuuga

SEQ ID NO: 1288415 - RNA, 19 nt, Artificial Sequence
  Description of Artificial Sequence: Synthetic oligonucleotide
  Antisense strand to SEQ ID NO: 1288414
ucaaacacauccagaucuu

SEQ ID NO: 1288416 - RNA, 19 nt, Artificial Sequence
  Description of Artificial Sequence: Synthetic oligonucleotide
  Sense strand starting at position 756 of SEQ ID NO: 1241644
agaucuggauguguuugaa

SEQ ID NO: 1288417 - RNA, 19 nt, Artificial Sequence
  Description of Artificial Sequence: Synthetic oligonucleotide
  Antisense strand to SEQ ID NO: 1288416
uucaaacacauccagaucu

SEQ ID NO: 1288418 - RNA, 19 nt, Artificial Sequence
  Description of Artificial Sequence: Synthetic oligonucleotide
  Sense strand starting at position 759 of SEQ ID NO: 1241644
ucuggauguguuugaagaa

SEQ ID NO: 1288419 - RNA, 19 nt, Artificial Sequence
  Description of Artificial Sequence: Synthetic oligonucleotide
  Antisense strand to SEQ ID NO: 1288418
uucuucaaacacauccaga

SEQ ID NO: 1288420 - RNA, 19 nt, Artificial Sequence
  Description of Artificial Sequence: Synthetic oligonucleotide
  Sense strand starting at position 810 of SEQ ID NO: 1241644
uucuguaagcagcaauaaa

SEQ ID NO: 1288421 - RNA, 19 nt, Artificial Sequence
  Description of Artificial Sequence: Synthetic oligonucleotide
  Antisense strand to SEQ ID NO: 1288420
uuuauugcugcuuacagaa

SEQ ID NO: 1288422 - RNA, 19 nt, Artificial Sequence
  Description of Artificial Sequence: Synthetic oligonucleotide
  Sense strand starting at position 1198 of SEQ ID NO: 1241644
uccauuguacgugacacuu

SEQ ID NO: 1288423 - RNA, 19 nt, Artificial Sequence
  Description of Artificial Sequence: Synthetic oligonucleotide
  Antisense strand to SEQ ID NO: 1288422
aagugucacguacaaugga

SEQ ID NO: 1288424 - RNA, 19 nt, Artificial Sequence
  Description of Artificial Sequence: Synthetic oligonucleotide
  Sense strand starting at position 1256 of SEQ ID NO: 1241644
gaccuucugggcgagcaua

SEQ ID NO: 1288425 - RNA, 19 nt, Artificial Sequence
  Description of Artificial Sequence: Synthetic oligonucleotide
  Antisense strand to SEQ ID NO: 1288424
uaugcucgcccagaagguc

SEQ ID NO: 1288426 - RNA, 19 nt, Artificial Sequence
  Description of Artificial Sequence: Synthetic oligonucleotide
  Sense strand starting at position 1267 of SEQ ID NO: 1241644
cgagcauagccuguguuau

SEQ ID NO: 1288427 - RNA, 19 nt, Artificial Sequence
  Description of Artificial Sequence: Synthetic oligonucleotide
  Antisense strand to SEQ ID NO: 1288426
auaacacaggcuaugcucg

SEQ ID NO: 1288428 - RNA, 19 nt, Artificial Sequence
  Description of Artificial Sequence: Synthetic oligonucleotide
  Sense strand starting at position 1674 of SEQ ID NO: 1241644
ugcuauaguuuccuaauga

SEQ ID NO: 1288429 - RNA, 19 nt, Artificial Sequence
  Description of Artificial Sequence: Synthetic oligonucleotide
  Antisense strand to SEQ ID NO: 1288428
ucauuaggaaacuauagca

SEQ ID NO: 1288430 - RNA, 19 nt, Artificial Sequence
  Description of Artificial Sequence: Synthetic oligonucleotide
  Sense strand starting at position 1870 of SEQ ID NO: 1241644
gcaggaaccauguaugacu

SEQ ID NO: 1288431 - RNA, 19 nt, Artificial Sequence
  Description of Artificial Sequence: Synthetic oligonucleotide
  Antisense strand to SEQ ID NO: 1288430
agucauacaugguuccugc

SEQ ID NO: 1288432 - RNA, 19 nt, Artificial Sequence
  Description of Artificial Sequence: Synthetic oligonucleotide
  Sense strand starting at position 1877 of SEQ ID NO: 1241644
ccauguaugacucacgguu

SEQ ID NO: 1288433 - RNA, 19 nt, Artificial Sequence
  Description of Artificial Sequence: Synthetic oligonucleotide
  Antisense strand to SEQ ID NO: 1288432
aaccgugagucauacaugg

SEQ ID NO: 1288434 - RNA, 19 nt, Artificial Sequence
  Description of Artificial Sequence: Synthetic oligonucleotide
  Sense strand starting at position 2037 of SEQ ID NO: 1241644
cuuagaaaucuaugugagg

SEQ ID NO: 1288435 - RNA, 19 nt, Artificial Sequence
  Description of Artificial Sequence: Synthetic oligonucleotide
  Antisense strand to SEQ ID NO: 1288434
ccucacauagauuucuaag

SEQ ID NO: 1288436 - RNA, 19 nt, Artificial Sequence
  Description of Artificial Sequence: Synthetic oligonucleotide
  Sense strand starting at position 2038 of SEQ ID NO: 1241644
uuagaaaucuaugugaggu

SEQ ID NO: 1288437 - RNA, 19 nt, Artificial Sequence
  Description of Artificial Sequence: Synthetic oligonucleotide
  Antisense strand to SEQ ID NO: 1288436
accucacauagauuucuaa

SEQ ID NO: 1288438 - RNA, 19 nt, Artificial Sequence
  Description of Artificial Sequence: Synthetic oligonucleotide
  Sense strand starting at position 2121 of SEQ ID NO: 1241644
gucugugaaugccugagaa

SEQ ID NO: 1288439 - RNA, 19 nt, Artificial Sequence
  Description of Artificial Sequence: Synthetic oligonucleotide
  Antisense strand to SEQ ID NO: 1288438
uucucaggcauucacagac

SEQ ID NO: 1288440 - RNA, 19 nt, Artificial Sequence
  Description of Artificial Sequence: Synthetic oligonucleotide
  Sense strand starting at position 2123 of SEQ ID NO: 1241644
cugugaaugccugagaaau

SEQ ID NO: 1288441 - RNA, 19 nt, Artificial Sequence
  Description of Artificial Sequence: Synthetic oligonucleotide
  Antisense strand to SEQ ID NO: 1288440
auuucucaggcauucacag

SEQ ID NO: 1288442 - RNA, 19 nt, Artificial Sequence
  Description of Artificial Sequence: Synthetic oligonucleotide
  Sense strand starting at position 2253 of SEQ ID NO: 1241644
ggaugcguccucaguggau

SEQ ID NO: 1288443 - RNA, 19 nt, Artificial Sequence
  Description of Artificial Sequence: Synthetic oligonucleotide
  Antisense strand to SEQ ID NO: 1288442
auccacugaggacgcaucc

SEQ ID NO: 1288444 - RNA, 19 nt, Artificial Sequence
  Description of Artificial Sequence: Synthetic oligonucleotide
  Sense strand starting at position 2405 of SEQ ID NO: 1241644
agaagucagacucgauaaa

SEQ ID NO: 1288445 - RNA, 19 nt, Artificial Sequence
  Description of Artificial Sequence: Synthetic oligonucleotide
  Antisense strand to SEQ ID NO: 1288444
uuuaucgagucugacuucu

SEQ ID NO: 1288446 - RNA, 19 nt, Artificial Sequence
  Description of Artificial Sequence: Synthetic oligonucleotide
  Sense strand starting at position 2520 of SEQ ID NO: 1241644
acuauuauucuaggugcaa

SEQ ID NO: 1288447 - RNA, 19 nt, Artificial Sequence
  Description of Artificial Sequence: Synthetic oligonucleotide
  Antisense strand to SEQ ID NO: 1288446
uugcaccuagaauaauagu

SEQ ID NO: 1288448 - RNA, 19 nt, Artificial Sequence
  Description of Artificial Sequence: Synthetic oligonucleotide
  Sense strand starting at position 2521 of SEQ ID NO: 1241644
cuauuauucuaggugcaaa

SEQ ID NO: 1288449 - RNA, 19 nt, Artificial Sequence
  Description of Artificial Sequence: Synthetic oligonucleotide
  Antisense strand to SEQ ID NO: 1288448
uuugcaccuagaauaauag

SEQ ID NO: 1288450 - RNA, 19 nt, Artificial Sequence
  Description of Artificial Sequence: Synthetic oligonucleotide
  Sense strand starting at position 2675 of SEQ ID NO: 1241644
aacgguaauuugucuccca

SEQ ID NO: 1288451 - RNA, 19 nt, Artificial Sequence
  Description of Artificial Sequence: Synthetic oligonucleotide
  Antisense strand to SEQ ID NO: 1288450
ugggagacaaauuaccguu

SEQ ID NO: 1288452 - RNA, 19 nt, Artificial Sequence
  Description of Artificial Sequence: Synthetic oligonucleotide
  Sense strand starting at position 2678 of SEQ ID NO: 1241644
gguaauuugucucccaggu

SEQ ID NO: 1288453 - RNA, 19 nt, Artificial Sequence
  Description of Artificial Sequence: Synthetic oligonucleotide
  Antisense strand to SEQ ID NO: 1288452
accugggagacaaauuacc

SEQ ID NO: 1288454 - RNA, 19 nt, Artificial Sequence
  Description of Artificial Sequence: Synthetic oligonucleotide
  Sense strand starting at position 2714 of SEQ ID NO: 1241644
gauggaggauaugaaugaa

SEQ ID NO: 1288455 - RNA, 19 nt, Artificial Sequence
  Description of Artificial Sequence: Synthetic oligonucleotide
  Antisense strand to SEQ ID NO: 1288454
uucauucauauccuccauc

SEQ ID NO: 1288456 - RNA, 19 nt, Artificial Sequence
  Description of Artificial Sequence: Synthetic oligonucleotide
  Sense strand starting at position 2866 of SEQ ID NO: 1241644
caaagagaaugguuucuca

SEQ ID NO: 1288457 - RNA, 19 nt, Artificial Sequence
  Description of Artificial Sequence: Synthetic oligonucleotide
  Antisense strand to SEQ ID NO: 1288456
ugagaaaccauucucuuug

SEQ ID NO: 1288458 - RNA, 19 nt, Artificial Sequence
  Description of Artificial Sequence: Synthetic oligonucleotide
  Sense strand starting at position 2869 of SEQ ID NO: 1241644
agagaaugguuucucaauu

SEQ ID NO: 1288459 - RNA, 19 nt, Artificial Sequence
  Description of Artificial Sequence: Synthetic oligonucleotide
  Antisense strand to SEQ ID NO: 1288458
aauugagaaaccauucucu

SEQ ID NO: 1288460 - RNA, 19 nt, Artificial Sequence
  Description of Artificial Sequence: Synthetic oligonucleotide
  Sense strand starting at position 2894 of SEQ ID NO: 1241644
uggcaauagucacuuagac

SEQ ID NO: 1288461 - RNA, 19 nt, Artificial Sequence
  Description of Artificial Sequence: Synthetic oligonucleotide
  Antisense strand to SEQ ID NO: 1288460
gucuaagugacuauugcca

SEQ ID NO: 1288462 - RNA, 19 nt, Artificial Sequence
  Description of Artificial Sequence: Synthetic oligonucleotide
  Sense strand starting at position 2972 of SEQ ID NO: 1241644
cuggauagcucacuuguaa

SEQ ID NO: 1288463 - RNA, 19 nt, Artificial Sequence
  Description of Artificial Sequence: Synthetic oligonucleotide
  Antisense strand to SEQ ID NO: 1288462
uuacaagugagcuauccag

SEQ ID NO: 1288464 - RNA, 19 nt, Artificial Sequence
  Description of Artificial Sequence: Synthetic oligonucleotide
  Sense strand starting at position 2979 of SEQ ID NO: 1241644
gcucacuuguaauuuguaa

SEQ ID NO: 1288465 - RNA, 19 nt, Artificial Sequence
  Description of Artificial Sequence: Synthetic oligonucleotide
  Antisense strand to SEQ ID NO: 1288464
uuacaaauuacaagugagc

SEQ ID NO: 1288466 - RNA, 19 nt, Artificial Sequence
  Description of Artificial Sequence: Synthetic oligonucleotide
  Sense strand starting at position 3014 of SEQ ID NO: 1241644
agaggucuuuaaucacgga

SEQ ID NO: 1288467 - RNA, 19 nt, Artificial Sequence
  Description of Artificial Sequence: Synthetic oligonucleotide
  Antisense strand to SEQ ID NO: 1288466
uccgugauuaaagaccucu

SEQ ID NO: 1288468 - RNA, 19 nt, Artificial Sequence
  Description of Artificial Sequence: Synthetic oligonucleotide
  Sense strand starting at position 3052 of SEQ ID NO: 1241644
ugucuaucuggccagaggu

SEQ ID NO: 1288469 - RNA, 19 nt, Artificial Sequence
  Description of Artificial Sequence: Synthetic oligonucleotide
  Antisense strand to SEQ ID NO: 1288468
accucuggccagauagaca

SEQ ID NO: 1288470 - RNA, 19 nt, Artificial Sequence
  Description of Artificial Sequence: Synthetic oligonucleotide
  Sense strand starting at position 3157 of SEQ ID NO: 1241644
agucuauauguguagggaa

SEQ ID NO: 1288471 - RNA, 19 nt, Artificial Sequence
  Description of Artificial Sequence: Synthetic oligonucleotide
  Antisense strand to SEQ ID NO: 1288470
uucccuacacauauagacu

SEQ ID NO: 1288472 - RNA, 19 nt, Artificial Sequence
  Description of Artificial Sequence: Synthetic oligonucleotide
  Sense strand starting at position 3538 of SEQ ID NO: 1241644
gguuucuucccaggugaua

SEQ ID NO: 1288473 - RNA, 19 nt, Artificial Sequence
  Description of Artificial Sequence: Synthetic oligonucleotide
  Antisense strand to SEQ ID NO: 1288472
uaucaccugggaagaaacc

SEQ ID NO: 1288474 - RNA, 19 nt, Artificial Sequence
  Description of Artificial Sequence: Synthetic oligonucleotide
  Sense strand starting at position 3705 of SEQ ID NO: 1241644
ggaacugaaugucucguua

SEQ ID NO: 1288475 - RNA, 19 nt, Artificial Sequence
  Description of Artificial Sequence: Synthetic oligonucleotide
  Antisense strand to SEQ ID NO: 1288474
uaacgagacauucaguucc

SEQ ID NO: 1288476 - RNA, 19 nt, Artificial Sequence
  Description of Artificial Sequence: Synthetic oligonucleotide
  Sense strand starting at position 3709 of SEQ ID NO: 1241644
cugaaugucucguuauaaa

SEQ ID NO: 1288477 - RNA, 19 nt, Artificial Sequence
  Description of Artificial Sequence: Synthetic oligonucleotide
  Antisense strand to SEQ ID NO: 1288476
uuuauaacgagacauucag

SEQ ID NO: 1288478 - RNA, 19 nt, Artificial Sequence
  Description of Artificial Sequence: Synthetic oligonucleotide
  Sense strand starting at position 180 of SEQ ID NO: 1241645
ggcucaacacuugauguaa

SEQ ID NO: 1288479 - RNA, 19 nt, Artificial Sequence
  Description of Artificial Sequence: Synthetic oligonucleotide
  Antisense strand to SEQ ID NO: 1288478
uuacaucaaguguugagcc

SEQ ID NO: 1288480 - RNA, 19 nt, Artificial Sequence
  Description of Artificial Sequence: Synthetic oligonucleotide
  Sense strand starting at position 229 of SEQ ID NO: 1241645
uuugcuuaacugugacaaa

SEQ ID NO: 1288481 - RNA, 19 nt, Artificial Sequence
  Description of Artificial Sequence: Synthetic oligonucleotide
  Antisense strand to SEQ ID NO: 1288480
uuugucacaguuaagcaaa

SEQ ID NO: 1288482 - RNA, 19 nt, Artificial Sequence
  Description of Artificial Sequence: Synthetic oligonucleotide
  Sense strand starting at position 329 of SEQ ID NO: 1241645
ucaaguaaugucugauaaa

SEQ ID NO: 1288483 - RNA, 19 nt, Artificial Sequence
  Description of Artificial Sequence: Synthetic oligonucleotide
  Antisense strand to SEQ ID NO: 1288482
uuuaucagacauuacuuga

SEQ ID NO: 1288484 - RNA, 19 nt, Artificial Sequence
  Description of Artificial Sequence: Synthetic oligonucleotide
  Sense strand starting at position 393 of SEQ ID NO: 1241645
aaccuaacugcauguguga

SEQ ID NO: 1288485 - RNA, 19 nt, Artificial Sequence
  Description of Artificial Sequence: Synthetic oligonucleotide
  Antisense strand to SEQ ID NO: 1288484
ucacacaugcaguuagguu

SEQ ID NO: 1288486 - RNA, 19 nt, Artificial Sequence
  Description of Artificial Sequence: Synthetic oligonucleotide
  Sense strand starting at position 460 of SEQ ID NO: 1241645
uuucgaguuacugauguac

SEQ ID NO: 1288487 - RNA, 19 nt, Artificial Sequence
  Description of Artificial Sequence: Synthetic oligonucleotide
  Antisense strand to SEQ ID NO: 1288486
guacaucaguaacucgaaa

SEQ ID NO: 1288488 - RNA, 19 nt, Artificial Sequence
  Description of Artificial Sequence: Synthetic oligonucleotide
  Sense strand starting at position 535 of SEQ ID NO: 1241645
cugacaaugugguuaugau

SEQ ID NO: 1288489 - RNA, 19 nt, Artificial Sequence
  Description of Artificial Sequence: Synthetic oligonucleotide
  Antisense strand to SEQ ID NO: 1288488
aucauaaccacauugucag

SEQ ID NO: 1288490 - RNA, 19 nt, Artificial Sequence
  Description of Artificial Sequence: Synthetic oligonucleotide
  Sense strand starting at position 536 of SEQ ID NO: 1241645
ugacaaugugguuaugaug

SEQ ID NO: 1288491 - RNA, 19 nt, Artificial Sequence
  Description of Artificial Sequence: Synthetic oligonucleotide
  Antisense strand to SEQ ID NO: 1288490
caucauaaccacauuguca

SEQ ID NO: 1288492 - RNA, 19 nt, Artificial Sequence
  Description of Artificial Sequence: Synthetic oligonucleotide
  Sense strand starting at position 627 of SEQ ID NO: 1241645
gguaauacuuaagucacaa

SEQ ID NO: 1288493 - RNA, 19 nt, Artificial Sequence
  Description of Artificial Sequence: Synthetic oligonucleotide
  Antisense strand to SEQ ID NO: 1288492
uugugacuuaaguauuacc

SEQ ID NO: 1288494 - RNA, 19 nt, Artificial Sequence
  Description of Artificial Sequence: Synthetic oligonucleotide
  Sense strand starting at position 879 of SEQ ID NO: 1241645
gguucucuaauacgauaga

SEQ ID NO: 1288495 - RNA, 19 nt, Artificial Sequence
  Description of Artificial Sequence: Synthetic oligonucleotide
  Antisense strand to SEQ ID NO: 1288494
ucuaucguauuagagaacc

SEQ ID NO: 1288496 - RNA, 19 nt, Artificial Sequence
  Description of Artificial Sequence: Synthetic oligonucleotide
  Sense strand starting at position 906 of SEQ ID NO: 1241645
ugaguugccuucuuggaau

SEQ ID NO: 1288497 - RNA, 19 nt, Artificial Sequence
  Description of Artificial Sequence: Synthetic oligonucleotide
  Antisense strand to SEQ ID NO: 1288496
auuccaagaaggcaacuca

SEQ ID NO: 1288498 - RNA, 19 nt, Artificial Sequence
  Description of Artificial Sequence: Synthetic oligonucleotide
  Sense strand starting at position 926 of SEQ ID NO: 1241645
ucacgaauauagccaaaua

SEQ ID NO: 1288499 - RNA, 19 nt, Artificial Sequence
  Description of Artificial Sequence: Synthetic oligonucleotide
  Antisense strand to SEQ ID NO: 1288498
uauuuggcuauauucguga

SEQ ID NO: 1288500 - RNA, 19 nt, Artificial Sequence
  Description of Artificial Sequence: Synthetic oligonucleotide
  Sense strand starting at position 1165 of SEQ ID NO: 1241645
gucccugucuaauuacuuu

SEQ ID NO: 1288501 - RNA, 19 nt, Artificial Sequence
  Description of Artificial Sequence: Synthetic oligonucleotide
  Antisense strand to SEQ ID NO: 1288500
aaaguaauuagacagggac

SEQ ID NO: 1288502 - RNA, 19 nt, Artificial Sequence
  Description of Artificial Sequence: Synthetic oligonucleotide
  Sense strand starting at position 1186 of SEQ ID NO: 1241645
cuccuauagcauuagguga

SEQ ID NO: 1288503 - RNA, 19 nt, Artificial Sequence
  Description of Artificial Sequence: Synthetic oligonucleotide
  Antisense strand to SEQ ID NO: 1288502
ucaccuaaugcuauaggag

SEQ ID NO: 1288504 - RNA, 19 nt, Artificial Sequence
  Description of Artificial Sequence: Synthetic oligonucleotide
  Sense strand starting at position 1966 of SEQ ID NO: 1241645
gccuacaucccguaaacuu

SEQ ID NO: 1288505 - RNA, 19 nt, Artificial Sequence
  Description of Artificial Sequence: Synthetic oligonucleotide
  Antisense strand to SEQ ID NO: 1288504
aaguuuacgggauguaggc

SEQ ID NO: 1288506 - RNA, 19 nt, Artificial Sequence
  Description of Artificial Sequence: Synthetic oligonucleotide
  Sense strand starting at position 1997 of SEQ ID NO: 1241645
cugggaauucugggaagcu

SEQ ID NO: 1288507 - RNA, 19 nt, Artificial Sequence
  Description of Artificial Sequence: Synthetic oligonucleotide
  Antisense strand to SEQ ID NO: 1288506
agcuucccagaauucccag

SEQ ID NO: 1288508 - RNA, 19 nt, Artificial Sequence
  Description of Artificial Sequence: Synthetic oligonucleotide
  Sense strand starting at position 2238 of SEQ ID NO: 1241645
accuacucuccacgaguuu

SEQ ID NO: 1288509 - RNA, 19 nt, Artificial Sequence
  Description of Artificial Sequence: Synthetic oligonucleotide
  Antisense strand to SEQ ID NO: 1288508
aaacucguggagaguaggu

SEQ ID NO: 1288510 - RNA, 19 nt, Artificial Sequence
  Description of Artificial Sequence: Synthetic oligonucleotide
  Sense strand starting at position 2435 of SEQ ID NO: 1241645
agcaucuauucugcuggaa

SEQ ID NO: 1288511 - RNA, 19 nt, Artificial Sequence
  Description of Artificial Sequence: Synthetic oligonucleotide
  Antisense strand to SEQ ID NO: 1288510
uuccagcagaauagaugcu

SEQ ID NO: 1288512 - RNA, 19 nt, Artificial Sequence
  Description of Artificial Sequence: Synthetic oligonucleotide
  Sense strand starting at position 2439 of SEQ ID NO: 1241645
ucuauucugcuggaaacgu

SEQ ID NO: 1288513 - RNA, 19 nt, Artificial Sequence
  Description of Artificial Sequence: Synthetic oligonucleotide
  Antisense strand to SEQ ID NO: 1288512
acguuuccagcagaauaga

SEQ ID NO: 1288514 - RNA, 19 nt, Artificial Sequence
  Description of Artificial Sequence: Synthetic oligonucleotide
  Sense strand starting at position 2616 of SEQ ID NO: 1241645
ucacuaucauuaguaugau

SEQ ID NO: 1288515 - RNA, 19 nt, Artificial Sequence
  Description of Artificial Sequence: Synthetic oligonucleotide
  Antisense strand to SEQ ID NO: 1288514
aucauacuaaugauaguga

SEQ ID NO: 1288516 - RNA, 19 nt, Artificial Sequence
  Description of Artificial Sequence: Synthetic oligonucleotide
  Sense strand starting at position 2689 of SEQ ID NO: 1241645
gacuuugaccacugcgagu

SEQ ID NO: 1288517 - RNA, 19 nt, Artificial Sequence
  Description of Artificial Sequence: Synthetic oligonucleotide
  Antisense strand to SEQ ID NO: 1288516
acucgcaguggucaaaguc

SEQ ID NO: 1288518 - RNA, 19 nt, Artificial Sequence
  Description of Artificial Sequence: Synthetic oligonucleotide
  Sense strand starting at position 2771 of SEQ ID NO: 1241645
cugccaaauguacaggaua

SEQ ID NO: 1288519 - RNA, 19 nt, Artificial Sequence
  Description of Artificial Sequence: Synthetic oligonucleotide
  Antisense strand to SEQ ID NO: 1288518
uauccuguacauuuggcag

SEQ ID NO: 1288520 - RNA, 19 nt, Artificial Sequence
  Description of Artificial Sequence: Synthetic oligonucleotide
  Sense strand starting at position 2848 of SEQ ID NO: 1241645
gaggaaugcuuucccugag

SEQ ID NO: 1288521 - RNA, 19 nt, Artificial Sequence
  Description of Artificial Sequence: Synthetic oligonucleotide
  Antisense strand to SEQ ID NO: 1288520
cucagggaaagcauuccuc

SEQ ID NO: 1288522 - RNA, 19 nt, Artificial Sequence
  Description of Artificial Sequence: Synthetic oligonucleotide
  Sense strand starting at position 2849 of SEQ ID NO: 1241645
aggaaugcuuucccugaga

SEQ ID NO: 1288523 - RNA, 19 nt, Artificial Sequence
  Description of Artificial Sequence: Synthetic oligonucleotide
  Antisense strand to SEQ ID NO: 1288522
ucucagggaaagcauuccu

SEQ ID NO: 1288524 - RNA, 19 nt, Artificial Sequence
  Description of Artificial Sequence: Synthetic oligonucleotide
  Sense strand starting at position 3074 of SEQ ID NO: 1241645
ugcgcuagucguuugugau

SEQ ID NO: 1288525 - RNA, 19 nt, Artificial Sequence
  Description of Artificial Sequence: Synthetic oligonucleotide
  Antisense strand to SEQ ID NO: 1288524
aucacaaacgacuagcgca

SEQ ID NO: 1288526 - RNA, 19 nt, Artificial Sequence
  Description of Artificial Sequence: Synthetic oligonucleotide
  Sense strand starting at position 3082 of SEQ ID NO: 1241645
ucguuugugauagagcaau

SEQ ID NO: 1288527 - RNA, 19 nt, Artificial Sequence
  Description of Artificial Sequence: Synthetic oligonucleotide
  Antisense strand to SEQ ID NO: 1288526
auugcucuaucacaaacga

SEQ ID NO: 1288528 - RNA, 19 nt, Artificial Sequence
  Description of Artificial Sequence: Synthetic oligonucleotide
  Sense strand starting at position 3088 of SEQ ID NO: 1241645
gugauagagcaauaagcaa

SEQ ID NO: 1288529 - RNA, 19 nt, Artificial Sequence
  Description of Artificial Sequence: Synthetic oligonucleotide
  Antisense strand to SEQ ID NO: 1288528
uugcuuauugcucuaucac

SEQ ID NO: 1288530 - RNA, 19 nt, Artificial Sequence
  Description of Artificial Sequence: Synthetic oligonucleotide
  Sense strand starting at position 3121 of SEQ ID NO: 1241645
ccuacugucaugggaaaga

SEQ ID NO: 1288531 - RNA, 19 nt, Artificial Sequence
  Description of Artificial Sequence: Synthetic oligonucleotide
  Antisense strand to SEQ ID NO: 1288530
ucuuucccaugacaguagg

SEQ ID NO: 1288532 - RNA, 19 nt, Artificial Sequence
  Description of Artificial Sequence: Synthetic oligonucleotide
  Sense strand starting at position 3173 of SEQ ID NO: 1241645
auguuagauagugauaagu

SEQ ID NO: 1288533 - RNA, 19 nt, Artificial Sequence
  Description of Artificial Sequence: Synthetic oligonucleotide
  Antisense strand to SEQ ID NO: 1288532
acuuaucacuaucuaacau

SEQ ID NO: 1288534 - RNA, 19 nt, Artificial Sequence
  Description of Artificial Sequence: Synthetic oligonucleotide
  Sense strand starting at position 3262 of SEQ ID NO: 1241645
ggaggugacauuggaguua

SEQ ID NO: 1288535 - RNA, 19 nt, Artificial Sequence
  Description of Artificial Sequence: Synthetic oligonucleotide
  Antisense strand to SEQ ID NO: 1288534
uaacuccaaugucaccucc

SEQ ID NO: 1288536 - RNA, 19 nt, Artificial Sequence
  Description of Artificial Sequence: Synthetic oligonucleotide
  Sense strand starting at position 3271 of SEQ ID NO: 1241645
auuggaguuaagugacaga

SEQ ID NO: 1288537 - RNA, 19 nt, Artificial Sequence
  Description of Artificial Sequence: Synthetic oligonucleotide
  Antisense strand to SEQ ID NO: 1288536
ucugucacuuaacuccaau

SEQ ID NO: 1288538 - RNA, 19 nt, Artificial Sequence
  Description of Artificial Sequence: Synthetic oligonucleotide
  Sense strand starting at position 3393 of SEQ ID NO: 1241645
ggaacaguaagaggguuua

SEQ ID NO: 1288539 - RNA, 19 nt, Artificial Sequence
  Description of Artificial Sequence: Synthetic oligonucleotide
  Antisense strand to SEQ ID NO: 1288538
uaaacccucuuacuguucc

SEQ ID NO: 1288540 - RNA, 19 nt, Artificial Sequence
  Description of Artificial Sequence: Synthetic oligonucleotide
  Sense strand starting at position 3446 of SEQ ID NO: 1241645
gcaguuagagaguaacaau

SEQ ID NO: 1288541 - RNA, 19 nt, Artificial Sequence
  Description of Artificial Sequence: Synthetic oligonucleotide
  Antisense strand to SEQ ID NO: 1288540
auuguuacucucuaacugc

SEQ ID NO: 1288542 - RNA, 19 nt, Artificial Sequence
  Description of Artificial Sequence: Synthetic oligonucleotide
  Sense strand starting at position 3489 of SEQ ID NO: 1241645
ggccauuguaaggaauguu

SEQ ID NO: 1288543 - RNA, 19 nt, Artificial Sequence
  Description of Artificial Sequence: Synthetic oligonucleotide
  Antisense strand to SEQ ID NO: 1288542
aacauuccuuacaauggcc

SEQ ID NO: 1288544 - RNA, 19 nt, Artificial Sequence
  Description of Artificial Sequence: Synthetic oligonucleotide
  Sense strand starting at position 3492 of SEQ ID NO: 1241645
cauuguaaggaauguuacu

SEQ ID NO: 1288545 - RNA, 19 nt, Artificial Sequence
  Description of Artificial Sequence: Synthetic oligonucleotide
  Antisense strand to SEQ ID NO: 1288544
aguaacauuccuuacaaug

SEQ ID NO: 1288546 - RNA, 19 nt, Artificial Sequence
  Description of Artificial Sequence: Synthetic oligonucleotide
  Sense strand starting at position 3737 of SEQ ID NO: 1241645
caaucacugccauggguau

SEQ ID NO: 1288547 - RNA, 19 nt, Artificial Sequence
  Description of Artificial Sequence: Synthetic oligonucleotide
  Antisense strand to SEQ ID NO: 1288546
auacccauggcagugauug

SEQ ID NO: 1288548 - RNA, 19 nt, Artificial Sequence
  Description of Artificial Sequence: Synthetic oligonucleotide
  Sense strand starting at position 3741 of SEQ ID NO: 1241645
cacugccauggguaugaaa

SEQ ID NO: 1288549 - RNA, 19 nt, Artificial Sequence
  Description of Artificial Sequence: Synthetic oligonucleotide
  Antisense strand to SEQ ID NO: 1288548
uuucauacccauggcagug

SEQ ID NO: 1288550 - RNA, 19 nt, Artificial Sequence
  Description of Artificial Sequence: Synthetic oligonucleotide
  Sense strand starting at position 3791 of SEQ ID NO: 1241645
agcagaguguacucugaga

SEQ ID NO: 1288551 - RNA, 19 nt, Artificial Sequence
  Description of Artificial Sequence: Synthetic oligonucleotide
  Antisense strand to SEQ ID NO: 1288550
ucucagaguacacucugcu

SEQ ID NO: 1288552 - RNA, 19 nt, Artificial Sequence
  Description of Artificial Sequence: Synthetic oligonucleotide
  Sense strand starting at position 3793 of SEQ ID NO: 1241645
cagaguguacucugagaga

SEQ ID NO: 1288553 - RNA, 19 nt, Artificial Sequence
  Description of Artificial Sequence: Synthetic oligonucleotide
  Antisense strand to SEQ ID NO: 1288552
ucucucagaguacacucug

SEQ ID NO: 1288554 - RNA, 19 nt, Artificial Sequence
  Description of Artificial Sequence: Synthetic oligonucleotide
  Sense strand starting at position 3933 of SEQ ID NO: 1241645
guuacacaucaggguauga

SEQ ID NO: 1288555 - RNA, 19 nt, Artificial Sequence
  Description of Artificial Sequence: Synthetic oligonucleotide
  Antisense strand to SEQ ID NO: 1288554
ucauacccugauguguaac

SEQ ID NO: 1288556 - RNA, 19 nt, Artificial Sequence
  Description of Artificial Sequence: Synthetic oligonucleotide
  Sense strand starting at position 3982 of SEQ ID NO: 1241645
aaagaagugccagguuucu

SEQ ID NO: 1288557 - RNA, 19 nt, Artificial Sequence
  Description of Artificial Sequence: Synthetic oligonucleotide
  Antisense strand to SEQ ID NO: 1288556
agaaaccuggcacuucuuu

SEQ ID NO: 1288558 - RNA, 19 nt, Artificial Sequence
  Description of Artificial Sequence: Synthetic oligonucleotide
  Sense strand starting at position 26 of SEQ ID NO: 1241646
cugggaagaugugcaagaa

SEQ ID NO: 1288559 - RNA, 19 nt, Artificial Sequence
  Description of Artificial Sequence: Synthetic oligonucleotide
  Antisense strand to SEQ ID NO: 1288558
uucuugcacaucuucccag

SEQ ID NO: 1288560 - RNA, 19 nt, Artificial Sequence
  Description of Artificial Sequence: Synthetic oligonucleotide
  Sense strand starting at position 396 of SEQ ID NO: 1241646
uaaggacugugaguuaucu

SEQ ID NO: 1288561 - RNA, 19 nt, Artificial Sequence
  Description of Artificial Sequence: Synthetic oligonucleotide
  Antisense strand to SEQ ID NO: 1288560
agauaacucacaguccuua

SEQ ID NO: 1288562 - RNA, 19 nt, Artificial Sequence
  Description of Artificial Sequence: Synthetic oligonucleotide
  Sense strand starting at position 400 of SEQ ID NO: 1241646
gacugugaguuaucuccca

SEQ ID NO: 1288563 - RNA, 19 nt, Artificial Sequence
  Description of Artificial Sequence: Synthetic oligonucleotide
  Antisense strand to SEQ ID NO: 1288562
ugggagauaacucacaguc

SEQ ID NO: 1288564 - RNA, 19 nt, Artificial Sequence
  Description of Artificial Sequence: Synthetic oligonucleotide
  Sense strand starting at position 441 of SEQ ID NO: 1241646
ggaaauagcuaauucugca

SEQ ID NO: 1288565 - RNA, 19 nt, Artificial Sequence
  Description of Artificial Sequence: Synthetic oligonucleotide
  Antisense strand to SEQ ID NO: 1288564
ugcagaauuagcuauuucc

SEQ ID NO: 1288566 - RNA, 19 nt, Artificial Sequence
  Description of Artificial Sequence: Synthetic oligonucleotide
  Sense strand starting at position 717 of SEQ ID NO: 1241646
guaguauagucaucagaaa

SEQ ID NO: 1288567 - RNA, 19 nt, Artificial Sequence
  Description of Artificial Sequence: Synthetic oligonucleotide
  Antisense strand to SEQ ID NO: 1288566
uuucugaugacuauacuac

SEQ ID NO: 1288568 - RNA, 19 nt, Artificial Sequence
  Description of Artificial Sequence: Synthetic oligonucleotide
  Sense strand starting at position 826 of SEQ ID NO: 1241646
uuuaguuaugccugacuuc

SEQ ID NO: 1288569 - RNA, 19 nt, Artificial Sequence
  Description of Artificial Sequence: Synthetic oligonucleotide
  Antisense strand to SEQ ID NO: 1288568
gaagucaggcauaacuaaa

SEQ ID NO: 1288570 - RNA, 19 nt, Artificial Sequence
  Description of Artificial Sequence: Synthetic oligonucleotide
  Sense strand starting at position 884 of SEQ ID NO: 1241646
gaacgcaacucaguaucuu

SEQ ID NO: 1288571 - RNA, 19 nt, Artificial Sequence
  Description of Artificial Sequence: Synthetic oligonucleotide
  Antisense strand to SEQ ID NO: 1288570
aagauacugaguugcguuc

SEQ ID NO: 1288572 - RNA, 19 nt, Artificial Sequence
  Description of Artificial Sequence: Synthetic oligonucleotide
  Sense strand starting at position 977 of SEQ ID NO: 1241646
aucccuucuguaggucaua

SEQ ID NO: 1288573 - RNA, 19 nt, Artificial Sequence
  Description of Artificial Sequence: Synthetic oligonucleotide
  Antisense strand to SEQ ID NO: 1288572
uaugaccuacagaagggau

SEQ ID NO: 1288574 - RNA, 19 nt, Artificial Sequence
  Description of Artificial Sequence: Synthetic oligonucleotide
  Sense strand starting at position 978 of SEQ ID NO: 1241646
ucccuucuguaggucauau

SEQ ID NO: 1288575 - RNA, 19 nt, Artificial Sequence
  Description of Artificial Sequence: Synthetic oligonucleotide
  Antisense strand to SEQ ID NO: 1288574
auaugaccuacagaaggga

SEQ ID NO: 1288576 - RNA, 19 nt, Artificial Sequence
  Description of Artificial Sequence: Synthetic oligonucleotide
  Sense strand starting at position 1183 of SEQ ID NO: 1241646
ccaaguugucaugagaagu

SEQ ID NO: 1288577 - RNA, 19 nt, Artificial Sequence
  Description of Artificial Sequence: Synthetic oligonucleotide
  Antisense strand to SEQ ID NO: 1288576
acuucucaugacaacuugg

SEQ ID NO: 1288578 - RNA, 19 nt, Artificial Sequence
  Description of Artificial Sequence: Synthetic oligonucleotide
  Sense strand starting at position 1218 of SEQ ID NO: 1241646
acuaauuucuaagacggaa

SEQ ID NO: 1288579 - RNA, 19 nt, Artificial Sequence
  Description of Artificial Sequence: Synthetic oligonucleotide
  Antisense strand to SEQ ID NO: 1288578
uuccgucuuagaaauuagu

SEQ ID NO: 1288580 - RNA, 19 nt, Artificial Sequence
  Description of Artificial Sequence: Synthetic oligonucleotide
  Sense strand starting at position 1428 of SEQ ID NO: 1241646
uguuuaucaccaggcauuu

SEQ ID NO: 1288581 - RNA, 19 nt, Artificial Sequence
  Description of Artificial Sequence: Synthetic oligonucleotide
  Antisense strand to SEQ ID NO: 1288580
aaaugccuggugauaaaca

SEQ ID NO: 1288582 - RNA, 19 nt, Artificial Sequence
  Description of Artificial Sequence: Synthetic oligonucleotide
  Sense strand starting at position 1515 of SEQ ID NO: 1241646
accuaaauucucugagugu

SEQ ID NO: 1288583 - RNA, 19 nt, Artificial Sequence
  Description of Artificial Sequence: Synthetic oligonucleotide
  Antisense strand to SEQ ID NO: 1288582
acacucagagaauuuaggu

SEQ ID NO: 1288584 - RNA, 19 nt, Artificial Sequence
  Description of Artificial Sequence: Synthetic oligonucleotide
  Sense strand starting at position 1519 of SEQ ID NO: 1241646
aaauucucugagugucaga

SEQ ID NO: 1288585 - RNA, 19 nt, Artificial Sequence
  Description of Artificial Sequence: Synthetic oligonucleotide
  Antisense strand to SEQ ID NO: 1288584
ucugacacucagagaauuu

SEQ ID NO: 1288586 - RNA, 19 nt, Artificial Sequence
  Description of Artificial Sequence: Synthetic oligonucleotide
  Sense strand starting at position 1805 of SEQ ID NO: 1241646
uguucuagggacuggauua

SEQ ID NO: 1288587 - RNA, 19 nt, Artificial Sequence
  Description of Artificial Sequence: Synthetic oligonucleotide
  Antisense strand to SEQ ID NO: 1288586
uaauccagucccuagaaca

SEQ ID NO: 1288588 - RNA, 19 nt, Artificial Sequence
  Description of Artificial Sequence: Synthetic oligonucleotide
  Sense strand starting at position 1806 of SEQ ID NO: 1241646
guucuagggacuggauuaa

SEQ ID NO: 1288589 - RNA, 19 nt, Artificial Sequence
  Description of Artificial Sequence: Synthetic oligonucleotide
  Antisense strand to SEQ ID NO: 1288588
uuaauccagucccuagaac

SEQ ID NO: 1288590 - RNA, 19 nt, Artificial Sequence
  Description of Artificial Sequence: Synthetic oligonucleotide
  Sense strand starting at position 2124 of SEQ ID NO: 1241646
cuccacucucgguagaacu

SEQ ID NO: 1288591 - RNA, 19 nt, Artificial Sequence
  Description of Artificial Sequence: Synthetic oligonucleotide
  Antisense strand to SEQ ID NO: 1288590
aguucuaccgagaguggag

SEQ ID NO: 1288592 - RNA, 19 nt, Artificial Sequence
  Description of Artificial Sequence: Synthetic oligonucleotide
  Sense strand starting at position 2171 of SEQ ID NO: 1241646
gcccguaauguuaggcgaa

SEQ ID NO: 1288593 - RNA, 19 nt, Artificial Sequence
  Description of Artificial Sequence: Synthetic oligonucleotide
  Antisense strand to SEQ ID NO: 1288592
uucgccuaacauuacgggc

SEQ ID NO: 1288594 - RNA, 19 nt, Artificial Sequence
  Description of Artificial Sequence: Synthetic oligonucleotide
  Sense strand starting at position 2178 of SEQ ID NO: 1241646
auguuaggcgaauacuaag

SEQ ID NO: 1288595 - RNA, 19 nt, Artificial Sequence
  Description of Artificial Sequence: Synthetic oligonucleotide
  Antisense strand to SEQ ID NO: 1288594
cuuaguauucgccuaacau

SEQ ID NO: 1288596 - RNA, 19 nt, Artificial Sequence
  Description of Artificial Sequence: Synthetic oligonucleotide
  Sense strand starting at position 2243 of SEQ ID NO: 1241646
acauuaaauugagcuguua

SEQ ID NO: 1288597 - RNA, 19 nt, Artificial Sequence
  Description of Artificial Sequence: Synthetic oligonucleotide
  Antisense strand to SEQ ID NO: 1288596
uaacagcucaauuuaaugu

SEQ ID NO: 1288598 - RNA, 19 nt, Artificial Sequence
  Description of Artificial Sequence: Synthetic oligonucleotide
  Sense strand starting at position 2323 of SEQ ID NO: 1241646
gcacuuaaagggugauaau

SEQ ID NO: 1288599 - RNA, 19 nt, Artificial Sequence
  Description of Artificial Sequence: Synthetic oligonucleotide
  Antisense strand to SEQ ID NO: 1288598
auuaucacccuuuaagugc

SEQ ID NO: 1288600 - RNA, 19 nt, Artificial Sequence
  Description of Artificial Sequence: Synthetic oligonucleotide
  Sense strand starting at position 2332 of SEQ ID NO: 1241646
gggugauaaugcucuagga

SEQ ID NO: 1288601 - RNA, 19 nt, Artificial Sequence
  Description of Artificial Sequence: Synthetic oligonucleotide
  Antisense strand to SEQ ID NO: 1288600
uccuagagcauuaucaccc

SEQ ID NO: 1288602 - RNA, 19 nt, Artificial Sequence
  Description of Artificial Sequence: Synthetic oligonucleotide
  Sense strand starting at position 2334 of SEQ ID NO: 1241646
gugauaaugcucuaggagu

SEQ ID NO: 1288603 - RNA, 19 nt, Artificial Sequence
  Description of Artificial Sequence: Synthetic oligonucleotide
  Antisense strand to SEQ ID NO: 1288602
acuccuagagcauuaucac

SEQ ID NO: 1288604 - RNA, 19 nt, Artificial Sequence
  Description of Artificial Sequence: Synthetic oligonucleotide
  Sense strand starting at position 2336 of SEQ ID NO: 1241646
gauaaugcucuaggaguau

SEQ ID NO: 1288605 - RNA, 19 nt, Artificial Sequence
  Description of Artificial Sequence: Synthetic oligonucleotide
  Antisense strand to SEQ ID NO: 1288604
auacuccuagagcauuauc

SEQ ID NO: 1288606 - RNA, 19 nt, Artificial Sequence
  Description of Artificial Sequence: Synthetic oligonucleotide
  Sense strand starting at position 2448 of SEQ ID NO: 1241646
uugcuccuuucuccagaga

SEQ ID NO: 1288607 - RNA, 19 nt, Artificial Sequence
  Description of Artificial Sequence: Synthetic oligonucleotide
  Antisense strand to SEQ ID NO: 1288606
ucucuggagaaaggagcaa

SEQ ID NO: 1288608 - RNA, 19 nt, Artificial Sequence
  Description of Artificial Sequence: Synthetic oligonucleotide
  Sense strand starting at position 2449 of SEQ ID NO: 1241646
ugcuccuuucuccagagaa

SEQ ID NO: 1288609 - RNA, 19 nt, Artificial Sequence
  Description of Artificial Sequence: Synthetic oligonucleotide
  Antisense strand to SEQ ID NO: 1288608
uucucuggagaaaggagca

SEQ ID NO: 1288610 - RNA, 19 nt, Artificial Sequence
  Description of Artificial Sequence: Synthetic oligonucleotide
  Sense strand starting at position 2480 of SEQ ID NO: 1241646
ggagcauuacucugaucug

SEQ ID NO: 1288611 - RNA, 19 nt, Artificial Sequence
  Description of Artificial Sequence: Synthetic oligonucleotide
  Antisense strand to SEQ ID NO: 1288610
cagaucagaguaaugcucc

SEQ ID NO: 1288612 - RNA, 19 nt, Artificial Sequence
  Description of Artificial Sequence: Synthetic oligonucleotide
  Sense strand starting at position 2483 of SEQ ID NO: 1241646
gcauuacucugaucuggca

SEQ ID NO: 1288613 - RNA, 19 nt, Artificial Sequence
  Description of Artificial Sequence: Synthetic oligonucleotide
  Antisense strand to SEQ ID NO: 1288612
ugccagaucagaguaaugc

SEQ ID NO: 1288614 - RNA, 19 nt, Artificial Sequence
  Description of Artificial Sequence: Synthetic oligonucleotide
  Sense strand starting at position 2499 of SEQ ID NO: 1241646
gcauauuucucagucgcau

SEQ ID NO: 1288615 - RNA, 19 nt, Artificial Sequence
  Description of Artificial Sequence: Synthetic oligonucleotide
  Antisense strand to SEQ ID NO: 1288614
augcgacugagaaauaugc

SEQ ID NO: 1288616 - RNA, 19 nt, Artificial Sequence
  Description of Artificial Sequence: Synthetic oligonucleotide
  Sense strand starting at position 2508 of SEQ ID NO: 1241646
ucagucgcaucucuuuaaa

SEQ ID NO: 1288617 - RNA, 19 nt, Artificial Sequence
  Description of Artificial Sequence: Synthetic oligonucleotide
  Antisense strand to SEQ ID NO: 1288616
uuuaaagagaugcgacuga

SEQ ID NO: 1288618 - RNA, 19 nt, Artificial Sequence
  Description of Artificial Sequence: Synthetic oligonucleotide
  Sense strand starting at position 2591 of SEQ ID NO: 1241646
augagaaauuagcauuucu

SEQ ID NO: 1288619 - RNA, 19 nt, Artificial Sequence
  Description of Artificial Sequence: Synthetic oligonucleotide
  Antisense strand to SEQ ID NO: 1288618
agaaaugcuaauuucucau

SEQ ID NO: 1288620 - RNA, 19 nt, Artificial Sequence
  Description of Artificial Sequence: Synthetic oligonucleotide
  Sense strand starting at position 2693 of SEQ ID NO: 1241646
cgcgcaaucagggaucacu

SEQ ID NO: 1288621 - RNA, 19 nt, Artificial Sequence
  Description of Artificial Sequence: Synthetic oligonucleotide
  Antisense strand to SEQ ID NO: 1288620
agugaucccugauugcgcg

SEQ ID NO: 1288622 - RNA, 19 nt, Artificial Sequence
  Description of Artificial Sequence: Synthetic oligonucleotide
  Sense strand starting at position 2718 of SEQ ID NO: 1241646
ucaaauucugacggucaaa

SEQ ID NO: 1288623 - RNA, 19 nt, Artificial Sequence
  Description of Artificial Sequence: Synthetic oligonucleotide
  Antisense strand to SEQ ID NO: 1288622
uuugaccgucagaauuuga

SEQ ID NO: 1288624 - RNA, 19 nt, Artificial Sequence
  Description of Artificial Sequence: Synthetic oligonucleotide
  Sense strand starting at position 3060 of SEQ ID NO: 1241646
ggcgguuuaauguacacuu

SEQ ID NO: 1288625 - RNA, 19 nt, Artificial Sequence
  Description of Artificial Sequence: Synthetic oligonucleotide
  Antisense strand to SEQ ID NO: 1288624
aaguguacauuaaaccgcc

SEQ ID NO: 1288626 - RNA, 19 nt, Artificial Sequence
  Description of Artificial Sequence: Synthetic oligonucleotide
  Sense strand starting at position 3062 of SEQ ID NO: 1241646
cgguuuaauguacacuuga

SEQ ID NO: 1288627 - RNA, 19 nt, Artificial Sequence
  Description of Artificial Sequence: Synthetic oligonucleotide
  Antisense strand to SEQ ID NO: 1288626
ucaaguguacauuaaaccg

SEQ ID NO: 1288628 - RNA, 19 nt, Artificial Sequence
  Description of Artificial Sequence: Synthetic oligonucleotide
  Sense strand starting at position 3739 of SEQ ID NO: 1241646
cuggaauacaugugugucu

SEQ ID NO: 1288629 - RNA, 19 nt, Artificial Sequence
  Description of Artificial Sequence: Synthetic oligonucleotide
  Antisense strand to SEQ ID NO: 1288628
agacacacauguauuccag

SEQ ID NO: 1288630 - RNA, 19 nt, Artificial Sequence
  Description of Artificial Sequence: Synthetic oligonucleotide
  Sense strand starting at position 3741 of SEQ ID NO: 1241646
ggaauacaugugugucuuc

SEQ ID NO: 1288631 - RNA, 19 nt, Artificial Sequence
  Description of Artificial Sequence: Synthetic oligonucleotide
  Antisense strand to SEQ ID NO: 1288630
gaagacacacauguauucc

SEQ ID NO: 1288632 - RNA, 19 nt, Artificial Sequence
  Description of Artificial Sequence: Synthetic oligonucleotide
  Sense strand starting at position 3794 of SEQ ID NO: 1241646
ugaucuagguguguuccaa

SEQ ID NO: 1288633 - RNA, 19 nt, Artificial Sequence
  Description of Artificial Sequence: Synthetic oligonucleotide
  Antisense strand to SEQ ID NO: 1288632
uuggaacacaccuagauca

SEQ ID NO: 1288634 - RNA, 19 nt, Artificial Sequence
  Description of Artificial Sequence: Synthetic oligonucleotide
  Sense strand starting at position 3969 of SEQ ID NO: 1241646
cucccaagacuaugaguca

SEQ ID NO: 1288635 - RNA, 19 nt, Artificial Sequence
  Description of Artificial Sequence: Synthetic oligonucleotide
  Antisense strand to SEQ ID NO: 1288634
ugacucauagucuugggag

SEQ ID NO: 1288636 - RNA, 19 nt, Artificial Sequence
  Description of Artificial Sequence: Synthetic oligonucleotide
  Sense strand starting at position 3972 of SEQ ID NO: 1241646
ccaagacuaugagucaugu

SEQ ID NO: 1288637 - RNA, 19 nt, Artificial Sequence
  Description of Artificial Sequence: Synthetic oligonucleotide
  Antisense strand to SEQ ID NO: 1288636
acaugacucauagucuugg

SEQ ID NO: 1288638 - RNA, 19 nt, Artificial Sequence
  Description of Artificial Sequence: Synthetic oligonucleotide
  Sense strand starting at position 331 of SEQ ID NO: 1241647
uaaggacugugaguuaucu

SEQ ID NO: 1288639 - RNA, 19 nt, Artificial Sequence
  Description of Artificial Sequence: Synthetic oligonucleotide
  Antisense strand to SEQ ID NO: 1288638
agauaacucacaguccuua

SEQ ID NO: 1288640 - RNA, 19 nt, Artificial Sequence
  Description of Artificial Sequence: Synthetic oligonucleotide
  Sense strand starting at position 335 of SEQ ID NO: 1241647
gacugugaguuaucuccca

SEQ ID NO: 1288641 - RNA, 19 nt, Artificial Sequence
  Description of Artificial Sequence: Synthetic oligonucleotide
  Antisense strand to SEQ ID NO: 1288640
ugggagauaacucacaguc

SEQ ID NO: 1288642 - RNA, 19 nt, Artificial Sequence
  Description of Artificial Sequence: Synthetic oligonucleotide
  Sense strand starting at position 376 of SEQ ID NO: 1241647
ggaaauagcuaauucugca

SEQ ID NO: 1288643 - RNA, 19 nt, Artificial Sequence
  Description of Artificial Sequence: Synthetic oligonucleotide
  Antisense strand to SEQ ID NO: 1288642
ugcagaauuagcuauuucc

SEQ ID NO: 1288644 - RNA, 19 nt, Artificial Sequence
  Description of Artificial Sequence: Synthetic oligonucleotide
  Sense strand starting at position 652 of SEQ ID NO: 1241647
guaguauagucaucagaaa

SEQ ID NO: 1288645 - RNA, 19 nt, Artificial Sequence
  Description of Artificial Sequence: Synthetic oligonucleotide
  Antisense strand to SEQ ID NO: 1288644
uuucugaugacuauacuac

SEQ ID NO: 1288646 - RNA, 19 nt, Artificial Sequence
  Description of Artificial Sequence: Synthetic oligonucleotide
  Sense strand starting at position 761 of SEQ ID NO: 1241647
uuuaguuaugccugacuuc

SEQ ID NO: 1288647 - RNA, 19 nt, Artificial Sequence
  Description of Artificial Sequence: Synthetic oligonucleotide
  Antisense strand to SEQ ID NO: 1288646
gaagucaggcauaacuaaa

SEQ ID NO: 1288648 - RNA, 19 nt, Artificial Sequence
  Description of Artificial Sequence: Synthetic oligonucleotide
  Sense strand starting at position 819 of SEQ ID NO: 1241647
gaacgcaacucaguaucuu

SEQ ID NO: 1288649 - RNA, 19 nt, Artificial Sequence
  Description of Artificial Sequence: Synthetic oligonucleotide
  Antisense strand to SEQ ID NO: 1288648
aagauacugaguugcguuc

SEQ ID NO: 1288650 - RNA, 19 nt, Artificial Sequence
  Description of Artificial Sequence: Synthetic oligonucleotide
  Sense strand starting at position 912 of SEQ ID NO: 1241647
aucccuucuguaggucaua

SEQ ID NO: 1288651 - RNA, 19 nt, Artificial Sequence
  Description of Artificial Sequence: Synthetic oligonucleotide
  Antisense strand to SEQ ID NO: 1288650
uaugaccuacagaagggau

SEQ ID NO: 1288652 - RNA, 19 nt, Artificial Sequence
  Description of Artificial Sequence: Synthetic oligonucleotide
  Sense strand starting at position 913 of SEQ ID NO: 1241647
ucccuucuguaggucauau

SEQ ID NO: 1288653 - RNA, 19 nt, Artificial Sequence
  Description of Artificial Sequence: Synthetic oligonucleotide
  Antisense strand to SEQ ID NO: 1288652
auaugaccuacagaaggga

SEQ ID NO: 1288654 - RNA, 19 nt, Artificial Sequence
  Description of Artificial Sequence: Synthetic oligonucleotide
  Sense strand starting at position 1118 of SEQ ID NO: 1241647
ccaaguugucaugagaagu

SEQ ID NO: 1288655 - RNA, 19 nt, Artificial Sequence
  Description of Artificial Sequence: Synthetic oligonucleotide
  Antisense strand to SEQ ID NO: 1288654
acuucucaugacaacuugg

SEQ ID NO: 1288656 - RNA, 19 nt, Artificial Sequence
  Description of Artificial Sequence: Synthetic oligonucleotide
  Sense strand starting at position 1153 of SEQ ID NO: 1241647
acuaauuucuaagacggaa

SEQ ID NO: 1288657 - RNA, 19 nt, Artificial Sequence
  Description of Artificial Sequence: Synthetic oligonucleotide
  Antisense strand to SEQ ID NO: 1288656
uuccgucuuagaaauuagu

SEQ ID NO: 1288658 - RNA, 19 nt, Artificial Sequence
  Description of Artificial Sequence: Synthetic oligonucleotide
  Sense strand starting at position 1363 of SEQ ID NO: 1241647
uguuuaucaccaggcauuu

SEQ ID NO: 1288659 - RNA, 19 nt, Artificial Sequence
  Description of Artificial Sequence: Synthetic oligonucleotide
  Antisense strand to SEQ ID NO: 1288658
aaaugccuggugauaaaca

SEQ ID NO: 1288660 - RNA, 19 nt, Artificial Sequence
  Description of Artificial Sequence: Synthetic oligonucleotide
  Sense strand starting at position 1450 of SEQ ID NO: 1241647
accuaaauucucugagugu

SEQ ID NO: 1288661 - RNA, 19 nt, Artificial Sequence
  Description of Artificial Sequence: Synthetic oligonucleotide
  Antisense strand to SEQ ID NO: 1288660
acacucagagaauuuaggu

SEQ ID NO: 1288662 - RNA, 19 nt, Artificial Sequence
  Description of Artificial Sequence: Synthetic oligonucleotide
  Sense strand starting at position 1454 of SEQ ID NO: 1241647
aaauucucugagugucaga

SEQ ID NO: 1288663 - RNA, 19 nt, Artificial Sequence
  Description of Artificial Sequence: Synthetic oligonucleotide
  Antisense strand to SEQ ID NO: 1288662
ucugacacucagagaauuu

SEQ ID NO: 1288664 - RNA, 19 nt, Artificial Sequence
  Description of Artificial Sequence: Synthetic oligonucleotide
  Sense strand starting at position 1740 of SEQ ID NO: 1241647
uguucuagggacuggauua

SEQ ID NO: 1288665 - RNA, 19 nt, Artificial Sequence
  Description of Artificial Sequence: Synthetic oligonucleotide
  Antisense strand to SEQ ID NO: 1288664
uaauccagucccuagaaca

SEQ ID NO: 1288666 - RNA, 19 nt, Artificial Sequence
  Description of Artificial Sequence: Synthetic oligonucleotide
  Sense strand starting at position 1741 of SEQ ID NO: 1241647
guucuagggacuggauuaa

SEQ ID NO: 1288667 - RNA, 19 nt, Artificial Sequence
  Description of Artificial Sequence: Synthetic oligonucleotide
  Antisense strand to SEQ ID NO: 1288666
uuaauccagucccuagaac

SEQ ID NO: 1288668 - RNA, 19 nt, Artificial Sequence
  Description of Artificial Sequence: Synthetic oligonucleotide
  Sense strand starting at position 2059 of SEQ ID NO: 1241647
cuccacucucgguagaacu

SEQ ID NO: 1288669 - RNA, 19 nt, Artificial Sequence
  Description of Artificial Sequence: Synthetic oligonucleotide
  Antisense strand to SEQ ID NO: 1288668
aguucuaccgagaguggag

SEQ ID NO: 1288670 - RNA, 19 nt, Artificial Sequence
  Description of Artificial Sequence: Synthetic oligonucleotide
  Sense strand starting at position 2106 of SEQ ID NO: 1241647
gcccguaauguuaggcgaa

SEQ ID NO: 1288671 - RNA, 19 nt, Artificial Sequence
  Description of Artificial Sequence: Synthetic oligonucleotide
  Antisense strand to SEQ ID NO: 1288670
uucgccuaacauuacgggc

SEQ ID NO: 1288672 - RNA, 19 nt, Artificial Sequence
  Description of Artificial Sequence: Synthetic oligonucleotide
  Sense strand starting at position 2113 of SEQ ID NO: 1241647
auguuaggcgaauacuaag

SEQ ID NO: 1288673 - RNA, 19 nt, Artificial Sequence
  Description of Artificial Sequence: Synthetic oligonucleotide
  Antisense strand to SEQ ID NO: 1288672
cuuaguauucgccuaacau

SEQ ID NO: 1288674 - RNA, 19 nt, Artificial Sequence
  Description of Artificial Sequence: Synthetic oligonucleotide
  Sense strand starting at position 2178 of SEQ ID NO: 1241647
acauuaaauugagcuguua

SEQ ID NO: 1288675 - RNA, 19 nt, Artificial Sequence
  Description of Artificial Sequence: Synthetic oligonucleotide
  Antisense strand to SEQ ID NO: 1288674
uaacagcucaauuuaaugu

SEQ ID NO: 1288676 - RNA, 19 nt, Artificial Sequence
  Description of Artificial Sequence: Synthetic oligonucleotide
  Sense strand starting at position 2258 of SEQ ID NO: 1241647
gcacuuaaagggugauaau

SEQ ID NO: 1288677 - RNA, 19 nt, Artificial Sequence
  Description of Artificial Sequence: Synthetic oligonucleotide
  Antisense strand to SEQ ID NO: 1288676
auuaucacccuuuaagugc

SEQ ID NO: 1288678 - RNA, 19 nt, Artificial Sequence
  Description of Artificial Sequence: Synthetic oligonucleotide
  Sense strand starting at position 2267 of SEQ ID NO: 1241647
gggugauaaugcucuagga

SEQ ID NO: 1288679 - RNA, 19 nt, Artificial Sequence
  Description of Artificial Sequence: Synthetic oligonucleotide
  Antisense strand to SEQ ID NO: 1288678
uccuagagcauuaucaccc

SEQ ID NO: 1288680 - RNA, 19 nt, Artificial Sequence
  Description of Artificial Sequence: Synthetic oligonucleotide
  Sense strand starting at position 2269 of SEQ ID NO: 1241647
gugauaaugcucuaggagu

SEQ ID NO: 1288681 - RNA, 19 nt, Artificial Sequence
  Description of Artificial Sequence: Synthetic oligonucleotide
  Antisense strand to SEQ ID NO: 1288680
acuccuagagcauuaucac

SEQ ID NO: 1288682 - RNA, 19 nt, Artificial Sequence
  Description of Artificial Sequence: Synthetic oligonucleotide
  Sense strand starting at position 2271 of SEQ ID NO: 1241647
gauaaugcucuaggaguau

SEQ ID NO: 1288683 - RNA, 19 nt, Artificial Sequence
  Description of Artificial Sequence: Synthetic oligonucleotide
  Antisense strand to SEQ ID NO: 1288682
auacuccuagagcauuauc

SEQ ID NO: 1288684 - RNA, 19 nt, Artificial Sequence
  Description of Artificial Sequence: Synthetic oligonucleotide
  Sense strand starting at position 2383 of SEQ ID NO: 1241647
uugcuccuuucuccagaga

SEQ ID NO: 1288685 - RNA, 19 nt, Artificial Sequence
  Description of Artificial Sequence: Synthetic oligonucleotide
  Antisense strand to SEQ ID NO: 1288684
ucucuggagaaaggagcaa

SEQ ID NO: 1288686 - RNA, 19 nt, Artificial Sequence
  Description of Artificial Sequence: Synthetic oligonucleotide
  Sense strand starting at position 2384 of SEQ ID NO: 1241647
ugcuccuuucuccagagaa

SEQ ID NO: 1288687 - RNA, 19 nt, Artificial Sequence
  Description of Artificial Sequence: Synthetic oligonucleotide
  Antisense strand to SEQ ID NO: 1288686
uucucuggagaaaggagca

SEQ ID NO: 1288688 - RNA, 19 nt, Artificial Sequence
  Description of Artificial Sequence: Synthetic oligonucleotide
  Sense strand starting at position 2415 of SEQ ID NO: 1241647
ggagcauuacucugaucug

SEQ ID NO: 1288689 - RNA, 19 nt, Artificial Sequence
  Description of Artificial Sequence: Synthetic oligonucleotide
  Antisense strand to SEQ ID NO: 1288688
cagaucagaguaaugcucc

SEQ ID NO: 1288690 - RNA, 19 nt, Artificial Sequence
  Description of Artificial Sequence: Synthetic oligonucleotide
  Sense strand starting at position 2418 of SEQ ID NO: 1241647
gcauuacucugaucuggca

SEQ ID NO: 1288691 - RNA, 19 nt, Artificial Sequence
  Description of Artificial Sequence: Synthetic oligonucleotide
  Antisense strand to SEQ ID NO: 1288690
ugccagaucagaguaaugc

SEQ ID NO: 1288692 - RNA, 19 nt, Artificial Sequence
  Description of Artificial Sequence: Synthetic oligonucleotide
  Sense strand starting at position 2434 of SEQ ID NO: 1241647
gcauauuucucagucgcau

SEQ ID NO: 1288693 - RNA, 19 nt, Artificial Sequence
  Description of Artificial Sequence: Synthetic oligonucleotide
  Antisense strand to SEQ ID NO: 1288692
augcgacugagaaauaugc

SEQ ID NO: 1288694 - RNA, 19 nt, Artificial Sequence
  Description of Artificial Sequence: Synthetic oligonucleotide
  Sense strand starting at position 2526 of SEQ ID NO: 1241647
augagaaauuagcauuucu

SEQ ID NO: 1288695 - RNA, 19 nt, Artificial Sequence
  Description of Artificial Sequence: Synthetic oligonucleotide
  Antisense strand to SEQ ID NO: 1288694
agaaaugcuaauuucucau

SEQ ID NO: 1288696 - RNA, 19 nt, Artificial Sequence
  Description of Artificial Sequence: Synthetic oligonucleotide
  Sense strand starting at position 2628 of SEQ ID NO: 1241647
cgcgcaaucagggaucacu

SEQ ID NO: 1288697 - RNA, 19 nt, Artificial Sequence
  Description of Artificial Sequence: Synthetic oligonucleotide
  Antisense strand to SEQ ID NO: 1288696
agugaucccugauugcgcg

SEQ ID NO: 1288698 - RNA, 19 nt, Artificial Sequence
  Description of Artificial Sequence: Synthetic oligonucleotide
  Sense strand starting at position 2653 of SEQ ID NO: 1241647
ucaaauucugacggucaaa

SEQ ID NO: 1288699 - RNA, 19 nt, Artificial Sequence
  Description of Artificial Sequence: Synthetic oligonucleotide
  Antisense strand to SEQ ID NO: 1288698
uuugaccgucagaauuuga

SEQ ID NO: 1288700 - RNA, 19 nt, Artificial Sequence
  Description of Artificial Sequence: Synthetic oligonucleotide
  Sense strand starting at position 2995 of SEQ ID NO: 1241647
ggcgguuuaauguacacuu

SEQ ID NO: 1288701 - RNA, 19 nt, Artificial Sequence
  Description of Artificial Sequence: Synthetic oligonucleotide
  Antisense strand to SEQ ID NO: 1288700
aaguguacauuaaaccgcc

SEQ ID NO: 1288702 - RNA, 19 nt, Artificial Sequence
  Description of Artificial Sequence: Synthetic oligonucleotide
  Sense strand starting at position 2997 of SEQ ID NO: 1241647
cgguuuaauguacacuuga

SEQ ID NO: 1288703 - RNA, 19 nt, Artificial Sequence
  Description of Artificial Sequence: Synthetic oligonucleotide
  Antisense strand to SEQ ID NO: 1288702
ucaaguguacauuaaaccg

SEQ ID NO: 1288704 - RNA, 19 nt, Artificial Sequence
  Description of Artificial Sequence: Synthetic oligonucleotide
  Sense strand starting at position 3674 of SEQ ID NO: 1241647
cuggaauacaugugugucu

SEQ ID NO: 1288705 - RNA, 19 nt, Artificial Sequence
  Description of Artificial Sequence: Synthetic oligonucleotide
  Antisense strand to SEQ ID NO: 1288704
agacacacauguauuccag

SEQ ID NO: 1288706 - RNA, 19 nt, Artificial Sequence
  Description of Artificial Sequence: Synthetic oligonucleotide
  Sense strand starting at position 3676 of SEQ ID NO: 1241647
ggaauacaugugugucuuc

SEQ ID NO: 1288707 - RNA, 19 nt, Artificial Sequence
  Description of Artificial Sequence: Synthetic oligonucleotide
  Antisense strand to SEQ ID NO: 1288706
gaagacacacauguauucc

SEQ ID NO: 1288708 - RNA, 19 nt, Artificial Sequence
  Description of Artificial Sequence: Synthetic oligonucleotide
  Sense strand starting at position 3729 of SEQ ID NO: 1241647
ugaucuagguguguuccaa

SEQ ID NO: 1288709 - RNA, 19 nt, Artificial Sequence
  Description of Artificial Sequence: Synthetic oligonucleotide
  Antisense strand to SEQ ID NO: 1288708
uuggaacacaccuagauca

SEQ ID NO: 1288710 - RNA, 19 nt, Artificial Sequence
  Description of Artificial Sequence: Synthetic oligonucleotide
  Sense strand starting at position 3904 of SEQ ID NO: 1241647
cucccaagacuaugaguca

SEQ ID NO: 1288711 - RNA, 19 nt, Artificial Sequence
  Description of Artificial Sequence: Synthetic oligonucleotide
  Antisense strand to SEQ ID NO: 1288710
ugacucauagucuugggag

SEQ ID NO: 1288712 - RNA, 19 nt, Artificial Sequence
  Description of Artificial Sequence: Synthetic oligonucleotide
  Sense strand starting at position 3907 of SEQ ID NO: 1241647
ccaagacuaugagucaugu

SEQ ID NO: 1288713 - RNA, 19 nt, Artificial Sequence
  Description of Artificial Sequence: Synthetic oligonucleotide
  Antisense strand to SEQ ID NO: 1288712
acaugacucauagucuugg

SEQ ID NO: 1288714 - RNA, 19 nt, Artificial Sequence
  Description of Artificial Sequence: Synthetic oligonucleotide
  Sense strand starting at position 3950 of SEQ ID NO: 1241647
auugauguacacugcauau

SEQ ID NO: 1288715 - RNA, 19 nt, Artificial Sequence
  Description of Artificial Sequence: Synthetic oligonucleotide
  Antisense strand to SEQ ID NO: 1288714
auaugcaguguacaucaau

SEQ ID NO: 1288716 - RNA, 19 nt, Artificial Sequence
  Description of Artificial Sequence: Synthetic oligonucleotide
  Sense strand starting at position 3952 of SEQ ID NO: 1241647
ugauguacacugcauauau

SEQ ID NO: 1288717 - RNA, 19 nt, Artificial Sequence
  Description of Artificial Sequence: Synthetic oligonucleotide
  Antisense strand to SEQ ID NO: 1288716
auauaugcaguguacauca

SEQ ID NO: 1288718 - RNA, 19 nt, Artificial Sequence
  Description of Artificial Sequence: Synthetic oligonucleotide
  Sense strand starting at position 439 of SEQ ID NO: 1241648
aguggcugguguguauaau

SEQ ID NO: 1288719 - RNA, 19 nt, Artificial Sequence
  Description of Artificial Sequence: Synthetic oligonucleotide
  Antisense strand to SEQ ID NO: 1288718
auuauacacaccagccacu

SEQ ID NO: 1288720 - RNA, 19 nt, Artificial Sequence
  Description of Artificial Sequence: Synthetic oligonucleotide
  Sense strand starting at position 440 of SEQ ID NO: 1241648
guggcugguguguauaauu

SEQ ID NO: 1288721 - RNA, 19 nt, Artificial Sequence
  Description of Artificial Sequence: Synthetic oligonucleotide
  Antisense strand to SEQ ID NO: 1288720
aauuauacacaccagccac

SEQ ID NO: 1288722 - RNA, 19 nt, Artificial Sequence
  Description of Artificial Sequence: Synthetic oligonucleotide
  Sense strand starting at position 448 of SEQ ID NO: 1241648
uguguauaauuguuugcaa

SEQ ID NO: 1288723 - RNA, 19 nt, Artificial Sequence
  Description of Artificial Sequence: Synthetic oligonucleotide
  Antisense strand to SEQ ID NO: 1288722
uugcaaacaauuauacaca

SEQ ID NO: 1288724 - RNA, 19 nt, Artificial Sequence
  Description of Artificial Sequence: Synthetic oligonucleotide
  Sense strand starting at position 449 of SEQ ID NO: 1241648
guguauaauuguuugcaau

SEQ ID NO: 1288725 - RNA, 19 nt, Artificial Sequence
  Description of Artificial Sequence: Synthetic oligonucleotide
  Antisense strand to SEQ ID NO: 1288724
auugcaaacaauuauacac

SEQ ID NO: 1288726 - RNA, 19 nt, Artificial Sequence
  Description of Artificial Sequence: Synthetic oligonucleotide
  Sense strand starting at position 462 of SEQ ID NO: 1241648
ugcaauuacuuggucccaa

SEQ ID NO: 1288727 - RNA, 19 nt, Artificial Sequence
  Description of Artificial Sequence: Synthetic oligonucleotide
  Antisense strand to SEQ ID NO: 1288726
uugggaccaaguaauugca

SEQ ID NO: 1288728 - RNA, 19 nt, Artificial Sequence
  Description of Artificial Sequence: Synthetic oligonucleotide
  Sense strand starting at position 463 of SEQ ID NO: 1241648
gcaauuacuuggucccaaa

SEQ ID NO: 1288729 - RNA, 19 nt, Artificial Sequence
  Description of Artificial Sequence: Synthetic oligonucleotide
  Antisense strand to SEQ ID NO: 1288728
uuugggaccaaguaauugc

SEQ ID NO: 1288730 - RNA, 19 nt, Artificial Sequence
  Description of Artificial Sequence: Synthetic oligonucleotide
  Sense strand starting at position 490 of SEQ ID NO: 1241648
ggaacucuguuccuaaaga

SEQ ID NO: 1288731 - RNA, 19 nt, Artificial Sequence
  Description of Artificial Sequence: Synthetic oligonucleotide
  Antisense strand to SEQ ID NO: 1288730
ucuuuaggaacagaguucc

SEQ ID NO: 1288732 - RNA, 19 nt, Artificial Sequence
  Description of Artificial Sequence: Synthetic oligonucleotide
  Sense strand starting at position 504 of SEQ ID NO: 1241648
aaagaacuauggugugaga

SEQ ID NO: 1288733 - RNA, 19 nt, Artificial Sequence
  Description of Artificial Sequence: Synthetic oligonucleotide
  Antisense strand to SEQ ID NO: 1288732
ucucacaccauaguucuuu

SEQ ID NO: 1288734 - RNA, 19 nt, Artificial Sequence
  Description of Artificial Sequence: Synthetic oligonucleotide
  Sense strand starting at position 506 of SEQ ID NO: 1241648
agaacuauggugugagaag

SEQ ID NO: 1288735 - RNA, 19 nt, Artificial Sequence
  Description of Artificial Sequence: Synthetic oligonucleotide
  Antisense strand to SEQ ID NO: 1288734
cuucucacaccauaguucu

SEQ ID NO: 1288736 - RNA, 19 nt, Artificial Sequence
  Description of Artificial Sequence: Synthetic oligonucleotide
  Sense strand starting at position 507 of SEQ ID NO: 1241648
gaacuauggugugagaagu

SEQ ID NO: 1288737 - RNA, 19 nt, Artificial Sequence
  Description of Artificial Sequence: Synthetic oligonucleotide
  Antisense strand to SEQ ID NO: 1288736
acuucucacaccauaguuc

SEQ ID NO: 1288738 - RNA, 19 nt, Artificial Sequence
  Description of Artificial Sequence: Synthetic oligonucleotide
  Sense strand starting at position 517 of SEQ ID NO: 1241648
gugagaaguaagggacuuu

SEQ ID NO: 1288739 - RNA, 19 nt, Artificial Sequence
  Description of Artificial Sequence: Synthetic oligonucleotide
  Antisense strand to SEQ ID NO: 1288738
aaagucccuuacuucucac

SEQ ID NO: 1288740 - RNA, 19 nt, Artificial Sequence
  Description of Artificial Sequence: Synthetic oligonucleotide
  Sense strand starting at position 594 of SEQ ID NO: 1241648
gucucaauuucuuagugaa

SEQ ID NO: 1288741 - RNA, 19 nt, Artificial Sequence
  Description of Artificial Sequence: Synthetic oligonucleotide
  Antisense strand to SEQ ID NO: 1288740
uucacuaagaaauugagac

SEQ ID NO: 1288742 - RNA, 19 nt, Artificial Sequence
  Description of Artificial Sequence: Synthetic oligonucleotide
  Sense strand starting at position 597 of SEQ ID NO: 1241648
ucaauuucuuagugaaagu

SEQ ID NO: 1288743 - RNA, 19 nt, Artificial Sequence
  Description of Artificial Sequence: Synthetic oligonucleotide
  Antisense strand to SEQ ID NO: 1288742
acuuucacuaagaaauuga

SEQ ID NO: 1288744 - RNA, 19 nt, Artificial Sequence
  Description of Artificial Sequence: Synthetic oligonucleotide
  Sense strand starting at position 616 of SEQ ID NO: 1241648
acacaaagguuaggagaaa

SEQ ID NO: 1288745 - RNA, 19 nt, Artificial Sequence
  Description of Artificial Sequence: Synthetic oligonucleotide
  Antisense strand to SEQ ID NO: 1288744
uuucuccuaaccuuugugu

SEQ ID NO: 1288746 - RNA, 19 nt, Artificial Sequence
  Description of Artificial Sequence: Synthetic oligonucleotide
  Sense strand starting at position 702 of SEQ ID NO: 1241648
gcuacagaggucugaguua

SEQ ID NO: 1288747 - RNA, 19 nt, Artificial Sequence
  Description of Artificial Sequence: Synthetic oligonucleotide
  Antisense strand to SEQ ID NO: 1288746
uaacucagaccucuguagc

SEQ ID NO: 1288748 - RNA, 19 nt, Artificial Sequence
  Description of Artificial Sequence: Synthetic oligonucleotide
  Sense strand starting at position 809 of SEQ ID NO: 1241648
ggcuuuggugauggcuuua

SEQ ID NO: 1288749 - RNA, 19 nt, Artificial Sequence
  Description of Artificial Sequence: Synthetic oligonucleotide
  Antisense strand to SEQ ID NO: 1288748
uaaagccaucaccaaagcc

SEQ ID NO: 1288750 - RNA, 19 nt, Artificial Sequence
  Description of Artificial Sequence: Synthetic oligonucleotide
  Sense strand starting at position 884 of SEQ ID NO: 1241648
auuccaucugcaggagaaa

SEQ ID NO: 1288751 - RNA, 19 nt, Artificial Sequence
  Description of Artificial Sequence: Synthetic oligonucleotide
  Antisense strand to SEQ ID NO: 1288750
uuucuccugcagauggaau

SEQ ID NO: 1288752 - RNA, 19 nt, Artificial Sequence
  Description of Artificial Sequence: Synthetic oligonucleotide
  Sense strand starting at position 896 of SEQ ID NO: 1241648
ggagaaacaugggaaauaa

SEQ ID NO: 1288753 - RNA, 19 nt, Artificial Sequence
  Description of Artificial Sequence: Synthetic oligonucleotide
  Antisense strand to SEQ ID NO: 1288752
uuauuucccauguuucucc

SEQ ID NO: 1288754 - RNA, 19 nt, Artificial Sequence
  Description of Artificial Sequence: Synthetic oligonucleotide
  Sense strand starting at position 1059 of SEQ ID NO: 1241648
ugggcauccugaguuauac

SEQ ID NO: 1288755 - RNA, 19 nt, Artificial Sequence
  Description of Artificial Sequence: Synthetic oligonucleotide
  Antisense strand to SEQ ID NO: 1288754
guauaacucaggaugccca

SEQ ID NO: 1288756 - RNA, 19 nt, Artificial Sequence
  Description of Artificial Sequence: Synthetic oligonucleotide
  Sense strand starting at position 1061 of SEQ ID NO: 1241648
ggcauccugaguuauacgu

SEQ ID NO: 1288757 - RNA, 19 nt, Artificial Sequence
  Description of Artificial Sequence: Synthetic oligonucleotide
  Antisense strand to SEQ ID NO: 1288756
acguauaacucaggaugcc

SEQ ID NO: 1288758 - RNA, 19 nt, Artificial Sequence
  Description of Artificial Sequence: Synthetic oligonucleotide
  Sense strand starting at position 1067 of SEQ ID NO: 1241648
cugaguuauacgugaggac

SEQ ID NO: 1288759 - RNA, 19 nt, Artificial Sequence
  Description of Artificial Sequence: Synthetic oligonucleotide
  Antisense strand to SEQ ID NO: 1288758
guccucacguauaacucag

SEQ ID NO: 1288760 - RNA, 19 nt, Artificial Sequence
  Description of Artificial Sequence: Synthetic oligonucleotide
  Sense strand starting at position 1068 of SEQ ID NO: 1241648
ugaguuauacgugaggacu

SEQ ID NO: 1288761 - RNA, 19 nt, Artificial Sequence
  Description of Artificial Sequence: Synthetic oligonucleotide
  Antisense strand to SEQ ID NO: 1288760
aguccucacguauaacuca

SEQ ID NO: 1288762 - RNA, 19 nt, Artificial Sequence
  Description of Artificial Sequence: Synthetic oligonucleotide
  Sense strand starting at position 1071 of SEQ ID NO: 1241648
guuauacgugaggacuuaa

SEQ ID NO: 1288763 - RNA, 19 nt, Artificial Sequence
  Description of Artificial Sequence: Synthetic oligonucleotide
  Antisense strand to SEQ ID NO: 1288762
uuaaguccucacguauaac

SEQ ID NO: 1288764 - RNA, 19 nt, Artificial Sequence
  Description of Artificial Sequence: Synthetic oligonucleotide
  Sense strand starting at position 1139 of SEQ ID NO: 1241648
cagaaugaguagucuggga

SEQ ID NO: 1288765 - RNA, 19 nt, Artificial Sequence
  Description of Artificial Sequence: Synthetic oligonucleotide
  Antisense strand to SEQ ID NO: 1288764
ucccagacuacucauucug

SEQ ID NO: 1288766 - RNA, 19 nt, Artificial Sequence
  Description of Artificial Sequence: Synthetic oligonucleotide
  Sense strand starting at position 1141 of SEQ ID NO: 1241648
gaaugaguagucugggaua

SEQ ID NO: 1288767 - RNA, 19 nt, Artificial Sequence
  Description of Artificial Sequence: Synthetic oligonucleotide
  Antisense strand to SEQ ID NO: 1288766
uaucccagacuacucauuc

SEQ ID NO: 1288768 - RNA, 19 nt, Artificial Sequence
  Description of Artificial Sequence: Synthetic oligonucleotide
  Sense strand starting at position 1143 of SEQ ID NO: 1241648
augaguagucugggauauc

SEQ ID NO: 1288769 - RNA, 19 nt, Artificial Sequence
  Description of Artificial Sequence: Synthetic oligonucleotide
  Antisense strand to SEQ ID NO: 1288768
gauaucccagacuacucau

SEQ ID NO: 1288770 - RNA, 19 nt, Artificial Sequence
  Description of Artificial Sequence: Synthetic oligonucleotide
  Sense strand starting at position 1349 of SEQ ID NO: 1241648
gcucauccugucggagaaa

SEQ ID NO: 1288771 - RNA, 19 nt, Artificial Sequence
  Description of Artificial Sequence: Synthetic oligonucleotide
  Antisense strand to SEQ ID NO: 1288770
uuucuccgacaggaugagc

SEQ ID NO: 1288772 - RNA, 19 nt, Artificial Sequence
  Description of Artificial Sequence: Synthetic oligonucleotide
  Sense strand starting at position 1569 of SEQ ID NO: 1241648
uuuauauucccguggaguu

SEQ ID NO: 1288773 - RNA, 19 nt, Artificial Sequence
  Description of Artificial Sequence: Synthetic oligonucleotide
  Antisense strand to SEQ ID NO: 1288772
aacuccacgggaauauaaa

SEQ ID NO: 1288774 - RNA, 19 nt, Artificial Sequence
  Description of Artificial Sequence: Synthetic oligonucleotide
  Sense strand starting at position 1570 of SEQ ID NO: 1241648
uuauauucccguggaguug

SEQ ID NO: 1288775 - RNA, 19 nt, Artificial Sequence
  Description of Artificial Sequence: Synthetic oligonucleotide
  Antisense strand to SEQ ID NO: 1288774
caacuccacgggaauauaa

SEQ ID NO: 1288776 - RNA, 19 nt, Artificial Sequence
  Description of Artificial Sequence: Synthetic oligonucleotide
  Sense strand starting at position 1794 of SEQ ID NO: 1241648
guccucaaucuccgacuaa

SEQ ID NO: 1288777 - RNA, 19 nt, Artificial Sequence
  Description of Artificial Sequence: Synthetic oligonucleotide
  Antisense strand to SEQ ID NO: 1288776
uuagucggagauugaggac

SEQ ID NO: 1288778 - RNA, 19 nt, Artificial Sequence
  Description of Artificial Sequence: Synthetic oligonucleotide
  Sense strand starting at position 1886 of SEQ ID NO: 1241648
cugcguaaaguuuagaguu

SEQ ID NO: 1288779 - RNA, 19 nt, Artificial Sequence
  Description of Artificial Sequence: Synthetic oligonucleotide
  Antisense strand to SEQ ID NO: 1288778
aacucuaaacuuuacgcag

SEQ ID NO: 1288780 - RNA, 19 nt, Artificial Sequence
  Description of Artificial Sequence: Synthetic oligonucleotide
  Sense strand starting at position 1950 of SEQ ID NO: 1241648
ucgggaagcgcguuccaau

SEQ ID NO: 1288781 - RNA, 19 nt, Artificial Sequence
  Description of Artificial Sequence: Synthetic oligonucleotide
  Antisense strand to SEQ ID NO: 1288780
auuggaacgcgcuucccga

SEQ ID NO: 1288782 - RNA, 19 nt, Artificial Sequence
  Description of Artificial Sequence: Synthetic oligonucleotide
  Sense strand starting at position 2223 of SEQ ID NO: 1241648
gaacccuuccaccgguaau

SEQ ID NO: 1288783 - RNA, 19 nt, Artificial Sequence
  Description of Artificial Sequence: Synthetic oligonucleotide
  Antisense strand to SEQ ID NO: 1288782
auuaccgguggaaggguuc

SEQ ID NO: 1288784 - RNA, 19 nt, Artificial Sequence
  Description of Artificial Sequence: Synthetic oligonucleotide
  Sense strand starting at position 2287 of SEQ ID NO: 1241648
gcuggagccuuucuaucaa

SEQ ID NO: 1288785 - RNA, 19 nt, Artificial Sequence
  Description of Artificial Sequence: Synthetic oligonucleotide
  Antisense strand to SEQ ID NO: 1288784
uugauagaaaggcuccagc

SEQ ID NO: 1288786 - RNA, 19 nt, Artificial Sequence
  Description of Artificial Sequence: Synthetic oligonucleotide
  Sense strand starting at position 2412 of SEQ ID NO: 1241648
ccacaagugugguuuccau

SEQ ID NO: 1288787 - RNA, 19 nt, Artificial Sequence
  Description of Artificial Sequence: Synthetic oligonucleotide
  Antisense strand to SEQ ID NO: 1288786
auggaaaccacacuugugg

SEQ ID NO: 1288788 - RNA, 19 nt, Artificial Sequence
  Description of Artificial Sequence: Synthetic oligonucleotide
  Sense strand starting at position 2499 of SEQ ID NO: 1241648
auaaguuucccauguguca

SEQ ID NO: 1288789 - RNA, 19 nt, Artificial Sequence
  Description of Artificial Sequence: Synthetic oligonucleotide
  Antisense strand to SEQ ID NO: 1288788
ugacacaugggaaacuuau

SEQ ID NO: 1288790 - RNA, 19 nt, Artificial Sequence
  Description of Artificial Sequence: Synthetic oligonucleotide
  Sense strand starting at position 2506 of SEQ ID NO: 1241648
ucccaugugucaccaaauc

SEQ ID NO: 1288791 - RNA, 19 nt, Artificial Sequence
  Description of Artificial Sequence: Synthetic oligonucleotide
  Antisense strand to SEQ ID NO: 1288790
gauuuggugacacauggga

SEQ ID NO: 1288792 - RNA, 19 nt, Artificial Sequence
  Description of Artificial Sequence: Synthetic oligonucleotide
  Sense strand starting at position 2697 of SEQ ID NO: 1241648
auugguauuccucagagcu

SEQ ID NO: 1288793 - RNA, 19 nt, Artificial Sequence
  Description of Artificial Sequence: Synthetic oligonucleotide
  Antisense strand to SEQ ID NO: 1288792
agcucugaggaauaccaau

SEQ ID NO: 1288794 - RNA, 19 nt, Artificial Sequence
  Description of Artificial Sequence: Synthetic oligonucleotide
  Sense strand starting at position 2756 of SEQ ID NO: 1241648
aggcaucuaugccuugaau

SEQ ID NO: 1288795 - RNA, 19 nt, Artificial Sequence
  Description of Artificial Sequence: Synthetic oligonucleotide
  Antisense strand to SEQ ID NO: 1288794
auucaaggcauagaugccu

SEQ ID NO: 1288796 - RNA, 19 nt, Artificial Sequence
  Description of Artificial Sequence: Synthetic oligonucleotide
  Sense strand starting at position 2778 of SEQ ID NO: 1241648
guuaccaggcuuuaacaga

SEQ ID NO: 1288797 - RNA, 19 nt, Artificial Sequence
  Description of Artificial Sequence: Synthetic oligonucleotide
  Antisense strand to SEQ ID NO: 1288796
ucuguuaaagccugguaac

SEQ ID NO: 1288798 - RNA, 19 nt, Artificial Sequence
  Description of Artificial Sequence: Synthetic oligonucleotide
  Sense strand starting at position 891 of SEQ ID NO: 1241649
aguggcugguguguauaau

SEQ ID NO: 1288799 - RNA, 19 nt, Artificial Sequence
  Description of Artificial Sequence: Synthetic oligonucleotide
  Antisense strand to SEQ ID NO: 1288798
auuauacacaccagccacu

SEQ ID NO: 1288800 - RNA, 19 nt, Artificial Sequence
  Description of Artificial Sequence: Synthetic oligonucleotide
  Sense strand starting at position 892 of SEQ ID NO: 1241649
guggcugguguguauaauu

SEQ ID NO: 1288801 - RNA, 19 nt, Artificial Sequence
  Description of Artificial Sequence: Synthetic oligonucleotide
  Antisense strand to SEQ ID NO: 1288800
aauuauacacaccagccac

SEQ ID NO: 1288802 - RNA, 19 nt, Artificial Sequence
  Description of Artificial Sequence: Synthetic oligonucleotide
  Sense strand starting at position 900 of SEQ ID NO: 1241649
uguguauaauuguuugcaa

SEQ ID NO: 1288803 - RNA, 19 nt, Artificial Sequence
  Description of Artificial Sequence: Synthetic oligonucleotide
  Antisense strand to SEQ ID NO: 1288802
uugcaaacaauuauacaca

SEQ ID NO: 1288804 - RNA, 19 nt, Artificial Sequence
  Description of Artificial Sequence: Synthetic oligonucleotide
  Sense strand starting at position 901 of SEQ ID NO: 1241649
guguauaauuguuugcaau

SEQ ID NO: 1288805 - RNA, 19 nt, Artificial Sequence
  Description of Artificial Sequence: Synthetic oligonucleotide
  Antisense strand to SEQ ID NO: 1288804
auugcaaacaauuauacac

SEQ ID NO: 1288806 - RNA, 19 nt, Artificial Sequence
  Description of Artificial Sequence: Synthetic oligonucleotide
  Sense strand starting at position 914 of SEQ ID NO: 1241649
ugcaauuacuuggucccaa

SEQ ID NO: 1288807 - RNA, 19 nt, Artificial Sequence
  Description of Artificial Sequence: Synthetic oligonucleotide
  Antisense strand to SEQ ID NO: 1288806
uugggaccaaguaauugca

SEQ ID NO: 1288808 - RNA, 19 nt, Artificial Sequence
  Description of Artificial Sequence: Synthetic oligonucleotide
  Sense strand starting at position 915 of SEQ ID NO: 1241649
gcaauuacuuggucccaaa

SEQ ID NO: 1288809 - RNA, 19 nt, Artificial Sequence
  Description of Artificial Sequence: Synthetic oligonucleotide
  Antisense strand to SEQ ID NO: 1288808
uuugggaccaaguaauugc

SEQ ID NO: 1288810 - RNA, 19 nt, Artificial Sequence
  Description of Artificial Sequence: Synthetic oligonucleotide
  Sense strand starting at position 942 of SEQ ID NO: 1241649
ggaacucuguuccuaaaga

SEQ ID NO: 1288811 - RNA, 19 nt, Artificial Sequence
  Description of Artificial Sequence: Synthetic oligonucleotide
  Antisense strand to SEQ ID NO: 1288810
ucuuuaggaacagaguucc

SEQ ID NO: 1288812 - RNA, 19 nt, Artificial Sequence
  Description of Artificial Sequence: Synthetic oligonucleotide
  Sense strand starting at position 956 of SEQ ID NO: 1241649
aaagaacuauggugugaga

SEQ ID NO: 1288813 - RNA, 19 nt, Artificial Sequence
  Description of Artificial Sequence: Synthetic oligonucleotide
  Antisense strand to SEQ ID NO: 1288812
ucucacaccauaguucuuu

SEQ ID NO: 1288814 - RNA, 19 nt, Artificial Sequence
  Description of Artificial Sequence: Synthetic oligonucleotide
  Sense strand starting at position 958 of SEQ ID NO: 1241649
agaacuauggugugagaag

SEQ ID NO: 1288815 - RNA, 19 nt, Artificial Sequence
  Description of Artificial Sequence: Synthetic oligonucleotide
  Antisense strand to SEQ ID NO: 1288814
cuucucacaccauaguucu

SEQ ID NO: 1288816 - RNA, 19 nt, Artificial Sequence
  Description of Artificial Sequence: Synthetic oligonucleotide
  Sense strand starting at position 959 of SEQ ID NO: 1241649
gaacuauggugugagaagu

SEQ ID NO: 1288817 - RNA, 19 nt, Artificial Sequence
  Description of Artificial Sequence: Synthetic oligonucleotide
  Antisense strand to SEQ ID NO: 1288816
acuucucacaccauaguuc

SEQ ID NO: 1288818 - RNA, 19 nt, Artificial Sequence
  Description of Artificial Sequence: Synthetic oligonucleotide
  Sense strand starting at position 969 of SEQ ID NO: 1241649
gugagaaguaagggacuuu

SEQ ID NO: 1288819 - RNA, 19 nt, Artificial Sequence
  Description of Artificial Sequence: Synthetic oligonucleotide
  Antisense strand to SEQ ID NO: 1288818
aaagucccuuacuucucac

SEQ ID NO: 1288820 - RNA, 19 nt, Artificial Sequence
  Description of Artificial Sequence: Synthetic oligonucleotide
  Sense strand starting at position 1046 of SEQ ID NO: 1241649
gucucaauuucuuagugaa

SEQ ID NO: 1288821 - RNA, 19 nt, Artificial Sequence
  Description of Artificial Sequence: Synthetic oligonucleotide
  Antisense strand to SEQ ID NO: 1288820
uucacuaagaaauugagac

SEQ ID NO: 1288822 - RNA, 19 nt, Artificial Sequence
  Description of Artificial Sequence: Synthetic oligonucleotide
  Sense strand starting at position 1049 of SEQ ID NO: 1241649
ucaauuucuuagugaaagu

SEQ ID NO: 1288823 - RNA, 19 nt, Artificial Sequence
  Description of Artificial Sequence: Synthetic oligonucleotide
  Antisense strand to SEQ ID NO: 1288822
acuuucacuaagaaauuga

SEQ ID NO: 1288824 - RNA, 19 nt, Artificial Sequence
  Description of Artificial Sequence: Synthetic oligonucleotide
  Sense strand starting at position 1068 of SEQ ID NO: 1241649
acacaaagguuaggagaaa

SEQ ID NO: 1288825 - RNA, 19 nt, Artificial Sequence
  Description of Artificial Sequence: Synthetic oligonucleotide
  Antisense strand to SEQ ID NO: 1288824
uuucuccuaaccuuugugu

SEQ ID NO: 1288826 - RNA, 19 nt, Artificial Sequence
  Description of Artificial Sequence: Synthetic oligonucleotide
  Sense strand starting at position 1154 of SEQ ID NO: 1241649
gcuacagaggucugaguua

SEQ ID NO: 1288827 - RNA, 19 nt, Artificial Sequence
  Description of Artificial Sequence: Synthetic oligonucleotide
  Antisense strand to SEQ ID NO: 1288826
uaacucagaccucuguagc

SEQ ID NO: 1288828 - RNA, 19 nt, Artificial Sequence
  Description of Artificial Sequence: Synthetic oligonucleotide
  Sense strand starting at position 1261 of SEQ ID NO: 1241649
ggcuuuggugauggcuuua

SEQ ID NO: 1288829 - RNA, 19 nt, Artificial Sequence
  Description of Artificial Sequence: Synthetic oligonucleotide
  Antisense strand to SEQ ID NO: 1288828
uaaagccaucaccaaagcc

SEQ ID NO: 1288830 - RNA, 19 nt, Artificial Sequence
  Description of Artificial Sequence: Synthetic oligonucleotide
  Sense strand starting at position 1336 of SEQ ID NO: 1241649
auuccaucugcaggagaaa

SEQ ID NO: 1288831 - RNA, 19 nt, Artificial Sequence
  Description of Artificial Sequence: Synthetic oligonucleotide
  Antisense strand to SEQ ID NO: 1288830
uuucuccugcagauggaau

SEQ ID NO: 1288832 - RNA, 19 nt, Artificial Sequence
  Description of Artificial Sequence: Synthetic oligonucleotide
  Sense strand starting at position 1348 of SEQ ID NO: 1241649
ggagaaacaugggaaauaa

SEQ ID NO: 1288833 - RNA, 19 nt, Artificial Sequence
  Description of Artificial Sequence: Synthetic oligonucleotide
  Antisense strand to SEQ ID NO: 1288832
uuauuucccauguuucucc

SEQ ID NO: 1288834 - RNA, 19 nt, Artificial Sequence
  Description of Artificial Sequence: Synthetic oligonucleotide
  Sense strand starting at position 1511 of SEQ ID NO: 1241649
ugggcauccugaguuauac

SEQ ID NO: 1288835 - RNA, 19 nt, Artificial Sequence
  Description of Artificial Sequence: Synthetic oligonucleotide
  Antisense strand to SEQ ID NO: 1288834
guauaacucaggaugccca

SEQ ID NO: 1288836 - RNA, 19 nt, Artificial Sequence
  Description of Artificial Sequence: Synthetic oligonucleotide
  Sense strand starting at position 1513 of SEQ ID NO: 1241649
ggcauccugaguuauacgu

SEQ ID NO: 1288837 - RNA, 19 nt, Artificial Sequence
  Description of Artificial Sequence: Synthetic oligonucleotide
  Antisense strand to SEQ ID NO: 1288836
acguauaacucaggaugcc

SEQ ID NO: 1288838 - RNA, 19 nt, Artificial Sequence
  Description of Artificial Sequence: Synthetic oligonucleotide
  Sense strand starting at position 1519 of SEQ ID NO: 1241649
cugaguuauacgugaggac

SEQ ID NO: 1288839 - RNA, 19 nt, Artificial Sequence
  Description of Artificial Sequence: Synthetic oligonucleotide
  Antisense strand to SEQ ID NO: 1288838
guccucacguauaacucag

SEQ ID NO: 1288840 - RNA, 19 nt, Artificial Sequence
  Description of Artificial Sequence: Synthetic oligonucleotide
  Sense strand starting at position 1520 of SEQ ID NO: 1241649
ugaguuauacgugaggacu

SEQ ID NO: 1288841 - RNA, 19 nt, Artificial Sequence
  Description of Artificial Sequence: Synthetic oligonucleotide
  Antisense strand to SEQ ID NO: 1288840
aguccucacguauaacuca

SEQ ID NO: 1288842 - RNA, 19 nt, Artificial Sequence
  Description of Artificial Sequence: Synthetic oligonucleotide
  Sense strand starting at position 1523 of SEQ ID NO: 1241649
guuauacgugaggacuuaa

SEQ ID NO: 1288843 - RNA, 19 nt, Artificial Sequence
  Description of Artificial Sequence: Synthetic oligonucleotide
  Antisense strand to SEQ ID NO: 1288842
uuaaguccucacguauaac

SEQ ID NO: 1288844 - RNA, 19 nt, Artificial Sequence
  Description of Artificial Sequence: Synthetic oligonucleotide
  Sense strand starting at position 1591 of SEQ ID NO: 1241649
cagaaugaguagucuggga

SEQ ID NO: 1288845 - RNA, 19 nt, Artificial Sequence
  Description of Artificial Sequence: Synthetic oligonucleotide
  Antisense strand to SEQ ID NO: 1288844
ucccagacuacucauucug

SEQ ID NO: 1288846 - RNA, 19 nt, Artificial Sequence
  Description of Artificial Sequence: Synthetic oligonucleotide
  Sense strand starting at position 1593 of SEQ ID NO: 1241649
gaaugaguagucugggaua

SEQ ID NO: 1288847 - RNA, 19 nt, Artificial Sequence
  Description of Artificial Sequence: Synthetic oligonucleotide
  Antisense strand to SEQ ID NO: 1288846
uaucccagacuacucauuc

SEQ ID NO: 1288848 - RNA, 19 nt, Artificial Sequence
  Description of Artificial Sequence: Synthetic oligonucleotide
  Sense strand starting at position 1595 of SEQ ID NO: 1241649
augaguagucugggauauc

SEQ ID NO: 1288849 - RNA, 19 nt, Artificial Sequence
  Description of Artificial Sequence: Synthetic oligonucleotide
  Antisense strand to SEQ ID NO: 1288848
gauaucccagacuacucau

SEQ ID NO: 1288850 - RNA, 19 nt, Artificial Sequence
  Description of Artificial Sequence: Synthetic oligonucleotide
  Sense strand starting at position 1801 of SEQ ID NO: 1241649
gcucauccugucggagaaa

SEQ ID NO: 1288851 - RNA, 19 nt, Artificial Sequence
  Description of Artificial Sequence: Synthetic oligonucleotide
  Antisense strand to SEQ ID NO: 1288850
uuucuccgacaggaugagc

SEQ ID NO: 1288852 - RNA, 19 nt, Artificial Sequence
  Description of Artificial Sequence: Synthetic oligonucleotide
  Sense strand starting at position 2021 of SEQ ID NO: 1241649
uuuauauucccguggaguu

SEQ ID NO: 1288853 - RNA, 19 nt, Artificial Sequence
  Description of Artificial Sequence: Synthetic oligonucleotide
  Antisense strand to SEQ ID NO: 1288852
aacuccacgggaauauaaa

SEQ ID NO: 1288854 - RNA, 19 nt, Artificial Sequence
  Description of Artificial Sequence: Synthetic oligonucleotide
  Sense strand starting at position 2022 of SEQ ID NO: 1241649
uuauauucccguggaguug

SEQ ID NO: 1288855 - RNA, 19 nt, Artificial Sequence
  Description of Artificial Sequence: Synthetic oligonucleotide
  Antisense strand to SEQ ID NO: 1288854
caacuccacgggaauauaa

SEQ ID NO: 1288856 - RNA, 19 nt, Artificial Sequence
  Description of Artificial Sequence: Synthetic oligonucleotide
  Sense strand starting at position 2246 of SEQ ID NO: 1241649
guccucaaucuccgacuaa

SEQ ID NO: 1288857 - RNA, 19 nt, Artificial Sequence
  Description of Artificial Sequence: Synthetic oligonucleotide
  Antisense strand to SEQ ID NO: 1288856
uuagucggagauugaggac

SEQ ID NO: 1288858 - RNA, 19 nt, Artificial Sequence
  Description of Artificial Sequence: Synthetic oligonucleotide
  Sense strand starting at position 2338 of SEQ ID NO: 1241649
cugcguaaaguuuagaguu

SEQ ID NO: 1288859 - RNA, 19 nt, Artificial Sequence
  Description of Artificial Sequence: Synthetic oligonucleotide
  Antisense strand to SEQ ID NO: 1288858
aacucuaaacuuuacgcag

SEQ ID NO: 1288860 - RNA, 19 nt, Artificial Sequence
  Description of Artificial Sequence: Synthetic oligonucleotide
  Sense strand starting at position 2402 of SEQ ID NO: 1241649
ucgggaagcgcguuccaau

SEQ ID NO: 1288861 - RNA, 19 nt, Artificial Sequence
  Description of Artificial Sequence: Synthetic oligonucleotide
  Antisense strand to SEQ ID NO: 1288860
auuggaacgcgcuucccga

SEQ ID NO: 1288862 - RNA, 19 nt, Artificial Sequence
  Description of Artificial Sequence: Synthetic oligonucleotide
  Sense strand starting at position 2675 of SEQ ID NO: 1241649
gaacccuuccaccgguaau

SEQ ID NO: 1288863 - RNA, 19 nt, Artificial Sequence
  Description of Artificial Sequence: Synthetic oligonucleotide
  Antisense strand to SEQ ID NO: 1288862
auuaccgguggaaggguuc

SEQ ID NO: 1288864 - RNA, 19 nt, Artificial Sequence
  Description of Artificial Sequence: Synthetic oligonucleotide
  Sense strand starting at position 2739 of SEQ ID NO: 1241649
gcuggagccuuucuaucaa

SEQ ID NO: 1288865 - RNA, 19 nt, Artificial Sequence
  Description of Artificial Sequence: Synthetic oligonucleotide
  Antisense strand to SEQ ID NO: 1288864
uugauagaaaggcuccagc

SEQ ID NO: 1288866 - RNA, 19 nt, Artificial Sequence
  Description of Artificial Sequence: Synthetic oligonucleotide
  Sense strand starting at position 2864 of SEQ ID NO: 1241649
ccacaagugugguuuccau

SEQ ID NO: 1288867 - RNA, 19 nt, Artificial Sequence
  Description of Artificial Sequence: Synthetic oligonucleotide
  Antisense strand to SEQ ID NO: 1288866
auggaaaccacacuugugg

SEQ ID NO: 1288868 - RNA, 19 nt, Artificial Sequence
  Description of Artificial Sequence: Synthetic oligonucleotide
  Sense strand starting at position 2951 of SEQ ID NO: 1241649
auaaguuucccauguguca

SEQ ID NO: 1288869 - RNA, 19 nt, Artificial Sequence
  Description of Artificial Sequence: Synthetic oligonucleotide
  Antisense strand to SEQ ID NO: 1288868
ugacacaugggaaacuuau

SEQ ID NO: 1288870 - RNA, 19 nt, Artificial Sequence
  Description of Artificial Sequence: Synthetic oligonucleotide
  Sense strand starting at position 2958 of SEQ ID NO: 1241649
ucccaugugucaccaaauc

SEQ ID NO: 1288871 - RNA, 19 nt, Artificial Sequence
  Description of Artificial Sequence: Synthetic oligonucleotide
  Antisense strand to SEQ ID NO: 1288870
gauuuggugacacauggga

SEQ ID NO: 1288872 - RNA, 19 nt, Artificial Sequence
  Description of Artificial Sequence: Synthetic oligonucleotide
  Sense strand starting at position 3149 of SEQ ID NO: 1241649
auugguauuccucagagcu

SEQ ID NO: 1288873 - RNA, 19 nt, Artificial Sequence
  Description of Artificial Sequence: Synthetic oligonucleotide
  Antisense strand to SEQ ID NO: 1288872
agcucugaggaauaccaau

SEQ ID NO: 1288874 - RNA, 19 nt, Artificial Sequence
  Description of Artificial Sequence: Synthetic oligonucleotide
  Sense strand starting at position 3208 of SEQ ID NO: 1241649
aggcaucuaugccuugaau

SEQ ID NO: 1288875 - RNA, 19 nt, Artificial Sequence
  Description of Artificial Sequence: Synthetic oligonucleotide
  Antisense strand to SEQ ID NO: 1288874
auucaaggcauagaugccu

SEQ ID NO: 1288876 - RNA, 19 nt, Artificial Sequence
  Description of Artificial Sequence: Synthetic oligonucleotide
  Sense strand starting at position 3230 of SEQ ID NO: 1241649
guuaccaggcuuuaacaga

SEQ ID NO: 1288877 - RNA, 19 nt, Artificial Sequence
  Description of Artificial Sequence: Synthetic oligonucleotide
  Antisense strand to SEQ ID NO: 1288876
ucuguuaaagccugguaac

SEQ ID NO: 1288878 - RNA, 19 nt, Artificial Sequence
  Description of Artificial Sequence: Synthetic oligonucleotide
  Sense strand starting at position 543 of SEQ ID NO: 1241650
aguggcugguguguauaau

SEQ ID NO: 1288879 - RNA, 19 nt, Artificial Sequence
  Description of Artificial Sequence: Synthetic oligonucleotide
  Antisense strand to SEQ ID NO: 1288878
auuauacacaccagccacu

SEQ ID NO: 1288880 - RNA, 19 nt, Artificial Sequence
  Description of Artificial Sequence: Synthetic oligonucleotide
  Sense strand starting at position 544 of SEQ ID NO: 1241650
guggcugguguguauaauu

SEQ ID NO: 1288881 - RNA, 19 nt, Artificial Sequence
  Description of Artificial Sequence: Synthetic oligonucleotide
  Antisense strand to SEQ ID NO: 1288880
aauuauacacaccagccac

SEQ ID NO: 1288882 - RNA, 19 nt, Artificial Sequence
  Description of Artificial Sequence: Synthetic oligonucleotide
  Sense strand starting at position 552 of SEQ ID NO: 1241650
uguguauaauuguuugcaa

SEQ ID NO: 1288883 - RNA, 19 nt, Artificial Sequence
  Description of Artificial Sequence: Synthetic oligonucleotide
  Antisense strand to SEQ ID NO: 1288882
uugcaaacaauuauacaca

SEQ ID NO: 1288884 - RNA, 19 nt, Artificial Sequence
  Description of Artificial Sequence: Synthetic oligonucleotide
  Sense strand starting at position 553 of SEQ ID NO: 1241650
guguauaauuguuugcaau

SEQ ID NO: 1288885 - RNA, 19 nt, Artificial Sequence
  Description of Artificial Sequence: Synthetic oligonucleotide
  Antisense strand to SEQ ID NO: 1288884
auugcaaacaauuauacac

SEQ ID NO: 1288886 - RNA, 19 nt, Artificial Sequence
  Description of Artificial Sequence: Synthetic oligonucleotide
  Sense strand starting at position 566 of SEQ ID NO: 1241650
ugcaauuacuuggucccaa

SEQ ID NO: 1288887 - RNA, 19 nt, Artificial Sequence
  Description of Artificial Sequence: Synthetic oligonucleotide
  Antisense strand to SEQ ID NO: 1288886
uugggaccaaguaauugca

SEQ ID NO: 1288888 - RNA, 19 nt, Artificial Sequence
  Description of Artificial Sequence: Synthetic oligonucleotide
  Sense strand starting at position 567 of SEQ ID NO: 1241650
gcaauuacuuggucccaaa

SEQ ID NO: 1288889 - RNA, 19 nt, Artificial Sequence
  Description of Artificial Sequence: Synthetic oligonucleotide
  Antisense strand to SEQ ID NO: 1288888
uuugggaccaaguaauugc

SEQ ID NO: 1288890 - RNA, 19 nt, Artificial Sequence
  Description of Artificial Sequence: Synthetic oligonucleotide
  Sense strand starting at position 594 of SEQ ID NO: 1241650
ggaacucuguuccuaaaga

SEQ ID NO: 1288891 - RNA, 19 nt, Artificial Sequence
  Description of Artificial Sequence: Synthetic oligonucleotide
  Antisense strand to SEQ ID NO: 1288890
ucuuuaggaacagaguucc

SEQ ID NO: 1288892 - RNA, 19 nt, Artificial Sequence
  Description of Artificial Sequence: Synthetic oligonucleotide
  Sense strand starting at position 608 of SEQ ID NO: 1241650
aaagaacuauggugugaga

SEQ ID NO: 1288893 - RNA, 19 nt, Artificial Sequence
  Description of Artificial Sequence: Synthetic oligonucleotide
  Antisense strand to SEQ ID NO: 1288892
ucucacaccauaguucuuu

SEQ ID NO: 1288894 - RNA, 19 nt, Artificial Sequence
  Description of Artificial Sequence: Synthetic oligonucleotide
  Sense strand starting at position 610 of SEQ ID NO: 1241650
agaacuauggugugagaag

SEQ ID NO: 1288895 - RNA, 19 nt, Artificial Sequence
  Description of Artificial Sequence: Synthetic oligonucleotide
  Antisense strand to SEQ ID NO: 1288894
cuucucacaccauaguucu

SEQ ID NO: 1288896 - RNA, 19 nt, Artificial Sequence
  Description of Artificial Sequence: Synthetic oligonucleotide
  Sense strand starting at position 611 of SEQ ID NO: 1241650
gaacuauggugugagaagu

SEQ ID NO: 1288897 - RNA, 19 nt, Artificial Sequence
  Description of Artificial Sequence: Synthetic oligonucleotide
  Antisense strand to SEQ ID NO: 1288896
acuucucacaccauaguuc

SEQ ID NO: 1288898 - RNA, 19 nt, Artificial Sequence
  Description of Artificial Sequence: Synthetic oligonucleotide
  Sense strand starting at position 621 of SEQ ID NO: 1241650
gugagaaguaagggacuuu

SEQ ID NO: 1288899 - RNA, 19 nt, Artificial Sequence
  Description of Artificial Sequence: Synthetic oligonucleotide
  Antisense strand to SEQ ID NO: 1288898
aaagucccuuacuucucac

SEQ ID NO: 1288900 - RNA, 19 nt, Artificial Sequence
  Description of Artificial Sequence: Synthetic oligonucleotide
  Sense strand starting at position 698 of SEQ ID NO: 1241650
gucucaauuucuuagugaa

SEQ ID NO: 1288901 - RNA, 19 nt, Artificial Sequence
  Description of Artificial Sequence: Synthetic oligonucleotide
  Antisense strand to SEQ ID NO: 1288900
uucacuaagaaauugagac

SEQ ID NO: 1288902 - RNA, 19 nt, Artificial Sequence
  Description of Artificial Sequence: Synthetic oligonucleotide
  Sense strand starting at position 701 of SEQ ID NO: 1241650
ucaauuucuuagugaaagu

SEQ ID NO: 1288903 - RNA, 19 nt, Artificial Sequence
  Description of Artificial Sequence: Synthetic oligonucleotide
  Antisense strand to SEQ ID NO: 1288902
acuuucacuaagaaauuga

SEQ ID NO: 1288904 - RNA, 19 nt, Artificial Sequence
  Description of Artificial Sequence: Synthetic oligonucleotide
  Sense strand starting at position 720 of SEQ ID NO: 1241650
acacaaagguuaggagaaa

SEQ ID NO: 1288905 - RNA, 19 nt, Artificial Sequence
  Description of Artificial Sequence: Synthetic oligonucleotide
  Antisense strand to SEQ ID NO: 1288904
uuucuccuaaccuuugugu

SEQ ID NO: 1288906 - RNA, 19 nt, Artificial Sequence
  Description of Artificial Sequence: Synthetic oligonucleotide
  Sense strand starting at position 806 of SEQ ID NO: 1241650
gcuacagaggucugaguua

SEQ ID NO: 1288907 - RNA, 19 nt, Artificial Sequence
  Description of Artificial Sequence: Synthetic oligonucleotide
  Antisense strand to SEQ ID NO: 1288906
uaacucagaccucuguagc

SEQ ID NO: 1288908 - RNA, 19 nt, Artificial Sequence
  Description of Artificial Sequence: Synthetic oligonucleotide
  Sense strand starting at position 913 of SEQ ID NO: 1241650
ggcuuuggugauggcuuua

SEQ ID NO: 1288909 - RNA, 19 nt, Artificial Sequence
  Description of Artificial Sequence: Synthetic oligonucleotide
  Antisense strand to SEQ ID NO: 1288908
uaaagccaucaccaaagcc

SEQ ID NO: 1288910 - RNA, 19 nt, Artificial Sequence
  Description of Artificial Sequence: Synthetic oligonucleotide
  Sense strand starting at position 988 of SEQ ID NO: 1241650
auuccaucugcaggagaaa

SEQ ID NO: 1288911 - RNA, 19 nt, Artificial Sequence
  Description of Artificial Sequence: Synthetic oligonucleotide
  Antisense strand to SEQ ID NO: 1288910
uuucuccugcagauggaau

SEQ ID NO: 1288912 - RNA, 19 nt, Artificial Sequence
  Description of Artificial Sequence: Synthetic oligonucleotide
  Sense strand starting at position 1000 of SEQ ID NO: 1241650
ggagaaacaugggaaauaa

SEQ ID NO: 1288913 - RNA, 19 nt, Artificial Sequence
  Description of Artificial Sequence: Synthetic oligonucleotide
  Antisense strand to SEQ ID NO: 1288912
uuauuucccauguuucucc

SEQ ID NO: 1288914 - RNA, 19 nt, Artificial Sequence
  Description of Artificial Sequence: Synthetic oligonucleotide
  Sense strand starting at position 1163 of SEQ ID NO: 1241650
ugggcauccugaguuauac

SEQ ID NO: 1288915 - RNA, 19 nt, Artificial Sequence
  Description of Artificial Sequence: Synthetic oligonucleotide
  Antisense strand to SEQ ID NO: 1288914
guauaacucaggaugccca

SEQ ID NO: 1288916 - RNA, 19 nt, Artificial Sequence
  Description of Artificial Sequence: Synthetic oligonucleotide
  Sense strand starting at position 1165 of SEQ ID NO: 1241650
ggcauccugaguuauacgu

SEQ ID NO: 1288917 - RNA, 19 nt, Artificial Sequence
  Description of Artificial Sequence: Synthetic oligonucleotide
  Antisense strand to SEQ ID NO: 1288916
acguauaacucaggaugcc

SEQ ID NO: 1288918 - RNA, 19 nt, Artificial Sequence
  Description of Artificial Sequence: Synthetic oligonucleotide
  Sense strand starting at position 1171 of SEQ ID NO: 1241650
cugaguuauacgugaggac

SEQ ID NO: 1288919 - RNA, 19 nt, Artificial Sequence
  Description of Artificial Sequence: Synthetic oligonucleotide
  Antisense strand to SEQ ID NO: 1288918
guccucacguauaacucag

SEQ ID NO: 1288920 - RNA, 19 nt, Artificial Sequence
  Description of Artificial Sequence: Synthetic oligonucleotide
  Sense strand starting at position 1172 of SEQ ID NO: 1241650
ugaguuauacgugaggacu

SEQ ID NO: 1288921 - RNA, 19 nt, Artificial Sequence
  Description of Artificial Sequence: Synthetic oligonucleotide
  Antisense strand to SEQ ID NO: 1288920
aguccucacguauaacuca

SEQ ID NO: 1288922 - RNA, 19 nt, Artificial Sequence
  Description of Artificial Sequence: Synthetic oligonucleotide
  Sense strand starting at position 1175 of SEQ ID NO: 1241650
guuauacgugaggacuuaa

SEQ ID NO: 1288923 - RNA, 19 nt, Artificial Sequence
  Description of Artificial Sequence: Synthetic oligonucleotide
  Antisense strand to SEQ ID NO: 1288922
uuaaguccucacguauaac

SEQ ID NO: 1288924 - RNA, 19 nt, Artificial Sequence
  Description of Artificial Sequence: Synthetic oligonucleotide
  Sense strand starting at position 1243 of SEQ ID NO: 1241650
cagaaugaguagucuggga

SEQ ID NO: 1288925 - RNA, 19 nt, Artificial Sequence
  Description of Artificial Sequence: Synthetic oligonucleotide
  Antisense strand to SEQ ID NO: 1288924
ucccagacuacucauucug

SEQ ID NO: 1288926 - RNA, 19 nt, Artificial Sequence
  Description of Artificial Sequence: Synthetic oligonucleotide
  Sense strand starting at position 1245 of SEQ ID NO: 1241650
gaaugaguagucugggaua

SEQ ID NO: 1288927 - RNA, 19 nt, Artificial Sequence
  Description of Artificial Sequence: Synthetic oligonucleotide
  Antisense strand to SEQ ID NO: 1288926
uaucccagacuacucauuc

SEQ ID NO: 1288928 - RNA, 19 nt, Artificial Sequence
  Description of Artificial Sequence: Synthetic oligonucleotide
  Sense strand starting at position 1247 of SEQ ID NO: 1241650
augaguagucugggauauc

SEQ ID NO: 1288929 - RNA, 19 nt, Artificial Sequence
  Description of Artificial Sequence: Synthetic oligonucleotide
  Antisense strand to SEQ ID NO: 1288928
gauaucccagacuacucau

SEQ ID NO: 1288930 - RNA, 19 nt, Artificial Sequence
  Description of Artificial Sequence: Synthetic oligonucleotide
  Sense strand starting at position 1453 of SEQ ID NO: 1241650
gcucauccugucggagaaa

SEQ ID NO: 1288931 - RNA, 19 nt, Artificial Sequence
  Description of Artificial Sequence: Synthetic oligonucleotide
  Antisense strand to SEQ ID NO: 1288930
uuucuccgacaggaugagc

SEQ ID NO: 1288932 - RNA, 19 nt, Artificial Sequence
  Description of Artificial Sequence: Synthetic oligonucleotide
  Sense strand starting at position 1673 of SEQ ID NO: 1241650
uuuauauucccguggaguu

SEQ ID NO: 1288933 - RNA, 19 nt, Artificial Sequence
  Description of Artificial Sequence: Synthetic oligonucleotide
  Antisense strand to SEQ ID NO: 1288932
aacuccacgggaauauaaa

SEQ ID NO: 1288934 - RNA, 19 nt, Artificial Sequence
  Description of Artificial Sequence: Synthetic oligonucleotide
  Sense strand starting at position 1674 of SEQ ID NO: 1241650
uuauauucccguggaguug

SEQ ID NO: 1288935 - RNA, 19 nt, Artificial Sequence
  Description of Artificial Sequence: Synthetic oligonucleotide
  Antisense strand to SEQ ID NO: 1288934
caacuccacgggaauauaa

SEQ ID NO: 1288936 - RNA, 19 nt, Artificial Sequence
  Description of Artificial Sequence: Synthetic oligonucleotide
  Sense strand starting at position 1898 of SEQ ID NO: 1241650
guccucaaucuccgacuaa

SEQ ID NO: 1288937 - RNA, 19 nt, Artificial Sequence
  Description of Artificial Sequence: Synthetic oligonucleotide
  Antisense strand to SEQ ID NO: 1288936
uuagucggagauugaggac

SEQ ID NO: 1288938 - RNA, 19 nt, Artificial Sequence
  Description of Artificial Sequence: Synthetic oligonucleotide
  Sense strand starting at position 1990 of SEQ ID NO: 1241650
cugcguaaaguuuagaguu

SEQ ID NO: 1288939 - RNA, 19 nt, Artificial Sequence
  Description of Artificial Sequence: Synthetic oligonucleotide
  Antisense strand to SEQ ID NO: 1288938
aacucuaaacuuuacgcag

SEQ ID NO: 1288940 - RNA, 19 nt, Artificial Sequence
  Description of Artificial Sequence: Synthetic oligonucleotide
  Sense strand starting at position 2054 of SEQ ID NO: 1241650
ucgggaagcgcguuccaau

SEQ ID NO: 1288941 - RNA, 19 nt, Artificial Sequence
  Description of Artificial Sequence: Synthetic oligonucleotide
  Antisense strand to SEQ ID NO: 1288940
auuggaacgcgcuucccga

SEQ ID NO: 1288942 - RNA, 19 nt, Artificial Sequence
  Description of Artificial Sequence: Synthetic oligonucleotide
  Sense strand starting at position 2327 of SEQ ID NO: 1241650
gaacccuuccaccgguaau

SEQ ID NO: 1288943 - RNA, 19 nt, Artificial Sequence
  Description of Artificial Sequence: Synthetic oligonucleotide
  Antisense strand to SEQ ID NO: 1288942
auuaccgguggaaggguuc

SEQ ID NO: 1288944 - RNA, 19 nt, Artificial Sequence
  Description of Artificial Sequence: Synthetic oligonucleotide
  Sense strand starting at position 2391 of SEQ ID NO: 1241650
gcuggagccuuucuaucaa

SEQ ID NO: 1288945 - RNA, 19 nt, Artificial Sequence
  Description of Artificial Sequence: Synthetic oligonucleotide
  Antisense strand to SEQ ID NO: 1288944
uugauagaaaggcuccagc

SEQ ID NO: 1288946 - RNA, 19 nt, Artificial Sequence
  Description of Artificial Sequence: Synthetic oligonucleotide
  Sense strand starting at position 2516 of SEQ ID NO: 1241650
ccacaagugugguuuccau

SEQ ID NO: 1288947 - RNA, 19 nt, Artificial Sequence
  Description of Artificial Sequence: Synthetic oligonucleotide
  Antisense strand to SEQ ID NO: 1288946
auggaaaccacacuugugg

SEQ ID NO: 1288948 - RNA, 19 nt, Artificial Sequence
  Description of Artificial Sequence: Synthetic oligonucleotide
  Sense strand starting at position 2603 of SEQ ID NO: 1241650
auaaguuucccauguguca

SEQ ID NO: 1288949 - RNA, 19 nt, Artificial Sequence
  Description of Artificial Sequence: Synthetic oligonucleotide
  Antisense strand to SEQ ID NO: 1288948
ugacacaugggaaacuuau

SEQ ID NO: 1288950 - RNA, 19 nt, Artificial Sequence
  Description of Artificial Sequence: Synthetic oligonucleotide
  Sense strand starting at position 2610 of SEQ ID NO: 1241650
ucccaugugucaccaaauc

SEQ ID NO: 1288951 - RNA, 19 nt, Artificial Sequence
  Description of Artificial Sequence: Synthetic oligonucleotide
  Antisense strand to SEQ ID NO: 1288950
gauuuggugacacauggga

SEQ ID NO: 1288952 - RNA, 19 nt, Artificial Sequence
  Description of Artificial Sequence: Synthetic oligonucleotide
  Sense strand starting at position 2801 of SEQ ID NO: 1241650
auugguauuccucagagcu

SEQ ID NO: 1288953 - RNA, 19 nt, Artificial Sequence
  Description of Artificial Sequence: Synthetic oligonucleotide
  Antisense strand to SEQ ID NO: 1288952
agcucugaggaauaccaau

SEQ ID NO: 1288954 - RNA, 19 nt, Artificial Sequence
  Description of Artificial Sequence: Synthetic oligonucleotide
  Sense strand starting at position 2860 of SEQ ID NO: 1241650
aggcaucuaugccuugaau

SEQ ID NO: 1288955 - RNA, 19 nt, Artificial Sequence
  Description of Artificial Sequence: Synthetic oligonucleotide
  Antisense strand to SEQ ID NO: 1288954
auucaaggcauagaugccu

SEQ ID NO: 1288956 - RNA, 19 nt, Artificial Sequence
  Description of Artificial Sequence: Synthetic oligonucleotide
  Sense strand starting at position 2882 of SEQ ID NO: 1241650
guuaccaggcuuuaacaga

SEQ ID NO: 1288957 - RNA, 19 nt, Artificial Sequence
  Description of Artificial Sequence: Synthetic oligonucleotide
  Antisense strand to SEQ ID NO: 1288956
ucuguuaaagccugguaac

SEQ ID NO: 1288958 - RNA, 19 nt, Artificial Sequence
  Description of Artificial Sequence: Synthetic oligonucleotide
  Sense strand starting at position 293 of SEQ ID NO: 1241651
gagaauagcuuagcuugua

SEQ ID NO: 1288959 - RNA, 19 nt, Artificial Sequence
  Description of Artificial Sequence: Synthetic oligonucleotide
  Antisense strand to SEQ ID NO: 1288958
uacaagcuaagcuauucuc

SEQ ID NO: 1288960 - RNA, 19 nt, Artificial Sequence
  Description of Artificial Sequence: Synthetic oligonucleotide
  Sense strand starting at position 410 of SEQ ID NO: 1241651
agacuuucccuaugauagu

SEQ ID NO: 1288961 - RNA, 19 nt, Artificial Sequence
  Description of Artificial Sequence: Synthetic oligonucleotide
  Antisense strand to SEQ ID NO: 1288960
acuaucauagggaaagucu

SEQ ID NO: 1288962 - RNA, 19 nt, Artificial Sequence
  Description of Artificial Sequence: Synthetic oligonucleotide
  Sense strand starting at position 515 of SEQ ID NO: 1241651
uguauuuguuaguugccaa

SEQ ID NO: 1288963 - RNA, 19 nt, Artificial Sequence
  Description of Artificial Sequence: Synthetic oligonucleotide
  Antisense strand to SEQ ID NO: 1288962
uuggcaacuaacaaauaca

SEQ ID NO: 1288964 - RNA, 19 nt, Artificial Sequence
  Description of Artificial Sequence: Synthetic oligonucleotide
  Sense strand starting at position 516 of SEQ ID NO: 1241651
guauuuguuaguugccaau

SEQ ID NO: 1288965 - RNA, 19 nt, Artificial Sequence
  Description of Artificial Sequence: Synthetic oligonucleotide
  Antisense strand to SEQ ID NO: 1288964
auuggcaacuaacaaauac

SEQ ID NO: 1288966 - RNA, 19 nt, Artificial Sequence
  Description of Artificial Sequence: Synthetic oligonucleotide
  Sense strand starting at position 518 of SEQ ID NO: 1241651
auuuguuaguugccaauua

SEQ ID NO: 1288967 - RNA, 19 nt, Artificial Sequence
  Description of Artificial Sequence: Synthetic oligonucleotide
  Antisense strand to SEQ ID NO: 1288966
uaauuggcaacuaacaaau

SEQ ID NO: 1288968 - RNA, 19 nt, Artificial Sequence
  Description of Artificial Sequence: Synthetic oligonucleotide
  Sense strand starting at position 573 of SEQ ID NO: 1241651
ugaauugucuucuuaugau

SEQ ID NO: 1288969 - RNA, 19 nt, Artificial Sequence
  Description of Artificial Sequence: Synthetic oligonucleotide
  Antisense strand to SEQ ID NO: 1288968
aucauaagaagacaauuca

SEQ ID NO: 1288970 - RNA, 19 nt, Artificial Sequence
  Description of Artificial Sequence: Synthetic oligonucleotide
  Sense strand starting at position 579 of SEQ ID NO: 1241651
gucuucuuaugaucuugga

SEQ ID NO: 1288971 - RNA, 19 nt, Artificial Sequence
  Description of Artificial Sequence: Synthetic oligonucleotide
  Antisense strand to SEQ ID NO: 1288970
uccaagaucauaagaagac

SEQ ID NO: 1288972 - RNA, 19 nt, Artificial Sequence
  Description of Artificial Sequence: Synthetic oligonucleotide
  Sense strand starting at position 583 of SEQ ID NO: 1241651
ucuuaugaucuuggacaau

SEQ ID NO: 1288973 - RNA, 19 nt, Artificial Sequence
  Description of Artificial Sequence: Synthetic oligonucleotide
  Antisense strand to SEQ ID NO: 1288972
auuguccaagaucauaaga

SEQ ID NO: 1288974 - RNA, 19 nt, Artificial Sequence
  Description of Artificial Sequence: Synthetic oligonucleotide
  Sense strand starting at position 637 of SEQ ID NO: 1241651
auaagagacuuggacuaga

SEQ ID NO: 1288975 - RNA, 19 nt, Artificial Sequence
  Description of Artificial Sequence: Synthetic oligonucleotide
  Antisense strand to SEQ ID NO: 1288974
ucuaguccaagucucuuau

SEQ ID NO: 1288976 - RNA, 19 nt, Artificial Sequence
  Description of Artificial Sequence: Synthetic oligonucleotide
  Sense strand starting at position 1018 of SEQ ID NO: 1241651
ggacuucugaaaugauguu

SEQ ID NO: 1288977 - RNA, 19 nt, Artificial Sequence
  Description of Artificial Sequence: Synthetic oligonucleotide
  Antisense strand to SEQ ID NO: 1288976
aacaucauuucagaagucc

SEQ ID NO: 1288978 - RNA, 19 nt, Artificial Sequence
  Description of Artificial Sequence: Synthetic oligonucleotide
  Sense strand starting at position 1110 of SEQ ID NO: 1241651
caaguuaauuuggcuaguu

SEQ ID NO: 1288979 - RNA, 19 nt, Artificial Sequence
  Description of Artificial Sequence: Synthetic oligonucleotide
  Antisense strand to SEQ ID NO: 1288978
aacuagccaaauuaacuug

SEQ ID NO: 1288980 - RNA, 19 nt, Artificial Sequence
  Description of Artificial Sequence: Synthetic oligonucleotide
  Sense strand starting at position 1276 of SEQ ID NO: 1241651
aagaaagcccagugagaua

SEQ ID NO: 1288981 - RNA, 19 nt, Artificial Sequence
  Description of Artificial Sequence: Synthetic oligonucleotide
  Antisense strand to SEQ ID NO: 1288980
uaucucacugggcuuucuu

SEQ ID NO: 1288982 - RNA, 19 nt, Artificial Sequence
  Description of Artificial Sequence: Synthetic oligonucleotide
  Sense strand starting at position 1340 of SEQ ID NO: 1241651
aggcauuaucuuuaccaag

SEQ ID NO: 1288983 - RNA, 19 nt, Artificial Sequence
  Description of Artificial Sequence: Synthetic oligonucleotide
  Antisense strand to SEQ ID NO: 1288982
cuugguaaagauaaugccu

SEQ ID NO: 1288984 - RNA, 19 nt, Artificial Sequence
  Description of Artificial Sequence: Synthetic oligonucleotide
  Sense strand starting at position 1863 of SEQ ID NO: 1241651
gcagccuccgcuuugcaaa

SEQ ID NO: 1288985 - RNA, 19 nt, Artificial Sequence
  Description of Artificial Sequence: Synthetic oligonucleotide
  Antisense strand to SEQ ID NO: 1288984
uuugcaaagcggaggcugc

SEQ ID NO: 1288986 - RNA, 19 nt, Artificial Sequence
  Description of Artificial Sequence: Synthetic oligonucleotide
  Sense strand starting at position 2085 of SEQ ID NO: 1241651
cccugagcuugcuuaauaa

SEQ ID NO: 1288987 - RNA, 19 nt, Artificial Sequence
  Description of Artificial Sequence: Synthetic oligonucleotide
  Antisense strand to SEQ ID NO: 1288986
uuauuaagcaagcucaggg

SEQ ID NO: 1288988 - RNA, 19 nt, Artificial Sequence
  Description of Artificial Sequence: Synthetic oligonucleotide
  Sense strand starting at position 2094 of SEQ ID NO: 1241651
ugcuuaauaaccggaggau

SEQ ID NO: 1288989 - RNA, 19 nt, Artificial Sequence
  Description of Artificial Sequence: Synthetic oligonucleotide
  Antisense strand to SEQ ID NO: 1288988
auccuccgguuauuaagca

SEQ ID NO: 1288990 - RNA, 19 nt, Artificial Sequence
  Description of Artificial Sequence: Synthetic oligonucleotide
  Sense strand starting at position 2095 of SEQ ID NO: 1241651
gcuuaauaaccggaggauu

SEQ ID NO: 1288991 - RNA, 19 nt, Artificial Sequence
  Description of Artificial Sequence: Synthetic oligonucleotide
  Antisense strand to SEQ ID NO: 1288990
aauccuccgguuauuaagc

SEQ ID NO: 1288992 - RNA, 19 nt, Artificial Sequence
  Description of Artificial Sequence: Synthetic oligonucleotide
  Sense strand starting at position 2348 of SEQ ID NO: 1241651
accuuagcucaccgagaga

SEQ ID NO: 1288993 - RNA, 19 nt, Artificial Sequence
  Description of Artificial Sequence: Synthetic oligonucleotide
  Antisense strand to SEQ ID NO: 1288992
ucucucggugagcuaaggu

SEQ ID NO: 1288994 - RNA, 19 nt, Artificial Sequence
  Description of Artificial Sequence: Synthetic oligonucleotide
  Sense strand starting at position 2351 of SEQ ID NO: 1241651
uuagcucaccgagagaaau

SEQ ID NO: 1288995 - RNA, 19 nt, Artificial Sequence
  Description of Artificial Sequence: Synthetic oligonucleotide
  Antisense strand to SEQ ID NO: 1288994
auuucucucggugagcuaa

SEQ ID NO: 1288996 - RNA, 19 nt, Artificial Sequence
  Description of Artificial Sequence: Synthetic oligonucleotide
  Sense strand starting at position 2401 of SEQ ID NO: 1241651
gguugauuccgagaaucac

SEQ ID NO: 1288997 - RNA, 19 nt, Artificial Sequence
  Description of Artificial Sequence: Synthetic oligonucleotide
  Antisense strand to SEQ ID NO: 1288996
gugauucucggaaucaacc

SEQ ID NO: 1288998 - RNA, 19 nt, Artificial Sequence
  Description of Artificial Sequence: Synthetic oligonucleotide
  Sense strand starting at position 2466 of SEQ ID NO: 1241651
gcaacaaauguuuacugaa

SEQ ID NO: 1288999 - RNA, 19 nt, Artificial Sequence
  Description of Artificial Sequence: Synthetic oligonucleotide
  Antisense strand to SEQ ID NO: 1288998
uucaguaaacauuuguugc

SEQ ID NO: 1289000 - RNA, 19 nt, Artificial Sequence
  Description of Artificial Sequence: Synthetic oligonucleotide
  Sense strand starting at position 2496 of SEQ ID NO: 1241651
gccagacacaauugagaug

SEQ ID NO: 1289001 - RNA, 19 nt, Artificial Sequence
  Description of Artificial Sequence: Synthetic oligonucleotide
  Antisense strand to SEQ ID NO: 1289000
caucucaauugugucuggc

SEQ ID NO: 1289002 - RNA, 19 nt, Artificial Sequence
  Description of Artificial Sequence: Synthetic oligonucleotide
  Sense strand starting at position 2505 of SEQ ID NO: 1241651
aauugagaugcugguaaua

SEQ ID NO: 1289003 - RNA, 19 nt, Artificial Sequence
  Description of Artificial Sequence: Synthetic oligonucleotide
  Antisense strand to SEQ ID NO: 1289002
uauuaccagcaucucaauu

SEQ ID NO: 1289004 - RNA, 19 nt, Artificial Sequence
  Description of Artificial Sequence: Synthetic oligonucleotide
  Sense strand starting at position 2517 of SEQ ID NO: 1241651
gguaauaugaugcaggcaa

SEQ ID NO: 1289005 - RNA, 19 nt, Artificial Sequence
  Description of Artificial Sequence: Synthetic oligonucleotide
  Antisense strand to SEQ ID NO: 1289004
uugccugcaucauauuacc

SEQ ID NO: 1289006 - RNA, 19 nt, Artificial Sequence
  Description of Artificial Sequence: Synthetic oligonucleotide
  Sense strand starting at position 2521 of SEQ ID NO: 1241651
auaugaugcaggcaaagua

SEQ ID NO: 1289007 - RNA, 19 nt, Artificial Sequence
  Description of Artificial Sequence: Synthetic oligonucleotide
  Antisense strand to SEQ ID NO: 1289006
uacuuugccugcaucauau

SEQ ID NO: 1289008 - RNA, 19 nt, Artificial Sequence
  Description of Artificial Sequence: Synthetic oligonucleotide
  Sense strand starting at position 2546 of SEQ ID NO: 1241651
gaucccuggcccgaaagaa

SEQ ID NO: 1289009 - RNA, 19 nt, Artificial Sequence
  Description of Artificial Sequence: Synthetic oligonucleotide
  Antisense strand to SEQ ID NO: 1289008
uucuuucgggccagggauc

SEQ ID NO: 1289010 - RNA, 19 nt, Artificial Sequence
  Description of Artificial Sequence: Synthetic oligonucleotide
  Sense strand starting at position 2762 of SEQ ID NO: 1241651
agagcuugguggucucaga

SEQ ID NO: 1289011 - RNA, 19 nt, Artificial Sequence
  Description of Artificial Sequence: Synthetic oligonucleotide
  Antisense strand to SEQ ID NO: 1289010
ucugagaccaccaagcucu

SEQ ID NO: 1289012 - RNA, 19 nt, Artificial Sequence
  Description of Artificial Sequence: Synthetic oligonucleotide
  Sense strand starting at position 2807 of SEQ ID NO: 1241651
gaaauuaagugcccaugga

SEQ ID NO: 1289013 - RNA, 19 nt, Artificial Sequence
  Description of Artificial Sequence: Synthetic oligonucleotide
  Antisense strand to SEQ ID NO: 1289012
uccaugggcacuuaauuuc

SEQ ID NO: 1289014 - RNA, 19 nt, Artificial Sequence
  Description of Artificial Sequence: Synthetic oligonucleotide
  Sense strand starting at position 2811 of SEQ ID NO: 1241651
uuaagugcccauggaauua

SEQ ID NO: 1289015 - RNA, 19 nt, Artificial Sequence
  Description of Artificial Sequence: Synthetic oligonucleotide
  Antisense strand to SEQ ID NO: 1289014
uaauuccaugggcacuuaa

SEQ ID NO: 1289016 - RNA, 19 nt, Artificial Sequence
  Description of Artificial Sequence: Synthetic oligonucleotide
  Sense strand starting at position 2857 of SEQ ID NO: 1241651
cugcaaaguuuagccauau

SEQ ID NO: 1289017 - RNA, 19 nt, Artificial Sequence
  Description of Artificial Sequence: Synthetic oligonucleotide
  Antisense strand to SEQ ID NO: 1289016
auauggcuaaacuuugcag

SEQ ID NO: 1289018 - RNA, 19 nt, Artificial Sequence
  Description of Artificial Sequence: Synthetic oligonucleotide
  Sense strand starting at position 2907 of SEQ ID NO: 1241651
gucccuguccuugaaagcu

SEQ ID NO: 1289019 - RNA, 19 nt, Artificial Sequence
  Description of Artificial Sequence: Synthetic oligonucleotide
  Antisense strand to SEQ ID NO: 1289018
agcuuucaaggacagggac

SEQ ID NO: 1289020 - RNA, 19 nt, Artificial Sequence
  Description of Artificial Sequence: Synthetic oligonucleotide
  Sense strand starting at position 3266 of SEQ ID NO: 1241651
cuauaauguguguacuaaa

SEQ ID NO: 1289021 - RNA, 19 nt, Artificial Sequence
  Description of Artificial Sequence: Synthetic oligonucleotide
  Antisense strand to SEQ ID NO: 1289020
uuuaguacacacauuauag

SEQ ID NO: 1289022 - RNA, 19 nt, Artificial Sequence
  Description of Artificial Sequence: Synthetic oligonucleotide
  Sense strand starting at position 3303 of SEQ ID NO: 1241651
agaggauguuugcuuguca

SEQ ID NO: 1289023 - RNA, 19 nt, Artificial Sequence
  Description of Artificial Sequence: Synthetic oligonucleotide
  Antisense strand to SEQ ID NO: 1289022
ugacaagcaaacauccucu

SEQ ID NO: 1289024 - RNA, 19 nt, Artificial Sequence
  Description of Artificial Sequence: Synthetic oligonucleotide
  Sense strand starting at position 3304 of SEQ ID NO: 1241651
gaggauguuugcuugucaa

SEQ ID NO: 1289025 - RNA, 19 nt, Artificial Sequence
  Description of Artificial Sequence: Synthetic oligonucleotide
  Antisense strand to SEQ ID NO: 1289024
uugacaagcaaacauccuc

SEQ ID NO: 1289026 - RNA, 19 nt, Artificial Sequence
  Description of Artificial Sequence: Synthetic oligonucleotide
  Sense strand starting at position 3444 of SEQ ID NO: 1241651
uguuguuauaaagguggaa

SEQ ID NO: 1289027 - RNA, 19 nt, Artificial Sequence
  Description of Artificial Sequence: Synthetic oligonucleotide
  Antisense strand to SEQ ID NO: 1289026
uuccaccuuuauaacaaca

SEQ ID NO: 1289028 - RNA, 19 nt, Artificial Sequence
  Description of Artificial Sequence: Synthetic oligonucleotide
  Sense strand starting at position 3446 of SEQ ID NO: 1241651
uuguuauaaagguggaaua

SEQ ID NO: 1289029 - RNA, 19 nt, Artificial Sequence
  Description of Artificial Sequence: Synthetic oligonucleotide
  Antisense strand to SEQ ID NO: 1289028
uauuccaccuuuauaacaa

SEQ ID NO: 1289030 - RNA, 19 nt, Artificial Sequence
  Description of Artificial Sequence: Synthetic oligonucleotide
  Sense strand starting at position 3447 of SEQ ID NO: 1241651
uguuauaaagguggaauaa

SEQ ID NO: 1289031 - RNA, 19 nt, Artificial Sequence
  Description of Artificial Sequence: Synthetic oligonucleotide
  Antisense strand to SEQ ID NO: 1289030
uuauuccaccuuuauaaca

SEQ ID NO: 1289032 - RNA, 19 nt, Artificial Sequence
  Description of Artificial Sequence: Synthetic oligonucleotide
  Sense strand starting at position 3836 of SEQ ID NO: 1241651
augaguuugguaggacaca

SEQ ID NO: 1289033 - RNA, 19 nt, Artificial Sequence
  Description of Artificial Sequence: Synthetic oligonucleotide
  Antisense strand to SEQ ID NO: 1289032
uguguccuaccaaacucau

SEQ ID NO: 1289034 - RNA, 19 nt, Artificial Sequence
  Description of Artificial Sequence: Synthetic oligonucleotide
  Sense strand starting at position 3902 of SEQ ID NO: 1241651
ggaauccagcgaggaauaa

SEQ ID NO: 1289035 - RNA, 19 nt, Artificial Sequence
  Description of Artificial Sequence: Synthetic oligonucleotide
  Antisense strand to SEQ ID NO: 1289034
uuauuccucgcuggauucc

SEQ ID NO: 1289036 - RNA, 19 nt, Artificial Sequence
  Description of Artificial Sequence: Synthetic oligonucleotide
  Sense strand starting at position 3929 of SEQ ID NO: 1241651
auaguaccuuugguagauu

SEQ ID NO: 1289037 - RNA, 19 nt, Artificial Sequence
  Description of Artificial Sequence: Synthetic oligonucleotide
  Antisense strand to SEQ ID NO: 1289036
aaucuaccaaagguacuau

SEQ ID NO: 1289038 - RNA, 19 nt, Artificial Sequence
  Description of Artificial Sequence: Synthetic oligonucleotide
  Sense strand starting at position 77 of SEQ ID NO: 1241652
ugccuuuaccauugaaaug

SEQ ID NO: 1289039 - RNA, 19 nt, Artificial Sequence
  Description of Artificial Sequence: Synthetic oligonucleotide
  Antisense strand to SEQ ID NO: 1289038
cauuucaaugguaaaggca

SEQ ID NO: 1289040 - RNA, 19 nt, Artificial Sequence
  Description of Artificial Sequence: Synthetic oligonucleotide
  Sense strand starting at position 98 of SEQ ID NO: 1241652
guggcacagcuuuaacuau

SEQ ID NO: 1289041 - RNA, 19 nt, Artificial Sequence
  Description of Artificial Sequence: Synthetic oligonucleotide
  Antisense strand to SEQ ID NO: 1289040
auaguuaaagcugugccac

SEQ ID NO: 1289042 - RNA, 19 nt, Artificial Sequence
  Description of Artificial Sequence: Synthetic oligonucleotide
  Sense strand starting at position 385 of SEQ ID NO: 1241652
uucucuuuagugugaagaa

SEQ ID NO: 1289043 - RNA, 19 nt, Artificial Sequence
  Description of Artificial Sequence: Synthetic oligonucleotide
  Antisense strand to SEQ ID NO: 1289042
uucuucacacuaaagagaa

SEQ ID NO: 1289044 - RNA, 19 nt, Artificial Sequence
  Description of Artificial Sequence: Synthetic oligonucleotide
  Sense strand starting at position 406 of SEQ ID NO: 1241652
ccucauggagauuguuaau

SEQ ID NO: 1289045 - RNA, 19 nt, Artificial Sequence
  Description of Artificial Sequence: Synthetic oligonucleotide
  Antisense strand to SEQ ID NO: 1289044
auuaacaaucuccaugagg

SEQ ID NO: 1289046 - RNA, 19 nt, Artificial Sequence
  Description of Artificial Sequence: Synthetic oligonucleotide
  Sense strand starting at position 412 of SEQ ID NO: 1241652
ggagauuguuaaucuaugu

SEQ ID NO: 1289047 - RNA, 19 nt, Artificial Sequence
  Description of Artificial Sequence: Synthetic oligonucleotide
  Antisense strand to SEQ ID NO: 1289046
acauagauuaacaaucucc

SEQ ID NO: 1289048 - RNA, 19 nt, Artificial Sequence
  Description of Artificial Sequence: Synthetic oligonucleotide
  Sense strand starting at position 425 of SEQ ID NO: 1241652
cuauguauaccugagcugu

SEQ ID NO: 1289049 - RNA, 19 nt, Artificial Sequence
  Description of Artificial Sequence: Synthetic oligonucleotide
  Antisense strand to SEQ ID NO: 1289048
acagcucagguauacauag

SEQ ID NO: 1289050 - RNA, 19 nt, Artificial Sequence
  Description of Artificial Sequence: Synthetic oligonucleotide
  Sense strand starting at position 436 of SEQ ID NO: 1241652
ugagcuguuccagaccuaa

SEQ ID NO: 1289051 - RNA, 19 nt, Artificial Sequence
  Description of Artificial Sequence: Synthetic oligonucleotide
  Antisense strand to SEQ ID NO: 1289050
uuaggucuggaacagcuca

SEQ ID NO: 1289052 - RNA, 19 nt, Artificial Sequence
  Description of Artificial Sequence: Synthetic oligonucleotide
  Sense strand starting at position 586 of SEQ ID NO: 1241652
ugcuucgagaguuaaguau

SEQ ID NO: 1289053 - RNA, 19 nt, Artificial Sequence
  Description of Artificial Sequence: Synthetic oligonucleotide
  Antisense strand to SEQ ID NO: 1289052
auacuuaacucucgaagca

SEQ ID NO: 1289054 - RNA, 19 nt, Artificial Sequence
  Description of Artificial Sequence: Synthetic oligonucleotide
  Sense strand starting at position 590 of SEQ ID NO: 1241652
ucgagaguuaaguauaguc

SEQ ID NO: 1289055 - RNA, 19 nt, Artificial Sequence
  Description of Artificial Sequence: Synthetic oligonucleotide
  Antisense strand to SEQ ID NO: 1289054
gacuauacuuaacucucga

SEQ ID NO: 1289056 - RNA, 19 nt, Artificial Sequence
  Description of Artificial Sequence: Synthetic oligonucleotide
  Sense strand starting at position 592 of SEQ ID NO: 1241652
gagaguuaaguauagucua

SEQ ID NO: 1289057 - RNA, 19 nt, Artificial Sequence
  Description of Artificial Sequence: Synthetic oligonucleotide
  Antisense strand to SEQ ID NO: 1289056
uagacuauacuuaacucuc

SEQ ID NO: 1289058 - RNA, 19 nt, Artificial Sequence
  Description of Artificial Sequence: Synthetic oligonucleotide
  Sense strand starting at position 595 of SEQ ID NO: 1241652
aguuaaguauagucuaaag

SEQ ID NO: 1289059 - RNA, 19 nt, Artificial Sequence
  Description of Artificial Sequence: Synthetic oligonucleotide
  Antisense strand to SEQ ID NO: 1289058
cuuuagacuauacuuaacu

SEQ ID NO: 1289060 - RNA, 19 nt, Artificial Sequence
  Description of Artificial Sequence: Synthetic oligonucleotide
  Sense strand starting at position 669 of SEQ ID NO: 1241652
aagaaugauguuggcagua

SEQ ID NO: 1289061 - RNA, 19 nt, Artificial Sequence
  Description of Artificial Sequence: Synthetic oligonucleotide
  Antisense strand to SEQ ID NO: 1289060
uacugccaacaucauucuu

SEQ ID NO: 1289062 - RNA, 19 nt, Artificial Sequence
  Description of Artificial Sequence: Synthetic oligonucleotide
  Sense strand starting at position 674 of SEQ ID NO: 1241652
ugauguuggcaguaaagua

SEQ ID NO: 1289063 - RNA, 19 nt, Artificial Sequence
  Description of Artificial Sequence: Synthetic oligonucleotide
  Antisense strand to SEQ ID NO: 1289062
uacuuuacugccaacauca

SEQ ID NO: 1289064 - RNA, 19 nt, Artificial Sequence
  Description of Artificial Sequence: Synthetic oligonucleotide
  Sense strand starting at position 688 of SEQ ID NO: 1241652
aaguaauuagcauaggguu

SEQ ID NO: 1289065 - RNA, 19 nt, Artificial Sequence
  Description of Artificial Sequence: Synthetic oligonucleotide
  Antisense strand to SEQ ID NO: 1289064
aacccuaugcuaauuacuu

SEQ ID NO: 1289066 - RNA, 19 nt, Artificial Sequence
  Description of Artificial Sequence: Synthetic oligonucleotide
  Sense strand starting at position 714 of SEQ ID NO: 1241652
uugaaaugguaucucaaac

SEQ ID NO: 1289067 - RNA, 19 nt, Artificial Sequence
  Description of Artificial Sequence: Synthetic oligonucleotide
  Antisense strand to SEQ ID NO: 1289066
guuugagauaccauuucaa

SEQ ID NO: 1289068 - RNA, 19 nt, Artificial Sequence
  Description of Artificial Sequence: Synthetic oligonucleotide
  Sense strand starting at position 776 of SEQ ID NO: 1241652
gcagaaugacguuauggca

SEQ ID NO: 1289069 - RNA, 19 nt, Artificial Sequence
  Description of Artificial Sequence: Synthetic oligonucleotide
  Antisense strand to SEQ ID NO: 1289068
ugccauaacgucauucugc

SEQ ID NO: 1289070 - RNA, 19 nt, Artificial Sequence
  Description of Artificial Sequence: Synthetic oligonucleotide
  Sense strand starting at position 784 of SEQ ID NO: 1241652
acguuauggcauugauuua

SEQ ID NO: 1289071 - RNA, 19 nt, Artificial Sequence
  Description of Artificial Sequence: Synthetic oligonucleotide
  Antisense strand to SEQ ID NO: 1289070
uaaaucaaugccauaacgu

SEQ ID NO: 1289072 - RNA, 19 nt, Artificial Sequence
  Description of Artificial Sequence: Synthetic oligonucleotide
  Sense strand starting at position 832 of SEQ ID NO: 1241652
auaaccaucugggaaauuu

SEQ ID NO: 1289073 - RNA, 19 nt, Artificial Sequence
  Description of Artificial Sequence: Synthetic oligonucleotide
  Antisense strand to SEQ ID NO: 1289072
aaauuucccagaugguuau

SEQ ID NO: 1289074 - RNA, 19 nt, Artificial Sequence
  Description of Artificial Sequence: Synthetic oligonucleotide
  Sense strand starting at position 896 of SEQ ID NO: 1241652
cauuuauacuccguguugu

SEQ ID NO: 1289075 - RNA, 19 nt, Artificial Sequence
  Description of Artificial Sequence: Synthetic oligonucleotide
  Antisense strand to SEQ ID NO: 1289074
acaacacggaguauaaaug

SEQ ID NO: 1289076 - RNA, 19 nt, Artificial Sequence
  Description of Artificial Sequence: Synthetic oligonucleotide
  Sense strand starting at position 897 of SEQ ID NO: 1241652
auuuauacuccguguuguc

SEQ ID NO: 1289077 - RNA, 19 nt, Artificial Sequence
  Description of Artificial Sequence: Synthetic oligonucleotide
  Antisense strand to SEQ ID NO: 1289076
gacaacacggaguauaaau

SEQ ID NO: 1289078 - RNA, 19 nt, Artificial Sequence
  Description of Artificial Sequence: Synthetic oligonucleotide
  Sense strand starting at position 1257 of SEQ ID NO: 1241652
ccgcuuucucaggaagguu

SEQ ID NO: 1289079 - RNA, 19 nt, Artificial Sequence
  Description of Artificial Sequence: Synthetic oligonucleotide
  Antisense strand to SEQ ID NO: 1289078
aaccuuccugagaaagcgg

SEQ ID NO: 1289080 - RNA, 19 nt, Artificial Sequence
  Description of Artificial Sequence: Synthetic oligonucleotide
  Sense strand starting at position 1369 of SEQ ID NO: 1241652
ucaacauccuggucuggau

SEQ ID NO: 1289081 - RNA, 19 nt, Artificial Sequence
  Description of Artificial Sequence: Synthetic oligonucleotide
  Antisense strand to SEQ ID NO: 1289080
auccagaccaggauguuga

SEQ ID NO: 1289082 - RNA, 19 nt, Artificial Sequence
  Description of Artificial Sequence: Synthetic oligonucleotide
  Sense strand starting at position 1406 of SEQ ID NO: 1241652
aagugacagcuccagguuu

SEQ ID NO: 1289083 - RNA, 19 nt, Artificial Sequence
  Description of Artificial Sequence: Synthetic oligonucleotide
  Antisense strand to SEQ ID NO: 1289082
aaaccuggagcugucacuu

SEQ ID NO: 1289084 - RNA, 19 nt, Artificial Sequence
  Description of Artificial Sequence: Synthetic oligonucleotide
  Sense strand starting at position 1539 of SEQ ID NO: 1241652
gucaauuccgcguucguga

SEQ ID NO: 1289085 - RNA, 19 nt, Artificial Sequence
  Description of Artificial Sequence: Synthetic oligonucleotide
  Antisense strand to SEQ ID NO: 1289084
ucacgaacgcggaauugac

SEQ ID NO: 1289086 - RNA, 19 nt, Artificial Sequence
  Description of Artificial Sequence: Synthetic oligonucleotide
  Sense strand starting at position 2247 of SEQ ID NO: 1241652
gaaagaggcucauccgaga

SEQ ID NO: 1289087 - RNA, 19 nt, Artificial Sequence
  Description of Artificial Sequence: Synthetic oligonucleotide
  Antisense strand to SEQ ID NO: 1289086
ucucggaugagccucuuuc

SEQ ID NO: 1289088 - RNA, 19 nt, Artificial Sequence
  Description of Artificial Sequence: Synthetic oligonucleotide
  Sense strand starting at position 2252 of SEQ ID NO: 1241652
aggcucauccgagacuaca

SEQ ID NO: 1289089 - RNA, 19 nt, Artificial Sequence
  Description of Artificial Sequence: Synthetic oligonucleotide
  Antisense strand to SEQ ID NO: 1289088
uguagucucggaugagccu

SEQ ID NO: 1289090 - RNA, 19 nt, Artificial Sequence
  Description of Artificial Sequence: Synthetic oligonucleotide
  Sense strand starting at position 2316 of SEQ ID NO: 1241652
ggaaacguaguccaucgua

SEQ ID NO: 1289091 - RNA, 19 nt, Artificial Sequence
  Description of Artificial Sequence: Synthetic oligonucleotide
  Antisense strand to SEQ ID NO: 1289090
uacgauggacuacguuucc

SEQ ID NO: 1289092 - RNA, 19 nt, Artificial Sequence
  Description of Artificial Sequence: Synthetic oligonucleotide
  Sense strand starting at position 2354 of SEQ ID NO: 1241652
gggugacuguugaaguuag

SEQ ID NO: 1289093 - RNA, 19 nt, Artificial Sequence
  Description of Artificial Sequence: Synthetic oligonucleotide
  Antisense strand to SEQ ID NO: 1289092
cuaacuucaacagucaccc

SEQ ID NO: 1289094 - RNA, 19 nt, Artificial Sequence
  Description of Artificial Sequence: Synthetic oligonucleotide
  Sense strand starting at position 2515 of SEQ ID NO: 1241652
uuaaauugggcauagugau

SEQ ID NO: 1289095 - RNA, 19 nt, Artificial Sequence
  Description of Artificial Sequence: Synthetic oligonucleotide
  Antisense strand to SEQ ID NO: 1289094
aucacuaugcccaauuuaa

SEQ ID NO: 1289096 - RNA, 19 nt, Artificial Sequence
  Description of Artificial Sequence: Synthetic oligonucleotide
  Sense strand starting at position 2681 of SEQ ID NO: 1241652
cggcacagauuaucucaau

SEQ ID NO: 1289097 - RNA, 19 nt, Artificial Sequence
  Description of Artificial Sequence: Synthetic oligonucleotide
  Antisense strand to SEQ ID NO: 1289096
auugagauaaucugugccg

SEQ ID NO: 1289098 - RNA, 19 nt, Artificial Sequence
  Description of Artificial Sequence: Synthetic oligonucleotide
  Sense strand starting at position 2682 of SEQ ID NO: 1241652
ggcacagauuaucucaaua

SEQ ID NO: 1289099 - RNA, 19 nt, Artificial Sequence
  Description of Artificial Sequence: Synthetic oligonucleotide
  Antisense strand to SEQ ID NO: 1289098
uauugagauaaucugugcc

SEQ ID NO: 1289100 - RNA, 19 nt, Artificial Sequence
  Description of Artificial Sequence: Synthetic oligonucleotide
  Sense strand starting at position 2869 of SEQ ID NO: 1241652
agaggugauagugauugca

SEQ ID NO: 1289101 - RNA, 19 nt, Artificial Sequence
  Description of Artificial Sequence: Synthetic oligonucleotide
  Antisense strand to SEQ ID NO: 1289100
ugcaaucacuaucaccucu

SEQ ID NO: 1289102 - RNA, 19 nt, Artificial Sequence
  Description of Artificial Sequence: Synthetic oligonucleotide
  Sense strand starting at position 2871 of SEQ ID NO: 1241652
aggugauagugauugcauc

SEQ ID NO: 1289103 - RNA, 19 nt, Artificial Sequence
  Description of Artificial Sequence: Synthetic oligonucleotide
  Antisense strand to SEQ ID NO: 1289102
gaugcaaucacuaucaccu

SEQ ID NO: 1289104 - RNA, 19 nt, Artificial Sequence
  Description of Artificial Sequence: Synthetic oligonucleotide
  Sense strand starting at position 2909 of SEQ ID NO: 1241652
auguaauaagcacgaaauc

SEQ ID NO: 1289105 - RNA, 19 nt, Artificial Sequence
  Description of Artificial Sequence: Synthetic oligonucleotide
  Antisense strand to SEQ ID NO: 1289104
gauuucgugcuuauuacau

SEQ ID NO: 1289106 - RNA, 19 nt, Artificial Sequence
  Description of Artificial Sequence: Synthetic oligonucleotide
  Sense strand starting at position 3111 of SEQ ID NO: 1241652
gcauuugucuuccuuccuu

SEQ ID NO: 1289107 - RNA, 19 nt, Artificial Sequence
  Description of Artificial Sequence: Synthetic oligonucleotide
  Antisense strand to SEQ ID NO: 1289106
aaggaaggaagacaaaugc

SEQ ID NO: 1289108 - RNA, 19 nt, Artificial Sequence
  Description of Artificial Sequence: Synthetic oligonucleotide
  Sense strand starting at position 3383 of SEQ ID NO: 1241652
guucuaucaguuuaaacua

SEQ ID NO: 1289109 - RNA, 19 nt, Artificial Sequence
  Description of Artificial Sequence: Synthetic oligonucleotide
  Antisense strand to SEQ ID NO: 1289108
uaguuuaaacugauagaac

SEQ ID NO: 1289110 - RNA, 19 nt, Artificial Sequence
  Description of Artificial Sequence: Synthetic oligonucleotide
  Sense strand starting at position 3479 of SEQ ID NO: 1241652
uuucucucaccuggaugau

SEQ ID NO: 1289111 - RNA, 19 nt, Artificial Sequence
  Description of Artificial Sequence: Synthetic oligonucleotide
  Antisense strand to SEQ ID NO: 1289110
aucauccaggugagagaaa

SEQ ID NO: 1289112 - RNA, 19 nt, Artificial Sequence
  Description of Artificial Sequence: Synthetic oligonucleotide
  Sense strand starting at position 3491 of SEQ ID NO: 1241652
ggaugaugcaccugaguuc

SEQ ID NO: 1289113 - RNA, 19 nt, Artificial Sequence
  Description of Artificial Sequence: Synthetic oligonucleotide
  Antisense strand to SEQ ID NO: 1289112
gaacucaggugcaucaucc

SEQ ID NO: 1289114 - RNA, 19 nt, Artificial Sequence
  Description of Artificial Sequence: Synthetic oligonucleotide
  Sense strand starting at position 3741 of SEQ ID NO: 1241652
cagugauuaucuguuugau

SEQ ID NO: 1289115 - RNA, 19 nt, Artificial Sequence
  Description of Artificial Sequence: Synthetic oligonucleotide
  Antisense strand to SEQ ID NO: 1289114
aucaaacagauaaucacug

SEQ ID NO: 1289116 - RNA, 19 nt, Artificial Sequence
  Description of Artificial Sequence: Synthetic oligonucleotide
  Sense strand starting at position 3743 of SEQ ID NO: 1241652
gugauuaucuguuugauua

SEQ ID NO: 1289117 - RNA, 19 nt, Artificial Sequence
  Description of Artificial Sequence: Synthetic oligonucleotide
  Antisense strand to SEQ ID NO: 1289116
uaaucaaacagauaaucac

SEQ ID NO: 1289118 - RNA, 19 nt, Artificial Sequence
  Description of Artificial Sequence: Synthetic oligonucleotide
  Sense strand starting at position 35 of SEQ ID NO: 1241653
uuacuaacaccugguguuu

SEQ ID NO: 1289119 - RNA, 19 nt, Artificial Sequence
  Description of Artificial Sequence: Synthetic oligonucleotide
  Antisense strand to SEQ ID NO: 1289118
aaacaccagguguuaguaa

SEQ ID NO: 1289120 - RNA, 19 nt, Artificial Sequence
  Description of Artificial Sequence: Synthetic oligonucleotide
  Sense strand starting at position 92 of SEQ ID NO: 1241653
cccuauaaggugcaaauua

SEQ ID NO: 1289121 - RNA, 19 nt, Artificial Sequence
  Description of Artificial Sequence: Synthetic oligonucleotide
  Antisense strand to SEQ ID NO: 1289120
uaauuugcaccuuauaggg

SEQ ID NO: 1289122 - RNA, 19 nt, Artificial Sequence
  Description of Artificial Sequence: Synthetic oligonucleotide
  Sense strand starting at position 177 of SEQ ID NO: 1241653
agagcuacuugcuuacaaa

SEQ ID NO: 1289123 - RNA, 19 nt, Artificial Sequence
  Description of Artificial Sequence: Synthetic oligonucleotide
  Antisense strand to SEQ ID NO: 1289122
uuuguaagcaaguagcucu

SEQ ID NO: 1289124 - RNA, 19 nt, Artificial Sequence
  Description of Artificial Sequence: Synthetic oligonucleotide
  Sense strand starting at position 257 of SEQ ID NO: 1241653
auugaaucaucucugugua

SEQ ID NO: 1289125 - RNA, 19 nt, Artificial Sequence
  Description of Artificial Sequence: Synthetic oligonucleotide
  Antisense strand to SEQ ID NO: 1289124
uacacagagaugauucaau

SEQ ID NO: 1289126 - RNA, 19 nt, Artificial Sequence
  Description of Artificial Sequence: Synthetic oligonucleotide
  Sense strand starting at position 258 of SEQ ID NO: 1241653
uugaaucaucucuguguac

SEQ ID NO: 1289127 - RNA, 19 nt, Artificial Sequence
  Description of Artificial Sequence: Synthetic oligonucleotide
  Antisense strand to SEQ ID NO: 1289126
guacacagagaugauucaa

SEQ ID NO: 1289128 - RNA, 19 nt, Artificial Sequence
  Description of Artificial Sequence: Synthetic oligonucleotide
  Sense strand starting at position 259 of SEQ ID NO: 1241653
ugaaucaucucuguguaca

SEQ ID NO: 1289129 - RNA, 19 nt, Artificial Sequence
  Description of Artificial Sequence: Synthetic oligonucleotide
  Antisense strand to SEQ ID NO: 1289128
uguacacagagaugauuca

SEQ ID NO: 1289130 - RNA, 19 nt, Artificial Sequence
  Description of Artificial Sequence: Synthetic oligonucleotide
  Sense strand starting at position 286 of SEQ ID NO: 1241653
gccagaagucuugaaucag

SEQ ID NO: 1289131 - RNA, 19 nt, Artificial Sequence
  Description of Artificial Sequence: Synthetic oligonucleotide
  Antisense strand to SEQ ID NO: 1289130
cugauucaagacuucuggc

SEQ ID NO: 1289132 - RNA, 19 nt, Artificial Sequence
  Description of Artificial Sequence: Synthetic oligonucleotide
  Sense strand starting at position 465 of SEQ ID NO: 1241653
aaagguggacuuugucaua

SEQ ID NO: 1289133 - RNA, 19 nt, Artificial Sequence
  Description of Artificial Sequence: Synthetic oligonucleotide
  Antisense strand to SEQ ID NO: 1289132
uaugacaaaguccaccuuu

SEQ ID NO: 1289134 - RNA, 19 nt, Artificial Sequence
  Description of Artificial Sequence: Synthetic oligonucleotide
  Sense strand starting at position 476 of SEQ ID NO: 1241653
uugucauagagcuauugug

SEQ ID NO: 1289135 - RNA, 19 nt, Artificial Sequence
  Description of Artificial Sequence: Synthetic oligonucleotide
  Antisense strand to SEQ ID NO: 1289134
cacaauagcucuaugacaa

SEQ ID NO: 1289136 - RNA, 19 nt, Artificial Sequence
  Description of Artificial Sequence: Synthetic oligonucleotide
  Sense strand starting at position 535 of SEQ ID NO: 1241653
cagcaaguucucgagaaua

SEQ ID NO: 1289137 - RNA, 19 nt, Artificial Sequence
  Description of Artificial Sequence: Synthetic oligonucleotide
  Antisense strand to SEQ ID NO: 1289136
uauucucgagaacuugcug

SEQ ID NO: 1289138 - RNA, 19 nt, Artificial Sequence
  Description of Artificial Sequence: Synthetic oligonucleotide
  Sense strand starting at position 537 of SEQ ID NO: 1241653
gcaaguucucgagaauacc

SEQ ID NO: 1289139 - RNA, 19 nt, Artificial Sequence
  Description of Artificial Sequence: Synthetic oligonucleotide
  Antisense strand to SEQ ID NO: 1289138
gguauucucgagaacuugc

SEQ ID NO: 1289140 - RNA, 19 nt, Artificial Sequence
  Description of Artificial Sequence: Synthetic oligonucleotide
  Sense strand starting at position 586 of SEQ ID NO: 1241653
agaggcguucuauaggaaa

SEQ ID NO: 1289141 - RNA, 19 nt, Artificial Sequence
  Description of Artificial Sequence: Synthetic oligonucleotide
  Antisense strand to SEQ ID NO: 1289140
uuuccuauagaacgccucu

SEQ ID NO: 1289142 - RNA, 19 nt, Artificial Sequence
  Description of Artificial Sequence: Synthetic oligonucleotide
  Sense strand starting at position 588 of SEQ ID NO: 1241653
aggcguucuauaggaaacu

SEQ ID NO: 1289143 - RNA, 19 nt, Artificial Sequence
  Description of Artificial Sequence: Synthetic oligonucleotide
  Antisense strand to SEQ ID NO: 1289142
aguuuccuauagaacgccu

SEQ ID NO: 1289144 - RNA, 19 nt, Artificial Sequence
  Description of Artificial Sequence: Synthetic oligonucleotide
  Sense strand starting at position 723 of SEQ ID NO: 1241653
agucaaagguuaucauguu

SEQ ID NO: 1289145 - RNA, 19 nt, Artificial Sequence
  Description of Artificial Sequence: Synthetic oligonucleotide
  Antisense strand to SEQ ID NO: 1289144
aacaugauaaccuuugacu

SEQ ID NO: 1289146 - RNA, 19 nt, Artificial Sequence
  Description of Artificial Sequence: Synthetic oligonucleotide
  Sense strand starting at position 913 of SEQ ID NO: 1241653
cgaauuauggauggugugu

SEQ ID NO: 1289147 - RNA, 19 nt, Artificial Sequence
  Description of Artificial Sequence: Synthetic oligonucleotide
  Antisense strand to SEQ ID NO: 1289146
acacaccauccauaauucg

SEQ ID NO: 1289148 - RNA, 19 nt, Artificial Sequence
  Description of Artificial Sequence: Synthetic oligonucleotide
  Sense strand starting at position 1013 of SEQ ID NO: 1241653
gguuaugaggcuuaaucac

SEQ ID NO: 1289149 - RNA, 19 nt, Artificial Sequence
  Description of Artificial Sequence: Synthetic oligonucleotide
  Antisense strand to SEQ ID NO: 1289148
gugauuaagccucauaacc

SEQ ID NO: 1289150 - RNA, 19 nt, Artificial Sequence
  Description of Artificial Sequence: Synthetic oligonucleotide
  Sense strand starting at position 1021 of SEQ ID NO: 1241653
ggcuuaaucacgcacugag

SEQ ID NO: 1289151 - RNA, 19 nt, Artificial Sequence
  Description of Artificial Sequence: Synthetic oligonucleotide
  Antisense strand to SEQ ID NO: 1289150
cucagugcgugauuaagcc

SEQ ID NO: 1289152 - RNA, 19 nt, Artificial Sequence
  Description of Artificial Sequence: Synthetic oligonucleotide
  Sense strand starting at position 1297 of SEQ ID NO: 1241653
gagaaagaugcaugcccaa

SEQ ID NO: 1289153 - RNA, 19 nt, Artificial Sequence
  Description of Artificial Sequence: Synthetic oligonucleotide
  Antisense strand to SEQ ID NO: 1289152
uugggcaugcaucuuucuc

SEQ ID NO: 1289154 - RNA, 19 nt, Artificial Sequence
  Description of Artificial Sequence: Synthetic oligonucleotide
  Sense strand starting at position 1327 of SEQ ID NO: 1241653
gguggugaggcuuauagga

SEQ ID NO: 1289155 - RNA, 19 nt, Artificial Sequence
  Description of Artificial Sequence: Synthetic oligonucleotide
  Antisense strand to SEQ ID NO: 1289154
uccuauaagccucaccacc

SEQ ID NO: 1289156 - RNA, 19 nt, Artificial Sequence
  Description of Artificial Sequence: Synthetic oligonucleotide
  Sense strand starting at position 1482 of SEQ ID NO: 1241653
uccacuucugcuuacagga

SEQ ID NO: 1289157 - RNA, 19 nt, Artificial Sequence
  Description of Artificial Sequence: Synthetic oligonucleotide
  Antisense strand to SEQ ID NO: 1289156
uccuguaagcagaagugga

SEQ ID NO: 1289158 - RNA, 19 nt, Artificial Sequence
  Description of Artificial Sequence: Synthetic oligonucleotide
  Sense strand starting at position 1505 of SEQ ID NO: 1241653
guguauccaccaggaggua

SEQ ID NO: 1289159 - RNA, 19 nt, Artificial Sequence
  Description of Artificial Sequence: Synthetic oligonucleotide
  Antisense strand to SEQ ID NO: 1289158
uaccuccugguggauacac

SEQ ID NO: 1289160 - RNA, 19 nt, Artificial Sequence
  Description of Artificial Sequence: Synthetic oligonucleotide
  Sense strand starting at position 1795 of SEQ ID NO: 1241653
cuguccucguccguauuua

SEQ ID NO: 1289161 - RNA, 19 nt, Artificial Sequence
  Description of Artificial Sequence: Synthetic oligonucleotide
  Antisense strand to SEQ ID NO: 1289160
uaaauacggacgaggacag

SEQ ID NO: 1289162 - RNA, 19 nt, Artificial Sequence
  Description of Artificial Sequence: Synthetic oligonucleotide
  Sense strand starting at position 1796 of SEQ ID NO: 1241653
uguccucguccguauuuaa

SEQ ID NO: 1289163 - RNA, 19 nt, Artificial Sequence
  Description of Artificial Sequence: Synthetic oligonucleotide
  Antisense strand to SEQ ID NO: 1289162
uuaaauacggacgaggaca

SEQ ID NO: 1289164 - RNA, 19 nt, Artificial Sequence
  Description of Artificial Sequence: Synthetic oligonucleotide
  Sense strand starting at position 1841 of SEQ ID NO: 1241653
gaggcugcuggugaauauu

SEQ ID NO: 1289165 - RNA, 19 nt, Artificial Sequence
  Description of Artificial Sequence: Synthetic oligonucleotide
  Antisense strand to SEQ ID NO: 1289164
aauauucaccagcagccuc

SEQ ID NO: 1289166 - RNA, 19 nt, Artificial Sequence
  Description of Artificial Sequence: Synthetic oligonucleotide
  Sense strand starting at position 1850 of SEQ ID NO: 1241653
ggugaauauuaaccaaggu

SEQ ID NO: 1289167 - RNA, 19 nt, Artificial Sequence
  Description of Artificial Sequence: Synthetic oligonucleotide
  Antisense strand to SEQ ID NO: 1289166
accuugguuaauauucacc

SEQ ID NO: 1289168 - RNA, 19 nt, Artificial Sequence
  Description of Artificial Sequence: Synthetic oligonucleotide
  Sense strand starting at position 1873 of SEQ ID NO: 1241653
ccaguuaucggaggagcaa

SEQ ID NO: 1289169 - RNA, 19 nt, Artificial Sequence
  Description of Artificial Sequence: Synthetic oligonucleotide
  Antisense strand to SEQ ID NO: 1289168
uugcuccuccgauaacugg

SEQ ID NO: 1289170 - RNA, 19 nt, Artificial Sequence
  Description of Artificial Sequence: Synthetic oligonucleotide
  Sense strand starting at position 1874 of SEQ ID NO: 1241653
caguuaucggaggagcaaa

SEQ ID NO: 1289171 - RNA, 19 nt, Artificial Sequence
  Description of Artificial Sequence: Synthetic oligonucleotide
  Antisense strand to SEQ ID NO: 1289170
uuugcuccuccgauaacug

SEQ ID NO: 1289172 - RNA, 19 nt, Artificial Sequence
  Description of Artificial Sequence: Synthetic oligonucleotide
  Sense strand starting at position 1983 of SEQ ID NO: 1241653
accgaaaggagucauugua

SEQ ID NO: 1289173 - RNA, 19 nt, Artificial Sequence
  Description of Artificial Sequence: Synthetic oligonucleotide
  Antisense strand to SEQ ID NO: 1289172
uacaaugacuccuuucggu

SEQ ID NO: 1289174 - RNA, 19 nt, Artificial Sequence
  Description of Artificial Sequence: Synthetic oligonucleotide
  Sense strand starting at position 2197 of SEQ ID NO: 1241653
gggagaucagaguggguua

SEQ ID NO: 1289175 - RNA, 19 nt, Artificial Sequence
  Description of Artificial Sequence: Synthetic oligonucleotide
  Antisense strand to SEQ ID NO: 1289174
uaacccacucugaucuccc

SEQ ID NO: 1289176 - RNA, 19 nt, Artificial Sequence
  Description of Artificial Sequence: Synthetic oligonucleotide
  Sense strand starting at position 2304 of SEQ ID NO: 1241653
cuugauggucccgauggaa

SEQ ID NO: 1289177 - RNA, 19 nt, Artificial Sequence
  Description of Artificial Sequence: Synthetic oligonucleotide
  Antisense strand to SEQ ID NO: 1289176
uuccaucgggaccaucaag

SEQ ID NO: 1289178 - RNA, 19 nt, Artificial Sequence
  Description of Artificial Sequence: Synthetic oligonucleotide
  Sense strand starting at position 2394 of SEQ ID NO: 1241653
ggaagcacaucuguaaaga

SEQ ID NO: 1289179 - RNA, 19 nt, Artificial Sequence
  Description of Artificial Sequence: Synthetic oligonucleotide
  Antisense strand to SEQ ID NO: 1289178
ucuuuacagaugugcuucc

SEQ ID NO: 1289180 - RNA, 19 nt, Artificial Sequence
  Description of Artificial Sequence: Synthetic oligonucleotide
  Sense strand starting at position 2474 of SEQ ID NO: 1241653
aucccaaagaguuggaagu

SEQ ID NO: 1289181 - RNA, 19 nt, Artificial Sequence
  Description of Artificial Sequence: Synthetic oligonucleotide
  Antisense strand to SEQ ID NO: 1289180
acuuccaacucuuugggau

SEQ ID NO: 1289182 - RNA, 19 nt, Artificial Sequence
  Description of Artificial Sequence: Synthetic oligonucleotide
  Sense strand starting at position 2475 of SEQ ID NO: 1241653
ucccaaagaguuggaaguu

SEQ ID NO: 1289183 - RNA, 19 nt, Artificial Sequence
  Description of Artificial Sequence: Synthetic oligonucleotide
  Antisense strand to SEQ ID NO: 1289182
aacuuccaacucuuuggga

SEQ ID NO: 1289184 - RNA, 19 nt, Artificial Sequence
  Description of Artificial Sequence: Synthetic oligonucleotide
  Sense strand starting at position 2663 of SEQ ID NO: 1241653
aaaccagugugauccguau

SEQ ID NO: 1289185 - RNA, 19 nt, Artificial Sequence
  Description of Artificial Sequence: Synthetic oligonucleotide
  Antisense strand to SEQ ID NO: 1289184
auacggaucacacugguuu

SEQ ID NO: 1289186 - RNA, 19 nt, Artificial Sequence
  Description of Artificial Sequence: Synthetic oligonucleotide
  Sense strand starting at position 2667 of SEQ ID NO: 1241653
cagugugauccguauacag

SEQ ID NO: 1289187 - RNA, 19 nt, Artificial Sequence
  Description of Artificial Sequence: Synthetic oligonucleotide
  Antisense strand to SEQ ID NO: 1289186
cuguauacggaucacacug

SEQ ID NO: 1289188 - RNA, 19 nt, Artificial Sequence
  Description of Artificial Sequence: Synthetic oligonucleotide
  Sense strand starting at position 2686 of SEQ ID NO: 1241653
cuuggaguuucuuuggaua

SEQ ID NO: 1289189 - RNA, 19 nt, Artificial Sequence
  Description of Artificial Sequence: Synthetic oligonucleotide
  Antisense strand to SEQ ID NO: 1289188
uauccaaagaaacuccaag

SEQ ID NO: 1289190 - RNA, 19 nt, Artificial Sequence
  Description of Artificial Sequence: Synthetic oligonucleotide
  Sense strand starting at position 2873 of SEQ ID NO: 1241653
ggcguacgugccguagaua

SEQ ID NO: 1289191 - RNA, 19 nt, Artificial Sequence
  Description of Artificial Sequence: Synthetic oligonucleotide
  Antisense strand to SEQ ID NO: 1289190
uaucuacggcacguacgcc

SEQ ID NO: 1289192 - RNA, 19 nt, Artificial Sequence
  Description of Artificial Sequence: Synthetic oligonucleotide
  Sense strand starting at position 2900 of SEQ ID NO: 1241653
gugaauggaugagugcauu

SEQ ID NO: 1289193 - RNA, 19 nt, Artificial Sequence
  Description of Artificial Sequence: Synthetic oligonucleotide
  Antisense strand to SEQ ID NO: 1289192
aaugcacucauccauucac

SEQ ID NO: 1289194 - RNA, 19 nt, Artificial Sequence
  Description of Artificial Sequence: Synthetic oligonucleotide
  Sense strand starting at position 3053 of SEQ ID NO: 1241653
aguuguuuaaccgcuccga

SEQ ID NO: 1289195 - RNA, 19 nt, Artificial Sequence
  Description of Artificial Sequence: Synthetic oligonucleotide
  Antisense strand to SEQ ID NO: 1289194
ucggagcgguuaaacaacu

SEQ ID NO: 1289196 - RNA, 19 nt, Artificial Sequence
  Description of Artificial Sequence: Synthetic oligonucleotide
  Sense strand starting at position 3737 of SEQ ID NO: 1241653
ccuggaauuccuggcagca

SEQ ID NO: 1289197 - RNA, 19 nt, Artificial Sequence
  Description of Artificial Sequence: Synthetic oligonucleotide
  Antisense strand to SEQ ID NO: 1289196
ugcugccaggaauuccagg

SEQ ID NO: 1289198 - RNA, 19 nt, Artificial Sequence
  Description of Artificial Sequence: Synthetic oligonucleotide
  Sense strand starting at position 107 of SEQ ID NO: 1241654
accgaaaggagucauugua

SEQ ID NO: 1289199 - RNA, 19 nt, Artificial Sequence
  Description of Artificial Sequence: Synthetic oligonucleotide
  Antisense strand to SEQ ID NO: 1289198
uacaaugacuccuuucggu

SEQ ID NO: 1289200 - RNA, 19 nt, Artificial Sequence
  Description of Artificial Sequence: Synthetic oligonucleotide
  Sense strand starting at position 321 of SEQ ID NO: 1241654
gggagaucagaguggguua

SEQ ID NO: 1289201 - RNA, 19 nt, Artificial Sequence
  Description of Artificial Sequence: Synthetic oligonucleotide
  Antisense strand to SEQ ID NO: 1289200
uaacccacucugaucuccc

SEQ ID NO: 1289202 - RNA, 19 nt, Artificial Sequence
  Description of Artificial Sequence: Synthetic oligonucleotide
  Sense strand starting at position 428 of SEQ ID NO: 1241654
cuugauggucccgauggaa

SEQ ID NO: 1289203 - RNA, 19 nt, Artificial Sequence
  Description of Artificial Sequence: Synthetic oligonucleotide
  Antisense strand to SEQ ID NO: 1289202
uuccaucgggaccaucaag

SEQ ID NO: 1289204 - RNA, 19 nt, Artificial Sequence
  Description of Artificial Sequence: Synthetic oligonucleotide
  Sense strand starting at position 518 of SEQ ID NO: 1241654
ggaagcacaucuguaaaga

SEQ ID NO: 1289205 - RNA, 19 nt, Artificial Sequence
  Description of Artificial Sequence: Synthetic oligonucleotide
  Antisense strand to SEQ ID NO: 1289204
ucuuuacagaugugcuucc

SEQ ID NO: 1289206 - RNA, 19 nt, Artificial Sequence
  Description of Artificial Sequence: Synthetic oligonucleotide
  Sense strand starting at position 598 of SEQ ID NO: 1241654
aucccaaagaguuggaagu

SEQ ID NO: 1289207 - RNA, 19 nt, Artificial Sequence
  Description of Artificial Sequence: Synthetic oligonucleotide
  Antisense strand to SEQ ID NO: 1289206
acuuccaacucuuugggau

SEQ ID NO: 1289208 - RNA, 19 nt, Artificial Sequence
  Description of Artificial Sequence: Synthetic oligonucleotide
  Sense strand starting at position 599 of SEQ ID NO: 1241654
ucccaaagaguuggaaguu

SEQ ID NO: 1289209 - RNA, 19 nt, Artificial Sequence
  Description of Artificial Sequence: Synthetic oligonucleotide
  Antisense strand to SEQ ID NO: 1289208
aacuuccaacucuuuggga

SEQ ID NO: 1289210 - RNA, 19 nt, Artificial Sequence
  Description of Artificial Sequence: Synthetic oligonucleotide
  Sense strand starting at position 787 of SEQ ID NO: 1241654
aaaccagugugauccguau

SEQ ID NO: 1289211 - RNA, 19 nt, Artificial Sequence
  Description of Artificial Sequence: Synthetic oligonucleotide
  Antisense strand to SEQ ID NO: 1289210
auacggaucacacugguuu

SEQ ID NO: 1289212 - RNA, 19 nt, Artificial Sequence
  Description of Artificial Sequence: Synthetic oligonucleotide
  Sense strand starting at position 791 of SEQ ID NO: 1241654
cagugugauccguauacag

SEQ ID NO: 1289213 - RNA, 19 nt, Artificial Sequence
  Description of Artificial Sequence: Synthetic oligonucleotide
  Antisense strand to SEQ ID NO: 1289212
cuguauacggaucacacug

SEQ ID NO: 1289214 - RNA, 19 nt, Artificial Sequence
  Description of Artificial Sequence: Synthetic oligonucleotide
  Sense strand starting at position 810 of SEQ ID NO: 1241654
cuuggaguuucuuuggaua

SEQ ID NO: 1289215 - RNA, 19 nt, Artificial Sequence
  Description of Artificial Sequence: Synthetic oligonucleotide
  Antisense strand to SEQ ID NO: 1289214
uauccaaagaaacuccaag

SEQ ID NO: 1289216 - RNA, 19 nt, Artificial Sequence
  Description of Artificial Sequence: Synthetic oligonucleotide
  Sense strand starting at position 997 of SEQ ID NO: 1241654
ggcguacgugccguagaua

SEQ ID NO: 1289217 - RNA, 19 nt, Artificial Sequence
  Description of Artificial Sequence: Synthetic oligonucleotide
  Antisense strand to SEQ ID NO: 1289216
uaucuacggcacguacgcc

SEQ ID NO: 1289218 - RNA, 19 nt, Artificial Sequence
  Description of Artificial Sequence: Synthetic oligonucleotide
  Sense strand starting at position 1024 of SEQ ID NO: 1241654
gugaauggaugagugcauu

SEQ ID NO: 1289219 - RNA, 19 nt, Artificial Sequence
  Description of Artificial Sequence: Synthetic oligonucleotide
  Antisense strand to SEQ ID NO: 1289218
aaugcacucauccauucac

SEQ ID NO: 1289220 - RNA, 19 nt, Artificial Sequence
  Description of Artificial Sequence: Synthetic oligonucleotide
  Sense strand starting at position 1177 of SEQ ID NO: 1241654
aguuguuuaaccgcuccga

SEQ ID NO: 1289221 - RNA, 19 nt, Artificial Sequence
  Description of Artificial Sequence: Synthetic oligonucleotide
  Antisense strand to SEQ ID NO: 1289220
ucggagcgguuaaacaacu

SEQ ID NO: 1289222 - RNA, 19 nt, Artificial Sequence
  Description of Artificial Sequence: Synthetic oligonucleotide
  Sense strand starting at position 1861 of SEQ ID NO: 1241654
ccuggaauuccuggcagca

SEQ ID NO: 1289223 - RNA, 19 nt, Artificial Sequence
  Description of Artificial Sequence: Synthetic oligonucleotide
  Antisense strand to SEQ ID NO: 1289222
ugcugccaggaauuccagg

SEQ ID NO: 1289224 - RNA, 19 nt, Artificial Sequence
  Description of Artificial Sequence: Synthetic oligonucleotide
  Sense strand starting at position 2187 of SEQ ID NO: 1241654
ugaguugccgcaagaggua

SEQ ID NO: 1289225 - RNA, 19 nt, Artificial Sequence
  Description of Artificial Sequence: Synthetic oligonucleotide
  Antisense strand to SEQ ID NO: 1289224
uaccucuugcggcaacuca

SEQ ID NO: 1289226 - RNA, 19 nt, Artificial Sequence
  Description of Artificial Sequence: Synthetic oligonucleotide
  Sense strand starting at position 2209 of SEQ ID NO: 1241654
ucacacugcccagaggauu

SEQ ID NO: 1289227 - RNA, 19 nt, Artificial Sequence
  Description of Artificial Sequence: Synthetic oligonucleotide
  Antisense strand to SEQ ID NO: 1289226
aauccucugggcaguguga

SEQ ID NO: 1289228 - RNA, 19 nt, Artificial Sequence
  Description of Artificial Sequence: Synthetic oligonucleotide
  Sense strand starting at position 2635 of SEQ ID NO: 1241654
gggaguacucaguggccau

SEQ ID NO: 1289229 - RNA, 19 nt, Artificial Sequence
  Description of Artificial Sequence: Synthetic oligonucleotide
  Antisense strand to SEQ ID NO: 1289228
auggccacugaguacuccc

SEQ ID NO: 1289230 - RNA, 19 nt, Artificial Sequence
  Description of Artificial Sequence: Synthetic oligonucleotide
  Sense strand starting at position 2636 of SEQ ID NO: 1241654
ggaguacucaguggccauu

SEQ ID NO: 1289231 - RNA, 19 nt, Artificial Sequence
  Description of Artificial Sequence: Synthetic oligonucleotide
  Antisense strand to SEQ ID NO: 1289230
aauggccacugaguacucc

SEQ ID NO: 1289232 - RNA, 19 nt, Artificial Sequence
  Description of Artificial Sequence: Synthetic oligonucleotide
  Sense strand starting at position 2695 of SEQ ID NO: 1241654
gggaaagucuuguccaccu

SEQ ID NO: 1289233 - RNA, 19 nt, Artificial Sequence
  Description of Artificial Sequence: Synthetic oligonucleotide
  Antisense strand to SEQ ID NO: 1289232
agguggacaagacuuuccc

SEQ ID NO: 1289234 - RNA, 19 nt, Artificial Sequence
  Description of Artificial Sequence: Synthetic oligonucleotide
  Sense strand starting at position 2713 of SEQ ID NO: 1241654
ugguuacuuccacaauugu

SEQ ID NO: 1289235 - RNA, 19 nt, Artificial Sequence
  Description of Artificial Sequence: Synthetic oligonucleotide
  Antisense strand to SEQ ID NO: 1289234
acaauuguggaaguaacca

SEQ ID NO: 1289236 - RNA, 19 nt, Artificial Sequence
  Description of Artificial Sequence: Synthetic oligonucleotide
  Sense strand starting at position 2785 of SEQ ID NO: 1241654
cugugagcuggucaugagu

SEQ ID NO: 1289237 - RNA, 19 nt, Artificial Sequence
  Description of Artificial Sequence: Synthetic oligonucleotide
  Antisense strand to SEQ ID NO: 1289236
acucaugaccagcucacag

SEQ ID NO: 1289238 - RNA, 19 nt, Artificial Sequence
  Description of Artificial Sequence: Synthetic oligonucleotide
  Sense strand starting at position 2873 of SEQ ID NO: 1241654
gcuggauagggaugugaga

SEQ ID NO: 1289239 - RNA, 19 nt, Artificial Sequence
  Description of Artificial Sequence: Synthetic oligonucleotide
  Antisense strand to SEQ ID NO: 1289238
ucucacaucccuauccagc

SEQ ID NO: 1289240 - RNA, 19 nt, Artificial Sequence
  Description of Artificial Sequence: Synthetic oligonucleotide
  Sense strand starting at position 2882 of SEQ ID NO: 1241654
ggaugugagagucgagauu

SEQ ID NO: 1289241 - RNA, 19 nt, Artificial Sequence
  Description of Artificial Sequence: Synthetic oligonucleotide
  Antisense strand to SEQ ID NO: 1289240
aaucucgacucucacaucc

SEQ ID NO: 1289242 - RNA, 19 nt, Artificial Sequence
  Description of Artificial Sequence: Synthetic oligonucleotide
  Sense strand starting at position 2884 of SEQ ID NO: 1241654
augugagagucgagauuug

SEQ ID NO: 1289243 - RNA, 19 nt, Artificial Sequence
  Description of Artificial Sequence: Synthetic oligonucleotide
  Antisense strand to SEQ ID NO: 1289242
caaaucucgacucucacau

SEQ ID NO: 1289244 - RNA, 19 nt, Artificial Sequence
  Description of Artificial Sequence: Synthetic oligonucleotide
  Sense strand starting at position 3011 of SEQ ID NO: 1241654
agcugaacucauuggcaaa

SEQ ID NO: 1289245 - RNA, 19 nt, Artificial Sequence
  Description of Artificial Sequence: Synthetic oligonucleotide
  Antisense strand to SEQ ID NO: 1289244
uuugccaaugaguucagcu

SEQ ID NO: 1289246 - RNA, 19 nt, Artificial Sequence
  Description of Artificial Sequence: Synthetic oligonucleotide
  Sense strand starting at position 3013 of SEQ ID NO: 1241654
cugaacucauuggcaaagu

SEQ ID NO: 1289247 - RNA, 19 nt, Artificial Sequence
  Description of Artificial Sequence: Synthetic oligonucleotide
  Antisense strand to SEQ ID NO: 1289246
acuuugccaaugaguucag

SEQ ID NO: 1289248 - RNA, 19 nt, Artificial Sequence
  Description of Artificial Sequence: Synthetic oligonucleotide
  Sense strand starting at position 3110 of SEQ ID NO: 1241654
ccagcuuccuucuuugaga

SEQ ID NO: 1289249 - RNA, 19 nt, Artificial Sequence
  Description of Artificial Sequence: Synthetic oligonucleotide
  Antisense strand to SEQ ID NO: 1289248
ucucaaagaaggaagcugg

SEQ ID NO: 1289250 - RNA, 19 nt, Artificial Sequence
  Description of Artificial Sequence: Synthetic oligonucleotide
  Sense strand starting at position 3112 of SEQ ID NO: 1241654
agcuuccuucuuugagagu

SEQ ID NO: 1289251 - RNA, 19 nt, Artificial Sequence
  Description of Artificial Sequence: Synthetic oligonucleotide
  Antisense strand to SEQ ID NO: 1289250
acucucaaagaaggaagcu

SEQ ID NO: 1289252 - RNA, 19 nt, Artificial Sequence
  Description of Artificial Sequence: Synthetic oligonucleotide
  Sense strand starting at position 3152 of SEQ ID NO: 1241654
gcguggguucgggaucuaa

SEQ ID NO: 1289253 - RNA, 19 nt, Artificial Sequence
  Description of Artificial Sequence: Synthetic oligonucleotide
  Antisense strand to SEQ ID NO: 1289252
uuagaucccgaacccacgc

SEQ ID NO: 1289254 - RNA, 19 nt, Artificial Sequence
  Description of Artificial Sequence: Synthetic oligonucleotide
  Sense strand starting at position 3156 of SEQ ID NO: 1241654
ggguucgggaucuaauauc

SEQ ID NO: 1289255 - RNA, 19 nt, Artificial Sequence
  Description of Artificial Sequence: Synthetic oligonucleotide
  Antisense strand to SEQ ID NO: 1289254
gauauuagaucccgaaccc

SEQ ID NO: 1289256 - RNA, 19 nt, Artificial Sequence
  Description of Artificial Sequence: Synthetic oligonucleotide
  Sense strand starting at position 3267 of SEQ ID NO: 1241654
ggaagacucuaagaagagu

SEQ ID NO: 1289257 - RNA, 19 nt, Artificial Sequence
  Description of Artificial Sequence: Synthetic oligonucleotide
  Antisense strand to SEQ ID NO: 1289256
acucuucuuagagucuucc

SEQ ID NO: 1289258 - RNA, 19 nt, Artificial Sequence
  Description of Artificial Sequence: Synthetic oligonucleotide
  Sense strand starting at position 3298 of SEQ ID NO: 1241654
gacugugaagaucgaauga

SEQ ID NO: 1289259 - RNA, 19 nt, Artificial Sequence
  Description of Artificial Sequence: Synthetic oligonucleotide
  Antisense strand to SEQ ID NO: 1289258
ucauucgaucuucacaguc

SEQ ID NO: 1289260 - RNA, 19 nt, Artificial Sequence
  Description of Artificial Sequence: Synthetic oligonucleotide
  Sense strand starting at position 3305 of SEQ ID NO: 1241654
aagaucgaaugagauaaua

SEQ ID NO: 1289261 - RNA, 19 nt, Artificial Sequence
  Description of Artificial Sequence: Synthetic oligonucleotide
  Antisense strand to SEQ ID NO: 1289260
uauuaucucauucgaucuu

SEQ ID NO: 1289262 - RNA, 19 nt, Artificial Sequence
  Description of Artificial Sequence: Synthetic oligonucleotide
  Sense strand starting at position 3509 of SEQ ID NO: 1241654
agggacaccuccucagauu

SEQ ID NO: 1289263 - RNA, 19 nt, Artificial Sequence
  Description of Artificial Sequence: Synthetic oligonucleotide
  Antisense strand to SEQ ID NO: 1289262
aaucugaggaggugucccu

SEQ ID NO: 1289264 - RNA, 19 nt, Artificial Sequence
  Description of Artificial Sequence: Synthetic oligonucleotide
  Sense strand starting at position 3588 of SEQ ID NO: 1241654
uggcuuuccgaaggugaag

SEQ ID NO: 1289265 - RNA, 19 nt, Artificial Sequence
  Description of Artificial Sequence: Synthetic oligonucleotide
  Antisense strand to SEQ ID NO: 1289264
cuucaccuucggaaagcca

SEQ ID NO: 1289266 - RNA, 19 nt, Artificial Sequence
  Description of Artificial Sequence: Synthetic oligonucleotide
  Sense strand starting at position 3747 of SEQ ID NO: 1241654
guuucuuucccacauagcu

SEQ ID NO: 1289267 - RNA, 19 nt, Artificial Sequence
  Description of Artificial Sequence: Synthetic oligonucleotide
  Antisense strand to SEQ ID NO: 1289266
agcuaugugggaaagaaac

SEQ ID NO: 1289268 - RNA, 19 nt, Artificial Sequence
  Description of Artificial Sequence: Synthetic oligonucleotide
  Sense strand starting at position 3765 of SEQ ID NO: 1241654
ucuucugaggcuuagauga

SEQ ID NO: 1289269 - RNA, 19 nt, Artificial Sequence
  Description of Artificial Sequence: Synthetic oligonucleotide
  Antisense strand to SEQ ID NO: 1289268
ucaucuaagccucagaaga

SEQ ID NO: 1289270 - RNA, 19 nt, Artificial Sequence
  Description of Artificial Sequence: Synthetic oligonucleotide
  Sense strand starting at position 3797 of SEQ ID NO: 1241654
ggguguuuaacacagagcu

SEQ ID NO: 1289271 - RNA, 19 nt, Artificial Sequence
  Description of Artificial Sequence: Synthetic oligonucleotide
  Antisense strand to SEQ ID NO: 1289270
agcucuguguuaaacaccc

SEQ ID NO: 1289272 - RNA, 19 nt, Artificial Sequence
  Description of Artificial Sequence: Synthetic oligonucleotide
  Sense strand starting at position 3810 of SEQ ID NO: 1241654
agagcucuguuagcauaau

SEQ ID NO: 1289273 - RNA, 19 nt, Artificial Sequence
  Description of Artificial Sequence: Synthetic oligonucleotide
  Antisense strand to SEQ ID NO: 1289272
auuaugcuaacagagcucu

SEQ ID NO: 1289274 - RNA, 19 nt, Artificial Sequence
  Description of Artificial Sequence: Synthetic oligonucleotide
  Sense strand starting at position 3959 of SEQ ID NO: 1241654
guguaaucuccugagccac

SEQ ID NO: 1289275 - RNA, 19 nt, Artificial Sequence
  Description of Artificial Sequence: Synthetic oligonucleotide
  Antisense strand to SEQ ID NO: 1289274
guggcucaggagauuacac

SEQ ID NO: 1289276 - RNA, 19 nt, Artificial Sequence
  Description of Artificial Sequence: Synthetic oligonucleotide
  Sense strand starting at position 3961 of SEQ ID NO: 1241654
guaaucuccugagccacuu

SEQ ID NO: 1289277 - RNA, 19 nt, Artificial Sequence
  Description of Artificial Sequence: Synthetic oligonucleotide
  Antisense strand to SEQ ID NO: 1289276
aaguggcucaggagauuac

SEQ ID NO: 1289278 - RNA, 19 nt, Artificial Sequence
  Description of Artificial Sequence: Synthetic oligonucleotide
  Sense strand starting at position 434 of SEQ ID NO: 1241655
aguaguucccaucagcaga

SEQ ID NO: 1289279 - RNA, 19 nt, Artificial Sequence
  Description of Artificial Sequence: Synthetic oligonucleotide
  Antisense strand to SEQ ID NO: 1289278
ucugcugaugggaacuacu

SEQ ID NO: 1289280 - RNA, 19 nt, Artificial Sequence
  Description of Artificial Sequence: Synthetic oligonucleotide
  Sense strand starting at position 447 of SEQ ID NO: 1241655
agcagagacccuuauucuu

SEQ ID NO: 1289281 - RNA, 19 nt, Artificial Sequence
  Description of Artificial Sequence: Synthetic oligonucleotide
  Antisense strand to SEQ ID NO: 1289280
aagaauaagggucucugcu

SEQ ID NO: 1289282 - RNA, 19 nt, Artificial Sequence
  Description of Artificial Sequence: Synthetic oligonucleotide
  Sense strand starting at position 456 of SEQ ID NO: 1241655
ccuuauucuugaccaaggu

SEQ ID NO: 1289283 - RNA, 19 nt, Artificial Sequence
  Description of Artificial Sequence: Synthetic oligonucleotide
  Antisense strand to SEQ ID NO: 1289282
accuuggucaagaauaagg

SEQ ID NO: 1289284 - RNA, 19 nt, Artificial Sequence
  Description of Artificial Sequence: Synthetic oligonucleotide
  Sense strand starting at position 540 of SEQ ID NO: 1241655
cuuaucuaugccugggaca

SEQ ID NO: 1289285 - RNA, 19 nt, Artificial Sequence
  Description of Artificial Sequence: Synthetic oligonucleotide
  Antisense strand to SEQ ID NO: 1289284
ugucccaggcauagauaag

SEQ ID NO: 1289286 - RNA, 19 nt, Artificial Sequence
  Description of Artificial Sequence: Synthetic oligonucleotide
  Sense strand starting at position 541 of SEQ ID NO: 1241655
uuaucuaugccugggacaa

SEQ ID NO: 1289287 - RNA, 19 nt, Artificial Sequence
  Description of Artificial Sequence: Synthetic oligonucleotide
  Antisense strand to SEQ ID NO: 1289286
uugucccaggcauagauaa

SEQ ID NO: 1289288 - RNA, 19 nt, Artificial Sequence
  Description of Artificial Sequence: Synthetic oligonucleotide
  Sense strand starting at position 758 of SEQ ID NO: 1241655
aggucacccaaguauugua

SEQ ID NO: 1289289 - RNA, 19 nt, Artificial Sequence
  Description of Artificial Sequence: Synthetic oligonucleotide
  Antisense strand to SEQ ID NO: 1289288
uacaauacuugggugaccu

SEQ ID NO: 1289290 - RNA, 19 nt, Artificial Sequence
  Description of Artificial Sequence: Synthetic oligonucleotide
  Sense strand starting at position 773 of SEQ ID NO: 1241655
uguaaacguuggguaaaua

SEQ ID NO: 1289291 - RNA, 19 nt, Artificial Sequence
  Description of Artificial Sequence: Synthetic oligonucleotide
  Antisense strand to SEQ ID NO: 1289290
uauuuacccaacguuuaca

SEQ ID NO: 1289292 - RNA, 19 nt, Artificial Sequence
  Description of Artificial Sequence: Synthetic oligonucleotide
  Sense strand starting at position 882 of SEQ ID NO: 1241655
caccauugugauggcaaua

SEQ ID NO: 1289293 - RNA, 19 nt, Artificial Sequence
  Description of Artificial Sequence: Synthetic oligonucleotide
  Antisense strand to SEQ ID NO: 1289292
uauugccaucacaauggug

SEQ ID NO: 1289294 - RNA, 19 nt, Artificial Sequence
  Description of Artificial Sequence: Synthetic oligonucleotide
  Sense strand starting at position 887 of SEQ ID NO: 1241655
uugugauggcaauagaguu

SEQ ID NO: 1289295 - RNA, 19 nt, Artificial Sequence
  Description of Artificial Sequence: Synthetic oligonucleotide
  Antisense strand to SEQ ID NO: 1289294
aacucuauugccaucacaa

SEQ ID NO: 1289296 - RNA, 19 nt, Artificial Sequence
  Description of Artificial Sequence: Synthetic oligonucleotide
  Sense strand starting at position 1267 of SEQ ID NO: 1241655
ccuguacaauggucaggaa

SEQ ID NO: 1289297 - RNA, 19 nt, Artificial Sequence
  Description of Artificial Sequence: Synthetic oligonucleotide
  Antisense strand to SEQ ID NO: 1289296
uuccugaccauuguacagg

SEQ ID NO: 1289298 - RNA, 19 nt, Artificial Sequence
  Description of Artificial Sequence: Synthetic oligonucleotide
  Sense strand starting at position 1393 of SEQ ID NO: 1241655
ggugcuccuggacauauau

SEQ ID NO: 1289299 - RNA, 19 nt, Artificial Sequence
  Description of Artificial Sequence: Synthetic oligonucleotide
  Antisense strand to SEQ ID NO: 1289298
auauauguccaggagcacc

SEQ ID NO: 1289300 - RNA, 19 nt, Artificial Sequence
  Description of Artificial Sequence: Synthetic oligonucleotide
  Sense strand starting at position 1404 of SEQ ID NO: 1241655
acauauaucgccuaagguc

SEQ ID NO: 1289301 - RNA, 19 nt, Artificial Sequence
  Description of Artificial Sequence: Synthetic oligonucleotide
  Antisense strand to SEQ ID NO: 1289300
gaccuuaggcgauauaugu

SEQ ID NO: 1289302 - RNA, 19 nt, Artificial Sequence
  Description of Artificial Sequence: Synthetic oligonucleotide
  Sense strand starting at position 1520 of SEQ ID NO: 1241655
cgcaccuuccuagacagaa

SEQ ID NO: 1289303 - RNA, 19 nt, Artificial Sequence
  Description of Artificial Sequence: Synthetic oligonucleotide
  Antisense strand to SEQ ID NO: 1289302
uucugucuaggaaggugcg

SEQ ID NO: 1289304 - RNA, 19 nt, Artificial Sequence
  Description of Artificial Sequence: Synthetic oligonucleotide
  Sense strand starting at position 1648 of SEQ ID NO: 1241655
ugagugguggugggugaaa

SEQ ID NO: 1289305 - RNA, 19 nt, Artificial Sequence
  Description of Artificial Sequence: Synthetic oligonucleotide
  Antisense strand to SEQ ID NO: 1289304
uuucacccaccaccacuca

SEQ ID NO: 1289306 - RNA, 19 nt, Artificial Sequence
  Description of Artificial Sequence: Synthetic oligonucleotide
  Sense strand starting at position 1649 of SEQ ID NO: 1241655
gagugguggugggugaaau

SEQ ID NO: 1289307 - RNA, 19 nt, Artificial Sequence
  Description of Artificial Sequence: Synthetic oligonucleotide
  Antisense strand to SEQ ID NO: 1289306
auuucacccaccaccacuc

SEQ ID NO: 1289308 - RNA, 19 nt, Artificial Sequence
  Description of Artificial Sequence: Synthetic oligonucleotide
  Sense strand starting at position 1650 of SEQ ID NO: 1241655
agugguggugggugaaaua

SEQ ID NO: 1289309 - RNA, 19 nt, Artificial Sequence
  Description of Artificial Sequence: Synthetic oligonucleotide
  Antisense strand to SEQ ID NO: 1289308
uauuucacccaccaccacu

SEQ ID NO: 1289310 - RNA, 19 nt, Artificial Sequence
  Description of Artificial Sequence: Synthetic oligonucleotide
  Sense strand starting at position 1651 of SEQ ID NO: 1241655
gugguggugggugaaauau

SEQ ID NO: 1289311 - RNA, 19 nt, Artificial Sequence
  Description of Artificial Sequence: Synthetic oligonucleotide
  Antisense strand to SEQ ID NO: 1289310
auauuucacccaccaccac

SEQ ID NO: 1289312 - RNA, 19 nt, Artificial Sequence
  Description of Artificial Sequence: Synthetic oligonucleotide
  Sense strand starting at position 1653 of SEQ ID NO: 1241655
gguggugggugaaauauca

SEQ ID NO: 1289313 - RNA, 19 nt, Artificial Sequence
  Description of Artificial Sequence: Synthetic oligonucleotide
  Antisense strand to SEQ ID NO: 1289312
ugauauuucacccaccacc

SEQ ID NO: 1289314 - RNA, 19 nt, Artificial Sequence
  Description of Artificial Sequence: Synthetic oligonucleotide
  Sense strand starting at position 1863 of SEQ ID NO: 1241655
cggucccucccugauuaga

SEQ ID NO: 1289315 - RNA, 19 nt, Artificial Sequence
  Description of Artificial Sequence: Synthetic oligonucleotide
  Antisense strand to SEQ ID NO: 1289314
ucuaaucagggagggaccg

SEQ ID NO: 1289316 - RNA, 19 nt, Artificial Sequence
  Description of Artificial Sequence: Synthetic oligonucleotide
  Sense strand starting at position 1884 of SEQ ID NO: 1241655
cauugaaggucuccuguaa

SEQ ID NO: 1289317 - RNA, 19 nt, Artificial Sequence
  Description of Artificial Sequence: Synthetic oligonucleotide
  Antisense strand to SEQ ID NO: 1289316
uuacaggagaccuucaaug

SEQ ID NO: 1289318 - RNA, 19 nt, Artificial Sequence
  Description of Artificial Sequence: Synthetic oligonucleotide
  Sense strand starting at position 2032 of SEQ ID NO: 1241655
gugggacgguuacugauua

SEQ ID NO: 1289319 - RNA, 19 nt, Artificial Sequence
  Description of Artificial Sequence: Synthetic oligonucleotide
  Antisense strand to SEQ ID NO: 1289318
uaaucaguaaccgucccac

SEQ ID NO: 1289320 - RNA, 19 nt, Artificial Sequence
  Description of Artificial Sequence: Synthetic oligonucleotide
  Sense strand starting at position 2036 of SEQ ID NO: 1241655
gacgguuacugauuaacau

SEQ ID NO: 1289321 - RNA, 19 nt, Artificial Sequence
  Description of Artificial Sequence: Synthetic oligonucleotide
  Antisense strand to SEQ ID NO: 1289320
auguuaaucaguaaccguc

SEQ ID NO: 1289322 - RNA, 19 nt, Artificial Sequence
  Description of Artificial Sequence: Synthetic oligonucleotide
  Sense strand starting at position 2124 of SEQ ID NO: 1241655
cuccuauaacccggaauau

SEQ ID NO: 1289323 - RNA, 19 nt, Artificial Sequence
  Description of Artificial Sequence: Synthetic oligonucleotide
  Antisense strand to SEQ ID NO: 1289322
auauuccggguuauaggag

SEQ ID NO: 1289324 - RNA, 19 nt, Artificial Sequence
  Description of Artificial Sequence: Synthetic oligonucleotide
  Sense strand starting at position 2133 of SEQ ID NO: 1241655
cccggaauaugacccaaau

SEQ ID NO: 1289325 - RNA, 19 nt, Artificial Sequence
  Description of Artificial Sequence: Synthetic oligonucleotide
  Antisense strand to SEQ ID NO: 1289324
auuugggucauauuccggg

SEQ ID NO: 1289326 - RNA, 19 nt, Artificial Sequence
  Description of Artificial Sequence: Synthetic oligonucleotide
  Sense strand starting at position 2253 of SEQ ID NO: 1241655
ugcugaacaccucgagaaa

SEQ ID NO: 1289327 - RNA, 19 nt, Artificial Sequence
  Description of Artificial Sequence: Synthetic oligonucleotide
  Antisense strand to SEQ ID NO: 1289326
uuucucgagguguucagca

SEQ ID NO: 1289328 - RNA, 19 nt, Artificial Sequence
  Description of Artificial Sequence: Synthetic oligonucleotide
  Sense strand starting at position 2424 of SEQ ID NO: 1241655
guaaaucacuacuuagagu

SEQ ID NO: 1289329 - RNA, 19 nt, Artificial Sequence
  Description of Artificial Sequence: Synthetic oligonucleotide
  Antisense strand to SEQ ID NO: 1289328
acucuaaguagugauuuac

SEQ ID NO: 1289330 - RNA, 19 nt, Artificial Sequence
  Description of Artificial Sequence: Synthetic oligonucleotide
  Sense strand starting at position 2495 of SEQ ID NO: 1241655
gacugaauccucgggcacu

SEQ ID NO: 1289331 - RNA, 19 nt, Artificial Sequence
  Description of Artificial Sequence: Synthetic oligonucleotide
  Antisense strand to SEQ ID NO: 1289330
agugcccgaggauucaguc

SEQ ID NO: 1289332 - RNA, 19 nt, Artificial Sequence
  Description of Artificial Sequence: Synthetic oligonucleotide
  Sense strand starting at position 2626 of SEQ ID NO: 1241655
ugaagugaaacguauagcu

SEQ ID NO: 1289333 - RNA, 19 nt, Artificial Sequence
  Description of Artificial Sequence: Synthetic oligonucleotide
  Antisense strand to SEQ ID NO: 1289332
agcuauacguuucacuuca

SEQ ID NO: 1289334 - RNA, 19 nt, Artificial Sequence
  Description of Artificial Sequence: Synthetic oligonucleotide
  Sense strand starting at position 2628 of SEQ ID NO: 1241655
aagugaaacguauagcuaa

SEQ ID NO: 1289335 - RNA, 19 nt, Artificial Sequence
  Description of Artificial Sequence: Synthetic oligonucleotide
  Antisense strand to SEQ ID NO: 1289334
uuagcuauacguuucacuu

SEQ ID NO: 1289336 - RNA, 19 nt, Artificial Sequence
  Description of Artificial Sequence: Synthetic oligonucleotide
  Sense strand starting at position 2631 of SEQ ID NO: 1241655
ugaaacguauagcuaauau

SEQ ID NO: 1289337 - RNA, 19 nt, Artificial Sequence
  Description of Artificial Sequence: Synthetic oligonucleotide
  Antisense strand to SEQ ID NO: 1289336
auauuagcuauacguuuca

SEQ ID NO: 1289338 - RNA, 19 nt, Artificial Sequence
  Description of Artificial Sequence: Synthetic oligonucleotide
  Sense strand starting at position 2713 of SEQ ID NO: 1241655
agaauaaugugucccugaa

SEQ ID NO: 1289339 - RNA, 19 nt, Artificial Sequence
  Description of Artificial Sequence: Synthetic oligonucleotide
  Antisense strand to SEQ ID NO: 1289338
uucagggacacauuauucu

SEQ ID NO: 1289340 - RNA, 19 nt, Artificial Sequence
  Description of Artificial Sequence: Synthetic oligonucleotide
  Sense strand starting at position 2717 of SEQ ID NO: 1241655
uaaugugucccugaauaug

SEQ ID NO: 1289341 - RNA, 19 nt, Artificial Sequence
  Description of Artificial Sequence: Synthetic oligonucleotide
  Antisense strand to SEQ ID NO: 1289340
cauauucagggacacauua

SEQ ID NO: 1289342 - RNA, 19 nt, Artificial Sequence
  Description of Artificial Sequence: Synthetic oligonucleotide
  Sense strand starting at position 2877 of SEQ ID NO: 1241655
gguaaauaaugcuugguaa

SEQ ID NO: 1289343 - RNA, 19 nt, Artificial Sequence
  Description of Artificial Sequence: Synthetic oligonucleotide
  Antisense strand to SEQ ID NO: 1289342
uuaccaagcauuauuuacc

SEQ ID NO: 1289344 - RNA, 19 nt, Artificial Sequence
  Description of Artificial Sequence: Synthetic oligonucleotide
  Sense strand starting at position 2878 of SEQ ID NO: 1241655
guaaauaaugcuugguaaa

SEQ ID NO: 1289345 - RNA, 19 nt, Artificial Sequence
  Description of Artificial Sequence: Synthetic oligonucleotide
  Antisense strand to SEQ ID NO: 1289344
uuuaccaagcauuauuuac

SEQ ID NO: 1289346 - RNA, 19 nt, Artificial Sequence
  Description of Artificial Sequence: Synthetic oligonucleotide
  Sense strand starting at position 2957 of SEQ ID NO: 1241655
aaaugcaguguguaguaaa

SEQ ID NO: 1289347 - RNA, 19 nt, Artificial Sequence
  Description of Artificial Sequence: Synthetic oligonucleotide
  Antisense strand to SEQ ID NO: 1289346
uuuacuacacacugcauuu

SEQ ID NO: 1289348 - RNA, 19 nt, Artificial Sequence
  Description of Artificial Sequence: Synthetic oligonucleotide
  Sense strand starting at position 3255 of SEQ ID NO: 1241655
auaggcaguucuuuaagag

SEQ ID NO: 1289349 - RNA, 19 nt, Artificial Sequence
  Description of Artificial Sequence: Synthetic oligonucleotide
  Antisense strand to SEQ ID NO: 1289348
cucuuaaagaacugccuau

SEQ ID NO: 1289350 - RNA, 19 nt, Artificial Sequence
  Description of Artificial Sequence: Synthetic oligonucleotide
  Sense strand starting at position 3261 of SEQ ID NO: 1241655
aguucuuuaagaggugaaa

SEQ ID NO: 1289351 - RNA, 19 nt, Artificial Sequence
  Description of Artificial Sequence: Synthetic oligonucleotide
  Antisense strand to SEQ ID NO: 1289350
uuucaccucuuaaagaacu

SEQ ID NO: 1289352 - RNA, 19 nt, Artificial Sequence
  Description of Artificial Sequence: Synthetic oligonucleotide
  Sense strand starting at position 3263 of SEQ ID NO: 1241655
uucuuuaagaggugaaagu

SEQ ID NO: 1289353 - RNA, 19 nt, Artificial Sequence
  Description of Artificial Sequence: Synthetic oligonucleotide
  Antisense strand to SEQ ID NO: 1289352
acuuucaccucuuaaagaa

SEQ ID NO: 1289354 - RNA, 19 nt, Artificial Sequence
  Description of Artificial Sequence: Synthetic oligonucleotide
  Sense strand starting at position 3947 of SEQ ID NO: 1241655
cuguuaaguggccagaacu

SEQ ID NO: 1289355 - RNA, 19 nt, Artificial Sequence
  Description of Artificial Sequence: Synthetic oligonucleotide
  Antisense strand to SEQ ID NO: 1289354
aguucuggccacuuaacag

SEQ ID NO: 1289356 - RNA, 19 nt, Artificial Sequence
  Description of Artificial Sequence: Synthetic oligonucleotide
  Sense strand starting at position 3964 of SEQ ID NO: 1241655
cucagacucuguccuauga

SEQ ID NO: 1289357 - RNA, 19 nt, Artificial Sequence
  Description of Artificial Sequence: Synthetic oligonucleotide
  Antisense strand to SEQ ID NO: 1289356
ucauaggacagagucugag

SEQ ID NO: 1289358 - RNA, 19 nt, Artificial Sequence
  Description of Artificial Sequence: Synthetic oligonucleotide
  Sense strand starting at position 124 of SEQ ID NO: 1241656
auuggagcuuuccuggauu

SEQ ID NO: 1289359 - RNA, 19 nt, Artificial Sequence
  Description of Artificial Sequence: Synthetic oligonucleotide
  Antisense strand to SEQ ID NO: 1289358
aauccaggaaagcuccaau

SEQ ID NO: 1289360 - RNA, 19 nt, Artificial Sequence
  Description of Artificial Sequence: Synthetic oligonucleotide
  Sense strand starting at position 681 of SEQ ID NO: 1241656
aguaguucccaucagcaga

SEQ ID NO: 1289361 - RNA, 19 nt, Artificial Sequence
  Description of Artificial Sequence: Synthetic oligonucleotide
  Antisense strand to SEQ ID NO: 1289360
ucugcugaugggaacuacu

SEQ ID NO: 1289362 - RNA, 19 nt, Artificial Sequence
  Description of Artificial Sequence: Synthetic oligonucleotide
  Sense strand starting at position 694 of SEQ ID NO: 1241656
agcagagacccuuauucuu

SEQ ID NO: 1289363 - RNA, 19 nt, Artificial Sequence
  Description of Artificial Sequence: Synthetic oligonucleotide
  Antisense strand to SEQ ID NO: 1289362
aagaauaagggucucugcu

SEQ ID NO: 1289364 - RNA, 19 nt, Artificial Sequence
  Description of Artificial Sequence: Synthetic oligonucleotide
  Sense strand starting at position 703 of SEQ ID NO: 1241656
ccuuauucuugaccaaggu

SEQ ID NO: 1289365 - RNA, 19 nt, Artificial Sequence
  Description of Artificial Sequence: Synthetic oligonucleotide
  Antisense strand to SEQ ID NO: 1289364
accuuggucaagaauaagg

SEQ ID NO: 1289366 - RNA, 19 nt, Artificial Sequence
  Description of Artificial Sequence: Synthetic oligonucleotide
  Sense strand starting at position 787 of SEQ ID NO: 1241656
cuuaucuaugccugggaca

SEQ ID NO: 1289367 - RNA, 19 nt, Artificial Sequence
  Description of Artificial Sequence: Synthetic oligonucleotide
  Antisense strand to SEQ ID NO: 1289366
ugucccaggcauagauaag

SEQ ID NO: 1289368 - RNA, 19 nt, Artificial Sequence
  Description of Artificial Sequence: Synthetic oligonucleotide
  Sense strand starting at position 788 of SEQ ID NO: 1241656
uuaucuaugccugggacaa

SEQ ID NO: 1289369 - RNA, 19 nt, Artificial Sequence
  Description of Artificial Sequence: Synthetic oligonucleotide
  Antisense strand to SEQ ID NO: 1289368
uugucccaggcauagauaa

SEQ ID NO: 1289370 - RNA, 19 nt, Artificial Sequence
  Description of Artificial Sequence: Synthetic oligonucleotide
  Sense strand starting at position 1005 of SEQ ID NO: 1241656
aggucacccaaguauugua

SEQ ID NO: 1289371 - RNA, 19 nt, Artificial Sequence
  Description of Artificial Sequence: Synthetic oligonucleotide
  Antisense strand to SEQ ID NO: 1289370
uacaauacuugggugaccu

SEQ ID NO: 1289372 - RNA, 19 nt, Artificial Sequence
  Description of Artificial Sequence: Synthetic oligonucleotide
  Sense strand starting at position 1020 of SEQ ID NO: 1241656
uguaaacguuggguaaaua

SEQ ID NO: 1289373 - RNA, 19 nt, Artificial Sequence
  Description of Artificial Sequence: Synthetic oligonucleotide
  Antisense strand to SEQ ID NO: 1289372
uauuuacccaacguuuaca

SEQ ID NO: 1289374 - RNA, 19 nt, Artificial Sequence
  Description of Artificial Sequence: Synthetic oligonucleotide
  Sense strand starting at position 1129 of SEQ ID NO: 1241656
caccauugugauggcaaua

SEQ ID NO: 1289375 - RNA, 19 nt, Artificial Sequence
  Description of Artificial Sequence: Synthetic oligonucleotide
  Antisense strand to SEQ ID NO: 1289374
uauugccaucacaauggug

SEQ ID NO: 1289376 - RNA, 19 nt, Artificial Sequence
  Description of Artificial Sequence: Synthetic oligonucleotide
  Sense strand starting at position 1134 of SEQ ID NO: 1241656
uugugauggcaauagaguu

SEQ ID NO: 1289377 - RNA, 19 nt, Artificial Sequence
  Description of Artificial Sequence: Synthetic oligonucleotide
  Antisense strand to SEQ ID NO: 1289376
aacucuauugccaucacaa

SEQ ID NO: 1289378 - RNA, 19 nt, Artificial Sequence
  Description of Artificial Sequence: Synthetic oligonucleotide
  Sense strand starting at position 1514 of SEQ ID NO: 1241656
ccuguacaauggucaggaa

SEQ ID NO: 1289379 - RNA, 19 nt, Artificial Sequence
  Description of Artificial Sequence: Synthetic oligonucleotide
  Antisense strand to SEQ ID NO: 1289378
uuccugaccauuguacagg

SEQ ID NO: 1289380 - RNA, 19 nt, Artificial Sequence
  Description of Artificial Sequence: Synthetic oligonucleotide
  Sense strand starting at position 1640 of SEQ ID NO: 1241656
ggugcuccuggacauauau

SEQ ID NO: 1289381 - RNA, 19 nt, Artificial Sequence
  Description of Artificial Sequence: Synthetic oligonucleotide
  Antisense strand to SEQ ID NO: 1289380
auauauguccaggagcacc

SEQ ID NO: 1289382 - RNA, 19 nt, Artificial Sequence
  Description of Artificial Sequence: Synthetic oligonucleotide
  Sense strand starting at position 1651 of SEQ ID NO: 1241656
acauauaucgccuaagguc

SEQ ID NO: 1289383 - RNA, 19 nt, Artificial Sequence
  Description of Artificial Sequence: Synthetic oligonucleotide
  Antisense strand to SEQ ID NO: 1289382
gaccuuaggcgauauaugu

SEQ ID NO: 1289384 - RNA, 19 nt, Artificial Sequence
  Description of Artificial Sequence: Synthetic oligonucleotide
  Sense strand starting at position 1767 of SEQ ID NO: 1241656
cgcaccuuccuagacagaa

SEQ ID NO: 1289385 - RNA, 19 nt, Artificial Sequence
  Description of Artificial Sequence: Synthetic oligonucleotide
  Antisense strand to SEQ ID NO: 1289384
uucugucuaggaaggugcg

SEQ ID NO: 1289386 - RNA, 19 nt, Artificial Sequence
  Description of Artificial Sequence: Synthetic oligonucleotide
  Sense strand starting at position 1895 of SEQ ID NO: 1241656
ugagugguggugggugaaa

SEQ ID NO: 1289387 - RNA, 19 nt, Artificial Sequence
  Description of Artificial Sequence: Synthetic oligonucleotide
  Antisense strand to SEQ ID NO: 1289386
uuucacccaccaccacuca

SEQ ID NO: 1289388 - RNA, 19 nt, Artificial Sequence
  Description of Artificial Sequence: Synthetic oligonucleotide
  Sense strand starting at position 1896 of SEQ ID NO: 1241656
gagugguggugggugaaau

SEQ ID NO: 1289389 - RNA, 19 nt, Artificial Sequence
  Description of Artificial Sequence: Synthetic oligonucleotide
  Antisense strand to SEQ ID NO: 1289388
auuucacccaccaccacuc

SEQ ID NO: 1289390 - RNA, 19 nt, Artificial Sequence
  Description of Artificial Sequence: Synthetic oligonucleotide
  Sense strand starting at position 1897 of SEQ ID NO: 1241656
agugguggugggugaaaua

SEQ ID NO: 1289391 - RNA, 19 nt, Artificial Sequence
  Description of Artificial Sequence: Synthetic oligonucleotide
  Antisense strand to SEQ ID NO: 1289390
uauuucacccaccaccacu

SEQ ID NO: 1289392 - RNA, 19 nt, Artificial Sequence
  Description of Artificial Sequence: Synthetic oligonucleotide
  Sense strand starting at position 1898 of SEQ ID NO: 1241656
gugguggugggugaaauau

SEQ ID NO: 1289393 - RNA, 19 nt, Artificial Sequence
  Description of Artificial Sequence: Synthetic oligonucleotide
  Antisense strand to SEQ ID NO: 1289392
auauuucacccaccaccac

SEQ ID NO: 1289394 - RNA, 19 nt, Artificial Sequence
  Description of Artificial Sequence: Synthetic oligonucleotide
  Sense strand starting at position 1900 of SEQ ID NO: 1241656
gguggugggugaaauauca

SEQ ID NO: 1289395 - RNA, 19 nt, Artificial Sequence
  Description of Artificial Sequence: Synthetic oligonucleotide
  Antisense strand to SEQ ID NO: 1289394
ugauauuucacccaccacc

SEQ ID NO: 1289396 - RNA, 19 nt, Artificial Sequence
  Description of Artificial Sequence: Synthetic oligonucleotide
  Sense strand starting at position 2110 of SEQ ID NO: 1241656
cggucccucccugauuaga

SEQ ID NO: 1289397 - RNA, 19 nt, Artificial Sequence
  Description of Artificial Sequence: Synthetic oligonucleotide
  Antisense strand to SEQ ID NO: 1289396
ucuaaucagggagggaccg

SEQ ID NO: 1289398 - RNA, 19 nt, Artificial Sequence
  Description of Artificial Sequence: Synthetic oligonucleotide
  Sense strand starting at position 2131 of SEQ ID NO: 1241656
cauugaaggucuccuguaa

SEQ ID NO: 1289399 - RNA, 19 nt, Artificial Sequence
  Description of Artificial Sequence: Synthetic oligonucleotide
  Antisense strand to SEQ ID NO: 1289398
uuacaggagaccuucaaug

SEQ ID NO: 1289400 - RNA, 19 nt, Artificial Sequence
  Description of Artificial Sequence: Synthetic oligonucleotide
  Sense strand starting at position 2279 of SEQ ID NO: 1241656
gugggacgguuacugauua

SEQ ID NO: 1289401 - RNA, 19 nt, Artificial Sequence
  Description of Artificial Sequence: Synthetic oligonucleotide
  Antisense strand to SEQ ID NO: 1289400
uaaucaguaaccgucccac

SEQ ID NO: 1289402 - RNA, 19 nt, Artificial Sequence
  Description of Artificial Sequence: Synthetic oligonucleotide
  Sense strand starting at position 2283 of SEQ ID NO: 1241656
gacgguuacugauuaacau

SEQ ID NO: 1289403 - RNA, 19 nt, Artificial Sequence
  Description of Artificial Sequence: Synthetic oligonucleotide
  Antisense strand to SEQ ID NO: 1289402
auguuaaucaguaaccguc

SEQ ID NO: 1289404 - RNA, 19 nt, Artificial Sequence
  Description of Artificial Sequence: Synthetic oligonucleotide
  Sense strand starting at position 2343 of SEQ ID NO: 1241656
gugggaggcuucccauacu

SEQ ID NO: 1289405 - RNA, 19 nt, Artificial Sequence
  Description of Artificial Sequence: Synthetic oligonucleotide
  Antisense strand to SEQ ID NO: 1289404
aguaugggaagccucccac

SEQ ID NO: 1289406 - RNA, 19 nt, Artificial Sequence
  Description of Artificial Sequence: Synthetic oligonucleotide
  Sense strand starting at position 2371 of SEQ ID NO: 1241656
cuccuauaacccggaauau

SEQ ID NO: 1289407 - RNA, 19 nt, Artificial Sequence
  Description of Artificial Sequence: Synthetic oligonucleotide
  Antisense strand to SEQ ID NO: 1289406
auauuccggguuauaggag

SEQ ID NO: 1289408 - RNA, 19 nt, Artificial Sequence
  Description of Artificial Sequence: Synthetic oligonucleotide
  Sense strand starting at position 2380 of SEQ ID NO: 1241656
cccggaauaugacccaaau

SEQ ID NO: 1289409 - RNA, 19 nt, Artificial Sequence
  Description of Artificial Sequence: Synthetic oligonucleotide
  Antisense strand to SEQ ID NO: 1289408
auuugggucauauuccggg

SEQ ID NO: 1289410 - RNA, 19 nt, Artificial Sequence
  Description of Artificial Sequence: Synthetic oligonucleotide
  Sense strand starting at position 2500 of SEQ ID NO: 1241656
ugcugaacaccucgagaaa

SEQ ID NO: 1289411 - RNA, 19 nt, Artificial Sequence
  Description of Artificial Sequence: Synthetic oligonucleotide
  Antisense strand to SEQ ID NO: 1289410
uuucucgagguguucagca

SEQ ID NO: 1289412 - RNA, 19 nt, Artificial Sequence
  Description of Artificial Sequence: Synthetic oligonucleotide
  Sense strand starting at position 2671 of SEQ ID NO: 1241656
guaaaucacuacuuagagu

SEQ ID NO: 1289413 - RNA, 19 nt, Artificial Sequence
  Description of Artificial Sequence: Synthetic oligonucleotide
  Antisense strand to SEQ ID NO: 1289412
acucuaaguagugauuuac

SEQ ID NO: 1289414 - RNA, 19 nt, Artificial Sequence
  Description of Artificial Sequence: Synthetic oligonucleotide
  Sense strand starting at position 2742 of SEQ ID NO: 1241656
gacugaauccucgggcacu

SEQ ID NO: 1289415 - RNA, 19 nt, Artificial Sequence
  Description of Artificial Sequence: Synthetic oligonucleotide
  Antisense strand to SEQ ID NO: 1289414
agugcccgaggauucaguc

SEQ ID NO: 1289416 - RNA, 19 nt, Artificial Sequence
  Description of Artificial Sequence: Synthetic oligonucleotide
  Sense strand starting at position 2873 of SEQ ID NO: 1241656
ugaagugaaacguauagcu

SEQ ID NO: 1289417 - RNA, 19 nt, Artificial Sequence
  Description of Artificial Sequence: Synthetic oligonucleotide
  Antisense strand to SEQ ID NO: 1289416
agcuauacguuucacuuca

SEQ ID NO: 1289418 - RNA, 19 nt, Artificial Sequence
  Description of Artificial Sequence: Synthetic oligonucleotide
  Sense strand starting at position 2875 of SEQ ID NO: 1241656
aagugaaacguauagcuaa

SEQ ID NO: 1289419 - RNA, 19 nt, Artificial Sequence
  Description of Artificial Sequence: Synthetic oligonucleotide
  Antisense strand to SEQ ID NO: 1289418
uuagcuauacguuucacuu

SEQ ID NO: 1289420 - RNA, 19 nt, Artificial Sequence
  Description of Artificial Sequence: Synthetic oligonucleotide
  Sense strand starting at position 2878 of SEQ ID NO: 1241656
ugaaacguauagcuaauau

SEQ ID NO: 1289421 - RNA, 19 nt, Artificial Sequence
  Description of Artificial Sequence: Synthetic oligonucleotide
  Antisense strand to SEQ ID NO: 1289420
auauuagcuauacguuuca

SEQ ID NO: 1289422 - RNA, 19 nt, Artificial Sequence
  Description of Artificial Sequence: Synthetic oligonucleotide
  Sense strand starting at position 2960 of SEQ ID NO: 1241656
agaauaaugugucccugaa

SEQ ID NO: 1289423 - RNA, 19 nt, Artificial Sequence
  Description of Artificial Sequence: Synthetic oligonucleotide
  Antisense strand to SEQ ID NO: 1289422
uucagggacacauuauucu

SEQ ID NO: 1289424 - RNA, 19 nt, Artificial Sequence
  Description of Artificial Sequence: Synthetic oligonucleotide
  Sense strand starting at position 2964 of SEQ ID NO: 1241656
uaaugugucccugaauaug

SEQ ID NO: 1289425 - RNA, 19 nt, Artificial Sequence
  Description of Artificial Sequence: Synthetic oligonucleotide
  Antisense strand to SEQ ID NO: 1289424
cauauucagggacacauua

SEQ ID NO: 1289426 - RNA, 19 nt, Artificial Sequence
  Description of Artificial Sequence: Synthetic oligonucleotide
  Sense strand starting at position 3124 of SEQ ID NO: 1241656
gguaaauaaugcuugguaa

SEQ ID NO: 1289427 - RNA, 19 nt, Artificial Sequence
  Description of Artificial Sequence: Synthetic oligonucleotide
  Antisense strand to SEQ ID NO: 1289426
uuaccaagcauuauuuacc

SEQ ID NO: 1289428 - RNA, 19 nt, Artificial Sequence
  Description of Artificial Sequence: Synthetic oligonucleotide
  Sense strand starting at position 3125 of SEQ ID NO: 1241656
guaaauaaugcuugguaaa

SEQ ID NO: 1289429 - RNA, 19 nt, Artificial Sequence
  Description of Artificial Sequence: Synthetic oligonucleotide
  Antisense strand to SEQ ID NO: 1289428
uuuaccaagcauuauuuac

SEQ ID NO: 1289430 - RNA, 19 nt, Artificial Sequence
  Description of Artificial Sequence: Synthetic oligonucleotide
  Sense strand starting at position 3204 of SEQ ID NO: 1241656
aaaugcaguguguaguaaa

SEQ ID NO: 1289431 - RNA, 19 nt, Artificial Sequence
  Description of Artificial Sequence: Synthetic oligonucleotide
  Antisense strand to SEQ ID NO: 1289430
uuuacuacacacugcauuu

SEQ ID NO: 1289432 - RNA, 19 nt, Artificial Sequence
  Description of Artificial Sequence: Synthetic oligonucleotide
  Sense strand starting at position 3502 of SEQ ID NO: 1241656
auaggcaguucuuuaagag

SEQ ID NO: 1289433 - RNA, 19 nt, Artificial Sequence
  Description of Artificial Sequence: Synthetic oligonucleotide
  Antisense strand to SEQ ID NO: 1289432
cucuuaaagaacugccuau

SEQ ID NO: 1289434 - RNA, 19 nt, Artificial Sequence
  Description of Artificial Sequence: Synthetic oligonucleotide
  Sense strand starting at position 3508 of SEQ ID NO: 1241656
aguucuuuaagaggugaaa

SEQ ID NO: 1289435 - RNA, 19 nt, Artificial Sequence
  Description of Artificial Sequence: Synthetic oligonucleotide
  Antisense strand to SEQ ID NO: 1289434
uuucaccucuuaaagaacu

SEQ ID NO: 1289436 - RNA, 19 nt, Artificial Sequence
  Description of Artificial Sequence: Synthetic oligonucleotide
  Sense strand starting at position 3510 of SEQ ID NO: 1241656
uucuuuaagaggugaaagu

SEQ ID NO: 1289437 - RNA, 19 nt, Artificial Sequence
  Description of Artificial Sequence: Synthetic oligonucleotide
  Antisense strand to SEQ ID NO: 1289436
acuuucaccucuuaaagaa

SEQ ID NO: 1289438 - RNA, 19 nt, Artificial Sequence
  Description of Artificial Sequence: Synthetic oligonucleotide
  Sense strand starting at position 116 of SEQ ID NO: 1241657
cagguucuugcagaagacu

SEQ ID NO: 1289439 - RNA, 19 nt, Artificial Sequence
  Description of Artificial Sequence: Synthetic oligonucleotide
  Antisense strand to SEQ ID NO: 1289438
agucuucugcaagaaccug

SEQ ID NO: 1289440 - RNA, 19 nt, Artificial Sequence
  Description of Artificial Sequence: Synthetic oligonucleotide
  Sense strand starting at position 279 of SEQ ID NO: 1241657
cucaucaguuuguccugau

SEQ ID NO: 1289441 - RNA, 19 nt, Artificial Sequence
  Description of Artificial Sequence: Synthetic oligonucleotide
  Antisense strand to SEQ ID NO: 1289440
aucaggacaaacugaugag

SEQ ID NO: 1289442 - RNA, 19 nt, Artificial Sequence
  Description of Artificial Sequence: Synthetic oligonucleotide
  Sense strand starting at position 280 of SEQ ID NO: 1241657
ucaucaguuuguccugaua

SEQ ID NO: 1289443 - RNA, 19 nt, Artificial Sequence
  Description of Artificial Sequence: Synthetic oligonucleotide
  Antisense strand to SEQ ID NO: 1289442
uaucaggacaaacugauga

SEQ ID NO: 1289444 - RNA, 19 nt, Artificial Sequence
  Description of Artificial Sequence: Synthetic oligonucleotide
  Sense strand starting at position 283 of SEQ ID NO: 1241657
ucaguuuguccugauaaca

SEQ ID NO: 1289445 - RNA, 19 nt, Artificial Sequence
  Description of Artificial Sequence: Synthetic oligonucleotide
  Antisense strand to SEQ ID NO: 1289444
uguuaucaggacaaacuga

SEQ ID NO: 1289446 - RNA, 19 nt, Artificial Sequence
  Description of Artificial Sequence: Synthetic oligonucleotide
  Sense strand starting at position 468 of SEQ ID NO: 1241657
ggacgaauguggucucauu

SEQ ID NO: 1289447 - RNA, 19 nt, Artificial Sequence
  Description of Artificial Sequence: Synthetic oligonucleotide
  Antisense strand to SEQ ID NO: 1289446
aaugagaccacauucgucc

SEQ ID NO: 1289448 - RNA, 19 nt, Artificial Sequence
  Description of Artificial Sequence: Synthetic oligonucleotide
  Sense strand starting at position 484 of SEQ ID NO: 1241657
auuaucugcuauguugaaa

SEQ ID NO: 1289449 - RNA, 19 nt, Artificial Sequence
  Description of Artificial Sequence: Synthetic oligonucleotide
  Antisense strand to SEQ ID NO: 1289448
uuucaacauagcagauaau

SEQ ID NO: 1289450 - RNA, 19 nt, Artificial Sequence
  Description of Artificial Sequence: Synthetic oligonucleotide
  Sense strand starting at position 708 of SEQ ID NO: 1241657
aaaugaagugccuguaaug

SEQ ID NO: 1289451 - RNA, 19 nt, Artificial Sequence
  Description of Artificial Sequence: Synthetic oligonucleotide
  Antisense strand to SEQ ID NO: 1289450
cauuacaggcacuucauuu

SEQ ID NO: 1289452 - RNA, 19 nt, Artificial Sequence
  Description of Artificial Sequence: Synthetic oligonucleotide
  Sense strand starting at position 902 of SEQ ID NO: 1241657
aaagcagcugucugaaacu

SEQ ID NO: 1289453 - RNA, 19 nt, Artificial Sequence
  Description of Artificial Sequence: Synthetic oligonucleotide
  Antisense strand to SEQ ID NO: 1289452
aguuucagacagcugcuuu

SEQ ID NO: 1289454 - RNA, 19 nt, Artificial Sequence
  Description of Artificial Sequence: Synthetic oligonucleotide
  Sense strand starting at position 1023 of SEQ ID NO: 1241657
gaaaguacucaauggcagu

SEQ ID NO: 1289455 - RNA, 19 nt, Artificial Sequence
  Description of Artificial Sequence: Synthetic oligonucleotide
  Antisense strand to SEQ ID NO: 1289454
acugccauugaguacuuuc

SEQ ID NO: 1289456 - RNA, 19 nt, Artificial Sequence
  Description of Artificial Sequence: Synthetic oligonucleotide
  Sense strand starting at position 1066 of SEQ ID NO: 1241657
ggguaaugaugcccaauuc

SEQ ID NO: 1289457 - RNA, 19 nt, Artificial Sequence
  Description of Artificial Sequence: Synthetic oligonucleotide
  Antisense strand to SEQ ID NO: 1289456
gaauugggcaucauuaccc

SEQ ID NO: 1289458 - RNA, 19 nt, Artificial Sequence
  Description of Artificial Sequence: Synthetic oligonucleotide
  Sense strand starting at position 1102 of SEQ ID NO: 1241657
ccagaaagaucccagagga

SEQ ID NO: 1289459 - RNA, 19 nt, Artificial Sequence
  Description of Artificial Sequence: Synthetic oligonucleotide
  Antisense strand to SEQ ID NO: 1289458
uccucugggaucuuucugg

SEQ ID NO: 1289460 - RNA, 19 nt, Artificial Sequence
  Description of Artificial Sequence: Synthetic oligonucleotide
  Sense strand starting at position 1127 of SEQ ID NO: 1241657
agaacuauauucgugaagu

SEQ ID NO: 1289461 - RNA, 19 nt, Artificial Sequence
  Description of Artificial Sequence: Synthetic oligonucleotide
  Antisense strand to SEQ ID NO: 1289460
acuucacgaauauaguucu

SEQ ID NO: 1289462 - RNA, 19 nt, Artificial Sequence
  Description of Artificial Sequence: Synthetic oligonucleotide
  Sense strand starting at position 1129 of SEQ ID NO: 1241657
aacuauauucgugaaguau

SEQ ID NO: 1289463 - RNA, 19 nt, Artificial Sequence
  Description of Artificial Sequence: Synthetic oligonucleotide
  Antisense strand to SEQ ID NO: 1289462
auacuucacgaauauaguu

SEQ ID NO: 1289464 - RNA, 19 nt, Artificial Sequence
  Description of Artificial Sequence: Synthetic oligonucleotide
  Sense strand starting at position 1166 of SEQ ID NO: 1241657
ggguuuaugaagugauagg

SEQ ID NO: 1289465 - RNA, 19 nt, Artificial Sequence
  Description of Artificial Sequence: Synthetic oligonucleotide
  Antisense strand to SEQ ID NO: 1289464
ccuaucacuucauaaaccc

SEQ ID NO: 1289466 - RNA, 19 nt, Artificial Sequence
  Description of Artificial Sequence: Synthetic oligonucleotide
  Sense strand starting at position 1228 of SEQ ID NO: 1241657
gagggcuguguguaaagga

SEQ ID NO: 1289467 - RNA, 19 nt, Artificial Sequence
  Description of Artificial Sequence: Synthetic oligonucleotide
  Antisense strand to SEQ ID NO: 1289466
uccuuuacacacagcccuc

SEQ ID NO: 1289468 - RNA, 19 nt, Artificial Sequence
  Description of Artificial Sequence: Synthetic oligonucleotide
  Sense strand starting at position 1459 of SEQ ID NO: 1241657
agggauuauuagcccuacu

SEQ ID NO: 1289469 - RNA, 19 nt, Artificial Sequence
  Description of Artificial Sequence: Synthetic oligonucleotide
  Antisense strand to SEQ ID NO: 1289468
aguagggcuaauaaucccu

SEQ ID NO: 1289470 - RNA, 19 nt, Artificial Sequence
  Description of Artificial Sequence: Synthetic oligonucleotide
  Sense strand starting at position 1591 of SEQ ID NO: 1241657
guaaauuugcugcagcauc

SEQ ID NO: 1289471 - RNA, 19 nt, Artificial Sequence
  Description of Artificial Sequence: Synthetic oligonucleotide
  Antisense strand to SEQ ID NO: 1289470
gaugcugcagcaaauuuac

SEQ ID NO: 1289472 - RNA, 19 nt, Artificial Sequence
  Description of Artificial Sequence: Synthetic oligonucleotide
  Sense strand starting at position 1649 of SEQ ID NO: 1241657
gucuaacuggcaggaauau

SEQ ID NO: 1289473 - RNA, 19 nt, Artificial Sequence
  Description of Artificial Sequence: Synthetic oligonucleotide
  Antisense strand to SEQ ID NO: 1289472
auauuccugccaguuagac

SEQ ID NO: 1289474 - RNA, 19 nt, Artificial Sequence
  Description of Artificial Sequence: Synthetic oligonucleotide
  Sense strand starting at position 1658 of SEQ ID NO: 1241657
gcaggaauauuugggauuc

SEQ ID NO: 1289475 - RNA, 19 nt, Artificial Sequence
  Description of Artificial Sequence: Synthetic oligonucleotide
  Antisense strand to SEQ ID NO: 1289474
gaaucccaaauauuccugc

SEQ ID NO: 1289476 - RNA, 19 nt, Artificial Sequence
  Description of Artificial Sequence: Synthetic oligonucleotide
  Sense strand starting at position 1659 of SEQ ID NO: 1241657
caggaauauuugggauucu

SEQ ID NO: 1289477 - RNA, 19 nt, Artificial Sequence
  Description of Artificial Sequence: Synthetic oligonucleotide
  Antisense strand to SEQ ID NO: 1289476
agaaucccaaauauuccug

SEQ ID NO: 1289478 - RNA, 19 nt, Artificial Sequence
  Description of Artificial Sequence: Synthetic oligonucleotide
  Sense strand starting at position 1660 of SEQ ID NO: 1241657
aggaauauuugggauucuu

SEQ ID NO: 1289479 - RNA, 19 nt, Artificial Sequence
  Description of Artificial Sequence: Synthetic oligonucleotide
  Antisense strand to SEQ ID NO: 1289478
aagaaucccaaauauuccu

SEQ ID NO: 1289480 - RNA, 19 nt, Artificial Sequence
  Description of Artificial Sequence: Synthetic oligonucleotide
  Sense strand starting at position 1668 of SEQ ID NO: 1241657
uugggauucuucucucaaa

SEQ ID NO: 1289481 - RNA, 19 nt, Artificial Sequence
  Description of Artificial Sequence: Synthetic oligonucleotide
  Antisense strand to SEQ ID NO: 1289480
uuugagagaagaaucccaa

SEQ ID NO: 1289482 - RNA, 19 nt, Artificial Sequence
  Description of Artificial Sequence: Synthetic oligonucleotide
  Sense strand starting at position 1723 of SEQ ID NO: 1241657
ugaagucucuccuuuaaga

SEQ ID NO: 1289483 - RNA, 19 nt, Artificial Sequence
  Description of Artificial Sequence: Synthetic oligonucleotide
  Antisense strand to SEQ ID NO: 1289482
ucuuaaaggagagacuuca

SEQ ID NO: 1289484 - RNA, 19 nt, Artificial Sequence
  Description of Artificial Sequence: Synthetic oligonucleotide
  Sense strand starting at position 1748 of SEQ ID NO: 1241657
gggaguacaugguugcauu

SEQ ID NO: 1289485 - RNA, 19 nt, Artificial Sequence
  Description of Artificial Sequence: Synthetic oligonucleotide
  Antisense strand to SEQ ID NO: 1289484
aaugcaaccauguacuccc

SEQ ID NO: 1289486 - RNA, 19 nt, Artificial Sequence
  Description of Artificial Sequence: Synthetic oligonucleotide
  Sense strand starting at position 1749 of SEQ ID NO: 1241657
ggaguacaugguugcauuu

SEQ ID NO: 1289487 - RNA, 19 nt, Artificial Sequence
  Description of Artificial Sequence: Synthetic oligonucleotide
  Antisense strand to SEQ ID NO: 1289486
aaaugcaaccauguacucc

SEQ ID NO: 1289488 - RNA, 19 nt, Artificial Sequence
  Description of Artificial Sequence: Synthetic oligonucleotide
  Sense strand starting at position 1776 of SEQ ID NO: 1241657
gggacuuacuucucccauc

SEQ ID NO: 1289489 - RNA, 19 nt, Artificial Sequence
  Description of Artificial Sequence: Synthetic oligonucleotide
  Antisense strand to SEQ ID NO: 1289488
gaugggagaaguaaguccc

SEQ ID NO: 1289490 - RNA, 19 nt, Artificial Sequence
  Description of Artificial Sequence: Synthetic oligonucleotide
  Sense strand starting at position 1928 of SEQ ID NO: 1241657
caggcaaaguacuuacaga

SEQ ID NO: 1289491 - RNA, 19 nt, Artificial Sequence
  Description of Artificial Sequence: Synthetic oligonucleotide
  Antisense strand to SEQ ID NO: 1289490
ucuguaaguacuuugccug

SEQ ID NO: 1289492 - RNA, 19 nt, Artificial Sequence
  Description of Artificial Sequence: Synthetic oligonucleotide
  Sense strand starting at position 2058 of SEQ ID NO: 1241657
gggaacugguaugaagaca

SEQ ID NO: 1289493 - RNA, 19 nt, Artificial Sequence
  Description of Artificial Sequence: Synthetic oligonucleotide
  Antisense strand to SEQ ID NO: 1289492
ugucuucauaccaguuccc

SEQ ID NO: 1289494 - RNA, 19 nt, Artificial Sequence
  Description of Artificial Sequence: Synthetic oligonucleotide
  Sense strand starting at position 2147 of SEQ ID NO: 1241657
gguggauugugacuuaagc

SEQ ID NO: 1289495 - RNA, 19 nt, Artificial Sequence
  Description of Artificial Sequence: Synthetic oligonucleotide
  Antisense strand to SEQ ID NO: 1289494
gcuuaagucacaauccacc

SEQ ID NO: 1289496 - RNA, 19 nt, Artificial Sequence
  Description of Artificial Sequence: Synthetic oligonucleotide
  Sense strand starting at position 2175 of SEQ ID NO: 1241657
cuuugagaauauucugaug

SEQ ID NO: 1289497 - RNA, 19 nt, Artificial Sequence
  Description of Artificial Sequence: Synthetic oligonucleotide
  Antisense strand to SEQ ID NO: 1289496
caucagaauauucucaaag

SEQ ID NO: 1289498 - RNA, 19 nt, Artificial Sequence
  Description of Artificial Sequence: Synthetic oligonucleotide
  Sense strand starting at position 2241 of SEQ ID NO: 1241657
uuguaugauccaggcugua

SEQ ID NO: 1289499 - RNA, 19 nt, Artificial Sequence
  Description of Artificial Sequence: Synthetic oligonucleotide
  Antisense strand to SEQ ID NO: 1289498
uacagccuggaucauacaa

SEQ ID NO: 1289500 - RNA, 19 nt, Artificial Sequence
  Description of Artificial Sequence: Synthetic oligonucleotide
  Sense strand starting at position 2579 of SEQ ID NO: 1241657
ggcugaugugaaugcaauu

SEQ ID NO: 1289501 - RNA, 19 nt, Artificial Sequence
  Description of Artificial Sequence: Synthetic oligonucleotide
  Antisense strand to SEQ ID NO: 1289500
aauugcauucacaucagcc

SEQ ID NO: 1289502 - RNA, 19 nt, Artificial Sequence
  Description of Artificial Sequence: Synthetic oligonucleotide
  Sense strand starting at position 3128 of SEQ ID NO: 1241657
gcuaauuuguuggaauauc

SEQ ID NO: 1289503 - RNA, 19 nt, Artificial Sequence
  Description of Artificial Sequence: Synthetic oligonucleotide
  Antisense strand to SEQ ID NO: 1289502
gauauuccaacaaauuagc

SEQ ID NO: 1289504 - RNA, 19 nt, Artificial Sequence
  Description of Artificial Sequence: Synthetic oligonucleotide
  Sense strand starting at position 3136 of SEQ ID NO: 1241657
guuggaauaucucuggaua

SEQ ID NO: 1289505 - RNA, 19 nt, Artificial Sequence
  Description of Artificial Sequence: Synthetic oligonucleotide
  Antisense strand to SEQ ID NO: 1289504
uauccagagauauuccaac

SEQ ID NO: 1289506 - RNA, 19 nt, Artificial Sequence
  Description of Artificial Sequence: Synthetic oligonucleotide
  Sense strand starting at position 3137 of SEQ ID NO: 1241657
uuggaauaucucuggauau

SEQ ID NO: 1289507 - RNA, 19 nt, Artificial Sequence
  Description of Artificial Sequence: Synthetic oligonucleotide
  Antisense strand to SEQ ID NO: 1289506
auauccagagauauuccaa

SEQ ID NO: 1289508 - RNA, 19 nt, Artificial Sequence
  Description of Artificial Sequence: Synthetic oligonucleotide
  Sense strand starting at position 3553 of SEQ ID NO: 1241657
cuacgauaacugggcugua

SEQ ID NO: 1289509 - RNA, 19 nt, Artificial Sequence
  Description of Artificial Sequence: Synthetic oligonucleotide
  Antisense strand to SEQ ID NO: 1289508
uacagcccaguuaucguag

SEQ ID NO: 1289510 - RNA, 19 nt, Artificial Sequence
  Description of Artificial Sequence: Synthetic oligonucleotide
  Sense strand starting at position 3554 of SEQ ID NO: 1241657
uacgauaacugggcuguaa

SEQ ID NO: 1289511 - RNA, 19 nt, Artificial Sequence
  Description of Artificial Sequence: Synthetic oligonucleotide
  Antisense strand to SEQ ID NO: 1289510
uuacagcccaguuaucgua

SEQ ID NO: 1289512 - RNA, 19 nt, Artificial Sequence
  Description of Artificial Sequence: Synthetic oligonucleotide
  Sense strand starting at position 3558 of SEQ ID NO: 1241657
auaacugggcuguaaguau

SEQ ID NO: 1289513 - RNA, 19 nt, Artificial Sequence
  Description of Artificial Sequence: Synthetic oligonucleotide
  Antisense strand to SEQ ID NO: 1289512
auacuuacagcccaguuau

SEQ ID NO: 1289514 - RNA, 19 nt, Artificial Sequence
  Description of Artificial Sequence: Synthetic oligonucleotide
  Sense strand starting at position 3803 of SEQ ID NO: 1241657
ggaauuggcucugaauuug

SEQ ID NO: 1289515 - RNA, 19 nt, Artificial Sequence
  Description of Artificial Sequence: Synthetic oligonucleotide
  Antisense strand to SEQ ID NO: 1289514
caaauucagagccaauucc

SEQ ID NO: 1289516 - RNA, 19 nt, Artificial Sequence
  Description of Artificial Sequence: Synthetic oligonucleotide
  Sense strand starting at position 3881 of SEQ ID NO: 1241657
cgggauguguuucuauuua

SEQ ID NO: 1289517 - RNA, 19 nt, Artificial Sequence
  Description of Artificial Sequence: Synthetic oligonucleotide
  Antisense strand to SEQ ID NO: 1289516
uaaauagaaacacaucccg

SEQ ID NO: 1289518 - RNA, 19 nt, Artificial Sequence
  Description of Artificial Sequence: Synthetic oligonucleotide
  Sense strand starting at position 45 of SEQ ID NO: 1241658
auccacuuccugggauauu

SEQ ID NO: 1289519 - RNA, 19 nt, Artificial Sequence
  Description of Artificial Sequence: Synthetic oligonucleotide
  Antisense strand to SEQ ID NO: 1289518
aauaucccaggaaguggau

SEQ ID NO: 1289520 - RNA, 19 nt, Artificial Sequence
  Description of Artificial Sequence: Synthetic oligonucleotide
  Sense strand starting at position 333 of SEQ ID NO: 1241658
gagguuacugcagggauua

SEQ ID NO: 1289521 - RNA, 19 nt, Artificial Sequence
  Description of Artificial Sequence: Synthetic oligonucleotide
  Antisense strand to SEQ ID NO: 1289520
uaaucccugcaguaaccuc

SEQ ID NO: 1289522 - RNA, 19 nt, Artificial Sequence
  Description of Artificial Sequence: Synthetic oligonucleotide
  Sense strand starting at position 480 of SEQ ID NO: 1241658
cagaaugaggccuggucaa

SEQ ID NO: 1289523 - RNA, 19 nt, Artificial Sequence
  Description of Artificial Sequence: Synthetic oligonucleotide
  Antisense strand to SEQ ID NO: 1289522
uugaccaggccucauucug

SEQ ID NO: 1289524 - RNA, 19 nt, Artificial Sequence
  Description of Artificial Sequence: Synthetic oligonucleotide
  Sense strand starting at position 546 of SEQ ID NO: 1241658
gacacagugacucgaggaa

SEQ ID NO: 1289525 - RNA, 19 nt, Artificial Sequence
  Description of Artificial Sequence: Synthetic oligonucleotide
  Antisense strand to SEQ ID NO: 1289524
uuccucgagucacuguguc

SEQ ID NO: 1289526 - RNA, 19 nt, Artificial Sequence
  Description of Artificial Sequence: Synthetic oligonucleotide
  Sense strand starting at position 799 of SEQ ID NO: 1241658
gugagaauucgucacuaca

SEQ ID NO: 1289527 - RNA, 19 nt, Artificial Sequence
  Description of Artificial Sequence: Synthetic oligonucleotide
  Antisense strand to SEQ ID NO: 1289526
uguagugacgaauucucac

SEQ ID NO: 1289528 - RNA, 19 nt, Artificial Sequence
  Description of Artificial Sequence: Synthetic oligonucleotide
  Sense strand starting at position 1088 of SEQ ID NO: 1241658
gcaugugucaccgcagcua

SEQ ID NO: 1289529 - RNA, 19 nt, Artificial Sequence
  Description of Artificial Sequence: Synthetic oligonucleotide
  Antisense strand to SEQ ID NO: 1289528
uagcugcggugacacaugc

SEQ ID NO: 1289530 - RNA, 19 nt, Artificial Sequence
  Description of Artificial Sequence: Synthetic oligonucleotide
  Sense strand starting at position 1179 of SEQ ID NO: 1241658
agugaacuugcugaccaua

SEQ ID NO: 1289531 - RNA, 19 nt, Artificial Sequence
  Description of Artificial Sequence: Synthetic oligonucleotide
  Antisense strand to SEQ ID NO: 1289530
uauggucagcaaguucacu

SEQ ID NO: 1289532 - RNA, 19 nt, Artificial Sequence
  Description of Artificial Sequence: Synthetic oligonucleotide
  Sense strand starting at position 1181 of SEQ ID NO: 1241658
ugaacuugcugaccauaaa

SEQ ID NO: 1289533 - RNA, 19 nt, Artificial Sequence
  Description of Artificial Sequence: Synthetic oligonucleotide
  Antisense strand to SEQ ID NO: 1289532
uuuauggucagcaaguuca

SEQ ID NO: 1289534 - RNA, 19 nt, Artificial Sequence
  Description of Artificial Sequence: Synthetic oligonucleotide
  Sense strand starting at position 1184 of SEQ ID NO: 1241658
acuugcugaccauaaaugu

SEQ ID NO: 1289535 - RNA, 19 nt, Artificial Sequence
  Description of Artificial Sequence: Synthetic oligonucleotide
  Antisense strand to SEQ ID NO: 1289534
acauuuauggucagcaagu

SEQ ID NO: 1289536 - RNA, 19 nt, Artificial Sequence
  Description of Artificial Sequence: Synthetic oligonucleotide
  Sense strand starting at position 1190 of SEQ ID NO: 1241658
ugaccauaaaugugaacga

SEQ ID NO: 1289537 - RNA, 19 nt, Artificial Sequence
  Description of Artificial Sequence: Synthetic oligonucleotide
  Antisense strand to SEQ ID NO: 1289536
ucguucacauuuaugguca

SEQ ID NO: 1289538 - RNA, 19 nt, Artificial Sequence
  Description of Artificial Sequence: Synthetic oligonucleotide
  Sense strand starting at position 1492 of SEQ ID NO: 1241658
uggguucuucccuacaaga

SEQ ID NO: 1289539 - RNA, 19 nt, Artificial Sequence
  Description of Artificial Sequence: Synthetic oligonucleotide
  Antisense strand to SEQ ID NO: 1289538
ucuuguagggaagaaccca

SEQ ID NO: 1289540 - RNA, 19 nt, Artificial Sequence
  Description of Artificial Sequence: Synthetic oligonucleotide
  Sense strand starting at position 1519 of SEQ ID NO: 1241658
cuagauuucugguuagcuc

SEQ ID NO: 1289541 - RNA, 19 nt, Artificial Sequence
  Description of Artificial Sequence: Synthetic oligonucleotide
  Antisense strand to SEQ ID NO: 1289540
gagcuaaccagaaaucuag

SEQ ID NO: 1289542 - RNA, 19 nt, Artificial Sequence
  Description of Artificial Sequence: Synthetic oligonucleotide
  Sense strand starting at position 1637 of SEQ ID NO: 1241658
gagugauacugaucaccau

SEQ ID NO: 1289543 - RNA, 19 nt, Artificial Sequence
  Description of Artificial Sequence: Synthetic oligonucleotide
  Antisense strand to SEQ ID NO: 1289542
auggugaucaguaucacuc

SEQ ID NO: 1289544 - RNA, 19 nt, Artificial Sequence
  Description of Artificial Sequence: Synthetic oligonucleotide
  Sense strand starting at position 1849 of SEQ ID NO: 1241658
gguucuguucuggaguaga

SEQ ID NO: 1289545 - RNA, 19 nt, Artificial Sequence
  Description of Artificial Sequence: Synthetic oligonucleotide
  Antisense strand to SEQ ID NO: 1289544
ucuacuccagaacagaacc

SEQ ID NO: 1289546 - RNA, 19 nt, Artificial Sequence
  Description of Artificial Sequence: Synthetic oligonucleotide
  Sense strand starting at position 1885 of SEQ ID NO: 1241658
ugaagaaacugguuucuug

SEQ ID NO: 1289547 - RNA, 19 nt, Artificial Sequence
  Description of Artificial Sequence: Synthetic oligonucleotide
  Antisense strand to SEQ ID NO: 1289546
caagaaaccaguuucuuca

SEQ ID NO: 1289548 - RNA, 19 nt, Artificial Sequence
  Description of Artificial Sequence: Synthetic oligonucleotide
  Sense strand starting at position 2223 of SEQ ID NO: 1241658
aagagagaacuuugucauu

SEQ ID NO: 1289549 - RNA, 19 nt, Artificial Sequence
  Description of Artificial Sequence: Synthetic oligonucleotide
  Antisense strand to SEQ ID NO: 1289548
aaugacaaaguucucucuu

SEQ ID NO: 1289550 - RNA, 19 nt, Artificial Sequence
  Description of Artificial Sequence: Synthetic oligonucleotide
  Sense strand starting at position 2225 of SEQ ID NO: 1241658
gagagaacuuugucauugu

SEQ ID NO: 1289551 - RNA, 19 nt, Artificial Sequence
  Description of Artificial Sequence: Synthetic oligonucleotide
  Antisense strand to SEQ ID NO: 1289550
acaaugacaaaguucucuc

SEQ ID NO: 1289552 - RNA, 19 nt, Artificial Sequence
  Description of Artificial Sequence: Synthetic oligonucleotide
  Sense strand starting at position 2294 of SEQ ID NO: 1241658
uggcaagcacaucaaauua

SEQ ID NO: 1289553 - RNA, 19 nt, Artificial Sequence
  Description of Artificial Sequence: Synthetic oligonucleotide
  Antisense strand to SEQ ID NO: 1289552
uaauuugaugugcuugcca

SEQ ID NO: 1289554 - RNA, 19 nt, Artificial Sequence
  Description of Artificial Sequence: Synthetic oligonucleotide
  Sense strand starting at position 2375 of SEQ ID NO: 1241658
aggcauuuaucacagacag

SEQ ID NO: 1289555 - RNA, 19 nt, Artificial Sequence
  Description of Artificial Sequence: Synthetic oligonucleotide
  Antisense strand to SEQ ID NO: 1289554
cugucugugauaaaugccu

SEQ ID NO: 1289556 - RNA, 19 nt, Artificial Sequence
  Description of Artificial Sequence: Synthetic oligonucleotide
  Sense strand starting at position 2615 of SEQ ID NO: 1241658
auggacauucuagguuuau

SEQ ID NO: 1289557 - RNA, 19 nt, Artificial Sequence
  Description of Artificial Sequence: Synthetic oligonucleotide
  Antisense strand to SEQ ID NO: 1289556
auaaaccuagaauguccau

SEQ ID NO: 1289558 - RNA, 19 nt, Artificial Sequence
  Description of Artificial Sequence: Synthetic oligonucleotide
  Sense strand starting at position 2616 of SEQ ID NO: 1241658
uggacauucuagguuuaua

SEQ ID NO: 1289559 - RNA, 19 nt, Artificial Sequence
  Description of Artificial Sequence: Synthetic oligonucleotide
  Antisense strand to SEQ ID NO: 1289558
uauaaaccuagaaugucca

SEQ ID NO: 1289560 - RNA, 19 nt, Artificial Sequence
  Description of Artificial Sequence: Synthetic oligonucleotide
  Sense strand starting at position 2625 of SEQ ID NO: 1241658
uagguuuauagugaggguu

SEQ ID NO: 1289561 - RNA, 19 nt, Artificial Sequence
  Description of Artificial Sequence: Synthetic oligonucleotide
  Antisense strand to SEQ ID NO: 1289560
aacccucacuauaaaccua

SEQ ID NO: 1289562 - RNA, 19 nt, Artificial Sequence
  Description of Artificial Sequence: Synthetic oligonucleotide
  Sense strand starting at position 2774 of SEQ ID NO: 1241658
gguguuauuucccucucua

SEQ ID NO: 1289563 - RNA, 19 nt, Artificial Sequence
  Description of Artificial Sequence: Synthetic oligonucleotide
  Antisense strand to SEQ ID NO: 1289562
uagagagggaaauaacacc

SEQ ID NO: 1289564 - RNA, 19 nt, Artificial Sequence
  Description of Artificial Sequence: Synthetic oligonucleotide
  Sense strand starting at position 2826 of SEQ ID NO: 1241658
guuaaauagcaacagugaa

SEQ ID NO: 1289565 - RNA, 19 nt, Artificial Sequence
  Description of Artificial Sequence: Synthetic oligonucleotide
  Antisense strand to SEQ ID NO: 1289564
uucacuguugcuauuuaac

SEQ ID NO: 1289566 - RNA, 19 nt, Artificial Sequence
  Description of Artificial Sequence: Synthetic oligonucleotide
  Sense strand starting at position 2846 of SEQ ID NO: 1241658
aaauguugggauuguaaug

SEQ ID NO: 1289567 - RNA, 19 nt, Artificial Sequence
  Description of Artificial Sequence: Synthetic oligonucleotide
  Antisense strand to SEQ ID NO: 1289566
cauuacaaucccaacauuu

SEQ ID NO: 1289568 - RNA, 19 nt, Artificial Sequence
  Description of Artificial Sequence: Synthetic oligonucleotide
  Sense strand starting at position 2896 of SEQ ID NO: 1241658
uuaccuuugcauuagggaa

SEQ ID NO: 1289569 - RNA, 19 nt, Artificial Sequence
  Description of Artificial Sequence: Synthetic oligonucleotide
  Antisense strand to SEQ ID NO: 1289568
uucccuaaugcaaagguaa

SEQ ID NO: 1289570 - RNA, 19 nt, Artificial Sequence
  Description of Artificial Sequence: Synthetic oligonucleotide
  Sense strand starting at position 2908 of SEQ ID NO: 1241658
uagggaagggcucauucuu

SEQ ID NO: 1289571 - RNA, 19 nt, Artificial Sequence
  Description of Artificial Sequence: Synthetic oligonucleotide
  Antisense strand to SEQ ID NO: 1289570
aagaaugagcccuucccua

SEQ ID NO: 1289572 - RNA, 19 nt, Artificial Sequence
  Description of Artificial Sequence: Synthetic oligonucleotide
  Sense strand starting at position 2998 of SEQ ID NO: 1241658
cuuguccaucugggaaauu

SEQ ID NO: 1289573 - RNA, 19 nt, Artificial Sequence
  Description of Artificial Sequence: Synthetic oligonucleotide
  Antisense strand to SEQ ID NO: 1289572
aauuucccagauggacaag

SEQ ID NO: 1289574 - RNA, 19 nt, Artificial Sequence
  Description of Artificial Sequence: Synthetic oligonucleotide
  Sense strand starting at position 3009 of SEQ ID NO: 1241658
gggaaauucugacccagcu

SEQ ID NO: 1289575 - RNA, 19 nt, Artificial Sequence
  Description of Artificial Sequence: Synthetic oligonucleotide
  Antisense strand to SEQ ID NO: 1289574
agcugggucagaauuuccc

SEQ ID NO: 1289576 - RNA, 19 nt, Artificial Sequence
  Description of Artificial Sequence: Synthetic oligonucleotide
  Sense strand starting at position 3047 of SEQ ID NO: 1241658
ucacuuucuccaugaggag

SEQ ID NO: 1289577 - RNA, 19 nt, Artificial Sequence
  Description of Artificial Sequence: Synthetic oligonucleotide
  Antisense strand to SEQ ID NO: 1289576
cuccucauggagaaaguga

SEQ ID NO: 1289578 - RNA, 19 nt, Artificial Sequence
  Description of Artificial Sequence: Synthetic oligonucleotide
  Sense strand starting at position 3140 of SEQ ID NO: 1241658
gguuguaauggugauauua

SEQ ID NO: 1289579 - RNA, 19 nt, Artificial Sequence
  Description of Artificial Sequence: Synthetic oligonucleotide
  Antisense strand to SEQ ID NO: 1289578
uaauaucaccauuacaacc

SEQ ID NO: 1289580 - RNA, 19 nt, Artificial Sequence
  Description of Artificial Sequence: Synthetic oligonucleotide
  Sense strand starting at position 3188 of SEQ ID NO: 1241658
ggugagaguggugauaguu

SEQ ID NO: 1289581 - RNA, 19 nt, Artificial Sequence
  Description of Artificial Sequence: Synthetic oligonucleotide
  Antisense strand to SEQ ID NO: 1289580
aacuaucaccacucucacc

SEQ ID NO: 1289582 - RNA, 19 nt, Artificial Sequence
  Description of Artificial Sequence: Synthetic oligonucleotide
  Sense strand starting at position 3290 of SEQ ID NO: 1241658
gguggugaugguggaaaua

SEQ ID NO: 1289583 - RNA, 19 nt, Artificial Sequence
  Description of Artificial Sequence: Synthetic oligonucleotide
  Antisense strand to SEQ ID NO: 1289582
uauuuccaccaucaccacc

SEQ ID NO: 1289584 - RNA, 19 nt, Artificial Sequence
  Description of Artificial Sequence: Synthetic oligonucleotide
  Sense strand starting at position 3301 of SEQ ID NO: 1241658
uggaaauaauaguugugau

SEQ ID NO: 1289585 - RNA, 19 nt, Artificial Sequence
  Description of Artificial Sequence: Synthetic oligonucleotide
  Antisense strand to SEQ ID NO: 1289584
aucacaacuauuauuucca

SEQ ID NO: 1289586 - RNA, 19 nt, Artificial Sequence
  Description of Artificial Sequence: Synthetic oligonucleotide
  Sense strand starting at position 3302 of SEQ ID NO: 1241658
ggaaauaauaguugugaug

SEQ ID NO: 1289587 - RNA, 19 nt, Artificial Sequence
  Description of Artificial Sequence: Synthetic oligonucleotide
  Antisense strand to SEQ ID NO: 1289586
caucacaacuauuauuucc

SEQ ID NO: 1289588 - RNA, 19 nt, Artificial Sequence
  Description of Artificial Sequence: Synthetic oligonucleotide
  Sense strand starting at position 3399 of SEQ ID NO: 1241658
uggugauggaaguaguagu

SEQ ID NO: 1289589 - RNA, 19 nt, Artificial Sequence
  Description of Artificial Sequence: Synthetic oligonucleotide
  Antisense strand to SEQ ID NO: 1289588
acuacuacuuccaucacca

SEQ ID NO: 1289590 - RNA, 19 nt, Artificial Sequence
  Description of Artificial Sequence: Synthetic oligonucleotide
  Sense strand starting at position 3532 of SEQ ID NO: 1241658
ggugaugcaggugaugaua

SEQ ID NO: 1289591 - RNA, 19 nt, Artificial Sequence
  Description of Artificial Sequence: Synthetic oligonucleotide
  Antisense strand to SEQ ID NO: 1289590
uaucaucaccugcaucacc

SEQ ID NO: 1289592 - RNA, 19 nt, Artificial Sequence
  Description of Artificial Sequence: Synthetic oligonucleotide
  Sense strand starting at position 3623 of SEQ ID NO: 1241658
gguaacgguggugauaaua

SEQ ID NO: 1289593 - RNA, 19 nt, Artificial Sequence
  Description of Artificial Sequence: Synthetic oligonucleotide
  Antisense strand to SEQ ID NO: 1289592
uauuaucaccaccguuacc

SEQ ID NO: 1289594 - RNA, 19 nt, Artificial Sequence
  Description of Artificial Sequence: Synthetic oligonucleotide
  Sense strand starting at position 3884 of SEQ ID NO: 1241658
ugaugauaauaguugugau

SEQ ID NO: 1289595 - RNA, 19 nt, Artificial Sequence
  Description of Artificial Sequence: Synthetic oligonucleotide
  Antisense strand to SEQ ID NO: 1289594
aucacaacuauuaucauca

SEQ ID NO: 1289596 - RNA, 19 nt, Artificial Sequence
  Description of Artificial Sequence: Synthetic oligonucleotide
  Sense strand starting at position 3885 of SEQ ID NO: 1241658
gaugauaauaguugugaug

SEQ ID NO: 1289597 - RNA, 19 nt, Artificial Sequence
  Description of Artificial Sequence: Synthetic oligonucleotide
  Antisense strand to SEQ ID NO: 1289596
caucacaacuauuaucauc

SEQ ID NO: 1289598 - RNA, 19 nt, Artificial Sequence
  Description of Artificial Sequence: Synthetic oligonucleotide
  Sense strand starting at position 51 of SEQ ID NO: 1241659
uugugagaaucaccugaag

SEQ ID NO: 1289599 - RNA, 19 nt, Artificial Sequence
  Description of Artificial Sequence: Synthetic oligonucleotide
  Antisense strand to SEQ ID NO: 1289598
cuucaggugauucucacaa

SEQ ID NO: 1289600 - RNA, 19 nt, Artificial Sequence
  Description of Artificial Sequence: Synthetic oligonucleotide
  Sense strand starting at position 142 of SEQ ID NO: 1241659
auauuuggcucuguuuauu

SEQ ID NO: 1289601 - RNA, 19 nt, Artificial Sequence
  Description of Artificial Sequence: Synthetic oligonucleotide
  Antisense strand to SEQ ID NO: 1289600
aauaaacagagccaaauau

SEQ ID NO: 1289602 - RNA, 19 nt, Artificial Sequence
  Description of Artificial Sequence: Synthetic oligonucleotide
  Sense strand starting at position 236 of SEQ ID NO: 1241659
ggaggcuucugaucucaug

SEQ ID NO: 1289603 - RNA, 19 nt, Artificial Sequence
  Description of Artificial Sequence: Synthetic oligonucleotide
  Antisense strand to SEQ ID NO: 1289602
caugagaucagaagccucc

SEQ ID NO: 1289604 - RNA, 19 nt, Artificial Sequence
  Description of Artificial Sequence: Synthetic oligonucleotide
  Sense strand starting at position 307 of SEQ ID NO: 1241659
gaggccuuucccuggauga

SEQ ID NO: 1289605 - RNA, 19 nt, Artificial Sequence
  Description of Artificial Sequence: Synthetic oligonucleotide
  Antisense strand to SEQ ID NO: 1289604
ucauccagggaaaggccuc

SEQ ID NO: 1289606 - RNA, 19 nt, Artificial Sequence
  Description of Artificial Sequence: Synthetic oligonucleotide
  Sense strand starting at position 429 of SEQ ID NO: 1241659
ucagcuuucucauuggaca

SEQ ID NO: 1289607 - RNA, 19 nt, Artificial Sequence
  Description of Artificial Sequence: Synthetic oligonucleotide
  Antisense strand to SEQ ID NO: 1289606
uguccaaugagaaagcuga

SEQ ID NO: 1289608 - RNA, 19 nt, Artificial Sequence
  Description of Artificial Sequence: Synthetic oligonucleotide
  Sense strand starting at position 956 of SEQ ID NO: 1241659
ggacacuagggucgucuaa

SEQ ID NO: 1289609 - RNA, 19 nt, Artificial Sequence
  Description of Artificial Sequence: Synthetic oligonucleotide
  Antisense strand to SEQ ID NO: 1289608
uuagacgacccuagugucc

SEQ ID NO: 1289610 - RNA, 19 nt, Artificial Sequence
  Description of Artificial Sequence: Synthetic oligonucleotide
  Sense strand starting at position 958 of SEQ ID NO: 1241659
acacuagggucgucuaaag

SEQ ID NO: 1289611 - RNA, 19 nt, Artificial Sequence
  Description of Artificial Sequence: Synthetic oligonucleotide
  Antisense strand to SEQ ID NO: 1289610
cuuuagacgacccuagugu

SEQ ID NO: 1289612 - RNA, 19 nt, Artificial Sequence
  Description of Artificial Sequence: Synthetic oligonucleotide
  Sense strand starting at position 1108 of SEQ ID NO: 1241659
cugacaaggucuguagaga

SEQ ID NO: 1289613 - RNA, 19 nt, Artificial Sequence
  Description of Artificial Sequence: Synthetic oligonucleotide
  Antisense strand to SEQ ID NO: 1289612
ucucuacagaccuugucag

SEQ ID NO: 1289614 - RNA, 19 nt, Artificial Sequence
  Description of Artificial Sequence: Synthetic oligonucleotide
  Sense strand starting at position 1164 of SEQ ID NO: 1241659
aaucuuguuugaucaugga

SEQ ID NO: 1289615 - RNA, 19 nt, Artificial Sequence
  Description of Artificial Sequence: Synthetic oligonucleotide
  Antisense strand to SEQ ID NO: 1289614
uccaugaucaaacaagauu

SEQ ID NO: 1289616 - RNA, 19 nt, Artificial Sequence
  Description of Artificial Sequence: Synthetic oligonucleotide
  Sense strand starting at position 1168 of SEQ ID NO: 1241659
uuguuugaucauggaaagu

SEQ ID NO: 1289617 - RNA, 19 nt, Artificial Sequence
  Description of Artificial Sequence: Synthetic oligonucleotide
  Antisense strand to SEQ ID NO: 1289616
acuuuccaugaucaaacaa

SEQ ID NO: 1289618 - RNA, 19 nt, Artificial Sequence
  Description of Artificial Sequence: Synthetic oligonucleotide
  Sense strand starting at position 1245 of SEQ ID NO: 1241659
cauaguacauugucuagga

SEQ ID NO: 1289619 - RNA, 19 nt, Artificial Sequence
  Description of Artificial Sequence: Synthetic oligonucleotide
  Antisense strand to SEQ ID NO: 1289618
uccuagacaauguacuaug

SEQ ID NO: 1289620 - RNA, 19 nt, Artificial Sequence
  Description of Artificial Sequence: Synthetic oligonucleotide
  Sense strand starting at position 1246 of SEQ ID NO: 1241659
auaguacauugucuaggaa

SEQ ID NO: 1289621 - RNA, 19 nt, Artificial Sequence
  Description of Artificial Sequence: Synthetic oligonucleotide
  Antisense strand to SEQ ID NO: 1289620
uuccuagacaauguacuau

SEQ ID NO: 1289622 - RNA, 19 nt, Artificial Sequence
  Description of Artificial Sequence: Synthetic oligonucleotide
  Sense strand starting at position 1275 of SEQ ID NO: 1241659
cuaguaauuugagaauaug

SEQ ID NO: 1289623 - RNA, 19 nt, Artificial Sequence
  Description of Artificial Sequence: Synthetic oligonucleotide
  Antisense strand to SEQ ID NO: 1289622
cauauucucaaauuacuag

SEQ ID NO: 1289624 - RNA, 19 nt, Artificial Sequence
  Description of Artificial Sequence: Synthetic oligonucleotide
  Sense strand starting at position 1284 of SEQ ID NO: 1241659
ugagaauauguuuggauua

SEQ ID NO: 1289625 - RNA, 19 nt, Artificial Sequence
  Description of Artificial Sequence: Synthetic oligonucleotide
  Antisense strand to SEQ ID NO: 1289624
uaauccaaacauauucuca

SEQ ID NO: 1289626 - RNA, 19 nt, Artificial Sequence
  Description of Artificial Sequence: Synthetic oligonucleotide
  Sense strand starting at position 1333 of SEQ ID NO: 1241659
cuaccuuaccgugaaagga

SEQ ID NO: 1289627 - RNA, 19 nt, Artificial Sequence
  Description of Artificial Sequence: Synthetic oligonucleotide
  Antisense strand to SEQ ID NO: 1289626
uccuuucacgguaagguag

SEQ ID NO: 1289628 - RNA, 19 nt, Artificial Sequence
  Description of Artificial Sequence: Synthetic oligonucleotide
  Sense strand starting at position 1342 of SEQ ID NO: 1241659
cgugaaaggaaauguaauc

SEQ ID NO: 1289629 - RNA, 19 nt, Artificial Sequence
  Description of Artificial Sequence: Synthetic oligonucleotide
  Antisense strand to SEQ ID NO: 1289628
gauuacauuuccuuucacg

SEQ ID NO: 1289630 - RNA, 19 nt, Artificial Sequence
  Description of Artificial Sequence: Synthetic oligonucleotide
  Sense strand starting at position 1387 of SEQ ID NO: 1241659
ucagguguuugaccaaauc

SEQ ID NO: 1289631 - RNA, 19 nt, Artificial Sequence
  Description of Artificial Sequence: Synthetic oligonucleotide
  Antisense strand to SEQ ID NO: 1289630
gauuuggucaaacaccuga

SEQ ID NO: 1289632 - RNA, 19 nt, Artificial Sequence
  Description of Artificial Sequence: Synthetic oligonucleotide
  Sense strand starting at position 1616 of SEQ ID NO: 1241659
gagaacuugcuggaagcau

SEQ ID NO: 1289633 - RNA, 19 nt, Artificial Sequence
  Description of Artificial Sequence: Synthetic oligonucleotide
  Antisense strand to SEQ ID NO: 1289632
augcuuccagcaaguucuc

SEQ ID NO: 1289634 - RNA, 19 nt, Artificial Sequence
  Description of Artificial Sequence: Synthetic oligonucleotide
  Sense strand starting at position 1628 of SEQ ID NO: 1241659
gaagcauucguggaucuug

SEQ ID NO: 1289635 - RNA, 19 nt, Artificial Sequence
  Description of Artificial Sequence: Synthetic oligonucleotide
  Antisense strand to SEQ ID NO: 1289634
caagauccacgaaugcuuc

SEQ ID NO: 1289636 - RNA, 19 nt, Artificial Sequence
  Description of Artificial Sequence: Synthetic oligonucleotide
  Sense strand starting at position 1653 of SEQ ID NO: 1241659
ggcgucucugugagguuga

SEQ ID NO: 1289637 - RNA, 19 nt, Artificial Sequence
  Description of Artificial Sequence: Synthetic oligonucleotide
  Antisense strand to SEQ ID NO: 1289636
ucaaccucacagagacgcc

SEQ ID NO: 1289638 - RNA, 19 nt, Artificial Sequence
  Description of Artificial Sequence: Synthetic oligonucleotide
  Sense strand starting at position 1871 of SEQ ID NO: 1241659
uugaucauggugggaugua

SEQ ID NO: 1289639 - RNA, 19 nt, Artificial Sequence
  Description of Artificial Sequence: Synthetic oligonucleotide
  Antisense strand to SEQ ID NO: 1289638
uacaucccaccaugaucaa

SEQ ID NO: 1289640 - RNA, 19 nt, Artificial Sequence
  Description of Artificial Sequence: Synthetic oligonucleotide
  Sense strand starting at position 1992 of SEQ ID NO: 1241659
gguauuguccugcaagaca

SEQ ID NO: 1289641 - RNA, 19 nt, Artificial Sequence
  Description of Artificial Sequence: Synthetic oligonucleotide
  Antisense strand to SEQ ID NO: 1289640
ugucuugcaggacaauacc

SEQ ID NO: 1289642 - RNA, 19 nt, Artificial Sequence
  Description of Artificial Sequence: Synthetic oligonucleotide
  Sense strand starting at position 2065 of SEQ ID NO: 1241659
gacugacauugugugauug

SEQ ID NO: 1289643 - RNA, 19 nt, Artificial Sequence
  Description of Artificial Sequence: Synthetic oligonucleotide
  Antisense strand to SEQ ID NO: 1289642
caaucacacaaugucaguc

SEQ ID NO: 1289644 - RNA, 19 nt, Artificial Sequence
  Description of Artificial Sequence: Synthetic oligonucleotide
  Sense strand starting at position 2193 of SEQ ID NO: 1241659
agcuuaugccaagaacugu

SEQ ID NO: 1289645 - RNA, 19 nt, Artificial Sequence
  Description of Artificial Sequence: Synthetic oligonucleotide
  Antisense strand to SEQ ID NO: 1289644
acaguucuuggcauaagcu

SEQ ID NO: 1289646 - RNA, 19 nt, Artificial Sequence
  Description of Artificial Sequence: Synthetic oligonucleotide
  Sense strand starting at position 2246 of SEQ ID NO: 1241659
guaacaauccugugaggug

SEQ ID NO: 1289647 - RNA, 19 nt, Artificial Sequence
  Description of Artificial Sequence: Synthetic oligonucleotide
  Antisense strand to SEQ ID NO: 1289646
caccucacaggauuguuac

SEQ ID NO: 1289648 - RNA, 19 nt, Artificial Sequence
  Description of Artificial Sequence: Synthetic oligonucleotide
  Sense strand starting at position 2251 of SEQ ID NO: 1241659
aauccugugaggugguaau

SEQ ID NO: 1289649 - RNA, 19 nt, Artificial Sequence
  Description of Artificial Sequence: Synthetic oligonucleotide
  Antisense strand to SEQ ID NO: 1289648
auuaccaccucacaggauu

SEQ ID NO: 1289650 - RNA, 19 nt, Artificial Sequence
  Description of Artificial Sequence: Synthetic oligonucleotide
  Sense strand starting at position 2414 of SEQ ID NO: 1241659
cuguaaugaccuugaggug

SEQ ID NO: 1289651 - RNA, 19 nt, Artificial Sequence
  Description of Artificial Sequence: Synthetic oligonucleotide
  Antisense strand to SEQ ID NO: 1289650
caccucaaggucauuacag

SEQ ID NO: 1289652 - RNA, 19 nt, Artificial Sequence
  Description of Artificial Sequence: Synthetic oligonucleotide
  Sense strand starting at position 2419 of SEQ ID NO: 1241659
augaccuugaggugcaaau

SEQ ID NO: 1289653 - RNA, 19 nt, Artificial Sequence
  Description of Artificial Sequence: Synthetic oligonucleotide
  Antisense strand to SEQ ID NO: 1289652
auuugcaccucaaggucau

SEQ ID NO: 1289654 - RNA, 19 nt, Artificial Sequence
  Description of Artificial Sequence: Synthetic oligonucleotide
  Sense strand starting at position 2826 of SEQ ID NO: 1241659
uuaagucaggaucagcaau

SEQ ID NO: 1289655 - RNA, 19 nt, Artificial Sequence
  Description of Artificial Sequence: Synthetic oligonucleotide
  Antisense strand to SEQ ID NO: 1289654
auugcugauccugacuuaa

SEQ ID NO: 1289656 - RNA, 19 nt, Artificial Sequence
  Description of Artificial Sequence: Synthetic oligonucleotide
  Sense strand starting at position 2858 of SEQ ID NO: 1241659
cacaacaguccuuggagau

SEQ ID NO: 1289657 - RNA, 19 nt, Artificial Sequence
  Description of Artificial Sequence: Synthetic oligonucleotide
  Antisense strand to SEQ ID NO: 1289656
aucuccaaggacuguugug

SEQ ID NO: 1289658 - RNA, 19 nt, Artificial Sequence
  Description of Artificial Sequence: Synthetic oligonucleotide
  Sense strand starting at position 2859 of SEQ ID NO: 1241659
acaacaguccuuggagauc

SEQ ID NO: 1289659 - RNA, 19 nt, Artificial Sequence
  Description of Artificial Sequence: Synthetic oligonucleotide
  Antisense strand to SEQ ID NO: 1289658
gaucuccaaggacuguugu

SEQ ID NO: 1289660 - RNA, 19 nt, Artificial Sequence
  Description of Artificial Sequence: Synthetic oligonucleotide
  Sense strand starting at position 3127 of SEQ ID NO: 1241659
gggaaugcugcugauuaaa

SEQ ID NO: 1289661 - RNA, 19 nt, Artificial Sequence
  Description of Artificial Sequence: Synthetic oligonucleotide
  Antisense strand to SEQ ID NO: 1289660
uuuaaucagcagcauuccc

SEQ ID NO: 1289662 - RNA, 19 nt, Artificial Sequence
  Description of Artificial Sequence: Synthetic oligonucleotide
  Sense strand starting at position 3239 of SEQ ID NO: 1241659
gugaacucagagugguuca

SEQ ID NO: 1289663 - RNA, 19 nt, Artificial Sequence
  Description of Artificial Sequence: Synthetic oligonucleotide
  Antisense strand to SEQ ID NO: 1289662
ugaaccacucugaguucac

SEQ ID NO: 1289664 - RNA, 19 nt, Artificial Sequence
  Description of Artificial Sequence: Synthetic oligonucleotide
  Sense strand starting at position 3321 of SEQ ID NO: 1241659
uggccaagugcuuugcgua

SEQ ID NO: 1289665 - RNA, 19 nt, Artificial Sequence
  Description of Artificial Sequence: Synthetic oligonucleotide
  Antisense strand to SEQ ID NO: 1289664
uacgcaaagcacuuggcca

SEQ ID NO: 1289666 - RNA, 19 nt, Artificial Sequence
  Description of Artificial Sequence: Synthetic oligonucleotide
  Sense strand starting at position 3480 of SEQ ID NO: 1241659
auccuaggauguuugacaa

SEQ ID NO: 1289667 - RNA, 19 nt, Artificial Sequence
  Description of Artificial Sequence: Synthetic oligonucleotide
  Antisense strand to SEQ ID NO: 1289666
uugucaaacauccuaggau

SEQ ID NO: 1289668 - RNA, 19 nt, Artificial Sequence
  Description of Artificial Sequence: Synthetic oligonucleotide
  Sense strand starting at position 3522 of SEQ ID NO: 1241659
uguagugacccucaacuca

SEQ ID NO: 1289669 - RNA, 19 nt, Artificial Sequence
  Description of Artificial Sequence: Synthetic oligonucleotide
  Antisense strand to SEQ ID NO: 1289668
ugaguugagggucacuaca

SEQ ID NO: 1289670 - RNA, 19 nt, Artificial Sequence
  Description of Artificial Sequence: Synthetic oligonucleotide
  Sense strand starting at position 3689 of SEQ ID NO: 1241659
aagugaggcccaugugaau

SEQ ID NO: 1289671 - RNA, 19 nt, Artificial Sequence
  Description of Artificial Sequence: Synthetic oligonucleotide
  Antisense strand to SEQ ID NO: 1289670
auucacaugggccucacuu

SEQ ID NO: 1289672 - RNA, 19 nt, Artificial Sequence
  Description of Artificial Sequence: Synthetic oligonucleotide
  Sense strand starting at position 3733 of SEQ ID NO: 1241659
uguccauuccucugggaug

SEQ ID NO: 1289673 - RNA, 19 nt, Artificial Sequence
  Description of Artificial Sequence: Synthetic oligonucleotide
  Antisense strand to SEQ ID NO: 1289672
caucccagaggaauggaca

SEQ ID NO: 1289674 - RNA, 19 nt, Artificial Sequence
  Description of Artificial Sequence: Synthetic oligonucleotide
  Sense strand starting at position 3817 of SEQ ID NO: 1241659
ccgaucuccucacugacau

SEQ ID NO: 1289675 - RNA, 19 nt, Artificial Sequence
  Description of Artificial Sequence: Synthetic oligonucleotide
  Antisense strand to SEQ ID NO: 1289674
augucagugaggagaucgg

SEQ ID NO: 1289676 - RNA, 19 nt, Artificial Sequence
  Description of Artificial Sequence: Synthetic oligonucleotide
  Sense strand starting at position 3852 of SEQ ID NO: 1241659
ccauaagguuccucccuga

SEQ ID NO: 1289677 - RNA, 19 nt, Artificial Sequence
  Description of Artificial Sequence: Synthetic oligonucleotide
  Antisense strand to SEQ ID NO: 1289676
ucagggaggaaccuuaugg

SEQ ID NO: 1289678 - RNA, 19 nt, Artificial Sequence
  Description of Artificial Sequence: Synthetic oligonucleotide
  Sense strand starting at position 192 of SEQ ID NO: 1241660
gggcuugcccaagaucaua

SEQ ID NO: 1289679 - RNA, 19 nt, Artificial Sequence
  Description of Artificial Sequence: Synthetic oligonucleotide
  Antisense strand to SEQ ID NO: 1289678
uaugaucuugggcaagccc

SEQ ID NO: 1289680 - RNA, 19 nt, Artificial Sequence
  Description of Artificial Sequence: Synthetic oligonucleotide
  Sense strand starting at position 539 of SEQ ID NO: 1241660
aaugaaagucccugguaca

SEQ ID NO: 1289681 - RNA, 19 nt, Artificial Sequence
  Description of Artificial Sequence: Synthetic oligonucleotide
  Antisense strand to SEQ ID NO: 1289680
uguaccagggacuuucauu

SEQ ID NO: 1289682 - RNA, 19 nt, Artificial Sequence
  Description of Artificial Sequence: Synthetic oligonucleotide
  Sense strand starting at position 568 of SEQ ID NO: 1241660
ccucgauggcccugauaau

SEQ ID NO: 1289683 - RNA, 19 nt, Artificial Sequence
  Description of Artificial Sequence: Synthetic oligonucleotide
  Antisense strand to SEQ ID NO: 1289682
auuaucagggccaucgagg

SEQ ID NO: 1289684 - RNA, 19 nt, Artificial Sequence
  Description of Artificial Sequence: Synthetic oligonucleotide
  Sense strand starting at position 569 of SEQ ID NO: 1241660
cucgauggcccugauaaug

SEQ ID NO: 1289685 - RNA, 19 nt, Artificial Sequence
  Description of Artificial Sequence: Synthetic oligonucleotide
  Antisense strand to SEQ ID NO: 1289684
cauuaucagggccaucgag

SEQ ID NO: 1289686 - RNA, 19 nt, Artificial Sequence
  Description of Artificial Sequence: Synthetic oligonucleotide
  Sense strand starting at position 580 of SEQ ID NO: 1241660
ugauaaugguuggcagcaa

SEQ ID NO: 1289687 - RNA, 19 nt, Artificial Sequence
  Description of Artificial Sequence: Synthetic oligonucleotide
  Antisense strand to SEQ ID NO: 1289686
uugcugccaaccauuauca

SEQ ID NO: 1289688 - RNA, 19 nt, Artificial Sequence
  Description of Artificial Sequence: Synthetic oligonucleotide
  Sense strand starting at position 648 of SEQ ID NO: 1241660
ggugucuguguccaccaua

SEQ ID NO: 1289689 - RNA, 19 nt, Artificial Sequence
  Description of Artificial Sequence: Synthetic oligonucleotide
  Antisense strand to SEQ ID NO: 1289688
uaugguggacacagacacc

SEQ ID NO: 1289690 - RNA, 19 nt, Artificial Sequence
  Description of Artificial Sequence: Synthetic oligonucleotide
  Sense strand starting at position 925 of SEQ ID NO: 1241660
agagaagagccaugagcua

SEQ ID NO: 1289691 - RNA, 19 nt, Artificial Sequence
  Description of Artificial Sequence: Synthetic oligonucleotide
  Antisense strand to SEQ ID NO: 1289690
uagcucauggcucuucucu

SEQ ID NO: 1289692 - RNA, 19 nt, Artificial Sequence
  Description of Artificial Sequence: Synthetic oligonucleotide
  Sense strand starting at position 1227 of SEQ ID NO: 1241660
uggaaaugccuuuggccaa

SEQ ID NO: 1289693 - RNA, 19 nt, Artificial Sequence
  Description of Artificial Sequence: Synthetic oligonucleotide
  Antisense strand to SEQ ID NO: 1289692
uuggccaaaggcauuucca

SEQ ID NO: 1289694 - RNA, 19 nt, Artificial Sequence
  Description of Artificial Sequence: Synthetic oligonucleotide
  Sense strand starting at position 1312 of SEQ ID NO: 1241660
ggauaaauguuagacaaua

SEQ ID NO: 1289695 - RNA, 19 nt, Artificial Sequence
  Description of Artificial Sequence: Synthetic oligonucleotide
  Antisense strand to SEQ ID NO: 1289694
uauugucuaacauuuaucc

SEQ ID NO: 1289696 - RNA, 19 nt, Artificial Sequence
  Description of Artificial Sequence: Synthetic oligonucleotide
  Sense strand starting at position 1395 of SEQ ID NO: 1241660
ggcuguuucccagcaguuu

SEQ ID NO: 1289697 - RNA, 19 nt, Artificial Sequence
  Description of Artificial Sequence: Synthetic oligonucleotide
  Antisense strand to SEQ ID NO: 1289696
aaacugcugggaaacagcc

SEQ ID NO: 1289698 - RNA, 19 nt, Artificial Sequence
  Description of Artificial Sequence: Synthetic oligonucleotide
  Sense strand starting at position 1546 of SEQ ID NO: 1241660
agggaccugcugcaauaau

SEQ ID NO: 1289699 - RNA, 19 nt, Artificial Sequence
  Description of Artificial Sequence: Synthetic oligonucleotide
  Antisense strand to SEQ ID NO: 1289698
auuauugcagcaggucccu

SEQ ID NO: 1289700 - RNA, 19 nt, Artificial Sequence
  Description of Artificial Sequence: Synthetic oligonucleotide
  Sense strand starting at position 1653 of SEQ ID NO: 1241660
aaauccgaaucuguaagua

SEQ ID NO: 1289701 - RNA, 19 nt, Artificial Sequence
  Description of Artificial Sequence: Synthetic oligonucleotide
  Antisense strand to SEQ ID NO: 1289700
uacuuacagauucggauuu

SEQ ID NO: 1289702 - RNA, 19 nt, Artificial Sequence
  Description of Artificial Sequence: Synthetic oligonucleotide
  Sense strand starting at position 1657 of SEQ ID NO: 1241660
ccgaaucuguaaguaucaa

SEQ ID NO: 1289703 - RNA, 19 nt, Artificial Sequence
  Description of Artificial Sequence: Synthetic oligonucleotide
  Antisense strand to SEQ ID NO: 1289702
uugauacuuacagauucgg

SEQ ID NO: 1289704 - RNA, 19 nt, Artificial Sequence
  Description of Artificial Sequence: Synthetic oligonucleotide
  Sense strand starting at position 1658 of SEQ ID NO: 1241660
cgaaucuguaaguaucaag

SEQ ID NO: 1289705 - RNA, 19 nt, Artificial Sequence
  Description of Artificial Sequence: Synthetic oligonucleotide
  Antisense strand to SEQ ID NO: 1289704
cuugauacuuacagauucg

SEQ ID NO: 1289706 - RNA, 19 nt, Artificial Sequence
  Description of Artificial Sequence: Synthetic oligonucleotide
  Sense strand starting at position 1711 of SEQ ID NO: 1241660
acccuuugcaggugugaaa

SEQ ID NO: 1289707 - RNA, 19 nt, Artificial Sequence
  Description of Artificial Sequence: Synthetic oligonucleotide
  Antisense strand to SEQ ID NO: 1289706
uuucacaccugcaaagggu

SEQ ID NO: 1289708 - RNA, 19 nt, Artificial Sequence
  Description of Artificial Sequence: Synthetic oligonucleotide
  Sense strand starting at position 2001 of SEQ ID NO: 1241660
ugcugaggcuuauuuauuc

SEQ ID NO: 1289709 - RNA, 19 nt, Artificial Sequence
  Description of Artificial Sequence: Synthetic oligonucleotide
  Antisense strand to SEQ ID NO: 1289708
gaauaaauaagccucagca

SEQ ID NO: 1289710 - RNA, 19 nt, Artificial Sequence
  Description of Artificial Sequence: Synthetic oligonucleotide
  Sense strand starting at position 2006 of SEQ ID NO: 1241660
aggcuuauuuauuccugca

SEQ ID NO: 1289711 - RNA, 19 nt, Artificial Sequence
  Description of Artificial Sequence: Synthetic oligonucleotide
  Antisense strand to SEQ ID NO: 1289710
ugcaggaauaaauaagccu

SEQ ID NO: 1289712 - RNA, 19 nt, Artificial Sequence
  Description of Artificial Sequence: Synthetic oligonucleotide
  Sense strand starting at position 2008 of SEQ ID NO: 1241660
gcuuauuuauuccugcaga

SEQ ID NO: 1289713 - RNA, 19 nt, Artificial Sequence
  Description of Artificial Sequence: Synthetic oligonucleotide
  Antisense strand to SEQ ID NO: 1289712
ucugcaggaauaaauaagc

SEQ ID NO: 1289714 - RNA, 19 nt, Artificial Sequence
  Description of Artificial Sequence: Synthetic oligonucleotide
  Sense strand starting at position 2013 of SEQ ID NO: 1241660
uuuauuccugcagagaacu

SEQ ID NO: 1289715 - RNA, 19 nt, Artificial Sequence
  Description of Artificial Sequence: Synthetic oligonucleotide
  Antisense strand to SEQ ID NO: 1289714
aguucucugcaggaauaaa

SEQ ID NO: 1289716 - RNA, 19 nt, Artificial Sequence
  Description of Artificial Sequence: Synthetic oligonucleotide
  Sense strand starting at position 2071 of SEQ ID NO: 1241660
cuguucucggacuggaaau

SEQ ID NO: 1289717 - RNA, 19 nt, Artificial Sequence
  Description of Artificial Sequence: Synthetic oligonucleotide
  Antisense strand to SEQ ID NO: 1289716
auuuccaguccgagaacag

SEQ ID NO: 1289718 - RNA, 19 nt, Artificial Sequence
  Description of Artificial Sequence: Synthetic oligonucleotide
  Sense strand starting at position 2095 of SEQ ID NO: 1241660
gaugauaauuucugguaau

SEQ ID NO: 1289719 - RNA, 19 nt, Artificial Sequence
  Description of Artificial Sequence: Synthetic oligonucleotide
  Antisense strand to SEQ ID NO: 1289718
auuaccagaaauuaucauc

SEQ ID NO: 1289720 - RNA, 19 nt, Artificial Sequence
  Description of Artificial Sequence: Synthetic oligonucleotide
  Sense strand starting at position 2098 of SEQ ID NO: 1241660
gauaauuucugguaauacg

SEQ ID NO: 1289721 - RNA, 19 nt, Artificial Sequence
  Description of Artificial Sequence: Synthetic oligonucleotide
  Antisense strand to SEQ ID NO: 1289720
cguauuaccagaaauuauc

SEQ ID NO: 1289722 - RNA, 19 nt, Artificial Sequence
  Description of Artificial Sequence: Synthetic oligonucleotide
  Sense strand starting at position 2132 of SEQ ID NO: 1241660
cucaaauaaccugguuaug

SEQ ID NO: 1289723 - RNA, 19 nt, Artificial Sequence
  Description of Artificial Sequence: Synthetic oligonucleotide
  Antisense strand to SEQ ID NO: 1289722
cauaaccagguuauuugag

SEQ ID NO: 1289724 - RNA, 19 nt, Artificial Sequence
  Description of Artificial Sequence: Synthetic oligonucleotide
  Sense strand starting at position 2301 of SEQ ID NO: 1241660
gcacuuuacuacccagaga

SEQ ID NO: 1289725 - RNA, 19 nt, Artificial Sequence
  Description of Artificial Sequence: Synthetic oligonucleotide
  Antisense strand to SEQ ID NO: 1289724
ucucuggguaguaaagugc

SEQ ID NO: 1289726 - RNA, 19 nt, Artificial Sequence
  Description of Artificial Sequence: Synthetic oligonucleotide
  Sense strand starting at position 2749 of SEQ ID NO: 1241660
ugaugugaauguccauaua

SEQ ID NO: 1289727 - RNA, 19 nt, Artificial Sequence
  Description of Artificial Sequence: Synthetic oligonucleotide
  Antisense strand to SEQ ID NO: 1289726
uauauggacauucacauca

SEQ ID NO: 1289728 - RNA, 19 nt, Artificial Sequence
  Description of Artificial Sequence: Synthetic oligonucleotide
  Sense strand starting at position 2752 of SEQ ID NO: 1241660
ugugaauguccauauacaa

SEQ ID NO: 1289729 - RNA, 19 nt, Artificial Sequence
  Description of Artificial Sequence: Synthetic oligonucleotide
  Antisense strand to SEQ ID NO: 1289728
uuguauauggacauucaca

SEQ ID NO: 1289730 - RNA, 19 nt, Artificial Sequence
  Description of Artificial Sequence: Synthetic oligonucleotide
  Sense strand starting at position 2809 of SEQ ID NO: 1241660
uguggaucaguuugcauuu

SEQ ID NO: 1289731 - RNA, 19 nt, Artificial Sequence
  Description of Artificial Sequence: Synthetic oligonucleotide
  Antisense strand to SEQ ID NO: 1289730
aaaugcaaacugauccaca

SEQ ID NO: 1289732 - RNA, 19 nt, Artificial Sequence
  Description of Artificial Sequence: Synthetic oligonucleotide
  Sense strand starting at position 3070 of SEQ ID NO: 1241660
cuuucuuuggcucaugaaa

SEQ ID NO: 1289733 - RNA, 19 nt, Artificial Sequence
  Description of Artificial Sequence: Synthetic oligonucleotide
  Antisense strand to SEQ ID NO: 1289732
uuucaugagccaaagaaag

SEQ ID NO: 1289734 - RNA, 19 nt, Artificial Sequence
  Description of Artificial Sequence: Synthetic oligonucleotide
  Sense strand starting at position 3428 of SEQ ID NO: 1241660
ccucuugauuccucauggu

SEQ ID NO: 1289735 - RNA, 19 nt, Artificial Sequence
  Description of Artificial Sequence: Synthetic oligonucleotide
  Antisense strand to SEQ ID NO: 1289734
accaugaggaaucaagagg

SEQ ID NO: 1289736 - RNA, 19 nt, Artificial Sequence
  Description of Artificial Sequence: Synthetic oligonucleotide
  Sense strand starting at position 3432 of SEQ ID NO: 1241660
uugauuccucauggucaca

SEQ ID NO: 1289737 - RNA, 19 nt, Artificial Sequence
  Description of Artificial Sequence: Synthetic oligonucleotide
  Antisense strand to SEQ ID NO: 1289736
ugugaccaugaggaaucaa

SEQ ID NO: 1289738 - RNA, 19 nt, Artificial Sequence
  Description of Artificial Sequence: Synthetic oligonucleotide
  Sense strand starting at position 3434 of SEQ ID NO: 1241660
gauuccucauggucacagu

SEQ ID NO: 1289739 - RNA, 19 nt, Artificial Sequence
  Description of Artificial Sequence: Synthetic oligonucleotide
  Antisense strand to SEQ ID NO: 1289738
acugugaccaugaggaauc

SEQ ID NO: 1289740 - RNA, 19 nt, Artificial Sequence
  Description of Artificial Sequence: Synthetic oligonucleotide
  Sense strand starting at position 3548 of SEQ ID NO: 1241660
uggcuugaaucucugaugu

SEQ ID NO: 1289741 - RNA, 19 nt, Artificial Sequence
  Description of Artificial Sequence: Synthetic oligonucleotide
  Antisense strand to SEQ ID NO: 1289740
acaucagagauucaagcca

SEQ ID NO: 1289742 - RNA, 19 nt, Artificial Sequence
  Description of Artificial Sequence: Synthetic oligonucleotide
  Sense strand starting at position 3556 of SEQ ID NO: 1241660
aucucugaugucugacuca

SEQ ID NO: 1289743 - RNA, 19 nt, Artificial Sequence
  Description of Artificial Sequence: Synthetic oligonucleotide
  Antisense strand to SEQ ID NO: 1289742
ugagucagacaucagagau

SEQ ID NO: 1289744 - RNA, 19 nt, Artificial Sequence
  Description of Artificial Sequence: Synthetic oligonucleotide
  Sense strand starting at position 3643 of SEQ ID NO: 1241660
aggcaauauucccugacag

SEQ ID NO: 1289745 - RNA, 19 nt, Artificial Sequence
  Description of Artificial Sequence: Synthetic oligonucleotide
  Antisense strand to SEQ ID NO: 1289744
cugucagggaauauugccu

SEQ ID NO: 1289746 - RNA, 19 nt, Artificial Sequence
  Description of Artificial Sequence: Synthetic oligonucleotide
  Sense strand starting at position 3644 of SEQ ID NO: 1241660
ggcaauauucccugacaga

SEQ ID NO: 1289747 - RNA, 19 nt, Artificial Sequence
  Description of Artificial Sequence: Synthetic oligonucleotide
  Antisense strand to SEQ ID NO: 1289746
ucugucagggaauauugcc

SEQ ID NO: 1289748 - RNA, 19 nt, Artificial Sequence
  Description of Artificial Sequence: Synthetic oligonucleotide
  Sense strand starting at position 3653 of SEQ ID NO: 1241660
cccugacagagugguaauc

SEQ ID NO: 1289749 - RNA, 19 nt, Artificial Sequence
  Description of Artificial Sequence: Synthetic oligonucleotide
  Antisense strand to SEQ ID NO: 1289748
gauuaccacucugucaggg

SEQ ID NO: 1289750 - RNA, 19 nt, Artificial Sequence
  Description of Artificial Sequence: Synthetic oligonucleotide
  Sense strand starting at position 3721 of SEQ ID NO: 1241660
uuuguuugucuguugcgau

SEQ ID NO: 1289751 - RNA, 19 nt, Artificial Sequence
  Description of Artificial Sequence: Synthetic oligonucleotide
  Antisense strand to SEQ ID NO: 1289750
aucgcaacagacaaacaaa

SEQ ID NO: 1289752 - RNA, 19 nt, Artificial Sequence
  Description of Artificial Sequence: Synthetic oligonucleotide
  Sense strand starting at position 3734 of SEQ ID NO: 1241660
ugcgauagugcugcaucuu

SEQ ID NO: 1289753 - RNA, 19 nt, Artificial Sequence
  Description of Artificial Sequence: Synthetic oligonucleotide
  Antisense strand to SEQ ID NO: 1289752
aagaugcagcacuaucgca

SEQ ID NO: 1289754 - RNA, 19 nt, Artificial Sequence
  Description of Artificial Sequence: Synthetic oligonucleotide
  Sense strand starting at position 3808 of SEQ ID NO: 1241660
gggcccaucuuucuuaaau

SEQ ID NO: 1289755 - RNA, 19 nt, Artificial Sequence
  Description of Artificial Sequence: Synthetic oligonucleotide
  Antisense strand to SEQ ID NO: 1289754
auuuaagaaagaugggccc

SEQ ID NO: 1289756 - RNA, 19 nt, Artificial Sequence
  Description of Artificial Sequence: Synthetic oligonucleotide
  Sense strand starting at position 3809 of SEQ ID NO: 1241660
ggcccaucuuucuuaaaug

SEQ ID NO: 1289757 - RNA, 19 nt, Artificial Sequence
  Description of Artificial Sequence: Synthetic oligonucleotide
  Antisense strand to SEQ ID NO: 1289756
cauuuaagaaagaugggcc

SEQ ID NO: 1289758 - RNA, 19 nt, Artificial Sequence
  Description of Artificial Sequence: Synthetic oligonucleotide
  Sense strand starting at position 77 of SEQ ID NO: 1241661
gcuugugaaaggcaaugua

SEQ ID NO: 1289759 - RNA, 19 nt, Artificial Sequence
  Description of Artificial Sequence: Synthetic oligonucleotide
  Antisense strand to SEQ ID NO: 1289758
uacauugccuuucacaagc

SEQ ID NO: 1289760 - RNA, 19 nt, Artificial Sequence
  Description of Artificial Sequence: Synthetic oligonucleotide
  Sense strand starting at position 80 of SEQ ID NO: 1241661
ugugaaaggcaauguaaca

SEQ ID NO: 1289761 - RNA, 19 nt, Artificial Sequence
  Description of Artificial Sequence: Synthetic oligonucleotide
  Antisense strand to SEQ ID NO: 1289760
uguuacauugccuuucaca

SEQ ID NO: 1289762 - RNA, 19 nt, Artificial Sequence
  Description of Artificial Sequence: Synthetic oligonucleotide
  Sense strand starting at position 398 of SEQ ID NO: 1241661
gaggauggcuauccucaga

SEQ ID NO: 1289763 - RNA, 19 nt, Artificial Sequence
  Description of Artificial Sequence: Synthetic oligonucleotide
  Antisense strand to SEQ ID NO: 1289762
ucugaggauagccauccuc

SEQ ID NO: 1289764 - RNA, 19 nt, Artificial Sequence
  Description of Artificial Sequence: Synthetic oligonucleotide
  Sense strand starting at position 401 of SEQ ID NO: 1241661
gauggcuauccucagaguu

SEQ ID NO: 1289765 - RNA, 19 nt, Artificial Sequence
  Description of Artificial Sequence: Synthetic oligonucleotide
  Antisense strand to SEQ ID NO: 1289764
aacucugaggauagccauc

SEQ ID NO: 1289766 - RNA, 19 nt, Artificial Sequence
  Description of Artificial Sequence: Synthetic oligonucleotide
  Sense strand starting at position 427 of SEQ ID NO: 1241661
gggucuguuccacaaacau

SEQ ID NO: 1289767 - RNA, 19 nt, Artificial Sequence
  Description of Artificial Sequence: Synthetic oligonucleotide
  Antisense strand to SEQ ID NO: 1289766
auguuuguggaacagaccc

SEQ ID NO: 1289768 - RNA, 19 nt, Artificial Sequence
  Description of Artificial Sequence: Synthetic oligonucleotide
  Sense strand starting at position 436 of SEQ ID NO: 1241661
ccacaaacaucuguggagu

SEQ ID NO: 1289769 - RNA, 19 nt, Artificial Sequence
  Description of Artificial Sequence: Synthetic oligonucleotide
  Antisense strand to SEQ ID NO: 1289768
acuccacagauguuugugg

SEQ ID NO: 1289770 - RNA, 19 nt, Artificial Sequence
  Description of Artificial Sequence: Synthetic oligonucleotide
  Sense strand starting at position 506 of SEQ ID NO: 1241661
cccuguagaggucaguaga

SEQ ID NO: 1289771 - RNA, 19 nt, Artificial Sequence
  Description of Artificial Sequence: Synthetic oligonucleotide
  Antisense strand to SEQ ID NO: 1289770
ucuacugaccucuacaggg

SEQ ID NO: 1289772 - RNA, 19 nt, Artificial Sequence
  Description of Artificial Sequence: Synthetic oligonucleotide
  Sense strand starting at position 509 of SEQ ID NO: 1241661
uguagaggucaguagaacu

SEQ ID NO: 1289773 - RNA, 19 nt, Artificial Sequence
  Description of Artificial Sequence: Synthetic oligonucleotide
  Antisense strand to SEQ ID NO: 1289772
aguucuacugaccucuaca

SEQ ID NO: 1289774 - RNA, 19 nt, Artificial Sequence
  Description of Artificial Sequence: Synthetic oligonucleotide
  Sense strand starting at position 1246 of SEQ ID NO: 1241661
cguggcuguguuucaguga

SEQ ID NO: 1289775 - RNA, 19 nt, Artificial Sequence
  Description of Artificial Sequence: Synthetic oligonucleotide
  Antisense strand to SEQ ID NO: 1289774
ucacugaaacacagccacg

SEQ ID NO: 1289776 - RNA, 19 nt, Artificial Sequence
  Description of Artificial Sequence: Synthetic oligonucleotide
  Sense strand starting at position 1276 of SEQ ID NO: 1241661
cggacacugaaaugugaau

SEQ ID NO: 1289777 - RNA, 19 nt, Artificial Sequence
  Description of Artificial Sequence: Synthetic oligonucleotide
  Antisense strand to SEQ ID NO: 1289776
auucacauuucaguguccg

SEQ ID NO: 1289778 - RNA, 19 nt, Artificial Sequence
  Description of Artificial Sequence: Synthetic oligonucleotide
  Sense strand starting at position 1524 of SEQ ID NO: 1241661
agcaguuggagggaucauu

SEQ ID NO: 1289779 - RNA, 19 nt, Artificial Sequence
  Description of Artificial Sequence: Synthetic oligonucleotide
  Antisense strand to SEQ ID NO: 1289778
aaugaucccuccaacugcu

SEQ ID NO: 1289780 - RNA, 19 nt, Artificial Sequence
  Description of Artificial Sequence: Synthetic oligonucleotide
  Sense strand starting at position 2035 of SEQ ID NO: 1241661
ccgaccagguaauuauuaa

SEQ ID NO: 1289781 - RNA, 19 nt, Artificial Sequence
  Description of Artificial Sequence: Synthetic oligonucleotide
  Antisense strand to SEQ ID NO: 1289780
uuaauaauuaccuggucgg

SEQ ID NO: 1289782 - RNA, 19 nt, Artificial Sequence
  Description of Artificial Sequence: Synthetic oligonucleotide
  Sense strand starting at position 2521 of SEQ ID NO: 1241661
aauccuggacucugugauu

SEQ ID NO: 1289783 - RNA, 19 nt, Artificial Sequence
  Description of Artificial Sequence: Synthetic oligonucleotide
  Antisense strand to SEQ ID NO: 1289782
aaucacagaguccaggauu

SEQ ID NO: 1289784 - RNA, 19 nt, Artificial Sequence
  Description of Artificial Sequence: Synthetic oligonucleotide
  Sense strand starting at position 2546 of SEQ ID NO: 1241661
gauagaguccacugagauc

SEQ ID NO: 1289785 - RNA, 19 nt, Artificial Sequence
  Description of Artificial Sequence: Synthetic oligonucleotide
  Antisense strand to SEQ ID NO: 1289784
gaucucaguggacucuauc

SEQ ID NO: 1289786 - RNA, 19 nt, Artificial Sequence
  Description of Artificial Sequence: Synthetic oligonucleotide
  Sense strand starting at position 2558 of SEQ ID NO: 1241661
ugagaucucauaggucaga

SEQ ID NO: 1289787 - RNA, 19 nt, Artificial Sequence
  Description of Artificial Sequence: Synthetic oligonucleotide
  Antisense strand to SEQ ID NO: 1289786
ucugaccuaugagaucuca

SEQ ID NO: 1289788 - RNA, 19 nt, Artificial Sequence
  Description of Artificial Sequence: Synthetic oligonucleotide
  Sense strand starting at position 2809 of SEQ ID NO: 1241661
cugagaugaccuugaccau

SEQ ID NO: 1289789 - RNA, 19 nt, Artificial Sequence
  Description of Artificial Sequence: Synthetic oligonucleotide
  Antisense strand to SEQ ID NO: 1289788
auggucaaggucaucucag

SEQ ID NO: 1289790 - RNA, 19 nt, Artificial Sequence
  Description of Artificial Sequence: Synthetic oligonucleotide
  Sense strand starting at position 2828 of SEQ ID NO: 1241661
ucaggcauccucuagcaga

SEQ ID NO: 1289791 - RNA, 19 nt, Artificial Sequence
  Description of Artificial Sequence: Synthetic oligonucleotide
  Antisense strand to SEQ ID NO: 1289790
ucugcuagaggaugccuga

SEQ ID NO: 1289792 - RNA, 19 nt, Artificial Sequence
  Description of Artificial Sequence: Synthetic oligonucleotide
  Sense strand starting at position 2875 of SEQ ID NO: 1241661
gccuuaagguaagugaaau

SEQ ID NO: 1289793 - RNA, 19 nt, Artificial Sequence
  Description of Artificial Sequence: Synthetic oligonucleotide
  Antisense strand to SEQ ID NO: 1289792
auuucacuuaccuuaaggc

SEQ ID NO: 1289794 - RNA, 19 nt, Artificial Sequence
  Description of Artificial Sequence: Synthetic oligonucleotide
  Sense strand starting at position 2926 of SEQ ID NO: 1241661
cccugagcgauguagacau

SEQ ID NO: 1289795 - RNA, 19 nt, Artificial Sequence
  Description of Artificial Sequence: Synthetic oligonucleotide
  Antisense strand to SEQ ID NO: 1289794
augucuacaucgcucaggg

SEQ ID NO: 1289796 - RNA, 19 nt, Artificial Sequence
  Description of Artificial Sequence: Synthetic oligonucleotide
  Sense strand starting at position 3107 of SEQ ID NO: 1241661
gccuauacacucuagguau

SEQ ID NO: 1289797 - RNA, 19 nt, Artificial Sequence
  Description of Artificial Sequence: Synthetic oligonucleotide
  Antisense strand to SEQ ID NO: 1289796
auaccuagaguguauaggc

SEQ ID NO: 1289798 - RNA, 19 nt, Artificial Sequence
  Description of Artificial Sequence: Synthetic oligonucleotide
  Sense strand starting at position 3155 of SEQ ID NO: 1241661
aaauguaagcccggagaca

SEQ ID NO: 1289799 - RNA, 19 nt, Artificial Sequence
  Description of Artificial Sequence: Synthetic oligonucleotide
  Antisense strand to SEQ ID NO: 1289798
ugucuccgggcuuacauuu

SEQ ID NO: 1289800 - RNA, 19 nt, Artificial Sequence
  Description of Artificial Sequence: Synthetic oligonucleotide
  Sense strand starting at position 3156 of SEQ ID NO: 1241661
aauguaagcccggagacau

SEQ ID NO: 1289801 - RNA, 19 nt, Artificial Sequence
  Description of Artificial Sequence: Synthetic oligonucleotide
  Antisense strand to SEQ ID NO: 1289800
augucuccgggcuuacauu

SEQ ID NO: 1289802 - RNA, 19 nt, Artificial Sequence
  Description of Artificial Sequence: Synthetic oligonucleotide
  Sense strand starting at position 3168 of SEQ ID NO: 1241661
gagacauuguuagcucaga

SEQ ID NO: 1289803 - RNA, 19 nt, Artificial Sequence
  Description of Artificial Sequence: Synthetic oligonucleotide
  Antisense strand to SEQ ID NO: 1289802
ucugagcuaacaaugucuc

SEQ ID NO: 1289804 - RNA, 19 nt, Artificial Sequence
  Description of Artificial Sequence: Synthetic oligonucleotide
  Sense strand starting at position 3169 of SEQ ID NO: 1241661
agacauuguuagcucagau

SEQ ID NO: 1289805 - RNA, 19 nt, Artificial Sequence
  Description of Artificial Sequence: Synthetic oligonucleotide
  Antisense strand to SEQ ID NO: 1289804
aucugagcuaacaaugucu

SEQ ID NO: 1289806 - RNA, 19 nt, Artificial Sequence
  Description of Artificial Sequence: Synthetic oligonucleotide
  Sense strand starting at position 3348 of SEQ ID NO: 1241661
ggacaugcuccauggaugu

SEQ ID NO: 1289807 - RNA, 19 nt, Artificial Sequence
  Description of Artificial Sequence: Synthetic oligonucleotide
  Antisense strand to SEQ ID NO: 1289806
acauccauggagcaugucc

SEQ ID NO: 1289808 - RNA, 19 nt, Artificial Sequence
  Description of Artificial Sequence: Synthetic oligonucleotide
  Sense strand starting at position 3358 of SEQ ID NO: 1241661
cauggauguugacugagua

SEQ ID NO: 1289809 - RNA, 19 nt, Artificial Sequence
  Description of Artificial Sequence: Synthetic oligonucleotide
  Antisense strand to SEQ ID NO: 1289808
uacucagucaacauccaug

SEQ ID NO: 1289810 - RNA, 19 nt, Artificial Sequence
  Description of Artificial Sequence: Synthetic oligonucleotide
  Sense strand starting at position 3359 of SEQ ID NO: 1241661
auggauguugacugaguaa

SEQ ID NO: 1289811 - RNA, 19 nt, Artificial Sequence
  Description of Artificial Sequence: Synthetic oligonucleotide
  Antisense strand to SEQ ID NO: 1289810
uuacucagucaacauccau

SEQ ID NO: 1289812 - RNA, 19 nt, Artificial Sequence
  Description of Artificial Sequence: Synthetic oligonucleotide
  Sense strand starting at position 3374 of SEQ ID NO: 1241661
guaagucaaugagugaaag

SEQ ID NO: 1289813 - RNA, 19 nt, Artificial Sequence
  Description of Artificial Sequence: Synthetic oligonucleotide
  Antisense strand to SEQ ID NO: 1289812
cuuucacucauugacuuac

SEQ ID NO: 1289814 - RNA, 19 nt, Artificial Sequence
  Description of Artificial Sequence: Synthetic oligonucleotide
  Sense strand starting at position 3408 of SEQ ID NO: 1241661
ugcucugaugaaugugaaa

SEQ ID NO: 1289815 - RNA, 19 nt, Artificial Sequence
  Description of Artificial Sequence: Synthetic oligonucleotide
  Antisense strand to SEQ ID NO: 1289814
uuucacauucaucagagca

SEQ ID NO: 1289816 - RNA, 19 nt, Artificial Sequence
  Description of Artificial Sequence: Synthetic oligonucleotide
  Sense strand starting at position 3617 of SEQ ID NO: 1241661
ugguauguucuggacagag

SEQ ID NO: 1289817 - RNA, 19 nt, Artificial Sequence
  Description of Artificial Sequence: Synthetic oligonucleotide
  Antisense strand to SEQ ID NO: 1289816
cucuguccagaacauacca

SEQ ID NO: 1289818 - RNA, 19 nt, Artificial Sequence
  Description of Artificial Sequence: Synthetic oligonucleotide
  Sense strand starting at position 3640 of SEQ ID NO: 1241661
ggcuuuggcgucagacaag

SEQ ID NO: 1289819 - RNA, 19 nt, Artificial Sequence
  Description of Artificial Sequence: Synthetic oligonucleotide
  Antisense strand to SEQ ID NO: 1289818
cuugucugacgccaaagcc

SEQ ID NO: 1289820 - RNA, 19 nt, Artificial Sequence
  Description of Artificial Sequence: Synthetic oligonucleotide
  Sense strand starting at position 3722 of SEQ ID NO: 1241661
ucacgugucaaaugagaag

SEQ ID NO: 1289821 - RNA, 19 nt, Artificial Sequence
  Description of Artificial Sequence: Synthetic oligonucleotide
  Antisense strand to SEQ ID NO: 1289820
cuucucauuugacacguga

SEQ ID NO: 1289822 - RNA, 19 nt, Artificial Sequence
  Description of Artificial Sequence: Synthetic oligonucleotide
  Sense strand starting at position 3867 of SEQ ID NO: 1241661
cagacugucuggguugaau

SEQ ID NO: 1289823 - RNA, 19 nt, Artificial Sequence
  Description of Artificial Sequence: Synthetic oligonucleotide
  Antisense strand to SEQ ID NO: 1289822
auucaacccagacagucug

SEQ ID NO: 1289824 - RNA, 19 nt, Artificial Sequence
  Description of Artificial Sequence: Synthetic oligonucleotide
  Sense strand starting at position 3869 of SEQ ID NO: 1241661
gacugucuggguugaaucu

SEQ ID NO: 1289825 - RNA, 19 nt, Artificial Sequence
  Description of Artificial Sequence: Synthetic oligonucleotide
  Antisense strand to SEQ ID NO: 1289824
agauucaacccagacaguc

SEQ ID NO: 1289826 - RNA, 19 nt, Artificial Sequence
  Description of Artificial Sequence: Synthetic oligonucleotide
  Sense strand starting at position 3934 of SEQ ID NO: 1241661
aucuguaaacuguggguaa

SEQ ID NO: 1289827 - RNA, 19 nt, Artificial Sequence
  Description of Artificial Sequence: Synthetic oligonucleotide
  Antisense strand to SEQ ID NO: 1289826
uuacccacaguuuacagau

SEQ ID NO: 1289828 - RNA, 19 nt, Artificial Sequence
  Description of Artificial Sequence: Synthetic oligonucleotide
  Sense strand starting at position 3936 of SEQ ID NO: 1241661
cuguaaacuguggguaaua

SEQ ID NO: 1289829 - RNA, 19 nt, Artificial Sequence
  Description of Artificial Sequence: Synthetic oligonucleotide
  Antisense strand to SEQ ID NO: 1289828
uauuacccacaguuuacag

SEQ ID NO: 1289830 - RNA, 19 nt, Artificial Sequence
  Description of Artificial Sequence: Synthetic oligonucleotide
  Sense strand starting at position 3937 of SEQ ID NO: 1241661
uguaaacuguggguaauaa

SEQ ID NO: 1289831 - RNA, 19 nt, Artificial Sequence
  Description of Artificial Sequence: Synthetic oligonucleotide
  Antisense strand to SEQ ID NO: 1289830
uuauuacccacaguuuaca

SEQ ID NO: 1289832 - RNA, 19 nt, Artificial Sequence
  Description of Artificial Sequence: Synthetic oligonucleotide
  Sense strand starting at position 3938 of SEQ ID NO: 1241661
guaaacuguggguaauaau

SEQ ID NO: 1289833 - RNA, 19 nt, Artificial Sequence
  Description of Artificial Sequence: Synthetic oligonucleotide
  Antisense strand to SEQ ID NO: 1289832
auuauuacccacaguuuac

SEQ ID NO: 1289834 - RNA, 19 nt, Artificial Sequence
  Description of Artificial Sequence: Synthetic oligonucleotide
  Sense strand starting at position 3966 of SEQ ID NO: 1241661
aucucaggguugucaacaa

SEQ ID NO: 1289835 - RNA, 19 nt, Artificial Sequence
  Description of Artificial Sequence: Synthetic oligonucleotide
  Antisense strand to SEQ ID NO: 1289834
uuguugacaacccugagau

SEQ ID NO: 1289836 - RNA, 19 nt, Artificial Sequence
  Description of Artificial Sequence: Synthetic oligonucleotide
  Sense strand starting at position 3973 of SEQ ID NO: 1241661
gguugucaacaagaucagu

SEQ ID NO: 1289837 - RNA, 19 nt, Artificial Sequence
  Description of Artificial Sequence: Synthetic oligonucleotide
  Antisense strand to SEQ ID NO: 1289836
acugaucuuguugacaacc

SEQ ID NO: 1289838 - RNA, 19 nt, Artificial Sequence
  Description of Artificial Sequence: Synthetic oligonucleotide
  Sense strand starting at position 106 of SEQ ID NO: 1241662
cugaaaggcuuucuauaua

SEQ ID NO: 1289839 - RNA, 19 nt, Artificial Sequence
  Description of Artificial Sequence: Synthetic oligonucleotide
  Antisense strand to SEQ ID NO: 1289838
uauauagaaagccuuucag

SEQ ID NO: 1289840 - RNA, 19 nt, Artificial Sequence
  Description of Artificial Sequence: Synthetic oligonucleotide
  Sense strand starting at position 167 of SEQ ID NO: 1241662
gcgcuuccucgccuaagaa

SEQ ID NO: 1289841 - RNA, 19 nt, Artificial Sequence
  Description of Artificial Sequence: Synthetic oligonucleotide
  Antisense strand to SEQ ID NO: 1289840
uucuuaggcgaggaagcgc

SEQ ID NO: 1289842 - RNA, 19 nt, Artificial Sequence
  Description of Artificial Sequence: Synthetic oligonucleotide
  Sense strand starting at position 225 of SEQ ID NO: 1241662
uuugauuugugcucuaacc

SEQ ID NO: 1289843 - RNA, 19 nt, Artificial Sequence
  Description of Artificial Sequence: Synthetic oligonucleotide
  Antisense strand to SEQ ID NO: 1289842
gguuagagcacaaaucaaa

SEQ ID NO: 1289844 - RNA, 19 nt, Artificial Sequence
  Description of Artificial Sequence: Synthetic oligonucleotide
  Sense strand starting at position 508 of SEQ ID NO: 1241662
auggcuauucucuggaaca

SEQ ID NO: 1289845 - RNA, 19 nt, Artificial Sequence
  Description of Artificial Sequence: Synthetic oligonucleotide
  Antisense strand to SEQ ID NO: 1289844
uguuccagagaauagccau

SEQ ID NO: 1289846 - RNA, 19 nt, Artificial Sequence
  Description of Artificial Sequence: Synthetic oligonucleotide
  Sense strand starting at position 510 of SEQ ID NO: 1241662
ggcuauucucuggaacagu

SEQ ID NO: 1289847 - RNA, 19 nt, Artificial Sequence
  Description of Artificial Sequence: Synthetic oligonucleotide
  Antisense strand to SEQ ID NO: 1289846
acuguuccagagaauagcc

SEQ ID NO: 1289848 - RNA, 19 nt, Artificial Sequence
  Description of Artificial Sequence: Synthetic oligonucleotide
  Sense strand starting at position 521 of SEQ ID NO: 1241662
ggaacagucccuugacucu

SEQ ID NO: 1289849 - RNA, 19 nt, Artificial Sequence
  Description of Artificial Sequence: Synthetic oligonucleotide
  Antisense strand to SEQ ID NO: 1289848
agagucaagggacuguucc

SEQ ID NO: 1289850 - RNA, 19 nt, Artificial Sequence
  Description of Artificial Sequence: Synthetic oligonucleotide
  Sense strand starting at position 655 of SEQ ID NO: 1241662
agagcuugcagucaggaga

SEQ ID NO: 1289851 - RNA, 19 nt, Artificial Sequence
  Description of Artificial Sequence: Synthetic oligonucleotide
  Antisense strand to SEQ ID NO: 1289850
ucuccugacugcaagcucu

SEQ ID NO: 1289852 - RNA, 19 nt, Artificial Sequence
  Description of Artificial Sequence: Synthetic oligonucleotide
  Sense strand starting at position 658 of SEQ ID NO: 1241662
gcuugcagucaggagagau

SEQ ID NO: 1289853 - RNA, 19 nt, Artificial Sequence
  Description of Artificial Sequence: Synthetic oligonucleotide
  Antisense strand to SEQ ID NO: 1289852
aucucuccugacugcaagc

SEQ ID NO: 1289854 - RNA, 19 nt, Artificial Sequence
  Description of Artificial Sequence: Synthetic oligonucleotide
  Sense strand starting at position 686 of SEQ ID NO: 1241662
accuuuguagaaugaauga

SEQ ID NO: 1289855 - RNA, 19 nt, Artificial Sequence
  Description of Artificial Sequence: Synthetic oligonucleotide
  Antisense strand to SEQ ID NO: 1289854
ucauucauucuacaaaggu

SEQ ID NO: 1289856 - RNA, 19 nt, Artificial Sequence
  Description of Artificial Sequence: Synthetic oligonucleotide
  Sense strand starting at position 907 of SEQ ID NO: 1241662
uugagacaugacugcuauu

SEQ ID NO: 1289857 - RNA, 19 nt, Artificial Sequence
  Description of Artificial Sequence: Synthetic oligonucleotide
  Antisense strand to SEQ ID NO: 1289856
aauagcagucaugucucaa

SEQ ID NO: 1289858 - RNA, 19 nt, Artificial Sequence
  Description of Artificial Sequence: Synthetic oligonucleotide
  Sense strand starting at position 947 of SEQ ID NO: 1241662
ugucuauaaccugacaagu

SEQ ID NO: 1289859 - RNA, 19 nt, Artificial Sequence
  Description of Artificial Sequence: Synthetic oligonucleotide
  Antisense strand to SEQ ID NO: 1289858
acuugucagguuauagaca

SEQ ID NO: 1289860 - RNA, 19 nt, Artificial Sequence
  Description of Artificial Sequence: Synthetic oligonucleotide
  Sense strand starting at position 955 of SEQ ID NO: 1241662
accugacaaguuuggagau

SEQ ID NO: 1289861 - RNA, 19 nt, Artificial Sequence
  Description of Artificial Sequence: Synthetic oligonucleotide
  Antisense strand to SEQ ID NO: 1289860
aucuccaaacuugucaggu

SEQ ID NO: 1289862 - RNA, 19 nt, Artificial Sequence
  Description of Artificial Sequence: Synthetic oligonucleotide
  Sense strand starting at position 961 of SEQ ID NO: 1241662
caaguuuggagaugagucu

SEQ ID NO: 1289863 - RNA, 19 nt, Artificial Sequence
  Description of Artificial Sequence: Synthetic oligonucleotide
  Antisense strand to SEQ ID NO: 1289862
agacucaucuccaaacuug

SEQ ID NO: 1289864 - RNA, 19 nt, Artificial Sequence
  Description of Artificial Sequence: Synthetic oligonucleotide
  Sense strand starting at position 1065 of SEQ ID NO: 1241662
uuuccugaucuaugagcaa

SEQ ID NO: 1289865 - RNA, 19 nt, Artificial Sequence
  Description of Artificial Sequence: Synthetic oligonucleotide
  Antisense strand to SEQ ID NO: 1289864
uugcucauagaucaggaaa

SEQ ID NO: 1289866 - RNA, 19 nt, Artificial Sequence
  Description of Artificial Sequence: Synthetic oligonucleotide
  Sense strand starting at position 1267 of SEQ ID NO: 1241662
gcaagaugcccuuaucuca

SEQ ID NO: 1289867 - RNA, 19 nt, Artificial Sequence
  Description of Artificial Sequence: Synthetic oligonucleotide
  Antisense strand to SEQ ID NO: 1289866
ugagauaagggcaucuugc

SEQ ID NO: 1289868 - RNA, 19 nt, Artificial Sequence
  Description of Artificial Sequence: Synthetic oligonucleotide
  Sense strand starting at position 1284 of SEQ ID NO: 1241662
cacggaagccgauaauauu

SEQ ID NO: 1289869 - RNA, 19 nt, Artificial Sequence
  Description of Artificial Sequence: Synthetic oligonucleotide
  Antisense strand to SEQ ID NO: 1289868
aauauuaucggcuuccgug

SEQ ID NO: 1289870 - RNA, 19 nt, Artificial Sequence
  Description of Artificial Sequence: Synthetic oligonucleotide
  Sense strand starting at position 1291 of SEQ ID NO: 1241662
gccgauaauauuggaucau

SEQ ID NO: 1289871 - RNA, 19 nt, Artificial Sequence
  Description of Artificial Sequence: Synthetic oligonucleotide
  Antisense strand to SEQ ID NO: 1289870
augauccaauauuaucggc

SEQ ID NO: 1289872 - RNA, 19 nt, Artificial Sequence
  Description of Artificial Sequence: Synthetic oligonucleotide
  Sense strand starting at position 1300 of SEQ ID NO: 1241662
auuggaucauuguuccuga

SEQ ID NO: 1289873 - RNA, 19 nt, Artificial Sequence
  Description of Artificial Sequence: Synthetic oligonucleotide
  Antisense strand to SEQ ID NO: 1289872
ucaggaacaaugauccaau

SEQ ID NO: 1289874 - RNA, 19 nt, Artificial Sequence
  Description of Artificial Sequence: Synthetic oligonucleotide
  Sense strand starting at position 1301 of SEQ ID NO: 1241662
uuggaucauuguuccugau

SEQ ID NO: 1289875 - RNA, 19 nt, Artificial Sequence
  Description of Artificial Sequence: Synthetic oligonucleotide
  Antisense strand to SEQ ID NO: 1289874
aucaggaacaaugauccaa

SEQ ID NO: 1289876 - RNA, 19 nt, Artificial Sequence
  Description of Artificial Sequence: Synthetic oligonucleotide
  Sense strand starting at position 1454 of SEQ ID NO: 1241662
acaggaugaugcuuuguga

SEQ ID NO: 1289877 - RNA, 19 nt, Artificial Sequence
  Description of Artificial Sequence: Synthetic oligonucleotide
  Antisense strand to SEQ ID NO: 1289876
ucacaaagcaucauccugu

SEQ ID NO: 1289878 - RNA, 19 nt, Artificial Sequence
  Description of Artificial Sequence: Synthetic oligonucleotide
  Sense strand starting at position 1595 of SEQ ID NO: 1241662
gagagcacccgcuguauuu

SEQ ID NO: 1289879 - RNA, 19 nt, Artificial Sequence
  Description of Artificial Sequence: Synthetic oligonucleotide
  Antisense strand to SEQ ID NO: 1289878
aaauacagcgggugcucuc

SEQ ID NO: 1289880 - RNA, 19 nt, Artificial Sequence
  Description of Artificial Sequence: Synthetic oligonucleotide
  Sense strand starting at position 1597 of SEQ ID NO: 1241662
gagcacccgcuguauuuaa

SEQ ID NO: 1289881 - RNA, 19 nt, Artificial Sequence
  Description of Artificial Sequence: Synthetic oligonucleotide
  Antisense strand to SEQ ID NO: 1289880
uuaaauacagcgggugcuc

SEQ ID NO: 1289882 - RNA, 19 nt, Artificial Sequence
  Description of Artificial Sequence: Synthetic oligonucleotide
  Sense strand starting at position 1628 of SEQ ID NO: 1241662
ccauccagaggguguaauu

SEQ ID NO: 1289883 - RNA, 19 nt, Artificial Sequence
  Description of Artificial Sequence: Synthetic oligonucleotide
  Antisense strand to SEQ ID NO: 1289882
aauuacacccucuggaugg

SEQ ID NO: 1289884 - RNA, 19 nt, Artificial Sequence
  Description of Artificial Sequence: Synthetic oligonucleotide
  Sense strand starting at position 1651 of SEQ ID NO: 1241662
ccaucuuaccuaugaggaa

SEQ ID NO: 1289885 - RNA, 19 nt, Artificial Sequence
  Description of Artificial Sequence: Synthetic oligonucleotide
  Antisense strand to SEQ ID NO: 1289884
uuccucauagguaagaugg

SEQ ID NO: 1289886 - RNA, 19 nt, Artificial Sequence
  Description of Artificial Sequence: Synthetic oligonucleotide
  Sense strand starting at position 1872 of SEQ ID NO: 1241662
guacuuacugugucccgua

SEQ ID NO: 1289887 - RNA, 19 nt, Artificial Sequence
  Description of Artificial Sequence: Synthetic oligonucleotide
  Antisense strand to SEQ ID NO: 1289886
uacgggacacaguaaguac

SEQ ID NO: 1289888 - RNA, 19 nt, Artificial Sequence
  Description of Artificial Sequence: Synthetic oligonucleotide
  Sense strand starting at position 2354 of SEQ ID NO: 1241662
ugcugacugggucauagau

SEQ ID NO: 1289889 - RNA, 19 nt, Artificial Sequence
  Description of Artificial Sequence: Synthetic oligonucleotide
  Antisense strand to SEQ ID NO: 1289888
aucuaugacccagucagca

SEQ ID NO: 1289890 - RNA, 19 nt, Artificial Sequence
  Description of Artificial Sequence: Synthetic oligonucleotide
  Sense strand starting at position 2381 of SEQ ID NO: 1241662
uuagauucuaguggaaaug

SEQ ID NO: 1289891 - RNA, 19 nt, Artificial Sequence
  Description of Artificial Sequence: Synthetic oligonucleotide
  Antisense strand to SEQ ID NO: 1289890
cauuuccacuagaaucuaa

SEQ ID NO: 1289892 - RNA, 19 nt, Artificial Sequence
  Description of Artificial Sequence: Synthetic oligonucleotide
  Sense strand starting at position 2416 of SEQ ID NO: 1241662
ucaccaugccugcaaugaa

SEQ ID NO: 1289893 - RNA, 19 nt, Artificial Sequence
  Description of Artificial Sequence: Synthetic oligonucleotide
  Antisense strand to SEQ ID NO: 1289892
uucauugcaggcaugguga

SEQ ID NO: 1289894 - RNA, 19 nt, Artificial Sequence
  Description of Artificial Sequence: Synthetic oligonucleotide
  Sense strand starting at position 2454 of SEQ ID NO: 1241662
cugugauugcaccaaucac

SEQ ID NO: 1289895 - RNA, 19 nt, Artificial Sequence
  Description of Artificial Sequence: Synthetic oligonucleotide
  Antisense strand to SEQ ID NO: 1289894
gugauuggugcaaucacag

SEQ ID NO: 1289896 - RNA, 19 nt, Artificial Sequence
  Description of Artificial Sequence: Synthetic oligonucleotide
  Sense strand starting at position 2638 of SEQ ID NO: 1241662
uugaaauccugguucccua

SEQ ID NO: 1289897 - RNA, 19 nt, Artificial Sequence
  Description of Artificial Sequence: Synthetic oligonucleotide
  Antisense strand to SEQ ID NO: 1289896
uagggaaccaggauuucaa

SEQ ID NO: 1289898 - RNA, 19 nt, Artificial Sequence
  Description of Artificial Sequence: Synthetic oligonucleotide
  Sense strand starting at position 2830 of SEQ ID NO: 1241662
gagguaauaccuggaaagu

SEQ ID NO: 1289899 - RNA, 19 nt, Artificial Sequence
  Description of Artificial Sequence: Synthetic oligonucleotide
  Antisense strand to SEQ ID NO: 1289898
acuuuccagguauuaccuc

SEQ ID NO: 1289900 - RNA, 19 nt, Artificial Sequence
  Description of Artificial Sequence: Synthetic oligonucleotide
  Sense strand starting at position 2936 of SEQ ID NO: 1241662
gcuguuggauauccacaga

SEQ ID NO: 1289901 - RNA, 19 nt, Artificial Sequence
  Description of Artificial Sequence: Synthetic oligonucleotide
  Antisense strand to SEQ ID NO: 1289900
ucuguggauauccaacagc

SEQ ID NO: 1289902 - RNA, 19 nt, Artificial Sequence
  Description of Artificial Sequence: Synthetic oligonucleotide
  Sense strand starting at position 3083 of SEQ ID NO: 1241662
agagaugagcacuggguau

SEQ ID NO: 1289903 - RNA, 19 nt, Artificial Sequence
  Description of Artificial Sequence: Synthetic oligonucleotide
  Antisense strand to SEQ ID NO: 1289902
auacccagugcucaucucu

SEQ ID NO: 1289904 - RNA, 19 nt, Artificial Sequence
  Description of Artificial Sequence: Synthetic oligonucleotide
  Sense strand starting at position 3205 of SEQ ID NO: 1241662
gaucacuucuggguaucca

SEQ ID NO: 1289905 - RNA, 19 nt, Artificial Sequence
  Description of Artificial Sequence: Synthetic oligonucleotide
  Antisense strand to SEQ ID NO: 1289904
uggauacccagaagugauc

SEQ ID NO: 1289906 - RNA, 19 nt, Artificial Sequence
  Description of Artificial Sequence: Synthetic oligonucleotide
  Sense strand starting at position 3598 of SEQ ID NO: 1241662
ugagcaagaguccauuauc

SEQ ID NO: 1289907 - RNA, 19 nt, Artificial Sequence
  Description of Artificial Sequence: Synthetic oligonucleotide
  Antisense strand to SEQ ID NO: 1289906
gauaauggacucuugcuca

SEQ ID NO: 1289908 - RNA, 19 nt, Artificial Sequence
  Description of Artificial Sequence: Synthetic oligonucleotide
  Sense strand starting at position 3601 of SEQ ID NO: 1241662
gcaagaguccauuaucuca

SEQ ID NO: 1289909 - RNA, 19 nt, Artificial Sequence
  Description of Artificial Sequence: Synthetic oligonucleotide
  Antisense strand to SEQ ID NO: 1289908
ugagauaauggacucuugc

SEQ ID NO: 1289910 - RNA, 19 nt, Artificial Sequence
  Description of Artificial Sequence: Synthetic oligonucleotide
  Sense strand starting at position 3672 of SEQ ID NO: 1241662
accaguuaugggugaguaa

SEQ ID NO: 1289911 - RNA, 19 nt, Artificial Sequence
  Description of Artificial Sequence: Synthetic oligonucleotide
  Antisense strand to SEQ ID NO: 1289910
uuacucacccauaacuggu

SEQ ID NO: 1289912 - RNA, 19 nt, Artificial Sequence
  Description of Artificial Sequence: Synthetic oligonucleotide
  Sense strand starting at position 3673 of SEQ ID NO: 1241662
ccaguuaugggugaguaau

SEQ ID NO: 1289913 - RNA, 19 nt, Artificial Sequence
  Description of Artificial Sequence: Synthetic oligonucleotide
  Antisense strand to SEQ ID NO: 1289912
auuacucacccauaacugg

SEQ ID NO: 1289914 - RNA, 19 nt, Artificial Sequence
  Description of Artificial Sequence: Synthetic oligonucleotide
  Sense strand starting at position 3787 of SEQ ID NO: 1241662
ucuugaagagauugucaug

SEQ ID NO: 1289915 - RNA, 19 nt, Artificial Sequence
  Description of Artificial Sequence: Synthetic oligonucleotide
  Antisense strand to SEQ ID NO: 1289914
caugacaaucucuucaaga

SEQ ID NO: 1289916 - RNA, 19 nt, Artificial Sequence
  Description of Artificial Sequence: Synthetic oligonucleotide
  Sense strand starting at position 3880 of SEQ ID NO: 1241662
aggugaugugaugguagaa

SEQ ID NO: 1289917 - RNA, 19 nt, Artificial Sequence
  Description of Artificial Sequence: Synthetic oligonucleotide
  Antisense strand to SEQ ID NO: 1289916
uucuaccaucacaucaccu

SEQ ID NO: 1289918 - RNA, 19 nt, Artificial Sequence
  Description of Artificial Sequence: Synthetic oligonucleotide
  Sense strand starting at position 110 of SEQ ID NO: 1241663
ggguucuuccagcacacau

SEQ ID NO: 1289919 - RNA, 19 nt, Artificial Sequence
  Description of Artificial Sequence: Synthetic oligonucleotide
  Antisense strand to SEQ ID NO: 1289918
augugugcuggaagaaccc

SEQ ID NO: 1289920 - RNA, 19 nt, Artificial Sequence
  Description of Artificial Sequence: Synthetic oligonucleotide
  Sense strand starting at position 468 of SEQ ID NO: 1241663
uggucacugccauaccuau

SEQ ID NO: 1289921 - RNA, 19 nt, Artificial Sequence
  Description of Artificial Sequence: Synthetic oligonucleotide
  Antisense strand to SEQ ID NO: 1289920
auagguauggcagugacca

SEQ ID NO: 1289922 - RNA, 19 nt, Artificial Sequence
  Description of Artificial Sequence: Synthetic oligonucleotide
  Sense strand starting at position 475 of SEQ ID NO: 1241663
ugccauaccuaucugggau

SEQ ID NO: 1289923 - RNA, 19 nt, Artificial Sequence
  Description of Artificial Sequence: Synthetic oligonucleotide
  Antisense strand to SEQ ID NO: 1289922
aucccagauagguauggca

SEQ ID NO: 1289924 - RNA, 19 nt, Artificial Sequence
  Description of Artificial Sequence: Synthetic oligonucleotide
  Sense strand starting at position 588 of SEQ ID NO: 1241663
gcguuaauucucuaagaug

SEQ ID NO: 1289925 - RNA, 19 nt, Artificial Sequence
  Description of Artificial Sequence: Synthetic oligonucleotide
  Antisense strand to SEQ ID NO: 1289924
caucuuagagaauuaacgc

SEQ ID NO: 1289926 - RNA, 19 nt, Artificial Sequence
  Description of Artificial Sequence: Synthetic oligonucleotide
  Sense strand starting at position 627 of SEQ ID NO: 1241663
cccacaauauuguugugaa

SEQ ID NO: 1289927 - RNA, 19 nt, Artificial Sequence
  Description of Artificial Sequence: Synthetic oligonucleotide
  Antisense strand to SEQ ID NO: 1289926
uucacaacaauauuguggg

SEQ ID NO: 1289928 - RNA, 19 nt, Artificial Sequence
  Description of Artificial Sequence: Synthetic oligonucleotide
  Sense strand starting at position 634 of SEQ ID NO: 1241663
uauuguugugaauaccaga

SEQ ID NO: 1289929 - RNA, 19 nt, Artificial Sequence
  Description of Artificial Sequence: Synthetic oligonucleotide
  Antisense strand to SEQ ID NO: 1289928
ucugguauucacaacaaua

SEQ ID NO: 1289930 - RNA, 19 nt, Artificial Sequence
  Description of Artificial Sequence: Synthetic oligonucleotide
  Sense strand starting at position 765 of SEQ ID NO: 1241663
cuggaauucuaagccuaga

SEQ ID NO: 1289931 - RNA, 19 nt, Artificial Sequence
  Description of Artificial Sequence: Synthetic oligonucleotide
  Antisense strand to SEQ ID NO: 1289930
ucuaggcuuagaauuccag

SEQ ID NO: 1289932 - RNA, 19 nt, Artificial Sequence
  Description of Artificial Sequence: Synthetic oligonucleotide
  Sense strand starting at position 768 of SEQ ID NO: 1241663
gaauucuaagccuagaugu

SEQ ID NO: 1289933 - RNA, 19 nt, Artificial Sequence
  Description of Artificial Sequence: Synthetic oligonucleotide
  Antisense strand to SEQ ID NO: 1289932
acaucuaggcuuagaauuc

SEQ ID NO: 1289934 - RNA, 19 nt, Artificial Sequence
  Description of Artificial Sequence: Synthetic oligonucleotide
  Sense strand starting at position 775 of SEQ ID NO: 1241663
aagccuagaugucugacau

SEQ ID NO: 1289935 - RNA, 19 nt, Artificial Sequence
  Description of Artificial Sequence: Synthetic oligonucleotide
  Antisense strand to SEQ ID NO: 1289934
augucagacaucuaggcuu

SEQ ID NO: 1289936 - RNA, 19 nt, Artificial Sequence
  Description of Artificial Sequence: Synthetic oligonucleotide
  Sense strand starting at position 1257 of SEQ ID NO: 1241663
uguuccucaucucugaaga

SEQ ID NO: 1289937 - RNA, 19 nt, Artificial Sequence
  Description of Artificial Sequence: Synthetic oligonucleotide
  Antisense strand to SEQ ID NO: 1289936
ucuucagagaugaggaaca

SEQ ID NO: 1289938 - RNA, 19 nt, Artificial Sequence
  Description of Artificial Sequence: Synthetic oligonucleotide
  Sense strand starting at position 1258 of SEQ ID NO: 1241663
guuccucaucucugaagag

SEQ ID NO: 1289939 - RNA, 19 nt, Artificial Sequence
  Description of Artificial Sequence: Synthetic oligonucleotide
  Antisense strand to SEQ ID NO: 1289938
cucuucagagaugaggaac

SEQ ID NO: 1289940 - RNA, 19 nt, Artificial Sequence
  Description of Artificial Sequence: Synthetic oligonucleotide
  Sense strand starting at position 1270 of SEQ ID NO: 1241663
ugaagagacucacuuagua

SEQ ID NO: 1289941 - RNA, 19 nt, Artificial Sequence
  Description of Artificial Sequence: Synthetic oligonucleotide
  Antisense strand to SEQ ID NO: 1289940
uacuaagugagucucuuca

SEQ ID NO: 1289942 - RNA, 19 nt, Artificial Sequence
  Description of Artificial Sequence: Synthetic oligonucleotide
  Sense strand starting at position 1342 of SEQ ID NO: 1241663
cuugaccuucuguagugaa

SEQ ID NO: 1289943 - RNA, 19 nt, Artificial Sequence
  Description of Artificial Sequence: Synthetic oligonucleotide
  Antisense strand to SEQ ID NO: 1289942
uucacuacagaaggucaag

SEQ ID NO: 1289944 - RNA, 19 nt, Artificial Sequence
  Description of Artificial Sequence: Synthetic oligonucleotide
  Sense strand starting at position 1356 of SEQ ID NO: 1241663
gugaaaccucaugacaugu

SEQ ID NO: 1289945 - RNA, 19 nt, Artificial Sequence
  Description of Artificial Sequence: Synthetic oligonucleotide
  Antisense strand to SEQ ID NO: 1289944
acaugucaugagguuucac

SEQ ID NO: 1289946 - RNA, 19 nt, Artificial Sequence
  Description of Artificial Sequence: Synthetic oligonucleotide
  Sense strand starting at position 1615 of SEQ ID NO: 1241663
ugggcuuaggagcaucaau

SEQ ID NO: 1289947 - RNA, 19 nt, Artificial Sequence
  Description of Artificial Sequence: Synthetic oligonucleotide
  Antisense strand to SEQ ID NO: 1289946
auugaugcuccuaagccca

SEQ ID NO: 1289948 - RNA, 19 nt, Artificial Sequence
  Description of Artificial Sequence: Synthetic oligonucleotide
  Sense strand starting at position 1643 of SEQ ID NO: 1241663
ggacgagaaugguucuuag

SEQ ID NO: 1289949 - RNA, 19 nt, Artificial Sequence
  Description of Artificial Sequence: Synthetic oligonucleotide
  Antisense strand to SEQ ID NO: 1289948
cuaagaaccauucucgucc

SEQ ID NO: 1289950 - RNA, 19 nt, Artificial Sequence
  Description of Artificial Sequence: Synthetic oligonucleotide
  Sense strand starting at position 2117 of SEQ ID NO: 1241663
caggauagcugaguaaaca

SEQ ID NO: 1289951 - RNA, 19 nt, Artificial Sequence
  Description of Artificial Sequence: Synthetic oligonucleotide
  Antisense strand to SEQ ID NO: 1289950
uguuuacucagcuauccug

SEQ ID NO: 1289952 - RNA, 19 nt, Artificial Sequence
  Description of Artificial Sequence: Synthetic oligonucleotide
  Sense strand starting at position 2277 of SEQ ID NO: 1241663
aggugcagauacuuguaaa

SEQ ID NO: 1289953 - RNA, 19 nt, Artificial Sequence
  Description of Artificial Sequence: Synthetic oligonucleotide
  Antisense strand to SEQ ID NO: 1289952
uuuacaaguaucugcaccu

SEQ ID NO: 1289954 - RNA, 19 nt, Artificial Sequence
  Description of Artificial Sequence: Synthetic oligonucleotide
  Sense strand starting at position 2359 of SEQ ID NO: 1241663
cuuagucuggugggagaga

SEQ ID NO: 1289955 - RNA, 19 nt, Artificial Sequence
  Description of Artificial Sequence: Synthetic oligonucleotide
  Antisense strand to SEQ ID NO: 1289954
ucucucccaccagacuaag

SEQ ID NO: 1289956 - RNA, 19 nt, Artificial Sequence
  Description of Artificial Sequence: Synthetic oligonucleotide
  Sense strand starting at position 2383 of SEQ ID NO: 1241663
auggaauaauaucugccaa

SEQ ID NO: 1289957 - RNA, 19 nt, Artificial Sequence
  Description of Artificial Sequence: Synthetic oligonucleotide
  Antisense strand to SEQ ID NO: 1289956
uuggcagauauuauuccau

SEQ ID NO: 1289958 - RNA, 19 nt, Artificial Sequence
  Description of Artificial Sequence: Synthetic oligonucleotide
  Sense strand starting at position 2443 of SEQ ID NO: 1241663
cugugaaguggguaccauu

SEQ ID NO: 1289959 - RNA, 19 nt, Artificial Sequence
  Description of Artificial Sequence: Synthetic oligonucleotide
  Antisense strand to SEQ ID NO: 1289958
aaugguacccacuucacag

SEQ ID NO: 1289960 - RNA, 19 nt, Artificial Sequence
  Description of Artificial Sequence: Synthetic oligonucleotide
  Sense strand starting at position 2461 of SEQ ID NO: 1241663
ugucacuccucuuuagaua

SEQ ID NO: 1289961 - RNA, 19 nt, Artificial Sequence
  Description of Artificial Sequence: Synthetic oligonucleotide
  Antisense strand to SEQ ID NO: 1289960
uaucuaaagaggagugaca

SEQ ID NO: 1289962 - RNA, 19 nt, Artificial Sequence
  Description of Artificial Sequence: Synthetic oligonucleotide
  Sense strand starting at position 2462 of SEQ ID NO: 1241663
gucacuccucuuuagauag

SEQ ID NO: 1289963 - RNA, 19 nt, Artificial Sequence
  Description of Artificial Sequence: Synthetic oligonucleotide
  Antisense strand to SEQ ID NO: 1289962
cuaucuaaagaggagugac

SEQ ID NO: 1289964 - RNA, 19 nt, Artificial Sequence
  Description of Artificial Sequence: Synthetic oligonucleotide
  Sense strand starting at position 2490 of SEQ ID NO: 1241663
cugcauggaaguuaaguua

SEQ ID NO: 1289965 - RNA, 19 nt, Artificial Sequence
  Description of Artificial Sequence: Synthetic oligonucleotide
  Antisense strand to SEQ ID NO: 1289964
uaacuuaacuuccaugcag

SEQ ID NO: 1289966 - RNA, 19 nt, Artificial Sequence
  Description of Artificial Sequence: Synthetic oligonucleotide
  Sense strand starting at position 2697 of SEQ ID NO: 1241663
ggaguucuaaaucaggcau

SEQ ID NO: 1289967 - RNA, 19 nt, Artificial Sequence
  Description of Artificial Sequence: Synthetic oligonucleotide
  Antisense strand to SEQ ID NO: 1289966
augccugauuuagaacucc

SEQ ID NO: 1289968 - RNA, 19 nt, Artificial Sequence
  Description of Artificial Sequence: Synthetic oligonucleotide
  Sense strand starting at position 2807 of SEQ ID NO: 1241663
ggacaaauguggccacagu

SEQ ID NO: 1289969 - RNA, 19 nt, Artificial Sequence
  Description of Artificial Sequence: Synthetic oligonucleotide
  Antisense strand to SEQ ID NO: 1289968
acuguggccacauuugucc

SEQ ID NO: 1289970 - RNA, 19 nt, Artificial Sequence
  Description of Artificial Sequence: Synthetic oligonucleotide
  Sense strand starting at position 2808 of SEQ ID NO: 1241663
gacaaauguggccacagua

SEQ ID NO: 1289971 - RNA, 19 nt, Artificial Sequence
  Description of Artificial Sequence: Synthetic oligonucleotide
  Antisense strand to SEQ ID NO: 1289970
uacuguggccacauuuguc

SEQ ID NO: 1289972 - RNA, 19 nt, Artificial Sequence
  Description of Artificial Sequence: Synthetic oligonucleotide
  Sense strand starting at position 2826 of SEQ ID NO: 1241663
agcucuggguuauuuaguu

SEQ ID NO: 1289973 - RNA, 19 nt, Artificial Sequence
  Description of Artificial Sequence: Synthetic oligonucleotide
  Antisense strand to SEQ ID NO: 1289972
aacuaaauaacccagagcu

SEQ ID NO: 1289974 - RNA, 19 nt, Artificial Sequence
  Description of Artificial Sequence: Synthetic oligonucleotide
  Sense strand starting at position 2842 of SEQ ID NO: 1241663
guucuaacugguuaguuga

SEQ ID NO: 1289975 - RNA, 19 nt, Artificial Sequence
  Description of Artificial Sequence: Synthetic oligonucleotide
  Antisense strand to SEQ ID NO: 1289974
ucaacuaaccaguuagaac

SEQ ID NO: 1289976 - RNA, 19 nt, Artificial Sequence
  Description of Artificial Sequence: Synthetic oligonucleotide
  Sense strand starting at position 2844 of SEQ ID NO: 1241663
ucuaacugguuaguugaua

SEQ ID NO: 1289977 - RNA, 19 nt, Artificial Sequence
  Description of Artificial Sequence: Synthetic oligonucleotide
  Antisense strand to SEQ ID NO: 1289976
uaucaacuaaccaguuaga

SEQ ID NO: 1289978 - RNA, 19 nt, Artificial Sequence
  Description of Artificial Sequence: Synthetic oligonucleotide
  Sense strand starting at position 2845 of SEQ ID NO: 1241663
cuaacugguuaguugauau

SEQ ID NO: 1289979 - RNA, 19 nt, Artificial Sequence
  Description of Artificial Sequence: Synthetic oligonucleotide
  Antisense strand to SEQ ID NO: 1289978
auaucaacuaaccaguuag

SEQ ID NO: 1289980 - RNA, 19 nt, Artificial Sequence
  Description of Artificial Sequence: Synthetic oligonucleotide
  Sense strand starting at position 2942 of SEQ ID NO: 1241663
aggacugauugaucacagu

SEQ ID NO: 1289981 - RNA, 19 nt, Artificial Sequence
  Description of Artificial Sequence: Synthetic oligonucleotide
  Antisense strand to SEQ ID NO: 1289980
acugugaucaaucaguccu

SEQ ID NO: 1289982 - RNA, 19 nt, Artificial Sequence
  Description of Artificial Sequence: Synthetic oligonucleotide
  Sense strand starting at position 2948 of SEQ ID NO: 1241663
gauugaucacaguguggag

SEQ ID NO: 1289983 - RNA, 19 nt, Artificial Sequence
  Description of Artificial Sequence: Synthetic oligonucleotide
  Antisense strand to SEQ ID NO: 1289982
cuccacacugugaucaauc

SEQ ID NO: 1289984 - RNA, 19 nt, Artificial Sequence
  Description of Artificial Sequence: Synthetic oligonucleotide
  Sense strand starting at position 3013 of SEQ ID NO: 1241663
uuggguugacagcaucauu

SEQ ID NO: 1289985 - RNA, 19 nt, Artificial Sequence
  Description of Artificial Sequence: Synthetic oligonucleotide
  Antisense strand to SEQ ID NO: 1289984
aaugaugcugucaacccaa

SEQ ID NO: 1289986 - RNA, 19 nt, Artificial Sequence
  Description of Artificial Sequence: Synthetic oligonucleotide
  Sense strand starting at position 3031 of SEQ ID NO: 1241663
ugcuuccauccagagauga

SEQ ID NO: 1289987 - RNA, 19 nt, Artificial Sequence
  Description of Artificial Sequence: Synthetic oligonucleotide
  Antisense strand to SEQ ID NO: 1289986
ucaucucuggauggaagca

SEQ ID NO: 1289988 - RNA, 19 nt, Artificial Sequence
  Description of Artificial Sequence: Synthetic oligonucleotide
  Sense strand starting at position 3516 of SEQ ID NO: 1241663
ugagauaaaugcuuagcuu

SEQ ID NO: 1289989 - RNA, 19 nt, Artificial Sequence
  Description of Artificial Sequence: Synthetic oligonucleotide
  Antisense strand to SEQ ID NO: 1289988
aagcuaagcauuuaucuca

SEQ ID NO: 1289990 - RNA, 19 nt, Artificial Sequence
  Description of Artificial Sequence: Synthetic oligonucleotide
  Sense strand starting at position 3594 of SEQ ID NO: 1241663
cuaaauacugagugagcua

SEQ ID NO: 1289991 - RNA, 19 nt, Artificial Sequence
  Description of Artificial Sequence: Synthetic oligonucleotide
  Antisense strand to SEQ ID NO: 1289990
uagcucacucaguauuuag

SEQ ID NO: 1289992 - RNA, 19 nt, Artificial Sequence
  Description of Artificial Sequence: Synthetic oligonucleotide
  Sense strand starting at position 3699 of SEQ ID NO: 1241663
cagaguguaguuuaguaau

SEQ ID NO: 1289993 - RNA, 19 nt, Artificial Sequence
  Description of Artificial Sequence: Synthetic oligonucleotide
  Antisense strand to SEQ ID NO: 1289992
auuacuaaacuacacucug

SEQ ID NO: 1289994 - RNA, 19 nt, Artificial Sequence
  Description of Artificial Sequence: Synthetic oligonucleotide
  Sense strand starting at position 3716 of SEQ ID NO: 1241663
auaugucacugaguuuauu

SEQ ID NO: 1289995 - RNA, 19 nt, Artificial Sequence
  Description of Artificial Sequence: Synthetic oligonucleotide
  Antisense strand to SEQ ID NO: 1289994
aauaaacucagugacauau

SEQ ID NO: 1289996 - RNA, 19 nt, Artificial Sequence
  Description of Artificial Sequence: Synthetic oligonucleotide
  Sense strand starting at position 3838 of SEQ ID NO: 1241663
uuguaauagccauauaugg

SEQ ID NO: 1289997 - RNA, 19 nt, Artificial Sequence
  Description of Artificial Sequence: Synthetic oligonucleotide
  Antisense strand to SEQ ID NO: 1289996
ccauauauggcuauuacaa

SEQ ID NO: 1289998 - RNA, 19 nt, Artificial Sequence
  Description of Artificial Sequence: Synthetic oligonucleotide
  Sense strand starting at position 42 of SEQ ID NO: 1241664
aguaaauguccugagucau

SEQ ID NO: 1289999 - RNA, 19 nt, Artificial Sequence
  Description of Artificial Sequence: Synthetic oligonucleotide
  Antisense strand to SEQ ID NO: 1289998
augacucaggacauuuacu

SEQ ID NO: 1290000 - RNA, 19 nt, Artificial Sequence
  Description of Artificial Sequence: Synthetic oligonucleotide
  Sense strand starting at position 50 of SEQ ID NO: 1241664
uccugagucaucgauggua

SEQ ID NO: 1290001 - RNA, 19 nt, Artificial Sequence
  Description of Artificial Sequence: Synthetic oligonucleotide
  Antisense strand to SEQ ID NO: 1290000
uaccaucgaugacucagga

SEQ ID NO: 1290002 - RNA, 19 nt, Artificial Sequence
  Description of Artificial Sequence: Synthetic oligonucleotide
  Sense strand starting at position 544 of SEQ ID NO: 1241664
gcugaucugguguaucacu

SEQ ID NO: 1290003 - RNA, 19 nt, Artificial Sequence
  Description of Artificial Sequence: Synthetic oligonucleotide
  Antisense strand to SEQ ID NO: 1290002
agugauacaccagaucagc

SEQ ID NO: 1290004 - RNA, 19 nt, Artificial Sequence
  Description of Artificial Sequence: Synthetic oligonucleotide
  Sense strand starting at position 829 of SEQ ID NO: 1241664
ccaugugugguagaaccua

SEQ ID NO: 1290005 - RNA, 19 nt, Artificial Sequence
  Description of Artificial Sequence: Synthetic oligonucleotide
  Antisense strand to SEQ ID NO: 1290004
uagguucuaccacacaugg

SEQ ID NO: 1290006 - RNA, 19 nt, Artificial Sequence
  Description of Artificial Sequence: Synthetic oligonucleotide
  Sense strand starting at position 1621 of SEQ ID NO: 1241664
uggcuucuguauccacaaa

SEQ ID NO: 1290007 - RNA, 19 nt, Artificial Sequence
  Description of Artificial Sequence: Synthetic oligonucleotide
  Antisense strand to SEQ ID NO: 1290006
uuuguggauacagaagcca

SEQ ID NO: 1290008 - RNA, 19 nt, Artificial Sequence
  Description of Artificial Sequence: Synthetic oligonucleotide
  Sense strand starting at position 1639 of SEQ ID NO: 1241664
aaaugugacccagaugcua

SEQ ID NO: 1290009 - RNA, 19 nt, Artificial Sequence
  Description of Artificial Sequence: Synthetic oligonucleotide
  Antisense strand to SEQ ID NO: 1290008
uagcaucugggucacauuu

SEQ ID NO: 1290010 - RNA, 19 nt, Artificial Sequence
  Description of Artificial Sequence: Synthetic oligonucleotide
  Sense strand starting at position 2031 of SEQ ID NO: 1241664
uccucugaucucuacaugu

SEQ ID NO: 1290011 - RNA, 19 nt, Artificial Sequence
  Description of Artificial Sequence: Synthetic oligonucleotide
  Antisense strand to SEQ ID NO: 1290010
acauguagagaucagagga

SEQ ID NO: 1290012 - RNA, 19 nt, Artificial Sequence
  Description of Artificial Sequence: Synthetic oligonucleotide
  Sense strand starting at position 2033 of SEQ ID NO: 1241664
cucugaucucuacaugucu

SEQ ID NO: 1290013 - RNA, 19 nt, Artificial Sequence
  Description of Artificial Sequence: Synthetic oligonucleotide
  Antisense strand to SEQ ID NO: 1290012
agacauguagagaucagag

SEQ ID NO: 1290014 - RNA, 19 nt, Artificial Sequence
  Description of Artificial Sequence: Synthetic oligonucleotide
  Sense strand starting at position 2476 of SEQ ID NO: 1241664
cugugucacuuaguauuua

SEQ ID NO: 1290015 - RNA, 19 nt, Artificial Sequence
  Description of Artificial Sequence: Synthetic oligonucleotide
  Antisense strand to SEQ ID NO: 1290014
uaaauacuaagugacacag

SEQ ID NO: 1290016 - RNA, 19 nt, Artificial Sequence
  Description of Artificial Sequence: Synthetic oligonucleotide
  Sense strand starting at position 2653 of SEQ ID NO: 1241664
acaugugauauuuguuguu

SEQ ID NO: 1290017 - RNA, 19 nt, Artificial Sequence
  Description of Artificial Sequence: Synthetic oligonucleotide
  Antisense strand to SEQ ID NO: 1290016
aacaacaaauaucacaugu

SEQ ID NO: 1290018 - RNA, 19 nt, Artificial Sequence
  Description of Artificial Sequence: Synthetic oligonucleotide
  Sense strand starting at position 2655 of SEQ ID NO: 1241664
augugauauuuguuguuuc

SEQ ID NO: 1290019 - RNA, 19 nt, Artificial Sequence
  Description of Artificial Sequence: Synthetic oligonucleotide
  Antisense strand to SEQ ID NO: 1290018
gaaacaacaaauaucacau

SEQ ID NO: 1290020 - RNA, 19 nt, Artificial Sequence
  Description of Artificial Sequence: Synthetic oligonucleotide
  Sense strand starting at position 2745 of SEQ ID NO: 1241664
gcccuaguuugugugauuu

SEQ ID NO: 1290021 - RNA, 19 nt, Artificial Sequence
  Description of Artificial Sequence: Synthetic oligonucleotide
  Antisense strand to SEQ ID NO: 1290020
aaaucacacaaacuagggc

SEQ ID NO: 1290022 - RNA, 19 nt, Artificial Sequence
  Description of Artificial Sequence: Synthetic oligonucleotide
  Sense strand starting at position 2844 of SEQ ID NO: 1241664
gugaaacacuuaucacugu

SEQ ID NO: 1290023 - RNA, 19 nt, Artificial Sequence
  Description of Artificial Sequence: Synthetic oligonucleotide
  Antisense strand to SEQ ID NO: 1290022
acagugauaaguguuucac

SEQ ID NO: 1290024 - RNA, 19 nt, Artificial Sequence
  Description of Artificial Sequence: Synthetic oligonucleotide
  Sense strand starting at position 2874 of SEQ ID NO: 1241664
auuuauuugugugacugaa

SEQ ID NO: 1290025 - RNA, 19 nt, Artificial Sequence
  Description of Artificial Sequence: Synthetic oligonucleotide
  Antisense strand to SEQ ID NO: 1290024
uucagucacacaaauaaau

SEQ ID NO: 1290026 - RNA, 19 nt, Artificial Sequence
  Description of Artificial Sequence: Synthetic oligonucleotide
  Sense strand starting at position 2905 of SEQ ID NO: 1241664
cagggauccugucuaccuu

SEQ ID NO: 1290027 - RNA, 19 nt, Artificial Sequence
  Description of Artificial Sequence: Synthetic oligonucleotide
  Antisense strand to SEQ ID NO: 1290026
aagguagacaggaucccug

SEQ ID NO: 1290028 - RNA, 19 nt, Artificial Sequence
  Description of Artificial Sequence: Synthetic oligonucleotide
  Sense strand starting at position 2906 of SEQ ID NO: 1241664
agggauccugucuaccuua

SEQ ID NO: 1290029 - RNA, 19 nt, Artificial Sequence
  Description of Artificial Sequence: Synthetic oligonucleotide
  Antisense strand to SEQ ID NO: 1290028
uaagguagacaggaucccu

SEQ ID NO: 1290030 - RNA, 19 nt, Artificial Sequence
  Description of Artificial Sequence: Synthetic oligonucleotide
  Sense strand starting at position 3020 of SEQ ID NO: 1241664
ccauuuaucuuugaagagu

SEQ ID NO: 1290031 - RNA, 19 nt, Artificial Sequence
  Description of Artificial Sequence: Synthetic oligonucleotide
  Antisense strand to SEQ ID NO: 1290030
acucuucaaagauaaaugg

SEQ ID NO: 1290032 - RNA, 19 nt, Artificial Sequence
  Description of Artificial Sequence: Synthetic oligonucleotide
  Sense strand starting at position 3035 of SEQ ID NO: 1241664
gaguaauccugacugguaa

SEQ ID NO: 1290033 - RNA, 19 nt, Artificial Sequence
  Description of Artificial Sequence: Synthetic oligonucleotide
  Antisense strand to SEQ ID NO: 1290032
uuaccagucaggauuacuc

SEQ ID NO: 1290034 - RNA, 19 nt, Artificial Sequence
  Description of Artificial Sequence: Synthetic oligonucleotide
  Sense strand starting at position 3036 of SEQ ID NO: 1241664
aguaauccugacugguaau

SEQ ID NO: 1290035 - RNA, 19 nt, Artificial Sequence
  Description of Artificial Sequence: Synthetic oligonucleotide
  Antisense strand to SEQ ID NO: 1290034
auuaccagucaggauuacu

SEQ ID NO: 1290036 - RNA, 19 nt, Artificial Sequence
  Description of Artificial Sequence: Synthetic oligonucleotide
  Sense strand starting at position 3077 of SEQ ID NO: 1241664
uggaaaguccuguagcuac

SEQ ID NO: 1290037 - RNA, 19 nt, Artificial Sequence
  Description of Artificial Sequence: Synthetic oligonucleotide
  Antisense strand to SEQ ID NO: 1290036
guagcuacaggacuuucca

SEQ ID NO: 1290038 - RNA, 19 nt, Artificial Sequence
  Description of Artificial Sequence: Synthetic oligonucleotide
  Sense strand starting at position 3100 of SEQ ID NO: 1241664
gguaaaguuacacagguau

SEQ ID NO: 1290039 - RNA, 19 nt, Artificial Sequence
  Description of Artificial Sequence: Synthetic oligonucleotide
  Antisense strand to SEQ ID NO: 1290038
auaccuguguaacuuuacc

SEQ ID NO: 1290040 - RNA, 19 nt, Artificial Sequence
  Description of Artificial Sequence: Synthetic oligonucleotide
  Sense strand starting at position 3111 of SEQ ID NO: 1241664
acagguauauauguaaagu

SEQ ID NO: 1290041 - RNA, 19 nt, Artificial Sequence
  Description of Artificial Sequence: Synthetic oligonucleotide
  Antisense strand to SEQ ID NO: 1290040
acuuuacauauauaccugu

SEQ ID NO: 1290042 - RNA, 19 nt, Artificial Sequence
  Description of Artificial Sequence: Synthetic oligonucleotide
  Sense strand starting at position 3122 of SEQ ID NO: 1241664
uguaaaguuugaguugacu

SEQ ID NO: 1290043 - RNA, 19 nt, Artificial Sequence
  Description of Artificial Sequence: Synthetic oligonucleotide
  Antisense strand to SEQ ID NO: 1290042
agucaacucaaacuuuaca

SEQ ID NO: 1290044 - RNA, 19 nt, Artificial Sequence
  Description of Artificial Sequence: Synthetic oligonucleotide
  Sense strand starting at position 3164 of SEQ ID NO: 1241664
aacugauauugguugcaaa

SEQ ID NO: 1290045 - RNA, 19 nt, Artificial Sequence
  Description of Artificial Sequence: Synthetic oligonucleotide
  Antisense strand to SEQ ID NO: 1290044
uuugcaaccaauaucaguu

SEQ ID NO: 1290046 - RNA, 19 nt, Artificial Sequence
  Description of Artificial Sequence: Synthetic oligonucleotide
  Sense strand starting at position 3165 of SEQ ID NO: 1241664
acugauauugguugcaaac

SEQ ID NO: 1290047 - RNA, 19 nt, Artificial Sequence
  Description of Artificial Sequence: Synthetic oligonucleotide
  Antisense strand to SEQ ID NO: 1290046
guuugcaaccaauaucagu

SEQ ID NO: 1290048 - RNA, 19 nt, Artificial Sequence
  Description of Artificial Sequence: Synthetic oligonucleotide
  Sense strand starting at position 3289 of SEQ ID NO: 1241664
agauaagcucuacaauugu

SEQ ID NO: 1290049 - RNA, 19 nt, Artificial Sequence
  Description of Artificial Sequence: Synthetic oligonucleotide
  Antisense strand to SEQ ID NO: 1290048
acaauuguagagcuuaucu

SEQ ID NO: 1290050 - RNA, 19 nt, Artificial Sequence
  Description of Artificial Sequence: Synthetic oligonucleotide
  Sense strand starting at position 3329 of SEQ ID NO: 1241664
acuuucuggacguguggaa

SEQ ID NO: 1290051 - RNA, 19 nt, Artificial Sequence
  Description of Artificial Sequence: Synthetic oligonucleotide
  Antisense strand to SEQ ID NO: 1290050
uuccacacguccagaaagu

SEQ ID NO: 1290052 - RNA, 19 nt, Artificial Sequence
  Description of Artificial Sequence: Synthetic oligonucleotide
  Sense strand starting at position 3333 of SEQ ID NO: 1241664
ucuggacguguggaagaaa

SEQ ID NO: 1290053 - RNA, 19 nt, Artificial Sequence
  Description of Artificial Sequence: Synthetic oligonucleotide
  Antisense strand to SEQ ID NO: 1290052
uuucuuccacacguccaga

SEQ ID NO: 1290054 - RNA, 19 nt, Artificial Sequence
  Description of Artificial Sequence: Synthetic oligonucleotide
  Sense strand starting at position 3372 of SEQ ID NO: 1241664
gcuugcugagcuuaggaga

SEQ ID NO: 1290055 - RNA, 19 nt, Artificial Sequence
  Description of Artificial Sequence: Synthetic oligonucleotide
  Antisense strand to SEQ ID NO: 1290054
ucuccuaagcucagcaagc

SEQ ID NO: 1290056 - RNA, 19 nt, Artificial Sequence
  Description of Artificial Sequence: Synthetic oligonucleotide
  Sense strand starting at position 3421 of SEQ ID NO: 1241664
gcuauaauuugugcaguga

SEQ ID NO: 1290057 - RNA, 19 nt, Artificial Sequence
  Description of Artificial Sequence: Synthetic oligonucleotide
  Antisense strand to SEQ ID NO: 1290056
ucacugcacaaauuauagc

SEQ ID NO: 1290058 - RNA, 19 nt, Artificial Sequence
  Description of Artificial Sequence: Synthetic oligonucleotide
  Sense strand starting at position 3425 of SEQ ID NO: 1241664
uaauuugugcagugaagua

SEQ ID NO: 1290059 - RNA, 19 nt, Artificial Sequence
  Description of Artificial Sequence: Synthetic oligonucleotide
  Antisense strand to SEQ ID NO: 1290058
uacuucacugcacaaauua

SEQ ID NO: 1290060 - RNA, 19 nt, Artificial Sequence
  Description of Artificial Sequence: Synthetic oligonucleotide
  Sense strand starting at position 3473 of SEQ ID NO: 1241664
gggucucuuuaaguccaaa

SEQ ID NO: 1290061 - RNA, 19 nt, Artificial Sequence
  Description of Artificial Sequence: Synthetic oligonucleotide
  Antisense strand to SEQ ID NO: 1290060
uuuggacuuaaagagaccc

SEQ ID NO: 1290062 - RNA, 19 nt, Artificial Sequence
  Description of Artificial Sequence: Synthetic oligonucleotide
  Sense strand starting at position 3485 of SEQ ID NO: 1241664
guccaaagcuaaguacuaa

SEQ ID NO: 1290063 - RNA, 19 nt, Artificial Sequence
  Description of Artificial Sequence: Synthetic oligonucleotide
  Antisense strand to SEQ ID NO: 1290062
uuaguacuuagcuuuggac

SEQ ID NO: 1290064 - RNA, 19 nt, Artificial Sequence
  Description of Artificial Sequence: Synthetic oligonucleotide
  Sense strand starting at position 3519 of SEQ ID NO: 1241664
agugaaauuccacauggcu

SEQ ID NO: 1290065 - RNA, 19 nt, Artificial Sequence
  Description of Artificial Sequence: Synthetic oligonucleotide
  Antisense strand to SEQ ID NO: 1290064
agccauguggaauuucacu

SEQ ID NO: 1290066 - RNA, 19 nt, Artificial Sequence
  Description of Artificial Sequence: Synthetic oligonucleotide
  Sense strand starting at position 3601 of SEQ ID NO: 1241664
accuacugugaagguauaa

SEQ ID NO: 1290067 - RNA, 19 nt, Artificial Sequence
  Description of Artificial Sequence: Synthetic oligonucleotide
  Antisense strand to SEQ ID NO: 1290066
uuauaccuucacaguaggu

SEQ ID NO: 1290068 - RNA, 19 nt, Artificial Sequence
  Description of Artificial Sequence: Synthetic oligonucleotide
  Sense strand starting at position 3698 of SEQ ID NO: 1241664
aguagagacccagaagugu

SEQ ID NO: 1290069 - RNA, 19 nt, Artificial Sequence
  Description of Artificial Sequence: Synthetic oligonucleotide
  Antisense strand to SEQ ID NO: 1290068
acacuucugggucucuacu

SEQ ID NO: 1290070 - RNA, 19 nt, Artificial Sequence
  Description of Artificial Sequence: Synthetic oligonucleotide
  Sense strand starting at position 3724 of SEQ ID NO: 1241664
uggcauuagggcuaaacua

SEQ ID NO: 1290071 - RNA, 19 nt, Artificial Sequence
  Description of Artificial Sequence: Synthetic oligonucleotide
  Antisense strand to SEQ ID NO: 1290070
uaguuuagcccuaaugcca

SEQ ID NO: 1290072 - RNA, 19 nt, Artificial Sequence
  Description of Artificial Sequence: Synthetic oligonucleotide
  Sense strand starting at position 3732 of SEQ ID NO: 1241664
gggcuaaacuaacuuugaa

SEQ ID NO: 1290073 - RNA, 19 nt, Artificial Sequence
  Description of Artificial Sequence: Synthetic oligonucleotide
  Antisense strand to SEQ ID NO: 1290072
uucaaaguuaguuuagccc

SEQ ID NO: 1290074 - RNA, 19 nt, Artificial Sequence
  Description of Artificial Sequence: Synthetic oligonucleotide
  Sense strand starting at position 3805 of SEQ ID NO: 1241664
ucaaacagaucuguaagua

SEQ ID NO: 1290075 - RNA, 19 nt, Artificial Sequence
  Description of Artificial Sequence: Synthetic oligonucleotide
  Antisense strand to SEQ ID NO: 1290074
uacuuacagaucuguuuga

SEQ ID NO: 1290076 - RNA, 19 nt, Artificial Sequence
  Description of Artificial Sequence: Synthetic oligonucleotide
  Sense strand starting at position 3881 of SEQ ID NO: 1241664
auauuaugauguccagcau

SEQ ID NO: 1290077 - RNA, 19 nt, Artificial Sequence
  Description of Artificial Sequence: Synthetic oligonucleotide
  Antisense strand to SEQ ID NO: 1290076
augcuggacaucauaauau

SEQ ID NO: 1290078 - RNA, 19 nt, Artificial Sequence
  Description of Artificial Sequence: Synthetic oligonucleotide
  Sense strand starting at position 221 of SEQ ID NO: 1241665
auguuagcacacuggagaa

SEQ ID NO: 1290079 - RNA, 19 nt, Artificial Sequence
  Description of Artificial Sequence: Synthetic oligonucleotide
  Antisense strand to SEQ ID NO: 1290078
uucuccagugugcuaacau

SEQ ID NO: 1290080 - RNA, 19 nt, Artificial Sequence
  Description of Artificial Sequence: Synthetic oligonucleotide
  Sense strand starting at position 402 of SEQ ID NO: 1241665
acuuucuuaggccgaagaa

SEQ ID NO: 1290081 - RNA, 19 nt, Artificial Sequence
  Description of Artificial Sequence: Synthetic oligonucleotide
  Antisense strand to SEQ ID NO: 1290080
uucuucggccuaagaaagu

SEQ ID NO: 1290082 - RNA, 19 nt, Artificial Sequence
  Description of Artificial Sequence: Synthetic oligonucleotide
  Sense strand starting at position 403 of SEQ ID NO: 1241665
cuuucuuaggccgaagaaa

SEQ ID NO: 1290083 - RNA, 19 nt, Artificial Sequence
  Description of Artificial Sequence: Synthetic oligonucleotide
  Antisense strand to SEQ ID NO: 1290082
uuucuucggccuaagaaag

SEQ ID NO: 1290084 - RNA, 19 nt, Artificial Sequence
  Description of Artificial Sequence: Synthetic oligonucleotide
  Sense strand starting at position 477 of SEQ ID NO: 1241665
ggacuaauccaguacugcu

SEQ ID NO: 1290085 - RNA, 19 nt, Artificial Sequence
  Description of Artificial Sequence: Synthetic oligonucleotide
  Antisense strand to SEQ ID NO: 1290084
agcaguacuggauuagucc

SEQ ID NO: 1290086 - RNA, 19 nt, Artificial Sequence
  Description of Artificial Sequence: Synthetic oligonucleotide
  Sense strand starting at position 507 of SEQ ID NO: 1241665
caugguagcccguauaaac

SEQ ID NO: 1290087 - RNA, 19 nt, Artificial Sequence
  Description of Artificial Sequence: Synthetic oligonucleotide
  Antisense strand to SEQ ID NO: 1290086
guuuauacgggcuaccaug

SEQ ID NO: 1290088 - RNA, 19 nt, Artificial Sequence
  Description of Artificial Sequence: Synthetic oligonucleotide
  Sense strand starting at position 598 of SEQ ID NO: 1241665
cuauauucuuggguuaaau

SEQ ID NO: 1290089 - RNA, 19 nt, Artificial Sequence
  Description of Artificial Sequence: Synthetic oligonucleotide
  Antisense strand to SEQ ID NO: 1290088
auuuaacccaagaauauag

SEQ ID NO: 1290090 - RNA, 19 nt, Artificial Sequence
  Description of Artificial Sequence: Synthetic oligonucleotide
  Sense strand starting at position 633 of SEQ ID NO: 1241665
auaaacacuucuccgagau

SEQ ID NO: 1290091 - RNA, 19 nt, Artificial Sequence
  Description of Artificial Sequence: Synthetic oligonucleotide
  Antisense strand to SEQ ID NO: 1290090
aucucggagaaguguuuau

SEQ ID NO: 1290092 - RNA, 19 nt, Artificial Sequence
  Description of Artificial Sequence: Synthetic oligonucleotide
  Sense strand starting at position 637 of SEQ ID NO: 1241665
acacuucuccgagauuauu

SEQ ID NO: 1290093 - RNA, 19 nt, Artificial Sequence
  Description of Artificial Sequence: Synthetic oligonucleotide
  Antisense strand to SEQ ID NO: 1290092
aauaaucucggagaagugu

SEQ ID NO: 1290094 - RNA, 19 nt, Artificial Sequence
  Description of Artificial Sequence: Synthetic oligonucleotide
  Sense strand starting at position 645 of SEQ ID NO: 1241665
ccgagauuauuacugguua

SEQ ID NO: 1290095 - RNA, 19 nt, Artificial Sequence
  Description of Artificial Sequence: Synthetic oligonucleotide
  Antisense strand to SEQ ID NO: 1290094
uaaccaguaauaaucucgg

SEQ ID NO: 1290096 - RNA, 19 nt, Artificial Sequence
  Description of Artificial Sequence: Synthetic oligonucleotide
  Sense strand starting at position 649 of SEQ ID NO: 1241665
gauuauuacugguuaguuc

SEQ ID NO: 1290097 - RNA, 19 nt, Artificial Sequence
  Description of Artificial Sequence: Synthetic oligonucleotide
  Antisense strand to SEQ ID NO: 1290096
gaacuaaccaguaauaauc

SEQ ID NO: 1290098 - RNA, 19 nt, Artificial Sequence
  Description of Artificial Sequence: Synthetic oligonucleotide
  Sense strand starting at position 830 of SEQ ID NO: 1241665
guaacucuucgaggauucu

SEQ ID NO: 1290099 - RNA, 19 nt, Artificial Sequence
  Description of Artificial Sequence: Synthetic oligonucleotide
  Antisense strand to SEQ ID NO: 1290098
agaauccucgaagaguuac

SEQ ID NO: 1290100 - RNA, 19 nt, Artificial Sequence
  Description of Artificial Sequence: Synthetic oligonucleotide
  Sense strand starting at position 955 of SEQ ID NO: 1241665
ccgcgaaugccuuugcaac

SEQ ID NO: 1290101 - RNA, 19 nt, Artificial Sequence
  Description of Artificial Sequence: Synthetic oligonucleotide
  Antisense strand to SEQ ID NO: 1290100
guugcaaaggcauucgcgg

SEQ ID NO: 1290102 - RNA, 19 nt, Artificial Sequence
  Description of Artificial Sequence: Synthetic oligonucleotide
  Sense strand starting at position 1114 of SEQ ID NO: 1241665
aagaguuaacgccggaaug

SEQ ID NO: 1290103 - RNA, 19 nt, Artificial Sequence
  Description of Artificial Sequence: Synthetic oligonucleotide
  Antisense strand to SEQ ID NO: 1290102
cauuccggcguuaacucuu

SEQ ID NO: 1290104 - RNA, 19 nt, Artificial Sequence
  Description of Artificial Sequence: Synthetic oligonucleotide
  Sense strand starting at position 1115 of SEQ ID NO: 1241665
agaguuaacgccggaauga

SEQ ID NO: 1290105 - RNA, 19 nt, Artificial Sequence
  Description of Artificial Sequence: Synthetic oligonucleotide
  Antisense strand to SEQ ID NO: 1290104
ucauuccggcguuaacucu

SEQ ID NO: 1290106 - RNA, 19 nt, Artificial Sequence
  Description of Artificial Sequence: Synthetic oligonucleotide
  Sense strand starting at position 1116 of SEQ ID NO: 1241665
gaguuaacgccggaaugac

SEQ ID NO: 1290107 - RNA, 19 nt, Artificial Sequence
  Description of Artificial Sequence: Synthetic oligonucleotide
  Antisense strand to SEQ ID NO: 1290106
gucauuccggcguuaacuc

SEQ ID NO: 1290108 - RNA, 19 nt, Artificial Sequence
  Description of Artificial Sequence: Synthetic oligonucleotide
  Sense strand starting at position 2213 of SEQ ID NO: 1241665
cagagcuuugauuggacga

SEQ ID NO: 1290109 - RNA, 19 nt, Artificial Sequence
  Description of Artificial Sequence: Synthetic oligonucleotide
  Antisense strand to SEQ ID NO: 1290108
ucguccaaucaaagcucug

SEQ ID NO: 1290110 - RNA, 19 nt, Artificial Sequence
  Description of Artificial Sequence: Synthetic oligonucleotide
  Sense strand starting at position 2214 of SEQ ID NO: 1241665
agagcuuugauuggacgaa

SEQ ID NO: 1290111 - RNA, 19 nt, Artificial Sequence
  Description of Artificial Sequence: Synthetic oligonucleotide
  Antisense strand to SEQ ID NO: 1290110
uucguccaaucaaagcucu

SEQ ID NO: 1290112 - RNA, 19 nt, Artificial Sequence
  Description of Artificial Sequence: Synthetic oligonucleotide
  Sense strand starting at position 2899 of SEQ ID NO: 1241665
gguguuaaccgcgcacagu

SEQ ID NO: 1290113 - RNA, 19 nt, Artificial Sequence
  Description of Artificial Sequence: Synthetic oligonucleotide
  Antisense strand to SEQ ID NO: 1290112
acugugcgcgguuaacacc

SEQ ID NO: 1290114 - RNA, 19 nt, Artificial Sequence
  Description of Artificial Sequence: Synthetic oligonucleotide
  Sense strand starting at position 2977 of SEQ ID NO: 1241665
uuggcuaggccugaaacuu

SEQ ID NO: 1290115 - RNA, 19 nt, Artificial Sequence
  Description of Artificial Sequence: Synthetic oligonucleotide
  Antisense strand to SEQ ID NO: 1290114
aaguuucaggccuagccaa

SEQ ID NO: 1290116 - RNA, 19 nt, Artificial Sequence
  Description of Artificial Sequence: Synthetic oligonucleotide
  Sense strand starting at position 3080 of SEQ ID NO: 1241665
aggcacuuccgggauuaga

SEQ ID NO: 1290117 - RNA, 19 nt, Artificial Sequence
  Description of Artificial Sequence: Synthetic oligonucleotide
  Antisense strand to SEQ ID NO: 1290116
ucuaaucccggaagugccu

SEQ ID NO: 1290118 - RNA, 19 nt, Artificial Sequence
  Description of Artificial Sequence: Synthetic oligonucleotide
  Sense strand starting at position 3144 of SEQ ID NO: 1241665
guugauuugguuuguuaug

SEQ ID NO: 1290119 - RNA, 19 nt, Artificial Sequence
  Description of Artificial Sequence: Synthetic oligonucleotide
  Antisense strand to SEQ ID NO: 1290118
cauaacaaaccaaaucaac

SEQ ID NO: 1290120 - RNA, 19 nt, Artificial Sequence
  Description of Artificial Sequence: Synthetic oligonucleotide
  Sense strand starting at position 3162 of SEQ ID NO: 1241665
gagagaaauuguucuuuag

SEQ ID NO: 1290121 - RNA, 19 nt, Artificial Sequence
  Description of Artificial Sequence: Synthetic oligonucleotide
  Antisense strand to SEQ ID NO: 1290120
cuaaagaacaauuucucuc

SEQ ID NO: 1290122 - RNA, 19 nt, Artificial Sequence
  Description of Artificial Sequence: Synthetic oligonucleotide
  Sense strand starting at position 3189 of SEQ ID NO: 1241665
agcguaagucuagagguua

SEQ ID NO: 1290123 - RNA, 19 nt, Artificial Sequence
  Description of Artificial Sequence: Synthetic oligonucleotide
  Antisense strand to SEQ ID NO: 1290122
uaaccucuagacuuacgcu

SEQ ID NO: 1290124 - RNA, 19 nt, Artificial Sequence
  Description of Artificial Sequence: Synthetic oligonucleotide
  Sense strand starting at position 3194 of SEQ ID NO: 1241665
aagucuagagguuauguga

SEQ ID NO: 1290125 - RNA, 19 nt, Artificial Sequence
  Description of Artificial Sequence: Synthetic oligonucleotide
  Antisense strand to SEQ ID NO: 1290124
ucacauaaccucuagacuu

SEQ ID NO: 1290126 - RNA, 19 nt, Artificial Sequence
  Description of Artificial Sequence: Synthetic oligonucleotide
  Sense strand starting at position 3221 of SEQ ID NO: 1241665
aaacgauugucugcccaag

SEQ ID NO: 1290127 - RNA, 19 nt, Artificial Sequence
  Description of Artificial Sequence: Synthetic oligonucleotide
  Antisense strand to SEQ ID NO: 1290126
cuugggcagacaaucguuu

SEQ ID NO: 1290128 - RNA, 19 nt, Artificial Sequence
  Description of Artificial Sequence: Synthetic oligonucleotide
  Sense strand starting at position 3235 of SEQ ID NO: 1241665
ccaagauaggcucgguaau

SEQ ID NO: 1290129 - RNA, 19 nt, Artificial Sequence
  Description of Artificial Sequence: Synthetic oligonucleotide
  Antisense strand to SEQ ID NO: 1290128
auuaccgagccuaucuugg

SEQ ID NO: 1290130 - RNA, 19 nt, Artificial Sequence
  Description of Artificial Sequence: Synthetic oligonucleotide
  Sense strand starting at position 3236 of SEQ ID NO: 1241665
caagauaggcucgguaaug

SEQ ID NO: 1290131 - RNA, 19 nt, Artificial Sequence
  Description of Artificial Sequence: Synthetic oligonucleotide
  Antisense strand to SEQ ID NO: 1290130
cauuaccgagccuaucuug

SEQ ID NO: 1290132 - RNA, 19 nt, Artificial Sequence
  Description of Artificial Sequence: Synthetic oligonucleotide
  Sense strand starting at position 3323 of SEQ ID NO: 1241665
aagagcauuucuuaagggu

SEQ ID NO: 1290133 - RNA, 19 nt, Artificial Sequence
  Description of Artificial Sequence: Synthetic oligonucleotide
  Antisense strand to SEQ ID NO: 1290132
acccuuaagaaaugcucuu

SEQ ID NO: 1290134 - RNA, 19 nt, Artificial Sequence
  Description of Artificial Sequence: Synthetic oligonucleotide
  Sense strand starting at position 3358 of SEQ ID NO: 1241665
aagagaaacuuggugaugu

SEQ ID NO: 1290135 - RNA, 19 nt, Artificial Sequence
  Description of Artificial Sequence: Synthetic oligonucleotide
  Antisense strand to SEQ ID NO: 1290134
acaucaccaaguuucucuu

SEQ ID NO: 1290136 - RNA, 19 nt, Artificial Sequence
  Description of Artificial Sequence: Synthetic oligonucleotide
  Sense strand starting at position 3360 of SEQ ID NO: 1241665
gagaaacuuggugauguuu

SEQ ID NO: 1290137 - RNA, 19 nt, Artificial Sequence
  Description of Artificial Sequence: Synthetic oligonucleotide
  Antisense strand to SEQ ID NO: 1290136
aaacaucaccaaguuucuc

SEQ ID NO: 1290138 - RNA, 19 nt, Artificial Sequence
  Description of Artificial Sequence: Synthetic oligonucleotide
  Sense strand starting at position 3392 of SEQ ID NO: 1241665
uaaaucgcuguuuacagau

SEQ ID NO: 1290139 - RNA, 19 nt, Artificial Sequence
  Description of Artificial Sequence: Synthetic oligonucleotide
  Antisense strand to SEQ ID NO: 1290138
aucuguaaacagcgauuua

SEQ ID NO: 1290140 - RNA, 19 nt, Artificial Sequence
  Description of Artificial Sequence: Synthetic oligonucleotide
  Sense strand starting at position 3440 of SEQ ID NO: 1241665
gcccgcuaaagguuuguau

SEQ ID NO: 1290141 - RNA, 19 nt, Artificial Sequence
  Description of Artificial Sequence: Synthetic oligonucleotide
  Antisense strand to SEQ ID NO: 1290140
auacaaaccuuuagcgggc

SEQ ID NO: 1290142 - RNA, 19 nt, Artificial Sequence
  Description of Artificial Sequence: Synthetic oligonucleotide
  Sense strand starting at position 3507 of SEQ ID NO: 1241665
cugccugacguuuaauaag

SEQ ID NO: 1290143 - RNA, 19 nt, Artificial Sequence
  Description of Artificial Sequence: Synthetic oligonucleotide
  Antisense strand to SEQ ID NO: 1290142
cuuauuaaacgucaggcag

SEQ ID NO: 1290144 - RNA, 19 nt, Artificial Sequence
  Description of Artificial Sequence: Synthetic oligonucleotide
  Sense strand starting at position 3528 of SEQ ID NO: 1241665
cucuguauugcugaaugaa

SEQ ID NO: 1290145 - RNA, 19 nt, Artificial Sequence
  Description of Artificial Sequence: Synthetic oligonucleotide
  Antisense strand to SEQ ID NO: 1290144
uucauucagcaauacagag

SEQ ID NO: 1290146 - RNA, 19 nt, Artificial Sequence
  Description of Artificial Sequence: Synthetic oligonucleotide
  Sense strand starting at position 3531 of SEQ ID NO: 1241665
uguauugcugaaugaaaga

SEQ ID NO: 1290147 - RNA, 19 nt, Artificial Sequence
  Description of Artificial Sequence: Synthetic oligonucleotide
  Antisense strand to SEQ ID NO: 1290146
ucuuucauucagcaauaca

SEQ ID NO: 1290148 - RNA, 19 nt, Artificial Sequence
  Description of Artificial Sequence: Synthetic oligonucleotide
  Sense strand starting at position 3569 of SEQ ID NO: 1241665
gguaguaguauugauagac

SEQ ID NO: 1290149 - RNA, 19 nt, Artificial Sequence
  Description of Artificial Sequence: Synthetic oligonucleotide
  Antisense strand to SEQ ID NO: 1290148
gucuaucaauacuacuacc

SEQ ID NO: 1290150 - RNA, 19 nt, Artificial Sequence
  Description of Artificial Sequence: Synthetic oligonucleotide
  Sense strand starting at position 3607 of SEQ ID NO: 1241665
uaggaugcuuaccuguuaa

SEQ ID NO: 1290151 - RNA, 19 nt, Artificial Sequence
  Description of Artificial Sequence: Synthetic oligonucleotide
  Antisense strand to SEQ ID NO: 1290150
uuaacagguaagcauccua

SEQ ID NO: 1290152 - RNA, 19 nt, Artificial Sequence
  Description of Artificial Sequence: Synthetic oligonucleotide
  Sense strand starting at position 3748 of SEQ ID NO: 1241665
ucaagcauauuaguugauu

SEQ ID NO: 1290153 - RNA, 19 nt, Artificial Sequence
  Description of Artificial Sequence: Synthetic oligonucleotide
  Antisense strand to SEQ ID NO: 1290152
aaucaacuaauaugcuuga

SEQ ID NO: 1290154 - RNA, 19 nt, Artificial Sequence
  Description of Artificial Sequence: Synthetic oligonucleotide
  Sense strand starting at position 3771 of SEQ ID NO: 1241665
ggcaaauccuguuuaaauu

SEQ ID NO: 1290155 - RNA, 19 nt, Artificial Sequence
  Description of Artificial Sequence: Synthetic oligonucleotide
  Antisense strand to SEQ ID NO: 1290154
aauuuaaacaggauuugcc

SEQ ID NO: 1290156 - RNA, 19 nt, Artificial Sequence
  Description of Artificial Sequence: Synthetic oligonucleotide
  Sense strand starting at position 3806 of SEQ ID NO: 1241665
uguaguuugcacuaacaag

SEQ ID NO: 1290157 - RNA, 19 nt, Artificial Sequence
  Description of Artificial Sequence: Synthetic oligonucleotide
  Antisense strand to SEQ ID NO: 1290156
cuuguuagugcaaacuaca

SEQ ID NO: 1290158 - RNA, 19 nt, Artificial Sequence
  Description of Artificial Sequence: Synthetic oligonucleotide
  Sense strand starting at position 66 of SEQ ID NO: 1241666
cauagaaaucugugugcaa

SEQ ID NO: 1290159 - RNA, 19 nt, Artificial Sequence
  Description of Artificial Sequence: Synthetic oligonucleotide
  Antisense strand to SEQ ID NO: 1290158
uugcacacagauuucuaug

SEQ ID NO: 1290160 - RNA, 19 nt, Artificial Sequence
  Description of Artificial Sequence: Synthetic oligonucleotide
  Sense strand starting at position 67 of SEQ ID NO: 1241666
auagaaaucugugugcaau

SEQ ID NO: 1290161 - RNA, 19 nt, Artificial Sequence
  Description of Artificial Sequence: Synthetic oligonucleotide
  Antisense strand to SEQ ID NO: 1290160
auugcacacagauuucuau

SEQ ID NO: 1290162 - RNA, 19 nt, Artificial Sequence
  Description of Artificial Sequence: Synthetic oligonucleotide
  Sense strand starting at position 68 of SEQ ID NO: 1241666
uagaaaucugugugcaauc

SEQ ID NO: 1290163 - RNA, 19 nt, Artificial Sequence
  Description of Artificial Sequence: Synthetic oligonucleotide
  Antisense strand to SEQ ID NO: 1290162
gauugcacacagauuucua

SEQ ID NO: 1290164 - RNA, 19 nt, Artificial Sequence
  Description of Artificial Sequence: Synthetic oligonucleotide
  Sense strand starting at position 69 of SEQ ID NO: 1241666
agaaaucugugugcaauca

SEQ ID NO: 1290165 - RNA, 19 nt, Artificial Sequence
  Description of Artificial Sequence: Synthetic oligonucleotide
  Antisense strand to SEQ ID NO: 1290164
ugauugcacacagauuucu

SEQ ID NO: 1290166 - RNA, 19 nt, Artificial Sequence
  Description of Artificial Sequence: Synthetic oligonucleotide
  Sense strand starting at position 99 of SEQ ID NO: 1241666
ggcagaaucagauguggau

SEQ ID NO: 1290167 - RNA, 19 nt, Artificial Sequence
  Description of Artificial Sequence: Synthetic oligonucleotide
  Antisense strand to SEQ ID NO: 1290166
auccacaucugauucugcc

SEQ ID NO: 1290168 - RNA, 19 nt, Artificial Sequence
  Description of Artificial Sequence: Synthetic oligonucleotide
  Sense strand starting at position 198 of SEQ ID NO: 1241666
gagcacuaacagugaucaa

SEQ ID NO: 1290169 - RNA, 19 nt, Artificial Sequence
  Description of Artificial Sequence: Synthetic oligonucleotide
  Antisense strand to SEQ ID NO: 1290168
uugaucacuguuagugcuc

SEQ ID NO: 1290170 - RNA, 19 nt, Artificial Sequence
  Description of Artificial Sequence: Synthetic oligonucleotide
  Sense strand starting at position 318 of SEQ ID NO: 1241666
gguaauaaaugcuuacgaa

SEQ ID NO: 1290171 - RNA, 19 nt, Artificial Sequence
  Description of Artificial Sequence: Synthetic oligonucleotide
  Antisense strand to SEQ ID NO: 1290170
uucguaagcauuuauuacc

SEQ ID NO: 1290172 - RNA, 19 nt, Artificial Sequence
  Description of Artificial Sequence: Synthetic oligonucleotide
  Sense strand starting at position 319 of SEQ ID NO: 1241666
guaauaaaugcuuacgaag

SEQ ID NO: 1290173 - RNA, 19 nt, Artificial Sequence
  Description of Artificial Sequence: Synthetic oligonucleotide
  Antisense strand to SEQ ID NO: 1290172
cuucguaagcauuuauuac

SEQ ID NO: 1290174 - RNA, 19 nt, Artificial Sequence
  Description of Artificial Sequence: Synthetic oligonucleotide
  Sense strand starting at position 330 of SEQ ID NO: 1241666
uuacgaagcagaggucaaa

SEQ ID NO: 1290175 - RNA, 19 nt, Artificial Sequence
  Description of Artificial Sequence: Synthetic oligonucleotide
  Antisense strand to SEQ ID NO: 1290174
uuugaccucugcuucguaa

SEQ ID NO: 1290176 - RNA, 19 nt, Artificial Sequence
  Description of Artificial Sequence: Synthetic oligonucleotide
  Sense strand starting at position 417 of SEQ ID NO: 1241666
gcauuaggucacuaucaga

SEQ ID NO: 1290177 - RNA, 19 nt, Artificial Sequence
  Description of Artificial Sequence: Synthetic oligonucleotide
  Antisense strand to SEQ ID NO: 1290176
ucugauagugaccuaaugc

SEQ ID NO: 1290178 - RNA, 19 nt, Artificial Sequence
  Description of Artificial Sequence: Synthetic oligonucleotide
  Sense strand starting at position 652 of SEQ ID NO: 1241666
ggacaaacuuuccagagag

SEQ ID NO: 1290179 - RNA, 19 nt, Artificial Sequence
  Description of Artificial Sequence: Synthetic oligonucleotide
  Antisense strand to SEQ ID NO: 1290178
cucucuggaaaguuugucc

SEQ ID NO: 1290180 - RNA, 19 nt, Artificial Sequence
  Description of Artificial Sequence: Synthetic oligonucleotide
  Sense strand starting at position 984 of SEQ ID NO: 1241666
guaacccaugccuaagaau

SEQ ID NO: 1290181 - RNA, 19 nt, Artificial Sequence
  Description of Artificial Sequence: Synthetic oligonucleotide
  Antisense strand to SEQ ID NO: 1290180
auucuuaggcauggguuac

SEQ ID NO: 1290182 - RNA, 19 nt, Artificial Sequence
  Description of Artificial Sequence: Synthetic oligonucleotide
  Sense strand starting at position 1068 of SEQ ID NO: 1241666
cugcuuccucgcgcuaaua

SEQ ID NO: 1290183 - RNA, 19 nt, Artificial Sequence
  Description of Artificial Sequence: Synthetic oligonucleotide
  Antisense strand to SEQ ID NO: 1290182
uauuagcgcgaggaagcag

SEQ ID NO: 1290184 - RNA, 19 nt, Artificial Sequence
  Description of Artificial Sequence: Synthetic oligonucleotide
  Sense strand starting at position 1069 of SEQ ID NO: 1241666
ugcuuccucgcgcuaauaa

SEQ ID NO: 1290185 - RNA, 19 nt, Artificial Sequence
  Description of Artificial Sequence: Synthetic oligonucleotide
  Antisense strand to SEQ ID NO: 1290184
uuauuagcgcgaggaagca

SEQ ID NO: 1290186 - RNA, 19 nt, Artificial Sequence
  Description of Artificial Sequence: Synthetic oligonucleotide
  Sense strand starting at position 1223 of SEQ ID NO: 1241666
agucuuuaucagcacgguu

SEQ ID NO: 1290187 - RNA, 19 nt, Artificial Sequence
  Description of Artificial Sequence: Synthetic oligonucleotide
  Antisense strand to SEQ ID NO: 1290186
aaccgugcugauaaagacu

SEQ ID NO: 1290188 - RNA, 19 nt, Artificial Sequence
  Description of Artificial Sequence: Synthetic oligonucleotide
  Sense strand starting at position 1241 of SEQ ID NO: 1241666
ucacacagauccuggauuu

SEQ ID NO: 1290189 - RNA, 19 nt, Artificial Sequence
  Description of Artificial Sequence: Synthetic oligonucleotide
  Antisense strand to SEQ ID NO: 1290188
aaauccaggaucuguguga

SEQ ID NO: 1290190 - RNA, 19 nt, Artificial Sequence
  Description of Artificial Sequence: Synthetic oligonucleotide
  Sense strand starting at position 1329 of SEQ ID NO: 1241666
ggucccuaaugaguuggaa

SEQ ID NO: 1290191 - RNA, 19 nt, Artificial Sequence
  Description of Artificial Sequence: Synthetic oligonucleotide
  Antisense strand to SEQ ID NO: 1290190
uuccaacucauuagggacc

SEQ ID NO: 1290192 - RNA, 19 nt, Artificial Sequence
  Description of Artificial Sequence: Synthetic oligonucleotide
  Sense strand starting at position 1331 of SEQ ID NO: 1241666
ucccuaaugaguuggaagu

SEQ ID NO: 1290193 - RNA, 19 nt, Artificial Sequence
  Description of Artificial Sequence: Synthetic oligonucleotide
  Antisense strand to SEQ ID NO: 1290192
acuuccaacucauuaggga

SEQ ID NO: 1290194 - RNA, 19 nt, Artificial Sequence
  Description of Artificial Sequence: Synthetic oligonucleotide
  Sense strand starting at position 1375 of SEQ ID NO: 1241666
uuaucuggaucgccugaga

SEQ ID NO: 1290195 - RNA, 19 nt, Artificial Sequence
  Description of Artificial Sequence: Synthetic oligonucleotide
  Antisense strand to SEQ ID NO: 1290194
ucucaggcgauccagauaa

SEQ ID NO: 1290196 - RNA, 19 nt, Artificial Sequence
  Description of Artificial Sequence: Synthetic oligonucleotide
  Sense strand starting at position 1378 of SEQ ID NO: 1241666
ucuggaucgccugagaaga

SEQ ID NO: 1290197 - RNA, 19 nt, Artificial Sequence
  Description of Artificial Sequence: Synthetic oligonucleotide
  Antisense strand to SEQ ID NO: 1290196
ucuucucaggcgauccaga

SEQ ID NO: 1290198 - RNA, 19 nt, Artificial Sequence
  Description of Artificial Sequence: Synthetic oligonucleotide
  Sense strand starting at position 1620 of SEQ ID NO: 1241666
gagcaagucuuucccuaug

SEQ ID NO: 1290199 - RNA, 19 nt, Artificial Sequence
  Description of Artificial Sequence: Synthetic oligonucleotide
  Antisense strand to SEQ ID NO: 1290198
cauagggaaagacuugcuc

SEQ ID NO: 1290200 - RNA, 19 nt, Artificial Sequence
  Description of Artificial Sequence: Synthetic oligonucleotide
  Sense strand starting at position 1622 of SEQ ID NO: 1241666
gcaagucuuucccuaugaa

SEQ ID NO: 1290201 - RNA, 19 nt, Artificial Sequence
  Description of Artificial Sequence: Synthetic oligonucleotide
  Antisense strand to SEQ ID NO: 1290200
uucauagggaaagacuugc

SEQ ID NO: 1290202 - RNA, 19 nt, Artificial Sequence
  Description of Artificial Sequence: Synthetic oligonucleotide
  Sense strand starting at position 1625 of SEQ ID NO: 1241666
agucuuucccuaugaaagg

SEQ ID NO: 1290203 - RNA, 19 nt, Artificial Sequence
  Description of Artificial Sequence: Synthetic oligonucleotide
  Antisense strand to SEQ ID NO: 1290202
ccuuucauagggaaagacu

SEQ ID NO: 1290204 - RNA, 19 nt, Artificial Sequence
  Description of Artificial Sequence: Synthetic oligonucleotide
  Sense strand starting at position 1647 of SEQ ID NO: 1241666
aacucuaagcuucgugaag

SEQ ID NO: 1290205 - RNA, 19 nt, Artificial Sequence
  Description of Artificial Sequence: Synthetic oligonucleotide
  Antisense strand to SEQ ID NO: 1290204
cuucacgaagcuuagaguu

SEQ ID NO: 1290206 - RNA, 19 nt, Artificial Sequence
  Description of Artificial Sequence: Synthetic oligonucleotide
  Sense strand starting at position 1648 of SEQ ID NO: 1241666
acucuaagcuucgugaaga

SEQ ID NO: 1290207 - RNA, 19 nt, Artificial Sequence
  Description of Artificial Sequence: Synthetic oligonucleotide
  Antisense strand to SEQ ID NO: 1290206
ucuucacgaagcuuagagu

SEQ ID NO: 1290208 - RNA, 19 nt, Artificial Sequence
  Description of Artificial Sequence: Synthetic oligonucleotide
  Sense strand starting at position 1884 of SEQ ID NO: 1241666
guguguacccuuguuggua

SEQ ID NO: 1290209 - RNA, 19 nt, Artificial Sequence
  Description of Artificial Sequence: Synthetic oligonucleotide
  Antisense strand to SEQ ID NO: 1290208
uaccaacaaggguacacac

SEQ ID NO: 1290210 - RNA, 19 nt, Artificial Sequence
  Description of Artificial Sequence: Synthetic oligonucleotide
  Sense strand starting at position 2073 of SEQ ID NO: 1241666
gcagcuuugggaugcuaaa

SEQ ID NO: 1290211 - RNA, 19 nt, Artificial Sequence
  Description of Artificial Sequence: Synthetic oligonucleotide
  Antisense strand to SEQ ID NO: 1290210
uuuagcaucccaaagcugc

SEQ ID NO: 1290212 - RNA, 19 nt, Artificial Sequence
  Description of Artificial Sequence: Synthetic oligonucleotide
  Sense strand starting at position 2270 of SEQ ID NO: 1241666
gguacuuuggcggaggcaa

SEQ ID NO: 1290213 - RNA, 19 nt, Artificial Sequence
  Description of Artificial Sequence: Synthetic oligonucleotide
  Antisense strand to SEQ ID NO: 1290212
uugccuccgccaaaguacc

SEQ ID NO: 1290214 - RNA, 19 nt, Artificial Sequence
  Description of Artificial Sequence: Synthetic oligonucleotide
  Sense strand starting at position 2377 of SEQ ID NO: 1241666
gcugauuucuccgagaggg

SEQ ID NO: 1290215 - RNA, 19 nt, Artificial Sequence
  Description of Artificial Sequence: Synthetic oligonucleotide
  Antisense strand to SEQ ID NO: 1290214
cccucucggagaaaucagc

SEQ ID NO: 1290216 - RNA, 19 nt, Artificial Sequence
  Description of Artificial Sequence: Synthetic oligonucleotide
  Sense strand starting at position 2400 of SEQ ID NO: 1241666
ccagaaauugggcacgagu

SEQ ID NO: 1290217 - RNA, 19 nt, Artificial Sequence
  Description of Artificial Sequence: Synthetic oligonucleotide
  Antisense strand to SEQ ID NO: 1290216
acucgugcccaauuucugg

SEQ ID NO: 1290218 - RNA, 19 nt, Artificial Sequence
  Description of Artificial Sequence: Synthetic oligonucleotide
  Sense strand starting at position 2403 of SEQ ID NO: 1241666
gaaauugggcacgaguuga

SEQ ID NO: 1290219 - RNA, 19 nt, Artificial Sequence
  Description of Artificial Sequence: Synthetic oligonucleotide
  Antisense strand to SEQ ID NO: 1290218
ucaacucgugcccaauuuc

SEQ ID NO: 1290220 - RNA, 19 nt, Artificial Sequence
  Description of Artificial Sequence: Synthetic oligonucleotide
  Sense strand starting at position 2414 of SEQ ID NO: 1241666
cgaguugaugcaggagauu

SEQ ID NO: 1290221 - RNA, 19 nt, Artificial Sequence
  Description of Artificial Sequence: Synthetic oligonucleotide
  Antisense strand to SEQ ID NO: 1290220
aaucuccugcaucaacucg

SEQ ID NO: 1290222 - RNA, 19 nt, Artificial Sequence
  Description of Artificial Sequence: Synthetic oligonucleotide
  Sense strand starting at position 2628 of SEQ ID NO: 1241666
agcguaauugauggcaaga

SEQ ID NO: 1290223 - RNA, 19 nt, Artificial Sequence
  Description of Artificial Sequence: Synthetic oligonucleotide
  Antisense strand to SEQ ID NO: 1290222
ucuugccaucaauuacgcu

SEQ ID NO: 1290224 - RNA, 19 nt, Artificial Sequence
  Description of Artificial Sequence: Synthetic oligonucleotide
  Sense strand starting at position 2663 of SEQ ID NO: 1241666
guuugucucgguccgcaaa

SEQ ID NO: 1290225 - RNA, 19 nt, Artificial Sequence
  Description of Artificial Sequence: Synthetic oligonucleotide
  Antisense strand to SEQ ID NO: 1290224
uuugcggaccgagacaaac

SEQ ID NO: 1290226 - RNA, 19 nt, Artificial Sequence
  Description of Artificial Sequence: Synthetic oligonucleotide
  Sense strand starting at position 2754 of SEQ ID NO: 1241666
aagaauguauuugauggaa

SEQ ID NO: 1290227 - RNA, 19 nt, Artificial Sequence
  Description of Artificial Sequence: Synthetic oligonucleotide
  Antisense strand to SEQ ID NO: 1290226
uuccaucaaauacauucuu

SEQ ID NO: 1290228 - RNA, 19 nt, Artificial Sequence
  Description of Artificial Sequence: Synthetic oligonucleotide
  Sense strand starting at position 2756 of SEQ ID NO: 1241666
gaauguauuugauggaaac

SEQ ID NO: 1290229 - RNA, 19 nt, Artificial Sequence
  Description of Artificial Sequence: Synthetic oligonucleotide
  Antisense strand to SEQ ID NO: 1290228
guuuccaucaaauacauuc

SEQ ID NO: 1290230 - RNA, 19 nt, Artificial Sequence
  Description of Artificial Sequence: Synthetic oligonucleotide
  Sense strand starting at position 3070 of SEQ ID NO: 1241666
ugaccauuccaacgcaagu

SEQ ID NO: 1290231 - RNA, 19 nt, Artificial Sequence
  Description of Artificial Sequence: Synthetic oligonucleotide
  Antisense strand to SEQ ID NO: 1290230
acuugcguuggaaugguca

SEQ ID NO: 1290232 - RNA, 19 nt, Artificial Sequence
  Description of Artificial Sequence: Synthetic oligonucleotide
  Sense strand starting at position 3079 of SEQ ID NO: 1241666
caacgcaaguggucaaauu

SEQ ID NO: 1290233 - RNA, 19 nt, Artificial Sequence
  Description of Artificial Sequence: Synthetic oligonucleotide
  Antisense strand to SEQ ID NO: 1290232
aauuugaccacuugcguug

SEQ ID NO: 1290234 - RNA, 19 nt, Artificial Sequence
  Description of Artificial Sequence: Synthetic oligonucleotide
  Sense strand starting at position 3088 of SEQ ID NO: 1241666
uggucaaauuuguuuguuu

SEQ ID NO: 1290235 - RNA, 19 nt, Artificial Sequence
  Description of Artificial Sequence: Synthetic oligonucleotide
  Antisense strand to SEQ ID NO: 1290234
aaacaaacaaauuugacca

SEQ ID NO: 1290236 - RNA, 19 nt, Artificial Sequence
  Description of Artificial Sequence: Synthetic oligonucleotide
  Sense strand starting at position 3894 of SEQ ID NO: 1241666
agugaaaucucagcuccca

SEQ ID NO: 1290237 - RNA, 19 nt, Artificial Sequence
  Description of Artificial Sequence: Synthetic oligonucleotide
  Antisense strand to SEQ ID NO: 1290236
ugggagcugagauuucacu

SEQ ID NO: 1290238 - RNA, 19 nt, Artificial Sequence
  Description of Artificial Sequence: Synthetic oligonucleotide
  Sense strand starting at position 55 of SEQ ID NO: 1241667
uuccauguacuguaagaga

SEQ ID NO: 1290239 - RNA, 19 nt, Artificial Sequence
  Description of Artificial Sequence: Synthetic oligonucleotide
  Antisense strand to SEQ ID NO: 1290238
ucucuuacaguacauggaa

SEQ ID NO: 1290240 - RNA, 19 nt, Artificial Sequence
  Description of Artificial Sequence: Synthetic oligonucleotide
  Sense strand starting at position 64 of SEQ ID NO: 1241667
cuguaagagagaugcacua

SEQ ID NO: 1290241 - RNA, 19 nt, Artificial Sequence
  Description of Artificial Sequence: Synthetic oligonucleotide
  Antisense strand to SEQ ID NO: 1290240
uagugcaucucucuuacag

SEQ ID NO: 1290242 - RNA, 19 nt, Artificial Sequence
  Description of Artificial Sequence: Synthetic oligonucleotide
  Sense strand starting at position 118 of SEQ ID NO: 1241667
acugaaauuuaauguggga

SEQ ID NO: 1290243 - RNA, 19 nt, Artificial Sequence
  Description of Artificial Sequence: Synthetic oligonucleotide
  Antisense strand to SEQ ID NO: 1290242
ucccacauuaaauuucagu

SEQ ID NO: 1290244 - RNA, 19 nt, Artificial Sequence
  Description of Artificial Sequence: Synthetic oligonucleotide
  Sense strand starting at position 121 of SEQ ID NO: 1241667
gaaauuuaaugugggauaa

SEQ ID NO: 1290245 - RNA, 19 nt, Artificial Sequence
  Description of Artificial Sequence: Synthetic oligonucleotide
  Antisense strand to SEQ ID NO: 1290244
uuaucccacauuaaauuuc

SEQ ID NO: 1290246 - RNA, 19 nt, Artificial Sequence
  Description of Artificial Sequence: Synthetic oligonucleotide
  Sense strand starting at position 123 of SEQ ID NO: 1241667
aauuuaaugugggauaagu

SEQ ID NO: 1290247 - RNA, 19 nt, Artificial Sequence
  Description of Artificial Sequence: Synthetic oligonucleotide
  Antisense strand to SEQ ID NO: 1290246
acuuaucccacauuaaauu

SEQ ID NO: 1290248 - RNA, 19 nt, Artificial Sequence
  Description of Artificial Sequence: Synthetic oligonucleotide
  Sense strand starting at position 222 of SEQ ID NO: 1241667
agaggaaguuuguuuccuu

SEQ ID NO: 1290249 - RNA, 19 nt, Artificial Sequence
  Description of Artificial Sequence: Synthetic oligonucleotide
  Antisense strand to SEQ ID NO: 1290248
aaggaaacaaacuuccucu

SEQ ID NO: 1290250 - RNA, 19 nt, Artificial Sequence
  Description of Artificial Sequence: Synthetic oligonucleotide
  Sense strand starting at position 223 of SEQ ID NO: 1241667
gaggaaguuuguuuccuua

SEQ ID NO: 1290251 - RNA, 19 nt, Artificial Sequence
  Description of Artificial Sequence: Synthetic oligonucleotide
  Antisense strand to SEQ ID NO: 1290250
uaaggaaacaaacuuccuc

SEQ ID NO: 1290252 - RNA, 19 nt, Artificial Sequence
  Description of Artificial Sequence: Synthetic oligonucleotide
  Sense strand starting at position 225 of SEQ ID NO: 1241667
ggaaguuuguuuccuuaga

SEQ ID NO: 1290253 - RNA, 19 nt, Artificial Sequence
  Description of Artificial Sequence: Synthetic oligonucleotide
  Antisense strand to SEQ ID NO: 1290252
ucuaaggaaacaaacuucc

SEQ ID NO: 1290254 - RNA, 19 nt, Artificial Sequence
  Description of Artificial Sequence: Synthetic oligonucleotide
  Sense strand starting at position 226 of SEQ ID NO: 1241667
gaaguuuguuuccuuagaa

SEQ ID NO: 1290255 - RNA, 19 nt, Artificial Sequence
  Description of Artificial Sequence: Synthetic oligonucleotide
  Antisense strand to SEQ ID NO: 1290254
uucuaaggaaacaaacuuc

SEQ ID NO: 1290256 - RNA, 19 nt, Artificial Sequence
  Description of Artificial Sequence: Synthetic oligonucleotide
  Sense strand starting at position 278 of SEQ ID NO: 1241667
gggacuggucugcaggauu

SEQ ID NO: 1290257 - RNA, 19 nt, Artificial Sequence
  Description of Artificial Sequence: Synthetic oligonucleotide
  Antisense strand to SEQ ID NO: 1290256
aauccugcagaccaguccc

SEQ ID NO: 1290258 - RNA, 19 nt, Artificial Sequence
  Description of Artificial Sequence: Synthetic oligonucleotide
  Sense strand starting at position 474 of SEQ ID NO: 1241667
ccacuaguuugaucaagag

SEQ ID NO: 1290259 - RNA, 19 nt, Artificial Sequence
  Description of Artificial Sequence: Synthetic oligonucleotide
  Antisense strand to SEQ ID NO: 1290258
cucuugaucaaacuagugg

SEQ ID NO: 1290260 - RNA, 19 nt, Artificial Sequence
  Description of Artificial Sequence: Synthetic oligonucleotide
  Sense strand starting at position 489 of SEQ ID NO: 1241667
agagcccuaucuuuaagaa

SEQ ID NO: 1290261 - RNA, 19 nt, Artificial Sequence
  Description of Artificial Sequence: Synthetic oligonucleotide
  Antisense strand to SEQ ID NO: 1290260
uucuuaaagauagggcucu

SEQ ID NO: 1290262 - RNA, 19 nt, Artificial Sequence
  Description of Artificial Sequence: Synthetic oligonucleotide
  Sense strand starting at position 745 of SEQ ID NO: 1241667
uuggaauuacacuaacguu

SEQ ID NO: 1290263 - RNA, 19 nt, Artificial Sequence
  Description of Artificial Sequence: Synthetic oligonucleotide
  Antisense strand to SEQ ID NO: 1290262
aacguuaguguaauuccaa

SEQ ID NO: 1290264 - RNA, 19 nt, Artificial Sequence
  Description of Artificial Sequence: Synthetic oligonucleotide
  Sense strand starting at position 835 of SEQ ID NO: 1241667
cauauauuacggugaaacu

SEQ ID NO: 1290265 - RNA, 19 nt, Artificial Sequence
  Description of Artificial Sequence: Synthetic oligonucleotide
  Antisense strand to SEQ ID NO: 1290264
aguuucaccguaauauaug

SEQ ID NO: 1290266 - RNA, 19 nt, Artificial Sequence
  Description of Artificial Sequence: Synthetic oligonucleotide
  Sense strand starting at position 893 of SEQ ID NO: 1241667
uccacugugcauuacaaga

SEQ ID NO: 1290267 - RNA, 19 nt, Artificial Sequence
  Description of Artificial Sequence: Synthetic oligonucleotide
  Antisense strand to SEQ ID NO: 1290266
ucuuguaaugcacagugga

SEQ ID NO: 1290268 - RNA, 19 nt, Artificial Sequence
  Description of Artificial Sequence: Synthetic oligonucleotide
  Sense strand starting at position 898 of SEQ ID NO: 1241667
ugugcauuacaagaauuaa

SEQ ID NO: 1290269 - RNA, 19 nt, Artificial Sequence
  Description of Artificial Sequence: Synthetic oligonucleotide
  Antisense strand to SEQ ID NO: 1290268
uuaauucuuguaaugcaca

SEQ ID NO: 1290270 - RNA, 19 nt, Artificial Sequence
  Description of Artificial Sequence: Synthetic oligonucleotide
  Sense strand starting at position 941 of SEQ ID NO: 1241667
gcccaaugacaauguauua

SEQ ID NO: 1290271 - RNA, 19 nt, Artificial Sequence
  Description of Artificial Sequence: Synthetic oligonucleotide
  Antisense strand to SEQ ID NO: 1290270
uaauacauugucauugggc

SEQ ID NO: 1290272 - RNA, 19 nt, Artificial Sequence
  Description of Artificial Sequence: Synthetic oligonucleotide
  Sense strand starting at position 981 of SEQ ID NO: 1241667
uggguucuaaggcauuaaa

SEQ ID NO: 1290273 - RNA, 19 nt, Artificial Sequence
  Description of Artificial Sequence: Synthetic oligonucleotide
  Antisense strand to SEQ ID NO: 1290272
uuuaaugccuuagaaccca

SEQ ID NO: 1290274 - RNA, 19 nt, Artificial Sequence
  Description of Artificial Sequence: Synthetic oligonucleotide
  Sense strand starting at position 984 of SEQ ID NO: 1241667
guucuaaggcauuaaauug

SEQ ID NO: 1290275 - RNA, 19 nt, Artificial Sequence
  Description of Artificial Sequence: Synthetic oligonucleotide
  Antisense strand to SEQ ID NO: 1290274
caauuuaaugccuuagaac

SEQ ID NO: 1290276 - RNA, 19 nt, Artificial Sequence
  Description of Artificial Sequence: Synthetic oligonucleotide
  Sense strand starting at position 991 of SEQ ID NO: 1241667
ggcauuaaauuggaauuua

SEQ ID NO: 1290277 - RNA, 19 nt, Artificial Sequence
  Description of Artificial Sequence: Synthetic oligonucleotide
  Antisense strand to SEQ ID NO: 1290276
uaaauuccaauuuaaugcc

SEQ ID NO: 1290278 - RNA, 19 nt, Artificial Sequence
  Description of Artificial Sequence: Synthetic oligonucleotide
  Sense strand starting at position 1082 of SEQ ID NO: 1241667
gccuguuugcgaguauugu

SEQ ID NO: 1290279 - RNA, 19 nt, Artificial Sequence
  Description of Artificial Sequence: Synthetic oligonucleotide
  Antisense strand to SEQ ID NO: 1290278
acaauacucgcaaacaggc

SEQ ID NO: 1290280 - RNA, 19 nt, Artificial Sequence
  Description of Artificial Sequence: Synthetic oligonucleotide
  Sense strand starting at position 1300 of SEQ ID NO: 1241667
uguacucagaguuguagaa

SEQ ID NO: 1290281 - RNA, 19 nt, Artificial Sequence
  Description of Artificial Sequence: Synthetic oligonucleotide
  Antisense strand to SEQ ID NO: 1290280
uucuacaacucugaguaca

SEQ ID NO: 1290282 - RNA, 19 nt, Artificial Sequence
  Description of Artificial Sequence: Synthetic oligonucleotide
  Sense strand starting at position 1892 of SEQ ID NO: 1241667
cugccucagcgacaugaua

SEQ ID NO: 1290283 - RNA, 19 nt, Artificial Sequence
  Description of Artificial Sequence: Synthetic oligonucleotide
  Antisense strand to SEQ ID NO: 1290282
uaucaugucgcugaggcag

SEQ ID NO: 1290284 - RNA, 19 nt, Artificial Sequence
  Description of Artificial Sequence: Synthetic oligonucleotide
  Sense strand starting at position 2183 of SEQ ID NO: 1241667
ugaggucccggguaauauc

SEQ ID NO: 1290285 - RNA, 19 nt, Artificial Sequence
  Description of Artificial Sequence: Synthetic oligonucleotide
  Antisense strand to SEQ ID NO: 1290284
gauauuacccgggaccuca

SEQ ID NO: 1290286 - RNA, 19 nt, Artificial Sequence
  Description of Artificial Sequence: Synthetic oligonucleotide
  Sense strand starting at position 2292 of SEQ ID NO: 1241667
cggauucccucagccagaa

SEQ ID NO: 1290287 - RNA, 19 nt, Artificial Sequence
  Description of Artificial Sequence: Synthetic oligonucleotide
  Antisense strand to SEQ ID NO: 1290286
uucuggcugagggaauccg

SEQ ID NO: 1290288 - RNA, 19 nt, Artificial Sequence
  Description of Artificial Sequence: Synthetic oligonucleotide
  Sense strand starting at position 2302 of SEQ ID NO: 1241667
cagccagaaguugacuuaa

SEQ ID NO: 1290289 - RNA, 19 nt, Artificial Sequence
  Description of Artificial Sequence: Synthetic oligonucleotide
  Antisense strand to SEQ ID NO: 1290288
uuaagucaacuucuggcug

SEQ ID NO: 1290290 - RNA, 19 nt, Artificial Sequence
  Description of Artificial Sequence: Synthetic oligonucleotide
  Sense strand starting at position 2304 of SEQ ID NO: 1241667
gccagaaguugacuuaaag

SEQ ID NO: 1290291 - RNA, 19 nt, Artificial Sequence
  Description of Artificial Sequence: Synthetic oligonucleotide
  Antisense strand to SEQ ID NO: 1290290
cuuuaagucaacuucuggc

SEQ ID NO: 1290292 - RNA, 19 nt, Artificial Sequence
  Description of Artificial Sequence: Synthetic oligonucleotide
  Sense strand starting at position 2426 of SEQ ID NO: 1241667
cuaccaugaguucggaauc

SEQ ID NO: 1290293 - RNA, 19 nt, Artificial Sequence
  Description of Artificial Sequence: Synthetic oligonucleotide
  Antisense strand to SEQ ID NO: 1290292
gauuccgaacucaugguag

SEQ ID NO: 1290294 - RNA, 19 nt, Artificial Sequence
  Description of Artificial Sequence: Synthetic oligonucleotide
  Sense strand starting at position 2436 of SEQ ID NO: 1241667
uucggaaucauucgacuca

SEQ ID NO: 1290295 - RNA, 19 nt, Artificial Sequence
  Description of Artificial Sequence: Synthetic oligonucleotide
  Antisense strand to SEQ ID NO: 1290294
ugagucgaaugauuccgaa

SEQ ID NO: 1290296 - RNA, 19 nt, Artificial Sequence
  Description of Artificial Sequence: Synthetic oligonucleotide
  Sense strand starting at position 2448 of SEQ ID NO: 1241667
cgacucaaguaauuaacaa

SEQ ID NO: 1290297 - RNA, 19 nt, Artificial Sequence
  Description of Artificial Sequence: Synthetic oligonucleotide
  Antisense strand to SEQ ID NO: 1290296
uuguuaauuacuugagucg

SEQ ID NO: 1290298 - RNA, 19 nt, Artificial Sequence
  Description of Artificial Sequence: Synthetic oligonucleotide
  Sense strand starting at position 2739 of SEQ ID NO: 1241667
gaaugaaugcaguguauag

SEQ ID NO: 1290299 - RNA, 19 nt, Artificial Sequence
  Description of Artificial Sequence: Synthetic oligonucleotide
  Antisense strand to SEQ ID NO: 1290298
cuauacacugcauucauuc

SEQ ID NO: 1290300 - RNA, 19 nt, Artificial Sequence
  Description of Artificial Sequence: Synthetic oligonucleotide
  Sense strand starting at position 2741 of SEQ ID NO: 1241667
augaaugcaguguauagau

SEQ ID NO: 1290301 - RNA, 19 nt, Artificial Sequence
  Description of Artificial Sequence: Synthetic oligonucleotide
  Antisense strand to SEQ ID NO: 1290300
aucuauacacugcauucau

SEQ ID NO: 1290302 - RNA, 19 nt, Artificial Sequence
  Description of Artificial Sequence: Synthetic oligonucleotide
  Sense strand starting at position 2775 of SEQ ID NO: 1241667
cguuaauuuagacgcuuaa

SEQ ID NO: 1290303 - RNA, 19 nt, Artificial Sequence
  Description of Artificial Sequence: Synthetic oligonucleotide
  Antisense strand to SEQ ID NO: 1290302
uuaagcgucuaaauuaacg

SEQ ID NO: 1290304 - RNA, 19 nt, Artificial Sequence
  Description of Artificial Sequence: Synthetic oligonucleotide
  Sense strand starting at position 2839 of SEQ ID NO: 1241667
uuuauaaggucucugaacu

SEQ ID NO: 1290305 - RNA, 19 nt, Artificial Sequence
  Description of Artificial Sequence: Synthetic oligonucleotide
  Antisense strand to SEQ ID NO: 1290304
aguucagagaccuuauaaa

SEQ ID NO: 1290306 - RNA, 19 nt, Artificial Sequence
  Description of Artificial Sequence: Synthetic oligonucleotide
  Sense strand starting at position 2840 of SEQ ID NO: 1241667
uuauaaggucucugaacuc

SEQ ID NO: 1290307 - RNA, 19 nt, Artificial Sequence
  Description of Artificial Sequence: Synthetic oligonucleotide
  Antisense strand to SEQ ID NO: 1290306
gaguucagagaccuuauaa

SEQ ID NO: 1290308 - RNA, 19 nt, Artificial Sequence
  Description of Artificial Sequence: Synthetic oligonucleotide
  Sense strand starting at position 3027 of SEQ ID NO: 1241667
aggugaaugucuguaauua

SEQ ID NO: 1290309 - RNA, 19 nt, Artificial Sequence
  Description of Artificial Sequence: Synthetic oligonucleotide
  Antisense strand to SEQ ID NO: 1290308
uaauuacagacauucaccu

SEQ ID NO: 1290310 - RNA, 19 nt, Artificial Sequence
  Description of Artificial Sequence: Synthetic oligonucleotide
  Sense strand starting at position 3028 of SEQ ID NO: 1241667
ggugaaugucuguaauuaa

SEQ ID NO: 1290311 - RNA, 19 nt, Artificial Sequence
  Description of Artificial Sequence: Synthetic oligonucleotide
  Antisense strand to SEQ ID NO: 1290310
uuaauuacagacauucacc

SEQ ID NO: 1290312 - RNA, 19 nt, Artificial Sequence
  Description of Artificial Sequence: Synthetic oligonucleotide
  Sense strand starting at position 3031 of SEQ ID NO: 1241667
gaaugucuguaauuaaaga

SEQ ID NO: 1290313 - RNA, 19 nt, Artificial Sequence
  Description of Artificial Sequence: Synthetic oligonucleotide
  Antisense strand to SEQ ID NO: 1290312
ucuuuaauuacagacauuc

SEQ ID NO: 1290314 - RNA, 19 nt, Artificial Sequence
  Description of Artificial Sequence: Synthetic oligonucleotide
  Sense strand starting at position 3039 of SEQ ID NO: 1241667
guaauuaaagaaugugaac

SEQ ID NO: 1290315 - RNA, 19 nt, Artificial Sequence
  Description of Artificial Sequence: Synthetic oligonucleotide
  Antisense strand to SEQ ID NO: 1290314
guucacauucuuuaauuac

SEQ ID NO: 1290316 - RNA, 19 nt, Artificial Sequence
  Description of Artificial Sequence: Synthetic oligonucleotide
  Sense strand starting at position 3976 of SEQ ID NO: 1241667
ccuguagagcuggauuguu

SEQ ID NO: 1290317 - RNA, 19 nt, Artificial Sequence
  Description of Artificial Sequence: Synthetic oligonucleotide
  Antisense strand to SEQ ID NO: 1290316
aacaauccagcucuacagg

SEQ ID NO: 1290318 - RNA, 19 nt, Artificial Sequence
  Description of Artificial Sequence: Synthetic oligonucleotide
  Sense strand starting at position 215 of SEQ ID NO: 1241668
gagugaacucaaugguagg

SEQ ID NO: 1290319 - RNA, 19 nt, Artificial Sequence
  Description of Artificial Sequence: Synthetic oligonucleotide
  Antisense strand to SEQ ID NO: 1290318
ccuaccauugaguucacuc

SEQ ID NO: 1290320 - RNA, 19 nt, Artificial Sequence
  Description of Artificial Sequence: Synthetic oligonucleotide
  Sense strand starting at position 255 of SEQ ID NO: 1241668
uucguauuaguagauaaga

SEQ ID NO: 1290321 - RNA, 19 nt, Artificial Sequence
  Description of Artificial Sequence: Synthetic oligonucleotide
  Antisense strand to SEQ ID NO: 1290320
ucuuaucuacuaauacgaa

SEQ ID NO: 1290322 - RNA, 19 nt, Artificial Sequence
  Description of Artificial Sequence: Synthetic oligonucleotide
  Sense strand starting at position 257 of SEQ ID NO: 1241668
cguauuaguagauaagaca

SEQ ID NO: 1290323 - RNA, 19 nt, Artificial Sequence
  Description of Artificial Sequence: Synthetic oligonucleotide
  Antisense strand to SEQ ID NO: 1290322
ugucuuaucuacuaauacg

SEQ ID NO: 1290324 - RNA, 19 nt, Artificial Sequence
  Description of Artificial Sequence: Synthetic oligonucleotide
  Sense strand starting at position 445 of SEQ ID NO: 1241668
guaauaaaugcacauagca

SEQ ID NO: 1290325 - RNA, 19 nt, Artificial Sequence
  Description of Artificial Sequence: Synthetic oligonucleotide
  Antisense strand to SEQ ID NO: 1290324
ugcuaugugcauuuauuac

SEQ ID NO: 1290326 - RNA, 19 nt, Artificial Sequence
  Description of Artificial Sequence: Synthetic oligonucleotide
  Sense strand starting at position 810 of SEQ ID NO: 1241668
aaggguauagacuguucua

SEQ ID NO: 1290327 - RNA, 19 nt, Artificial Sequence
  Description of Artificial Sequence: Synthetic oligonucleotide
  Antisense strand to SEQ ID NO: 1290326
uagaacagucuauacccuu

SEQ ID NO: 1290328 - RNA, 19 nt, Artificial Sequence
  Description of Artificial Sequence: Synthetic oligonucleotide
  Sense strand starting at position 813 of SEQ ID NO: 1241668
gguauagacuguucuaaga

SEQ ID NO: 1290329 - RNA, 19 nt, Artificial Sequence
  Description of Artificial Sequence: Synthetic oligonucleotide
  Antisense strand to SEQ ID NO: 1290328
ucuuagaacagucuauacc

SEQ ID NO: 1290330 - RNA, 19 nt, Artificial Sequence
  Description of Artificial Sequence: Synthetic oligonucleotide
  Sense strand starting at position 880 of SEQ ID NO: 1241668
aagggaugagucugccagu

SEQ ID NO: 1290331 - RNA, 19 nt, Artificial Sequence
  Description of Artificial Sequence: Synthetic oligonucleotide
  Antisense strand to SEQ ID NO: 1290330
acuggcagacucaucccuu

SEQ ID NO: 1290332 - RNA, 19 nt, Artificial Sequence
  Description of Artificial Sequence: Synthetic oligonucleotide
  Sense strand starting at position 881 of SEQ ID NO: 1241668
agggaugagucugccagua

SEQ ID NO: 1290333 - RNA, 19 nt, Artificial Sequence
  Description of Artificial Sequence: Synthetic oligonucleotide
  Antisense strand to SEQ ID NO: 1290332
uacuggcagacucaucccu

SEQ ID NO: 1290334 - RNA, 19 nt, Artificial Sequence
  Description of Artificial Sequence: Synthetic oligonucleotide
  Sense strand starting at position 886 of SEQ ID NO: 1241668
ugagucugccaguauccaa

SEQ ID NO: 1290335 - RNA, 19 nt, Artificial Sequence
  Description of Artificial Sequence: Synthetic oligonucleotide
  Antisense strand to SEQ ID NO: 1290334
uuggauacuggcagacuca

SEQ ID NO: 1290336 - RNA, 19 nt, Artificial Sequence
  Description of Artificial Sequence: Synthetic oligonucleotide
  Sense strand starting at position 1038 of SEQ ID NO: 1241668
acuguuaagagugaagagu

SEQ ID NO: 1290337 - RNA, 19 nt, Artificial Sequence
  Description of Artificial Sequence: Synthetic oligonucleotide
  Antisense strand to SEQ ID NO: 1290336
acucuucacucuuaacagu

SEQ ID NO: 1290338 - RNA, 19 nt, Artificial Sequence
  Description of Artificial Sequence: Synthetic oligonucleotide
  Sense strand starting at position 1046 of SEQ ID NO: 1241668
gagugaagaguaugccagu

SEQ ID NO: 1290339 - RNA, 19 nt, Artificial Sequence
  Description of Artificial Sequence: Synthetic oligonucleotide
  Antisense strand to SEQ ID NO: 1290338
acuggcauacucuucacuc

SEQ ID NO: 1290340 - RNA, 19 nt, Artificial Sequence
  Description of Artificial Sequence: Synthetic oligonucleotide
  Sense strand starting at position 1234 of SEQ ID NO: 1241668
aggaaauguauuggcucaa

SEQ ID NO: 1290341 - RNA, 19 nt, Artificial Sequence
  Description of Artificial Sequence: Synthetic oligonucleotide
  Antisense strand to SEQ ID NO: 1290340
uugagccaauacauuuccu

SEQ ID NO: 1290342 - RNA, 19 nt, Artificial Sequence
  Description of Artificial Sequence: Synthetic oligonucleotide
  Sense strand starting at position 1235 of SEQ ID NO: 1241668
ggaaauguauuggcucaaa

SEQ ID NO: 1290343 - RNA, 19 nt, Artificial Sequence
  Description of Artificial Sequence: Synthetic oligonucleotide
  Antisense strand to SEQ ID NO: 1290342
uuugagccaauacauuucc

SEQ ID NO: 1290344 - RNA, 19 nt, Artificial Sequence
  Description of Artificial Sequence: Synthetic oligonucleotide
  Sense strand starting at position 1253 of SEQ ID NO: 1241668
augcuuggacgucagagaa

SEQ ID NO: 1290345 - RNA, 19 nt, Artificial Sequence
  Description of Artificial Sequence: Synthetic oligonucleotide
  Antisense strand to SEQ ID NO: 1290344
uucucugacguccaagcau

SEQ ID NO: 1290346 - RNA, 19 nt, Artificial Sequence
  Description of Artificial Sequence: Synthetic oligonucleotide
  Sense strand starting at position 1419 of SEQ ID NO: 1241668
cuguccuaaccaugagaag

SEQ ID NO: 1290347 - RNA, 19 nt, Artificial Sequence
  Description of Artificial Sequence: Synthetic oligonucleotide
  Antisense strand to SEQ ID NO: 1290346
cuucucaugguuaggacag

SEQ ID NO: 1290348 - RNA, 19 nt, Artificial Sequence
  Description of Artificial Sequence: Synthetic oligonucleotide
  Sense strand starting at position 1537 of SEQ ID NO: 1241668
cucagcacucacugaugua

SEQ ID NO: 1290349 - RNA, 19 nt, Artificial Sequence
  Description of Artificial Sequence: Synthetic oligonucleotide
  Antisense strand to SEQ ID NO: 1290348
uacaucagugagugcugag

SEQ ID NO: 1290350 - RNA, 19 nt, Artificial Sequence
  Description of Artificial Sequence: Synthetic oligonucleotide
  Sense strand starting at position 1652 of SEQ ID NO: 1241668
auagaugcaacgcaugaua

SEQ ID NO: 1290351 - RNA, 19 nt, Artificial Sequence
  Description of Artificial Sequence: Synthetic oligonucleotide
  Antisense strand to SEQ ID NO: 1290350
uaucaugcguugcaucuau

SEQ ID NO: 1290352 - RNA, 19 nt, Artificial Sequence
  Description of Artificial Sequence: Synthetic oligonucleotide
  Sense strand starting at position 1661 of SEQ ID NO: 1241668
acgcaugauauggauccaa

SEQ ID NO: 1290353 - RNA, 19 nt, Artificial Sequence
  Description of Artificial Sequence: Synthetic oligonucleotide
  Antisense strand to SEQ ID NO: 1290352
uuggauccauaucaugcgu

SEQ ID NO: 1290354 - RNA, 19 nt, Artificial Sequence
  Description of Artificial Sequence: Synthetic oligonucleotide
  Sense strand starting at position 1706 of SEQ ID NO: 1241668
caggcaauagccugagcaa

SEQ ID NO: 1290355 - RNA, 19 nt, Artificial Sequence
  Description of Artificial Sequence: Synthetic oligonucleotide
  Antisense strand to SEQ ID NO: 1290354
uugcucaggcuauugccug

SEQ ID NO: 1290356 - RNA, 19 nt, Artificial Sequence
  Description of Artificial Sequence: Synthetic oligonucleotide
  Sense strand starting at position 1707 of SEQ ID NO: 1241668
aggcaauagccugagcaau

SEQ ID NO: 1290357 - RNA, 19 nt, Artificial Sequence
  Description of Artificial Sequence: Synthetic oligonucleotide
  Antisense strand to SEQ ID NO: 1290356
auugcucaggcuauugccu

SEQ ID NO: 1290358 - RNA, 19 nt, Artificial Sequence
  Description of Artificial Sequence: Synthetic oligonucleotide
  Sense strand starting at position 1713 of SEQ ID NO: 1241668
uagccugagcaauacugua

SEQ ID NO: 1290359 - RNA, 19 nt, Artificial Sequence
  Description of Artificial Sequence: Synthetic oligonucleotide
  Antisense strand to SEQ ID NO: 1290358
uacaguauugcucaggcua

SEQ ID NO: 1290360 - RNA, 19 nt, Artificial Sequence
  Description of Artificial Sequence: Synthetic oligonucleotide
  Sense strand starting at position 1718 of SEQ ID NO: 1241668
ugagcaauacuguaucaga

SEQ ID NO: 1290361 - RNA, 19 nt, Artificial Sequence
  Description of Artificial Sequence: Synthetic oligonucleotide
  Antisense strand to SEQ ID NO: 1290360
ucugauacaguauugcuca

SEQ ID NO: 1290362 - RNA, 19 nt, Artificial Sequence
  Description of Artificial Sequence: Synthetic oligonucleotide
  Sense strand starting at position 1921 of SEQ ID NO: 1241668
ggaaguauggcauaguacu

SEQ ID NO: 1290363 - RNA, 19 nt, Artificial Sequence
  Description of Artificial Sequence: Synthetic oligonucleotide
  Antisense strand to SEQ ID NO: 1290362
aguacuaugccauacuucc

SEQ ID NO: 1290364 - RNA, 19 nt, Artificial Sequence
  Description of Artificial Sequence: Synthetic oligonucleotide
  Sense strand starting at position 1927 of SEQ ID NO: 1241668
auggcauaguacuuacuau

SEQ ID NO: 1290365 - RNA, 19 nt, Artificial Sequence
  Description of Artificial Sequence: Synthetic oligonucleotide
  Antisense strand to SEQ ID NO: 1290364
auaguaaguacuaugccau

SEQ ID NO: 1290366 - RNA, 19 nt, Artificial Sequence
  Description of Artificial Sequence: Synthetic oligonucleotide
  Sense strand starting at position 2025 of SEQ ID NO: 1241668
ccugguuaagugcacaaua

SEQ ID NO: 1290367 - RNA, 19 nt, Artificial Sequence
  Description of Artificial Sequence: Synthetic oligonucleotide
  Antisense strand to SEQ ID NO: 1290366
uauugugcacuuaaccagg

SEQ ID NO: 1290368 - RNA, 19 nt, Artificial Sequence
  Description of Artificial Sequence: Synthetic oligonucleotide
  Sense strand starting at position 2027 of SEQ ID NO: 1241668
ugguuaagugcacaauaaa

SEQ ID NO: 1290369 - RNA, 19 nt, Artificial Sequence
  Description of Artificial Sequence: Synthetic oligonucleotide
  Antisense strand to SEQ ID NO: 1290368
uuuauugugcacuuaacca

SEQ ID NO: 1290370 - RNA, 19 nt, Artificial Sequence
  Description of Artificial Sequence: Synthetic oligonucleotide
  Sense strand starting at position 2521 of SEQ ID NO: 1241668
ucacaugcaucuuuguaga

SEQ ID NO: 1290371 - RNA, 19 nt, Artificial Sequence
  Description of Artificial Sequence: Synthetic oligonucleotide
  Antisense strand to SEQ ID NO: 1290370
ucuacaaagaugcauguga

SEQ ID NO: 1290372 - RNA, 19 nt, Artificial Sequence
  Description of Artificial Sequence: Synthetic oligonucleotide
  Sense strand starting at position 2531 of SEQ ID NO: 1241668
cuuuguagagcugaccaua

SEQ ID NO: 1290373 - RNA, 19 nt, Artificial Sequence
  Description of Artificial Sequence: Synthetic oligonucleotide
  Antisense strand to SEQ ID NO: 1290372
uauggucagcucuacaaag

SEQ ID NO: 1290374 - RNA, 19 nt, Artificial Sequence
  Description of Artificial Sequence: Synthetic oligonucleotide
  Sense strand starting at position 2534 of SEQ ID NO: 1241668
uguagagcugaccauaaca

SEQ ID NO: 1290375 - RNA, 19 nt, Artificial Sequence
  Description of Artificial Sequence: Synthetic oligonucleotide
  Antisense strand to SEQ ID NO: 1290374
uguuauggucagcucuaca

SEQ ID NO: 1290376 - RNA, 19 nt, Artificial Sequence
  Description of Artificial Sequence: Synthetic oligonucleotide
  Sense strand starting at position 2839 of SEQ ID NO: 1241668
ccauauugcccagacaggu

SEQ ID NO: 1290377 - RNA, 19 nt, Artificial Sequence
  Description of Artificial Sequence: Synthetic oligonucleotide
  Antisense strand to SEQ ID NO: 1290376
accugucugggcaauaugg

SEQ ID NO: 1290378 - RNA, 19 nt, Artificial Sequence
  Description of Artificial Sequence: Synthetic oligonucleotide
  Sense strand starting at position 2977 of SEQ ID NO: 1241668
guagucuacucacuacaag

SEQ ID NO: 1290379 - RNA, 19 nt, Artificial Sequence
  Description of Artificial Sequence: Synthetic oligonucleotide
  Antisense strand to SEQ ID NO: 1290378
cuuguagugaguagacuac

SEQ ID NO: 1290380 - RNA, 19 nt, Artificial Sequence
  Description of Artificial Sequence: Synthetic oligonucleotide
  Sense strand starting at position 3066 of SEQ ID NO: 1241668
acuugaagaucugaggaga

SEQ ID NO: 1290381 - RNA, 19 nt, Artificial Sequence
  Description of Artificial Sequence: Synthetic oligonucleotide
  Antisense strand to SEQ ID NO: 1290380
ucuccucagaucuucaagu

SEQ ID NO: 1290382 - RNA, 19 nt, Artificial Sequence
  Description of Artificial Sequence: Synthetic oligonucleotide
  Sense strand starting at position 3171 of SEQ ID NO: 1241668
cacacuauggagugcugaa

SEQ ID NO: 1290383 - RNA, 19 nt, Artificial Sequence
  Description of Artificial Sequence: Synthetic oligonucleotide
  Antisense strand to SEQ ID NO: 1290382
uucagcacuccauagugug

SEQ ID NO: 1290384 - RNA, 19 nt, Artificial Sequence
  Description of Artificial Sequence: Synthetic oligonucleotide
  Sense strand starting at position 3254 of SEQ ID NO: 1241668
aagauaauagccgguacaa

SEQ ID NO: 1290385 - RNA, 19 nt, Artificial Sequence
  Description of Artificial Sequence: Synthetic oligonucleotide
  Antisense strand to SEQ ID NO: 1290384
uuguaccggcuauuaucuu

SEQ ID NO: 1290386 - RNA, 19 nt, Artificial Sequence
  Description of Artificial Sequence: Synthetic oligonucleotide
  Sense strand starting at position 3256 of SEQ ID NO: 1241668
gauaauagccgguacaaug

SEQ ID NO: 1290387 - RNA, 19 nt, Artificial Sequence
  Description of Artificial Sequence: Synthetic oligonucleotide
  Antisense strand to SEQ ID NO: 1290386
cauuguaccggcuauuauc

SEQ ID NO: 1290388 - RNA, 19 nt, Artificial Sequence
  Description of Artificial Sequence: Synthetic oligonucleotide
  Sense strand starting at position 3428 of SEQ ID NO: 1241668
agauaagaacucuguccuu

SEQ ID NO: 1290389 - RNA, 19 nt, Artificial Sequence
  Description of Artificial Sequence: Synthetic oligonucleotide
  Antisense strand to SEQ ID NO: 1290388
aaggacagaguucuuaucu

SEQ ID NO: 1290390 - RNA, 19 nt, Artificial Sequence
  Description of Artificial Sequence: Synthetic oligonucleotide
  Sense strand starting at position 3536 of SEQ ID NO: 1241668
acaauuaaguuuccaggua

SEQ ID NO: 1290391 - RNA, 19 nt, Artificial Sequence
  Description of Artificial Sequence: Synthetic oligonucleotide
  Antisense strand to SEQ ID NO: 1290390
uaccuggaaacuuaauugu

SEQ ID NO: 1290392 - RNA, 19 nt, Artificial Sequence
  Description of Artificial Sequence: Synthetic oligonucleotide
  Sense strand starting at position 3571 of SEQ ID NO: 1241668
gaggaucacuguccaugua

SEQ ID NO: 1290393 - RNA, 19 nt, Artificial Sequence
  Description of Artificial Sequence: Synthetic oligonucleotide
  Antisense strand to SEQ ID NO: 1290392
uacauggacagugauccuc

SEQ ID NO: 1290394 - RNA, 19 nt, Artificial Sequence
  Description of Artificial Sequence: Synthetic oligonucleotide
  Sense strand starting at position 3572 of SEQ ID NO: 1241668
aggaucacuguccauguau

SEQ ID NO: 1290395 - RNA, 19 nt, Artificial Sequence
  Description of Artificial Sequence: Synthetic oligonucleotide
  Antisense strand to SEQ ID NO: 1290394
auacauggacagugauccu

SEQ ID NO: 1290396 - RNA, 19 nt, Artificial Sequence
  Description of Artificial Sequence: Synthetic oligonucleotide
  Sense strand starting at position 3591 of SEQ ID NO: 1241668
ccacaaauacagugucuaa

SEQ ID NO: 1290397 - RNA, 19 nt, Artificial Sequence
  Description of Artificial Sequence: Synthetic oligonucleotide
  Antisense strand to SEQ ID NO: 1290396
uuagacacuguauuugugg

SEQ ID NO: 1290398 - RNA, 19 nt, Artificial Sequence
  Description of Artificial Sequence: Synthetic oligonucleotide
  Sense strand starting at position 844 of SEQ ID NO: 1241669
uuuaguaaagcagguuuga

SEQ ID NO: 1290399 - RNA, 19 nt, Artificial Sequence
  Description of Artificial Sequence: Synthetic oligonucleotide
  Antisense strand to SEQ ID NO: 1290398
ucaaaccugcuuuacuaaa

SEQ ID NO: 1290400 - RNA, 19 nt, Artificial Sequence
  Description of Artificial Sequence: Synthetic oligonucleotide
  Sense strand starting at position 849 of SEQ ID NO: 1241669
uaaagcagguuugaaagaa

SEQ ID NO: 1290401 - RNA, 19 nt, Artificial Sequence
  Description of Artificial Sequence: Synthetic oligonucleotide
  Antisense strand to SEQ ID NO: 1290400
uucuuucaaaccugcuuua

SEQ ID NO: 1290402 - RNA, 19 nt, Artificial Sequence
  Description of Artificial Sequence: Synthetic oligonucleotide
  Sense strand starting at position 979 of SEQ ID NO: 1241669
ggguacaucuuguucugga

SEQ ID NO: 1290403 - RNA, 19 nt, Artificial Sequence
  Description of Artificial Sequence: Synthetic oligonucleotide
  Antisense strand to SEQ ID NO: 1290402
uccagaacaagauguaccc

SEQ ID NO: 1290404 - RNA, 19 nt, Artificial Sequence
  Description of Artificial Sequence: Synthetic oligonucleotide
  Sense strand starting at position 980 of SEQ ID NO: 1241669
gguacaucuuguucuggau

SEQ ID NO: 1290405 - RNA, 19 nt, Artificial Sequence
  Description of Artificial Sequence: Synthetic oligonucleotide
  Antisense strand to SEQ ID NO: 1290404
auccagaacaagauguacc

SEQ ID NO: 1290406 - RNA, 19 nt, Artificial Sequence
  Description of Artificial Sequence: Synthetic oligonucleotide
  Sense strand starting at position 986 of SEQ ID NO: 1241669
ucuuguucuggauaucaug

SEQ ID NO: 1290407 - RNA, 19 nt, Artificial Sequence
  Description of Artificial Sequence: Synthetic oligonucleotide
  Antisense strand to SEQ ID NO: 1290406
caugauauccagaacaaga

SEQ ID NO: 1290408 - RNA, 19 nt, Artificial Sequence
  Description of Artificial Sequence: Synthetic oligonucleotide
  Sense strand starting at position 1069 of SEQ ID NO: 1241669
cugugaugaccagaaguuu

SEQ ID NO: 1290409 - RNA, 19 nt, Artificial Sequence
  Description of Artificial Sequence: Synthetic oligonucleotide
  Antisense strand to SEQ ID NO: 1290408
aaacuucuggucaucacag

SEQ ID NO: 1290410 - RNA, 19 nt, Artificial Sequence
  Description of Artificial Sequence: Synthetic oligonucleotide
  Sense strand starting at position 1080 of SEQ ID NO: 1241669
agaaguuugagauguaacc

SEQ ID NO: 1290411 - RNA, 19 nt, Artificial Sequence
  Description of Artificial Sequence: Synthetic oligonucleotide
  Antisense strand to SEQ ID NO: 1290410
gguuacaucucaaacuucu

SEQ ID NO: 1290412 - RNA, 19 nt, Artificial Sequence
  Description of Artificial Sequence: Synthetic oligonucleotide
  Sense strand starting at position 1097 of SEQ ID NO: 1241669
ccaagugaauaagauaauu

SEQ ID NO: 1290413 - RNA, 19 nt, Artificial Sequence
  Description of Artificial Sequence: Synthetic oligonucleotide
  Antisense strand to SEQ ID NO: 1290412
aauuaucuuauucacuugg

SEQ ID NO: 1290414 - RNA, 19 nt, Artificial Sequence
  Description of Artificial Sequence: Synthetic oligonucleotide
  Sense strand starting at position 1164 of SEQ ID NO: 1241669
cugaauaugcugcaacaau

SEQ ID NO: 1290415 - RNA, 19 nt, Artificial Sequence
  Description of Artificial Sequence: Synthetic oligonucleotide
  Antisense strand to SEQ ID NO: 1290414
auuguugcagcauauucag

SEQ ID NO: 1290416 - RNA, 19 nt, Artificial Sequence
  Description of Artificial Sequence: Synthetic oligonucleotide
  Sense strand starting at position 1238 of SEQ ID NO: 1241669
ggcuuaacauaguuggcaa

SEQ ID NO: 1290417 - RNA, 19 nt, Artificial Sequence
  Description of Artificial Sequence: Synthetic oligonucleotide
  Antisense strand to SEQ ID NO: 1290416
uugccaacuauguuaagcc

SEQ ID NO: 1290418 - RNA, 19 nt, Artificial Sequence
  Description of Artificial Sequence: Synthetic oligonucleotide
  Sense strand starting at position 1343 of SEQ ID NO: 1241669
uuauuacuuaccgagacga

SEQ ID NO: 1290419 - RNA, 19 nt, Artificial Sequence
  Description of Artificial Sequence: Synthetic oligonucleotide
  Antisense strand to SEQ ID NO: 1290418
ucgucucgguaaguaauaa

SEQ ID NO: 1290420 - RNA, 19 nt, Artificial Sequence
  Description of Artificial Sequence: Synthetic oligonucleotide
  Sense strand starting at position 1991 of SEQ ID NO: 1241669
uuagaagacucgcugcuau

SEQ ID NO: 1290421 - RNA, 19 nt, Artificial Sequence
  Description of Artificial Sequence: Synthetic oligonucleotide
  Antisense strand to SEQ ID NO: 1290420
auagcagcgagucuucuaa

SEQ ID NO: 1290422 - RNA, 19 nt, Artificial Sequence
  Description of Artificial Sequence: Synthetic oligonucleotide
  Sense strand starting at position 2130 of SEQ ID NO: 1241669
ucagauaaaugccauuugu

SEQ ID NO: 1290423 - RNA, 19 nt, Artificial Sequence
  Description of Artificial Sequence: Synthetic oligonucleotide
  Antisense strand to SEQ ID NO: 1290422
acaaauggcauuuaucuga

SEQ ID NO: 1290424 - RNA, 19 nt, Artificial Sequence
  Description of Artificial Sequence: Synthetic oligonucleotide
  Sense strand starting at position 2226 of SEQ ID NO: 1241669
uugagcuuucuagauacuu

SEQ ID NO: 1290425 - RNA, 19 nt, Artificial Sequence
  Description of Artificial Sequence: Synthetic oligonucleotide
  Antisense strand to SEQ ID NO: 1290424
aaguaucuagaaagcucaa

SEQ ID NO: 1290426 - RNA, 19 nt, Artificial Sequence
  Description of Artificial Sequence: Synthetic oligonucleotide
  Sense strand starting at position 2337 of SEQ ID NO: 1241669
uguugcuuccgaggauauc

SEQ ID NO: 1290427 - RNA, 19 nt, Artificial Sequence
  Description of Artificial Sequence: Synthetic oligonucleotide
  Antisense strand to SEQ ID NO: 1290426
gauauccucggaagcaaca

SEQ ID NO: 1290428 - RNA, 19 nt, Artificial Sequence
  Description of Artificial Sequence: Synthetic oligonucleotide
  Sense strand starting at position 2338 of SEQ ID NO: 1241669
guugcuuccgaggauauca

SEQ ID NO: 1290429 - RNA, 19 nt, Artificial Sequence
  Description of Artificial Sequence: Synthetic oligonucleotide
  Antisense strand to SEQ ID NO: 1290428
ugauauccucggaagcaac

SEQ ID NO: 1290430 - RNA, 19 nt, Artificial Sequence
  Description of Artificial Sequence: Synthetic oligonucleotide
  Sense strand starting at position 2340 of SEQ ID NO: 1241669
ugcuuccgaggauaucaaa

SEQ ID NO: 1290431 - RNA, 19 nt, Artificial Sequence
  Description of Artificial Sequence: Synthetic oligonucleotide
  Antisense strand to SEQ ID NO: 1290430
uuugauauccucggaagca

SEQ ID NO: 1290432 - RNA, 19 nt, Artificial Sequence
  Description of Artificial Sequence: Synthetic oligonucleotide
  Sense strand starting at position 2363 of SEQ ID NO: 1241669
agcauauauggccauagca

SEQ ID NO: 1290433 - RNA, 19 nt, Artificial Sequence
  Description of Artificial Sequence: Synthetic oligonucleotide
  Antisense strand to SEQ ID NO: 1290432
ugcuauggccauauaugcu

SEQ ID NO: 1290434 - RNA, 19 nt, Artificial Sequence
  Description of Artificial Sequence: Synthetic oligonucleotide
  Sense strand starting at position 2692 of SEQ ID NO: 1241669
cugucuuucccaggauaug

SEQ ID NO: 1290435 - RNA, 19 nt, Artificial Sequence
  Description of Artificial Sequence: Synthetic oligonucleotide
  Antisense strand to SEQ ID NO: 1290434
cauauccugggaaagacag

SEQ ID NO: 1290436 - RNA, 19 nt, Artificial Sequence
  Description of Artificial Sequence: Synthetic oligonucleotide
  Sense strand starting at position 2693 of SEQ ID NO: 1241669
ugucuuucccaggauaugu

SEQ ID NO: 1290437 - RNA, 19 nt, Artificial Sequence
  Description of Artificial Sequence: Synthetic oligonucleotide
  Antisense strand to SEQ ID NO: 1290436
acauauccugggaaagaca

SEQ ID NO: 1290438 - RNA, 19 nt, Artificial Sequence
  Description of Artificial Sequence: Synthetic oligonucleotide
  Sense strand starting at position 2711 of SEQ ID NO: 1241669
ugaaguuauuuccauuaga

SEQ ID NO: 1290439 - RNA, 19 nt, Artificial Sequence
  Description of Artificial Sequence: Synthetic oligonucleotide
  Antisense strand to SEQ ID NO: 1290438
ucuaauggaaauaacuuca

SEQ ID NO: 1290440 - RNA, 19 nt, Artificial Sequence
  Description of Artificial Sequence: Synthetic oligonucleotide
  Sense strand starting at position 2777 of SEQ ID NO: 1241669
uggaaaugcucagucucca

SEQ ID NO: 1290441 - RNA, 19 nt, Artificial Sequence
  Description of Artificial Sequence: Synthetic oligonucleotide
  Antisense strand to SEQ ID NO: 1290440
uggagacugagcauuucca

SEQ ID NO: 1290442 - RNA, 19 nt, Artificial Sequence
  Description of Artificial Sequence: Synthetic oligonucleotide
  Sense strand starting at position 3022 of SEQ ID NO: 1241669
guucgagaugggcaauuau

SEQ ID NO: 1290443 - RNA, 19 nt, Artificial Sequence
  Description of Artificial Sequence: Synthetic oligonucleotide
  Antisense strand to SEQ ID NO: 1290442
auaauugcccaucucgaac

SEQ ID NO: 1290444 - RNA, 19 nt, Artificial Sequence
  Description of Artificial Sequence: Synthetic oligonucleotide
  Sense strand starting at position 3029 of SEQ ID NO: 1241669
augggcaauuauguuaaau

SEQ ID NO: 1290445 - RNA, 19 nt, Artificial Sequence
  Description of Artificial Sequence: Synthetic oligonucleotide
  Antisense strand to SEQ ID NO: 1290444
auuuaacauaauugcccau

SEQ ID NO: 1290446 - RNA, 19 nt, Artificial Sequence
  Description of Artificial Sequence: Synthetic oligonucleotide
  Sense strand starting at position 3252 of SEQ ID NO: 1241669
aaauaaugcuguccaucga

SEQ ID NO: 1290447 - RNA, 19 nt, Artificial Sequence
  Description of Artificial Sequence: Synthetic oligonucleotide
  Antisense strand to SEQ ID NO: 1290446
ucgauggacagcauuauuu

SEQ ID NO: 1290448 - RNA, 19 nt, Artificial Sequence
  Description of Artificial Sequence: Synthetic oligonucleotide
  Sense strand starting at position 3253 of SEQ ID NO: 1241669
aauaaugcuguccaucgau

SEQ ID NO: 1290449 - RNA, 19 nt, Artificial Sequence
  Description of Artificial Sequence: Synthetic oligonucleotide
  Antisense strand to SEQ ID NO: 1290448
aucgauggacagcauuauu

SEQ ID NO: 1290450 - RNA, 19 nt, Artificial Sequence
  Description of Artificial Sequence: Synthetic oligonucleotide
  Sense strand starting at position 3262 of SEQ ID NO: 1241669
guccaucgauguguaucau

SEQ ID NO: 1290451 - RNA, 19 nt, Artificial Sequence
  Description of Artificial Sequence: Synthetic oligonucleotide
  Antisense strand to SEQ ID NO: 1290450
augauacacaucgauggac

SEQ ID NO: 1290452 - RNA, 19 nt, Artificial Sequence
  Description of Artificial Sequence: Synthetic oligonucleotide
  Sense strand starting at position 3263 of SEQ ID NO: 1241669
uccaucgauguguaucaua

SEQ ID NO: 1290453 - RNA, 19 nt, Artificial Sequence
  Description of Artificial Sequence: Synthetic oligonucleotide
  Antisense strand to SEQ ID NO: 1290452
uaugauacacaucgaugga

SEQ ID NO: 1290454 - RNA, 19 nt, Artificial Sequence
  Description of Artificial Sequence: Synthetic oligonucleotide
  Sense strand starting at position 3276 of SEQ ID NO: 1241669
aucauaugaugacagauca

SEQ ID NO: 1290455 - RNA, 19 nt, Artificial Sequence
  Description of Artificial Sequence: Synthetic oligonucleotide
  Antisense strand to SEQ ID NO: 1290454
ugaucugucaucauaugau

SEQ ID NO: 1290456 - RNA, 19 nt, Artificial Sequence
  Description of Artificial Sequence: Synthetic oligonucleotide
  Sense strand starting at position 3306 of SEQ ID NO: 1241669
acaucuauuccuuaggguu

SEQ ID NO: 1290457 - RNA, 19 nt, Artificial Sequence
  Description of Artificial Sequence: Synthetic oligonucleotide
  Antisense strand to SEQ ID NO: 1290456
aacccuaaggaauagaugu

SEQ ID NO: 1290458 - RNA, 19 nt, Artificial Sequence
  Description of Artificial Sequence: Synthetic oligonucleotide
  Sense strand starting at position 3312 of SEQ ID NO: 1241669
auuccuuaggguugacuga

SEQ ID NO: 1290459 - RNA, 19 nt, Artificial Sequence
  Description of Artificial Sequence: Synthetic oligonucleotide
  Antisense strand to SEQ ID NO: 1290458
ucagucaacccuaaggaau

SEQ ID NO: 1290460 - RNA, 19 nt, Artificial Sequence
  Description of Artificial Sequence: Synthetic oligonucleotide
  Sense strand starting at position 3344 of SEQ ID NO: 1241669
uguugacaaugaucagcaa

SEQ ID NO: 1290461 - RNA, 19 nt, Artificial Sequence
  Description of Artificial Sequence: Synthetic oligonucleotide
  Antisense strand to SEQ ID NO: 1290460
uugcugaucauugucaaca

SEQ ID NO: 1290462 - RNA, 19 nt, Artificial Sequence
  Description of Artificial Sequence: Synthetic oligonucleotide
  Sense strand starting at position 3464 of SEQ ID NO: 1241669
guugaaagagcaggcuaua

SEQ ID NO: 1290463 - RNA, 19 nt, Artificial Sequence
  Description of Artificial Sequence: Synthetic oligonucleotide
  Antisense strand to SEQ ID NO: 1290462
uauagccugcucuuucaac

SEQ ID NO: 1290464 - RNA, 19 nt, Artificial Sequence
  Description of Artificial Sequence: Synthetic oligonucleotide
  Sense strand starting at position 3526 of SEQ ID NO: 1241669
acuaucuaagucuauggua

SEQ ID NO: 1290465 - RNA, 19 nt, Artificial Sequence
  Description of Artificial Sequence: Synthetic oligonucleotide
  Antisense strand to SEQ ID NO: 1290464
uaccauagacuuagauagu

SEQ ID NO: 1290466 - RNA, 19 nt, Artificial Sequence
  Description of Artificial Sequence: Synthetic oligonucleotide
  Sense strand starting at position 3528 of SEQ ID NO: 1241669
uaucuaagucuaugguaga

SEQ ID NO: 1290467 - RNA, 19 nt, Artificial Sequence
  Description of Artificial Sequence: Synthetic oligonucleotide
  Antisense strand to SEQ ID NO: 1290466
ucuaccauagacuuagaua

SEQ ID NO: 1290468 - RNA, 19 nt, Artificial Sequence
  Description of Artificial Sequence: Synthetic oligonucleotide
  Sense strand starting at position 3766 of SEQ ID NO: 1241669
gaaagcuccagguguagca

SEQ ID NO: 1290469 - RNA, 19 nt, Artificial Sequence
  Description of Artificial Sequence: Synthetic oligonucleotide
  Antisense strand to SEQ ID NO: 1290468
ugcuacaccuggagcuuuc

SEQ ID NO: 1290470 - RNA, 19 nt, Artificial Sequence
  Description of Artificial Sequence: Synthetic oligonucleotide
  Sense strand starting at position 3825 of SEQ ID NO: 1241669
ggucaugccuccuuccuau

SEQ ID NO: 1290471 - RNA, 19 nt, Artificial Sequence
  Description of Artificial Sequence: Synthetic oligonucleotide
  Antisense strand to SEQ ID NO: 1290470
auaggaaggaggcaugacc

SEQ ID NO: 1290472 - RNA, 19 nt, Artificial Sequence
  Description of Artificial Sequence: Synthetic oligonucleotide
  Sense strand starting at position 3935 of SEQ ID NO: 1241669
auaucaagucccugagaau

SEQ ID NO: 1290473 - RNA, 19 nt, Artificial Sequence
  Description of Artificial Sequence: Synthetic oligonucleotide
  Antisense strand to SEQ ID NO: 1290472
auucucagggacuugauau

SEQ ID NO: 1290474 - RNA, 19 nt, Artificial Sequence
  Description of Artificial Sequence: Synthetic oligonucleotide
  Sense strand starting at position 3975 of SEQ ID NO: 1241669
gggaucucuugauugccaa

SEQ ID NO: 1290475 - RNA, 19 nt, Artificial Sequence
  Description of Artificial Sequence: Synthetic oligonucleotide
  Antisense strand to SEQ ID NO: 1290474
uuggcaaucaagagauccc

SEQ ID NO: 1290476 - RNA, 19 nt, Artificial Sequence
  Description of Artificial Sequence: Synthetic oligonucleotide
  Sense strand starting at position 3976 of SEQ ID NO: 1241669
ggaucucuugauugccaaa

SEQ ID NO: 1290477 - RNA, 19 nt, Artificial Sequence
  Description of Artificial Sequence: Synthetic oligonucleotide
  Antisense strand to SEQ ID NO: 1290476
uuuggcaaucaagagaucc

SEQ ID NO: 1290478 - RNA, 19 nt, Artificial Sequence
  Description of Artificial Sequence: Synthetic oligonucleotide
  Sense strand starting at position 55 of SEQ ID NO: 1241670
gcaaaugguuauuuagcua

SEQ ID NO: 1290479 - RNA, 19 nt, Artificial Sequence
  Description of Artificial Sequence: Synthetic oligonucleotide
  Antisense strand to SEQ ID NO: 1290478
uagcuaaauaaccauuugc

SEQ ID NO: 1290480 - RNA, 19 nt, Artificial Sequence
  Description of Artificial Sequence: Synthetic oligonucleotide
  Sense strand starting at position 2134 of SEQ ID NO: 1241670
uuuaguaaagcagguuuga

SEQ ID NO: 1290481 - RNA, 19 nt, Artificial Sequence
  Description of Artificial Sequence: Synthetic oligonucleotide
  Antisense strand to SEQ ID NO: 1290480
ucaaaccugcuuuacuaaa

SEQ ID NO: 1290482 - RNA, 19 nt, Artificial Sequence
  Description of Artificial Sequence: Synthetic oligonucleotide
  Sense strand starting at position 2139 of SEQ ID NO: 1241670
uaaagcagguuugaaagaa

SEQ ID NO: 1290483 - RNA, 19 nt, Artificial Sequence
  Description of Artificial Sequence: Synthetic oligonucleotide
  Antisense strand to SEQ ID NO: 1290482
uucuuucaaaccugcuuua

SEQ ID NO: 1290484 - RNA, 19 nt, Artificial Sequence
  Description of Artificial Sequence: Synthetic oligonucleotide
  Sense strand starting at position 2269 of SEQ ID NO: 1241670
ggguacaucuuguucugga

SEQ ID NO: 1290485 - RNA, 19 nt, Artificial Sequence
  Description of Artificial Sequence: Synthetic oligonucleotide
  Antisense strand to SEQ ID NO: 1290484
uccagaacaagauguaccc

SEQ ID NO: 1290486 - RNA, 19 nt, Artificial Sequence
  Description of Artificial Sequence: Synthetic oligonucleotide
  Sense strand starting at position 2270 of SEQ ID NO: 1241670
gguacaucuuguucuggau

SEQ ID NO: 1290487 - RNA, 19 nt, Artificial Sequence
  Description of Artificial Sequence: Synthetic oligonucleotide
  Antisense strand to SEQ ID NO: 1290486
auccagaacaagauguacc

SEQ ID NO: 1290488 - RNA, 19 nt, Artificial Sequence
  Description of Artificial Sequence: Synthetic oligonucleotide
  Sense strand starting at position 2273 of SEQ ID NO: 1241670
acaucuuguucuggauauc

SEQ ID NO: 1290489 - RNA, 19 nt, Artificial Sequence
  Description of Artificial Sequence: Synthetic oligonucleotide
  Antisense strand to SEQ ID NO: 1290488
gauauccagaacaagaugu

SEQ ID NO: 1290490 - RNA, 19 nt, Artificial Sequence
  Description of Artificial Sequence: Synthetic oligonucleotide
  Sense strand starting at position 2276 of SEQ ID NO: 1241670
ucuuguucuggauaucaug

SEQ ID NO: 1290491 - RNA, 19 nt, Artificial Sequence
  Description of Artificial Sequence: Synthetic oligonucleotide
  Antisense strand to SEQ ID NO: 1290490
caugauauccagaacaaga

SEQ ID NO: 1290492 - RNA, 19 nt, Artificial Sequence
  Description of Artificial Sequence: Synthetic oligonucleotide
  Sense strand starting at position 2340 of SEQ ID NO: 1241670
uguagaacaucaugagcua

SEQ ID NO: 1290493 - RNA, 19 nt, Artificial Sequence
  Description of Artificial Sequence: Synthetic oligonucleotide
  Antisense strand to SEQ ID NO: 1290492
uagcucaugauguucuaca

SEQ ID NO: 1290494 - RNA, 19 nt, Artificial Sequence
  Description of Artificial Sequence: Synthetic oligonucleotide
  Sense strand starting at position 2359 of SEQ ID NO: 1241670
cugugaugaccagaaguuu

SEQ ID NO: 1290495 - RNA, 19 nt, Artificial Sequence
  Description of Artificial Sequence: Synthetic oligonucleotide
  Antisense strand to SEQ ID NO: 1290494
aaacuucuggucaucacag

SEQ ID NO: 1290496 - RNA, 19 nt, Artificial Sequence
  Description of Artificial Sequence: Synthetic oligonucleotide
  Sense strand starting at position 2368 of SEQ ID NO: 1241670
ccagaaguuugagauguaa

SEQ ID NO: 1290497 - RNA, 19 nt, Artificial Sequence
  Description of Artificial Sequence: Synthetic oligonucleotide
  Antisense strand to SEQ ID NO: 1290496
uuacaucucaaacuucugg

SEQ ID NO: 1290498 - RNA, 19 nt, Artificial Sequence
  Description of Artificial Sequence: Synthetic oligonucleotide
  Sense strand starting at position 2370 of SEQ ID NO: 1241670
agaaguuugagauguaacc

SEQ ID NO: 1290499 - RNA, 19 nt, Artificial Sequence
  Description of Artificial Sequence: Synthetic oligonucleotide
  Antisense strand to SEQ ID NO: 1290498
gguuacaucucaaacuucu

SEQ ID NO: 1290500 - RNA, 19 nt, Artificial Sequence
  Description of Artificial Sequence: Synthetic oligonucleotide
  Sense strand starting at position 2387 of SEQ ID NO: 1241670
ccaagugaauaagauaauu

SEQ ID NO: 1290501 - RNA, 19 nt, Artificial Sequence
  Description of Artificial Sequence: Synthetic oligonucleotide
  Antisense strand to SEQ ID NO: 1290500
aauuaucuuauucacuugg

SEQ ID NO: 1290502 - RNA, 19 nt, Artificial Sequence
  Description of Artificial Sequence: Synthetic oligonucleotide
  Sense strand starting at position 2454 of SEQ ID NO: 1241670
cugaauaugcugcaacaau

SEQ ID NO: 1290503 - RNA, 19 nt, Artificial Sequence
  Description of Artificial Sequence: Synthetic oligonucleotide
  Antisense strand to SEQ ID NO: 1290502
auuguugcagcauauucag

SEQ ID NO: 1290504 - RNA, 19 nt, Artificial Sequence
  Description of Artificial Sequence: Synthetic oligonucleotide
  Sense strand starting at position 2528 of SEQ ID NO: 1241670
ggcuuaacauaguuggcaa

SEQ ID NO: 1290505 - RNA, 19 nt, Artificial Sequence
  Description of Artificial Sequence: Synthetic oligonucleotide
  Antisense strand to SEQ ID NO: 1290504
uugccaacuauguuaagcc

SEQ ID NO: 1290506 - RNA, 19 nt, Artificial Sequence
  Description of Artificial Sequence: Synthetic oligonucleotide
  Sense strand starting at position 2633 of SEQ ID NO: 1241670
uuauuacuuaccgagacga

SEQ ID NO: 1290507 - RNA, 19 nt, Artificial Sequence
  Description of Artificial Sequence: Synthetic oligonucleotide
  Antisense strand to SEQ ID NO: 1290506
ucgucucgguaaguaauaa

SEQ ID NO: 1290508 - RNA, 19 nt, Artificial Sequence
  Description of Artificial Sequence: Synthetic oligonucleotide
  Sense strand starting at position 3281 of SEQ ID NO: 1241670
uuagaagacucgcugcuau

SEQ ID NO: 1290509 - RNA, 19 nt, Artificial Sequence
  Description of Artificial Sequence: Synthetic oligonucleotide
  Antisense strand to SEQ ID NO: 1290508
auagcagcgagucuucuaa

SEQ ID NO: 1290510 - RNA, 19 nt, Artificial Sequence
  Description of Artificial Sequence: Synthetic oligonucleotide
  Sense strand starting at position 3346 of SEQ ID NO: 1241670
augcaugcugccugcagaa

SEQ ID NO: 1290511 - RNA, 19 nt, Artificial Sequence
  Description of Artificial Sequence: Synthetic oligonucleotide
  Antisense strand to SEQ ID NO: 1290510
uucugcaggcagcaugcau

SEQ ID NO: 1290512 - RNA, 19 nt, Artificial Sequence
  Description of Artificial Sequence: Synthetic oligonucleotide
  Sense strand starting at position 3420 of SEQ ID NO: 1241670
ucagauaaaugccauuugu

SEQ ID NO: 1290513 - RNA, 19 nt, Artificial Sequence
  Description of Artificial Sequence: Synthetic oligonucleotide
  Antisense strand to SEQ ID NO: 1290512
acaaauggcauuuaucuga

SEQ ID NO: 1290514 - RNA, 19 nt, Artificial Sequence
  Description of Artificial Sequence: Synthetic oligonucleotide
  Sense strand starting at position 3516 of SEQ ID NO: 1241670
uugagcuuucuagauacuu

SEQ ID NO: 1290515 - RNA, 19 nt, Artificial Sequence
  Description of Artificial Sequence: Synthetic oligonucleotide
  Antisense strand to SEQ ID NO: 1290514
aaguaucuagaaagcucaa

SEQ ID NO: 1290516 - RNA, 19 nt, Artificial Sequence
  Description of Artificial Sequence: Synthetic oligonucleotide
  Sense strand starting at position 3527 of SEQ ID NO: 1241670
agauacuucuacugucaga

SEQ ID NO: 1290517 - RNA, 19 nt, Artificial Sequence
  Description of Artificial Sequence: Synthetic oligonucleotide
  Antisense strand to SEQ ID NO: 1290516
ucugacaguagaaguaucu

SEQ ID NO: 1290518 - RNA, 19 nt, Artificial Sequence
  Description of Artificial Sequence: Synthetic oligonucleotide
  Sense strand starting at position 3538 of SEQ ID NO: 1241670
cugucagacugcuauuauu

SEQ ID NO: 1290519 - RNA, 19 nt, Artificial Sequence
  Description of Artificial Sequence: Synthetic oligonucleotide
  Antisense strand to SEQ ID NO: 1290518
aauaauagcagucugacag

SEQ ID NO: 1290520 - RNA, 19 nt, Artificial Sequence
  Description of Artificial Sequence: Synthetic oligonucleotide
  Sense strand starting at position 3624 of SEQ ID NO: 1241670
aacuguugcuuccgaggau

SEQ ID NO: 1290521 - RNA, 19 nt, Artificial Sequence
  Description of Artificial Sequence: Synthetic oligonucleotide
  Antisense strand to SEQ ID NO: 1290520
auccucggaagcaacaguu

SEQ ID NO: 1290522 - RNA, 19 nt, Artificial Sequence
  Description of Artificial Sequence: Synthetic oligonucleotide
  Sense strand starting at position 3625 of SEQ ID NO: 1241670
acuguugcuuccgaggaua

SEQ ID NO: 1290523 - RNA, 19 nt, Artificial Sequence
  Description of Artificial Sequence: Synthetic oligonucleotide
  Antisense strand to SEQ ID NO: 1290522
uauccucggaagcaacagu

SEQ ID NO: 1290524 - RNA, 19 nt, Artificial Sequence
  Description of Artificial Sequence: Synthetic oligonucleotide
  Sense strand starting at position 3627 of SEQ ID NO: 1241670
uguugcuuccgaggauauc

SEQ ID NO: 1290525 - RNA, 19 nt, Artificial Sequence
  Description of Artificial Sequence: Synthetic oligonucleotide
  Antisense strand to SEQ ID NO: 1290524
gauauccucggaagcaaca

SEQ ID NO: 1290526 - RNA, 19 nt, Artificial Sequence
  Description of Artificial Sequence: Synthetic oligonucleotide
  Sense strand starting at position 3628 of SEQ ID NO: 1241670
guugcuuccgaggauauca

SEQ ID NO: 1290527 - RNA, 19 nt, Artificial Sequence
  Description of Artificial Sequence: Synthetic oligonucleotide
  Antisense strand to SEQ ID NO: 1290526
ugauauccucggaagcaac

SEQ ID NO: 1290528 - RNA, 19 nt, Artificial Sequence
  Description of Artificial Sequence: Synthetic oligonucleotide
  Sense strand starting at position 3630 of SEQ ID NO: 1241670
ugcuuccgaggauaucaaa

SEQ ID NO: 1290529 - RNA, 19 nt, Artificial Sequence
  Description of Artificial Sequence: Synthetic oligonucleotide
  Antisense strand to SEQ ID NO: 1290528
uuugauauccucggaagca

SEQ ID NO: 1290530 - RNA, 19 nt, Artificial Sequence
  Description of Artificial Sequence: Synthetic oligonucleotide
  Sense strand starting at position 3653 of SEQ ID NO: 1241670
agcauauauggccauagca

SEQ ID NO: 1290531 - RNA, 19 nt, Artificial Sequence
  Description of Artificial Sequence: Synthetic oligonucleotide
  Antisense strand to SEQ ID NO: 1290530
ugcuauggccauauaugcu

SEQ ID NO: 1290532 - RNA, 19 nt, Artificial Sequence
  Description of Artificial Sequence: Synthetic oligonucleotide
  Sense strand starting at position 3980 of SEQ ID NO: 1241670
agcugucuuucccaggaua

SEQ ID NO: 1290533 - RNA, 19 nt, Artificial Sequence
  Description of Artificial Sequence: Synthetic oligonucleotide
  Antisense strand to SEQ ID NO: 1290532
uauccugggaaagacagcu

SEQ ID NO: 1290534 - RNA, 19 nt, Artificial Sequence
  Description of Artificial Sequence: Synthetic oligonucleotide
  Sense strand starting at position 3982 of SEQ ID NO: 1241670
cugucuuucccaggauaug

SEQ ID NO: 1290535 - RNA, 19 nt, Artificial Sequence
  Description of Artificial Sequence: Synthetic oligonucleotide
  Antisense strand to SEQ ID NO: 1290534
cauauccugggaaagacag

SEQ ID NO: 1290536 - RNA, 19 nt, Artificial Sequence
  Description of Artificial Sequence: Synthetic oligonucleotide
  Sense strand starting at position 3983 of SEQ ID NO: 1241670
ugucuuucccaggauaugu

SEQ ID NO: 1290537 - RNA, 19 nt, Artificial Sequence
  Description of Artificial Sequence: Synthetic oligonucleotide
  Antisense strand to SEQ ID NO: 1290536
acauauccugggaaagaca

SEQ ID NO: 1290538 - RNA, 19 nt, Artificial Sequence
  Description of Artificial Sequence: Synthetic oligonucleotide
  Sense strand starting at position 26 of SEQ ID NO: 1241671
uacagaguugcuggcaaga

SEQ ID NO: 1290539 - RNA, 19 nt, Artificial Sequence
  Description of Artificial Sequence: Synthetic oligonucleotide
  Antisense strand to SEQ ID NO: 1290538
ucuugccagcaacucugua

SEQ ID NO: 1290540 - RNA, 19 nt, Artificial Sequence
  Description of Artificial Sequence: Synthetic oligonucleotide
  Sense strand starting at position 28 of SEQ ID NO: 1241671
cagaguugcuggcaagaca

SEQ ID NO: 1290541 - RNA, 19 nt, Artificial Sequence
  Description of Artificial Sequence: Synthetic oligonucleotide
  Antisense strand to SEQ ID NO: 1290540
ugucuugccagcaacucug

SEQ ID NO: 1290542 - RNA, 19 nt, Artificial Sequence
  Description of Artificial Sequence: Synthetic oligonucleotide
  Sense strand starting at position 63 of SEQ ID NO: 1241671
ccagaccucuuguucuaga

SEQ ID NO: 1290543 - RNA, 19 nt, Artificial Sequence
  Description of Artificial Sequence: Synthetic oligonucleotide
  Antisense strand to SEQ ID NO: 1290542
ucuagaacaagaggucugg

SEQ ID NO: 1290544 - RNA, 19 nt, Artificial Sequence
  Description of Artificial Sequence: Synthetic oligonucleotide
  Sense strand starting at position 256 of SEQ ID NO: 1241671
ugaagugggcagcaauaau

SEQ ID NO: 1290545 - RNA, 19 nt, Artificial Sequence
  Description of Artificial Sequence: Synthetic oligonucleotide
  Antisense strand to SEQ ID NO: 1290544
auuauugcugcccacuuca

SEQ ID NO: 1290546 - RNA, 19 nt, Artificial Sequence
  Description of Artificial Sequence: Synthetic oligonucleotide
  Sense strand starting at position 268 of SEQ ID NO: 1241671
caauaauagugacagggua

SEQ ID NO: 1290547 - RNA, 19 nt, Artificial Sequence
  Description of Artificial Sequence: Synthetic oligonucleotide
  Antisense strand to SEQ ID NO: 1290546
uacccugucacuauuauug

SEQ ID NO: 1290548 - RNA, 19 nt, Artificial Sequence
  Description of Artificial Sequence: Synthetic oligonucleotide
  Sense strand starting at position 282 of SEQ ID NO: 1241671
ggguaacucacauggagua

SEQ ID NO: 1290549 - RNA, 19 nt, Artificial Sequence
  Description of Artificial Sequence: Synthetic oligonucleotide
  Antisense strand to SEQ ID NO: 1290548
uacuccaugugaguuaccc

SEQ ID NO: 1290550 - RNA, 19 nt, Artificial Sequence
  Description of Artificial Sequence: Synthetic oligonucleotide
  Sense strand starting at position 396 of SEQ ID NO: 1241671
ggcuaauccuuguccucaa

SEQ ID NO: 1290551 - RNA, 19 nt, Artificial Sequence
  Description of Artificial Sequence: Synthetic oligonucleotide
  Antisense strand to SEQ ID NO: 1290550
uugaggacaaggauuagcc

SEQ ID NO: 1290552 - RNA, 19 nt, Artificial Sequence
  Description of Artificial Sequence: Synthetic oligonucleotide
  Sense strand starting at position 420 of SEQ ID NO: 1241671
uguggacaauucgagguua

SEQ ID NO: 1290553 - RNA, 19 nt, Artificial Sequence
  Description of Artificial Sequence: Synthetic oligonucleotide
  Antisense strand to SEQ ID NO: 1290552
uaaccucgaauuguccaca

SEQ ID NO: 1290554 - RNA, 19 nt, Artificial Sequence
  Description of Artificial Sequence: Synthetic oligonucleotide
  Sense strand starting at position 422 of SEQ ID NO: 1241671
uggacaauucgagguuaag

SEQ ID NO: 1290555 - RNA, 19 nt, Artificial Sequence
  Description of Artificial Sequence: Synthetic oligonucleotide
  Antisense strand to SEQ ID NO: 1290554
cuuaaccucgaauugucca

SEQ ID NO: 1290556 - RNA, 19 nt, Artificial Sequence
  Description of Artificial Sequence: Synthetic oligonucleotide
  Sense strand starting at position 452 of SEQ ID NO: 1241671
acagcuguggccuggaauu

SEQ ID NO: 1290557 - RNA, 19 nt, Artificial Sequence
  Description of Artificial Sequence: Synthetic oligonucleotide
  Antisense strand to SEQ ID NO: 1290556
aauuccaggccacagcugu

SEQ ID NO: 1290558 - RNA, 19 nt, Artificial Sequence
  Description of Artificial Sequence: Synthetic oligonucleotide
  Sense strand starting at position 471 of SEQ ID NO: 1241671
uggaaacugucacacaguu

SEQ ID NO: 1290559 - RNA, 19 nt, Artificial Sequence
  Description of Artificial Sequence: Synthetic oligonucleotide
  Antisense strand to SEQ ID NO: 1290558
aacugugugacaguuucca

SEQ ID NO: 1290560 - RNA, 19 nt, Artificial Sequence
  Description of Artificial Sequence: Synthetic oligonucleotide
  Sense strand starting at position 490 of SEQ ID NO: 1241671
caaaguagguguccugcau

SEQ ID NO: 1290561 - RNA, 19 nt, Artificial Sequence
  Description of Artificial Sequence: Synthetic oligonucleotide
  Antisense strand to SEQ ID NO: 1290560
augcaggacaccuacuuug

SEQ ID NO: 1290562 - RNA, 19 nt, Artificial Sequence
  Description of Artificial Sequence: Synthetic oligonucleotide
  Sense strand starting at position 494 of SEQ ID NO: 1241671
guagguguccugcauuuac

SEQ ID NO: 1290563 - RNA, 19 nt, Artificial Sequence
  Description of Artificial Sequence: Synthetic oligonucleotide
  Antisense strand to SEQ ID NO: 1290562
guaaaugcaggacaccuac

SEQ ID NO: 1290564 - RNA, 19 nt, Artificial Sequence
  Description of Artificial Sequence: Synthetic oligonucleotide
  Sense strand starting at position 654 of SEQ ID NO: 1241671
ccugcacaguguuugaauu

SEQ ID NO: 1290565 - RNA, 19 nt, Artificial Sequence
  Description of Artificial Sequence: Synthetic oligonucleotide
  Antisense strand to SEQ ID NO: 1290564
aauucaaacacugugcagg

SEQ ID NO: 1290566 - RNA, 19 nt, Artificial Sequence
  Description of Artificial Sequence: Synthetic oligonucleotide
  Sense strand starting at position 655 of SEQ ID NO: 1241671
cugcacaguguuugaauuu

SEQ ID NO: 1290567 - RNA, 19 nt, Artificial Sequence
  Description of Artificial Sequence: Synthetic oligonucleotide
  Antisense strand to SEQ ID NO: 1290566
aaauucaaacacugugcag

SEQ ID NO: 1290568 - RNA, 19 nt, Artificial Sequence
  Description of Artificial Sequence: Synthetic oligonucleotide
  Sense strand starting at position 816 of SEQ ID NO: 1241671
ggcagagucuuucccucau

SEQ ID NO: 1290569 - RNA, 19 nt, Artificial Sequence
  Description of Artificial Sequence: Synthetic oligonucleotide
  Antisense strand to SEQ ID NO: 1290568
augagggaaagacucugcc

SEQ ID NO: 1290570 - RNA, 19 nt, Artificial Sequence
  Description of Artificial Sequence: Synthetic oligonucleotide
  Sense strand starting at position 900 of SEQ ID NO: 1241671
ugcagacuuugugucccaa

SEQ ID NO: 1290571 - RNA, 19 nt, Artificial Sequence
  Description of Artificial Sequence: Synthetic oligonucleotide
  Antisense strand to SEQ ID NO: 1290570
uugggacacaaagucugca

SEQ ID NO: 1290572 - RNA, 19 nt, Artificial Sequence
  Description of Artificial Sequence: Synthetic oligonucleotide
  Sense strand starting at position 972 of SEQ ID NO: 1241671
cagucagagugaugaucaa

SEQ ID NO: 1290573 - RNA, 19 nt, Artificial Sequence
  Description of Artificial Sequence: Synthetic oligonucleotide
  Antisense strand to SEQ ID NO: 1290572
uugaucaucacucugacug

SEQ ID NO: 1290574 - RNA, 19 nt, Artificial Sequence
  Description of Artificial Sequence: Synthetic oligonucleotide
  Sense strand starting at position 1188 of SEQ ID NO: 1241671
ucagacuguucuuccaaga

SEQ ID NO: 1290575 - RNA, 19 nt, Artificial Sequence
  Description of Artificial Sequence: Synthetic oligonucleotide
  Antisense strand to SEQ ID NO: 1290574
ucuuggaagaacagucuga

SEQ ID NO: 1290576 - RNA, 19 nt, Artificial Sequence
  Description of Artificial Sequence: Synthetic oligonucleotide
  Sense strand starting at position 1340 of SEQ ID NO: 1241671
ugccuuuggucucccgaga

SEQ ID NO: 1290577 - RNA, 19 nt, Artificial Sequence
  Description of Artificial Sequence: Synthetic oligonucleotide
  Antisense strand to SEQ ID NO: 1290576
ucucgggagaccaaaggca

SEQ ID NO: 1290578 - RNA, 19 nt, Artificial Sequence
  Description of Artificial Sequence: Synthetic oligonucleotide
  Sense strand starting at position 1391 of SEQ ID NO: 1241671
augaauaccucuugggaca

SEQ ID NO: 1290579 - RNA, 19 nt, Artificial Sequence
  Description of Artificial Sequence: Synthetic oligonucleotide
  Antisense strand to SEQ ID NO: 1290578
ugucccaagagguauucau

SEQ ID NO: 1290580 - RNA, 19 nt, Artificial Sequence
  Description of Artificial Sequence: Synthetic oligonucleotide
  Sense strand starting at position 1479 of SEQ ID NO: 1241671
acgggacaguccugagaaa

SEQ ID NO: 1290581 - RNA, 19 nt, Artificial Sequence
  Description of Artificial Sequence: Synthetic oligonucleotide
  Antisense strand to SEQ ID NO: 1290580
uuucucaggacugucccgu

SEQ ID NO: 1290582 - RNA, 19 nt, Artificial Sequence
  Description of Artificial Sequence: Synthetic oligonucleotide
  Sense strand starting at position 2420 of SEQ ID NO: 1241671
ugaggaucggcgugggaua

SEQ ID NO: 1290583 - RNA, 19 nt, Artificial Sequence
  Description of Artificial Sequence: Synthetic oligonucleotide
  Antisense strand to SEQ ID NO: 1290582
uaucccacgccgauccuca

SEQ ID NO: 1290584 - RNA, 19 nt, Artificial Sequence
  Description of Artificial Sequence: Synthetic oligonucleotide
  Sense strand starting at position 2523 of SEQ ID NO: 1241671
cgggauuccugucagcuuu

SEQ ID NO: 1290585 - RNA, 19 nt, Artificial Sequence
  Description of Artificial Sequence: Synthetic oligonucleotide
  Antisense strand to SEQ ID NO: 1290584
aaagcugacaggaaucccg

SEQ ID NO: 1290586 - RNA, 19 nt, Artificial Sequence
  Description of Artificial Sequence: Synthetic oligonucleotide
  Sense strand starting at position 2556 of SEQ ID NO: 1241671
acgguagacacugguuaua

SEQ ID NO: 1290587 - RNA, 19 nt, Artificial Sequence
  Description of Artificial Sequence: Synthetic oligonucleotide
  Antisense strand to SEQ ID NO: 1290586
uauaaccagugucuaccgu

SEQ ID NO: 1290588 - RNA, 19 nt, Artificial Sequence
  Description of Artificial Sequence: Synthetic oligonucleotide
  Sense strand starting at position 2558 of SEQ ID NO: 1241671
gguagacacugguuauagu

SEQ ID NO: 1290589 - RNA, 19 nt, Artificial Sequence
  Description of Artificial Sequence: Synthetic oligonucleotide
  Antisense strand to SEQ ID NO: 1290588
acuauaaccagugucuacc

SEQ ID NO: 1290590 - RNA, 19 nt, Artificial Sequence
  Description of Artificial Sequence: Synthetic oligonucleotide
  Sense strand starting at position 2559 of SEQ ID NO: 1241671
guagacacugguuauaguu

SEQ ID NO: 1290591 - RNA, 19 nt, Artificial Sequence
  Description of Artificial Sequence: Synthetic oligonucleotide
  Antisense strand to SEQ ID NO: 1290590
aacuauaaccagugucuac

SEQ ID NO: 1290592 - RNA, 19 nt, Artificial Sequence
  Description of Artificial Sequence: Synthetic oligonucleotide
  Sense strand starting at position 2567 of SEQ ID NO: 1241671
ugguuauaguuccucauuu

SEQ ID NO: 1290593 - RNA, 19 nt, Artificial Sequence
  Description of Artificial Sequence: Synthetic oligonucleotide
  Antisense strand to SEQ ID NO: 1290592
aaaugaggaacuauaacca

SEQ ID NO: 1290594 - RNA, 19 nt, Artificial Sequence
  Description of Artificial Sequence: Synthetic oligonucleotide
  Sense strand starting at position 2582 of SEQ ID NO: 1241671
auuuacuucuccgaaguua

SEQ ID NO: 1290595 - RNA, 19 nt, Artificial Sequence
  Description of Artificial Sequence: Synthetic oligonucleotide
  Antisense strand to SEQ ID NO: 1290594
uaacuucggagaaguaaau

SEQ ID NO: 1290596 - RNA, 19 nt, Artificial Sequence
  Description of Artificial Sequence: Synthetic oligonucleotide
  Sense strand starting at position 2855 of SEQ ID NO: 1241671
cuccgccuuccagaaguaa

SEQ ID NO: 1290597 - RNA, 19 nt, Artificial Sequence
  Description of Artificial Sequence: Synthetic oligonucleotide
  Antisense strand to SEQ ID NO: 1290596
uuacuucuggaaggcggag

SEQ ID NO: 1290598 - RNA, 19 nt, Artificial Sequence
  Description of Artificial Sequence: Synthetic oligonucleotide
  Sense strand starting at position 3096 of SEQ ID NO: 1241671
ugggcuucgcccugugaga

SEQ ID NO: 1290599 - RNA, 19 nt, Artificial Sequence
  Description of Artificial Sequence: Synthetic oligonucleotide
  Antisense strand to SEQ ID NO: 1290598
ucucacagggcgaagccca

SEQ ID NO: 1290600 - RNA, 19 nt, Artificial Sequence
  Description of Artificial Sequence: Synthetic oligonucleotide
  Sense strand starting at position 3098 of SEQ ID NO: 1241671
ggcuucgcccugugagaga

SEQ ID NO: 1290601 - RNA, 19 nt, Artificial Sequence
  Description of Artificial Sequence: Synthetic oligonucleotide
  Antisense strand to SEQ ID NO: 1290600
ucucucacagggcgaagcc

SEQ ID NO: 1290602 - RNA, 19 nt, Artificial Sequence
  Description of Artificial Sequence: Synthetic oligonucleotide
  Sense strand starting at position 3746 of SEQ ID NO: 1241671
accaaucagcacuguguuu

SEQ ID NO: 1290603 - RNA, 19 nt, Artificial Sequence
  Description of Artificial Sequence: Synthetic oligonucleotide
  Antisense strand to SEQ ID NO: 1290602
aaacacagugcugauuggu

SEQ ID NO: 1290604 - RNA, 19 nt, Artificial Sequence
  Description of Artificial Sequence: Synthetic oligonucleotide
  Sense strand starting at position 214 of SEQ ID NO: 1241672
agucuuggaagcgaacaaa

SEQ ID NO: 1290605 - RNA, 19 nt, Artificial Sequence
  Description of Artificial Sequence: Synthetic oligonucleotide
  Antisense strand to SEQ ID NO: 1290604
uuuguucgcuuccaagacu

SEQ ID NO: 1290606 - RNA, 19 nt, Artificial Sequence
  Description of Artificial Sequence: Synthetic oligonucleotide
  Sense strand starting at position 326 of SEQ ID NO: 1241672
uucugaaucucuguccgaa

SEQ ID NO: 1290607 - RNA, 19 nt, Artificial Sequence
  Description of Artificial Sequence: Synthetic oligonucleotide
  Antisense strand to SEQ ID NO: 1290606
uucggacagagauucagaa

SEQ ID NO: 1290608 - RNA, 19 nt, Artificial Sequence
  Description of Artificial Sequence: Synthetic oligonucleotide
  Sense strand starting at position 328 of SEQ ID NO: 1241672
cugaaucucuguccgaaac

SEQ ID NO: 1290609 - RNA, 19 nt, Artificial Sequence
  Description of Artificial Sequence: Synthetic oligonucleotide
  Antisense strand to SEQ ID NO: 1290608
guuucggacagagauucag

SEQ ID NO: 1290610 - RNA, 19 nt, Artificial Sequence
  Description of Artificial Sequence: Synthetic oligonucleotide
  Sense strand starting at position 339 of SEQ ID NO: 1241672
uccgaaacgcuauagagaa

SEQ ID NO: 1290611 - RNA, 19 nt, Artificial Sequence
  Description of Artificial Sequence: Synthetic oligonucleotide
  Antisense strand to SEQ ID NO: 1290610
uucucuauagcguuucgga

SEQ ID NO: 1290612 - RNA, 19 nt, Artificial Sequence
  Description of Artificial Sequence: Synthetic oligonucleotide
  Sense strand starting at position 655 of SEQ ID NO: 1241672
uguccagcuagugagaaau

SEQ ID NO: 1290613 - RNA, 19 nt, Artificial Sequence
  Description of Artificial Sequence: Synthetic oligonucleotide
  Antisense strand to SEQ ID NO: 1290612
auuucucacuagcuggaca

SEQ ID NO: 1290614 - RNA, 19 nt, Artificial Sequence
  Description of Artificial Sequence: Synthetic oligonucleotide
  Sense strand starting at position 661 of SEQ ID NO: 1241672
gcuagugagaaaugaagca

SEQ ID NO: 1290615 - RNA, 19 nt, Artificial Sequence
  Description of Artificial Sequence: Synthetic oligonucleotide
  Antisense strand to SEQ ID NO: 1290614
ugcuucauuucucacuagc

SEQ ID NO: 1290616 - RNA, 19 nt, Artificial Sequence
  Description of Artificial Sequence: Synthetic oligonucleotide
  Sense strand starting at position 677 of SEQ ID NO: 1241672
gcaggcuaccucuaaacca

SEQ ID NO: 1290617 - RNA, 19 nt, Artificial Sequence
  Description of Artificial Sequence: Synthetic oligonucleotide
  Antisense strand to SEQ ID NO: 1290616
ugguuuagagguagccugc

SEQ ID NO: 1290618 - RNA, 19 nt, Artificial Sequence
  Description of Artificial Sequence: Synthetic oligonucleotide
  Sense strand starting at position 824 of SEQ ID NO: 1241672
cuuuccuugcgacaccaau

SEQ ID NO: 1290619 - RNA, 19 nt, Artificial Sequence
  Description of Artificial Sequence: Synthetic oligonucleotide
  Antisense strand to SEQ ID NO: 1290618
auuggugucgcaaggaaag

SEQ ID NO: 1290620 - RNA, 19 nt, Artificial Sequence
  Description of Artificial Sequence: Synthetic oligonucleotide
  Sense strand starting at position 933 of SEQ ID NO: 1241672
gcgccaauauuucccgaca

SEQ ID NO: 1290621 - RNA, 19 nt, Artificial Sequence
  Description of Artificial Sequence: Synthetic oligonucleotide
  Antisense strand to SEQ ID NO: 1290620
ugucgggaaauauuggcgc

SEQ ID NO: 1290622 - RNA, 19 nt, Artificial Sequence
  Description of Artificial Sequence: Synthetic oligonucleotide
  Sense strand starting at position 1347 of SEQ ID NO: 1241672
ucgacuucuccuugaagca

SEQ ID NO: 1290623 - RNA, 19 nt, Artificial Sequence
  Description of Artificial Sequence: Synthetic oligonucleotide
  Antisense strand to SEQ ID NO: 1290622
ugcuucaaggagaagucga

SEQ ID NO: 1290624 - RNA, 19 nt, Artificial Sequence
  Description of Artificial Sequence: Synthetic oligonucleotide
  Sense strand starting at position 1548 of SEQ ID NO: 1241672
ucuuguagagcucacggaa

SEQ ID NO: 1290625 - RNA, 19 nt, Artificial Sequence
  Description of Artificial Sequence: Synthetic oligonucleotide
  Antisense strand to SEQ ID NO: 1290624
uuccgugagcucuacaaga

SEQ ID NO: 1290626 - RNA, 19 nt, Artificial Sequence
  Description of Artificial Sequence: Synthetic oligonucleotide
  Sense strand starting at position 1599 of SEQ ID NO: 1241672
ccuugaguacgcucucguu

SEQ ID NO: 1290627 - RNA, 19 nt, Artificial Sequence
  Description of Artificial Sequence: Synthetic oligonucleotide
  Antisense strand to SEQ ID NO: 1290626
aacgagagcguacucaagg

SEQ ID NO: 1290628 - RNA, 19 nt, Artificial Sequence
  Description of Artificial Sequence: Synthetic oligonucleotide
  Sense strand starting at position 2386 of SEQ ID NO: 1241672
cgcacaacuccgcacaaau

SEQ ID NO: 1290629 - RNA, 19 nt, Artificial Sequence
  Description of Artificial Sequence: Synthetic oligonucleotide
  Antisense strand to SEQ ID NO: 1290628
auuugugcggaguugugcg

SEQ ID NO: 1290630 - RNA, 19 nt, Artificial Sequence
  Description of Artificial Sequence: Synthetic oligonucleotide
  Sense strand starting at position 2499 of SEQ ID NO: 1241672
uacuuuaauguuggaauga

SEQ ID NO: 1290631 - RNA, 19 nt, Artificial Sequence
  Description of Artificial Sequence: Synthetic oligonucleotide
  Antisense strand to SEQ ID NO: 1290630
ucauuccaacauuaaagua

SEQ ID NO: 1290632 - RNA, 19 nt, Artificial Sequence
  Description of Artificial Sequence: Synthetic oligonucleotide
  Sense strand starting at position 2543 of SEQ ID NO: 1241672
uauggaacgcgauaaauaa

SEQ ID NO: 1290633 - RNA, 19 nt, Artificial Sequence
  Description of Artificial Sequence: Synthetic oligonucleotide
  Antisense strand to SEQ ID NO: 1290632
uuauuuaucgcguuccaua

SEQ ID NO: 1290634 - RNA, 19 nt, Artificial Sequence
  Description of Artificial Sequence: Synthetic oligonucleotide
  Sense strand starting at position 2779 of SEQ ID NO: 1241672
cagagagcuguuuagagca

SEQ ID NO: 1290635 - RNA, 19 nt, Artificial Sequence
  Description of Artificial Sequence: Synthetic oligonucleotide
  Antisense strand to SEQ ID NO: 1290634
ugcucuaaacagcucucug

SEQ ID NO: 1290636 - RNA, 19 nt, Artificial Sequence
  Description of Artificial Sequence: Synthetic oligonucleotide
  Sense strand starting at position 2784 of SEQ ID NO: 1241672
agcuguuuagagcauacuu

SEQ ID NO: 1290637 - RNA, 19 nt, Artificial Sequence
  Description of Artificial Sequence: Synthetic oligonucleotide
  Antisense strand to SEQ ID NO: 1290636
aaguaugcucuaaacagcu

SEQ ID NO: 1290638 - RNA, 19 nt, Artificial Sequence
  Description of Artificial Sequence: Synthetic oligonucleotide
  Sense strand starting at position 2944 of SEQ ID NO: 1241672
gaggaaugccgagaggcuu

SEQ ID NO: 1290639 - RNA, 19 nt, Artificial Sequence
  Description of Artificial Sequence: Synthetic oligonucleotide
  Antisense strand to SEQ ID NO: 1290638
aagccucucggcauuccuc

SEQ ID NO: 1290640 - RNA, 19 nt, Artificial Sequence
  Description of Artificial Sequence: Synthetic oligonucleotide
  Sense strand starting at position 3006 of SEQ ID NO: 1241672
gcgcuggaugugguguaaa

SEQ ID NO: 1290641 - RNA, 19 nt, Artificial Sequence
  Description of Artificial Sequence: Synthetic oligonucleotide
  Antisense strand to SEQ ID NO: 1290640
uuuacaccacauccagcgc

SEQ ID NO: 1290642 - RNA, 19 nt, Artificial Sequence
  Description of Artificial Sequence: Synthetic oligonucleotide
  Sense strand starting at position 3009 of SEQ ID NO: 1241672
cuggaugugguguaaauua

SEQ ID NO: 1290643 - RNA, 19 nt, Artificial Sequence
  Description of Artificial Sequence: Synthetic oligonucleotide
  Antisense strand to SEQ ID NO: 1290642
uaauuuacaccacauccag

SEQ ID NO: 1290644 - RNA, 19 nt, Artificial Sequence
  Description of Artificial Sequence: Synthetic oligonucleotide
  Sense strand starting at position 3073 of SEQ ID NO: 1241672
uccuuacccugcucugaga

SEQ ID NO: 1290645 - RNA, 19 nt, Artificial Sequence
  Description of Artificial Sequence: Synthetic oligonucleotide
  Antisense strand to SEQ ID NO: 1290644
ucucagagcaggguaagga

SEQ ID NO: 1290646 - RNA, 19 nt, Artificial Sequence
  Description of Artificial Sequence: Synthetic oligonucleotide
  Sense strand starting at position 3192 of SEQ ID NO: 1241672
guugcaaugcuggccuauu

SEQ ID NO: 1290647 - RNA, 19 nt, Artificial Sequence
  Description of Artificial Sequence: Synthetic oligonucleotide
  Antisense strand to SEQ ID NO: 1290646
aauaggccagcauugcaac

SEQ ID NO: 1290648 - RNA, 19 nt, Artificial Sequence
  Description of Artificial Sequence: Synthetic oligonucleotide
  Sense strand starting at position 3193 of SEQ ID NO: 1241672
uugcaaugcuggccuauuu

SEQ ID NO: 1290649 - RNA, 19 nt, Artificial Sequence
  Description of Artificial Sequence: Synthetic oligonucleotide
  Antisense strand to SEQ ID NO: 1290648
aaauaggccagcauugcaa

SEQ ID NO: 1290650 - RNA, 19 nt, Artificial Sequence
  Description of Artificial Sequence: Synthetic oligonucleotide
  Sense strand starting at position 3264 of SEQ ID NO: 1241672
uuuguuuauguguggagaa

SEQ ID NO: 1290651 - RNA, 19 nt, Artificial Sequence
  Description of Artificial Sequence: Synthetic oligonucleotide
  Antisense strand to SEQ ID NO: 1290650
uucuccacacauaaacaaa

SEQ ID NO: 1290652 - RNA, 19 nt, Artificial Sequence
  Description of Artificial Sequence: Synthetic oligonucleotide
  Sense strand starting at position 3266 of SEQ ID NO: 1241672
uguuuauguguggagaaug

SEQ ID NO: 1290653 - RNA, 19 nt, Artificial Sequence
  Description of Artificial Sequence: Synthetic oligonucleotide
  Antisense strand to SEQ ID NO: 1290652
cauucuccacacauaaaca

SEQ ID NO: 1290654 - RNA, 19 nt, Artificial Sequence
  Description of Artificial Sequence: Synthetic oligonucleotide
  Sense strand starting at position 3274 of SEQ ID NO: 1241672
uguggagaaugcuuaguaa

SEQ ID NO: 1290655 - RNA, 19 nt, Artificial Sequence
  Description of Artificial Sequence: Synthetic oligonucleotide
  Antisense strand to SEQ ID NO: 1290654
uuacuaagcauucuccaca

SEQ ID NO: 1290656 - RNA, 19 nt, Artificial Sequence
  Description of Artificial Sequence: Synthetic oligonucleotide
  Sense strand starting at position 3400 of SEQ ID NO: 1241672
gauaaucuauugucaguag

SEQ ID NO: 1290657 - RNA, 19 nt, Artificial Sequence
  Description of Artificial Sequence: Synthetic oligonucleotide
  Antisense strand to SEQ ID NO: 1290656
cuacugacaauagauuauc

SEQ ID NO: 1290658 - RNA, 19 nt, Artificial Sequence
  Description of Artificial Sequence: Synthetic oligonucleotide
  Sense strand starting at position 3404 of SEQ ID NO: 1241672
aucuauugucaguagcuga

SEQ ID NO: 1290659 - RNA, 19 nt, Artificial Sequence
  Description of Artificial Sequence: Synthetic oligonucleotide
  Antisense strand to SEQ ID NO: 1290658
ucagcuacugacaauagau

SEQ ID NO: 1290660 - RNA, 19 nt, Artificial Sequence
  Description of Artificial Sequence: Synthetic oligonucleotide
  Sense strand starting at position 3437 of SEQ ID NO: 1241672
aagaacaaugcguggagau

SEQ ID NO: 1290661 - RNA, 19 nt, Artificial Sequence
  Description of Artificial Sequence: Synthetic oligonucleotide
  Antisense strand to SEQ ID NO: 1290660
aucuccacgcauuguucuu

SEQ ID NO: 1290662 - RNA, 19 nt, Artificial Sequence
  Description of Artificial Sequence: Synthetic oligonucleotide
  Sense strand starting at position 3438 of SEQ ID NO: 1241672
agaacaaugcguggagaua

SEQ ID NO: 1290663 - RNA, 19 nt, Artificial Sequence
  Description of Artificial Sequence: Synthetic oligonucleotide
  Antisense strand to SEQ ID NO: 1290662
uaucuccacgcauuguucu

SEQ ID NO: 1290664 - RNA, 19 nt, Artificial Sequence
  Description of Artificial Sequence: Synthetic oligonucleotide
  Sense strand starting at position 3482 of SEQ ID NO: 1241672
gugacuuuaugacuauacu

SEQ ID NO: 1290665 - RNA, 19 nt, Artificial Sequence
  Description of Artificial Sequence: Synthetic oligonucleotide
  Antisense strand to SEQ ID NO: 1290664
aguauagucauaaagucac

SEQ ID NO: 1290666 - RNA, 19 nt, Artificial Sequence
  Description of Artificial Sequence: Synthetic oligonucleotide
  Sense strand starting at position 3570 of SEQ ID NO: 1241672
cccucuuagugagugguga

SEQ ID NO: 1290667 - RNA, 19 nt, Artificial Sequence
  Description of Artificial Sequence: Synthetic oligonucleotide
  Antisense strand to SEQ ID NO: 1290666
ucaccacucacuaagaggg

SEQ ID NO: 1290668 - RNA, 19 nt, Artificial Sequence
  Description of Artificial Sequence: Synthetic oligonucleotide
  Sense strand starting at position 3571 of SEQ ID NO: 1241672
ccucuuagugaguggugaa

SEQ ID NO: 1290669 - RNA, 19 nt, Artificial Sequence
  Description of Artificial Sequence: Synthetic oligonucleotide
  Antisense strand to SEQ ID NO: 1290668
uucaccacucacuaagagg

SEQ ID NO: 1290670 - RNA, 19 nt, Artificial Sequence
  Description of Artificial Sequence: Synthetic oligonucleotide
  Sense strand starting at position 3572 of SEQ ID NO: 1241672
cucuuagugaguggugaag

SEQ ID NO: 1290671 - RNA, 19 nt, Artificial Sequence
  Description of Artificial Sequence: Synthetic oligonucleotide
  Antisense strand to SEQ ID NO: 1290670
cuucaccacucacuaagag

SEQ ID NO: 1290672 - RNA, 19 nt, Artificial Sequence
  Description of Artificial Sequence: Synthetic oligonucleotide
  Sense strand starting at position 3596 of SEQ ID NO: 1241672
acuguaggcuccuuaaacu

SEQ ID NO: 1290673 - RNA, 19 nt, Artificial Sequence
  Description of Artificial Sequence: Synthetic oligonucleotide
  Antisense strand to SEQ ID NO: 1290672
aguuuaaggagccuacagu

SEQ ID NO: 1290674 - RNA, 19 nt, Artificial Sequence
  Description of Artificial Sequence: Synthetic oligonucleotide
  Sense strand starting at position 3639 of SEQ ID NO: 1241672
ugauuccuuuagccaaaga

SEQ ID NO: 1290675 - RNA, 19 nt, Artificial Sequence
  Description of Artificial Sequence: Synthetic oligonucleotide
  Antisense strand to SEQ ID NO: 1290674
ucuuuggcuaaaggaauca

SEQ ID NO: 1290676 - RNA, 19 nt, Artificial Sequence
  Description of Artificial Sequence: Synthetic oligonucleotide
  Sense strand starting at position 3679 of SEQ ID NO: 1241672
ugcauauugagaugcaagu

SEQ ID NO: 1290677 - RNA, 19 nt, Artificial Sequence
  Description of Artificial Sequence: Synthetic oligonucleotide
  Antisense strand to SEQ ID NO: 1290676
acuugcaucucaauaugca

SEQ ID NO: 1290678 - RNA, 19 nt, Artificial Sequence
  Description of Artificial Sequence: Synthetic oligonucleotide
  Sense strand starting at position 3705 of SEQ ID NO: 1241672
ggagaagcaugucuugguu

SEQ ID NO: 1290679 - RNA, 19 nt, Artificial Sequence
  Description of Artificial Sequence: Synthetic oligonucleotide
  Antisense strand to SEQ ID NO: 1290678
aaccaagacaugcuucucc

SEQ ID NO: 1290680 - RNA, 19 nt, Artificial Sequence
  Description of Artificial Sequence: Synthetic oligonucleotide
  Sense strand starting at position 3855 of SEQ ID NO: 1241672
ugcuucucugcugaacaua

SEQ ID NO: 1290681 - RNA, 19 nt, Artificial Sequence
  Description of Artificial Sequence: Synthetic oligonucleotide
  Antisense strand to SEQ ID NO: 1290680
uauguucagcagagaagca

SEQ ID NO: 1290682 - RNA, 19 nt, Artificial Sequence
  Description of Artificial Sequence: Synthetic oligonucleotide
  Sense strand starting at position 3974 of SEQ ID NO: 1241672
gcauuuaauaggugugcau

SEQ ID NO: 1290683 - RNA, 19 nt, Artificial Sequence
  Description of Artificial Sequence: Synthetic oligonucleotide
  Antisense strand to SEQ ID NO: 1290682
augcacaccuauuaaaugc

SEQ ID NO: 1290684 - RNA, 19 nt, Artificial Sequence
  Description of Artificial Sequence: Synthetic oligonucleotide
  Sense strand starting at position 62 of SEQ ID NO: 1241673
cuuuguuucguccaacaaa

SEQ ID NO: 1290685 - RNA, 19 nt, Artificial Sequence
  Description of Artificial Sequence: Synthetic oligonucleotide
  Antisense strand to SEQ ID NO: 1290684
uuuguuggacgaaacaaag

SEQ ID NO: 1290686 - RNA, 19 nt, Artificial Sequence
  Description of Artificial Sequence: Synthetic oligonucleotide
  Sense strand starting at position 709 of SEQ ID NO: 1241673
guccacauuugcuucguua

SEQ ID NO: 1290687 - RNA, 19 nt, Artificial Sequence
  Description of Artificial Sequence: Synthetic oligonucleotide
  Antisense strand to SEQ ID NO: 1290686
uaacgaagcaaauguggac

SEQ ID NO: 1290688 - RNA, 19 nt, Artificial Sequence
  Description of Artificial Sequence: Synthetic oligonucleotide
  Sense strand starting at position 981 of SEQ ID NO: 1241673
gaagguaagcgccauguuu

SEQ ID NO: 1290689 - RNA, 19 nt, Artificial Sequence
  Description of Artificial Sequence: Synthetic oligonucleotide
  Antisense strand to SEQ ID NO: 1290688
aaacauggcgcuuaccuuc

SEQ ID NO: 1290690 - RNA, 19 nt, Artificial Sequence
  Description of Artificial Sequence: Synthetic oligonucleotide
  Sense strand starting at position 1151 of SEQ ID NO: 1241673
gggagaggccggugaucuu

SEQ ID NO: 1290691 - RNA, 19 nt, Artificial Sequence
  Description of Artificial Sequence: Synthetic oligonucleotide
  Antisense strand to SEQ ID NO: 1290690
aagaucaccggccucuccc

SEQ ID NO: 1290692 - RNA, 19 nt, Artificial Sequence
  Description of Artificial Sequence: Synthetic oligonucleotide
  Sense strand starting at position 1238 of SEQ ID NO: 1241673
gcgacuucuccuugaaaca

SEQ ID NO: 1290693 - RNA, 19 nt, Artificial Sequence
  Description of Artificial Sequence: Synthetic oligonucleotide
  Antisense strand to SEQ ID NO: 1290692
uguuucaaggagaagucgc

SEQ ID NO: 1290694 - RNA, 19 nt, Artificial Sequence
  Description of Artificial Sequence: Synthetic oligonucleotide
  Sense strand starting at position 1454 of SEQ ID NO: 1241673
gguagaugcccugguggaa

SEQ ID NO: 1290695 - RNA, 19 nt, Artificial Sequence
  Description of Artificial Sequence: Synthetic oligonucleotide
  Antisense strand to SEQ ID NO: 1290694
uuccaccagggcaucuacc

SEQ ID NO: 1290696 - RNA, 19 nt, Artificial Sequence
  Description of Artificial Sequence: Synthetic oligonucleotide
  Sense strand starting at position 1669 of SEQ ID NO: 1241673
agaaguuccgaguggaguu

SEQ ID NO: 1290697 - RNA, 19 nt, Artificial Sequence
  Description of Artificial Sequence: Synthetic oligonucleotide
  Antisense strand to SEQ ID NO: 1290696
aacuccacucggaacuucu

SEQ ID NO: 1290698 - RNA, 19 nt, Artificial Sequence
  Description of Artificial Sequence: Synthetic oligonucleotide
  Sense strand starting at position 1889 of SEQ ID NO: 1241673
gcuugauguccgccgcacu

SEQ ID NO: 1290699 - RNA, 19 nt, Artificial Sequence
  Description of Artificial Sequence: Synthetic oligonucleotide
  Antisense strand to SEQ ID NO: 1290698
agugcggcggacaucaagc

SEQ ID NO: 1290700 - RNA, 19 nt, Artificial Sequence
  Description of Artificial Sequence: Synthetic oligonucleotide
  Sense strand starting at position 2113 of SEQ ID NO: 1241673
cgcagucaccauuaagaua

SEQ ID NO: 1290701 - RNA, 19 nt, Artificial Sequence
  Description of Artificial Sequence: Synthetic oligonucleotide
  Antisense strand to SEQ ID NO: 1290700
uaucuuaauggugacugcg

SEQ ID NO: 1290702 - RNA, 19 nt, Artificial Sequence
  Description of Artificial Sequence: Synthetic oligonucleotide
  Sense strand starting at position 2135 of SEQ ID NO: 1241673
guuagagcaaaguagugua

SEQ ID NO: 1290703 - RNA, 19 nt, Artificial Sequence
  Description of Artificial Sequence: Synthetic oligonucleotide
  Antisense strand to SEQ ID NO: 1290702
uacacuacuuugcucuaac

SEQ ID NO: 1290704 - RNA, 19 nt, Artificial Sequence
  Description of Artificial Sequence: Synthetic oligonucleotide
  Sense strand starting at position 2357 of SEQ ID NO: 1241673
ggcaccuauaccugaagga

SEQ ID NO: 1290705 - RNA, 19 nt, Artificial Sequence
  Description of Artificial Sequence: Synthetic oligonucleotide
  Antisense strand to SEQ ID NO: 1290704
uccuucagguauaggugcc

SEQ ID NO: 1290706 - RNA, 19 nt, Artificial Sequence
  Description of Artificial Sequence: Synthetic oligonucleotide
  Sense strand starting at position 2402 of SEQ ID NO: 1241673
gcuccugggcgggaaauua

SEQ ID NO: 1290707 - RNA, 19 nt, Artificial Sequence
  Description of Artificial Sequence: Synthetic oligonucleotide
  Antisense strand to SEQ ID NO: 1290706
uaauuucccgcccaggagc

SEQ ID NO: 1290708 - RNA, 19 nt, Artificial Sequence
  Description of Artificial Sequence: Synthetic oligonucleotide
  Sense strand starting at position 2410 of SEQ ID NO: 1241673
gcgggaaauuaccuaaugu

SEQ ID NO: 1290709 - RNA, 19 nt, Artificial Sequence
  Description of Artificial Sequence: Synthetic oligonucleotide
  Antisense strand to SEQ ID NO: 1290708
acauuagguaauuucccgc

SEQ ID NO: 1290710 - RNA, 19 nt, Artificial Sequence
  Description of Artificial Sequence: Synthetic oligonucleotide
  Sense strand starting at position 2419 of SEQ ID NO: 1241673
uaccuaauguggccugaaa

SEQ ID NO: 1290711 - RNA, 19 nt, Artificial Sequence
  Description of Artificial Sequence: Synthetic oligonucleotide
  Antisense strand to SEQ ID NO: 1290710
uuucaggccacauuaggua

SEQ ID NO: 1290712 - RNA, 19 nt, Artificial Sequence
  Description of Artificial Sequence: Synthetic oligonucleotide
  Sense strand starting at position 2482 of SEQ ID NO: 1241673
auauuaauuguguggccuu

SEQ ID NO: 1290713 - RNA, 19 nt, Artificial Sequence
  Description of Artificial Sequence: Synthetic oligonucleotide
  Antisense strand to SEQ ID NO: 1290712
aaggccacacaauuaauau

SEQ ID NO: 1290714 - RNA, 19 nt, Artificial Sequence
  Description of Artificial Sequence: Synthetic oligonucleotide
  Sense strand starting at position 2485 of SEQ ID NO: 1241673
uuaauuguguggccuuaag

SEQ ID NO: 1290715 - RNA, 19 nt, Artificial Sequence
  Description of Artificial Sequence: Synthetic oligonucleotide
  Antisense strand to SEQ ID NO: 1290714
cuuaaggccacacaauuaa

SEQ ID NO: 1290716 - RNA, 19 nt, Artificial Sequence
  Description of Artificial Sequence: Synthetic oligonucleotide
  Sense strand starting at position 2497 of SEQ ID NO: 1241673
ccuuaaggucuggaugguu

SEQ ID NO: 1290717 - RNA, 19 nt, Artificial Sequence
  Description of Artificial Sequence: Synthetic oligonucleotide
  Antisense strand to SEQ ID NO: 1290716
aaccauccagaccuuaagg

SEQ ID NO: 1290718 - RNA, 19 nt, Artificial Sequence
  Description of Artificial Sequence: Synthetic oligonucleotide
  Sense strand starting at position 2500 of SEQ ID NO: 1241673
uaaggucuggaugguuaaa

SEQ ID NO: 1290719 - RNA, 19 nt, Artificial Sequence
  Description of Artificial Sequence: Synthetic oligonucleotide
  Antisense strand to SEQ ID NO: 1290718
uuuaaccauccagaccuua

SEQ ID NO: 1290720 - RNA, 19 nt, Artificial Sequence
  Description of Artificial Sequence: Synthetic oligonucleotide
  Sense strand starting at position 2502 of SEQ ID NO: 1241673
aggucuggaugguuaaauu

SEQ ID NO: 1290721 - RNA, 19 nt, Artificial Sequence
  Description of Artificial Sequence: Synthetic oligonucleotide
  Antisense strand to SEQ ID NO: 1290720
aauuuaaccauccagaccu

SEQ ID NO: 1290722 - RNA, 19 nt, Artificial Sequence
  Description of Artificial Sequence: Synthetic oligonucleotide
  Sense strand starting at position 2617 of SEQ ID NO: 1241673
uuuggaugucuuuaucaag

SEQ ID NO: 1290723 - RNA, 19 nt, Artificial Sequence
  Description of Artificial Sequence: Synthetic oligonucleotide
  Antisense strand to SEQ ID NO: 1290722
cuugauaaagacauccaaa

SEQ ID NO: 1290724 - RNA, 19 nt, Artificial Sequence
  Description of Artificial Sequence: Synthetic oligonucleotide
  Sense strand starting at position 2664 of SEQ ID NO: 1241673
aaaugacacuaggaaaugu

SEQ ID NO: 1290725 - RNA, 19 nt, Artificial Sequence
  Description of Artificial Sequence: Synthetic oligonucleotide
  Antisense strand to SEQ ID NO: 1290724
acauuuccuagugucauuu

SEQ ID NO: 1290726 - RNA, 19 nt, Artificial Sequence
  Description of Artificial Sequence: Synthetic oligonucleotide
  Sense strand starting at position 2844 of SEQ ID NO: 1241673
ugaguugaacaugguauaa

SEQ ID NO: 1290727 - RNA, 19 nt, Artificial Sequence
  Description of Artificial Sequence: Synthetic oligonucleotide
  Antisense strand to SEQ ID NO: 1290726
uuauaccauguucaacuca

SEQ ID NO: 1290728 - RNA, 19 nt, Artificial Sequence
  Description of Artificial Sequence: Synthetic oligonucleotide
  Sense strand starting at position 2884 of SEQ ID NO: 1241673
ccauaaguuuauccuggau

SEQ ID NO: 1290729 - RNA, 19 nt, Artificial Sequence
  Description of Artificial Sequence: Synthetic oligonucleotide
  Antisense strand to SEQ ID NO: 1290728
auccaggauaaacuuaugg

SEQ ID NO: 1290730 - RNA, 19 nt, Artificial Sequence
  Description of Artificial Sequence: Synthetic oligonucleotide
  Sense strand starting at position 2887 of SEQ ID NO: 1241673
uaaguuuauccuggaugag

SEQ ID NO: 1290731 - RNA, 19 nt, Artificial Sequence
  Description of Artificial Sequence: Synthetic oligonucleotide
  Antisense strand to SEQ ID NO: 1290730
cucauccaggauaaacuua

SEQ ID NO: 1290732 - RNA, 19 nt, Artificial Sequence
  Description of Artificial Sequence: Synthetic oligonucleotide
  Sense strand starting at position 2888 of SEQ ID NO: 1241673
aaguuuauccuggaugagu

SEQ ID NO: 1290733 - RNA, 19 nt, Artificial Sequence
  Description of Artificial Sequence: Synthetic oligonucleotide
  Antisense strand to SEQ ID NO: 1290732
acucauccaggauaaacuu

SEQ ID NO: 1290734 - RNA, 19 nt, Artificial Sequence
  Description of Artificial Sequence: Synthetic oligonucleotide
  Sense strand starting at position 2899 of SEQ ID NO: 1241673
ggaugagucguguggaaga

SEQ ID NO: 1290735 - RNA, 19 nt, Artificial Sequence
  Description of Artificial Sequence: Synthetic oligonucleotide
  Antisense strand to SEQ ID NO: 1290734
ucuuccacacgacucaucc

SEQ ID NO: 1290736 - RNA, 19 nt, Artificial Sequence
  Description of Artificial Sequence: Synthetic oligonucleotide
  Sense strand starting at position 2901 of SEQ ID NO: 1241673
augagucguguggaagaga

SEQ ID NO: 1290737 - RNA, 19 nt, Artificial Sequence
  Description of Artificial Sequence: Synthetic oligonucleotide
  Antisense strand to SEQ ID NO: 1290736
ucucuuccacacgacucau

SEQ ID NO: 1290738 - RNA, 19 nt, Artificial Sequence
  Description of Artificial Sequence: Synthetic oligonucleotide
  Sense strand starting at position 2902 of SEQ ID NO: 1241673
ugagucguguggaagagau

SEQ ID NO: 1290739 - RNA, 19 nt, Artificial Sequence
  Description of Artificial Sequence: Synthetic oligonucleotide
  Antisense strand to SEQ ID NO: 1290738
aucucuuccacacgacuca

SEQ ID NO: 1290740 - RNA, 19 nt, Artificial Sequence
  Description of Artificial Sequence: Synthetic oligonucleotide
  Sense strand starting at position 2906 of SEQ ID NO: 1241673
ucguguggaagagaucuaa

SEQ ID NO: 1290741 - RNA, 19 nt, Artificial Sequence
  Description of Artificial Sequence: Synthetic oligonucleotide
  Antisense strand to SEQ ID NO: 1290740
uuagaucucuuccacacga

SEQ ID NO: 1290742 - RNA, 19 nt, Artificial Sequence
  Description of Artificial Sequence: Synthetic oligonucleotide
  Sense strand starting at position 3023 of SEQ ID NO: 1241673
gcgggugucauccagauca

SEQ ID NO: 1290743 - RNA, 19 nt, Artificial Sequence
  Description of Artificial Sequence: Synthetic oligonucleotide
  Antisense strand to SEQ ID NO: 1290742
ugaucuggaugacacccgc

SEQ ID NO: 1290744 - RNA, 19 nt, Artificial Sequence
  Description of Artificial Sequence: Synthetic oligonucleotide
  Sense strand starting at position 3025 of SEQ ID NO: 1241673
gggugucauccagaucagu

SEQ ID NO: 1290745 - RNA, 19 nt, Artificial Sequence
  Description of Artificial Sequence: Synthetic oligonucleotide
  Antisense strand to SEQ ID NO: 1290744
acugaucuggaugacaccc

SEQ ID NO: 1290746 - RNA, 19 nt, Artificial Sequence
  Description of Artificial Sequence: Synthetic oligonucleotide
  Sense strand starting at position 3145 of SEQ ID NO: 1241673
cuuuguaauuugcacaaga

SEQ ID NO: 1290747 - RNA, 19 nt, Artificial Sequence
  Description of Artificial Sequence: Synthetic oligonucleotide
  Antisense strand to SEQ ID NO: 1290746
ucuugugcaaauuacaaag

SEQ ID NO: 1290748 - RNA, 19 nt, Artificial Sequence
  Description of Artificial Sequence: Synthetic oligonucleotide
  Sense strand starting at position 3193 of SEQ ID NO: 1241673
ugcuucuuugauuacugua

SEQ ID NO: 1290749 - RNA, 19 nt, Artificial Sequence
  Description of Artificial Sequence: Synthetic oligonucleotide
  Antisense strand to SEQ ID NO: 1290748
uacaguaaucaaagaagca

SEQ ID NO: 1290750 - RNA, 19 nt, Artificial Sequence
  Description of Artificial Sequence: Synthetic oligonucleotide
  Sense strand starting at position 3198 of SEQ ID NO: 1241673
cuuugauuacuguagguca

SEQ ID NO: 1290751 - RNA, 19 nt, Artificial Sequence
  Description of Artificial Sequence: Synthetic oligonucleotide
  Antisense strand to SEQ ID NO: 1290750
ugaccuacaguaaucaaag

SEQ ID NO: 1290752 - RNA, 19 nt, Artificial Sequence
  Description of Artificial Sequence: Synthetic oligonucleotide
  Sense strand starting at position 3200 of SEQ ID NO: 1241673
uugauuacuguaggucagu

SEQ ID NO: 1290753 - RNA, 19 nt, Artificial Sequence
  Description of Artificial Sequence: Synthetic oligonucleotide
  Antisense strand to SEQ ID NO: 1290752
acugaccuacaguaaucaa

SEQ ID NO: 1290754 - RNA, 19 nt, Artificial Sequence
  Description of Artificial Sequence: Synthetic oligonucleotide
  Sense strand starting at position 3201 of SEQ ID NO: 1241673
ugauuacuguaggucaguu

SEQ ID NO: 1290755 - RNA, 19 nt, Artificial Sequence
  Description of Artificial Sequence: Synthetic oligonucleotide
  Antisense strand to SEQ ID NO: 1290754
aacugaccuacaguaauca

SEQ ID NO: 1290756 - RNA, 19 nt, Artificial Sequence
  Description of Artificial Sequence: Synthetic oligonucleotide
  Sense strand starting at position 3645 of SEQ ID NO: 1241673
gucaccugccgucaugaua

SEQ ID NO: 1290757 - RNA, 19 nt, Artificial Sequence
  Description of Artificial Sequence: Synthetic oligonucleotide
  Antisense strand to SEQ ID NO: 1290756
uaucaugacggcaggugac

SEQ ID NO: 1290758 - RNA, 19 nt, Artificial Sequence
  Description of Artificial Sequence: Synthetic oligonucleotide
  Sense strand starting at position 3705 of SEQ ID NO: 1241673
uuuauugcuggucaaucaa

SEQ ID NO: 1290759 - RNA, 19 nt, Artificial Sequence
  Description of Artificial Sequence: Synthetic oligonucleotide
  Antisense strand to SEQ ID NO: 1290758
uugauugaccagcaauaaa

SEQ ID NO: 1290760 - RNA, 19 nt, Artificial Sequence
  Description of Artificial Sequence: Synthetic oligonucleotide
  Sense strand starting at position 3712 of SEQ ID NO: 1241673
cuggucaaucaagauguca

SEQ ID NO: 1290761 - RNA, 19 nt, Artificial Sequence
  Description of Artificial Sequence: Synthetic oligonucleotide
  Antisense strand to SEQ ID NO: 1290760
ugacaucuugauugaccag

SEQ ID NO: 1290762 - RNA, 19 nt, Artificial Sequence
  Description of Artificial Sequence: Synthetic oligonucleotide
  Sense strand starting at position 3724 of SEQ ID NO: 1241673
gaugucauuugauguagga

SEQ ID NO: 1290763 - RNA, 19 nt, Artificial Sequence
  Description of Artificial Sequence: Synthetic oligonucleotide
  Antisense strand to SEQ ID NO: 1290762
uccuacaucaaaugacauc

SEQ ID NO: 1290764 - RNA, 19 nt, Artificial Sequence
  Description of Artificial Sequence: Synthetic oligonucleotide
  Sense strand starting at position 229 of SEQ ID NO: 1241674
gcuagagguucuuccgaag

SEQ ID NO: 1290765 - RNA, 19 nt, Artificial Sequence
  Description of Artificial Sequence: Synthetic oligonucleotide
  Antisense strand to SEQ ID NO: 1290764
cuucggaagaaccucuagc

SEQ ID NO: 1290766 - RNA, 19 nt, Artificial Sequence
  Description of Artificial Sequence: Synthetic oligonucleotide
  Sense strand starting at position 253 of SEQ ID NO: 1241674
agcaguuaaggcgaggauu

SEQ ID NO: 1290767 - RNA, 19 nt, Artificial Sequence
  Description of Artificial Sequence: Synthetic oligonucleotide
  Antisense strand to SEQ ID NO: 1290766
aauccucgccuuaacugcu

SEQ ID NO: 1290768 - RNA, 19 nt, Artificial Sequence
  Description of Artificial Sequence: Synthetic oligonucleotide
  Sense strand starting at position 255 of SEQ ID NO: 1241674
caguuaaggcgaggauuac

SEQ ID NO: 1290769 - RNA, 19 nt, Artificial Sequence
  Description of Artificial Sequence: Synthetic oligonucleotide
  Antisense strand to SEQ ID NO: 1290768
guaauccucgccuuaacug

SEQ ID NO: 1290770 - RNA, 19 nt, Artificial Sequence
  Description of Artificial Sequence: Synthetic oligonucleotide
  Sense strand starting at position 256 of SEQ ID NO: 1241674
aguuaaggcgaggauuacu

SEQ ID NO: 1290771 - RNA, 19 nt, Artificial Sequence
  Description of Artificial Sequence: Synthetic oligonucleotide
  Antisense strand to SEQ ID NO: 1290770
aguaauccucgccuuaacu

SEQ ID NO: 1290772 - RNA, 19 nt, Artificial Sequence
  Description of Artificial Sequence: Synthetic oligonucleotide
  Sense strand starting at position 442 of SEQ ID NO: 1241674
acaggacugucaggaaaua

SEQ ID NO: 1290773 - RNA, 19 nt, Artificial Sequence
  Description of Artificial Sequence: Synthetic oligonucleotide
  Antisense strand to SEQ ID NO: 1290772
uauuuccugacaguccugu

SEQ ID NO: 1290774 - RNA, 19 nt, Artificial Sequence
  Description of Artificial Sequence: Synthetic oligonucleotide
  Sense strand starting at position 546 of SEQ ID NO: 1241674
gagcaagugcucccgcgau

SEQ ID NO: 1290775 - RNA, 19 nt, Artificial Sequence
  Description of Artificial Sequence: Synthetic oligonucleotide
  Antisense strand to SEQ ID NO: 1290774
aucgcgggagcacuugcuc

SEQ ID NO: 1290776 - RNA, 19 nt, Artificial Sequence
  Description of Artificial Sequence: Synthetic oligonucleotide
  Sense strand starting at position 654 of SEQ ID NO: 1241674
auguuuggcuaaucgagau

SEQ ID NO: 1290777 - RNA, 19 nt, Artificial Sequence
  Description of Artificial Sequence: Synthetic oligonucleotide
  Antisense strand to SEQ ID NO: 1290776
aucucgauuagccaaacau

SEQ ID NO: 1290778 - RNA, 19 nt, Artificial Sequence
  Description of Artificial Sequence: Synthetic oligonucleotide
  Sense strand starting at position 815 of SEQ ID NO: 1241674
gagggauauaccugggcuu

SEQ ID NO: 1290779 - RNA, 19 nt, Artificial Sequence
  Description of Artificial Sequence: Synthetic oligonucleotide
  Antisense strand to SEQ ID NO: 1290778
aagcccagguauaucccuc

SEQ ID NO: 1290780 - RNA, 19 nt, Artificial Sequence
  Description of Artificial Sequence: Synthetic oligonucleotide
  Sense strand starting at position 816 of SEQ ID NO: 1241674
agggauauaccugggcuuu

SEQ ID NO: 1290781 - RNA, 19 nt, Artificial Sequence
  Description of Artificial Sequence: Synthetic oligonucleotide
  Antisense strand to SEQ ID NO: 1290780
aaagcccagguauaucccu

SEQ ID NO: 1290782 - RNA, 19 nt, Artificial Sequence
  Description of Artificial Sequence: Synthetic oligonucleotide
  Sense strand starting at position 818 of SEQ ID NO: 1241674
ggauauaccugggcuuuga

SEQ ID NO: 1290783 - RNA, 19 nt, Artificial Sequence
  Description of Artificial Sequence: Synthetic oligonucleotide
  Antisense strand to SEQ ID NO: 1290782
ucaaagcccagguauaucc

SEQ ID NO: 1290784 - RNA, 19 nt, Artificial Sequence
  Description of Artificial Sequence: Synthetic oligonucleotide
  Sense strand starting at position 856 of SEQ ID NO: 1241674
accgacacauugcuaauaa

SEQ ID NO: 1290785 - RNA, 19 nt, Artificial Sequence
  Description of Artificial Sequence: Synthetic oligonucleotide
  Antisense strand to SEQ ID NO: 1290784
uuauuagcaaugugucggu

SEQ ID NO: 1290786 - RNA, 19 nt, Artificial Sequence
  Description of Artificial Sequence: Synthetic oligonucleotide
  Sense strand starting at position 872 of SEQ ID NO: 1241674
uaagccaggcuucgauuaa

SEQ ID NO: 1290787 - RNA, 19 nt, Artificial Sequence
  Description of Artificial Sequence: Synthetic oligonucleotide
  Antisense strand to SEQ ID NO: 1290786
uuaaucgaagccuggcuua

SEQ ID NO: 1290788 - RNA, 19 nt, Artificial Sequence
  Description of Artificial Sequence: Synthetic oligonucleotide
  Sense strand starting at position 876 of SEQ ID NO: 1241674
ccaggcuucgauuaauagu

SEQ ID NO: 1290789 - RNA, 19 nt, Artificial Sequence
  Description of Artificial Sequence: Synthetic oligonucleotide
  Antisense strand to SEQ ID NO: 1290788
acuauuaaucgaagccugg

SEQ ID NO: 1290790 - RNA, 19 nt, Artificial Sequence
  Description of Artificial Sequence: Synthetic oligonucleotide
  Sense strand starting at position 917 of SEQ ID NO: 1241674
aagaauuagcuuugggucu

SEQ ID NO: 1290791 - RNA, 19 nt, Artificial Sequence
  Description of Artificial Sequence: Synthetic oligonucleotide
  Antisense strand to SEQ ID NO: 1290790
agacccaaagcuaauucuu

SEQ ID NO: 1290792 - RNA, 19 nt, Artificial Sequence
  Description of Artificial Sequence: Synthetic oligonucleotide
  Sense strand starting at position 941 of SEQ ID NO: 1241674
ucccuaacuguuuguagga

SEQ ID NO: 1290793 - RNA, 19 nt, Artificial Sequence
  Description of Artificial Sequence: Synthetic oligonucleotide
  Antisense strand to SEQ ID NO: 1290792
uccuacaaacaguuaggga

SEQ ID NO: 1290794 - RNA, 19 nt, Artificial Sequence
  Description of Artificial Sequence: Synthetic oligonucleotide
  Sense strand starting at position 942 of SEQ ID NO: 1241674
cccuaacuguuuguaggau

SEQ ID NO: 1290795 - RNA, 19 nt, Artificial Sequence
  Description of Artificial Sequence: Synthetic oligonucleotide
  Antisense strand to SEQ ID NO: 1290794
auccuacaaacaguuaggg

SEQ ID NO: 1290796 - RNA, 19 nt, Artificial Sequence
  Description of Artificial Sequence: Synthetic oligonucleotide
  Sense strand starting at position 2204 of SEQ ID NO: 1241674
ccguuagcuccuggacuuu

SEQ ID NO: 1290797 - RNA, 19 nt, Artificial Sequence
  Description of Artificial Sequence: Synthetic oligonucleotide
  Antisense strand to SEQ ID NO: 1290796
aaaguccaggagcuaacgg

SEQ ID NO: 1290798 - RNA, 19 nt, Artificial Sequence
  Description of Artificial Sequence: Synthetic oligonucleotide
  Sense strand starting at position 2261 of SEQ ID NO: 1241674
ugcgagugucugggagaaa

SEQ ID NO: 1290799 - RNA, 19 nt, Artificial Sequence
  Description of Artificial Sequence: Synthetic oligonucleotide
  Antisense strand to SEQ ID NO: 1290798
uuucucccagacacucgca

SEQ ID NO: 1290800 - RNA, 19 nt, Artificial Sequence
  Description of Artificial Sequence: Synthetic oligonucleotide
  Sense strand starting at position 2405 of SEQ ID NO: 1241674
gcguugucucggucgagag

SEQ ID NO: 1290801 - RNA, 19 nt, Artificial Sequence
  Description of Artificial Sequence: Synthetic oligonucleotide
  Antisense strand to SEQ ID NO: 1290800
cucucgaccgagacaacgc

SEQ ID NO: 1290802 - RNA, 19 nt, Artificial Sequence
  Description of Artificial Sequence: Synthetic oligonucleotide
  Sense strand starting at position 2454 of SEQ ID NO: 1241674
acugaaaugcuccgagaau

SEQ ID NO: 1290803 - RNA, 19 nt, Artificial Sequence
  Description of Artificial Sequence: Synthetic oligonucleotide
  Antisense strand to SEQ ID NO: 1290802
auucucggagcauuucagu

SEQ ID NO: 1290804 - RNA, 19 nt, Artificial Sequence
  Description of Artificial Sequence: Synthetic oligonucleotide
  Sense strand starting at position 2463 of SEQ ID NO: 1241674
cuccgagaauucgcaaguu

SEQ ID NO: 1290805 - RNA, 19 nt, Artificial Sequence
  Description of Artificial Sequence: Synthetic oligonucleotide
  Antisense strand to SEQ ID NO: 1290804
aacuugcgaauucucggag

SEQ ID NO: 1290806 - RNA, 19 nt, Artificial Sequence
  Description of Artificial Sequence: Synthetic oligonucleotide
  Sense strand starting at position 2472 of SEQ ID NO: 1241674
uucgcaaguuuaguuguaa

SEQ ID NO: 1290807 - RNA, 19 nt, Artificial Sequence
  Description of Artificial Sequence: Synthetic oligonucleotide
  Antisense strand to SEQ ID NO: 1290806
uuacaacuaaacuugcgaa

SEQ ID NO: 1290808 - RNA, 19 nt, Artificial Sequence
  Description of Artificial Sequence: Synthetic oligonucleotide
  Sense strand starting at position 2473 of SEQ ID NO: 1241674
ucgcaaguuuaguuguaac

SEQ ID NO: 1290809 - RNA, 19 nt, Artificial Sequence
  Description of Artificial Sequence: Synthetic oligonucleotide
  Antisense strand to SEQ ID NO: 1290808
guuacaacuaaacuugcga

SEQ ID NO: 1290810 - RNA, 19 nt, Artificial Sequence
  Description of Artificial Sequence: Synthetic oligonucleotide
  Sense strand starting at position 2894 of SEQ ID NO: 1241674
cgagaagucauugguaggu

SEQ ID NO: 1290811 - RNA, 19 nt, Artificial Sequence
  Description of Artificial Sequence: Synthetic oligonucleotide
  Antisense strand to SEQ ID NO: 1290810
accuaccaaugacuucucg

SEQ ID NO: 1290812 - RNA, 19 nt, Artificial Sequence
  Description of Artificial Sequence: Synthetic oligonucleotide
  Sense strand starting at position 3129 of SEQ ID NO: 1241674
uuccuaagccgcugauuau

SEQ ID NO: 1290813 - RNA, 19 nt, Artificial Sequence
  Description of Artificial Sequence: Synthetic oligonucleotide
  Antisense strand to SEQ ID NO: 1290812
auaaucagcggcuuaggaa

SEQ ID NO: 1290814 - RNA, 19 nt, Artificial Sequence
  Description of Artificial Sequence: Synthetic oligonucleotide
  Sense strand starting at position 3130 of SEQ ID NO: 1241674
uccuaagccgcugauuauu

SEQ ID NO: 1290815 - RNA, 19 nt, Artificial Sequence
  Description of Artificial Sequence: Synthetic oligonucleotide
  Antisense strand to SEQ ID NO: 1290814
aauaaucagcggcuuagga

SEQ ID NO: 1290816 - RNA, 19 nt, Artificial Sequence
  Description of Artificial Sequence: Synthetic oligonucleotide
  Sense strand starting at position 3195 of SEQ ID NO: 1241674
gggcuaguggagugaauug

SEQ ID NO: 1290817 - RNA, 19 nt, Artificial Sequence
  Description of Artificial Sequence: Synthetic oligonucleotide
  Antisense strand to SEQ ID NO: 1290816
caauucacuccacuagccc

SEQ ID NO: 1290818 - RNA, 19 nt, Artificial Sequence
  Description of Artificial Sequence: Synthetic oligonucleotide
  Sense strand starting at position 3202 of SEQ ID NO: 1241674
uggagugaauuggcaacuu

SEQ ID NO: 1290819 - RNA, 19 nt, Artificial Sequence
  Description of Artificial Sequence: Synthetic oligonucleotide
  Antisense strand to SEQ ID NO: 1290818
aaguugccaauucacucca

SEQ ID NO: 1290820 - RNA, 19 nt, Artificial Sequence
  Description of Artificial Sequence: Synthetic oligonucleotide
  Sense strand starting at position 3234 of SEQ ID NO: 1241674
auuggcaguccacaucaua

SEQ ID NO: 1290821 - RNA, 19 nt, Artificial Sequence
  Description of Artificial Sequence: Synthetic oligonucleotide
  Antisense strand to SEQ ID NO: 1290820
uaugauguggacugccaau

SEQ ID NO: 1290822 - RNA, 19 nt, Artificial Sequence
  Description of Artificial Sequence: Synthetic oligonucleotide
  Sense strand starting at position 3258 of SEQ ID NO: 1241674
uucugaggccugggucaaa

SEQ ID NO: 1290823 - RNA, 19 nt, Artificial Sequence
  Description of Artificial Sequence: Synthetic oligonucleotide
  Antisense strand to SEQ ID NO: 1290822
uuugacccaggccucagaa

SEQ ID NO: 1290824 - RNA, 19 nt, Artificial Sequence
  Description of Artificial Sequence: Synthetic oligonucleotide
  Sense strand starting at position 3310 of SEQ ID NO: 1241674
guuuguuuaguuugaagaa

SEQ ID NO: 1290825 - RNA, 19 nt, Artificial Sequence
  Description of Artificial Sequence: Synthetic oligonucleotide
  Antisense strand to SEQ ID NO: 1290824
uucuucaaacuaaacaaac

SEQ ID NO: 1290826 - RNA, 19 nt, Artificial Sequence
  Description of Artificial Sequence: Synthetic oligonucleotide
  Sense strand starting at position 3379 of SEQ ID NO: 1241674
ggagguccaucccuagaca

SEQ ID NO: 1290827 - RNA, 19 nt, Artificial Sequence
  Description of Artificial Sequence: Synthetic oligonucleotide
  Antisense strand to SEQ ID NO: 1290826
ugucuagggauggaccucc

SEQ ID NO: 1290828 - RNA, 19 nt, Artificial Sequence
  Description of Artificial Sequence: Synthetic oligonucleotide
  Sense strand starting at position 3398 of SEQ ID NO: 1241674
gaaaucaggugagaacguu

SEQ ID NO: 1290829 - RNA, 19 nt, Artificial Sequence
  Description of Artificial Sequence: Synthetic oligonucleotide
  Antisense strand to SEQ ID NO: 1290828
aacguucucaccugauuuc

SEQ ID NO: 1290830 - RNA, 19 nt, Artificial Sequence
  Description of Artificial Sequence: Synthetic oligonucleotide
  Sense strand starting at position 3469 of SEQ ID NO: 1241674
uuuguaugcggcuuguaca

SEQ ID NO: 1290831 - RNA, 19 nt, Artificial Sequence
  Description of Artificial Sequence: Synthetic oligonucleotide
  Antisense strand to SEQ ID NO: 1290830
uguacaagccgcauacaaa

SEQ ID NO: 1290832 - RNA, 19 nt, Artificial Sequence
  Description of Artificial Sequence: Synthetic oligonucleotide
  Sense strand starting at position 3493 of SEQ ID NO: 1241674
gguaaaucagaaggcagau

SEQ ID NO: 1290833 - RNA, 19 nt, Artificial Sequence
  Description of Artificial Sequence: Synthetic oligonucleotide
  Antisense strand to SEQ ID NO: 1290832
aucugccuucugauuuacc

SEQ ID NO: 1290834 - RNA, 19 nt, Artificial Sequence
  Description of Artificial Sequence: Synthetic oligonucleotide
  Sense strand starting at position 3566 of SEQ ID NO: 1241674
gggcaaagcucguucugac

SEQ ID NO: 1290835 - RNA, 19 nt, Artificial Sequence
  Description of Artificial Sequence: Synthetic oligonucleotide
  Antisense strand to SEQ ID NO: 1290834
gucagaacgagcuuugccc

SEQ ID NO: 1290836 - RNA, 19 nt, Artificial Sequence
  Description of Artificial Sequence: Synthetic oligonucleotide
  Sense strand starting at position 3669 of SEQ ID NO: 1241674
uuacaucauuucugugaga

SEQ ID NO: 1290837 - RNA, 19 nt, Artificial Sequence
  Description of Artificial Sequence: Synthetic oligonucleotide
  Antisense strand to SEQ ID NO: 1290836
ucucacagaaaugauguaa

SEQ ID NO: 1290838 - RNA, 19 nt, Artificial Sequence
  Description of Artificial Sequence: Synthetic oligonucleotide
  Sense strand starting at position 3672 of SEQ ID NO: 1241674
caucauuucugugagauug

SEQ ID NO: 1290839 - RNA, 19 nt, Artificial Sequence
  Description of Artificial Sequence: Synthetic oligonucleotide
  Antisense strand to SEQ ID NO: 1290838
caaucucacagaaaugaug

SEQ ID NO: 1290840 - RNA, 19 nt, Artificial Sequence
  Description of Artificial Sequence: Synthetic oligonucleotide
  Sense strand starting at position 3773 of SEQ ID NO: 1241674
cgaugaagauaaugacaaa

SEQ ID NO: 1290841 - RNA, 19 nt, Artificial Sequence
  Description of Artificial Sequence: Synthetic oligonucleotide
  Antisense strand to SEQ ID NO: 1290840
uuugucauuaucuucaucg

SEQ ID NO: 1290842 - RNA, 19 nt, Artificial Sequence
  Description of Artificial Sequence: Synthetic oligonucleotide
  Sense strand starting at position 3892 of SEQ ID NO: 1241674
gagaauccgcggugcagaa

SEQ ID NO: 1290843 - RNA, 19 nt, Artificial Sequence
  Description of Artificial Sequence: Synthetic oligonucleotide
  Antisense strand to SEQ ID NO: 1290842
uucugcaccgcggauucuc

SEQ ID NO: 1290844 - RNA, 19 nt, Artificial Sequence
  Description of Artificial Sequence: Synthetic oligonucleotide
  Sense strand starting at position 12 of SEQ ID NO: 1241675
uaaagugagggcugaauca

SEQ ID NO: 1290845 - RNA, 19 nt, Artificial Sequence
  Description of Artificial Sequence: Synthetic oligonucleotide
  Antisense strand to SEQ ID NO: 1290844
ugauucagcccucacuuua

SEQ ID NO: 1290846 - RNA, 19 nt, Artificial Sequence
  Description of Artificial Sequence: Synthetic oligonucleotide
  Sense strand starting at position 507 of SEQ ID NO: 1241675
uaggaaaguuuggcuagga

SEQ ID NO: 1290847 - RNA, 19 nt, Artificial Sequence
  Description of Artificial Sequence: Synthetic oligonucleotide
  Antisense strand to SEQ ID NO: 1290846
uccuagccaaacuuuccua

SEQ ID NO: 1290848 - RNA, 19 nt, Artificial Sequence
  Description of Artificial Sequence: Synthetic oligonucleotide
  Sense strand starting at position 624 of SEQ ID NO: 1241675
uggcuugagacugagguuu

SEQ ID NO: 1290849 - RNA, 19 nt, Artificial Sequence
  Description of Artificial Sequence: Synthetic oligonucleotide
  Antisense strand to SEQ ID NO: 1290848
aaaccucagucucaagcca

SEQ ID NO: 1290850 - RNA, 19 nt, Artificial Sequence
  Description of Artificial Sequence: Synthetic oligonucleotide
  Sense strand starting at position 818 of SEQ ID NO: 1241675
gcugauuucugcuuauaau

SEQ ID NO: 1290851 - RNA, 19 nt, Artificial Sequence
  Description of Artificial Sequence: Synthetic oligonucleotide
  Antisense strand to SEQ ID NO: 1290850
auuauaagcagaaaucagc

SEQ ID NO: 1290852 - RNA, 19 nt, Artificial Sequence
  Description of Artificial Sequence: Synthetic oligonucleotide
  Sense strand starting at position 957 of SEQ ID NO: 1241675
auggaaaugucauugcauc

SEQ ID NO: 1290853 - RNA, 19 nt, Artificial Sequence
  Description of Artificial Sequence: Synthetic oligonucleotide
  Antisense strand to SEQ ID NO: 1290852
gaugcaaugacauuuccau

SEQ ID NO: 1290854 - RNA, 19 nt, Artificial Sequence
  Description of Artificial Sequence: Synthetic oligonucleotide
  Sense strand starting at position 958 of SEQ ID NO: 1241675
uggaaaugucauugcaucu

SEQ ID NO: 1290855 - RNA, 19 nt, Artificial Sequence
  Description of Artificial Sequence: Synthetic oligonucleotide
  Antisense strand to SEQ ID NO: 1290854
agaugcaaugacauuucca

SEQ ID NO: 1290856 - RNA, 19 nt, Artificial Sequence
  Description of Artificial Sequence: Synthetic oligonucleotide
  Sense strand starting at position 1007 of SEQ ID NO: 1241675
caucuuagaugaccaggua

SEQ ID NO: 1290857 - RNA, 19 nt, Artificial Sequence
  Description of Artificial Sequence: Synthetic oligonucleotide
  Antisense strand to SEQ ID NO: 1290856
uaccuggucaucuaagaug

SEQ ID NO: 1290858 - RNA, 19 nt, Artificial Sequence
  Description of Artificial Sequence: Synthetic oligonucleotide
  Sense strand starting at position 1010 of SEQ ID NO: 1241675
cuuagaugaccagguaauu

SEQ ID NO: 1290859 - RNA, 19 nt, Artificial Sequence
  Description of Artificial Sequence: Synthetic oligonucleotide
  Antisense strand to SEQ ID NO: 1290858
aauuaccuggucaucuaag

SEQ ID NO: 1290860 - RNA, 19 nt, Artificial Sequence
  Description of Artificial Sequence: Synthetic oligonucleotide
  Sense strand starting at position 1073 of SEQ ID NO: 1241675
ggugcucauuugguuccaa

SEQ ID NO: 1290861 - RNA, 19 nt, Artificial Sequence
  Description of Artificial Sequence: Synthetic oligonucleotide
  Antisense strand to SEQ ID NO: 1290860
uuggaaccaaaugagcacc

SEQ ID NO: 1290862 - RNA, 19 nt, Artificial Sequence
  Description of Artificial Sequence: Synthetic oligonucleotide
  Sense strand starting at position 1096 of SEQ ID NO: 1241675
ccuugaucucccugaugau

SEQ ID NO: 1290863 - RNA, 19 nt, Artificial Sequence
  Description of Artificial Sequence: Synthetic oligonucleotide
  Antisense strand to SEQ ID NO: 1290862
aucaucagggagaucaagg

SEQ ID NO: 1290864 - RNA, 19 nt, Artificial Sequence
  Description of Artificial Sequence: Synthetic oligonucleotide
  Sense strand starting at position 1105 of SEQ ID NO: 1241675
cccugaugauguuuggaac

SEQ ID NO: 1290865 - RNA, 19 nt, Artificial Sequence
  Description of Artificial Sequence: Synthetic oligonucleotide
  Antisense strand to SEQ ID NO: 1290864
guuccaaacaucaucaggg

SEQ ID NO: 1290866 - RNA, 19 nt, Artificial Sequence
  Description of Artificial Sequence: Synthetic oligonucleotide
  Sense strand starting at position 1111 of SEQ ID NO: 1241675
ugauguuuggaacgaauca

SEQ ID NO: 1290867 - RNA, 19 nt, Artificial Sequence
  Description of Artificial Sequence: Synthetic oligonucleotide
  Antisense strand to SEQ ID NO: 1290866
ugauucguuccaaacauca

SEQ ID NO: 1290868 - RNA, 19 nt, Artificial Sequence
  Description of Artificial Sequence: Synthetic oligonucleotide
  Sense strand starting at position 1138 of SEQ ID NO: 1241675
uuuaaaucucugggcucaa

SEQ ID NO: 1290869 - RNA, 19 nt, Artificial Sequence
  Description of Artificial Sequence: Synthetic oligonucleotide
  Antisense strand to SEQ ID NO: 1290868
uugagcccagagauuuaaa

SEQ ID NO: 1290870 - RNA, 19 nt, Artificial Sequence
  Description of Artificial Sequence: Synthetic oligonucleotide
  Sense strand starting at position 1139 of SEQ ID NO: 1241675
uuaaaucucugggcucaaa

SEQ ID NO: 1290871 - RNA, 19 nt, Artificial Sequence
  Description of Artificial Sequence: Synthetic oligonucleotide
  Antisense strand to SEQ ID NO: 1290870
uuugagcccagagauuuaa

SEQ ID NO: 1290872 - RNA, 19 nt, Artificial Sequence
  Description of Artificial Sequence: Synthetic oligonucleotide
  Sense strand starting at position 1186 of SEQ ID NO: 1241675
gaugcaguucuccagaggu

SEQ ID NO: 1290873 - RNA, 19 nt, Artificial Sequence
  Description of Artificial Sequence: Synthetic oligonucleotide
  Antisense strand to SEQ ID NO: 1290872
accucuggagaacugcauc

SEQ ID NO: 1290874 - RNA, 19 nt, Artificial Sequence
  Description of Artificial Sequence: Synthetic oligonucleotide
  Sense strand starting at position 1262 of SEQ ID NO: 1241675
aggagaucaccacgagcuu

SEQ ID NO: 1290875 - RNA, 19 nt, Artificial Sequence
  Description of Artificial Sequence: Synthetic oligonucleotide
  Antisense strand to SEQ ID NO: 1290874
aagcucguggugaucuccu

SEQ ID NO: 1290876 - RNA, 19 nt, Artificial Sequence
  Description of Artificial Sequence: Synthetic oligonucleotide
  Sense strand starting at position 1701 of SEQ ID NO: 1241675
auaagugagccuugaucuu

SEQ ID NO: 1290877 - RNA, 19 nt, Artificial Sequence
  Description of Artificial Sequence: Synthetic oligonucleotide
  Antisense strand to SEQ ID NO: 1290876
aagaucaaggcucacuuau

SEQ ID NO: 1290878 - RNA, 19 nt, Artificial Sequence
  Description of Artificial Sequence: Synthetic oligonucleotide
  Sense strand starting at position 1989 of SEQ ID NO: 1241675
gggcaaauagaaggguuau

SEQ ID NO: 1290879 - RNA, 19 nt, Artificial Sequence
  Description of Artificial Sequence: Synthetic oligonucleotide
  Antisense strand to SEQ ID NO: 1290878
auaacccuucuauuugccc

SEQ ID NO: 1290880 - RNA, 19 nt, Artificial Sequence
  Description of Artificial Sequence: Synthetic oligonucleotide
  Sense strand starting at position 1990 of SEQ ID NO: 1241675
ggcaaauagaaggguuaug

SEQ ID NO: 1290881 - RNA, 19 nt, Artificial Sequence
  Description of Artificial Sequence: Synthetic oligonucleotide
  Antisense strand to SEQ ID NO: 1290880
cauaacccuucuauuugcc

SEQ ID NO: 1290882 - RNA, 19 nt, Artificial Sequence
  Description of Artificial Sequence: Synthetic oligonucleotide
  Sense strand starting at position 2001 of SEQ ID NO: 1241675
ggguuaugcaacuaucuga

SEQ ID NO: 1290883 - RNA, 19 nt, Artificial Sequence
  Description of Artificial Sequence: Synthetic oligonucleotide
  Antisense strand to SEQ ID NO: 1290882
ucagauaguugcauaaccc

SEQ ID NO: 1290884 - RNA, 19 nt, Artificial Sequence
  Description of Artificial Sequence: Synthetic oligonucleotide
  Sense strand starting at position 2018 of SEQ ID NO: 1241675
gagcuauuucucuggcugu

SEQ ID NO: 1290885 - RNA, 19 nt, Artificial Sequence
  Description of Artificial Sequence: Synthetic oligonucleotide
  Antisense strand to SEQ ID NO: 1290884
acagccagagaaauagcuc

SEQ ID NO: 1290886 - RNA, 19 nt, Artificial Sequence
  Description of Artificial Sequence: Synthetic oligonucleotide
  Sense strand starting at position 2336 of SEQ ID NO: 1241675
uguccaguggguuaucauu

SEQ ID NO: 1290887 - RNA, 19 nt, Artificial Sequence
  Description of Artificial Sequence: Synthetic oligonucleotide
  Antisense strand to SEQ ID NO: 1290886
aaugauaacccacuggaca

SEQ ID NO: 1290888 - RNA, 19 nt, Artificial Sequence
  Description of Artificial Sequence: Synthetic oligonucleotide
  Sense strand starting at position 2468 of SEQ ID NO: 1241675
ggauguguccaugacccuu

SEQ ID NO: 1290889 - RNA, 19 nt, Artificial Sequence
  Description of Artificial Sequence: Synthetic oligonucleotide
  Antisense strand to SEQ ID NO: 1290888
aagggucauggacacaucc

SEQ ID NO: 1290890 - RNA, 19 nt, Artificial Sequence
  Description of Artificial Sequence: Synthetic oligonucleotide
  Sense strand starting at position 2565 of SEQ ID NO: 1241675
guaugagucccagggagga

SEQ ID NO: 1290891 - RNA, 19 nt, Artificial Sequence
  Description of Artificial Sequence: Synthetic oligonucleotide
  Antisense strand to SEQ ID NO: 1290890
uccucccugggacucauac

SEQ ID NO: 1290892 - RNA, 19 nt, Artificial Sequence
  Description of Artificial Sequence: Synthetic oligonucleotide
  Sense strand starting at position 3042 of SEQ ID NO: 1241675
gggucugaaacaggugauu

SEQ ID NO: 1290893 - RNA, 19 nt, Artificial Sequence
  Description of Artificial Sequence: Synthetic oligonucleotide
  Antisense strand to SEQ ID NO: 1290892
aaucaccuguuucagaccc

SEQ ID NO: 1290894 - RNA, 19 nt, Artificial Sequence
  Description of Artificial Sequence: Synthetic oligonucleotide
  Sense strand starting at position 3044 of SEQ ID NO: 1241675
gucugaaacaggugauuag

SEQ ID NO: 1290895 - RNA, 19 nt, Artificial Sequence
  Description of Artificial Sequence: Synthetic oligonucleotide
  Antisense strand to SEQ ID NO: 1290894
cuaaucaccuguuucagac

SEQ ID NO: 1290896 - RNA, 19 nt, Artificial Sequence
  Description of Artificial Sequence: Synthetic oligonucleotide
  Sense strand starting at position 3061 of SEQ ID NO: 1241675
aggcuuuguauguaggacu

SEQ ID NO: 1290897 - RNA, 19 nt, Artificial Sequence
  Description of Artificial Sequence: Synthetic oligonucleotide
  Antisense strand to SEQ ID NO: 1290896
aguccuacauacaaagccu

SEQ ID NO: 1290898 - RNA, 19 nt, Artificial Sequence
  Description of Artificial Sequence: Synthetic oligonucleotide
  Sense strand starting at position 3189 of SEQ ID NO: 1241675
ccuugaggccucuggaauc

SEQ ID NO: 1290899 - RNA, 19 nt, Artificial Sequence
  Description of Artificial Sequence: Synthetic oligonucleotide
  Antisense strand to SEQ ID NO: 1290898
gauuccagaggccucaagg

SEQ ID NO: 1290900 - RNA, 19 nt, Artificial Sequence
  Description of Artificial Sequence: Synthetic oligonucleotide
  Sense strand starting at position 3200 of SEQ ID NO: 1241675
cuggaauccugcuuggaua

SEQ ID NO: 1290901 - RNA, 19 nt, Artificial Sequence
  Description of Artificial Sequence: Synthetic oligonucleotide
  Antisense strand to SEQ ID NO: 1290900
uauccaagcaggauuccag

SEQ ID NO: 1290902 - RNA, 19 nt, Artificial Sequence
  Description of Artificial Sequence: Synthetic oligonucleotide
  Sense strand starting at position 3201 of SEQ ID NO: 1241675
uggaauccugcuuggauaa

SEQ ID NO: 1290903 - RNA, 19 nt, Artificial Sequence
  Description of Artificial Sequence: Synthetic oligonucleotide
  Antisense strand to SEQ ID NO: 1290902
uuauccaagcaggauucca

SEQ ID NO: 1290904 - RNA, 19 nt, Artificial Sequence
  Description of Artificial Sequence: Synthetic oligonucleotide
  Sense strand starting at position 3202 of SEQ ID NO: 1241675
ggaauccugcuuggauaag

SEQ ID NO: 1290905 - RNA, 19 nt, Artificial Sequence
  Description of Artificial Sequence: Synthetic oligonucleotide
  Antisense strand to SEQ ID NO: 1290904
cuuauccaagcaggauucc

SEQ ID NO: 1290906 - RNA, 19 nt, Artificial Sequence
  Description of Artificial Sequence: Synthetic oligonucleotide
  Sense strand starting at position 3366 of SEQ ID NO: 1241675
uaaugauuuccuggugcuu

SEQ ID NO: 1290907 - RNA, 19 nt, Artificial Sequence
  Description of Artificial Sequence: Synthetic oligonucleotide
  Antisense strand to SEQ ID NO: 1290906
aagcaccaggaaaucauua

SEQ ID NO: 1290908 - RNA, 19 nt, Artificial Sequence
  Description of Artificial Sequence: Synthetic oligonucleotide
  Sense strand starting at position 3542 of SEQ ID NO: 1241675
auugaucacuaacugagua

SEQ ID NO: 1290909 - RNA, 19 nt, Artificial Sequence
  Description of Artificial Sequence: Synthetic oligonucleotide
  Antisense strand to SEQ ID NO: 1290908
uacucaguuagugaucaau

SEQ ID NO: 1290910 - RNA, 19 nt, Artificial Sequence
  Description of Artificial Sequence: Synthetic oligonucleotide
  Sense strand starting at position 3639 of SEQ ID NO: 1241675
accugauggucuguacaag

SEQ ID NO: 1290911 - RNA, 19 nt, Artificial Sequence
  Description of Artificial Sequence: Synthetic oligonucleotide
  Antisense strand to SEQ ID NO: 1290910
cuuguacagaccaucaggu

SEQ ID NO: 1290912 - RNA, 19 nt, Artificial Sequence
  Description of Artificial Sequence: Synthetic oligonucleotide
  Sense strand starting at position 3640 of SEQ ID NO: 1241675
ccugauggucuguacaaga

SEQ ID NO: 1290913 - RNA, 19 nt, Artificial Sequence
  Description of Artificial Sequence: Synthetic oligonucleotide
  Antisense strand to SEQ ID NO: 1290912
ucuuguacagaccaucagg

SEQ ID NO: 1290914 - RNA, 19 nt, Artificial Sequence
  Description of Artificial Sequence: Synthetic oligonucleotide
  Sense strand starting at position 3672 of SEQ ID NO: 1241675
gaugguacacaaugcaaua

SEQ ID NO: 1290915 - RNA, 19 nt, Artificial Sequence
  Description of Artificial Sequence: Synthetic oligonucleotide
  Antisense strand to SEQ ID NO: 1290914
uauugcauuguguaccauc

SEQ ID NO: 1290916 - RNA, 19 nt, Artificial Sequence
  Description of Artificial Sequence: Synthetic oligonucleotide
  Sense strand starting at position 3799 of SEQ ID NO: 1241675
acaugaggccuugaaguca

SEQ ID NO: 1290917 - RNA, 19 nt, Artificial Sequence
  Description of Artificial Sequence: Synthetic oligonucleotide
  Antisense strand to SEQ ID NO: 1290916
ugacuucaaggccucaugu

SEQ ID NO: 1290918 - RNA, 19 nt, Artificial Sequence
  Description of Artificial Sequence: Synthetic oligonucleotide
  Sense strand starting at position 3873 of SEQ ID NO: 1241675
ugaccaauaucuguuaaag

SEQ ID NO: 1290919 - RNA, 19 nt, Artificial Sequence
  Description of Artificial Sequence: Synthetic oligonucleotide
  Antisense strand to SEQ ID NO: 1290918
cuuuaacagauauugguca

SEQ ID NO: 1290920 - RNA, 19 nt, Artificial Sequence
  Description of Artificial Sequence: Synthetic oligonucleotide
  Sense strand starting at position 3910 of SEQ ID NO: 1241675
gucuauugugcacauccaa

SEQ ID NO: 1290921 - RNA, 19 nt, Artificial Sequence
  Description of Artificial Sequence: Synthetic oligonucleotide
  Antisense strand to SEQ ID NO: 1290920
uuggaugugcacaauagac

SEQ ID NO: 1290922 - RNA, 19 nt, Artificial Sequence
  Description of Artificial Sequence: Synthetic oligonucleotide
  Sense strand starting at position 3975 of SEQ ID NO: 1241675
ccacguagucucuaucaac

SEQ ID NO: 1290923 - RNA, 19 nt, Artificial Sequence
  Description of Artificial Sequence: Synthetic oligonucleotide
  Antisense strand to SEQ ID NO: 1290922
guugauagagacuacgugg

SEQ ID NO: 1290924 - RNA, 19 nt, Artificial Sequence
  Description of Artificial Sequence: Synthetic oligonucleotide
  Sense strand starting at position 15 of SEQ ID NO: 1241676
gacuauugguaagugauua

SEQ ID NO: 1290925 - RNA, 19 nt, Artificial Sequence
  Description of Artificial Sequence: Synthetic oligonucleotide
  Antisense strand to SEQ ID NO: 1290924
uaaucacuuaccaauaguc

SEQ ID NO: 1290926 - RNA, 19 nt, Artificial Sequence
  Description of Artificial Sequence: Synthetic oligonucleotide
  Sense strand starting at position 25 of SEQ ID NO: 1241676
aagugauuauggucacuaa

SEQ ID NO: 1290927 - RNA, 19 nt, Artificial Sequence
  Description of Artificial Sequence: Synthetic oligonucleotide
  Antisense strand to SEQ ID NO: 1290926
uuagugaccauaaucacuu

SEQ ID NO: 1290928 - RNA, 19 nt, Artificial Sequence
  Description of Artificial Sequence: Synthetic oligonucleotide
  Sense strand starting at position 26 of SEQ ID NO: 1241676
agugauuauggucacuaac

SEQ ID NO: 1290929 - RNA, 19 nt, Artificial Sequence
  Description of Artificial Sequence: Synthetic oligonucleotide
  Antisense strand to SEQ ID NO: 1290928
guuagugaccauaaucacu

SEQ ID NO: 1290930 - RNA, 19 nt, Artificial Sequence
  Description of Artificial Sequence: Synthetic oligonucleotide
  Sense strand starting at position 28 of SEQ ID NO: 1241676
ugauuauggucacuaacua

SEQ ID NO: 1290931 - RNA, 19 nt, Artificial Sequence
  Description of Artificial Sequence: Synthetic oligonucleotide
  Antisense strand to SEQ ID NO: 1290930
uaguuagugaccauaauca

SEQ ID NO: 1290932 - RNA, 19 nt, Artificial Sequence
  Description of Artificial Sequence: Synthetic oligonucleotide
  Sense strand starting at position 42 of SEQ ID NO: 1241676
aacuaugaguuagugaaga

SEQ ID NO: 1290933 - RNA, 19 nt, Artificial Sequence
  Description of Artificial Sequence: Synthetic oligonucleotide
  Antisense strand to SEQ ID NO: 1290932
ucuucacuaacucauaguu

SEQ ID NO: 1290934 - RNA, 19 nt, Artificial Sequence
  Description of Artificial Sequence: Synthetic oligonucleotide
  Sense strand starting at position 52 of SEQ ID NO: 1241676
uagugaagacaugguuacu

SEQ ID NO: 1290935 - RNA, 19 nt, Artificial Sequence
  Description of Artificial Sequence: Synthetic oligonucleotide
  Antisense strand to SEQ ID NO: 1290934
aguaaccaugucuucacua

SEQ ID NO: 1290936 - RNA, 19 nt, Artificial Sequence
  Description of Artificial Sequence: Synthetic oligonucleotide
  Sense strand starting at position 162 of SEQ ID NO: 1241676
caccaaucccugggaguua

SEQ ID NO: 1290937 - RNA, 19 nt, Artificial Sequence
  Description of Artificial Sequence: Synthetic oligonucleotide
  Antisense strand to SEQ ID NO: 1290936
uaacucccagggauuggug

SEQ ID NO: 1290938 - RNA, 19 nt, Artificial Sequence
  Description of Artificial Sequence: Synthetic oligonucleotide
  Sense strand starting at position 212 of SEQ ID NO: 1241676
ccaugaggaugggcuuauu

SEQ ID NO: 1290939 - RNA, 19 nt, Artificial Sequence
  Description of Artificial Sequence: Synthetic oligonucleotide
  Antisense strand to SEQ ID NO: 1290938
aauaagcccauccucaugg

SEQ ID NO: 1290940 - RNA, 19 nt, Artificial Sequence
  Description of Artificial Sequence: Synthetic oligonucleotide
  Sense strand starting at position 284 of SEQ ID NO: 1241676
ggaugaaaccaugguucca

SEQ ID NO: 1290941 - RNA, 19 nt, Artificial Sequence
  Description of Artificial Sequence: Synthetic oligonucleotide
  Antisense strand to SEQ ID NO: 1290940
uggaaccaugguuucaucc

SEQ ID NO: 1290942 - RNA, 19 nt, Artificial Sequence
  Description of Artificial Sequence: Synthetic oligonucleotide
  Sense strand starting at position 286 of SEQ ID NO: 1241676
augaaaccaugguuccaua

SEQ ID NO: 1290943 - RNA, 19 nt, Artificial Sequence
  Description of Artificial Sequence: Synthetic oligonucleotide
  Antisense strand to SEQ ID NO: 1290942
uauggaaccaugguuucau

SEQ ID NO: 1290944 - RNA, 19 nt, Artificial Sequence
  Description of Artificial Sequence: Synthetic oligonucleotide
  Sense strand starting at position 335 of SEQ ID NO: 1241676
gccacugaugcauagggau

SEQ ID NO: 1290945 - RNA, 19 nt, Artificial Sequence
  Description of Artificial Sequence: Synthetic oligonucleotide
  Antisense strand to SEQ ID NO: 1290944
aucccuaugcaucaguggc

SEQ ID NO: 1290946 - RNA, 19 nt, Artificial Sequence
  Description of Artificial Sequence: Synthetic oligonucleotide
  Sense strand starting at position 462 of SEQ ID NO: 1241676
ggcuuugauccacagaagu

SEQ ID NO: 1290947 - RNA, 19 nt, Artificial Sequence
  Description of Artificial Sequence: Synthetic oligonucleotide
  Antisense strand to SEQ ID NO: 1290946
acuucuguggaucaaagcc

SEQ ID NO: 1290948 - RNA, 19 nt, Artificial Sequence
  Description of Artificial Sequence: Synthetic oligonucleotide
  Sense strand starting at position 567 of SEQ ID NO: 1241676
uggugaaggugaccagaau

SEQ ID NO: 1290949 - RNA, 19 nt, Artificial Sequence
  Description of Artificial Sequence: Synthetic oligonucleotide
  Antisense strand to SEQ ID NO: 1290948
auucuggucaccuucacca

SEQ ID NO: 1290950 - RNA, 19 nt, Artificial Sequence
  Description of Artificial Sequence: Synthetic oligonucleotide
  Sense strand starting at position 639 of SEQ ID NO: 1241676
uguugaucucuagagguga

SEQ ID NO: 1290951 - RNA, 19 nt, Artificial Sequence
  Description of Artificial Sequence: Synthetic oligonucleotide
  Antisense strand to SEQ ID NO: 1290950
ucaccucuagagaucaaca

SEQ ID NO: 1290952 - RNA, 19 nt, Artificial Sequence
  Description of Artificial Sequence: Synthetic oligonucleotide
  Sense strand starting at position 696 of SEQ ID NO: 1241676
aucucaaagcccugaggau

SEQ ID NO: 1290953 - RNA, 19 nt, Artificial Sequence
  Description of Artificial Sequence: Synthetic oligonucleotide
  Antisense strand to SEQ ID NO: 1290952
auccucagggcuuugagau

SEQ ID NO: 1290954 - RNA, 19 nt, Artificial Sequence
  Description of Artificial Sequence: Synthetic oligonucleotide
  Sense strand starting at position 806 of SEQ ID NO: 1241676
ugaggauauugucuuugga

SEQ ID NO: 1290955 - RNA, 19 nt, Artificial Sequence
  Description of Artificial Sequence: Synthetic oligonucleotide
  Antisense strand to SEQ ID NO: 1290954
uccaaagacaauauccuca

SEQ ID NO: 1290956 - RNA, 19 nt, Artificial Sequence
  Description of Artificial Sequence: Synthetic oligonucleotide
  Sense strand starting at position 808 of SEQ ID NO: 1241676
aggauauugucuuuggaga

SEQ ID NO: 1290957 - RNA, 19 nt, Artificial Sequence
  Description of Artificial Sequence: Synthetic oligonucleotide
  Antisense strand to SEQ ID NO: 1290956
ucuccaaagacaauauccu

SEQ ID NO: 1290958 - RNA, 19 nt, Artificial Sequence
  Description of Artificial Sequence: Synthetic oligonucleotide
  Sense strand starting at position 809 of SEQ ID NO: 1241676
ggauauugucuuuggagau

SEQ ID NO: 1290959 - RNA, 19 nt, Artificial Sequence
  Description of Artificial Sequence: Synthetic oligonucleotide
  Antisense strand to SEQ ID NO: 1290958
aucuccaaagacaauaucc

SEQ ID NO: 1290960 - RNA, 19 nt, Artificial Sequence
  Description of Artificial Sequence: Synthetic oligonucleotide
  Sense strand starting at position 813 of SEQ ID NO: 1241676
auugucuuuggagauaguu

SEQ ID NO: 1290961 - RNA, 19 nt, Artificial Sequence
  Description of Artificial Sequence: Synthetic oligonucleotide
  Antisense strand to SEQ ID NO: 1290960
aacuaucuccaaagacaau

SEQ ID NO: 1290962 - RNA, 19 nt, Artificial Sequence
  Description of Artificial Sequence: Synthetic oligonucleotide
  Sense strand starting at position 815 of SEQ ID NO: 1241676
ugucuuuggagauaguuag

SEQ ID NO: 1290963 - RNA, 19 nt, Artificial Sequence
  Description of Artificial Sequence: Synthetic oligonucleotide
  Antisense strand to SEQ ID NO: 1290962
cuaacuaucuccaaagaca

SEQ ID NO: 1290964 - RNA, 19 nt, Artificial Sequence
  Description of Artificial Sequence: Synthetic oligonucleotide
  Sense strand starting at position 819 of SEQ ID NO: 1241676
uuuggagauaguuaguuga

SEQ ID NO: 1290965 - RNA, 19 nt, Artificial Sequence
  Description of Artificial Sequence: Synthetic oligonucleotide
  Antisense strand to SEQ ID NO: 1290964
ucaacuaacuaucuccaaa

SEQ ID NO: 1290966 - RNA, 19 nt, Artificial Sequence
  Description of Artificial Sequence: Synthetic oligonucleotide
  Sense strand starting at position 870 of SEQ ID NO: 1241676
gguaauuuguuugugaagu

SEQ ID NO: 1290967 - RNA, 19 nt, Artificial Sequence
  Description of Artificial Sequence: Synthetic oligonucleotide
  Antisense strand to SEQ ID NO: 1290966
acuucacaaacaaauuacc

SEQ ID NO: 1290968 - RNA, 19 nt, Artificial Sequence
  Description of Artificial Sequence: Synthetic oligonucleotide
  Sense strand starting at position 892 of SEQ ID NO: 1241676
acuauugaucagugggaau

SEQ ID NO: 1290969 - RNA, 19 nt, Artificial Sequence
  Description of Artificial Sequence: Synthetic oligonucleotide
  Antisense strand to SEQ ID NO: 1290968
auucccacugaucaauagu

SEQ ID NO: 1290970 - RNA, 19 nt, Artificial Sequence
  Description of Artificial Sequence: Synthetic oligonucleotide
  Sense strand starting at position 1000 of SEQ ID NO: 1241676
ggaugagacuauucucuuu

SEQ ID NO: 1290971 - RNA, 19 nt, Artificial Sequence
  Description of Artificial Sequence: Synthetic oligonucleotide
  Antisense strand to SEQ ID NO: 1290970
aaagagaauagucucaucc

SEQ ID NO: 1290972 - RNA, 19 nt, Artificial Sequence
  Description of Artificial Sequence: Synthetic oligonucleotide
  Sense strand starting at position 1003 of SEQ ID NO: 1241676
ugagacuauucucuuugga

SEQ ID NO: 1290973 - RNA, 19 nt, Artificial Sequence
  Description of Artificial Sequence: Synthetic oligonucleotide
  Antisense strand to SEQ ID NO: 1290972
uccaaagagaauagucuca

SEQ ID NO: 1290974 - RNA, 19 nt, Artificial Sequence
  Description of Artificial Sequence: Synthetic oligonucleotide
  Sense strand starting at position 1005 of SEQ ID NO: 1241676
agacuauucucuuuggaga

SEQ ID NO: 1290975 - RNA, 19 nt, Artificial Sequence
  Description of Artificial Sequence: Synthetic oligonucleotide
  Antisense strand to SEQ ID NO: 1290974
ucuccaaagagaauagucu

SEQ ID NO: 1290976 - RNA, 19 nt, Artificial Sequence
  Description of Artificial Sequence: Synthetic oligonucleotide
  Sense strand starting at position 1006 of SEQ ID NO: 1241676
gacuauucucuuuggagau

SEQ ID NO: 1290977 - RNA, 19 nt, Artificial Sequence
  Description of Artificial Sequence: Synthetic oligonucleotide
  Antisense strand to SEQ ID NO: 1290976
aucuccaaagagaauaguc

SEQ ID NO: 1290978 - RNA, 19 nt, Artificial Sequence
  Description of Artificial Sequence: Synthetic oligonucleotide
  Sense strand starting at position 1051 of SEQ ID NO: 1241676
ccacuaauuagugggaaug

SEQ ID NO: 1290979 - RNA, 19 nt, Artificial Sequence
  Description of Artificial Sequence: Synthetic oligonucleotide
  Antisense strand to SEQ ID NO: 1290978
cauucccacuaauuagugg

SEQ ID NO: 1290980 - RNA, 19 nt, Artificial Sequence
  Description of Artificial Sequence: Synthetic oligonucleotide
  Sense strand starting at position 1133 of SEQ ID NO: 1241676
cuugauggagagugaaguu

SEQ ID NO: 1290981 - RNA, 19 nt, Artificial Sequence
  Description of Artificial Sequence: Synthetic oligonucleotide
  Antisense strand to SEQ ID NO: 1290980
aacuucacucuccaucaag

SEQ ID NO: 1290982 - RNA, 19 nt, Artificial Sequence
  Description of Artificial Sequence: Synthetic oligonucleotide
  Sense strand starting at position 1539 of SEQ ID NO: 1241676
gucccaauccuugaggcaa

SEQ ID NO: 1290983 - RNA, 19 nt, Artificial Sequence
  Description of Artificial Sequence: Synthetic oligonucleotide
  Antisense strand to SEQ ID NO: 1290982
uugccucaaggauugggac

SEQ ID NO: 1290984 - RNA, 19 nt, Artificial Sequence
  Description of Artificial Sequence: Synthetic oligonucleotide
  Sense strand starting at position 2510 of SEQ ID NO: 1241676
cagacucuucgucagagag

SEQ ID NO: 1290985 - RNA, 19 nt, Artificial Sequence
  Description of Artificial Sequence: Synthetic oligonucleotide
  Antisense strand to SEQ ID NO: 1290984
cucucugacgaagagucug

SEQ ID NO: 1290986 - RNA, 19 nt, Artificial Sequence
  Description of Artificial Sequence: Synthetic oligonucleotide
  Sense strand starting at position 2647 of SEQ ID NO: 1241676
gcagaugccagagauucuu

SEQ ID NO: 1290987 - RNA, 19 nt, Artificial Sequence
  Description of Artificial Sequence: Synthetic oligonucleotide
  Antisense strand to SEQ ID NO: 1290986
aagaaucucuggcaucugc

SEQ ID NO: 1290988 - RNA, 19 nt, Artificial Sequence
  Description of Artificial Sequence: Synthetic oligonucleotide
  Sense strand starting at position 2753 of SEQ ID NO: 1241676
caggacuugcacuagacuu

SEQ ID NO: 1290989 - RNA, 19 nt, Artificial Sequence
  Description of Artificial Sequence: Synthetic oligonucleotide
  Antisense strand to SEQ ID NO: 1290988
aagucuagugcaaguccug

SEQ ID NO: 1290990 - RNA, 19 nt, Artificial Sequence
  Description of Artificial Sequence: Synthetic oligonucleotide
  Sense strand starting at position 2755 of SEQ ID NO: 1241676
ggacuugcacuagacuuua

SEQ ID NO: 1290991 - RNA, 19 nt, Artificial Sequence
  Description of Artificial Sequence: Synthetic oligonucleotide
  Antisense strand to SEQ ID NO: 1290990
uaaagucuagugcaagucc

SEQ ID NO: 1290992 - RNA, 19 nt, Artificial Sequence
  Description of Artificial Sequence: Synthetic oligonucleotide
  Sense strand starting at position 2808 of SEQ ID NO: 1241676
ccuuuacuccagggagaca

SEQ ID NO: 1290993 - RNA, 19 nt, Artificial Sequence
  Description of Artificial Sequence: Synthetic oligonucleotide
  Antisense strand to SEQ ID NO: 1290992
ugucucccuggaguaaagg

SEQ ID NO: 1290994 - RNA, 19 nt, Artificial Sequence
  Description of Artificial Sequence: Synthetic oligonucleotide
  Sense strand starting at position 2830 of SEQ ID NO: 1241676
auguaaacuggcuauuaca

SEQ ID NO: 1290995 - RNA, 19 nt, Artificial Sequence
  Description of Artificial Sequence: Synthetic oligonucleotide
  Antisense strand to SEQ ID NO: 1290994
uguaauagccaguuuacau

SEQ ID NO: 1290996 - RNA, 19 nt, Artificial Sequence
  Description of Artificial Sequence: Synthetic oligonucleotide
  Sense strand starting at position 2838 of SEQ ID NO: 1241676
uggcuauuacaguacaacu

SEQ ID NO: 1290997 - RNA, 19 nt, Artificial Sequence
  Description of Artificial Sequence: Synthetic oligonucleotide
  Antisense strand to SEQ ID NO: 1290996
aguuguacuguaauagcca

SEQ ID NO: 1290998 - RNA, 19 nt, Artificial Sequence
  Description of Artificial Sequence: Synthetic oligonucleotide
  Sense strand starting at position 3168 of SEQ ID NO: 1241676
gucuguauugguagugaug

SEQ ID NO: 1290999 - RNA, 19 nt, Artificial Sequence
  Description of Artificial Sequence: Synthetic oligonucleotide
  Antisense strand to SEQ ID NO: 1290998
caucacuaccaauacagac

SEQ ID NO: 1291000 - RNA, 19 nt, Artificial Sequence
  Description of Artificial Sequence: Synthetic oligonucleotide
  Sense strand starting at position 3217 of SEQ ID NO: 1241676
ccgucuguaucauuuagac

SEQ ID NO: 1291001 - RNA, 19 nt, Artificial Sequence
  Description of Artificial Sequence: Synthetic oligonucleotide
  Antisense strand to SEQ ID NO: 1291000
gucuaaaugauacagacgg

SEQ ID NO: 1291002 - RNA, 19 nt, Artificial Sequence
  Description of Artificial Sequence: Synthetic oligonucleotide
  Sense strand starting at position 3401 of SEQ ID NO: 1241676
uucugagcuccagaccuau

SEQ ID NO: 1291003 - RNA, 19 nt, Artificial Sequence
  Description of Artificial Sequence: Synthetic oligonucleotide
  Antisense strand to SEQ ID NO: 1291002
auaggucuggagcucagaa

SEQ ID NO: 1291004 - RNA, 19 nt, Artificial Sequence
  Description of Artificial Sequence: Synthetic oligonucleotide
  Sense strand starting at position 1 of SEQ ID NO: 1241677
ggcuuugauccacagaagu

SEQ ID NO: 1291005 - RNA, 19 nt, Artificial Sequence
  Description of Artificial Sequence: Synthetic oligonucleotide
  Antisense strand to SEQ ID NO: 1291004
acuucuguggaucaaagcc

SEQ ID NO: 1291006 - RNA, 19 nt, Artificial Sequence
  Description of Artificial Sequence: Synthetic oligonucleotide
  Sense strand starting at position 106 of SEQ ID NO: 1241677
uggugaaggugaccagaau

SEQ ID NO: 1291007 - RNA, 19 nt, Artificial Sequence
  Description of Artificial Sequence: Synthetic oligonucleotide
  Antisense strand to SEQ ID NO: 1291006
auucuggucaccuucacca

SEQ ID NO: 1291008 - RNA, 19 nt, Artificial Sequence
  Description of Artificial Sequence: Synthetic oligonucleotide
  Sense strand starting at position 178 of SEQ ID NO: 1241677
uguugaucucuagagguga

SEQ ID NO: 1291009 - RNA, 19 nt, Artificial Sequence
  Description of Artificial Sequence: Synthetic oligonucleotide
  Antisense strand to SEQ ID NO: 1291008
ucaccucuagagaucaaca

SEQ ID NO: 1291010 - RNA, 19 nt, Artificial Sequence
  Description of Artificial Sequence: Synthetic oligonucleotide
  Sense strand starting at position 192 of SEQ ID NO: 1241677
ggugaagcuaccgacucau

SEQ ID NO: 1291011 - RNA, 19 nt, Artificial Sequence
  Description of Artificial Sequence: Synthetic oligonucleotide
  Antisense strand to SEQ ID NO: 1291010
augagucgguagcuucacc

SEQ ID NO: 1291012 - RNA, 19 nt, Artificial Sequence
  Description of Artificial Sequence: Synthetic oligonucleotide
  Sense strand starting at position 235 of SEQ ID NO: 1241677
aucucaaagcccugaggau

SEQ ID NO: 1291013 - RNA, 19 nt, Artificial Sequence
  Description of Artificial Sequence: Synthetic oligonucleotide
  Antisense strand to SEQ ID NO: 1291012
auccucagggcuuugagau

SEQ ID NO: 1291014 - RNA, 19 nt, Artificial Sequence
  Description of Artificial Sequence: Synthetic oligonucleotide
  Sense strand starting at position 333 of SEQ ID NO: 1241677
gguuacugggucugaggau

SEQ ID NO: 1291015 - RNA, 19 nt, Artificial Sequence
  Description of Artificial Sequence: Synthetic oligonucleotide
  Antisense strand to SEQ ID NO: 1291014
auccucagacccaguaacc

SEQ ID NO: 1291016 - RNA, 19 nt, Artificial Sequence
  Description of Artificial Sequence: Synthetic oligonucleotide
  Sense strand starting at position 345 of SEQ ID NO: 1241677
ugaggauauugucuuugga

SEQ ID NO: 1291017 - RNA, 19 nt, Artificial Sequence
  Description of Artificial Sequence: Synthetic oligonucleotide
  Antisense strand to SEQ ID NO: 1291016
uccaaagacaauauccuca

SEQ ID NO: 1291018 - RNA, 19 nt, Artificial Sequence
  Description of Artificial Sequence: Synthetic oligonucleotide
  Sense strand starting at position 347 of SEQ ID NO: 1241677
aggauauugucuuuggaga

SEQ ID NO: 1291019 - RNA, 19 nt, Artificial Sequence
  Description of Artificial Sequence: Synthetic oligonucleotide
  Antisense strand to SEQ ID NO: 1291018
ucuccaaagacaauauccu

SEQ ID NO: 1291020 - RNA, 19 nt, Artificial Sequence
  Description of Artificial Sequence: Synthetic oligonucleotide
  Sense strand starting at position 348 of SEQ ID NO: 1241677
ggauauugucuuuggagau

SEQ ID NO: 1291021 - RNA, 19 nt, Artificial Sequence
  Description of Artificial Sequence: Synthetic oligonucleotide
  Antisense strand to SEQ ID NO: 1291020
aucuccaaagacaauaucc

SEQ ID NO: 1291022 - RNA, 19 nt, Artificial Sequence
  Description of Artificial Sequence: Synthetic oligonucleotide
  Sense strand starting at position 352 of SEQ ID NO: 1241677
auugucuuuggagauaguu

SEQ ID NO: 1291023 - RNA, 19 nt, Artificial Sequence
  Description of Artificial Sequence: Synthetic oligonucleotide
  Antisense strand to SEQ ID NO: 1291022
aacuaucuccaaagacaau

SEQ ID NO: 1291024 - RNA, 19 nt, Artificial Sequence
  Description of Artificial Sequence: Synthetic oligonucleotide
  Sense strand starting at position 354 of SEQ ID NO: 1241677
ugucuuuggagauaguuag

SEQ ID NO: 1291025 - RNA, 19 nt, Artificial Sequence
  Description of Artificial Sequence: Synthetic oligonucleotide
  Antisense strand to SEQ ID NO: 1291024
cuaacuaucuccaaagaca

SEQ ID NO: 1291026 - RNA, 19 nt, Artificial Sequence
  Description of Artificial Sequence: Synthetic oligonucleotide
  Sense strand starting at position 358 of SEQ ID NO: 1241677
uuuggagauaguuaguuga

SEQ ID NO: 1291027 - RNA, 19 nt, Artificial Sequence
  Description of Artificial Sequence: Synthetic oligonucleotide
  Antisense strand to SEQ ID NO: 1291026
ucaacuaacuaucuccaaa

SEQ ID NO: 1291028 - RNA, 19 nt, Artificial Sequence
  Description of Artificial Sequence: Synthetic oligonucleotide
  Sense strand starting at position 360 of SEQ ID NO: 1241677
uggagauaguuaguugacu

SEQ ID NO: 1291029 - RNA, 19 nt, Artificial Sequence
  Description of Artificial Sequence: Synthetic oligonucleotide
  Antisense strand to SEQ ID NO: 1291028
agucaacuaacuaucucca

SEQ ID NO: 1291030 - RNA, 19 nt, Artificial Sequence
  Description of Artificial Sequence: Synthetic oligonucleotide
  Sense strand starting at position 361 of SEQ ID NO: 1241677
ggagauaguuaguugacuu

SEQ ID NO: 1291031 - RNA, 19 nt, Artificial Sequence
  Description of Artificial Sequence: Synthetic oligonucleotide
  Antisense strand to SEQ ID NO: 1291030
aagucaacuaacuaucucc

SEQ ID NO: 1291032 - RNA, 19 nt, Artificial Sequence
  Description of Artificial Sequence: Synthetic oligonucleotide
  Sense strand starting at position 362 of SEQ ID NO: 1241677
gagauaguuaguugacuug

SEQ ID NO: 1291033 - RNA, 19 nt, Artificial Sequence
  Description of Artificial Sequence: Synthetic oligonucleotide
  Antisense strand to SEQ ID NO: 1291032
caagucaacuaacuaucuc

SEQ ID NO: 1291034 - RNA, 19 nt, Artificial Sequence
  Description of Artificial Sequence: Synthetic oligonucleotide
  Sense strand starting at position 409 of SEQ ID NO: 1241677
gguaauuuguuugugaagu

SEQ ID NO: 1291035 - RNA, 19 nt, Artificial Sequence
  Description of Artificial Sequence: Synthetic oligonucleotide
  Antisense strand to SEQ ID NO: 1291034
acuucacaaacaaauuacc

SEQ ID NO: 1291036 - RNA, 19 nt, Artificial Sequence
  Description of Artificial Sequence: Synthetic oligonucleotide
  Sense strand starting at position 417 of SEQ ID NO: 1241677
guuugugaaguugaacuau

SEQ ID NO: 1291037 - RNA, 19 nt, Artificial Sequence
  Description of Artificial Sequence: Synthetic oligonucleotide
  Antisense strand to SEQ ID NO: 1291036
auaguucaacuucacaaac

SEQ ID NO: 1291038 - RNA, 19 nt, Artificial Sequence
  Description of Artificial Sequence: Synthetic oligonucleotide
  Sense strand starting at position 431 of SEQ ID NO: 1241677
acuauugaucagugggaau

SEQ ID NO: 1291039 - RNA, 19 nt, Artificial Sequence
  Description of Artificial Sequence: Synthetic oligonucleotide
  Antisense strand to SEQ ID NO: 1291038
auucccacugaucaauagu

SEQ ID NO: 1291040 - RNA, 19 nt, Artificial Sequence
  Description of Artificial Sequence: Synthetic oligonucleotide
  Sense strand starting at position 539 of SEQ ID NO: 1241677
ggaugagacuauucucuuu

SEQ ID NO: 1291041 - RNA, 19 nt, Artificial Sequence
  Description of Artificial Sequence: Synthetic oligonucleotide
  Antisense strand to SEQ ID NO: 1291040
aaagagaauagucucaucc

SEQ ID NO: 1291042 - RNA, 19 nt, Artificial Sequence
  Description of Artificial Sequence: Synthetic oligonucleotide
  Sense strand starting at position 542 of SEQ ID NO: 1241677
ugagacuauucucuuugga

SEQ ID NO: 1291043 - RNA, 19 nt, Artificial Sequence
  Description of Artificial Sequence: Synthetic oligonucleotide
  Antisense strand to SEQ ID NO: 1291042
uccaaagagaauagucuca

SEQ ID NO: 1291044 - RNA, 19 nt, Artificial Sequence
  Description of Artificial Sequence: Synthetic oligonucleotide
  Sense strand starting at position 544 of SEQ ID NO: 1241677
agacuauucucuuuggaga

SEQ ID NO: 1291045 - RNA, 19 nt, Artificial Sequence
  Description of Artificial Sequence: Synthetic oligonucleotide
  Antisense strand to SEQ ID NO: 1291044
ucuccaaagagaauagucu

SEQ ID NO: 1291046 - RNA, 19 nt, Artificial Sequence
  Description of Artificial Sequence: Synthetic oligonucleotide
  Sense strand starting at position 545 of SEQ ID NO: 1241677
gacuauucucuuuggagau

SEQ ID NO: 1291047 - RNA, 19 nt, Artificial Sequence
  Description of Artificial Sequence: Synthetic oligonucleotide
  Antisense strand to SEQ ID NO: 1291046
aucuccaaagagaauaguc

SEQ ID NO: 1291048 - RNA, 19 nt, Artificial Sequence
  Description of Artificial Sequence: Synthetic oligonucleotide
  Sense strand starting at position 590 of SEQ ID NO: 1241677
ccacuaauuagugggaaug

SEQ ID NO: 1291049 - RNA, 19 nt, Artificial Sequence
  Description of Artificial Sequence: Synthetic oligonucleotide
  Antisense strand to SEQ ID NO: 1291048
cauucccacuaauuagugg

SEQ ID NO: 1291050 - RNA, 19 nt, Artificial Sequence
  Description of Artificial Sequence: Synthetic oligonucleotide
  Sense strand starting at position 619 of SEQ ID NO: 1241677
uccauagaggucgagucau

SEQ ID NO: 1291051 - RNA, 19 nt, Artificial Sequence
  Description of Artificial Sequence: Synthetic oligonucleotide
  Antisense strand to SEQ ID NO: 1291050
augacucgaccucuaugga

SEQ ID NO: 1291052 - RNA, 19 nt, Artificial Sequence
  Description of Artificial Sequence: Synthetic oligonucleotide
  Sense strand starting at position 672 of SEQ ID NO: 1241677
cuugauggagagugaaguu

SEQ ID NO: 1291053 - RNA, 19 nt, Artificial Sequence
  Description of Artificial Sequence: Synthetic oligonucleotide
  Antisense strand to SEQ ID NO: 1291052
aacuucacucuccaucaag

SEQ ID NO: 1291054 - RNA, 19 nt, Artificial Sequence
  Description of Artificial Sequence: Synthetic oligonucleotide
  Sense strand starting at position 1078 of SEQ ID NO: 1241677
gucccaauccuugaggcaa

SEQ ID NO: 1291055 - RNA, 19 nt, Artificial Sequence
  Description of Artificial Sequence: Synthetic oligonucleotide
  Antisense strand to SEQ ID NO: 1291054
uugccucaaggauugggac

SEQ ID NO: 1291056 - RNA, 19 nt, Artificial Sequence
  Description of Artificial Sequence: Synthetic oligonucleotide
  Sense strand starting at position 1756 of SEQ ID NO: 1241677
ucuacaguguugucgauuu

SEQ ID NO: 1291057 - RNA, 19 nt, Artificial Sequence
  Description of Artificial Sequence: Synthetic oligonucleotide
  Antisense strand to SEQ ID NO: 1291056
aaaucgacaacacuguaga

SEQ ID NO: 1291058 - RNA, 19 nt, Artificial Sequence
  Description of Artificial Sequence: Synthetic oligonucleotide
  Sense strand starting at position 2049 of SEQ ID NO: 1241677
cagacucuucgucagagag

SEQ ID NO: 1291059 - RNA, 19 nt, Artificial Sequence
  Description of Artificial Sequence: Synthetic oligonucleotide
  Antisense strand to SEQ ID NO: 1291058
cucucugacgaagagucug

SEQ ID NO: 1291060 - RNA, 19 nt, Artificial Sequence
  Description of Artificial Sequence: Synthetic oligonucleotide
  Sense strand starting at position 2186 of SEQ ID NO: 1241677
gcagaugccagagauucuu

SEQ ID NO: 1291061 - RNA, 19 nt, Artificial Sequence
  Description of Artificial Sequence: Synthetic oligonucleotide
  Antisense strand to SEQ ID NO: 1291060
aagaaucucuggcaucugc

SEQ ID NO: 1291062 - RNA, 19 nt, Artificial Sequence
  Description of Artificial Sequence: Synthetic oligonucleotide
  Sense strand starting at position 2292 of SEQ ID NO: 1241677
caggacuugcacuagacuu

SEQ ID NO: 1291063 - RNA, 19 nt, Artificial Sequence
  Description of Artificial Sequence: Synthetic oligonucleotide
  Antisense strand to SEQ ID NO: 1291062
aagucuagugcaaguccug

SEQ ID NO: 1291064 - RNA, 19 nt, Artificial Sequence
  Description of Artificial Sequence: Synthetic oligonucleotide
  Sense strand starting at position 2294 of SEQ ID NO: 1241677
ggacuugcacuagacuuua

SEQ ID NO: 1291065 - RNA, 19 nt, Artificial Sequence
  Description of Artificial Sequence: Synthetic oligonucleotide
  Antisense strand to SEQ ID NO: 1291064
uaaagucuagugcaagucc

SEQ ID NO: 1291066 - RNA, 19 nt, Artificial Sequence
  Description of Artificial Sequence: Synthetic oligonucleotide
  Sense strand starting at position 2347 of SEQ ID NO: 1241677
ccuuuacuccagggagaca

SEQ ID NO: 1291067 - RNA, 19 nt, Artificial Sequence
  Description of Artificial Sequence: Synthetic oligonucleotide
  Antisense strand to SEQ ID NO: 1291066
ugucucccuggaguaaagg

SEQ ID NO: 1291068 - RNA, 19 nt, Artificial Sequence
  Description of Artificial Sequence: Synthetic oligonucleotide
  Sense strand starting at position 2369 of SEQ ID NO: 1241677
auguaaacuggcuauuaca

SEQ ID NO: 1291069 - RNA, 19 nt, Artificial Sequence
  Description of Artificial Sequence: Synthetic oligonucleotide
  Antisense strand to SEQ ID NO: 1291068
uguaauagccaguuuacau

SEQ ID NO: 1291070 - RNA, 19 nt, Artificial Sequence
  Description of Artificial Sequence: Synthetic oligonucleotide
  Sense strand starting at position 2377 of SEQ ID NO: 1241677
uggcuauuacaguacaacu

SEQ ID NO: 1291071 - RNA, 19 nt, Artificial Sequence
  Description of Artificial Sequence: Synthetic oligonucleotide
  Antisense strand to SEQ ID NO: 1291070
aguuguacuguaauagcca

SEQ ID NO: 1291072 - RNA, 19 nt, Artificial Sequence
  Description of Artificial Sequence: Synthetic oligonucleotide
  Sense strand starting at position 2707 of SEQ ID NO: 1241677
gucuguauugguagugaug

SEQ ID NO: 1291073 - RNA, 19 nt, Artificial Sequence
  Description of Artificial Sequence: Synthetic oligonucleotide
  Antisense strand to SEQ ID NO: 1291072
caucacuaccaauacagac

SEQ ID NO: 1291074 - RNA, 19 nt, Artificial Sequence
  Description of Artificial Sequence: Synthetic oligonucleotide
  Sense strand starting at position 2756 of SEQ ID NO: 1241677
ccgucuguaucauuuagac

SEQ ID NO: 1291075 - RNA, 19 nt, Artificial Sequence
  Description of Artificial Sequence: Synthetic oligonucleotide
  Antisense strand to SEQ ID NO: 1291074
gucuaaaugauacagacgg

SEQ ID NO: 1291076 - RNA, 19 nt, Artificial Sequence
  Description of Artificial Sequence: Synthetic oligonucleotide
  Sense strand starting at position 2940 of SEQ ID NO: 1241677
uucugagcuccagaccuau

SEQ ID NO: 1291077 - RNA, 19 nt, Artificial Sequence
  Description of Artificial Sequence: Synthetic oligonucleotide
  Antisense strand to SEQ ID NO: 1291076
auaggucuggagcucagaa

SEQ ID NO: 1291078 - RNA, 19 nt, Artificial Sequence
  Description of Artificial Sequence: Synthetic oligonucleotide
  Sense strand starting at position 3454 of SEQ ID NO: 1241677
ccucauacaugguucuaca

SEQ ID NO: 1291079 - RNA, 19 nt, Artificial Sequence
  Description of Artificial Sequence: Synthetic oligonucleotide
  Antisense strand to SEQ ID NO: 1291078
uguagaaccauguaugagg

SEQ ID NO: 1291080 - RNA, 19 nt, Artificial Sequence
  Description of Artificial Sequence: Synthetic oligonucleotide
  Sense strand starting at position 3663 of SEQ ID NO: 1241677
aggagucuucccuaaccuc

SEQ ID NO: 1291081 - RNA, 19 nt, Artificial Sequence
  Description of Artificial Sequence: Synthetic oligonucleotide
  Antisense strand to SEQ ID NO: 1291080
gagguuagggaagacuccu

SEQ ID NO: 1291082 - RNA, 19 nt, Artificial Sequence
  Description of Artificial Sequence: Synthetic oligonucleotide
  Sense strand starting at position 3915 of SEQ ID NO: 1241677
auugucagccgggaaaucu

SEQ ID NO: 1291083 - RNA, 19 nt, Artificial Sequence
  Description of Artificial Sequence: Synthetic oligonucleotide
  Antisense strand to SEQ ID NO: 1291082
agauuucccggcugacaau

SEQ ID NO: 1291084 - RNA, 19 nt, Artificial Sequence
  Description of Artificial Sequence: Synthetic oligonucleotide
  Sense strand starting at position 5 of SEQ ID NO: 1241678
ccuuacauuugugugucua

SEQ ID NO: 1291085 - RNA, 19 nt, Artificial Sequence
  Description of Artificial Sequence: Synthetic oligonucleotide
  Antisense strand to SEQ ID NO: 1291084
uagacacacaaauguaagg

SEQ ID NO: 1291086 - RNA, 19 nt, Artificial Sequence
  Description of Artificial Sequence: Synthetic oligonucleotide
  Sense strand starting at position 6 of SEQ ID NO: 1241678
cuuacauuugugugucuau

SEQ ID NO: 1291087 - RNA, 19 nt, Artificial Sequence
  Description of Artificial Sequence: Synthetic oligonucleotide
  Antisense strand to SEQ ID NO: 1291086
auagacacacaaauguaag

SEQ ID NO: 1291088 - RNA, 19 nt, Artificial Sequence
  Description of Artificial Sequence: Synthetic oligonucleotide
  Sense strand starting at position 55 of SEQ ID NO: 1241678
gccaucuuuagggacugau

SEQ ID NO: 1291089 - RNA, 19 nt, Artificial Sequence
  Description of Artificial Sequence: Synthetic oligonucleotide
  Antisense strand to SEQ ID NO: 1291088
aucagucccuaaagauggc

SEQ ID NO: 1291090 - RNA, 19 nt, Artificial Sequence
  Description of Artificial Sequence: Synthetic oligonucleotide
  Sense strand starting at position 64 of SEQ ID NO: 1241678
agggacugauaggaugauu

SEQ ID NO: 1291091 - RNA, 19 nt, Artificial Sequence
  Description of Artificial Sequence: Synthetic oligonucleotide
  Antisense strand to SEQ ID NO: 1291090
aaucauccuaucagucccu

SEQ ID NO: 1291092 - RNA, 19 nt, Artificial Sequence
  Description of Artificial Sequence: Synthetic oligonucleotide
  Sense strand starting at position 72 of SEQ ID NO: 1241678
auaggaugauuggaaguau

SEQ ID NO: 1291093 - RNA, 19 nt, Artificial Sequence
  Description of Artificial Sequence: Synthetic oligonucleotide
  Antisense strand to SEQ ID NO: 1291092
auacuuccaaucauccuau

SEQ ID NO: 1291094 - RNA, 19 nt, Artificial Sequence
  Description of Artificial Sequence: Synthetic oligonucleotide
  Sense strand starting at position 115 of SEQ ID NO: 1241678
gccuguuuccuggaucuag

SEQ ID NO: 1291095 - RNA, 19 nt, Artificial Sequence
  Description of Artificial Sequence: Synthetic oligonucleotide
  Antisense strand to SEQ ID NO: 1291094
cuagauccaggaaacaggc

SEQ ID NO: 1291096 - RNA, 19 nt, Artificial Sequence
  Description of Artificial Sequence: Synthetic oligonucleotide
  Sense strand starting at position 203 of SEQ ID NO: 1241678
accucauaggugcaacaaa

SEQ ID NO: 1291097 - RNA, 19 nt, Artificial Sequence
  Description of Artificial Sequence: Synthetic oligonucleotide
  Antisense strand to SEQ ID NO: 1291096
uuuguugcaccuaugaggu

SEQ ID NO: 1291098 - RNA, 19 nt, Artificial Sequence
  Description of Artificial Sequence: Synthetic oligonucleotide
  Sense strand starting at position 223 of SEQ ID NO: 1241678
gguuuagauaggugaccuu

SEQ ID NO: 1291099 - RNA, 19 nt, Artificial Sequence
  Description of Artificial Sequence: Synthetic oligonucleotide
  Antisense strand to SEQ ID NO: 1291098
aaggucaccuaucuaaacc

SEQ ID NO: 1291100 - RNA, 19 nt, Artificial Sequence
  Description of Artificial Sequence: Synthetic oligonucleotide
  Sense strand starting at position 645 of SEQ ID NO: 1241678
ggguaauaauaccucuucu

SEQ ID NO: 1291101 - RNA, 19 nt, Artificial Sequence
  Description of Artificial Sequence: Synthetic oligonucleotide
  Antisense strand to SEQ ID NO: 1291100
agaagagguauuauuaccc

SEQ ID NO: 1291102 - RNA, 19 nt, Artificial Sequence
  Description of Artificial Sequence: Synthetic oligonucleotide
  Sense strand starting at position 699 of SEQ ID NO: 1241678
uuauuucugguguguaauu

SEQ ID NO: 1291103 - RNA, 19 nt, Artificial Sequence
  Description of Artificial Sequence: Synthetic oligonucleotide
  Antisense strand to SEQ ID NO: 1291102
aauuacacaccagaaauaa

SEQ ID NO: 1291104 - RNA, 19 nt, Artificial Sequence
  Description of Artificial Sequence: Synthetic oligonucleotide
  Sense strand starting at position 852 of SEQ ID NO: 1241678
gguuucgaaaggcaguuau

SEQ ID NO: 1291105 - RNA, 19 nt, Artificial Sequence
  Description of Artificial Sequence: Synthetic oligonucleotide
  Antisense strand to SEQ ID NO: 1291104
auaacugccuuucgaaacc

SEQ ID NO: 1291106 - RNA, 19 nt, Artificial Sequence
  Description of Artificial Sequence: Synthetic oligonucleotide
  Sense strand starting at position 913 of SEQ ID NO: 1241678
guguacaccucucuaaaug

SEQ ID NO: 1291107 - RNA, 19 nt, Artificial Sequence
  Description of Artificial Sequence: Synthetic oligonucleotide
  Antisense strand to SEQ ID NO: 1291106
cauuuagagagguguacac

SEQ ID NO: 1291108 - RNA, 19 nt, Artificial Sequence
  Description of Artificial Sequence: Synthetic oligonucleotide
  Sense strand starting at position 924 of SEQ ID NO: 1241678
ucuaaauggucucuggaug

SEQ ID NO: 1291109 - RNA, 19 nt, Artificial Sequence
  Description of Artificial Sequence: Synthetic oligonucleotide
  Antisense strand to SEQ ID NO: 1291108
cauccagagaccauuuaga

SEQ ID NO: 1291110 - RNA, 19 nt, Artificial Sequence
  Description of Artificial Sequence: Synthetic oligonucleotide
  Sense strand starting at position 925 of SEQ ID NO: 1241678
cuaaauggucucuggaugu

SEQ ID NO: 1291111 - RNA, 19 nt, Artificial Sequence
  Description of Artificial Sequence: Synthetic oligonucleotide
  Antisense strand to SEQ ID NO: 1291110
acauccagagaccauuuag

SEQ ID NO: 1291112 - RNA, 19 nt, Artificial Sequence
  Description of Artificial Sequence: Synthetic oligonucleotide
  Sense strand starting at position 952 of SEQ ID NO: 1241678
uuucuaacugcucaagaag

SEQ ID NO: 1291113 - RNA, 19 nt, Artificial Sequence
  Description of Artificial Sequence: Synthetic oligonucleotide
  Antisense strand to SEQ ID NO: 1291112
cuucuugagcaguuagaaa

SEQ ID NO: 1291114 - RNA, 19 nt, Artificial Sequence
  Description of Artificial Sequence: Synthetic oligonucleotide
  Sense strand starting at position 955 of SEQ ID NO: 1241678
cuaacugcucaagaaggua

SEQ ID NO: 1291115 - RNA, 19 nt, Artificial Sequence
  Description of Artificial Sequence: Synthetic oligonucleotide
  Antisense strand to SEQ ID NO: 1291114
uaccuucuugagcaguuag

SEQ ID NO: 1291116 - RNA, 19 nt, Artificial Sequence
  Description of Artificial Sequence: Synthetic oligonucleotide
  Sense strand starting at position 992 of SEQ ID NO: 1241678
augucuugguguuuaaauc

SEQ ID NO: 1291117 - RNA, 19 nt, Artificial Sequence
  Description of Artificial Sequence: Synthetic oligonucleotide
  Antisense strand to SEQ ID NO: 1291116
gauuuaaacaccaagacau

SEQ ID NO: 1291118 - RNA, 19 nt, Artificial Sequence
  Description of Artificial Sequence: Synthetic oligonucleotide
  Sense strand starting at position 993 of SEQ ID NO: 1241678
ugucuugguguuuaaauca

SEQ ID NO: 1291119 - RNA, 19 nt, Artificial Sequence
  Description of Artificial Sequence: Synthetic oligonucleotide
  Antisense strand to SEQ ID NO: 1291118
ugauuuaaacaccaagaca

SEQ ID NO: 1291120 - RNA, 19 nt, Artificial Sequence
  Description of Artificial Sequence: Synthetic oligonucleotide
  Sense strand starting at position 1000 of SEQ ID NO: 1241678
guguuuaaaucaccagcau

SEQ ID NO: 1291121 - RNA, 19 nt, Artificial Sequence
  Description of Artificial Sequence: Synthetic oligonucleotide
  Antisense strand to SEQ ID NO: 1291120
augcuggugauuuaaacac

SEQ ID NO: 1291122 - RNA, 19 nt, Artificial Sequence
  Description of Artificial Sequence: Synthetic oligonucleotide
  Sense strand starting at position 1089 of SEQ ID NO: 1241678
cgauuagggaagugaaugu

SEQ ID NO: 1291123 - RNA, 19 nt, Artificial Sequence
  Description of Artificial Sequence: Synthetic oligonucleotide
  Antisense strand to SEQ ID NO: 1291122
acauucacuucccuaaucg

SEQ ID NO: 1291124 - RNA, 19 nt, Artificial Sequence
  Description of Artificial Sequence: Synthetic oligonucleotide
  Sense strand starting at position 1096 of SEQ ID NO: 1241678
ggaagugaaugucuccuga

SEQ ID NO: 1291125 - RNA, 19 nt, Artificial Sequence
  Description of Artificial Sequence: Synthetic oligonucleotide
  Antisense strand to SEQ ID NO: 1291124
ucaggagacauucacuucc

SEQ ID NO: 1291126 - RNA, 19 nt, Artificial Sequence
  Description of Artificial Sequence: Synthetic oligonucleotide
  Sense strand starting at position 1098 of SEQ ID NO: 1241678
aagugaaugucuccugagu

SEQ ID NO: 1291127 - RNA, 19 nt, Artificial Sequence
  Description of Artificial Sequence: Synthetic oligonucleotide
  Antisense strand to SEQ ID NO: 1291126
acucaggagacauucacuu

SEQ ID NO: 1291128 - RNA, 19 nt, Artificial Sequence
  Description of Artificial Sequence: Synthetic oligonucleotide
  Sense strand starting at position 1105 of SEQ ID NO: 1241678
ugucuccugaguuagggaa

SEQ ID NO: 1291129 - RNA, 19 nt, Artificial Sequence
  Description of Artificial Sequence: Synthetic oligonucleotide
  Antisense strand to SEQ ID NO: 1291128
uucccuaacucaggagaca

SEQ ID NO: 1291130 - RNA, 19 nt, Artificial Sequence
  Description of Artificial Sequence: Synthetic oligonucleotide
  Sense strand starting at position 1322 of SEQ ID NO: 1241678
agacgcgaugcugaaacau

SEQ ID NO: 1291131 - RNA, 19 nt, Artificial Sequence
  Description of Artificial Sequence: Synthetic oligonucleotide
  Antisense strand to SEQ ID NO: 1291130
auguuucagcaucgcgucu

SEQ ID NO: 1291132 - RNA, 19 nt, Artificial Sequence
  Description of Artificial Sequence: Synthetic oligonucleotide
  Sense strand starting at position 1582 of SEQ ID NO: 1241678
ucuugcuuucgucuuagua

SEQ ID NO: 1291133 - RNA, 19 nt, Artificial Sequence
  Description of Artificial Sequence: Synthetic oligonucleotide
  Antisense strand to SEQ ID NO: 1291132
uacuaagacgaaagcaaga

SEQ ID NO: 1291134 - RNA, 19 nt, Artificial Sequence
  Description of Artificial Sequence: Synthetic oligonucleotide
  Sense strand starting at position 3054 of SEQ ID NO: 1241678
auuggucgugcagagcuaa

SEQ ID NO: 1291135 - RNA, 19 nt, Artificial Sequence
  Description of Artificial Sequence: Synthetic oligonucleotide
  Antisense strand to SEQ ID NO: 1291134
uuagcucugcacgaccaau

SEQ ID NO: 1291136 - RNA, 19 nt, Artificial Sequence
  Description of Artificial Sequence: Synthetic oligonucleotide
  Sense strand starting at position 3640 of SEQ ID NO: 1241678
gagcaaggcccuuagauaa

SEQ ID NO: 1291137 - RNA, 19 nt, Artificial Sequence
  Description of Artificial Sequence: Synthetic oligonucleotide
  Antisense strand to SEQ ID NO: 1291136
uuaucuaagggccuugcuc

SEQ ID NO: 1291138 - RNA, 19 nt, Artificial Sequence
  Description of Artificial Sequence: Synthetic oligonucleotide
  Sense strand starting at position 3678 of SEQ ID NO: 1241678
ccugaaagucacuguugug

SEQ ID NO: 1291139 - RNA, 19 nt, Artificial Sequence
  Description of Artificial Sequence: Synthetic oligonucleotide
  Antisense strand to SEQ ID NO: 1291138
cacaacagugacuuucagg

SEQ ID NO: 1291140 - RNA, 19 nt, Artificial Sequence
  Description of Artificial Sequence: Synthetic oligonucleotide
  Sense strand starting at position 3684 of SEQ ID NO: 1241678
agucacuguugugcagaau

SEQ ID NO: 1291141 - RNA, 19 nt, Artificial Sequence
  Description of Artificial Sequence: Synthetic oligonucleotide
  Antisense strand to SEQ ID NO: 1291140
auucugcacaacagugacu

SEQ ID NO: 1291142 - RNA, 19 nt, Artificial Sequence
  Description of Artificial Sequence: Synthetic oligonucleotide
  Sense strand starting at position 3742 of SEQ ID NO: 1241678
uccucagcagcaugagaau

SEQ ID NO: 1291143 - RNA, 19 nt, Artificial Sequence
  Description of Artificial Sequence: Synthetic oligonucleotide
  Antisense strand to SEQ ID NO: 1291142
auucucaugcugcugagga

SEQ ID NO: 1291144 - RNA, 19 nt, Artificial Sequence
  Description of Artificial Sequence: Synthetic oligonucleotide
  Sense strand starting at position 3751 of SEQ ID NO: 1241678
gcaugagaauugccuaaga

SEQ ID NO: 1291145 - RNA, 19 nt, Artificial Sequence
  Description of Artificial Sequence: Synthetic oligonucleotide
  Antisense strand to SEQ ID NO: 1291144
ucuuaggcaauucucaugc

SEQ ID NO: 1291146 - RNA, 19 nt, Artificial Sequence
  Description of Artificial Sequence: Synthetic oligonucleotide
  Sense strand starting at position 3753 of SEQ ID NO: 1241678
augagaauugccuaagagc

SEQ ID NO: 1291147 - RNA, 19 nt, Artificial Sequence
  Description of Artificial Sequence: Synthetic oligonucleotide
  Antisense strand to SEQ ID NO: 1291146
gcucuuaggcaauucucau

SEQ ID NO: 1291148 - RNA, 19 nt, Artificial Sequence
  Description of Artificial Sequence: Synthetic oligonucleotide
  Sense strand starting at position 3761 of SEQ ID NO: 1241678
ugccuaagagcuuaugcga

SEQ ID NO: 1291149 - RNA, 19 nt, Artificial Sequence
  Description of Artificial Sequence: Synthetic oligonucleotide
  Antisense strand to SEQ ID NO: 1291148
ucgcauaagcucuuaggca

SEQ ID NO: 1291150 - RNA, 19 nt, Artificial Sequence
  Description of Artificial Sequence: Synthetic oligonucleotide
  Sense strand starting at position 3836 of SEQ ID NO: 1241678
acgagaucccuuggaaauu

SEQ ID NO: 1291151 - RNA, 19 nt, Artificial Sequence
  Description of Artificial Sequence: Synthetic oligonucleotide
  Antisense strand to SEQ ID NO: 1291150
aauuuccaagggaucucgu

SEQ ID NO: 1291152 - RNA, 19 nt, Artificial Sequence
  Description of Artificial Sequence: Synthetic oligonucleotide
  Sense strand starting at position 3837 of SEQ ID NO: 1241678
cgagaucccuuggaaauuu

SEQ ID NO: 1291153 - RNA, 19 nt, Artificial Sequence
  Description of Artificial Sequence: Synthetic oligonucleotide
  Antisense strand to SEQ ID NO: 1291152
aaauuuccaagggaucucg

SEQ ID NO: 1291154 - RNA, 19 nt, Artificial Sequence
  Description of Artificial Sequence: Synthetic oligonucleotide
  Sense strand starting at position 3847 of SEQ ID NO: 1241678
uggaaauuugugugcaccu

SEQ ID NO: 1291155 - RNA, 19 nt, Artificial Sequence
  Description of Artificial Sequence: Synthetic oligonucleotide
  Antisense strand to SEQ ID NO: 1291154
aggugcacacaaauuucca

SEQ ID NO: 1291156 - RNA, 19 nt, Artificial Sequence
  Description of Artificial Sequence: Synthetic oligonucleotide
  Sense strand starting at position 3848 of SEQ ID NO: 1241678
ggaaauuugugugcaccuu

SEQ ID NO: 1291157 - RNA, 19 nt, Artificial Sequence
  Description of Artificial Sequence: Synthetic oligonucleotide
  Antisense strand to SEQ ID NO: 1291156
aaggugcacacaaauuucc

SEQ ID NO: 1291158 - RNA, 19 nt, Artificial Sequence
  Description of Artificial Sequence: Synthetic oligonucleotide
  Sense strand starting at position 3933 of SEQ ID NO: 1241678
uucccucuggacugaguaa

SEQ ID NO: 1291159 - RNA, 19 nt, Artificial Sequence
  Description of Artificial Sequence: Synthetic oligonucleotide
  Antisense strand to SEQ ID NO: 1291158
uuacucaguccagagggaa

SEQ ID NO: 1291160 - RNA, 19 nt, Artificial Sequence
  Description of Artificial Sequence: Synthetic oligonucleotide
  Sense strand starting at position 3968 of SEQ ID NO: 1241678
uuguguuagccuggaauag

SEQ ID NO: 1291161 - RNA, 19 nt, Artificial Sequence
  Description of Artificial Sequence: Synthetic oligonucleotide
  Antisense strand to SEQ ID NO: 1291160
cuauuccaggcuaacacaa

SEQ ID NO: 1291162 - RNA, 19 nt, Artificial Sequence
  Description of Artificial Sequence: Synthetic oligonucleotide
  Sense strand starting at position 3969 of SEQ ID NO: 1241678
uguguuagccuggaauagu

SEQ ID NO: 1291163 - RNA, 19 nt, Artificial Sequence
  Description of Artificial Sequence: Synthetic oligonucleotide
  Antisense strand to SEQ ID NO: 1291162
acuauuccaggcuaacaca

SEQ ID NO: 1291164 - RNA, 19 nt, Artificial Sequence
  Description of Artificial Sequence: Synthetic oligonucleotide
  Sense strand starting at position 30 of SEQ ID NO: 1241679
ggguaauaauaccucuucu

SEQ ID NO: 1291165 - RNA, 19 nt, Artificial Sequence
  Description of Artificial Sequence: Synthetic oligonucleotide
  Antisense strand to SEQ ID NO: 1291164
agaagagguauuauuaccc

SEQ ID NO: 1291166 - RNA, 19 nt, Artificial Sequence
  Description of Artificial Sequence: Synthetic oligonucleotide
  Sense strand starting at position 68 of SEQ ID NO: 1241679
gccucuagguauguuguua

SEQ ID NO: 1291167 - RNA, 19 nt, Artificial Sequence
  Description of Artificial Sequence: Synthetic oligonucleotide
  Antisense strand to SEQ ID NO: 1291166
uaacaacauaccuagaggc

SEQ ID NO: 1291168 - RNA, 19 nt, Artificial Sequence
  Description of Artificial Sequence: Synthetic oligonucleotide
  Sense strand starting at position 84 of SEQ ID NO: 1241679
uuauuucugguguguaauu

SEQ ID NO: 1291169 - RNA, 19 nt, Artificial Sequence
  Description of Artificial Sequence: Synthetic oligonucleotide
  Antisense strand to SEQ ID NO: 1291168
aauuacacaccagaaauaa

SEQ ID NO: 1291170 - RNA, 19 nt, Artificial Sequence
  Description of Artificial Sequence: Synthetic oligonucleotide
  Sense strand starting at position 237 of SEQ ID NO: 1241679
gguuucgaaaggcaguuau

SEQ ID NO: 1291171 - RNA, 19 nt, Artificial Sequence
  Description of Artificial Sequence: Synthetic oligonucleotide
  Antisense strand to SEQ ID NO: 1291170
auaacugccuuucgaaacc

SEQ ID NO: 1291172 - RNA, 19 nt, Artificial Sequence
  Description of Artificial Sequence: Synthetic oligonucleotide
  Sense strand starting at position 298 of SEQ ID NO: 1241679
guguacaccucucuaaaug

SEQ ID NO: 1291173 - RNA, 19 nt, Artificial Sequence
  Description of Artificial Sequence: Synthetic oligonucleotide
  Antisense strand to SEQ ID NO: 1291172
cauuuagagagguguacac

SEQ ID NO: 1291174 - RNA, 19 nt, Artificial Sequence
  Description of Artificial Sequence: Synthetic oligonucleotide
  Sense strand starting at position 309 of SEQ ID NO: 1241679
ucuaaauggucucuggaug

SEQ ID NO: 1291175 - RNA, 19 nt, Artificial Sequence
  Description of Artificial Sequence: Synthetic oligonucleotide
  Antisense strand to SEQ ID NO: 1291174
cauccagagaccauuuaga

SEQ ID NO: 1291176 - RNA, 19 nt, Artificial Sequence
  Description of Artificial Sequence: Synthetic oligonucleotide
  Sense strand starting at position 310 of SEQ ID NO: 1241679
cuaaauggucucuggaugu

SEQ ID NO: 1291177 - RNA, 19 nt, Artificial Sequence
  Description of Artificial Sequence: Synthetic oligonucleotide
  Antisense strand to SEQ ID NO: 1291176
acauccagagaccauuuag

SEQ ID NO: 1291178 - RNA, 19 nt, Artificial Sequence
  Description of Artificial Sequence: Synthetic oligonucleotide
  Sense strand starting at position 337 of SEQ ID NO: 1241679
uuucuaacugcucaagaag

SEQ ID NO: 1291179 - RNA, 19 nt, Artificial Sequence
  Description of Artificial Sequence: Synthetic oligonucleotide
  Antisense strand to SEQ ID NO: 1291178
cuucuugagcaguuagaaa

SEQ ID NO: 1291180 - RNA, 19 nt, Artificial Sequence
  Description of Artificial Sequence: Synthetic oligonucleotide
  Sense strand starting at position 340 of SEQ ID NO: 1241679
cuaacugcucaagaaggua

SEQ ID NO: 1291181 - RNA, 19 nt, Artificial Sequence
  Description of Artificial Sequence: Synthetic oligonucleotide
  Antisense strand to SEQ ID NO: 1291180
uaccuucuugagcaguuag

SEQ ID NO: 1291182 - RNA, 19 nt, Artificial Sequence
  Description of Artificial Sequence: Synthetic oligonucleotide
  Sense strand starting at position 377 of SEQ ID NO: 1241679
augucuugguguuuaaauc

SEQ ID NO: 1291183 - RNA, 19 nt, Artificial Sequence
  Description of Artificial Sequence: Synthetic oligonucleotide
  Antisense strand to SEQ ID NO: 1291182
gauuuaaacaccaagacau

SEQ ID NO: 1291184 - RNA, 19 nt, Artificial Sequence
  Description of Artificial Sequence: Synthetic oligonucleotide
  Sense strand starting at position 378 of SEQ ID NO: 1241679
ugucuugguguuuaaauca

SEQ ID NO: 1291185 - RNA, 19 nt, Artificial Sequence
  Description of Artificial Sequence: Synthetic oligonucleotide
  Antisense strand to SEQ ID NO: 1291184
ugauuuaaacaccaagaca

SEQ ID NO: 1291186 - RNA, 19 nt, Artificial Sequence
  Description of Artificial Sequence: Synthetic oligonucleotide
  Sense strand starting at position 385 of SEQ ID NO: 1241679
guguuuaaaucaccagcau

SEQ ID NO: 1291187 - RNA, 19 nt, Artificial Sequence
  Description of Artificial Sequence: Synthetic oligonucleotide
  Antisense strand to SEQ ID NO: 1291186
augcuggugauuuaaacac

SEQ ID NO: 1291188 - RNA, 19 nt, Artificial Sequence
  Description of Artificial Sequence: Synthetic oligonucleotide
  Sense strand starting at position 474 of SEQ ID NO: 1241679
cgauuagggaagugaaugu

SEQ ID NO: 1291189 - RNA, 19 nt, Artificial Sequence
  Description of Artificial Sequence: Synthetic oligonucleotide
  Antisense strand to SEQ ID NO: 1291188
acauucacuucccuaaucg

SEQ ID NO: 1291190 - RNA, 19 nt, Artificial Sequence
  Description of Artificial Sequence: Synthetic oligonucleotide
  Sense strand starting at position 481 of SEQ ID NO: 1241679
ggaagugaaugucuccuga

SEQ ID NO: 1291191 - RNA, 19 nt, Artificial Sequence
  Description of Artificial Sequence: Synthetic oligonucleotide
  Antisense strand to SEQ ID NO: 1291190
ucaggagacauucacuucc

SEQ ID NO: 1291192 - RNA, 19 nt, Artificial Sequence
  Description of Artificial Sequence: Synthetic oligonucleotide
  Sense strand starting at position 483 of SEQ ID NO: 1241679
aagugaaugucuccugagu

SEQ ID NO: 1291193 - RNA, 19 nt, Artificial Sequence
  Description of Artificial Sequence: Synthetic oligonucleotide
  Antisense strand to SEQ ID NO: 1291192
acucaggagacauucacuu

SEQ ID NO: 1291194 - RNA, 19 nt, Artificial Sequence
  Description of Artificial Sequence: Synthetic oligonucleotide
  Sense strand starting at position 490 of SEQ ID NO: 1241679
ugucuccugaguuagggaa

SEQ ID NO: 1291195 - RNA, 19 nt, Artificial Sequence
  Description of Artificial Sequence: Synthetic oligonucleotide
  Antisense strand to SEQ ID NO: 1291194
uucccuaacucaggagaca

SEQ ID NO: 1291196 - RNA, 19 nt, Artificial Sequence
  Description of Artificial Sequence: Synthetic oligonucleotide
  Sense strand starting at position 707 of SEQ ID NO: 1241679
agacgcgaugcugaaacau

SEQ ID NO: 1291197 - RNA, 19 nt, Artificial Sequence
  Description of Artificial Sequence: Synthetic oligonucleotide
  Antisense strand to SEQ ID NO: 1291196
auguuucagcaucgcgucu

SEQ ID NO: 1291198 - RNA, 19 nt, Artificial Sequence
  Description of Artificial Sequence: Synthetic oligonucleotide
  Sense strand starting at position 967 of SEQ ID NO: 1241679
ucuugcuuucgucuuagua

SEQ ID NO: 1291199 - RNA, 19 nt, Artificial Sequence
  Description of Artificial Sequence: Synthetic oligonucleotide
  Antisense strand to SEQ ID NO: 1291198
uacuaagacgaaagcaaga

SEQ ID NO: 1291200 - RNA, 19 nt, Artificial Sequence
  Description of Artificial Sequence: Synthetic oligonucleotide
  Sense strand starting at position 1127 of SEQ ID NO: 1241679
ggaccaaccugaugaggaa

SEQ ID NO: 1291201 - RNA, 19 nt, Artificial Sequence
  Description of Artificial Sequence: Synthetic oligonucleotide
  Antisense strand to SEQ ID NO: 1291200
uuccucaucagguuggucc

SEQ ID NO: 1291202 - RNA, 19 nt, Artificial Sequence
  Description of Artificial Sequence: Synthetic oligonucleotide
  Sense strand starting at position 2439 of SEQ ID NO: 1241679
auuggucgugcagagcuaa

SEQ ID NO: 1291203 - RNA, 19 nt, Artificial Sequence
  Description of Artificial Sequence: Synthetic oligonucleotide
  Antisense strand to SEQ ID NO: 1291202
uuagcucugcacgaccaau

SEQ ID NO: 1291204 - RNA, 19 nt, Artificial Sequence
  Description of Artificial Sequence: Synthetic oligonucleotide
  Sense strand starting at position 3025 of SEQ ID NO: 1241679
gagcaaggcccuuagauaa

SEQ ID NO: 1291205 - RNA, 19 nt, Artificial Sequence
  Description of Artificial Sequence: Synthetic oligonucleotide
  Antisense strand to SEQ ID NO: 1291204
uuaucuaagggccuugcuc

SEQ ID NO: 1291206 - RNA, 19 nt, Artificial Sequence
  Description of Artificial Sequence: Synthetic oligonucleotide
  Sense strand starting at position 3063 of SEQ ID NO: 1241679
ccugaaagucacuguugug

SEQ ID NO: 1291207 - RNA, 19 nt, Artificial Sequence
  Description of Artificial Sequence: Synthetic oligonucleotide
  Antisense strand to SEQ ID NO: 1291206
cacaacagugacuuucagg

SEQ ID NO: 1291208 - RNA, 19 nt, Artificial Sequence
  Description of Artificial Sequence: Synthetic oligonucleotide
  Sense strand starting at position 3069 of SEQ ID NO: 1241679
agucacuguugugcagaau

SEQ ID NO: 1291209 - RNA, 19 nt, Artificial Sequence
  Description of Artificial Sequence: Synthetic oligonucleotide
  Antisense strand to SEQ ID NO: 1291208
auucugcacaacagugacu

SEQ ID NO: 1291210 - RNA, 19 nt, Artificial Sequence
  Description of Artificial Sequence: Synthetic oligonucleotide
  Sense strand starting at position 3127 of SEQ ID NO: 1241679
uccucagcagcaugagaau

SEQ ID NO: 1291211 - RNA, 19 nt, Artificial Sequence
  Description of Artificial Sequence: Synthetic oligonucleotide
  Antisense strand to SEQ ID NO: 1291210
auucucaugcugcugagga

SEQ ID NO: 1291212 - RNA, 19 nt, Artificial Sequence
  Description of Artificial Sequence: Synthetic oligonucleotide
  Sense strand starting at position 3136 of SEQ ID NO: 1241679
gcaugagaauugccuaaga

SEQ ID NO: 1291213 - RNA, 19 nt, Artificial Sequence
  Description of Artificial Sequence: Synthetic oligonucleotide
  Antisense strand to SEQ ID NO: 1291212
ucuuaggcaauucucaugc

SEQ ID NO: 1291214 - RNA, 19 nt, Artificial Sequence
  Description of Artificial Sequence: Synthetic oligonucleotide
  Sense strand starting at position 3138 of SEQ ID NO: 1241679
augagaauugccuaagagc

SEQ ID NO: 1291215 - RNA, 19 nt, Artificial Sequence
  Description of Artificial Sequence: Synthetic oligonucleotide
  Antisense strand to SEQ ID NO: 1291214
gcucuuaggcaauucucau

SEQ ID NO: 1291216 - RNA, 19 nt, Artificial Sequence
  Description of Artificial Sequence: Synthetic oligonucleotide
  Sense strand starting at position 3146 of SEQ ID NO: 1241679
ugccuaagagcuuaugcga

SEQ ID NO: 1291217 - RNA, 19 nt, Artificial Sequence
  Description of Artificial Sequence: Synthetic oligonucleotide
  Antisense strand to SEQ ID NO: 1291216
ucgcauaagcucuuaggca

SEQ ID NO: 1291218 - RNA, 19 nt, Artificial Sequence
  Description of Artificial Sequence: Synthetic oligonucleotide
  Sense strand starting at position 3221 of SEQ ID NO: 1241679
acgagaucccuuggaaauu

SEQ ID NO: 1291219 - RNA, 19 nt, Artificial Sequence
  Description of Artificial Sequence: Synthetic oligonucleotide
  Antisense strand to SEQ ID NO: 1291218
aauuuccaagggaucucgu

SEQ ID NO: 1291220 - RNA, 19 nt, Artificial Sequence
  Description of Artificial Sequence: Synthetic oligonucleotide
  Sense strand starting at position 3222 of SEQ ID NO: 1241679
cgagaucccuuggaaauuu

SEQ ID NO: 1291221 - RNA, 19 nt, Artificial Sequence
  Description of Artificial Sequence: Synthetic oligonucleotide
  Antisense strand to SEQ ID NO: 1291220
aaauuuccaagggaucucg

SEQ ID NO: 1291222 - RNA, 19 nt, Artificial Sequence
  Description of Artificial Sequence: Synthetic oligonucleotide
  Sense strand starting at position 3232 of SEQ ID NO: 1241679
uggaaauuugugugcaccu

SEQ ID NO: 1291223 - RNA, 19 nt, Artificial Sequence
  Description of Artificial Sequence: Synthetic oligonucleotide
  Antisense strand to SEQ ID NO: 1291222
aggugcacacaaauuucca

SEQ ID NO: 1291224 - RNA, 19 nt, Artificial Sequence
  Description of Artificial Sequence: Synthetic oligonucleotide
  Sense strand starting at position 3233 of SEQ ID NO: 1241679
ggaaauuugugugcaccuu

SEQ ID NO: 1291225 - RNA, 19 nt, Artificial Sequence
  Description of Artificial Sequence: Synthetic oligonucleotide
  Antisense strand to SEQ ID NO: 1291224
aaggugcacacaaauuucc

SEQ ID NO: 1291226 - RNA, 19 nt, Artificial Sequence
  Description of Artificial Sequence: Synthetic oligonucleotide
  Sense strand starting at position 3318 of SEQ ID NO: 1241679
uucccucuggacugaguaa

SEQ ID NO: 1291227 - RNA, 19 nt, Artificial Sequence
  Description of Artificial Sequence: Synthetic oligonucleotide
  Antisense strand to SEQ ID NO: 1291226
uuacucaguccagagggaa

SEQ ID NO: 1291228 - RNA, 19 nt, Artificial Sequence
  Description of Artificial Sequence: Synthetic oligonucleotide
  Sense strand starting at position 3353 of SEQ ID NO: 1241679
uuguguuagccuggaauag

SEQ ID NO: 1291229 - RNA, 19 nt, Artificial Sequence
  Description of Artificial Sequence: Synthetic oligonucleotide
  Antisense strand to SEQ ID NO: 1291228
cuauuccaggcuaacacaa

SEQ ID NO: 1291230 - RNA, 19 nt, Artificial Sequence
  Description of Artificial Sequence: Synthetic oligonucleotide
  Sense strand starting at position 3354 of SEQ ID NO: 1241679
uguguuagccuggaauagu

SEQ ID NO: 1291231 - RNA, 19 nt, Artificial Sequence
  Description of Artificial Sequence: Synthetic oligonucleotide
  Antisense strand to SEQ ID NO: 1291230
acuauuccaggcuaacaca

SEQ ID NO: 1291232 - RNA, 19 nt, Artificial Sequence
  Description of Artificial Sequence: Synthetic oligonucleotide
  Sense strand starting at position 3789 of SEQ ID NO: 1241679
gcuguuguccugucccuaa

SEQ ID NO: 1291233 - RNA, 19 nt, Artificial Sequence
  Description of Artificial Sequence: Synthetic oligonucleotide
  Antisense strand to SEQ ID NO: 1291232
uuagggacaggacaacagc

SEQ ID NO: 1291234 - RNA, 19 nt, Artificial Sequence
  Description of Artificial Sequence: Synthetic oligonucleotide
  Sense strand starting at position 3957 of SEQ ID NO: 1241679
ggagucauuaggugucugu

SEQ ID NO: 1291235 - RNA, 19 nt, Artificial Sequence
  Description of Artificial Sequence: Synthetic oligonucleotide
  Antisense strand to SEQ ID NO: 1291234
acagacaccuaaugacucc

SEQ ID NO: 1291236 - RNA, 19 nt, Artificial Sequence
  Description of Artificial Sequence: Synthetic oligonucleotide
  Sense strand starting at position 3961 of SEQ ID NO: 1241679
ucauuaggugucugucuuu

SEQ ID NO: 1291237 - RNA, 19 nt, Artificial Sequence
  Description of Artificial Sequence: Synthetic oligonucleotide
  Antisense strand to SEQ ID NO: 1291236
aaagacagacaccuaauga

SEQ ID NO: 1291238 - RNA, 19 nt, Artificial Sequence
  Description of Artificial Sequence: Synthetic oligonucleotide
  Sense strand starting at position 3964 of SEQ ID NO: 1241679
uuaggugucugucuuuaga

SEQ ID NO: 1291239 - RNA, 19 nt, Artificial Sequence
  Description of Artificial Sequence: Synthetic oligonucleotide
  Antisense strand to SEQ ID NO: 1291238
ucuaaagacagacaccuaa

SEQ ID NO: 1291240 - RNA, 19 nt, Artificial Sequence
  Description of Artificial Sequence: Synthetic oligonucleotide
  Sense strand starting at position 3966 of SEQ ID NO: 1241679
aggugucugucuuuagaca

SEQ ID NO: 1291241 - RNA, 19 nt, Artificial Sequence
  Description of Artificial Sequence: Synthetic oligonucleotide
  Antisense strand to SEQ ID NO: 1291240
ugucuaaagacagacaccu

SEQ ID NO: 1291242 - RNA, 19 nt, Artificial Sequence
  Description of Artificial Sequence: Synthetic oligonucleotide
  Sense strand starting at position 3967 of SEQ ID NO: 1241679
ggugucugucuuuagacau

SEQ ID NO: 1291243 - RNA, 19 nt, Artificial Sequence
  Description of Artificial Sequence: Synthetic oligonucleotide
  Antisense strand to SEQ ID NO: 1291242
augucuaaagacagacacc

SEQ ID NO: 1291244 - RNA, 19 nt, Artificial Sequence
  Description of Artificial Sequence: Synthetic oligonucleotide
  Sense strand starting at position 95 of SEQ ID NO: 1241680
agacgcgaugcugaaacau

SEQ ID NO: 1291245 - RNA, 19 nt, Artificial Sequence
  Description of Artificial Sequence: Synthetic oligonucleotide
  Antisense strand to SEQ ID NO: 1291244
auguuucagcaucgcgucu

SEQ ID NO: 1291246 - RNA, 19 nt, Artificial Sequence
  Description of Artificial Sequence: Synthetic oligonucleotide
  Sense strand starting at position 355 of SEQ ID NO: 1241680
ucuugcuuucgucuuagua

SEQ ID NO: 1291247 - RNA, 19 nt, Artificial Sequence
  Description of Artificial Sequence: Synthetic oligonucleotide
  Antisense strand to SEQ ID NO: 1291246
uacuaagacgaaagcaaga

SEQ ID NO: 1291248 - RNA, 19 nt, Artificial Sequence
  Description of Artificial Sequence: Synthetic oligonucleotide
  Sense strand starting at position 515 of SEQ ID NO: 1241680
ggaccaaccugaugaggaa

SEQ ID NO: 1291249 - RNA, 19 nt, Artificial Sequence
  Description of Artificial Sequence: Synthetic oligonucleotide
  Antisense strand to SEQ ID NO: 1291248
uuccucaucagguuggucc

SEQ ID NO: 1291250 - RNA, 19 nt, Artificial Sequence
  Description of Artificial Sequence: Synthetic oligonucleotide
  Sense strand starting at position 1827 of SEQ ID NO: 1241680
auuggucgugcagagcuaa

SEQ ID NO: 1291251 - RNA, 19 nt, Artificial Sequence
  Description of Artificial Sequence: Synthetic oligonucleotide
  Antisense strand to SEQ ID NO: 1291250
uuagcucugcacgaccaau

SEQ ID NO: 1291252 - RNA, 19 nt, Artificial Sequence
  Description of Artificial Sequence: Synthetic oligonucleotide
  Sense strand starting at position 2413 of SEQ ID NO: 1241680
gagcaaggcccuuagauaa

SEQ ID NO: 1291253 - RNA, 19 nt, Artificial Sequence
  Description of Artificial Sequence: Synthetic oligonucleotide
  Antisense strand to SEQ ID NO: 1291252
uuaucuaagggccuugcuc

SEQ ID NO: 1291254 - RNA, 19 nt, Artificial Sequence
  Description of Artificial Sequence: Synthetic oligonucleotide
  Sense strand starting at position 2451 of SEQ ID NO: 1241680
ccugaaagucacuguugug

SEQ ID NO: 1291255 - RNA, 19 nt, Artificial Sequence
  Description of Artificial Sequence: Synthetic oligonucleotide
  Antisense strand to SEQ ID NO: 1291254
cacaacagugacuuucagg

SEQ ID NO: 1291256 - RNA, 19 nt, Artificial Sequence
  Description of Artificial Sequence: Synthetic oligonucleotide
  Sense strand starting at position 2457 of SEQ ID NO: 1241680
agucacuguugugcagaau

SEQ ID NO: 1291257 - RNA, 19 nt, Artificial Sequence
  Description of Artificial Sequence: Synthetic oligonucleotide
  Antisense strand to SEQ ID NO: 1291256
auucugcacaacagugacu

SEQ ID NO: 1291258 - RNA, 19 nt, Artificial Sequence
  Description of Artificial Sequence: Synthetic oligonucleotide
  Sense strand starting at position 2515 of SEQ ID NO: 1241680
uccucagcagcaugagaau

SEQ ID NO: 1291259 - RNA, 19 nt, Artificial Sequence
  Description of Artificial Sequence: Synthetic oligonucleotide
  Antisense strand to SEQ ID NO: 1291258
auucucaugcugcugagga

SEQ ID NO: 1291260 - RNA, 19 nt, Artificial Sequence
  Description of Artificial Sequence: Synthetic oligonucleotide
  Sense strand starting at position 2524 of SEQ ID NO: 1241680
gcaugagaauugccuaaga

SEQ ID NO: 1291261 - RNA, 19 nt, Artificial Sequence
  Description of Artificial Sequence: Synthetic oligonucleotide
  Antisense strand to SEQ ID NO: 1291260
ucuuaggcaauucucaugc

SEQ ID NO: 1291262 - RNA, 19 nt, Artificial Sequence
  Description of Artificial Sequence: Synthetic oligonucleotide
  Sense strand starting at position 2526 of SEQ ID NO: 1241680
augagaauugccuaagagc

SEQ ID NO: 1291263 - RNA, 19 nt, Artificial Sequence
  Description of Artificial Sequence: Synthetic oligonucleotide
  Antisense strand to SEQ ID NO: 1291262
gcucuuaggcaauucucau

SEQ ID NO: 1291264 - RNA, 19 nt, Artificial Sequence
  Description of Artificial Sequence: Synthetic oligonucleotide
  Sense strand starting at position 2529 of SEQ ID NO: 1241680
agaauugccuaagagcuua

SEQ ID NO: 1291265 - RNA, 19 nt, Artificial Sequence
  Description of Artificial Sequence: Synthetic oligonucleotide
  Antisense strand to SEQ ID NO: 1291264
uaagcucuuaggcaauucu

SEQ ID NO: 1291266 - RNA, 19 nt, Artificial Sequence
  Description of Artificial Sequence: Synthetic oligonucleotide
  Sense strand starting at position 2534 of SEQ ID NO: 1241680
ugccuaagagcuuaugcga

SEQ ID NO: 1291267 - RNA, 19 nt, Artificial Sequence
  Description of Artificial Sequence: Synthetic oligonucleotide
  Antisense strand to SEQ ID NO: 1291266
ucgcauaagcucuuaggca

SEQ ID NO: 1291268 - RNA, 19 nt, Artificial Sequence
  Description of Artificial Sequence: Synthetic oligonucleotide
  Sense strand starting at position 2609 of SEQ ID NO: 1241680
acgagaucccuuggaaauu

SEQ ID NO: 1291269 - RNA, 19 nt, Artificial Sequence
  Description of Artificial Sequence: Synthetic oligonucleotide
  Antisense strand to SEQ ID NO: 1291268
aauuuccaagggaucucgu

SEQ ID NO: 1291270 - RNA, 19 nt, Artificial Sequence
  Description of Artificial Sequence: Synthetic oligonucleotide
  Sense strand starting at position 2610 of SEQ ID NO: 1241680
cgagaucccuuggaaauuu

SEQ ID NO: 1291271 - RNA, 19 nt, Artificial Sequence
  Description of Artificial Sequence: Synthetic oligonucleotide
  Antisense strand to SEQ ID NO: 1291270
aaauuuccaagggaucucg

SEQ ID NO: 1291272 - RNA, 19 nt, Artificial Sequence
  Description of Artificial Sequence: Synthetic oligonucleotide
  Sense strand starting at position 2618 of SEQ ID NO: 1241680
cuuggaaauuugugugcac

SEQ ID NO: 1291273 - RNA, 19 nt, Artificial Sequence
  Description of Artificial Sequence: Synthetic oligonucleotide
  Antisense strand to SEQ ID NO: 1291272
gugcacacaaauuuccaag

SEQ ID NO: 1291274 - RNA, 19 nt, Artificial Sequence
  Description of Artificial Sequence: Synthetic oligonucleotide
  Sense strand starting at position 2620 of SEQ ID NO: 1241680
uggaaauuugugugcaccu

SEQ ID NO: 1291275 - RNA, 19 nt, Artificial Sequence
  Description of Artificial Sequence: Synthetic oligonucleotide
  Antisense strand to SEQ ID NO: 1291274
aggugcacacaaauuucca

SEQ ID NO: 1291276 - RNA, 19 nt, Artificial Sequence
  Description of Artificial Sequence: Synthetic oligonucleotide
  Sense strand starting at position 2621 of SEQ ID NO: 1241680
ggaaauuugugugcaccuu

SEQ ID NO: 1291277 - RNA, 19 nt, Artificial Sequence
  Description of Artificial Sequence: Synthetic oligonucleotide
  Antisense strand to SEQ ID NO: 1291276
aaggugcacacaaauuucc

SEQ ID NO: 1291278 - RNA, 19 nt, Artificial Sequence
  Description of Artificial Sequence: Synthetic oligonucleotide
  Sense strand starting at position 2706 of SEQ ID NO: 1241680
uucccucuggacugaguaa

SEQ ID NO: 1291279 - RNA, 19 nt, Artificial Sequence
  Description of Artificial Sequence: Synthetic oligonucleotide
  Antisense strand to SEQ ID NO: 1291278
uuacucaguccagagggaa

SEQ ID NO: 1291280 - RNA, 19 nt, Artificial Sequence
  Description of Artificial Sequence: Synthetic oligonucleotide
  Sense strand starting at position 2741 of SEQ ID NO: 1241680
uuguguuagccuggaauag

SEQ ID NO: 1291281 - RNA, 19 nt, Artificial Sequence
  Description of Artificial Sequence: Synthetic oligonucleotide
  Antisense strand to SEQ ID NO: 1291280
cuauuccaggcuaacacaa

SEQ ID NO: 1291282 - RNA, 19 nt, Artificial Sequence
  Description of Artificial Sequence: Synthetic oligonucleotide
  Sense strand starting at position 2742 of SEQ ID NO: 1241680
uguguuagccuggaauagu

SEQ ID NO: 1291283 - RNA, 19 nt, Artificial Sequence
  Description of Artificial Sequence: Synthetic oligonucleotide
  Antisense strand to SEQ ID NO: 1291282
acuauuccaggcuaacaca

SEQ ID NO: 1291284 - RNA, 19 nt, Artificial Sequence
  Description of Artificial Sequence: Synthetic oligonucleotide
  Sense strand starting at position 3177 of SEQ ID NO: 1241680
gcuguuguccugucccuaa

SEQ ID NO: 1291285 - RNA, 19 nt, Artificial Sequence
  Description of Artificial Sequence: Synthetic oligonucleotide
  Antisense strand to SEQ ID NO: 1291284
uuagggacaggacaacagc

SEQ ID NO: 1291286 - RNA, 19 nt, Artificial Sequence
  Description of Artificial Sequence: Synthetic oligonucleotide
  Sense strand starting at position 3345 of SEQ ID NO: 1241680
ggagucauuaggugucugu

SEQ ID NO: 1291287 - RNA, 19 nt, Artificial Sequence
  Description of Artificial Sequence: Synthetic oligonucleotide
  Antisense strand to SEQ ID NO: 1291286
acagacaccuaaugacucc

SEQ ID NO: 1291288 - RNA, 19 nt, Artificial Sequence
  Description of Artificial Sequence: Synthetic oligonucleotide
  Sense strand starting at position 3348 of SEQ ID NO: 1241680
gucauuaggugucugucuu

SEQ ID NO: 1291289 - RNA, 19 nt, Artificial Sequence
  Description of Artificial Sequence: Synthetic oligonucleotide
  Antisense strand to SEQ ID NO: 1291288
aagacagacaccuaaugac

SEQ ID NO: 1291290 - RNA, 19 nt, Artificial Sequence
  Description of Artificial Sequence: Synthetic oligonucleotide
  Sense strand starting at position 3349 of SEQ ID NO: 1241680
ucauuaggugucugucuuu

SEQ ID NO: 1291291 - RNA, 19 nt, Artificial Sequence
  Description of Artificial Sequence: Synthetic oligonucleotide
  Antisense strand to SEQ ID NO: 1291290
aaagacagacaccuaauga

SEQ ID NO: 1291292 - RNA, 19 nt, Artificial Sequence
  Description of Artificial Sequence: Synthetic oligonucleotide
  Sense strand starting at position 3352 of SEQ ID NO: 1241680
uuaggugucugucuuuaga

SEQ ID NO: 1291293 - RNA, 19 nt, Artificial Sequence
  Description of Artificial Sequence: Synthetic oligonucleotide
  Antisense strand to SEQ ID NO: 1291292
ucuaaagacagacaccuaa

SEQ ID NO: 1291294 - RNA, 19 nt, Artificial Sequence
  Description of Artificial Sequence: Synthetic oligonucleotide
  Sense strand starting at position 3354 of SEQ ID NO: 1241680
aggugucugucuuuagaca

SEQ ID NO: 1291295 - RNA, 19 nt, Artificial Sequence
  Description of Artificial Sequence: Synthetic oligonucleotide
  Antisense strand to SEQ ID NO: 1291294
ugucuaaagacagacaccu

SEQ ID NO: 1291296 - RNA, 19 nt, Artificial Sequence
  Description of Artificial Sequence: Synthetic oligonucleotide
  Sense strand starting at position 3355 of SEQ ID NO: 1241680
ggugucugucuuuagacau

SEQ ID NO: 1291297 - RNA, 19 nt, Artificial Sequence
  Description of Artificial Sequence: Synthetic oligonucleotide
  Antisense strand to SEQ ID NO: 1291296
augucuaaagacagacacc

SEQ ID NO: 1291298 - RNA, 19 nt, Artificial Sequence
  Description of Artificial Sequence: Synthetic oligonucleotide
  Sense strand starting at position 3374 of SEQ ID NO: 1241680
uuagucagcucuuuaguag

SEQ ID NO: 1291299 - RNA, 19 nt, Artificial Sequence
  Description of Artificial Sequence: Synthetic oligonucleotide
  Antisense strand to SEQ ID NO: 1291298
cuacuaaagagcugacuaa

SEQ ID NO: 1291300 - RNA, 19 nt, Artificial Sequence
  Description of Artificial Sequence: Synthetic oligonucleotide
  Sense strand starting at position 3433 of SEQ ID NO: 1241680
guuagaacccuuggaauaa

SEQ ID NO: 1291301 - RNA, 19 nt, Artificial Sequence
  Description of Artificial Sequence: Synthetic oligonucleotide
  Antisense strand to SEQ ID NO: 1291300
uuauuccaaggguucuaac

SEQ ID NO: 1291302 - RNA, 19 nt, Artificial Sequence
  Description of Artificial Sequence: Synthetic oligonucleotide
  Sense strand starting at position 3434 of SEQ ID NO: 1241680
uuagaacccuuggaauaau

SEQ ID NO: 1291303 - RNA, 19 nt, Artificial Sequence
  Description of Artificial Sequence: Synthetic oligonucleotide
  Antisense strand to SEQ ID NO: 1291302
auuauuccaaggguucuaa

SEQ ID NO: 1291304 - RNA, 19 nt, Artificial Sequence
  Description of Artificial Sequence: Synthetic oligonucleotide
  Sense strand starting at position 3445 of SEQ ID NO: 1241680
ggaauaauuucucaugcac

SEQ ID NO: 1291305 - RNA, 19 nt, Artificial Sequence
  Description of Artificial Sequence: Synthetic oligonucleotide
  Antisense strand to SEQ ID NO: 1291304
gugcaugagaaauuauucc

SEQ ID NO: 1291306 - RNA, 19 nt, Artificial Sequence
  Description of Artificial Sequence: Synthetic oligonucleotide
  Sense strand starting at position 3571 of SEQ ID NO: 1241680
augacucauucugcagaag

SEQ ID NO: 1291307 - RNA, 19 nt, Artificial Sequence
  Description of Artificial Sequence: Synthetic oligonucleotide
  Antisense strand to SEQ ID NO: 1291306
cuucugcagaaugagucau

SEQ ID NO: 1291308 - RNA, 19 nt, Artificial Sequence
  Description of Artificial Sequence: Synthetic oligonucleotide
  Sense strand starting at position 3710 of SEQ ID NO: 1241680
ugccuuuggauucggaaua

SEQ ID NO: 1291309 - RNA, 19 nt, Artificial Sequence
  Description of Artificial Sequence: Synthetic oligonucleotide
  Antisense strand to SEQ ID NO: 1291308
uauuccgaauccaaaggca

SEQ ID NO: 1291310 - RNA, 19 nt, Artificial Sequence
  Description of Artificial Sequence: Synthetic oligonucleotide
  Sense strand starting at position 3722 of SEQ ID NO: 1241680
cggaauaucuccucugcaa

SEQ ID NO: 1291311 - RNA, 19 nt, Artificial Sequence
  Description of Artificial Sequence: Synthetic oligonucleotide
  Antisense strand to SEQ ID NO: 1291310
uugcagaggagauauuccg

SEQ ID NO: 1291312 - RNA, 19 nt, Artificial Sequence
  Description of Artificial Sequence: Synthetic oligonucleotide
  Sense strand starting at position 3735 of SEQ ID NO: 1241680
cugcaauugugucuucuga

SEQ ID NO: 1291313 - RNA, 19 nt, Artificial Sequence
  Description of Artificial Sequence: Synthetic oligonucleotide
  Antisense strand to SEQ ID NO: 1291312
ucagaagacacaauugcag

SEQ ID NO: 1291314 - RNA, 19 nt, Artificial Sequence
  Description of Artificial Sequence: Synthetic oligonucleotide
  Sense strand starting at position 3737 of SEQ ID NO: 1241680
gcaauugugucuucugaua

SEQ ID NO: 1291315 - RNA, 19 nt, Artificial Sequence
  Description of Artificial Sequence: Synthetic oligonucleotide
  Antisense strand to SEQ ID NO: 1291314
uaucagaagacacaauugc

SEQ ID NO: 1291316 - RNA, 19 nt, Artificial Sequence
  Description of Artificial Sequence: Synthetic oligonucleotide
  Sense strand starting at position 3774 of SEQ ID NO: 1241680
ucuacauggccagaguuua

SEQ ID NO: 1291317 - RNA, 19 nt, Artificial Sequence
  Description of Artificial Sequence: Synthetic oligonucleotide
  Antisense strand to SEQ ID NO: 1291316
uaaacucuggccauguaga

SEQ ID NO: 1291318 - RNA, 19 nt, Artificial Sequence
  Description of Artificial Sequence: Synthetic oligonucleotide
  Sense strand starting at position 3782 of SEQ ID NO: 1241680
gccagaguuuaggccauuu

SEQ ID NO: 1291319 - RNA, 19 nt, Artificial Sequence
  Description of Artificial Sequence: Synthetic oligonucleotide
  Antisense strand to SEQ ID NO: 1291318
aaauggccuaaacucuggc

SEQ ID NO: 1291320 - RNA, 19 nt, Artificial Sequence
  Description of Artificial Sequence: Synthetic oligonucleotide
  Sense strand starting at position 3956 of SEQ ID NO: 1241680
uccacuuugccuugaagau

SEQ ID NO: 1291321 - RNA, 19 nt, Artificial Sequence
  Description of Artificial Sequence: Synthetic oligonucleotide
  Antisense strand to SEQ ID NO: 1291320
aucuucaaggcaaagugga

SEQ ID NO: 1291322 - RNA, 19 nt, Artificial Sequence
  Description of Artificial Sequence: Synthetic oligonucleotide
  Sense strand starting at position 3957 of SEQ ID NO: 1241680
ccacuuugccuugaagaug

SEQ ID NO: 1291323 - RNA, 19 nt, Artificial Sequence
  Description of Artificial Sequence: Synthetic oligonucleotide
  Antisense strand to SEQ ID NO: 1291322
caucuucaaggcaaagugg

SEQ ID NO: 1291324 - RNA, 19 nt, Artificial Sequence
  Description of Artificial Sequence: Synthetic oligonucleotide
  Sense strand starting at position 292 of SEQ ID NO: 1241681
uggugaugcgcaucgguaa

SEQ ID NO: 1291325 - RNA, 19 nt, Artificial Sequence
  Description of Artificial Sequence: Synthetic oligonucleotide
  Antisense strand to SEQ ID NO: 1291324
uuaccgaugcgcaucacca

SEQ ID NO: 1291326 - RNA, 19 nt, Artificial Sequence
  Description of Artificial Sequence: Synthetic oligonucleotide
  Sense strand starting at position 519 of SEQ ID NO: 1241681
agcaaugaauggcucuaau

SEQ ID NO: 1291327 - RNA, 19 nt, Artificial Sequence
  Description of Artificial Sequence: Synthetic oligonucleotide
  Antisense strand to SEQ ID NO: 1291326
auuagagccauucauugcu

SEQ ID NO: 1291328 - RNA, 19 nt, Artificial Sequence
  Description of Artificial Sequence: Synthetic oligonucleotide
  Sense strand starting at position 522 of SEQ ID NO: 1241681
aaugaauggcucuaaugug

SEQ ID NO: 1291329 - RNA, 19 nt, Artificial Sequence
  Description of Artificial Sequence: Synthetic oligonucleotide
  Antisense strand to SEQ ID NO: 1291328
cacauuagagccauucauu

SEQ ID NO: 1291330 - RNA, 19 nt, Artificial Sequence
  Description of Artificial Sequence: Synthetic oligonucleotide
  Sense strand starting at position 567 of SEQ ID NO: 1241681
aaguguacagauuguaagu

SEQ ID NO: 1291331 - RNA, 19 nt, Artificial Sequence
  Description of Artificial Sequence: Synthetic oligonucleotide
  Antisense strand to SEQ ID NO: 1291330
acuuacaaucuguacacuu

SEQ ID NO: 1291332 - RNA, 19 nt, Artificial Sequence
  Description of Artificial Sequence: Synthetic oligonucleotide
  Sense strand starting at position 645 of SEQ ID NO: 1241681
agucauaauuugcaguaau

SEQ ID NO: 1291333 - RNA, 19 nt, Artificial Sequence
  Description of Artificial Sequence: Synthetic oligonucleotide
  Antisense strand to SEQ ID NO: 1291332
auuacugcaaauuaugacu

SEQ ID NO: 1291334 - RNA, 19 nt, Artificial Sequence
  Description of Artificial Sequence: Synthetic oligonucleotide
  Sense strand starting at position 738 of SEQ ID NO: 1241681
uagucauugccuuaacagg

SEQ ID NO: 1291335 - RNA, 19 nt, Artificial Sequence
  Description of Artificial Sequence: Synthetic oligonucleotide
  Antisense strand to SEQ ID NO: 1291334
ccuguuaaggcaaugacua

SEQ ID NO: 1291336 - RNA, 19 nt, Artificial Sequence
  Description of Artificial Sequence: Synthetic oligonucleotide
  Sense strand starting at position 753 of SEQ ID NO: 1241681
caggauuuauuagaguuac

SEQ ID NO: 1291337 - RNA, 19 nt, Artificial Sequence
  Description of Artificial Sequence: Synthetic oligonucleotide
  Antisense strand to SEQ ID NO: 1291336
guaacucuaauaaauccug

SEQ ID NO: 1291338 - RNA, 19 nt, Artificial Sequence
  Description of Artificial Sequence: Synthetic oligonucleotide
  Sense strand starting at position 781 of SEQ ID NO: 1241681
uugaaagaauggcuagauu

SEQ ID NO: 1291339 - RNA, 19 nt, Artificial Sequence
  Description of Artificial Sequence: Synthetic oligonucleotide
  Antisense strand to SEQ ID NO: 1291338
aaucuagccauucuuucaa

SEQ ID NO: 1291340 - RNA, 19 nt, Artificial Sequence
  Description of Artificial Sequence: Synthetic oligonucleotide
  Sense strand starting at position 1050 of SEQ ID NO: 1241681
aaauuaacgugagcccauu

SEQ ID NO: 1291341 - RNA, 19 nt, Artificial Sequence
  Description of Artificial Sequence: Synthetic oligonucleotide
  Antisense strand to SEQ ID NO: 1291340
aaugggcucacguuaauuu

SEQ ID NO: 1291342 - RNA, 19 nt, Artificial Sequence
  Description of Artificial Sequence: Synthetic oligonucleotide
  Sense strand starting at position 1056 of SEQ ID NO: 1241681
acgugagcccauuauauca

SEQ ID NO: 1291343 - RNA, 19 nt, Artificial Sequence
  Description of Artificial Sequence: Synthetic oligonucleotide
  Antisense strand to SEQ ID NO: 1291342
ugauauaaugggcucacgu

SEQ ID NO: 1291344 - RNA, 19 nt, Artificial Sequence
  Description of Artificial Sequence: Synthetic oligonucleotide
  Sense strand starting at position 1084 of SEQ ID NO: 1241681
auguguguuacauaugcau

SEQ ID NO: 1291345 - RNA, 19 nt, Artificial Sequence
  Description of Artificial Sequence: Synthetic oligonucleotide
  Antisense strand to SEQ ID NO: 1291344
augcauauguaacacacau

SEQ ID NO: 1291346 - RNA, 19 nt, Artificial Sequence
  Description of Artificial Sequence: Synthetic oligonucleotide
  Sense strand starting at position 1086 of SEQ ID NO: 1241681
guguguuacauaugcauuu

SEQ ID NO: 1291347 - RNA, 19 nt, Artificial Sequence
  Description of Artificial Sequence: Synthetic oligonucleotide
  Antisense strand to SEQ ID NO: 1291346
aaaugcauauguaacacac

SEQ ID NO: 1291348 - RNA, 19 nt, Artificial Sequence
  Description of Artificial Sequence: Synthetic oligonucleotide
  Sense strand starting at position 1087 of SEQ ID NO: 1241681
uguguuacauaugcauuua

SEQ ID NO: 1291349 - RNA, 19 nt, Artificial Sequence
  Description of Artificial Sequence: Synthetic oligonucleotide
  Antisense strand to SEQ ID NO: 1291348
uaaaugcauauguaacaca

SEQ ID NO: 1291350 - RNA, 19 nt, Artificial Sequence
  Description of Artificial Sequence: Synthetic oligonucleotide
  Sense strand starting at position 1170 of SEQ ID NO: 1241681
uguggaguccuguaaguac

SEQ ID NO: 1291351 - RNA, 19 nt, Artificial Sequence
  Description of Artificial Sequence: Synthetic oligonucleotide
  Antisense strand to SEQ ID NO: 1291350
guacuuacaggacuccaca

SEQ ID NO: 1291352 - RNA, 19 nt, Artificial Sequence
  Description of Artificial Sequence: Synthetic oligonucleotide
  Sense strand starting at position 1173 of SEQ ID NO: 1241681
ggaguccuguaaguacuuu

SEQ ID NO: 1291353 - RNA, 19 nt, Artificial Sequence
  Description of Artificial Sequence: Synthetic oligonucleotide
  Antisense strand to SEQ ID NO: 1291352
aaaguacuuacaggacucc

SEQ ID NO: 1291354 - RNA, 19 nt, Artificial Sequence
  Description of Artificial Sequence: Synthetic oligonucleotide
  Sense strand starting at position 1179 of SEQ ID NO: 1241681
cuguaaguacuuugaugag

SEQ ID NO: 1291355 - RNA, 19 nt, Artificial Sequence
  Description of Artificial Sequence: Synthetic oligonucleotide
  Antisense strand to SEQ ID NO: 1291354
cucaucaaaguacuuacag

SEQ ID NO: 1291356 - RNA, 19 nt, Artificial Sequence
  Description of Artificial Sequence: Synthetic oligonucleotide
  Sense strand starting at position 1205 of SEQ ID NO: 1241681
ggauuuauguaagaccuga

SEQ ID NO: 1291357 - RNA, 19 nt, Artificial Sequence
  Description of Artificial Sequence: Synthetic oligonucleotide
  Antisense strand to SEQ ID NO: 1291356
ucaggucuuacauaaaucc

SEQ ID NO: 1291358 - RNA, 19 nt, Artificial Sequence
  Description of Artificial Sequence: Synthetic oligonucleotide
  Sense strand starting at position 1209 of SEQ ID NO: 1241681
uuauguaagaccugagcga

SEQ ID NO: 1291359 - RNA, 19 nt, Artificial Sequence
  Description of Artificial Sequence: Synthetic oligonucleotide
  Antisense strand to SEQ ID NO: 1291358
ucgcucaggucuuacauaa

SEQ ID NO: 1291360 - RNA, 19 nt, Artificial Sequence
  Description of Artificial Sequence: Synthetic oligonucleotide
  Sense strand starting at position 1220 of SEQ ID NO: 1241681
cugagcgagcuugaagaaa

SEQ ID NO: 1291361 - RNA, 19 nt, Artificial Sequence
  Description of Artificial Sequence: Synthetic oligonucleotide
  Antisense strand to SEQ ID NO: 1291360
uuucuucaagcucgcucag

SEQ ID NO: 1291362 - RNA, 19 nt, Artificial Sequence
  Description of Artificial Sequence: Synthetic oligonucleotide
  Sense strand starting at position 3250 of SEQ ID NO: 1241681
agggaaucuugagugcaau

SEQ ID NO: 1291363 - RNA, 19 nt, Artificial Sequence
  Description of Artificial Sequence: Synthetic oligonucleotide
  Antisense strand to SEQ ID NO: 1291362
auugcacucaagauucccu

SEQ ID NO: 1291364 - RNA, 19 nt, Artificial Sequence
  Description of Artificial Sequence: Synthetic oligonucleotide
  Sense strand starting at position 3251 of SEQ ID NO: 1241681
gggaaucuugagugcaaua

SEQ ID NO: 1291365 - RNA, 19 nt, Artificial Sequence
  Description of Artificial Sequence: Synthetic oligonucleotide
  Antisense strand to SEQ ID NO: 1291364
uauugcacucaagauuccc

SEQ ID NO: 1291366 - RNA, 19 nt, Artificial Sequence
  Description of Artificial Sequence: Synthetic oligonucleotide
  Sense strand starting at position 3253 of SEQ ID NO: 1241681
gaaucuugagugcaauaua

SEQ ID NO: 1291367 - RNA, 19 nt, Artificial Sequence
  Description of Artificial Sequence: Synthetic oligonucleotide
  Antisense strand to SEQ ID NO: 1291366
uauauugcacucaagauuc

SEQ ID NO: 1291368 - RNA, 19 nt, Artificial Sequence
  Description of Artificial Sequence: Synthetic oligonucleotide
  Sense strand starting at position 3256 of SEQ ID NO: 1241681
ucuugagugcaauauagaa

SEQ ID NO: 1291369 - RNA, 19 nt, Artificial Sequence
  Description of Artificial Sequence: Synthetic oligonucleotide
  Antisense strand to SEQ ID NO: 1291368
uucuauauugcacucaaga

SEQ ID NO: 1291370 - RNA, 19 nt, Artificial Sequence
  Description of Artificial Sequence: Synthetic oligonucleotide
  Sense strand starting at position 3302 of SEQ ID NO: 1241681
uguuauauacuagguauag

SEQ ID NO: 1291371 - RNA, 19 nt, Artificial Sequence
  Description of Artificial Sequence: Synthetic oligonucleotide
  Antisense strand to SEQ ID NO: 1291370
cuauaccuaguauauaaca

SEQ ID NO: 1291372 - RNA, 19 nt, Artificial Sequence
  Description of Artificial Sequence: Synthetic oligonucleotide
  Sense strand starting at position 3303 of SEQ ID NO: 1241681
guuauauacuagguauaga

SEQ ID NO: 1291373 - RNA, 19 nt, Artificial Sequence
  Description of Artificial Sequence: Synthetic oligonucleotide
  Antisense strand to SEQ ID NO: 1291372
ucuauaccuaguauauaac

SEQ ID NO: 1291374 - RNA, 19 nt, Artificial Sequence
  Description of Artificial Sequence: Synthetic oligonucleotide
  Sense strand starting at position 3387 of SEQ ID NO: 1241681
agaucacacuaggcguaau

SEQ ID NO: 1291375 - RNA, 19 nt, Artificial Sequence
  Description of Artificial Sequence: Synthetic oligonucleotide
  Antisense strand to SEQ ID NO: 1291374
auuacgccuagugugaucu

SEQ ID NO: 1291376 - RNA, 19 nt, Artificial Sequence
  Description of Artificial Sequence: Synthetic oligonucleotide
  Sense strand starting at position 3390 of SEQ ID NO: 1241681
ucacacuaggcguaauagu

SEQ ID NO: 1291377 - RNA, 19 nt, Artificial Sequence
  Description of Artificial Sequence: Synthetic oligonucleotide
  Antisense strand to SEQ ID NO: 1291376
acuauuacgccuaguguga

SEQ ID NO: 1291378 - RNA, 19 nt, Artificial Sequence
  Description of Artificial Sequence: Synthetic oligonucleotide
  Sense strand starting at position 3401 of SEQ ID NO: 1241681
guaauaguauagcugggau

SEQ ID NO: 1291379 - RNA, 19 nt, Artificial Sequence
  Description of Artificial Sequence: Synthetic oligonucleotide
  Antisense strand to SEQ ID NO: 1291378
aucccagcuauacuauuac

SEQ ID NO: 1291380 - RNA, 19 nt, Artificial Sequence
  Description of Artificial Sequence: Synthetic oligonucleotide
  Sense strand starting at position 3444 of SEQ ID NO: 1241681
auagcauuggauuguagau

SEQ ID NO: 1291381 - RNA, 19 nt, Artificial Sequence
  Description of Artificial Sequence: Synthetic oligonucleotide
  Antisense strand to SEQ ID NO: 1291380
aucuacaauccaaugcuau

SEQ ID NO: 1291382 - RNA, 19 nt, Artificial Sequence
  Description of Artificial Sequence: Synthetic oligonucleotide
  Sense strand starting at position 3446 of SEQ ID NO: 1241681
agcauuggauuguagauuu

SEQ ID NO: 1291383 - RNA, 19 nt, Artificial Sequence
  Description of Artificial Sequence: Synthetic oligonucleotide
  Antisense strand to SEQ ID NO: 1291382
aaaucuacaauccaaugcu

SEQ ID NO: 1291384 - RNA, 19 nt, Artificial Sequence
  Description of Artificial Sequence: Synthetic oligonucleotide
  Sense strand starting at position 3601 of SEQ ID NO: 1241681
cugagagcucacuaagugu

SEQ ID NO: 1291385 - RNA, 19 nt, Artificial Sequence
  Description of Artificial Sequence: Synthetic oligonucleotide
  Antisense strand to SEQ ID NO: 1291384
acacuuagugagcucucag

SEQ ID NO: 1291386 - RNA, 19 nt, Artificial Sequence
  Description of Artificial Sequence: Synthetic oligonucleotide
  Sense strand starting at position 3697 of SEQ ID NO: 1241681
accaccuuguaaguaaauu

SEQ ID NO: 1291387 - RNA, 19 nt, Artificial Sequence
  Description of Artificial Sequence: Synthetic oligonucleotide
  Antisense strand to SEQ ID NO: 1291386
aauuuacuuacaagguggu

SEQ ID NO: 1291388 - RNA, 19 nt, Artificial Sequence
  Description of Artificial Sequence: Synthetic oligonucleotide
  Sense strand starting at position 3723 of SEQ ID NO: 1241681
ucccuacguuauccaggaa

SEQ ID NO: 1291389 - RNA, 19 nt, Artificial Sequence
  Description of Artificial Sequence: Synthetic oligonucleotide
  Antisense strand to SEQ ID NO: 1291388
uuccuggauaacguaggga

SEQ ID NO: 1291390 - RNA, 19 nt, Artificial Sequence
  Description of Artificial Sequence: Synthetic oligonucleotide
  Sense strand starting at position 3726 of SEQ ID NO: 1241681
cuacguuauccaggaaaug

SEQ ID NO: 1291391 - RNA, 19 nt, Artificial Sequence
  Description of Artificial Sequence: Synthetic oligonucleotide
  Antisense strand to SEQ ID NO: 1291390
cauuuccuggauaacguag

SEQ ID NO: 1291392 - RNA, 19 nt, Artificial Sequence
  Description of Artificial Sequence: Synthetic oligonucleotide
  Sense strand starting at position 3816 of SEQ ID NO: 1241681
ugaagaucuuauccauggu

SEQ ID NO: 1291393 - RNA, 19 nt, Artificial Sequence
  Description of Artificial Sequence: Synthetic oligonucleotide
  Antisense strand to SEQ ID NO: 1291392
accauggauaagaucuuca

SEQ ID NO: 1291394 - RNA, 19 nt, Artificial Sequence
  Description of Artificial Sequence: Synthetic oligonucleotide
  Sense strand starting at position 3820 of SEQ ID NO: 1241681
gaucuuauccaugguaggu

SEQ ID NO: 1291395 - RNA, 19 nt, Artificial Sequence
  Description of Artificial Sequence: Synthetic oligonucleotide
  Antisense strand to SEQ ID NO: 1291394
accuaccauggauaagauc

SEQ ID NO: 1291396 - RNA, 19 nt, Artificial Sequence
  Description of Artificial Sequence: Synthetic oligonucleotide
  Sense strand starting at position 3839 of SEQ ID NO: 1241681
gggagcaaguuugugucua

SEQ ID NO: 1291397 - RNA, 19 nt, Artificial Sequence
  Description of Artificial Sequence: Synthetic oligonucleotide
  Antisense strand to SEQ ID NO: 1291396
uagacacaaacuugcuccc

SEQ ID NO: 1291398 - RNA, 19 nt, Artificial Sequence
  Description of Artificial Sequence: Synthetic oligonucleotide
  Sense strand starting at position 3841 of SEQ ID NO: 1241681
gagcaaguuugugucuaag

SEQ ID NO: 1291399 - RNA, 19 nt, Artificial Sequence
  Description of Artificial Sequence: Synthetic oligonucleotide
  Antisense strand to SEQ ID NO: 1291398
cuuagacacaaacuugcuc

SEQ ID NO: 1291400 - RNA, 19 nt, Artificial Sequence
  Description of Artificial Sequence: Synthetic oligonucleotide
  Sense strand starting at position 3843 of SEQ ID NO: 1241681
gcaaguuugugucuaagac

SEQ ID NO: 1291401 - RNA, 19 nt, Artificial Sequence
  Description of Artificial Sequence: Synthetic oligonucleotide
  Antisense strand to SEQ ID NO: 1291400
gucuuagacacaaacuugc

SEQ ID NO: 1291402 - RNA, 19 nt, Artificial Sequence
  Description of Artificial Sequence: Synthetic oligonucleotide
  Sense strand starting at position 3901 of SEQ ID NO: 1241681
cccaguuauccuuguuaaa

SEQ ID NO: 1291403 - RNA, 19 nt, Artificial Sequence
  Description of Artificial Sequence: Synthetic oligonucleotide
  Antisense strand to SEQ ID NO: 1291402
uuuaacaaggauaacuggg

SEQ ID NO: 1291404 - RNA, 19 nt, Artificial Sequence
  Description of Artificial Sequence: Synthetic oligonucleotide
  Sense strand starting at position 258 of SEQ ID NO: 1241682
cgguguuuccaggagggca

SEQ ID NO: 1291405 - RNA, 19 nt, Artificial Sequence
  Description of Artificial Sequence: Synthetic oligonucleotide
  Antisense strand to SEQ ID NO: 1291404
ugcccuccuggaaacaccg

SEQ ID NO: 1291406 - RNA, 19 nt, Artificial Sequence
  Description of Artificial Sequence: Synthetic oligonucleotide
  Sense strand starting at position 515 of SEQ ID NO: 1241682
gcagcaaauucugggcuuu

SEQ ID NO: 1291407 - RNA, 19 nt, Artificial Sequence
  Description of Artificial Sequence: Synthetic oligonucleotide
  Antisense strand to SEQ ID NO: 1291406
aaagcccagaauuugcugc

SEQ ID NO: 1291408 - RNA, 19 nt, Artificial Sequence
  Description of Artificial Sequence: Synthetic oligonucleotide
  Sense strand starting at position 541 of SEQ ID NO: 1241682
gcagcuucccacuggguaa

SEQ ID NO: 1291409 - RNA, 19 nt, Artificial Sequence
  Description of Artificial Sequence: Synthetic oligonucleotide
  Antisense strand to SEQ ID NO: 1291408
uuacccagugggaagcugc

SEQ ID NO: 1291410 - RNA, 19 nt, Artificial Sequence
  Description of Artificial Sequence: Synthetic oligonucleotide
  Sense strand starting at position 724 of SEQ ID NO: 1241682
gaggguuuauucgagccaa

SEQ ID NO: 1291411 - RNA, 19 nt, Artificial Sequence
  Description of Artificial Sequence: Synthetic oligonucleotide
  Antisense strand to SEQ ID NO: 1291410
uuggcucgaauaaacccuc

SEQ ID NO: 1291412 - RNA, 19 nt, Artificial Sequence
  Description of Artificial Sequence: Synthetic oligonucleotide
  Sense strand starting at position 864 of SEQ ID NO: 1241682
acaucuaaauccuggugaa

SEQ ID NO: 1291413 - RNA, 19 nt, Artificial Sequence
  Description of Artificial Sequence: Synthetic oligonucleotide
  Antisense strand to SEQ ID NO: 1291412
uucaccaggauuuagaugu

SEQ ID NO: 1291414 - RNA, 19 nt, Artificial Sequence
  Description of Artificial Sequence: Synthetic oligonucleotide
  Sense strand starting at position 867 of SEQ ID NO: 1241682
ucuaaauccuggugaauaa

SEQ ID NO: 1291415 - RNA, 19 nt, Artificial Sequence
  Description of Artificial Sequence: Synthetic oligonucleotide
  Antisense strand to SEQ ID NO: 1291414
uuauucaccaggauuuaga

SEQ ID NO: 1291416 - RNA, 19 nt, Artificial Sequence
  Description of Artificial Sequence: Synthetic oligonucleotide
  Sense strand starting at position 1245 of SEQ ID NO: 1241682
uggagucagucccgaaaua

SEQ ID NO: 1291417 - RNA, 19 nt, Artificial Sequence
  Description of Artificial Sequence: Synthetic oligonucleotide
  Antisense strand to SEQ ID NO: 1291416
uauuucgggacugacucca

SEQ ID NO: 1291418 - RNA, 19 nt, Artificial Sequence
  Description of Artificial Sequence: Synthetic oligonucleotide
  Sense strand starting at position 1246 of SEQ ID NO: 1241682
ggagucagucccgaaauau

SEQ ID NO: 1291419 - RNA, 19 nt, Artificial Sequence
  Description of Artificial Sequence: Synthetic oligonucleotide
  Antisense strand to SEQ ID NO: 1291418
auauuucgggacugacucc

SEQ ID NO: 1291420 - RNA, 19 nt, Artificial Sequence
  Description of Artificial Sequence: Synthetic oligonucleotide
  Sense strand starting at position 3010 of SEQ ID NO: 1241682
gcgcuuucucuucgcugua

SEQ ID NO: 1291421 - RNA, 19 nt, Artificial Sequence
  Description of Artificial Sequence: Synthetic oligonucleotide
  Antisense strand to SEQ ID NO: 1291420
uacagcgaagagaaagcgc

SEQ ID NO: 1291422 - RNA, 19 nt, Artificial Sequence
  Description of Artificial Sequence: Synthetic oligonucleotide
  Sense strand starting at position 3013 of SEQ ID NO: 1241682
cuuucucuucgcuguagga

SEQ ID NO: 1291423 - RNA, 19 nt, Artificial Sequence
  Description of Artificial Sequence: Synthetic oligonucleotide
  Antisense strand to SEQ ID NO: 1291422
uccuacagcgaagagaaag

SEQ ID NO: 1291424 - RNA, 19 nt, Artificial Sequence
  Description of Artificial Sequence: Synthetic oligonucleotide
  Sense strand starting at position 3015 of SEQ ID NO: 1241682
uucucuucgcuguaggagu

SEQ ID NO: 1291425 - RNA, 19 nt, Artificial Sequence
  Description of Artificial Sequence: Synthetic oligonucleotide
  Antisense strand to SEQ ID NO: 1291424
acuccuacagcgaagagaa

SEQ ID NO: 1291426 - RNA, 19 nt, Artificial Sequence
  Description of Artificial Sequence: Synthetic oligonucleotide
  Sense strand starting at position 3022 of SEQ ID NO: 1241682
cgcuguaggagucagauca

SEQ ID NO: 1291427 - RNA, 19 nt, Artificial Sequence
  Description of Artificial Sequence: Synthetic oligonucleotide
  Antisense strand to SEQ ID NO: 1291426
ugaucugacuccuacagcg

SEQ ID NO: 1291428 - RNA, 19 nt, Artificial Sequence
  Description of Artificial Sequence: Synthetic oligonucleotide
  Sense strand starting at position 3052 of SEQ ID NO: 1241682
ggcccagcuuccuucuuua

SEQ ID NO: 1291429 - RNA, 19 nt, Artificial Sequence
  Description of Artificial Sequence: Synthetic oligonucleotide
  Antisense strand to SEQ ID NO: 1291428
uaaagaaggaagcugggcc

SEQ ID NO: 1291430 - RNA, 19 nt, Artificial Sequence
  Description of Artificial Sequence: Synthetic oligonucleotide
  Sense strand starting at position 3114 of SEQ ID NO: 1241682
gguuuagggucacaugguu

SEQ ID NO: 1291431 - RNA, 19 nt, Artificial Sequence
  Description of Artificial Sequence: Synthetic oligonucleotide
  Antisense strand to SEQ ID NO: 1291430
aaccaugugacccuaaacc

SEQ ID NO: 1291432 - RNA, 19 nt, Artificial Sequence
  Description of Artificial Sequence: Synthetic oligonucleotide
  Sense strand starting at position 3177 of SEQ ID NO: 1241682
gucgaaagguucuguguau

SEQ ID NO: 1291433 - RNA, 19 nt, Artificial Sequence
  Description of Artificial Sequence: Synthetic oligonucleotide
  Antisense strand to SEQ ID NO: 1291432
auacacagaaccuuucgac

SEQ ID NO: 1291434 - RNA, 19 nt, Artificial Sequence
  Description of Artificial Sequence: Synthetic oligonucleotide
  Sense strand starting at position 3178 of SEQ ID NO: 1241682
ucgaaagguucuguguauu

SEQ ID NO: 1291435 - RNA, 19 nt, Artificial Sequence
  Description of Artificial Sequence: Synthetic oligonucleotide
  Antisense strand to SEQ ID NO: 1291434
aauacacagaaccuuucga

SEQ ID NO: 1291436 - RNA, 19 nt, Artificial Sequence
  Description of Artificial Sequence: Synthetic oligonucleotide
  Sense strand starting at position 3186 of SEQ ID NO: 1241682
uucuguguauuugguacua

SEQ ID NO: 1291437 - RNA, 19 nt, Artificial Sequence
  Description of Artificial Sequence: Synthetic oligonucleotide
  Antisense strand to SEQ ID NO: 1291436
uaguaccaaauacacagaa

SEQ ID NO: 1291438 - RNA, 19 nt, Artificial Sequence
  Description of Artificial Sequence: Synthetic oligonucleotide
  Sense strand starting at position 3191 of SEQ ID NO: 1241682
uguauuugguacuaggaca

SEQ ID NO: 1291439 - RNA, 19 nt, Artificial Sequence
  Description of Artificial Sequence: Synthetic oligonucleotide
  Antisense strand to SEQ ID NO: 1291438
uguccuaguaccaaauaca

SEQ ID NO: 1291440 - RNA, 19 nt, Artificial Sequence
  Description of Artificial Sequence: Synthetic oligonucleotide
  Sense strand starting at position 3211 of SEQ ID NO: 1241682
acagguagguguugucagu

SEQ ID NO: 1291441 - RNA, 19 nt, Artificial Sequence
  Description of Artificial Sequence: Synthetic oligonucleotide
  Antisense strand to SEQ ID NO: 1291440
acugacaacaccuaccugu

SEQ ID NO: 1291442 - RNA, 19 nt, Artificial Sequence
  Description of Artificial Sequence: Synthetic oligonucleotide
  Sense strand starting at position 3214 of SEQ ID NO: 1241682
gguagguguugucaguagu

SEQ ID NO: 1291443 - RNA, 19 nt, Artificial Sequence
  Description of Artificial Sequence: Synthetic oligonucleotide
  Antisense strand to SEQ ID NO: 1291442
acuacugacaacaccuacc

SEQ ID NO: 1291444 - RNA, 19 nt, Artificial Sequence
  Description of Artificial Sequence: Synthetic oligonucleotide
  Sense strand starting at position 3215 of SEQ ID NO: 1241682
guagguguugucaguagug

SEQ ID NO: 1291445 - RNA, 19 nt, Artificial Sequence
  Description of Artificial Sequence: Synthetic oligonucleotide
  Antisense strand to SEQ ID NO: 1291444
cacuacugacaacaccuac

SEQ ID NO: 1291446 - RNA, 19 nt, Artificial Sequence
  Description of Artificial Sequence: Synthetic oligonucleotide
  Sense strand starting at position 3217 of SEQ ID NO: 1241682
agguguugucaguagugca

SEQ ID NO: 1291447 - RNA, 19 nt, Artificial Sequence
  Description of Artificial Sequence: Synthetic oligonucleotide
  Antisense strand to SEQ ID NO: 1291446
ugcacuacugacaacaccu

SEQ ID NO: 1291448 - RNA, 19 nt, Artificial Sequence
  Description of Artificial Sequence: Synthetic oligonucleotide
  Sense strand starting at position 3282 of SEQ ID NO: 1241682
uuuagagucuaaguagaau

SEQ ID NO: 1291449 - RNA, 19 nt, Artificial Sequence
  Description of Artificial Sequence: Synthetic oligonucleotide
  Antisense strand to SEQ ID NO: 1291448
auucuacuuagacucuaaa

SEQ ID NO: 1291450 - RNA, 19 nt, Artificial Sequence
  Description of Artificial Sequence: Synthetic oligonucleotide
  Sense strand starting at position 3288 of SEQ ID NO: 1241682
gucuaaguagaauguuaag

SEQ ID NO: 1291451 - RNA, 19 nt, Artificial Sequence
  Description of Artificial Sequence: Synthetic oligonucleotide
  Antisense strand to SEQ ID NO: 1291450
cuuaacauucuacuuagac

SEQ ID NO: 1291452 - RNA, 19 nt, Artificial Sequence
  Description of Artificial Sequence: Synthetic oligonucleotide
  Sense strand starting at position 3294 of SEQ ID NO: 1241682
guagaauguuaagcagaga

SEQ ID NO: 1291453 - RNA, 19 nt, Artificial Sequence
  Description of Artificial Sequence: Synthetic oligonucleotide
  Antisense strand to SEQ ID NO: 1291452
ucucugcuuaacauucuac

SEQ ID NO: 1291454 - RNA, 19 nt, Artificial Sequence
  Description of Artificial Sequence: Synthetic oligonucleotide
  Sense strand starting at position 3575 of SEQ ID NO: 1241682
cagugauuacacuggacua

SEQ ID NO: 1291455 - RNA, 19 nt, Artificial Sequence
  Description of Artificial Sequence: Synthetic oligonucleotide
  Antisense strand to SEQ ID NO: 1291454
uaguccaguguaaucacug

SEQ ID NO: 1291456 - RNA, 19 nt, Artificial Sequence
  Description of Artificial Sequence: Synthetic oligonucleotide
  Sense strand starting at position 3593 of SEQ ID NO: 1241682
accuacauguagucacuua

SEQ ID NO: 1291457 - RNA, 19 nt, Artificial Sequence
  Description of Artificial Sequence: Synthetic oligonucleotide
  Antisense strand to SEQ ID NO: 1291456
uaagugacuacauguaggu

SEQ ID NO: 1291458 - RNA, 19 nt, Artificial Sequence
  Description of Artificial Sequence: Synthetic oligonucleotide
  Sense strand starting at position 3620 of SEQ ID NO: 1241682
acaggauguccuugggaug

SEQ ID NO: 1291459 - RNA, 19 nt, Artificial Sequence
  Description of Artificial Sequence: Synthetic oligonucleotide
  Antisense strand to SEQ ID NO: 1291458
caucccaaggacauccugu

SEQ ID NO: 1291460 - RNA, 19 nt, Artificial Sequence
  Description of Artificial Sequence: Synthetic oligonucleotide
  Sense strand starting at position 3676 of SEQ ID NO: 1241682
auccauuccugguugagga

SEQ ID NO: 1291461 - RNA, 19 nt, Artificial Sequence
  Description of Artificial Sequence: Synthetic oligonucleotide
  Antisense strand to SEQ ID NO: 1291460
uccucaaccaggaauggau

SEQ ID NO: 1291462 - RNA, 19 nt, Artificial Sequence
  Description of Artificial Sequence: Synthetic oligonucleotide
  Sense strand starting at position 3782 of SEQ ID NO: 1241682
uuugcuuuguuauugagag

SEQ ID NO: 1291463 - RNA, 19 nt, Artificial Sequence
  Description of Artificial Sequence: Synthetic oligonucleotide
  Antisense strand to SEQ ID NO: 1291462
cucucaauaacaaagcaaa

SEQ ID NO: 1291464 - RNA, 19 nt, Artificial Sequence
  Description of Artificial Sequence: Synthetic oligonucleotide
  Sense strand starting at position 3783 of SEQ ID NO: 1241682
uugcuuuguuauugagaga

SEQ ID NO: 1291465 - RNA, 19 nt, Artificial Sequence
  Description of Artificial Sequence: Synthetic oligonucleotide
  Antisense strand to SEQ ID NO: 1291464
ucucucaauaacaaagcaa

SEQ ID NO: 1291466 - RNA, 19 nt, Artificial Sequence
  Description of Artificial Sequence: Synthetic oligonucleotide
  Sense strand starting at position 3784 of SEQ ID NO: 1241682
ugcuuuguuauugagagaa

SEQ ID NO: 1291467 - RNA, 19 nt, Artificial Sequence
  Description of Artificial Sequence: Synthetic oligonucleotide
  Antisense strand to SEQ ID NO: 1291466
uucucucaauaacaaagca

SEQ ID NO: 1291468 - RNA, 19 nt, Artificial Sequence
  Description of Artificial Sequence: Synthetic oligonucleotide
  Sense strand starting at position 3786 of SEQ ID NO: 1241682
cuuuguuauugagagaaug

SEQ ID NO: 1291469 - RNA, 19 nt, Artificial Sequence
  Description of Artificial Sequence: Synthetic oligonucleotide
  Antisense strand to SEQ ID NO: 1291468
cauucucucaauaacaaag

SEQ ID NO: 1291470 - RNA, 19 nt, Artificial Sequence
  Description of Artificial Sequence: Synthetic oligonucleotide
  Sense strand starting at position 3788 of SEQ ID NO: 1241682
uuguuauugagagaaugca

SEQ ID NO: 1291471 - RNA, 19 nt, Artificial Sequence
  Description of Artificial Sequence: Synthetic oligonucleotide
  Antisense strand to SEQ ID NO: 1291470
ugcauucucucaauaacaa

SEQ ID NO: 1291472 - RNA, 19 nt, Artificial Sequence
  Description of Artificial Sequence: Synthetic oligonucleotide
  Sense strand starting at position 3835 of SEQ ID NO: 1241682
guugcacugagcugucagu

SEQ ID NO: 1291473 - RNA, 19 nt, Artificial Sequence
  Description of Artificial Sequence: Synthetic oligonucleotide
  Antisense strand to SEQ ID NO: 1291472
acugacagcucagugcaac

SEQ ID NO: 1291474 - RNA, 19 nt, Artificial Sequence
  Description of Artificial Sequence: Synthetic oligonucleotide
  Sense strand starting at position 3874 of SEQ ID NO: 1241682
ggccuaguagccugguaaa

SEQ ID NO: 1291475 - RNA, 19 nt, Artificial Sequence
  Description of Artificial Sequence: Synthetic oligonucleotide
  Antisense strand to SEQ ID NO: 1291474
uuuaccaggcuacuaggcc

SEQ ID NO: 1291476 - RNA, 19 nt, Artificial Sequence
  Description of Artificial Sequence: Synthetic oligonucleotide
  Sense strand starting at position 3884 of SEQ ID NO: 1241682
ccugguaaacaguagguau

SEQ ID NO: 1291477 - RNA, 19 nt, Artificial Sequence
  Description of Artificial Sequence: Synthetic oligonucleotide
  Antisense strand to SEQ ID NO: 1291476
auaccuacuguuuaccagg

SEQ ID NO: 1291478 - RNA, 19 nt, Artificial Sequence
  Description of Artificial Sequence: Synthetic oligonucleotide
  Sense strand starting at position 3895 of SEQ ID NO: 1241682
guagguauuccauaguuga

SEQ ID NO: 1291479 - RNA, 19 nt, Artificial Sequence
  Description of Artificial Sequence: Synthetic oligonucleotide
  Antisense strand to SEQ ID NO: 1291478
ucaacuauggaauaccuac

SEQ ID NO: 1291480 - RNA, 19 nt, Artificial Sequence
  Description of Artificial Sequence: Synthetic oligonucleotide
  Sense strand starting at position 322 of SEQ ID NO: 1241683
ucaguaaauaugugggaug

SEQ ID NO: 1291481 - RNA, 19 nt, Artificial Sequence
  Description of Artificial Sequence: Synthetic oligonucleotide
  Antisense strand to SEQ ID NO: 1291480
caucccacauauuuacuga

SEQ ID NO: 1291482 - RNA, 19 nt, Artificial Sequence
  Description of Artificial Sequence: Synthetic oligonucleotide
  Sense strand starting at position 323 of SEQ ID NO: 1241683
caguaaauaugugggauga

SEQ ID NO: 1291483 - RNA, 19 nt, Artificial Sequence
  Description of Artificial Sequence: Synthetic oligonucleotide
  Antisense strand to SEQ ID NO: 1291482
ucaucccacauauuuacug

SEQ ID NO: 1291484 - RNA, 19 nt, Artificial Sequence
  Description of Artificial Sequence: Synthetic oligonucleotide
  Sense strand starting at position 325 of SEQ ID NO: 1241683
guaaauaugugggaugaaa

SEQ ID NO: 1291485 - RNA, 19 nt, Artificial Sequence
  Description of Artificial Sequence: Synthetic oligonucleotide
  Antisense strand to SEQ ID NO: 1291484
uuucaucccacauauuuac

SEQ ID NO: 1291486 - RNA, 19 nt, Artificial Sequence
  Description of Artificial Sequence: Synthetic oligonucleotide
  Sense strand starting at position 374 of SEQ ID NO: 1241683
ccaaguggcuuggagagaa

SEQ ID NO: 1291487 - RNA, 19 nt, Artificial Sequence
  Description of Artificial Sequence: Synthetic oligonucleotide
  Antisense strand to SEQ ID NO: 1291486
uucucuccaagccacuugg

SEQ ID NO: 1291488 - RNA, 19 nt, Artificial Sequence
  Description of Artificial Sequence: Synthetic oligonucleotide
  Sense strand starting at position 514 of SEQ ID NO: 1241683
gccucugugccuggaacau

SEQ ID NO: 1291489 - RNA, 19 nt, Artificial Sequence
  Description of Artificial Sequence: Synthetic oligonucleotide
  Antisense strand to SEQ ID NO: 1291488
auguuccaggcacagaggc

SEQ ID NO: 1291490 - RNA, 19 nt, Artificial Sequence
  Description of Artificial Sequence: Synthetic oligonucleotide
  Sense strand starting at position 549 of SEQ ID NO: 1241683
gucauauggccuugcuguu

SEQ ID NO: 1291491 - RNA, 19 nt, Artificial Sequence
  Description of Artificial Sequence: Synthetic oligonucleotide
  Antisense strand to SEQ ID NO: 1291490
aacagcaaggccauaugac

SEQ ID NO: 1291492 - RNA, 19 nt, Artificial Sequence
  Description of Artificial Sequence: Synthetic oligonucleotide
  Sense strand starting at position 652 of SEQ ID NO: 1241683
gugagagcccuuuaccuag

SEQ ID NO: 1291493 - RNA, 19 nt, Artificial Sequence
  Description of Artificial Sequence: Synthetic oligonucleotide
  Antisense strand to SEQ ID NO: 1291492
cuagguaaagggcucucac

SEQ ID NO: 1291494 - RNA, 19 nt, Artificial Sequence
  Description of Artificial Sequence: Synthetic oligonucleotide
  Sense strand starting at position 675 of SEQ ID NO: 1241683
ccucauggcuccggaggaa

SEQ ID NO: 1291495 - RNA, 19 nt, Artificial Sequence
  Description of Artificial Sequence: Synthetic oligonucleotide
  Antisense strand to SEQ ID NO: 1291494
uuccuccggagccaugagg

SEQ ID NO: 1291496 - RNA, 19 nt, Artificial Sequence
  Description of Artificial Sequence: Synthetic oligonucleotide
  Sense strand starting at position 800 of SEQ ID NO: 1241683
gagaaaggcugcuaaugga

SEQ ID NO: 1291497 - RNA, 19 nt, Artificial Sequence
  Description of Artificial Sequence: Synthetic oligonucleotide
  Antisense strand to SEQ ID NO: 1291496
uccauuagcagccuuucuc

SEQ ID NO: 1291498 - RNA, 19 nt, Artificial Sequence
  Description of Artificial Sequence: Synthetic oligonucleotide
  Sense strand starting at position 1186 of SEQ ID NO: 1241683
ccaugcuguuuccagaagu

SEQ ID NO: 1291499 - RNA, 19 nt, Artificial Sequence
  Description of Artificial Sequence: Synthetic oligonucleotide
  Antisense strand to SEQ ID NO: 1291498
acuucuggaaacagcaugg

SEQ ID NO: 1291500 - RNA, 19 nt, Artificial Sequence
  Description of Artificial Sequence: Synthetic oligonucleotide
  Sense strand starting at position 1310 of SEQ ID NO: 1241683
cugguuaucucccugaauc

SEQ ID NO: 1291501 - RNA, 19 nt, Artificial Sequence
  Description of Artificial Sequence: Synthetic oligonucleotide
  Antisense strand to SEQ ID NO: 1291500
gauucagggagauaaccag

SEQ ID NO: 1291502 - RNA, 19 nt, Artificial Sequence
  Description of Artificial Sequence: Synthetic oligonucleotide
  Sense strand starting at position 1311 of SEQ ID NO: 1241683
ugguuaucucccugaauca

SEQ ID NO: 1291503 - RNA, 19 nt, Artificial Sequence
  Description of Artificial Sequence: Synthetic oligonucleotide
  Antisense strand to SEQ ID NO: 1291502
ugauucagggagauaacca

SEQ ID NO: 1291504 - RNA, 19 nt, Artificial Sequence
  Description of Artificial Sequence: Synthetic oligonucleotide
  Sense strand starting at position 1312 of SEQ ID NO: 1241683
gguuaucucccugaaucag

SEQ ID NO: 1291505 - RNA, 19 nt, Artificial Sequence
  Description of Artificial Sequence: Synthetic oligonucleotide
  Antisense strand to SEQ ID NO: 1291504
cugauucagggagauaacc

SEQ ID NO: 1291506 - RNA, 19 nt, Artificial Sequence
  Description of Artificial Sequence: Synthetic oligonucleotide
  Sense strand starting at position 1377 of SEQ ID NO: 1241683
cagagucuggccugagaag

SEQ ID NO: 1291507 - RNA, 19 nt, Artificial Sequence
  Description of Artificial Sequence: Synthetic oligonucleotide
  Antisense strand to SEQ ID NO: 1291506
cuucucaggccagacucug

SEQ ID NO: 1291508 - RNA, 19 nt, Artificial Sequence
  Description of Artificial Sequence: Synthetic oligonucleotide
  Sense strand starting at position 2542 of SEQ ID NO: 1241683
cucucugcuccaugggaau

SEQ ID NO: 1291509 - RNA, 19 nt, Artificial Sequence
  Description of Artificial Sequence: Synthetic oligonucleotide
  Antisense strand to SEQ ID NO: 1291508
auucccauggagcagagag

SEQ ID NO: 1291510 - RNA, 19 nt, Artificial Sequence
  Description of Artificial Sequence: Synthetic oligonucleotide
  Sense strand starting at position 2555 of SEQ ID NO: 1241683
gggaaugugucucccugga

SEQ ID NO: 1291511 - RNA, 19 nt, Artificial Sequence
  Description of Artificial Sequence: Synthetic oligonucleotide
  Antisense strand to SEQ ID NO: 1291510
uccagggagacacauuccc

SEQ ID NO: 1291512 - RNA, 19 nt, Artificial Sequence
  Description of Artificial Sequence: Synthetic oligonucleotide
  Sense strand starting at position 3031 of SEQ ID NO: 1241683
acugcauccuugugagauc

SEQ ID NO: 1291513 - RNA, 19 nt, Artificial Sequence
  Description of Artificial Sequence: Synthetic oligonucleotide
  Antisense strand to SEQ ID NO: 1291512
gaucucacaaggaugcagu

SEQ ID NO: 1291514 - RNA, 19 nt, Artificial Sequence
  Description of Artificial Sequence: Synthetic oligonucleotide
  Sense strand starting at position 3032 of SEQ ID NO: 1241683
cugcauccuugugagaucu

SEQ ID NO: 1291515 - RNA, 19 nt, Artificial Sequence
  Description of Artificial Sequence: Synthetic oligonucleotide
  Antisense strand to SEQ ID NO: 1291514
agaucucacaaggaugcag

SEQ ID NO: 1291516 - RNA, 19 nt, Artificial Sequence
  Description of Artificial Sequence: Synthetic oligonucleotide
  Sense strand starting at position 3040 of SEQ ID NO: 1241683
uugugagaucuccacguga

SEQ ID NO: 1291517 - RNA, 19 nt, Artificial Sequence
  Description of Artificial Sequence: Synthetic oligonucleotide
  Antisense strand to SEQ ID NO: 1291516
ucacguggagaucucacaa

SEQ ID NO: 1291518 - RNA, 19 nt, Artificial Sequence
  Description of Artificial Sequence: Synthetic oligonucleotide
  Sense strand starting at position 3042 of SEQ ID NO: 1241683
gugagaucuccacgugaga

SEQ ID NO: 1291519 - RNA, 19 nt, Artificial Sequence
  Description of Artificial Sequence: Synthetic oligonucleotide
  Antisense strand to SEQ ID NO: 1291518
ucucacguggagaucucac

SEQ ID NO: 1291520 - RNA, 19 nt, Artificial Sequence
  Description of Artificial Sequence: Synthetic oligonucleotide
  Sense strand starting at position 3141 of SEQ ID NO: 1241683
cuggaaugccagcaggaua

SEQ ID NO: 1291521 - RNA, 19 nt, Artificial Sequence
  Description of Artificial Sequence: Synthetic oligonucleotide
  Antisense strand to SEQ ID NO: 1291520
uauccugcuggcauuccag

SEQ ID NO: 1291522 - RNA, 19 nt, Artificial Sequence
  Description of Artificial Sequence: Synthetic oligonucleotide
  Sense strand starting at position 3231 of SEQ ID NO: 1241683
ccaggaggcucuuugucua

SEQ ID NO: 1291523 - RNA, 19 nt, Artificial Sequence
  Description of Artificial Sequence: Synthetic oligonucleotide
  Antisense strand to SEQ ID NO: 1291522
uagacaaagagccuccugg

SEQ ID NO: 1291524 - RNA, 19 nt, Artificial Sequence
  Description of Artificial Sequence: Synthetic oligonucleotide
  Sense strand starting at position 3337 of SEQ ID NO: 1241683
cggcuauuuauaggcaagu

SEQ ID NO: 1291525 - RNA, 19 nt, Artificial Sequence
  Description of Artificial Sequence: Synthetic oligonucleotide
  Antisense strand to SEQ ID NO: 1291524
acuugccuauaaauagccg

SEQ ID NO: 1291526 - RNA, 19 nt, Artificial Sequence
  Description of Artificial Sequence: Synthetic oligonucleotide
  Sense strand starting at position 3463 of SEQ ID NO: 1241683
agcuuagcaucugguuaga

SEQ ID NO: 1291527 - RNA, 19 nt, Artificial Sequence
  Description of Artificial Sequence: Synthetic oligonucleotide
  Antisense strand to SEQ ID NO: 1291526
ucuaaccagaugcuaagcu

SEQ ID NO: 1291528 - RNA, 19 nt, Artificial Sequence
  Description of Artificial Sequence: Synthetic oligonucleotide
  Sense strand starting at position 3465 of SEQ ID NO: 1241683
cuuagcaucugguuagaag

SEQ ID NO: 1291529 - RNA, 19 nt, Artificial Sequence
  Description of Artificial Sequence: Synthetic oligonucleotide
  Antisense strand to SEQ ID NO: 1291528
cuucuaaccagaugcuaag

SEQ ID NO: 1291530 - RNA, 19 nt, Artificial Sequence
  Description of Artificial Sequence: Synthetic oligonucleotide
  Sense strand starting at position 3484 of SEQ ID NO: 1241683
cuggcugccugccuuuaaa

SEQ ID NO: 1291531 - RNA, 19 nt, Artificial Sequence
  Description of Artificial Sequence: Synthetic oligonucleotide
  Antisense strand to SEQ ID NO: 1291530
uuuaaaggcaggcagccag

SEQ ID NO: 1291532 - RNA, 19 nt, Artificial Sequence
  Description of Artificial Sequence: Synthetic oligonucleotide
  Sense strand starting at position 3566 of SEQ ID NO: 1241683
uucugcauccaugaaauga

SEQ ID NO: 1291533 - RNA, 19 nt, Artificial Sequence
  Description of Artificial Sequence: Synthetic oligonucleotide
  Antisense strand to SEQ ID NO: 1291532
ucauuucauggaugcagaa

SEQ ID NO: 1291534 - RNA, 19 nt, Artificial Sequence
  Description of Artificial Sequence: Synthetic oligonucleotide
  Sense strand starting at position 3586 of SEQ ID NO: 1241683
gagaguaccugccucauau

SEQ ID NO: 1291535 - RNA, 19 nt, Artificial Sequence
  Description of Artificial Sequence: Synthetic oligonucleotide
  Antisense strand to SEQ ID NO: 1291534
auaugaggcagguacucuc

SEQ ID NO: 1291536 - RNA, 19 nt, Artificial Sequence
  Description of Artificial Sequence: Synthetic oligonucleotide
  Sense strand starting at position 3628 of SEQ ID NO: 1241683
cgggcgugucccugugaga

SEQ ID NO: 1291537 - RNA, 19 nt, Artificial Sequence
  Description of Artificial Sequence: Synthetic oligonucleotide
  Antisense strand to SEQ ID NO: 1291536
ucucacagggacacgcccg

SEQ ID NO: 1291538 - RNA, 19 nt, Artificial Sequence
  Description of Artificial Sequence: Synthetic oligonucleotide
  Sense strand starting at position 3630 of SEQ ID NO: 1241683
ggcgugucccugugagagu

SEQ ID NO: 1291539 - RNA, 19 nt, Artificial Sequence
  Description of Artificial Sequence: Synthetic oligonucleotide
  Antisense strand to SEQ ID NO: 1291538
acucucacagggacacgcc

SEQ ID NO: 1291540 - RNA, 19 nt, Artificial Sequence
  Description of Artificial Sequence: Synthetic oligonucleotide
  Sense strand starting at position 3727 of SEQ ID NO: 1241683
ggcaaauacagcugagacu

SEQ ID NO: 1291541 - RNA, 19 nt, Artificial Sequence
  Description of Artificial Sequence: Synthetic oligonucleotide
  Antisense strand to SEQ ID NO: 1291540
agucucagcuguauuugcc

SEQ ID NO: 1291542 - RNA, 19 nt, Artificial Sequence
  Description of Artificial Sequence: Synthetic oligonucleotide
  Sense strand starting at position 3728 of SEQ ID NO: 1241683
gcaaauacagcugagacuu

SEQ ID NO: 1291543 - RNA, 19 nt, Artificial Sequence
  Description of Artificial Sequence: Synthetic oligonucleotide
  Antisense strand to SEQ ID NO: 1291542
aagucucagcuguauuugc

SEQ ID NO: 1291544 - RNA, 19 nt, Artificial Sequence
  Description of Artificial Sequence: Synthetic oligonucleotide
  Sense strand starting at position 3736 of SEQ ID NO: 1241683
agcugagacuuggguuuga

SEQ ID NO: 1291545 - RNA, 19 nt, Artificial Sequence
  Description of Artificial Sequence: Synthetic oligonucleotide
  Antisense strand to SEQ ID NO: 1291544
ucaaacccaagucucagcu

SEQ ID NO: 1291546 - RNA, 19 nt, Artificial Sequence
  Description of Artificial Sequence: Synthetic oligonucleotide
  Sense strand starting at position 3802 of SEQ ID NO: 1241683
uuugaagcacugugucuaa

SEQ ID NO: 1291547 - RNA, 19 nt, Artificial Sequence
  Description of Artificial Sequence: Synthetic oligonucleotide
  Antisense strand to SEQ ID NO: 1291546
uuagacacagugcuucaaa

SEQ ID NO: 1291548 - RNA, 19 nt, Artificial Sequence
  Description of Artificial Sequence: Synthetic oligonucleotide
  Sense strand starting at position 3809 of SEQ ID NO: 1241683
cacugugucuaacugaaag

SEQ ID NO: 1291549 - RNA, 19 nt, Artificial Sequence
  Description of Artificial Sequence: Synthetic oligonucleotide
  Antisense strand to SEQ ID NO: 1291548
cuuucaguuagacacagug

SEQ ID NO: 1291550 - RNA, 19 nt, Artificial Sequence
  Description of Artificial Sequence: Synthetic oligonucleotide
  Sense strand starting at position 3843 of SEQ ID NO: 1241683
gauccauguuuccuguaga

SEQ ID NO: 1291551 - RNA, 19 nt, Artificial Sequence
  Description of Artificial Sequence: Synthetic oligonucleotide
  Antisense strand to SEQ ID NO: 1291550
ucuacaggaaacauggauc

SEQ ID NO: 1291552 - RNA, 19 nt, Artificial Sequence
  Description of Artificial Sequence: Synthetic oligonucleotide
  Sense strand starting at position 3844 of SEQ ID NO: 1241683
auccauguuuccuguagag

SEQ ID NO: 1291553 - RNA, 19 nt, Artificial Sequence
  Description of Artificial Sequence: Synthetic oligonucleotide
  Antisense strand to SEQ ID NO: 1291552
cucuacaggaaacauggau

SEQ ID NO: 1291554 - RNA, 19 nt, Artificial Sequence
  Description of Artificial Sequence: Synthetic oligonucleotide
  Sense strand starting at position 3846 of SEQ ID NO: 1241683
ccauguuuccuguagagca

SEQ ID NO: 1291555 - RNA, 19 nt, Artificial Sequence
  Description of Artificial Sequence: Synthetic oligonucleotide
  Antisense strand to SEQ ID NO: 1291554
ugcucuacaggaaacaugg

SEQ ID NO: 1291556 - RNA, 19 nt, Artificial Sequence
  Description of Artificial Sequence: Synthetic oligonucleotide
  Sense strand starting at position 3912 of SEQ ID NO: 1241683
caggaauugcccuggacac

SEQ ID NO: 1291557 - RNA, 19 nt, Artificial Sequence
  Description of Artificial Sequence: Synthetic oligonucleotide
  Antisense strand to SEQ ID NO: 1291556
guguccagggcaauuccug

SEQ ID NO: 1291558 - RNA, 19 nt, Artificial Sequence
  Description of Artificial Sequence: Synthetic oligonucleotide
  Sense strand starting at position 3971 of SEQ ID NO: 1241683
gugucaaccucuuaaauuc

SEQ ID NO: 1291559 - RNA, 19 nt, Artificial Sequence
  Description of Artificial Sequence: Synthetic oligonucleotide
  Antisense strand to SEQ ID NO: 1291558
gaauuuaagagguugacac

SEQ ID NO: 1291560 - RNA, 19 nt, Artificial Sequence
  Description of Artificial Sequence: Synthetic oligonucleotide
  Sense strand starting at position 104 of SEQ ID NO: 1241684
ugugcagcuauuugagcaa

SEQ ID NO: 1291561 - RNA, 19 nt, Artificial Sequence
  Description of Artificial Sequence: Synthetic oligonucleotide
  Antisense strand to SEQ ID NO: 1291560
uugcucaaauagcugcaca

SEQ ID NO: 1291562 - RNA, 19 nt, Artificial Sequence
  Description of Artificial Sequence: Synthetic oligonucleotide
  Sense strand starting at position 107 of SEQ ID NO: 1241684
gcagcuauuugagcaagua

SEQ ID NO: 1291563 - RNA, 19 nt, Artificial Sequence
  Description of Artificial Sequence: Synthetic oligonucleotide
  Antisense strand to SEQ ID NO: 1291562
uacuugcucaaauagcugc

SEQ ID NO: 1291564 - RNA, 19 nt, Artificial Sequence
  Description of Artificial Sequence: Synthetic oligonucleotide
  Sense strand starting at position 366 of SEQ ID NO: 1241684
uuauguuuccaggguuaaa

SEQ ID NO: 1291565 - RNA, 19 nt, Artificial Sequence
  Description of Artificial Sequence: Synthetic oligonucleotide
  Antisense strand to SEQ ID NO: 1291564
uuuaacccuggaaacauaa

SEQ ID NO: 1291566 - RNA, 19 nt, Artificial Sequence
  Description of Artificial Sequence: Synthetic oligonucleotide
  Sense strand starting at position 678 of SEQ ID NO: 1241684
gggagaaaguuacaugaaa

SEQ ID NO: 1291567 - RNA, 19 nt, Artificial Sequence
  Description of Artificial Sequence: Synthetic oligonucleotide
  Antisense strand to SEQ ID NO: 1291566
uuucauguaacuuucuccc

SEQ ID NO: 1291568 - RNA, 19 nt, Artificial Sequence
  Description of Artificial Sequence: Synthetic oligonucleotide
  Sense strand starting at position 711 of SEQ ID NO: 1241684
ugucuuugugccggaauuu

SEQ ID NO: 1291569 - RNA, 19 nt, Artificial Sequence
  Description of Artificial Sequence: Synthetic oligonucleotide
  Antisense strand to SEQ ID NO: 1291568
aaauuccggcacaaagaca

SEQ ID NO: 1291570 - RNA, 19 nt, Artificial Sequence
  Description of Artificial Sequence: Synthetic oligonucleotide
  Sense strand starting at position 753 of SEQ ID NO: 1241684
aacuguaauguugauugca

SEQ ID NO: 1291571 - RNA, 19 nt, Artificial Sequence
  Description of Artificial Sequence: Synthetic oligonucleotide
  Antisense strand to SEQ ID NO: 1291570
ugcaaucaacauuacaguu

SEQ ID NO: 1291572 - RNA, 19 nt, Artificial Sequence
  Description of Artificial Sequence: Synthetic oligonucleotide
  Sense strand starting at position 1109 of SEQ ID NO: 1241684
ccucgcuuagcuggaagaa

SEQ ID NO: 1291573 - RNA, 19 nt, Artificial Sequence
  Description of Artificial Sequence: Synthetic oligonucleotide
  Antisense strand to SEQ ID NO: 1291572
uucuuccagcuaagcgagg

SEQ ID NO: 1291574 - RNA, 19 nt, Artificial Sequence
  Description of Artificial Sequence: Synthetic oligonucleotide
  Sense strand starting at position 1110 of SEQ ID NO: 1241684
cucgcuuagcuggaagaaa

SEQ ID NO: 1291575 - RNA, 19 nt, Artificial Sequence
  Description of Artificial Sequence: Synthetic oligonucleotide
  Antisense strand to SEQ ID NO: 1291574
uuucuuccagcuaagcgag

SEQ ID NO: 1291576 - RNA, 19 nt, Artificial Sequence
  Description of Artificial Sequence: Synthetic oligonucleotide
  Sense strand starting at position 1264 of SEQ ID NO: 1241684
uuucucuucccagggugaa

SEQ ID NO: 1291577 - RNA, 19 nt, Artificial Sequence
  Description of Artificial Sequence: Synthetic oligonucleotide
  Antisense strand to SEQ ID NO: 1291576
uucacccugggaagagaaa

SEQ ID NO: 1291578 - RNA, 19 nt, Artificial Sequence
  Description of Artificial Sequence: Synthetic oligonucleotide
  Sense strand starting at position 1485 of SEQ ID NO: 1241684
cugacuuuccgcuaaguga

SEQ ID NO: 1291579 - RNA, 19 nt, Artificial Sequence
  Description of Artificial Sequence: Synthetic oligonucleotide
  Antisense strand to SEQ ID NO: 1291578
ucacuuagcggaaagucag

SEQ ID NO: 1291580 - RNA, 19 nt, Artificial Sequence
  Description of Artificial Sequence: Synthetic oligonucleotide
  Sense strand starting at position 1602 of SEQ ID NO: 1241684
ggcuacgacuguuuccaaa

SEQ ID NO: 1291581 - RNA, 19 nt, Artificial Sequence
  Description of Artificial Sequence: Synthetic oligonucleotide
  Antisense strand to SEQ ID NO: 1291580
uuuggaaacagucguagcc

SEQ ID NO: 1291582 - RNA, 19 nt, Artificial Sequence
  Description of Artificial Sequence: Synthetic oligonucleotide
  Sense strand starting at position 1604 of SEQ ID NO: 1241684
cuacgacuguuuccaaacu

SEQ ID NO: 1291583 - RNA, 19 nt, Artificial Sequence
  Description of Artificial Sequence: Synthetic oligonucleotide
  Antisense strand to SEQ ID NO: 1291582
aguuuggaaacagucguag

SEQ ID NO: 1291584 - RNA, 19 nt, Artificial Sequence
  Description of Artificial Sequence: Synthetic oligonucleotide
  Sense strand starting at position 1856 of SEQ ID NO: 1241684
gcuggaguaaccuggauaa

SEQ ID NO: 1291585 - RNA, 19 nt, Artificial Sequence
  Description of Artificial Sequence: Synthetic oligonucleotide
  Antisense strand to SEQ ID NO: 1291584
uuauccagguuacuccagc

SEQ ID NO: 1291586 - RNA, 19 nt, Artificial Sequence
  Description of Artificial Sequence: Synthetic oligonucleotide
  Sense strand starting at position 1866 of SEQ ID NO: 1241684
ccuggauaauagccauagu

SEQ ID NO: 1291587 - RNA, 19 nt, Artificial Sequence
  Description of Artificial Sequence: Synthetic oligonucleotide
  Antisense strand to SEQ ID NO: 1291586
acuauggcuauuauccagg

SEQ ID NO: 1291588 - RNA, 19 nt, Artificial Sequence
  Description of Artificial Sequence: Synthetic oligonucleotide
  Sense strand starting at position 1869 of SEQ ID NO: 1241684
ggauaauagccauaguagc

SEQ ID NO: 1291589 - RNA, 19 nt, Artificial Sequence
  Description of Artificial Sequence: Synthetic oligonucleotide
  Antisense strand to SEQ ID NO: 1291588
gcuacuauggcuauuaucc

SEQ ID NO: 1291590 - RNA, 19 nt, Artificial Sequence
  Description of Artificial Sequence: Synthetic oligonucleotide
  Sense strand starting at position 2438 of SEQ ID NO: 1241684
agggacucauagcuguuaa

SEQ ID NO: 1291591 - RNA, 19 nt, Artificial Sequence
  Description of Artificial Sequence: Synthetic oligonucleotide
  Antisense strand to SEQ ID NO: 1291590
uuaacagcuaugagucccu

SEQ ID NO: 1291592 - RNA, 19 nt, Artificial Sequence
  Description of Artificial Sequence: Synthetic oligonucleotide
  Sense strand starting at position 2439 of SEQ ID NO: 1241684
gggacucauagcuguuaau

SEQ ID NO: 1291593 - RNA, 19 nt, Artificial Sequence
  Description of Artificial Sequence: Synthetic oligonucleotide
  Antisense strand to SEQ ID NO: 1291592
auuaacagcuaugaguccc

SEQ ID NO: 1291594 - RNA, 19 nt, Artificial Sequence
  Description of Artificial Sequence: Synthetic oligonucleotide
  Sense strand starting at position 2452 of SEQ ID NO: 1241684
guuaaugcgaggcauuaac

SEQ ID NO: 1291595 - RNA, 19 nt, Artificial Sequence
  Description of Artificial Sequence: Synthetic oligonucleotide
  Antisense strand to SEQ ID NO: 1291594
guuaaugccucgcauuaac

SEQ ID NO: 1291596 - RNA, 19 nt, Artificial Sequence
  Description of Artificial Sequence: Synthetic oligonucleotide
  Sense strand starting at position 2537 of SEQ ID NO: 1241684
caccucuggucugcugaua

SEQ ID NO: 1291597 - RNA, 19 nt, Artificial Sequence
  Description of Artificial Sequence: Synthetic oligonucleotide
  Antisense strand to SEQ ID NO: 1291596
uaucagcagaccagaggug

SEQ ID NO: 1291598 - RNA, 19 nt, Artificial Sequence
  Description of Artificial Sequence: Synthetic oligonucleotide
  Sense strand starting at position 2571 of SEQ ID NO: 1241684
gcguuagucaguccuugca

SEQ ID NO: 1291599 - RNA, 19 nt, Artificial Sequence
  Description of Artificial Sequence: Synthetic oligonucleotide
  Antisense strand to SEQ ID NO: 1291598
ugcaaggacugacuaacgc

SEQ ID NO: 1291600 - RNA, 19 nt, Artificial Sequence
  Description of Artificial Sequence: Synthetic oligonucleotide
  Sense strand starting at position 2583 of SEQ ID NO: 1241684
ccuugcaacuugucuagaa

SEQ ID NO: 1291601 - RNA, 19 nt, Artificial Sequence
  Description of Artificial Sequence: Synthetic oligonucleotide
  Antisense strand to SEQ ID NO: 1291600
uucuagacaaguugcaagg

SEQ ID NO: 1291602 - RNA, 19 nt, Artificial Sequence
  Description of Artificial Sequence: Synthetic oligonucleotide
  Sense strand starting at position 2584 of SEQ ID NO: 1241684
cuugcaacuugucuagaag

SEQ ID NO: 1291603 - RNA, 19 nt, Artificial Sequence
  Description of Artificial Sequence: Synthetic oligonucleotide
  Antisense strand to SEQ ID NO: 1291602
cuucuagacaaguugcaag

SEQ ID NO: 1291604 - RNA, 19 nt, Artificial Sequence
  Description of Artificial Sequence: Synthetic oligonucleotide
  Sense strand starting at position 2585 of SEQ ID NO: 1241684
uugcaacuugucuagaaga

SEQ ID NO: 1291605 - RNA, 19 nt, Artificial Sequence
  Description of Artificial Sequence: Synthetic oligonucleotide
  Antisense strand to SEQ ID NO: 1291604
ucuucuagacaaguugcaa

SEQ ID NO: 1291606 - RNA, 19 nt, Artificial Sequence
  Description of Artificial Sequence: Synthetic oligonucleotide
  Sense strand starting at position 2587 of SEQ ID NO: 1241684
gcaacuugucuagaagacu

SEQ ID NO: 1291607 - RNA, 19 nt, Artificial Sequence
  Description of Artificial Sequence: Synthetic oligonucleotide
  Antisense strand to SEQ ID NO: 1291606
agucuucuagacaaguugc

SEQ ID NO: 1291608 - RNA, 19 nt, Artificial Sequence
  Description of Artificial Sequence: Synthetic oligonucleotide
  Sense strand starting at position 2652 of SEQ ID NO: 1241684
ugguauauggagugauuau

SEQ ID NO: 1291609 - RNA, 19 nt, Artificial Sequence
  Description of Artificial Sequence: Synthetic oligonucleotide
  Antisense strand to SEQ ID NO: 1291608
auaaucacuccauauacca

SEQ ID NO: 1291610 - RNA, 19 nt, Artificial Sequence
  Description of Artificial Sequence: Synthetic oligonucleotide
  Sense strand starting at position 2653 of SEQ ID NO: 1241684
gguauauggagugauuauc

SEQ ID NO: 1291611 - RNA, 19 nt, Artificial Sequence
  Description of Artificial Sequence: Synthetic oligonucleotide
  Antisense strand to SEQ ID NO: 1291610
gauaaucacuccauauacc

SEQ ID NO: 1291612 - RNA, 19 nt, Artificial Sequence
  Description of Artificial Sequence: Synthetic oligonucleotide
  Sense strand starting at position 2659 of SEQ ID NO: 1241684
uggagugauuauccagguu

SEQ ID NO: 1291613 - RNA, 19 nt, Artificial Sequence
  Description of Artificial Sequence: Synthetic oligonucleotide
  Antisense strand to SEQ ID NO: 1291612
aaccuggauaaucacucca

SEQ ID NO: 1291614 - RNA, 19 nt, Artificial Sequence
  Description of Artificial Sequence: Synthetic oligonucleotide
  Sense strand starting at position 2695 of SEQ ID NO: 1241684
guaaguguucaagcgcuca

SEQ ID NO: 1291615 - RNA, 19 nt, Artificial Sequence
  Description of Artificial Sequence: Synthetic oligonucleotide
  Antisense strand to SEQ ID NO: 1291614
ugagcgcuugaacacuuac

SEQ ID NO: 1291616 - RNA, 19 nt, Artificial Sequence
  Description of Artificial Sequence: Synthetic oligonucleotide
  Sense strand starting at position 2876 of SEQ ID NO: 1241684
acuguaaauaucuggacga

SEQ ID NO: 1291617 - RNA, 19 nt, Artificial Sequence
  Description of Artificial Sequence: Synthetic oligonucleotide
  Antisense strand to SEQ ID NO: 1291616
ucguccagauauuuacagu

SEQ ID NO: 1291618 - RNA, 19 nt, Artificial Sequence
  Description of Artificial Sequence: Synthetic oligonucleotide
  Sense strand starting at position 2878 of SEQ ID NO: 1241684
uguaaauaucuggacgagu

SEQ ID NO: 1291619 - RNA, 19 nt, Artificial Sequence
  Description of Artificial Sequence: Synthetic oligonucleotide
  Antisense strand to SEQ ID NO: 1291618
acucguccagauauuuaca

SEQ ID NO: 1291620 - RNA, 19 nt, Artificial Sequence
  Description of Artificial Sequence: Synthetic oligonucleotide
  Sense strand starting at position 2880 of SEQ ID NO: 1241684
uaaauaucuggacgaguga

SEQ ID NO: 1291621 - RNA, 19 nt, Artificial Sequence
  Description of Artificial Sequence: Synthetic oligonucleotide
  Antisense strand to SEQ ID NO: 1291620
ucacucguccagauauuua

SEQ ID NO: 1291622 - RNA, 19 nt, Artificial Sequence
  Description of Artificial Sequence: Synthetic oligonucleotide
  Sense strand starting at position 2895 of SEQ ID NO: 1241684
gugaaagucuuagcuacag

SEQ ID NO: 1291623 - RNA, 19 nt, Artificial Sequence
  Description of Artificial Sequence: Synthetic oligonucleotide
  Antisense strand to SEQ ID NO: 1291622
cuguagcuaagacuuucac

SEQ ID NO: 1291624 - RNA, 19 nt, Artificial Sequence
  Description of Artificial Sequence: Synthetic oligonucleotide
  Sense strand starting at position 2918 of SEQ ID NO: 1241684
gagccuuuccauuagagca

SEQ ID NO: 1291625 - RNA, 19 nt, Artificial Sequence
  Description of Artificial Sequence: Synthetic oligonucleotide
  Antisense strand to SEQ ID NO: 1291624
ugcucuaauggaaaggcuc

SEQ ID NO: 1291626 - RNA, 19 nt, Artificial Sequence
  Description of Artificial Sequence: Synthetic oligonucleotide
  Sense strand starting at position 2934 of SEQ ID NO: 1241684
gcagaacauccuugaagcu

SEQ ID NO: 1291627 - RNA, 19 nt, Artificial Sequence
  Description of Artificial Sequence: Synthetic oligonucleotide
  Antisense strand to SEQ ID NO: 1291626
agcuucaaggauguucugc

SEQ ID NO: 1291628 - RNA, 19 nt, Artificial Sequence
  Description of Artificial Sequence: Synthetic oligonucleotide
  Sense strand starting at position 3185 of SEQ ID NO: 1241684
gggucagcucaucagcuua

SEQ ID NO: 1291629 - RNA, 19 nt, Artificial Sequence
  Description of Artificial Sequence: Synthetic oligonucleotide
  Antisense strand to SEQ ID NO: 1291628
uaagcugaugagcugaccc

SEQ ID NO: 1291630 - RNA, 19 nt, Artificial Sequence
  Description of Artificial Sequence: Synthetic oligonucleotide
  Sense strand starting at position 3430 of SEQ ID NO: 1241684
guaaauuagguuuaagcau

SEQ ID NO: 1291631 - RNA, 19 nt, Artificial Sequence
  Description of Artificial Sequence: Synthetic oligonucleotide
  Antisense strand to SEQ ID NO: 1291630
augcuuaaaccuaauuuac

SEQ ID NO: 1291632 - RNA, 19 nt, Artificial Sequence
  Description of Artificial Sequence: Synthetic oligonucleotide
  Sense strand starting at position 3540 of SEQ ID NO: 1241684
agauuauuguggcuggaag

SEQ ID NO: 1291633 - RNA, 19 nt, Artificial Sequence
  Description of Artificial Sequence: Synthetic oligonucleotide
  Antisense strand to SEQ ID NO: 1291632
cuuccagccacaauaaucu

SEQ ID NO: 1291634 - RNA, 19 nt, Artificial Sequence
  Description of Artificial Sequence: Synthetic oligonucleotide
  Sense strand starting at position 3542 of SEQ ID NO: 1241684
auuauuguggcuggaagga

SEQ ID NO: 1291635 - RNA, 19 nt, Artificial Sequence
  Description of Artificial Sequence: Synthetic oligonucleotide
  Antisense strand to SEQ ID NO: 1291634
uccuuccagccacaauaau

SEQ ID NO: 1291636 - RNA, 19 nt, Artificial Sequence
  Description of Artificial Sequence: Synthetic oligonucleotide
  Sense strand starting at position 3705 of SEQ ID NO: 1241684
aaaugaaagcguuaugccu

SEQ ID NO: 1291637 - RNA, 19 nt, Artificial Sequence
  Description of Artificial Sequence: Synthetic oligonucleotide
  Antisense strand to SEQ ID NO: 1291636
aggcauaacgcuuucauuu

SEQ ID NO: 1291638 - RNA, 19 nt, Artificial Sequence
  Description of Artificial Sequence: Synthetic oligonucleotide
  Sense strand starting at position 3803 of SEQ ID NO: 1241684
gcauguauugcacauggua

SEQ ID NO: 1291639 - RNA, 19 nt, Artificial Sequence
  Description of Artificial Sequence: Synthetic oligonucleotide
  Antisense strand to SEQ ID NO: 1291638
uaccaugugcaauacaugc

SEQ ID NO: 1291640 - RNA, 19 nt, Artificial Sequence
  Description of Artificial Sequence: Synthetic oligonucleotide
  Sense strand starting at position 57 of SEQ ID NO: 1241685
ggccucugaaagugaaaua

SEQ ID NO: 1291641 - RNA, 19 nt, Artificial Sequence
  Description of Artificial Sequence: Synthetic oligonucleotide
  Antisense strand to SEQ ID NO: 1291640
uauuucacuuucagaggcc

SEQ ID NO: 1291642 - RNA, 19 nt, Artificial Sequence
  Description of Artificial Sequence: Synthetic oligonucleotide
  Sense strand starting at position 151 of SEQ ID NO: 1241685
uuuggaaguuaaucugcau

SEQ ID NO: 1291643 - RNA, 19 nt, Artificial Sequence
  Description of Artificial Sequence: Synthetic oligonucleotide
  Antisense strand to SEQ ID NO: 1291642
augcagauuaacuuccaaa

SEQ ID NO: 1291644 - RNA, 19 nt, Artificial Sequence
  Description of Artificial Sequence: Synthetic oligonucleotide
  Sense strand starting at position 155 of SEQ ID NO: 1241685
gaaguuaaucugcauggcu

SEQ ID NO: 1291645 - RNA, 19 nt, Artificial Sequence
  Description of Artificial Sequence: Synthetic oligonucleotide
  Antisense strand to SEQ ID NO: 1291644
agccaugcagauuaacuuc

SEQ ID NO: 1291646 - RNA, 19 nt, Artificial Sequence
  Description of Artificial Sequence: Synthetic oligonucleotide
  Sense strand starting at position 180 of SEQ ID NO: 1241685
cacuuuggccaaggagaua

SEQ ID NO: 1291647 - RNA, 19 nt, Artificial Sequence
  Description of Artificial Sequence: Synthetic oligonucleotide
  Antisense strand to SEQ ID NO: 1291646
uaucuccuuggccaaagug

SEQ ID NO: 1291648 - RNA, 19 nt, Artificial Sequence
  Description of Artificial Sequence: Synthetic oligonucleotide
  Sense strand starting at position 304 of SEQ ID NO: 1241685
guaguagcccuccaaggua

SEQ ID NO: 1291649 - RNA, 19 nt, Artificial Sequence
  Description of Artificial Sequence: Synthetic oligonucleotide
  Antisense strand to SEQ ID NO: 1291648
uaccuuggagggcuacuac

SEQ ID NO: 1291650 - RNA, 19 nt, Artificial Sequence
  Description of Artificial Sequence: Synthetic oligonucleotide
  Sense strand starting at position 414 of SEQ ID NO: 1241685
ucuacuucuccguauauua

SEQ ID NO: 1291651 - RNA, 19 nt, Artificial Sequence
  Description of Artificial Sequence: Synthetic oligonucleotide
  Antisense strand to SEQ ID NO: 1291650
uaauauacggagaaguaga

SEQ ID NO: 1291652 - RNA, 19 nt, Artificial Sequence
  Description of Artificial Sequence: Synthetic oligonucleotide
  Sense strand starting at position 635 of SEQ ID NO: 1241685
aaauguuuggacggugaag

SEQ ID NO: 1291653 - RNA, 19 nt, Artificial Sequence
  Description of Artificial Sequence: Synthetic oligonucleotide
  Antisense strand to SEQ ID NO: 1291652
cuucaccguccaaacauuu

SEQ ID NO: 1291654 - RNA, 19 nt, Artificial Sequence
  Description of Artificial Sequence: Synthetic oligonucleotide
  Sense strand starting at position 728 of SEQ ID NO: 1241685
acacucguugcuuaaccaa

SEQ ID NO: 1291655 - RNA, 19 nt, Artificial Sequence
  Description of Artificial Sequence: Synthetic oligonucleotide
  Antisense strand to SEQ ID NO: 1291654
uugguuaagcaacgagugu

SEQ ID NO: 1291656 - RNA, 19 nt, Artificial Sequence
  Description of Artificial Sequence: Synthetic oligonucleotide
  Sense strand starting at position 868 of SEQ ID NO: 1241685
uaaccuugugacugcaaga

SEQ ID NO: 1291657 - RNA, 19 nt, Artificial Sequence
  Description of Artificial Sequence: Synthetic oligonucleotide
  Antisense strand to SEQ ID NO: 1291656
ucuugcagucacaagguua

SEQ ID NO: 1291658 - RNA, 19 nt, Artificial Sequence
  Description of Artificial Sequence: Synthetic oligonucleotide
  Sense strand starting at position 926 of SEQ ID NO: 1241685
gggauaaggccucagcuca

SEQ ID NO: 1291659 - RNA, 19 nt, Artificial Sequence
  Description of Artificial Sequence: Synthetic oligonucleotide
  Antisense strand to SEQ ID NO: 1291658
ugagcugaggccuuauccc

SEQ ID NO: 1291660 - RNA, 19 nt, Artificial Sequence
  Description of Artificial Sequence: Synthetic oligonucleotide
  Sense strand starting at position 939 of SEQ ID NO: 1241685
agcucaugugauuacuaaa

SEQ ID NO: 1291661 - RNA, 19 nt, Artificial Sequence
  Description of Artificial Sequence: Synthetic oligonucleotide
  Antisense strand to SEQ ID NO: 1291660
uuuaguaaucacaugagcu

SEQ ID NO: 1291662 - RNA, 19 nt, Artificial Sequence
  Description of Artificial Sequence: Synthetic oligonucleotide
  Sense strand starting at position 1120 of SEQ ID NO: 1241685
cacguuguucuggcaguau

SEQ ID NO: 1291663 - RNA, 19 nt, Artificial Sequence
  Description of Artificial Sequence: Synthetic oligonucleotide
  Antisense strand to SEQ ID NO: 1291662
auacugccagaacaacgug

SEQ ID NO: 1291664 - RNA, 19 nt, Artificial Sequence
  Description of Artificial Sequence: Synthetic oligonucleotide
  Sense strand starting at position 1195 of SEQ ID NO: 1241685
ugucuaggacucgaguuaa

SEQ ID NO: 1291665 - RNA, 19 nt, Artificial Sequence
  Description of Artificial Sequence: Synthetic oligonucleotide
  Antisense strand to SEQ ID NO: 1291664
uuaacucgaguccuagaca

SEQ ID NO: 1291666 - RNA, 19 nt, Artificial Sequence
  Description of Artificial Sequence: Synthetic oligonucleotide
  Sense strand starting at position 1282 of SEQ ID NO: 1241685
ccauucuaccgcuaagaau

SEQ ID NO: 1291667 - RNA, 19 nt, Artificial Sequence
  Description of Artificial Sequence: Synthetic oligonucleotide
  Antisense strand to SEQ ID NO: 1291666
auucuuagcgguagaaugg

SEQ ID NO: 1291668 - RNA, 19 nt, Artificial Sequence
  Description of Artificial Sequence: Synthetic oligonucleotide
  Sense strand starting at position 1291 of SEQ ID NO: 1241685
cgcuaagaauuucuguauu

SEQ ID NO: 1291669 - RNA, 19 nt, Artificial Sequence
  Description of Artificial Sequence: Synthetic oligonucleotide
  Antisense strand to SEQ ID NO: 1291668
aauacagaaauucuuagcg

SEQ ID NO: 1291670 - RNA, 19 nt, Artificial Sequence
  Description of Artificial Sequence: Synthetic oligonucleotide
  Sense strand starting at position 1335 of SEQ ID NO: 1241685
ccaugacuaagucggaaga

SEQ ID NO: 1291671 - RNA, 19 nt, Artificial Sequence
  Description of Artificial Sequence: Synthetic oligonucleotide
  Antisense strand to SEQ ID NO: 1291670
ucuuccgacuuagucaugg

SEQ ID NO: 1291672 - RNA, 19 nt, Artificial Sequence
  Description of Artificial Sequence: Synthetic oligonucleotide
  Sense strand starting at position 2288 of SEQ ID NO: 1241685
cgagguucuggauaguaag

SEQ ID NO: 1291673 - RNA, 19 nt, Artificial Sequence
  Description of Artificial Sequence: Synthetic oligonucleotide
  Antisense strand to SEQ ID NO: 1291672
cuuacuauccagaaccucg

SEQ ID NO: 1291674 - RNA, 19 nt, Artificial Sequence
  Description of Artificial Sequence: Synthetic oligonucleotide
  Sense strand starting at position 2351 of SEQ ID NO: 1241685
cgagacuuauaguaauuua

SEQ ID NO: 1291675 - RNA, 19 nt, Artificial Sequence
  Description of Artificial Sequence: Synthetic oligonucleotide
  Antisense strand to SEQ ID NO: 1291674
uaaauuacuauaagucucg

SEQ ID NO: 1291676 - RNA, 19 nt, Artificial Sequence
  Description of Artificial Sequence: Synthetic oligonucleotide
  Sense strand starting at position 2409 of SEQ ID NO: 1241685
gaucucugacggugaaguu

SEQ ID NO: 1291677 - RNA, 19 nt, Artificial Sequence
  Description of Artificial Sequence: Synthetic oligonucleotide
  Antisense strand to SEQ ID NO: 1291676
aacuucaccgucagagauc

SEQ ID NO: 1291678 - RNA, 19 nt, Artificial Sequence
  Description of Artificial Sequence: Synthetic oligonucleotide
  Sense strand starting at position 2410 of SEQ ID NO: 1241685
aucucugacggugaaguua

SEQ ID NO: 1291679 - RNA, 19 nt, Artificial Sequence
  Description of Artificial Sequence: Synthetic oligonucleotide
  Antisense strand to SEQ ID NO: 1291678
uaacuucaccgucagagau

SEQ ID NO: 1291680 - RNA, 19 nt, Artificial Sequence
  Description of Artificial Sequence: Synthetic oligonucleotide
  Sense strand starting at position 2418 of SEQ ID NO: 1241685
cggugaaguuagacuucgu

SEQ ID NO: 1291681 - RNA, 19 nt, Artificial Sequence
  Description of Artificial Sequence: Synthetic oligonucleotide
  Antisense strand to SEQ ID NO: 1291680
acgaagucuaacuucaccg

SEQ ID NO: 1291682 - RNA, 19 nt, Artificial Sequence
  Description of Artificial Sequence: Synthetic oligonucleotide
  Sense strand starting at position 2474 of SEQ ID NO: 1241685
acaaguaaauucuuuggua

SEQ ID NO: 1291683 - RNA, 19 nt, Artificial Sequence
  Description of Artificial Sequence: Synthetic oligonucleotide
  Antisense strand to SEQ ID NO: 1291682
uaccaaagaauuuacuugu

SEQ ID NO: 1291684 - RNA, 19 nt, Artificial Sequence
  Description of Artificial Sequence: Synthetic oligonucleotide
  Sense strand starting at position 2681 of SEQ ID NO: 1241685
ccacuuaucagcugggaga

SEQ ID NO: 1291685 - RNA, 19 nt, Artificial Sequence
  Description of Artificial Sequence: Synthetic oligonucleotide
  Antisense strand to SEQ ID NO: 1291684
ucucccagcugauaagugg

SEQ ID NO: 1291686 - RNA, 19 nt, Artificial Sequence
  Description of Artificial Sequence: Synthetic oligonucleotide
  Sense strand starting at position 2695 of SEQ ID NO: 1241685
ggagacuuuggguggguua

SEQ ID NO: 1291687 - RNA, 19 nt, Artificial Sequence
  Description of Artificial Sequence: Synthetic oligonucleotide
  Antisense strand to SEQ ID NO: 1291686
uaacccacccaaagucucc

SEQ ID NO: 1291688 - RNA, 19 nt, Artificial Sequence
  Description of Artificial Sequence: Synthetic oligonucleotide
  Sense strand starting at position 2857 of SEQ ID NO: 1241685
acuaguaauggucauguau

SEQ ID NO: 1291689 - RNA, 19 nt, Artificial Sequence
  Description of Artificial Sequence: Synthetic oligonucleotide
  Antisense strand to SEQ ID NO: 1291688
auacaugaccauuacuagu

SEQ ID NO: 1291690 - RNA, 19 nt, Artificial Sequence
  Description of Artificial Sequence: Synthetic oligonucleotide
  Sense strand starting at position 2965 of SEQ ID NO: 1241685
gaucauugaguauggcuaa

SEQ ID NO: 1291691 - RNA, 19 nt, Artificial Sequence
  Description of Artificial Sequence: Synthetic oligonucleotide
  Antisense strand to SEQ ID NO: 1291690
uuagccauacucaaugauc

SEQ ID NO: 1291692 - RNA, 19 nt, Artificial Sequence
  Description of Artificial Sequence: Synthetic oligonucleotide
  Sense strand starting at position 3015 of SEQ ID NO: 1241685
auggguugaagguguaaau

SEQ ID NO: 1291693 - RNA, 19 nt, Artificial Sequence
  Description of Artificial Sequence: Synthetic oligonucleotide
  Antisense strand to SEQ ID NO: 1291692
auuuacaccuucaacccau

SEQ ID NO: 1291694 - RNA, 19 nt, Artificial Sequence
  Description of Artificial Sequence: Synthetic oligonucleotide
  Sense strand starting at position 3066 of SEQ ID NO: 1241685
cgacuuccugaagaaguca

SEQ ID NO: 1291695 - RNA, 19 nt, Artificial Sequence
  Description of Artificial Sequence: Synthetic oligonucleotide
  Antisense strand to SEQ ID NO: 1291694
ugacuucuucaggaagucg

SEQ ID NO: 1291696 - RNA, 19 nt, Artificial Sequence
  Description of Artificial Sequence: Synthetic oligonucleotide
  Sense strand starting at position 3079 of SEQ ID NO: 1241685
aagucauccuagucuggaa

SEQ ID NO: 1291697 - RNA, 19 nt, Artificial Sequence
  Description of Artificial Sequence: Synthetic oligonucleotide
  Antisense strand to SEQ ID NO: 1291696
uuccagacuaggaugacuu

SEQ ID NO: 1291698 - RNA, 19 nt, Artificial Sequence
  Description of Artificial Sequence: Synthetic oligonucleotide
  Sense strand starting at position 3140 of SEQ ID NO: 1241685
cagcauuuagcccguuauu

SEQ ID NO: 1291699 - RNA, 19 nt, Artificial Sequence
  Description of Artificial Sequence: Synthetic oligonucleotide
  Antisense strand to SEQ ID NO: 1291698
aauaacgggcuaaaugcug

SEQ ID NO: 1291700 - RNA, 19 nt, Artificial Sequence
  Description of Artificial Sequence: Synthetic oligonucleotide
  Sense strand starting at position 3228 of SEQ ID NO: 1241685
ggaucuuauggaggccauu

SEQ ID NO: 1291701 - RNA, 19 nt, Artificial Sequence
  Description of Artificial Sequence: Synthetic oligonucleotide
  Antisense strand to SEQ ID NO: 1291700
aauggccuccauaagaucc

SEQ ID NO: 1291702 - RNA, 19 nt, Artificial Sequence
  Description of Artificial Sequence: Synthetic oligonucleotide
  Sense strand starting at position 3271 of SEQ ID NO: 1241685
acuggaaagccauagcaua

SEQ ID NO: 1291703 - RNA, 19 nt, Artificial Sequence
  Description of Artificial Sequence: Synthetic oligonucleotide
  Antisense strand to SEQ ID NO: 1291702
uaugcuauggcuuuccagu

SEQ ID NO: 1291704 - RNA, 19 nt, Artificial Sequence
  Description of Artificial Sequence: Synthetic oligonucleotide
  Sense strand starting at position 3318 of SEQ ID NO: 1241685
cuuggacaucccugacaca

SEQ ID NO: 1291705 - RNA, 19 nt, Artificial Sequence
  Description of Artificial Sequence: Synthetic oligonucleotide
  Antisense strand to SEQ ID NO: 1291704
ugugucagggauguccaag

SEQ ID NO: 1291706 - RNA, 19 nt, Artificial Sequence
  Description of Artificial Sequence: Synthetic oligonucleotide
  Sense strand starting at position 3343 of SEQ ID NO: 1241685
uuuggaagcaccugguauu

SEQ ID NO: 1291707 - RNA, 19 nt, Artificial Sequence
  Description of Artificial Sequence: Synthetic oligonucleotide
  Antisense strand to SEQ ID NO: 1291706
aauaccaggugcuuccaaa

SEQ ID NO: 1291708 - RNA, 19 nt, Artificial Sequence
  Description of Artificial Sequence: Synthetic oligonucleotide
  Sense strand starting at position 3450 of SEQ ID NO: 1241685
auguccgaggcaugacaaa

SEQ ID NO: 1291709 - RNA, 19 nt, Artificial Sequence
  Description of Artificial Sequence: Synthetic oligonucleotide
  Antisense strand to SEQ ID NO: 1291708
uuugucaugccucggacau

SEQ ID NO: 1291710 - RNA, 19 nt, Artificial Sequence
  Description of Artificial Sequence: Synthetic oligonucleotide
  Sense strand starting at position 3585 of SEQ ID NO: 1241685
uaagacgugugauugaaga

SEQ ID NO: 1291711 - RNA, 19 nt, Artificial Sequence
  Description of Artificial Sequence: Synthetic oligonucleotide
  Antisense strand to SEQ ID NO: 1291710
ucuucaaucacacgucuua

SEQ ID NO: 1291712 - RNA, 19 nt, Artificial Sequence
  Description of Artificial Sequence: Synthetic oligonucleotide
  Sense strand starting at position 3587 of SEQ ID NO: 1241685
agacgugugauugaagauc

SEQ ID NO: 1291713 - RNA, 19 nt, Artificial Sequence
  Description of Artificial Sequence: Synthetic oligonucleotide
  Antisense strand to SEQ ID NO: 1291712
gaucuucaaucacacgucu

SEQ ID NO: 1291714 - RNA, 19 nt, Artificial Sequence
  Description of Artificial Sequence: Synthetic oligonucleotide
  Sense strand starting at position 3656 of SEQ ID NO: 1241685
acucaugauuccuuugaga

SEQ ID NO: 1291715 - RNA, 19 nt, Artificial Sequence
  Description of Artificial Sequence: Synthetic oligonucleotide
  Antisense strand to SEQ ID NO: 1291714
ucucaaaggaaucaugagu

SEQ ID NO: 1291716 - RNA, 19 nt, Artificial Sequence
  Description of Artificial Sequence: Synthetic oligonucleotide
  Sense strand starting at position 3658 of SEQ ID NO: 1241685
ucaugauuccuuugagaaa

SEQ ID NO: 1291717 - RNA, 19 nt, Artificial Sequence
  Description of Artificial Sequence: Synthetic oligonucleotide
  Antisense strand to SEQ ID NO: 1291716
uuucucaaaggaaucauga

SEQ ID NO: 1291718 - RNA, 19 nt, Artificial Sequence
  Description of Artificial Sequence: Synthetic oligonucleotide
  Sense strand starting at position 3882 of SEQ ID NO: 1241685
uugguacgugugucauagu

SEQ ID NO: 1291719 - RNA, 19 nt, Artificial Sequence
  Description of Artificial Sequence: Synthetic oligonucleotide
  Antisense strand to SEQ ID NO: 1291718
acuaugacacacguaccaa

SEQ ID NO: 1291720 - RNA, 19 nt, Artificial Sequence
  Description of Artificial Sequence: Synthetic oligonucleotide
  Sense strand starting at position 814 of SEQ ID NO: 1241686
gggacagaaucucaauaga

SEQ ID NO: 1291721 - RNA, 19 nt, Artificial Sequence
  Description of Artificial Sequence: Synthetic oligonucleotide
  Antisense strand to SEQ ID NO: 1291720
ucuauugagauucuguccc

SEQ ID NO: 1291722 - RNA, 19 nt, Artificial Sequence
  Description of Artificial Sequence: Synthetic oligonucleotide
  Sense strand starting at position 844 of SEQ ID NO: 1241686
gggcaaaugaugugaggua

SEQ ID NO: 1291723 - RNA, 19 nt, Artificial Sequence
  Description of Artificial Sequence: Synthetic oligonucleotide
  Antisense strand to SEQ ID NO: 1291722
uaccucacaucauuugccc

SEQ ID NO: 1291724 - RNA, 19 nt, Artificial Sequence
  Description of Artificial Sequence: Synthetic oligonucleotide
  Sense strand starting at position 991 of SEQ ID NO: 1241686
cuugguacuccucauguau

SEQ ID NO: 1291725 - RNA, 19 nt, Artificial Sequence
  Description of Artificial Sequence: Synthetic oligonucleotide
  Antisense strand to SEQ ID NO: 1291724
auacaugaggaguaccaag

SEQ ID NO: 1291726 - RNA, 19 nt, Artificial Sequence
  Description of Artificial Sequence: Synthetic oligonucleotide
  Sense strand starting at position 1082 of SEQ ID NO: 1241686
guacuuacaugagcugaau

SEQ ID NO: 1291727 - RNA, 19 nt, Artificial Sequence
  Description of Artificial Sequence: Synthetic oligonucleotide
  Antisense strand to SEQ ID NO: 1291726
auucagcucauguaaguac

SEQ ID NO: 1291728 - RNA, 19 nt, Artificial Sequence
  Description of Artificial Sequence: Synthetic oligonucleotide
  Sense strand starting at position 1126 of SEQ ID NO: 1241686
acuugcugaucuguucuaa

SEQ ID NO: 1291729 - RNA, 19 nt, Artificial Sequence
  Description of Artificial Sequence: Synthetic oligonucleotide
  Antisense strand to SEQ ID NO: 1291728
uuagaacagaucagcaagu

SEQ ID NO: 1291730 - RNA, 19 nt, Artificial Sequence
  Description of Artificial Sequence: Synthetic oligonucleotide
  Sense strand starting at position 1155 of SEQ ID NO: 1241686
gcagaaauuagauguggga

SEQ ID NO: 1291731 - RNA, 19 nt, Artificial Sequence
  Description of Artificial Sequence: Synthetic oligonucleotide
  Antisense strand to SEQ ID NO: 1291730
ucccacaucuaauuucugc

SEQ ID NO: 1291732 - RNA, 19 nt, Artificial Sequence
  Description of Artificial Sequence: Synthetic oligonucleotide
  Sense strand starting at position 1325 of SEQ ID NO: 1241686
cuuuguccuguuuaucauu

SEQ ID NO: 1291733 - RNA, 19 nt, Artificial Sequence
  Description of Artificial Sequence: Synthetic oligonucleotide
  Antisense strand to SEQ ID NO: 1291732
aaugauaaacaggacaaag

SEQ ID NO: 1291734 - RNA, 19 nt, Artificial Sequence
  Description of Artificial Sequence: Synthetic oligonucleotide
  Sense strand starting at position 1354 of SEQ ID NO: 1241686
agaccugcggcuugaaauc

SEQ ID NO: 1291735 - RNA, 19 nt, Artificial Sequence
  Description of Artificial Sequence: Synthetic oligonucleotide
  Antisense strand to SEQ ID NO: 1291734
gauuucaagccgcaggucu

SEQ ID NO: 1291736 - RNA, 19 nt, Artificial Sequence
  Description of Artificial Sequence: Synthetic oligonucleotide
  Sense strand starting at position 1621 of SEQ ID NO: 1241686
gaaucagagcaagguauca

SEQ ID NO: 1291737 - RNA, 19 nt, Artificial Sequence
  Description of Artificial Sequence: Synthetic oligonucleotide
  Antisense strand to SEQ ID NO: 1291736
ugauaccuugcucugauuc

SEQ ID NO: 1291738 - RNA, 19 nt, Artificial Sequence
  Description of Artificial Sequence: Synthetic oligonucleotide
  Sense strand starting at position 2118 of SEQ ID NO: 1241686
uggcaugacuaauccaaga

SEQ ID NO: 1291739 - RNA, 19 nt, Artificial Sequence
  Description of Artificial Sequence: Synthetic oligonucleotide
  Antisense strand to SEQ ID NO: 1291738
ucuuggauuagucaugcca

SEQ ID NO: 1291740 - RNA, 19 nt, Artificial Sequence
  Description of Artificial Sequence: Synthetic oligonucleotide
  Sense strand starting at position 2141 of SEQ ID NO: 1241686
cggauagucuuaguucaug

SEQ ID NO: 1291741 - RNA, 19 nt, Artificial Sequence
  Description of Artificial Sequence: Synthetic oligonucleotide
  Antisense strand to SEQ ID NO: 1291740
caugaacuaagacuauccg

SEQ ID NO: 1291742 - RNA, 19 nt, Artificial Sequence
  Description of Artificial Sequence: Synthetic oligonucleotide
  Sense strand starting at position 2253 of SEQ ID NO: 1241686
ggacguuugaucuaagccu

SEQ ID NO: 1291743 - RNA, 19 nt, Artificial Sequence
  Description of Artificial Sequence: Synthetic oligonucleotide
  Antisense strand to SEQ ID NO: 1291742
aggcuuagaucaaacgucc

SEQ ID NO: 1291744 - RNA, 19 nt, Artificial Sequence
  Description of Artificial Sequence: Synthetic oligonucleotide
  Sense strand starting at position 2295 of SEQ ID NO: 1241686
caagucuuauagguugcaa

SEQ ID NO: 1291745 - RNA, 19 nt, Artificial Sequence
  Description of Artificial Sequence: Synthetic oligonucleotide
  Antisense strand to SEQ ID NO: 1291744
uugcaaccuauaagacuug

SEQ ID NO: 1291746 - RNA, 19 nt, Artificial Sequence
  Description of Artificial Sequence: Synthetic oligonucleotide
  Sense strand starting at position 2297 of SEQ ID NO: 1241686
agucuuauagguugcaaug

SEQ ID NO: 1291747 - RNA, 19 nt, Artificial Sequence
  Description of Artificial Sequence: Synthetic oligonucleotide
  Antisense strand to SEQ ID NO: 1291746
cauugcaaccuauaagacu

SEQ ID NO: 1291748 - RNA, 19 nt, Artificial Sequence
  Description of Artificial Sequence: Synthetic oligonucleotide
  Sense strand starting at position 2306 of SEQ ID NO: 1241686
gguugcaaugcugauacuu

SEQ ID NO: 1291749 - RNA, 19 nt, Artificial Sequence
  Description of Artificial Sequence: Synthetic oligonucleotide
  Antisense strand to SEQ ID NO: 1291748
aaguaucagcauugcaacc

SEQ ID NO: 1291750 - RNA, 19 nt, Artificial Sequence
  Description of Artificial Sequence: Synthetic oligonucleotide
  Sense strand starting at position 2390 of SEQ ID NO: 1241686
uggugcuacucugugggaa

SEQ ID NO: 1291751 - RNA, 19 nt, Artificial Sequence
  Description of Artificial Sequence: Synthetic oligonucleotide
  Antisense strand to SEQ ID NO: 1291750
uucccacagaguagcacca

SEQ ID NO: 1291752 - RNA, 19 nt, Artificial Sequence
  Description of Artificial Sequence: Synthetic oligonucleotide
  Sense strand starting at position 2391 of SEQ ID NO: 1241686
ggugcuacucugugggaac

SEQ ID NO: 1291753 - RNA, 19 nt, Artificial Sequence
  Description of Artificial Sequence: Synthetic oligonucleotide
  Antisense strand to SEQ ID NO: 1291752
guucccacagaguagcacc

SEQ ID NO: 1291754 - RNA, 19 nt, Artificial Sequence
  Description of Artificial Sequence: Synthetic oligonucleotide
  Sense strand starting at position 2393 of SEQ ID NO: 1241686
ugcuacucugugggaacua

SEQ ID NO: 1291755 - RNA, 19 nt, Artificial Sequence
  Description of Artificial Sequence: Synthetic oligonucleotide
  Antisense strand to SEQ ID NO: 1291754
uaguucccacagaguagca

SEQ ID NO: 1291756 - RNA, 19 nt, Artificial Sequence
  Description of Artificial Sequence: Synthetic oligonucleotide
  Sense strand starting at position 2466 of SEQ ID NO: 1241686
cauggaaaugucuaguggu

SEQ ID NO: 1291757 - RNA, 19 nt, Artificial Sequence
  Description of Artificial Sequence: Synthetic oligonucleotide
  Antisense strand to SEQ ID NO: 1291756
accacuagacauuuccaug

SEQ ID NO: 1291758 - RNA, 19 nt, Artificial Sequence
  Description of Artificial Sequence: Synthetic oligonucleotide
  Sense strand starting at position 2480 of SEQ ID NO: 1241686
gugguaaguugauuuguuu

SEQ ID NO: 1291759 - RNA, 19 nt, Artificial Sequence
  Description of Artificial Sequence: Synthetic oligonucleotide
  Antisense strand to SEQ ID NO: 1291758
aaacaaaucaacuuaccac

SEQ ID NO: 1291760 - RNA, 19 nt, Artificial Sequence
  Description of Artificial Sequence: Synthetic oligonucleotide
  Sense strand starting at position 2541 of SEQ ID NO: 1241686
aguugagaugucugguauu

SEQ ID NO: 1291761 - RNA, 19 nt, Artificial Sequence
  Description of Artificial Sequence: Synthetic oligonucleotide
  Antisense strand to SEQ ID NO: 1291760
aauaccagacaucucaacu

SEQ ID NO: 1291762 - RNA, 19 nt, Artificial Sequence
  Description of Artificial Sequence: Synthetic oligonucleotide
  Sense strand starting at position 2600 of SEQ ID NO: 1241686
ccugguaagaacuguggaa

SEQ ID NO: 1291763 - RNA, 19 nt, Artificial Sequence
  Description of Artificial Sequence: Synthetic oligonucleotide
  Antisense strand to SEQ ID NO: 1291762
uuccacaguucuuaccagg

SEQ ID NO: 1291764 - RNA, 19 nt, Artificial Sequence
  Description of Artificial Sequence: Synthetic oligonucleotide
  Sense strand starting at position 2651 of SEQ ID NO: 1241686
cugcucuagcccugaaaca

SEQ ID NO: 1291765 - RNA, 19 nt, Artificial Sequence
  Description of Artificial Sequence: Synthetic oligonucleotide
  Antisense strand to SEQ ID NO: 1291764
uguuucagggcuagagcag

SEQ ID NO: 1291766 - RNA, 19 nt, Artificial Sequence
  Description of Artificial Sequence: Synthetic oligonucleotide
  Sense strand starting at position 2750 of SEQ ID NO: 1241686
ucaguucugaugggaauca

SEQ ID NO: 1291767 - RNA, 19 nt, Artificial Sequence
  Description of Artificial Sequence: Synthetic oligonucleotide
  Antisense strand to SEQ ID NO: 1291766
ugauucccaucagaacuga

SEQ ID NO: 1291768 - RNA, 19 nt, Artificial Sequence
  Description of Artificial Sequence: Synthetic oligonucleotide
  Sense strand starting at position 2840 of SEQ ID NO: 1241686
aagggaaggcguuaguaca

SEQ ID NO: 1291769 - RNA, 19 nt, Artificial Sequence
  Description of Artificial Sequence: Synthetic oligonucleotide
  Antisense strand to SEQ ID NO: 1291768
uguacuaacgccuucccuu

SEQ ID NO: 1291770 - RNA, 19 nt, Artificial Sequence
  Description of Artificial Sequence: Synthetic oligonucleotide
  Sense strand starting at position 3001 of SEQ ID NO: 1241686
gaagcaguauucuuacagu

SEQ ID NO: 1291771 - RNA, 19 nt, Artificial Sequence
  Description of Artificial Sequence: Synthetic oligonucleotide
  Antisense strand to SEQ ID NO: 1291770
acuguaagaauacugcuuc

SEQ ID NO: 1291772 - RNA, 19 nt, Artificial Sequence
  Description of Artificial Sequence: Synthetic oligonucleotide
  Sense strand starting at position 3017 of SEQ ID NO: 1241686
aguguuacuggaugauucu

SEQ ID NO: 1291773 - RNA, 19 nt, Artificial Sequence
  Description of Artificial Sequence: Synthetic oligonucleotide
  Antisense strand to SEQ ID NO: 1291772
agaaucauccaguaacacu

SEQ ID NO: 1291774 - RNA, 19 nt, Artificial Sequence
  Description of Artificial Sequence: Synthetic oligonucleotide
  Sense strand starting at position 3018 of SEQ ID NO: 1241686
guguuacuggaugauucuu

SEQ ID NO: 1291775 - RNA, 19 nt, Artificial Sequence
  Description of Artificial Sequence: Synthetic oligonucleotide
  Antisense strand to SEQ ID NO: 1291774
aagaaucauccaguaacac

SEQ ID NO: 1291776 - RNA, 19 nt, Artificial Sequence
  Description of Artificial Sequence: Synthetic oligonucleotide
  Sense strand starting at position 3023 of SEQ ID NO: 1241686
acuggaugauucuuacagu

SEQ ID NO: 1291777 - RNA, 19 nt, Artificial Sequence
  Description of Artificial Sequence: Synthetic oligonucleotide
  Antisense strand to SEQ ID NO: 1291776
acuguaagaaucauccagu

SEQ ID NO: 1291778 - RNA, 19 nt, Artificial Sequence
  Description of Artificial Sequence: Synthetic oligonucleotide
  Sense strand starting at position 3029 of SEQ ID NO: 1241686
ugauucuuacaguguuacu

SEQ ID NO: 1291779 - RNA, 19 nt, Artificial Sequence
  Description of Artificial Sequence: Synthetic oligonucleotide
  Antisense strand to SEQ ID NO: 1291778
aguaacacuguaagaauca

SEQ ID NO: 1291780 - RNA, 19 nt, Artificial Sequence
  Description of Artificial Sequence: Synthetic oligonucleotide
  Sense strand starting at position 3060 of SEQ ID NO: 1241686
uguucuugugguccgguaa

SEQ ID NO: 1291781 - RNA, 19 nt, Artificial Sequence
  Description of Artificial Sequence: Synthetic oligonucleotide
  Antisense strand to SEQ ID NO: 1291780
uuaccggaccacaagaaca

SEQ ID NO: 1291782 - RNA, 19 nt, Artificial Sequence
  Description of Artificial Sequence: Synthetic oligonucleotide
  Sense strand starting at position 3107 of SEQ ID NO: 1241686
acgggaguuuauuucugca

SEQ ID NO: 1291783 - RNA, 19 nt, Artificial Sequence
  Description of Artificial Sequence: Synthetic oligonucleotide
  Antisense strand to SEQ ID NO: 1291782
ugcagaaauaaacucccgu

SEQ ID NO: 1291784 - RNA, 19 nt, Artificial Sequence
  Description of Artificial Sequence: Synthetic oligonucleotide
  Sense strand starting at position 3211 of SEQ ID NO: 1241686
uaugacuaccugcgggaau

SEQ ID NO: 1291785 - RNA, 19 nt, Artificial Sequence
  Description of Artificial Sequence: Synthetic oligonucleotide
  Antisense strand to SEQ ID NO: 1291784
auucccgcagguagucaua

SEQ ID NO: 1291786 - RNA, 19 nt, Artificial Sequence
  Description of Artificial Sequence: Synthetic oligonucleotide
  Sense strand starting at position 3222 of SEQ ID NO: 1241686
gcgggaauguuuccuaauu

SEQ ID NO: 1291787 - RNA, 19 nt, Artificial Sequence
  Description of Artificial Sequence: Synthetic oligonucleotide
  Antisense strand to SEQ ID NO: 1291786
aauuaggaaacauucccgc

SEQ ID NO: 1291788 - RNA, 19 nt, Artificial Sequence
  Description of Artificial Sequence: Synthetic oligonucleotide
  Sense strand starting at position 3460 of SEQ ID NO: 1241686
gucuguucgcguuugaaau

SEQ ID NO: 1291789 - RNA, 19 nt, Artificial Sequence
  Description of Artificial Sequence: Synthetic oligonucleotide
  Antisense strand to SEQ ID NO: 1291788
auuucaaacgcgaacagac

SEQ ID NO: 1291790 - RNA, 19 nt, Artificial Sequence
  Description of Artificial Sequence: Synthetic oligonucleotide
  Sense strand starting at position 3573 of SEQ ID NO: 1241686
gugagugaguacuugcaga

SEQ ID NO: 1291791 - RNA, 19 nt, Artificial Sequence
  Description of Artificial Sequence: Synthetic oligonucleotide
  Antisense strand to SEQ ID NO: 1291790
ucugcaaguacucacucac

SEQ ID NO: 1291792 - RNA, 19 nt, Artificial Sequence
  Description of Artificial Sequence: Synthetic oligonucleotide
  Sense strand starting at position 3580 of SEQ ID NO: 1241686
aguacuugcagacagaagu

SEQ ID NO: 1291793 - RNA, 19 nt, Artificial Sequence
  Description of Artificial Sequence: Synthetic oligonucleotide
  Antisense strand to SEQ ID NO: 1291792
acuucugucugcaaguacu

SEQ ID NO: 1291794 - RNA, 19 nt, Artificial Sequence
  Description of Artificial Sequence: Synthetic oligonucleotide
  Sense strand starting at position 3655 of SEQ ID NO: 1241686
cucagcuagaucugaggua

SEQ ID NO: 1291795 - RNA, 19 nt, Artificial Sequence
  Description of Artificial Sequence: Synthetic oligonucleotide
  Antisense strand to SEQ ID NO: 1291794
uaccucagaucuagcugag

SEQ ID NO: 1291796 - RNA, 19 nt, Artificial Sequence
  Description of Artificial Sequence: Synthetic oligonucleotide
  Sense strand starting at position 3712 of SEQ ID NO: 1241686
uuguauucuggcuuucgua

SEQ ID NO: 1291797 - RNA, 19 nt, Artificial Sequence
  Description of Artificial Sequence: Synthetic oligonucleotide
  Antisense strand to SEQ ID NO: 1291796
uacgaaagccagaauacaa

SEQ ID NO: 1291798 - RNA, 19 nt, Artificial Sequence
  Description of Artificial Sequence: Synthetic oligonucleotide
  Sense strand starting at position 3871 of SEQ ID NO: 1241686
ucaucauuacagcgaagag

SEQ ID NO: 1291799 - RNA, 19 nt, Artificial Sequence
  Description of Artificial Sequence: Synthetic oligonucleotide
  Antisense strand to SEQ ID NO: 1291798
cucuucgcuguaaugauga

SEQ ID NO: 1291800 - RNA, 19 nt, Artificial Sequence
  Description of Artificial Sequence: Synthetic oligonucleotide
  Sense strand starting at position 71 of SEQ ID NO: 1241687
ucaggccuccuuugaaagu

SEQ ID NO: 1291801 - RNA, 19 nt, Artificial Sequence
  Description of Artificial Sequence: Synthetic oligonucleotide
  Antisense strand to SEQ ID NO: 1291800
acuuucaaaggaggccuga

SEQ ID NO: 1291802 - RNA, 19 nt, Artificial Sequence
  Description of Artificial Sequence: Synthetic oligonucleotide
  Sense strand starting at position 95 of SEQ ID NO: 1241687
caggaauggcacugaaacu

SEQ ID NO: 1291803 - RNA, 19 nt, Artificial Sequence
  Description of Artificial Sequence: Synthetic oligonucleotide
  Antisense strand to SEQ ID NO: 1291802
aguuucagugccauuccug

SEQ ID NO: 1291804 - RNA, 19 nt, Artificial Sequence
  Description of Artificial Sequence: Synthetic oligonucleotide
  Sense strand starting at position 128 of SEQ ID NO: 1241687
ugcugaacucuaggacaaa

SEQ ID NO: 1291805 - RNA, 19 nt, Artificial Sequence
  Description of Artificial Sequence: Synthetic oligonucleotide
  Antisense strand to SEQ ID NO: 1291804
uuuguccuagaguucagca

SEQ ID NO: 1291806 - RNA, 19 nt, Artificial Sequence
  Description of Artificial Sequence: Synthetic oligonucleotide
  Sense strand starting at position 373 of SEQ ID NO: 1241687
gcaaauagauuugaaacaa

SEQ ID NO: 1291807 - RNA, 19 nt, Artificial Sequence
  Description of Artificial Sequence: Synthetic oligonucleotide
  Antisense strand to SEQ ID NO: 1291806
uuguuucaaaucuauuugc

SEQ ID NO: 1291808 - RNA, 19 nt, Artificial Sequence
  Description of Artificial Sequence: Synthetic oligonucleotide
  Sense strand starting at position 507 of SEQ ID NO: 1241687
uccucagaaagguguguuu

SEQ ID NO: 1291809 - RNA, 19 nt, Artificial Sequence
  Description of Artificial Sequence: Synthetic oligonucleotide
  Antisense strand to SEQ ID NO: 1291808
aaacacaccuuucugagga

SEQ ID NO: 1291810 - RNA, 19 nt, Artificial Sequence
  Description of Artificial Sequence: Synthetic oligonucleotide
  Sense strand starting at position 509 of SEQ ID NO: 1241687
cucagaaagguguguuuga

SEQ ID NO: 1291811 - RNA, 19 nt, Artificial Sequence
  Description of Artificial Sequence: Synthetic oligonucleotide
  Antisense strand to SEQ ID NO: 1291810
ucaaacacaccuuucugag

SEQ ID NO: 1291812 - RNA, 19 nt, Artificial Sequence
  Description of Artificial Sequence: Synthetic oligonucleotide
  Sense strand starting at position 710 of SEQ ID NO: 1241687
ccucauuuguagggacaaa

SEQ ID NO: 1291813 - RNA, 19 nt, Artificial Sequence
  Description of Artificial Sequence: Synthetic oligonucleotide
  Antisense strand to SEQ ID NO: 1291812
uuugucccuacaaaugagg

SEQ ID NO: 1291814 - RNA, 19 nt, Artificial Sequence
  Description of Artificial Sequence: Synthetic oligonucleotide
  Sense strand starting at position 862 of SEQ ID NO: 1241687
cuggaaucuugauuccaug

SEQ ID NO: 1291815 - RNA, 19 nt, Artificial Sequence
  Description of Artificial Sequence: Synthetic oligonucleotide
  Antisense strand to SEQ ID NO: 1291814
cauggaaucaagauuccag

SEQ ID NO: 1291816 - RNA, 19 nt, Artificial Sequence
  Description of Artificial Sequence: Synthetic oligonucleotide
  Sense strand starting at position 879 of SEQ ID NO: 1241687
ugaaaccucugagaaucaa

SEQ ID NO: 1291817 - RNA, 19 nt, Artificial Sequence
  Description of Artificial Sequence: Synthetic oligonucleotide
  Antisense strand to SEQ ID NO: 1291816
uugauucucagagguuuca

SEQ ID NO: 1291818 - RNA, 19 nt, Artificial Sequence
  Description of Artificial Sequence: Synthetic oligonucleotide
  Sense strand starting at position 980 of SEQ ID NO: 1241687
ccaggaucuuccguggaau

SEQ ID NO: 1291819 - RNA, 19 nt, Artificial Sequence
  Description of Artificial Sequence: Synthetic oligonucleotide
  Antisense strand to SEQ ID NO: 1291818
auuccacggaagauccugg

SEQ ID NO: 1291820 - RNA, 19 nt, Artificial Sequence
  Description of Artificial Sequence: Synthetic oligonucleotide
  Sense strand starting at position 981 of SEQ ID NO: 1241687
caggaucuuccguggaaua

SEQ ID NO: 1291821 - RNA, 19 nt, Artificial Sequence
  Description of Artificial Sequence: Synthetic oligonucleotide
  Antisense strand to SEQ ID NO: 1291820
uauuccacggaagauccug

SEQ ID NO: 1291822 - RNA, 19 nt, Artificial Sequence
  Description of Artificial Sequence: Synthetic oligonucleotide
  Sense strand starting at position 982 of SEQ ID NO: 1241687
aggaucuuccguggaauau

SEQ ID NO: 1291823 - RNA, 19 nt, Artificial Sequence
  Description of Artificial Sequence: Synthetic oligonucleotide
  Antisense strand to SEQ ID NO: 1291822
auauuccacggaagauccu

SEQ ID NO: 1291824 - RNA, 19 nt, Artificial Sequence
  Description of Artificial Sequence: Synthetic oligonucleotide
  Sense strand starting at position 983 of SEQ ID NO: 1241687
ggaucuuccguggaauauc

SEQ ID NO: 1291825 - RNA, 19 nt, Artificial Sequence
  Description of Artificial Sequence: Synthetic oligonucleotide
  Antisense strand to SEQ ID NO: 1291824
gauauuccacggaagaucc

SEQ ID NO: 1291826 - RNA, 19 nt, Artificial Sequence
  Description of Artificial Sequence: Synthetic oligonucleotide
  Sense strand starting at position 1034 of SEQ ID NO: 1241687
auaugagguuucuuucuau

SEQ ID NO: 1291827 - RNA, 19 nt, Artificial Sequence
  Description of Artificial Sequence: Synthetic oligonucleotide
  Antisense strand to SEQ ID NO: 1291826
auagaaagaaaccucauau

SEQ ID NO: 1291828 - RNA, 19 nt, Artificial Sequence
  Description of Artificial Sequence: Synthetic oligonucleotide
  Sense strand starting at position 1037 of SEQ ID NO: 1241687
ugagguuucuuucuauuau

SEQ ID NO: 1291829 - RNA, 19 nt, Artificial Sequence
  Description of Artificial Sequence: Synthetic oligonucleotide
  Antisense strand to SEQ ID NO: 1291828
auaauagaaagaaaccuca

SEQ ID NO: 1291830 - RNA, 19 nt, Artificial Sequence
  Description of Artificial Sequence: Synthetic oligonucleotide
  Sense strand starting at position 1113 of SEQ ID NO: 1241687
agauuuaacuagggaagca

SEQ ID NO: 1291831 - RNA, 19 nt, Artificial Sequence
  Description of Artificial Sequence: Synthetic oligonucleotide
  Antisense strand to SEQ ID NO: 1291830
ugcuucccuaguuaaaucu

SEQ ID NO: 1291832 - RNA, 19 nt, Artificial Sequence
  Description of Artificial Sequence: Synthetic oligonucleotide
  Sense strand starting at position 1985 of SEQ ID NO: 1241687
ccacuuccggauugucuaa

SEQ ID NO: 1291833 - RNA, 19 nt, Artificial Sequence
  Description of Artificial Sequence: Synthetic oligonucleotide
  Antisense strand to SEQ ID NO: 1291832
uuagacaauccggaagugg

SEQ ID NO: 1291834 - RNA, 19 nt, Artificial Sequence
  Description of Artificial Sequence: Synthetic oligonucleotide
  Sense strand starting at position 2274 of SEQ ID NO: 1241687
ggaagugacugugccucua

SEQ ID NO: 1291835 - RNA, 19 nt, Artificial Sequence
  Description of Artificial Sequence: Synthetic oligonucleotide
  Antisense strand to SEQ ID NO: 1291834
uagaggcacagucacuucc

SEQ ID NO: 1291836 - RNA, 19 nt, Artificial Sequence
  Description of Artificial Sequence: Synthetic oligonucleotide
  Sense strand starting at position 2373 of SEQ ID NO: 1241687
guaguuaagcucguguaac

SEQ ID NO: 1291837 - RNA, 19 nt, Artificial Sequence
  Description of Artificial Sequence: Synthetic oligonucleotide
  Antisense strand to SEQ ID NO: 1291836
guuacacgagcuuaacuac

SEQ ID NO: 1291838 - RNA, 19 nt, Artificial Sequence
  Description of Artificial Sequence: Synthetic oligonucleotide
  Sense strand starting at position 2556 of SEQ ID NO: 1241687
acucuagucgguggauuga

SEQ ID NO: 1291839 - RNA, 19 nt, Artificial Sequence
  Description of Artificial Sequence: Synthetic oligonucleotide
  Antisense strand to SEQ ID NO: 1291838
ucaauccaccgacuagagu

SEQ ID NO: 1291840 - RNA, 19 nt, Artificial Sequence
  Description of Artificial Sequence: Synthetic oligonucleotide
  Sense strand starting at position 2691 of SEQ ID NO: 1241687
gaacucucucccgauuguu

SEQ ID NO: 1291841 - RNA, 19 nt, Artificial Sequence
  Description of Artificial Sequence: Synthetic oligonucleotide
  Antisense strand to SEQ ID NO: 1291840
aacaaucgggagagaguuc

SEQ ID NO: 1291842 - RNA, 19 nt, Artificial Sequence
  Description of Artificial Sequence: Synthetic oligonucleotide
  Sense strand starting at position 2703 of SEQ ID NO: 1241687
gauuguuacucgguagagg

SEQ ID NO: 1291843 - RNA, 19 nt, Artificial Sequence
  Description of Artificial Sequence: Synthetic oligonucleotide
  Antisense strand to SEQ ID NO: 1291842
ccucuaccgaguaacaauc

SEQ ID NO: 1291844 - RNA, 19 nt, Artificial Sequence
  Description of Artificial Sequence: Synthetic oligonucleotide
  Sense strand starting at position 3082 of SEQ ID NO: 1241687
gggccaggguugucuaacu

SEQ ID NO: 1291845 - RNA, 19 nt, Artificial Sequence
  Description of Artificial Sequence: Synthetic oligonucleotide
  Antisense strand to SEQ ID NO: 1291844
aguuagacaacccuggccc

SEQ ID NO: 1291846 - RNA, 19 nt, Artificial Sequence
  Description of Artificial Sequence: Synthetic oligonucleotide
  Sense strand starting at position 3087 of SEQ ID NO: 1241687
aggguugucuaacuauucu

SEQ ID NO: 1291847 - RNA, 19 nt, Artificial Sequence
  Description of Artificial Sequence: Synthetic oligonucleotide
  Antisense strand to SEQ ID NO: 1291846
agaauaguuagacaacccu

SEQ ID NO: 1291848 - RNA, 19 nt, Artificial Sequence
  Description of Artificial Sequence: Synthetic oligonucleotide
  Sense strand starting at position 3091 of SEQ ID NO: 1241687
uugucuaacuauucucgaa

SEQ ID NO: 1291849 - RNA, 19 nt, Artificial Sequence
  Description of Artificial Sequence: Synthetic oligonucleotide
  Antisense strand to SEQ ID NO: 1291848
uucgagaauaguuagacaa

SEQ ID NO: 1291850 - RNA, 19 nt, Artificial Sequence
  Description of Artificial Sequence: Synthetic oligonucleotide
  Sense strand starting at position 3224 of SEQ ID NO: 1241687
uugagaccucuagguauug

SEQ ID NO: 1291851 - RNA, 19 nt, Artificial Sequence
  Description of Artificial Sequence: Synthetic oligonucleotide
  Antisense strand to SEQ ID NO: 1291850
caauaccuagaggucucaa

SEQ ID NO: 1291852 - RNA, 19 nt, Artificial Sequence
  Description of Artificial Sequence: Synthetic oligonucleotide
  Sense strand starting at position 3355 of SEQ ID NO: 1241687
ccgggaugaucaguaagcu

SEQ ID NO: 1291853 - RNA, 19 nt, Artificial Sequence
  Description of Artificial Sequence: Synthetic oligonucleotide
  Antisense strand to SEQ ID NO: 1291852
agcuuacugaucaucccgg

SEQ ID NO: 1291854 - RNA, 19 nt, Artificial Sequence
  Description of Artificial Sequence: Synthetic oligonucleotide
  Sense strand starting at position 3399 of SEQ ID NO: 1241687
uggcuugagaggugguaua

SEQ ID NO: 1291855 - RNA, 19 nt, Artificial Sequence
  Description of Artificial Sequence: Synthetic oligonucleotide
  Antisense strand to SEQ ID NO: 1291854
uauaccaccucucaagcca

SEQ ID NO: 1291856 - RNA, 19 nt, Artificial Sequence
  Description of Artificial Sequence: Synthetic oligonucleotide
  Sense strand starting at position 3409 of SEQ ID NO: 1241687
ggugguauaaucuguaaag

SEQ ID NO: 1291857 - RNA, 19 nt, Artificial Sequence
  Description of Artificial Sequence: Synthetic oligonucleotide
  Antisense strand to SEQ ID NO: 1291856
cuuuacagauuauaccacc

SEQ ID NO: 1291858 - RNA, 19 nt, Artificial Sequence
  Description of Artificial Sequence: Synthetic oligonucleotide
  Sense strand starting at position 3410 of SEQ ID NO: 1241687
gugguauaaucuguaaaga

SEQ ID NO: 1291859 - RNA, 19 nt, Artificial Sequence
  Description of Artificial Sequence: Synthetic oligonucleotide
  Antisense strand to SEQ ID NO: 1291858
ucuuuacagauuauaccac

SEQ ID NO: 1291860 - RNA, 19 nt, Artificial Sequence
  Description of Artificial Sequence: Synthetic oligonucleotide
  Sense strand starting at position 3683 of SEQ ID NO: 1241687
aguugagauagcuagugua

SEQ ID NO: 1291861 - RNA, 19 nt, Artificial Sequence
  Description of Artificial Sequence: Synthetic oligonucleotide
  Antisense strand to SEQ ID NO: 1291860
uacacuagcuaucucaacu

SEQ ID NO: 1291862 - RNA, 19 nt, Artificial Sequence
  Description of Artificial Sequence: Synthetic oligonucleotide
  Sense strand starting at position 3755 of SEQ ID NO: 1241687
uuaaaugacucguugaaac

SEQ ID NO: 1291863 - RNA, 19 nt, Artificial Sequence
  Description of Artificial Sequence: Synthetic oligonucleotide
  Antisense strand to SEQ ID NO: 1291862
guuucaacgagucauuuaa

SEQ ID NO: 1291864 - RNA, 19 nt, Artificial Sequence
  Description of Artificial Sequence: Synthetic oligonucleotide
  Sense strand starting at position 3757 of SEQ ID NO: 1241687
aaaugacucguugaaacuu

SEQ ID NO: 1291865 - RNA, 19 nt, Artificial Sequence
  Description of Artificial Sequence: Synthetic oligonucleotide
  Antisense strand to SEQ ID NO: 1291864
aaguuucaacgagucauuu

SEQ ID NO: 1291866 - RNA, 19 nt, Artificial Sequence
  Description of Artificial Sequence: Synthetic oligonucleotide
  Sense strand starting at position 3777 of SEQ ID NO: 1241687
uugaguagcuagcuuacaa

SEQ ID NO: 1291867 - RNA, 19 nt, Artificial Sequence
  Description of Artificial Sequence: Synthetic oligonucleotide
  Antisense strand to SEQ ID NO: 1291866
uuguaagcuagcuacucaa

SEQ ID NO: 1291868 - RNA, 19 nt, Artificial Sequence
  Description of Artificial Sequence: Synthetic oligonucleotide
  Sense strand starting at position 3818 of SEQ ID NO: 1241687
cuaauaugaugcuuucugu

SEQ ID NO: 1291869 - RNA, 19 nt, Artificial Sequence
  Description of Artificial Sequence: Synthetic oligonucleotide
  Antisense strand to SEQ ID NO: 1291868
acagaaagcaucauauuag

SEQ ID NO: 1291870 - RNA, 19 nt, Artificial Sequence
  Description of Artificial Sequence: Synthetic oligonucleotide
  Sense strand starting at position 3866 of SEQ ID NO: 1241687
gacugcucagguuauuaca

SEQ ID NO: 1291871 - RNA, 19 nt, Artificial Sequence
  Description of Artificial Sequence: Synthetic oligonucleotide
  Antisense strand to SEQ ID NO: 1291870
uguaauaaccugagcaguc

SEQ ID NO: 1291872 - RNA, 19 nt, Artificial Sequence
  Description of Artificial Sequence: Synthetic oligonucleotide
  Sense strand starting at position 3873 of SEQ ID NO: 1241687
cagguuauuacaggugaga

SEQ ID NO: 1291873 - RNA, 19 nt, Artificial Sequence
  Description of Artificial Sequence: Synthetic oligonucleotide
  Antisense strand to SEQ ID NO: 1291872
ucucaccuguaauaaccug

SEQ ID NO: 1291874 - RNA, 19 nt, Artificial Sequence
  Description of Artificial Sequence: Synthetic oligonucleotide
  Sense strand starting at position 3875 of SEQ ID NO: 1241687
gguuauuacaggugagagu

SEQ ID NO: 1291875 - RNA, 19 nt, Artificial Sequence
  Description of Artificial Sequence: Synthetic oligonucleotide
  Antisense strand to SEQ ID NO: 1291874
acucucaccuguaauaacc

SEQ ID NO: 1291876 - RNA, 19 nt, Artificial Sequence
  Description of Artificial Sequence: Synthetic oligonucleotide
  Sense strand starting at position 3876 of SEQ ID NO: 1241687
guuauuacaggugagaguu

SEQ ID NO: 1291877 - RNA, 19 nt, Artificial Sequence
  Description of Artificial Sequence: Synthetic oligonucleotide
  Antisense strand to SEQ ID NO: 1291876
aacucucaccuguaauaac

SEQ ID NO: 1291878 - RNA, 19 nt, Artificial Sequence
  Description of Artificial Sequence: Synthetic oligonucleotide
  Sense strand starting at position 3953 of SEQ ID NO: 1241687
gucaaagugguuuaguucu

SEQ ID NO: 1291879 - RNA, 19 nt, Artificial Sequence
  Description of Artificial Sequence: Synthetic oligonucleotide
  Antisense strand to SEQ ID NO: 1291878
agaacuaaaccacuuugac

SEQ ID NO: 1291880 - RNA, 19 nt, Artificial Sequence
  Description of Artificial Sequence: Synthetic oligonucleotide
  Sense strand starting at position 84 of SEQ ID NO: 1241688
gcaaauagauuugaaacaa

SEQ ID NO: 1291881 - RNA, 19 nt, Artificial Sequence
  Description of Artificial Sequence: Synthetic oligonucleotide
  Antisense strand to SEQ ID NO: 1291880
uuguuucaaaucuauuugc

SEQ ID NO: 1291882 - RNA, 19 nt, Artificial Sequence
  Description of Artificial Sequence: Synthetic oligonucleotide
  Sense strand starting at position 218 of SEQ ID NO: 1241688
uccucagaaagguguguuu

SEQ ID NO: 1291883 - RNA, 19 nt, Artificial Sequence
  Description of Artificial Sequence: Synthetic oligonucleotide
  Antisense strand to SEQ ID NO: 1291882
aaacacaccuuucugagga

SEQ ID NO: 1291884 - RNA, 19 nt, Artificial Sequence
  Description of Artificial Sequence: Synthetic oligonucleotide
  Sense strand starting at position 220 of SEQ ID NO: 1241688
cucagaaagguguguuuga

SEQ ID NO: 1291885 - RNA, 19 nt, Artificial Sequence
  Description of Artificial Sequence: Synthetic oligonucleotide
  Antisense strand to SEQ ID NO: 1291884
ucaaacacaccuuucugag

SEQ ID NO: 1291886 - RNA, 19 nt, Artificial Sequence
  Description of Artificial Sequence: Synthetic oligonucleotide
  Sense strand starting at position 421 of SEQ ID NO: 1241688
ccucauuuguagggacaaa

SEQ ID NO: 1291887 - RNA, 19 nt, Artificial Sequence
  Description of Artificial Sequence: Synthetic oligonucleotide
  Antisense strand to SEQ ID NO: 1291886
uuugucccuacaaaugagg

SEQ ID NO: 1291888 - RNA, 19 nt, Artificial Sequence
  Description of Artificial Sequence: Synthetic oligonucleotide
  Sense strand starting at position 573 of SEQ ID NO: 1241688
cuggaaucuugauuccaug

SEQ ID NO: 1291889 - RNA, 19 nt, Artificial Sequence
  Description of Artificial Sequence: Synthetic oligonucleotide
  Antisense strand to SEQ ID NO: 1291888
cauggaaucaagauuccag

SEQ ID NO: 1291890 - RNA, 19 nt, Artificial Sequence
  Description of Artificial Sequence: Synthetic oligonucleotide
  Sense strand starting at position 590 of SEQ ID NO: 1241688
ugaaaccucugagaaucaa

SEQ ID NO: 1291891 - RNA, 19 nt, Artificial Sequence
  Description of Artificial Sequence: Synthetic oligonucleotide
  Antisense strand to SEQ ID NO: 1291890
uugauucucagagguuuca

SEQ ID NO: 1291892 - RNA, 19 nt, Artificial Sequence
  Description of Artificial Sequence: Synthetic oligonucleotide
  Sense strand starting at position 691 of SEQ ID NO: 1241688
ccaggaucuuccguggaau

SEQ ID NO: 1291893 - RNA, 19 nt, Artificial Sequence
  Description of Artificial Sequence: Synthetic oligonucleotide
  Antisense strand to SEQ ID NO: 1291892
auuccacggaagauccugg

SEQ ID NO: 1291894 - RNA, 19 nt, Artificial Sequence
  Description of Artificial Sequence: Synthetic oligonucleotide
  Sense strand starting at position 692 of SEQ ID NO: 1241688
caggaucuuccguggaaua

SEQ ID NO: 1291895 - RNA, 19 nt, Artificial Sequence
  Description of Artificial Sequence: Synthetic oligonucleotide
  Antisense strand to SEQ ID NO: 1291894
uauuccacggaagauccug

SEQ ID NO: 1291896 - RNA, 19 nt, Artificial Sequence
  Description of Artificial Sequence: Synthetic oligonucleotide
  Sense strand starting at position 693 of SEQ ID NO: 1241688
aggaucuuccguggaauau

SEQ ID NO: 1291897 - RNA, 19 nt, Artificial Sequence
  Description of Artificial Sequence: Synthetic oligonucleotide
  Antisense strand to SEQ ID NO: 1291896
auauuccacggaagauccu

SEQ ID NO: 1291898 - RNA, 19 nt, Artificial Sequence
  Description of Artificial Sequence: Synthetic oligonucleotide
  Sense strand starting at position 694 of SEQ ID NO: 1241688
ggaucuuccguggaauauc

SEQ ID NO: 1291899 - RNA, 19 nt, Artificial Sequence
  Description of Artificial Sequence: Synthetic oligonucleotide
  Antisense strand to SEQ ID NO: 1291898
gauauuccacggaagaucc

SEQ ID NO: 1291900 - RNA, 19 nt, Artificial Sequence
  Description of Artificial Sequence: Synthetic oligonucleotide
  Sense strand starting at position 745 of SEQ ID NO: 1241688
auaugagguuucuuucuau

SEQ ID NO: 1291901 - RNA, 19 nt, Artificial Sequence
  Description of Artificial Sequence: Synthetic oligonucleotide
  Antisense strand to SEQ ID NO: 1291900
auagaaagaaaccucauau

SEQ ID NO: 1291902 - RNA, 19 nt, Artificial Sequence
  Description of Artificial Sequence: Synthetic oligonucleotide
  Sense strand starting at position 748 of SEQ ID NO: 1241688
ugagguuucuuucuauuau

SEQ ID NO: 1291903 - RNA, 19 nt, Artificial Sequence
  Description of Artificial Sequence: Synthetic oligonucleotide
  Antisense strand to SEQ ID NO: 1291902
auaauagaaagaaaccuca

SEQ ID NO: 1291904 - RNA, 19 nt, Artificial Sequence
  Description of Artificial Sequence: Synthetic oligonucleotide
  Sense strand starting at position 824 of SEQ ID NO: 1241688
agauuuaacuagggaagca

SEQ ID NO: 1291905 - RNA, 19 nt, Artificial Sequence
  Description of Artificial Sequence: Synthetic oligonucleotide
  Antisense strand to SEQ ID NO: 1291904
ugcuucccuaguuaaaucu

SEQ ID NO: 1291906 - RNA, 19 nt, Artificial Sequence
  Description of Artificial Sequence: Synthetic oligonucleotide
  Sense strand starting at position 1696 of SEQ ID NO: 1241688
ccacuuccggauugucuaa

SEQ ID NO: 1291907 - RNA, 19 nt, Artificial Sequence
  Description of Artificial Sequence: Synthetic oligonucleotide
  Antisense strand to SEQ ID NO: 1291906
uuagacaauccggaagugg

SEQ ID NO: 1291908 - RNA, 19 nt, Artificial Sequence
  Description of Artificial Sequence: Synthetic oligonucleotide
  Sense strand starting at position 1985 of SEQ ID NO: 1241688
ggaagugacugugccucua

SEQ ID NO: 1291909 - RNA, 19 nt, Artificial Sequence
  Description of Artificial Sequence: Synthetic oligonucleotide
  Antisense strand to SEQ ID NO: 1291908
uagaggcacagucacuucc

SEQ ID NO: 1291910 - RNA, 19 nt, Artificial Sequence
  Description of Artificial Sequence: Synthetic oligonucleotide
  Sense strand starting at position 2084 of SEQ ID NO: 1241688
guaguuaagcucguguaac

SEQ ID NO: 1291911 - RNA, 19 nt, Artificial Sequence
  Description of Artificial Sequence: Synthetic oligonucleotide
  Antisense strand to SEQ ID NO: 1291910
guuacacgagcuuaacuac

SEQ ID NO: 1291912 - RNA, 19 nt, Artificial Sequence
  Description of Artificial Sequence: Synthetic oligonucleotide
  Sense strand starting at position 2121 of SEQ ID NO: 1241688
ugcuguagcgaagagaguu

SEQ ID NO: 1291913 - RNA, 19 nt, Artificial Sequence
  Description of Artificial Sequence: Synthetic oligonucleotide
  Antisense strand to SEQ ID NO: 1291912
aacucucuucgcuacagca

SEQ ID NO: 1291914 - RNA, 19 nt, Artificial Sequence
  Description of Artificial Sequence: Synthetic oligonucleotide
  Sense strand starting at position 2267 of SEQ ID NO: 1241688
acucuagucgguggauuga

SEQ ID NO: 1291915 - RNA, 19 nt, Artificial Sequence
  Description of Artificial Sequence: Synthetic oligonucleotide
  Antisense strand to SEQ ID NO: 1291914
ucaauccaccgacuagagu

SEQ ID NO: 1291916 - RNA, 19 nt, Artificial Sequence
  Description of Artificial Sequence: Synthetic oligonucleotide
  Sense strand starting at position 2402 of SEQ ID NO: 1241688
gaacucucucccgauuguu

SEQ ID NO: 1291917 - RNA, 19 nt, Artificial Sequence
  Description of Artificial Sequence: Synthetic oligonucleotide
  Antisense strand to SEQ ID NO: 1291916
aacaaucgggagagaguuc

SEQ ID NO: 1291918 - RNA, 19 nt, Artificial Sequence
  Description of Artificial Sequence: Synthetic oligonucleotide
  Sense strand starting at position 2414 of SEQ ID NO: 1241688
gauuguuacucgguagagg

SEQ ID NO: 1291919 - RNA, 19 nt, Artificial Sequence
  Description of Artificial Sequence: Synthetic oligonucleotide
  Antisense strand to SEQ ID NO: 1291918
ccucuaccgaguaacaauc

SEQ ID NO: 1291920 - RNA, 19 nt, Artificial Sequence
  Description of Artificial Sequence: Synthetic oligonucleotide
  Sense strand starting at position 2793 of SEQ ID NO: 1241688
gggccaggguugucuaacu

SEQ ID NO: 1291921 - RNA, 19 nt, Artificial Sequence
  Description of Artificial Sequence: Synthetic oligonucleotide
  Antisense strand to SEQ ID NO: 1291920
aguuagacaacccuggccc

SEQ ID NO: 1291922 - RNA, 19 nt, Artificial Sequence
  Description of Artificial Sequence: Synthetic oligonucleotide
  Sense strand starting at position 2798 of SEQ ID NO: 1241688
aggguugucuaacuauucu

SEQ ID NO: 1291923 - RNA, 19 nt, Artificial Sequence
  Description of Artificial Sequence: Synthetic oligonucleotide
  Antisense strand to SEQ ID NO: 1291922
agaauaguuagacaacccu

SEQ ID NO: 1291924 - RNA, 19 nt, Artificial Sequence
  Description of Artificial Sequence: Synthetic oligonucleotide
  Sense strand starting at position 2802 of SEQ ID NO: 1241688
uugucuaacuauucucgaa

SEQ ID NO: 1291925 - RNA, 19 nt, Artificial Sequence
  Description of Artificial Sequence: Synthetic oligonucleotide
  Antisense strand to SEQ ID NO: 1291924
uucgagaauaguuagacaa

SEQ ID NO: 1291926 - RNA, 19 nt, Artificial Sequence
  Description of Artificial Sequence: Synthetic oligonucleotide
  Sense strand starting at position 2935 of SEQ ID NO: 1241688
uugagaccucuagguauug

SEQ ID NO: 1291927 - RNA, 19 nt, Artificial Sequence
  Description of Artificial Sequence: Synthetic oligonucleotide
  Antisense strand to SEQ ID NO: 1291926
caauaccuagaggucucaa

SEQ ID NO: 1291928 - RNA, 19 nt, Artificial Sequence
  Description of Artificial Sequence: Synthetic oligonucleotide
  Sense strand starting at position 3066 of SEQ ID NO: 1241688
ccgggaugaucaguaagcu

SEQ ID NO: 1291929 - RNA, 19 nt, Artificial Sequence
  Description of Artificial Sequence: Synthetic oligonucleotide
  Antisense strand to SEQ ID NO: 1291928
agcuuacugaucaucccgg

SEQ ID NO: 1291930 - RNA, 19 nt, Artificial Sequence
  Description of Artificial Sequence: Synthetic oligonucleotide
  Sense strand starting at position 3110 of SEQ ID NO: 1241688
uggcuugagaggugguaua

SEQ ID NO: 1291931 - RNA, 19 nt, Artificial Sequence
  Description of Artificial Sequence: Synthetic oligonucleotide
  Antisense strand to SEQ ID NO: 1291930
uauaccaccucucaagcca

SEQ ID NO: 1291932 - RNA, 19 nt, Artificial Sequence
  Description of Artificial Sequence: Synthetic oligonucleotide
  Sense strand starting at position 3120 of SEQ ID NO: 1241688
ggugguauaaucuguaaag

SEQ ID NO: 1291933 - RNA, 19 nt, Artificial Sequence
  Description of Artificial Sequence: Synthetic oligonucleotide
  Antisense strand to SEQ ID NO: 1291932
cuuuacagauuauaccacc

SEQ ID NO: 1291934 - RNA, 19 nt, Artificial Sequence
  Description of Artificial Sequence: Synthetic oligonucleotide
  Sense strand starting at position 3121 of SEQ ID NO: 1241688
gugguauaaucuguaaaga

SEQ ID NO: 1291935 - RNA, 19 nt, Artificial Sequence
  Description of Artificial Sequence: Synthetic oligonucleotide
  Antisense strand to SEQ ID NO: 1291934
ucuuuacagauuauaccac

SEQ ID NO: 1291936 - RNA, 19 nt, Artificial Sequence
  Description of Artificial Sequence: Synthetic oligonucleotide
  Sense strand starting at position 3205 of SEQ ID NO: 1241688
cauguuauguucuuaguga

SEQ ID NO: 1291937 - RNA, 19 nt, Artificial Sequence
  Description of Artificial Sequence: Synthetic oligonucleotide
  Antisense strand to SEQ ID NO: 1291936
ucacuaagaacauaacaug

SEQ ID NO: 1291938 - RNA, 19 nt, Artificial Sequence
  Description of Artificial Sequence: Synthetic oligonucleotide
  Sense strand starting at position 3394 of SEQ ID NO: 1241688
aguugagauagcuagugua

SEQ ID NO: 1291939 - RNA, 19 nt, Artificial Sequence
  Description of Artificial Sequence: Synthetic oligonucleotide
  Antisense strand to SEQ ID NO: 1291938
uacacuagcuaucucaacu

SEQ ID NO: 1291940 - RNA, 19 nt, Artificial Sequence
  Description of Artificial Sequence: Synthetic oligonucleotide
  Sense strand starting at position 3414 of SEQ ID NO: 1241688
agggcaaccucuguugcaa

SEQ ID NO: 1291941 - RNA, 19 nt, Artificial Sequence
  Description of Artificial Sequence: Synthetic oligonucleotide
  Antisense strand to SEQ ID NO: 1291940
uugcaacagagguugcccu

SEQ ID NO: 1291942 - RNA, 19 nt, Artificial Sequence
  Description of Artificial Sequence: Synthetic oligonucleotide
  Sense strand starting at position 3466 of SEQ ID NO: 1241688
uuaaaugacucguugaaac

SEQ ID NO: 1291943 - RNA, 19 nt, Artificial Sequence
  Description of Artificial Sequence: Synthetic oligonucleotide
  Antisense strand to SEQ ID NO: 1291942
guuucaacgagucauuuaa

SEQ ID NO: 1291944 - RNA, 19 nt, Artificial Sequence
  Description of Artificial Sequence: Synthetic oligonucleotide
  Sense strand starting at position 3468 of SEQ ID NO: 1241688
aaaugacucguugaaacuu

SEQ ID NO: 1291945 - RNA, 19 nt, Artificial Sequence
  Description of Artificial Sequence: Synthetic oligonucleotide
  Antisense strand to SEQ ID NO: 1291944
aaguuucaacgagucauuu

SEQ ID NO: 1291946 - RNA, 19 nt, Artificial Sequence
  Description of Artificial Sequence: Synthetic oligonucleotide
  Sense strand starting at position 3488 of SEQ ID NO: 1241688
uugaguagcuagcuuacaa

SEQ ID NO: 1291947 - RNA, 19 nt, Artificial Sequence
  Description of Artificial Sequence: Synthetic oligonucleotide
  Antisense strand to SEQ ID NO: 1291946
uuguaagcuagcuacucaa

SEQ ID NO: 1291948 - RNA, 19 nt, Artificial Sequence
  Description of Artificial Sequence: Synthetic oligonucleotide
  Sense strand starting at position 3529 of SEQ ID NO: 1241688
cuaauaugaugcuuucugu

SEQ ID NO: 1291949 - RNA, 19 nt, Artificial Sequence
  Description of Artificial Sequence: Synthetic oligonucleotide
  Antisense strand to SEQ ID NO: 1291948
acagaaagcaucauauuag

SEQ ID NO: 1291950 - RNA, 19 nt, Artificial Sequence
  Description of Artificial Sequence: Synthetic oligonucleotide
  Sense strand starting at position 3577 of SEQ ID NO: 1241688
gacugcucagguuauuaca

SEQ ID NO: 1291951 - RNA, 19 nt, Artificial Sequence
  Description of Artificial Sequence: Synthetic oligonucleotide
  Antisense strand to SEQ ID NO: 1291950
uguaauaaccugagcaguc

SEQ ID NO: 1291952 - RNA, 19 nt, Artificial Sequence
  Description of Artificial Sequence: Synthetic oligonucleotide
  Sense strand starting at position 3584 of SEQ ID NO: 1241688
cagguuauuacaggugaga

SEQ ID NO: 1291953 - RNA, 19 nt, Artificial Sequence
  Description of Artificial Sequence: Synthetic oligonucleotide
  Antisense strand to SEQ ID NO: 1291952
ucucaccuguaauaaccug

SEQ ID NO: 1291954 - RNA, 19 nt, Artificial Sequence
  Description of Artificial Sequence: Synthetic oligonucleotide
  Sense strand starting at position 3586 of SEQ ID NO: 1241688
gguuauuacaggugagagu

SEQ ID NO: 1291955 - RNA, 19 nt, Artificial Sequence
  Description of Artificial Sequence: Synthetic oligonucleotide
  Antisense strand to SEQ ID NO: 1291954
acucucaccuguaauaacc

SEQ ID NO: 1291956 - RNA, 19 nt, Artificial Sequence
  Description of Artificial Sequence: Synthetic oligonucleotide
  Sense strand starting at position 3587 of SEQ ID NO: 1241688
guuauuacaggugagaguu

SEQ ID NO: 1291957 - RNA, 19 nt, Artificial Sequence
  Description of Artificial Sequence: Synthetic oligonucleotide
  Antisense strand to SEQ ID NO: 1291956
aacucucaccuguaauaac

SEQ ID NO: 1291958 - RNA, 19 nt, Artificial Sequence
  Description of Artificial Sequence: Synthetic oligonucleotide
  Sense strand starting at position 3664 of SEQ ID NO: 1241688
gucaaagugguuuaguucu

SEQ ID NO: 1291959 - RNA, 19 nt, Artificial Sequence
  Description of Artificial Sequence: Synthetic oligonucleotide
  Antisense strand to SEQ ID NO: 1291958
agaacuaaaccacuuugac

SEQ ID NO: 1291960 - RNA, 19 nt, Artificial Sequence
  Description of Artificial Sequence: Synthetic oligonucleotide
  Sense strand starting at position 215 of SEQ ID NO: 1241689
ggcacucauucgccagaga

SEQ ID NO: 1291961 - RNA, 19 nt, Artificial Sequence
  Description of Artificial Sequence: Synthetic oligonucleotide
  Antisense strand to SEQ ID NO: 1291960
ucucuggcgaaugagugcc

SEQ ID NO: 1291962 - RNA, 19 nt, Artificial Sequence
  Description of Artificial Sequence: Synthetic oligonucleotide
  Sense strand starting at position 216 of SEQ ID NO: 1241689
gcacucauucgccagagag

SEQ ID NO: 1291963 - RNA, 19 nt, Artificial Sequence
  Description of Artificial Sequence: Synthetic oligonucleotide
  Antisense strand to SEQ ID NO: 1291962
cucucuggcgaaugagugc

SEQ ID NO: 1291964 - RNA, 19 nt, Artificial Sequence
  Description of Artificial Sequence: Synthetic oligonucleotide
  Sense strand starting at position 218 of SEQ ID NO: 1241689
acucauucgccagagagaa

SEQ ID NO: 1291965 - RNA, 19 nt, Artificial Sequence
  Description of Artificial Sequence: Synthetic oligonucleotide
  Antisense strand to SEQ ID NO: 1291964
uucucucuggcgaaugagu

SEQ ID NO: 1291966 - RNA, 19 nt, Artificial Sequence
  Description of Artificial Sequence: Synthetic oligonucleotide
  Sense strand starting at position 231 of SEQ ID NO: 1241689
agagaaaggaucugucucu

SEQ ID NO: 1291967 - RNA, 19 nt, Artificial Sequence
  Description of Artificial Sequence: Synthetic oligonucleotide
  Antisense strand to SEQ ID NO: 1291966
agagacagauccuuucucu

SEQ ID NO: 1291968 - RNA, 19 nt, Artificial Sequence
  Description of Artificial Sequence: Synthetic oligonucleotide
  Sense strand starting at position 244 of SEQ ID NO: 1241689
gucucucaucauuaggaca

SEQ ID NO: 1291969 - RNA, 19 nt, Artificial Sequence
  Description of Artificial Sequence: Synthetic oligonucleotide
  Antisense strand to SEQ ID NO: 1291968
uguccuaaugaugagagac

SEQ ID NO: 1291970 - RNA, 19 nt, Artificial Sequence
  Description of Artificial Sequence: Synthetic oligonucleotide
  Sense strand starting at position 618 of SEQ ID NO: 1241689
aaauguugguucucucuga

SEQ ID NO: 1291971 - RNA, 19 nt, Artificial Sequence
  Description of Artificial Sequence: Synthetic oligonucleotide
  Antisense strand to SEQ ID NO: 1291970
ucagagagaaccaacauuu

SEQ ID NO: 1291972 - RNA, 19 nt, Artificial Sequence
  Description of Artificial Sequence: Synthetic oligonucleotide
  Sense strand starting at position 628 of SEQ ID NO: 1241689
ucucucugagccugcuaua

SEQ ID NO: 1291973 - RNA, 19 nt, Artificial Sequence
  Description of Artificial Sequence: Synthetic oligonucleotide
  Antisense strand to SEQ ID NO: 1291972
uauagcaggcucagagaga

SEQ ID NO: 1291974 - RNA, 19 nt, Artificial Sequence
  Description of Artificial Sequence: Synthetic oligonucleotide
  Sense strand starting at position 633 of SEQ ID NO: 1241689
cugagccugcuauaauaca

SEQ ID NO: 1291975 - RNA, 19 nt, Artificial Sequence
  Description of Artificial Sequence: Synthetic oligonucleotide
  Antisense strand to SEQ ID NO: 1291974
uguauuauagcaggcucag

SEQ ID NO: 1291976 - RNA, 19 nt, Artificial Sequence
  Description of Artificial Sequence: Synthetic oligonucleotide
  Sense strand starting at position 850 of SEQ ID NO: 1241689
ggacucuacgucugccaaa

SEQ ID NO: 1291977 - RNA, 19 nt, Artificial Sequence
  Description of Artificial Sequence: Synthetic oligonucleotide
  Antisense strand to SEQ ID NO: 1291976
uuuggcagacguagagucc

SEQ ID NO: 1291978 - RNA, 19 nt, Artificial Sequence
  Description of Artificial Sequence: Synthetic oligonucleotide
  Sense strand starting at position 1025 of SEQ ID NO: 1241689
uuucccauucucugguauu

SEQ ID NO: 1291979 - RNA, 19 nt, Artificial Sequence
  Description of Artificial Sequence: Synthetic oligonucleotide
  Antisense strand to SEQ ID NO: 1291978
aauaccagagaaugggaaa

SEQ ID NO: 1291980 - RNA, 19 nt, Artificial Sequence
  Description of Artificial Sequence: Synthetic oligonucleotide
  Sense strand starting at position 1067 of SEQ ID NO: 1241689
ucacaucagcaucguugaa

SEQ ID NO: 1291981 - RNA, 19 nt, Artificial Sequence
  Description of Artificial Sequence: Synthetic oligonucleotide
  Antisense strand to SEQ ID NO: 1291980
uucaacgaugcugauguga

SEQ ID NO: 1291982 - RNA, 19 nt, Artificial Sequence
  Description of Artificial Sequence: Synthetic oligonucleotide
  Sense strand starting at position 1069 of SEQ ID NO: 1241689
acaucagcaucguugaauc

SEQ ID NO: 1291983 - RNA, 19 nt, Artificial Sequence
  Description of Artificial Sequence: Synthetic oligonucleotide
  Antisense strand to SEQ ID NO: 1291982
gauucaacgaugcugaugu

SEQ ID NO: 1291984 - RNA, 19 nt, Artificial Sequence
  Description of Artificial Sequence: Synthetic oligonucleotide
  Sense strand starting at position 1114 of SEQ ID NO: 1241689
ggcgauccaauguaccaua

SEQ ID NO: 1291985 - RNA, 19 nt, Artificial Sequence
  Description of Artificial Sequence: Synthetic oligonucleotide
  Antisense strand to SEQ ID NO: 1291984
uaugguacauuggaucgcc

SEQ ID NO: 1291986 - RNA, 19 nt, Artificial Sequence
  Description of Artificial Sequence: Synthetic oligonucleotide
  Sense strand starting at position 1178 of SEQ ID NO: 1241689
agaguugcugcuggagaga

SEQ ID NO: 1291987 - RNA, 19 nt, Artificial Sequence
  Description of Artificial Sequence: Synthetic oligonucleotide
  Antisense strand to SEQ ID NO: 1291986
ucucuccagcagcaacucu

SEQ ID NO: 1291988 - RNA, 19 nt, Artificial Sequence
  Description of Artificial Sequence: Synthetic oligonucleotide
  Sense strand starting at position 1181 of SEQ ID NO: 1241689
guugcugcuggagagauau

SEQ ID NO: 1291989 - RNA, 19 nt, Artificial Sequence
  Description of Artificial Sequence: Synthetic oligonucleotide
  Antisense strand to SEQ ID NO: 1291988
auaucucuccagcagcaac

SEQ ID NO: 1291990 - RNA, 19 nt, Artificial Sequence
  Description of Artificial Sequence: Synthetic oligonucleotide
  Sense strand starting at position 1371 of SEQ ID NO: 1241689
gaggguuagcaagguaagu

SEQ ID NO: 1291991 - RNA, 19 nt, Artificial Sequence
  Description of Artificial Sequence: Synthetic oligonucleotide
  Antisense strand to SEQ ID NO: 1291990
acuuaccuugcuaacccuc

SEQ ID NO: 1291992 - RNA, 19 nt, Artificial Sequence
  Description of Artificial Sequence: Synthetic oligonucleotide
  Sense strand starting at position 1421 of SEQ ID NO: 1241689
cuccuugguccuggauaua

SEQ ID NO: 1291993 - RNA, 19 nt, Artificial Sequence
  Description of Artificial Sequence: Synthetic oligonucleotide
  Antisense strand to SEQ ID NO: 1291992
uauauccaggaccaaggag

SEQ ID NO: 1291994 - RNA, 19 nt, Artificial Sequence
  Description of Artificial Sequence: Synthetic oligonucleotide
  Sense strand starting at position 1490 of SEQ ID NO: 1241689
caggaucuguggucugaug

SEQ ID NO: 1291995 - RNA, 19 nt, Artificial Sequence
  Description of Artificial Sequence: Synthetic oligonucleotide
  Antisense strand to SEQ ID NO: 1291994
caucagaccacagauccug

SEQ ID NO: 1291996 - RNA, 19 nt, Artificial Sequence
  Description of Artificial Sequence: Synthetic oligonucleotide
  Sense strand starting at position 1546 of SEQ ID NO: 1241689
acaaaugccuauggauuua

SEQ ID NO: 1291997 - RNA, 19 nt, Artificial Sequence
  Description of Artificial Sequence: Synthetic oligonucleotide
  Antisense strand to SEQ ID NO: 1291996
uaaauccauaggcauuugu

SEQ ID NO: 1291998 - RNA, 19 nt, Artificial Sequence
  Description of Artificial Sequence: Synthetic oligonucleotide
  Sense strand starting at position 1702 of SEQ ID NO: 1241689
ucagcacuuucugugauaa

SEQ ID NO: 1291999 - RNA, 19 nt, Artificial Sequence
  Description of Artificial Sequence: Synthetic oligonucleotide
  Antisense strand to SEQ ID NO: 1291998
uuaucacagaaagugcuga

SEQ ID NO: 1292000 - RNA, 19 nt, Artificial Sequence
  Description of Artificial Sequence: Synthetic oligonucleotide
  Sense strand starting at position 1703 of SEQ ID NO: 1241689
cagcacuuucugugauaag

SEQ ID NO: 1292001 - RNA, 19 nt, Artificial Sequence
  Description of Artificial Sequence: Synthetic oligonucleotide
  Antisense strand to SEQ ID NO: 1292000
cuuaucacagaaagugcug

SEQ ID NO: 1292002 - RNA, 19 nt, Artificial Sequence
  Description of Artificial Sequence: Synthetic oligonucleotide
  Sense strand starting at position 1706 of SEQ ID NO: 1241689
cacuuucugugauaagaag

SEQ ID NO: 1292003 - RNA, 19 nt, Artificial Sequence
  Description of Artificial Sequence: Synthetic oligonucleotide
  Antisense strand to SEQ ID NO: 1292002
cuucuuaucacagaaagug

SEQ ID NO: 1292004 - RNA, 19 nt, Artificial Sequence
  Description of Artificial Sequence: Synthetic oligonucleotide
  Sense strand starting at position 1717 of SEQ ID NO: 1241689
auaagaaggugcucucuca

SEQ ID NO: 1292005 - RNA, 19 nt, Artificial Sequence
  Description of Artificial Sequence: Synthetic oligonucleotide
  Antisense strand to SEQ ID NO: 1292004
ugagagagcaccuucuuau

SEQ ID NO: 1292006 - RNA, 19 nt, Artificial Sequence
  Description of Artificial Sequence: Synthetic oligonucleotide
  Sense strand starting at position 1733 of SEQ ID NO: 1241689
ucaggaaucuccuuuguca

SEQ ID NO: 1292007 - RNA, 19 nt, Artificial Sequence
  Description of Artificial Sequence: Synthetic oligonucleotide
  Antisense strand to SEQ ID NO: 1292006
ugacaaaggagauuccuga

SEQ ID NO: 1292008 - RNA, 19 nt, Artificial Sequence
  Description of Artificial Sequence: Synthetic oligonucleotide
  Sense strand starting at position 2032 of SEQ ID NO: 1241689
gugacuggguguucuaaga

SEQ ID NO: 1292009 - RNA, 19 nt, Artificial Sequence
  Description of Artificial Sequence: Synthetic oligonucleotide
  Antisense strand to SEQ ID NO: 1292008
ucuuagaacacccagucac

SEQ ID NO: 1292010 - RNA, 19 nt, Artificial Sequence
  Description of Artificial Sequence: Synthetic oligonucleotide
  Sense strand starting at position 2039 of SEQ ID NO: 1241689
gguguucuaagagaacucu

SEQ ID NO: 1292011 - RNA, 19 nt, Artificial Sequence
  Description of Artificial Sequence: Synthetic oligonucleotide
  Antisense strand to SEQ ID NO: 1292010
agaguucucuuagaacacc

SEQ ID NO: 1292012 - RNA, 19 nt, Artificial Sequence
  Description of Artificial Sequence: Synthetic oligonucleotide
  Sense strand starting at position 2119 of SEQ ID NO: 1241689
aagucugagccucagacua

SEQ ID NO: 1292013 - RNA, 19 nt, Artificial Sequence
  Description of Artificial Sequence: Synthetic oligonucleotide
  Antisense strand to SEQ ID NO: 1292012
uagucugaggcucagacuu

SEQ ID NO: 1292014 - RNA, 19 nt, Artificial Sequence
  Description of Artificial Sequence: Synthetic oligonucleotide
  Sense strand starting at position 2224 of SEQ ID NO: 1241689
caagaucucugggauaagc

SEQ ID NO: 1292015 - RNA, 19 nt, Artificial Sequence
  Description of Artificial Sequence: Synthetic oligonucleotide
  Antisense strand to SEQ ID NO: 1292014
gcuuaucccagagaucuug

SEQ ID NO: 1292016 - RNA, 19 nt, Artificial Sequence
  Description of Artificial Sequence: Synthetic oligonucleotide
  Sense strand starting at position 2652 of SEQ ID NO: 1241689
cugaauucuguuggacaga

SEQ ID NO: 1292017 - RNA, 19 nt, Artificial Sequence
  Description of Artificial Sequence: Synthetic oligonucleotide
  Antisense strand to SEQ ID NO: 1292016
ucuguccaacagaauucag

SEQ ID NO: 1292018 - RNA, 19 nt, Artificial Sequence
  Description of Artificial Sequence: Synthetic oligonucleotide
  Sense strand starting at position 2653 of SEQ ID NO: 1241689
ugaauucuguuggacagac

SEQ ID NO: 1292019 - RNA, 19 nt, Artificial Sequence
  Description of Artificial Sequence: Synthetic oligonucleotide
  Antisense strand to SEQ ID NO: 1292018
gucuguccaacagaauuca

SEQ ID NO: 1292020 - RNA, 19 nt, Artificial Sequence
  Description of Artificial Sequence: Synthetic oligonucleotide
  Sense strand starting at position 2746 of SEQ ID NO: 1241689
uaaaucugguauucugagu

SEQ ID NO: 1292021 - RNA, 19 nt, Artificial Sequence
  Description of Artificial Sequence: Synthetic oligonucleotide
  Antisense strand to SEQ ID NO: 1292020
acucagaauaccagauuua

SEQ ID NO: 1292022 - RNA, 19 nt, Artificial Sequence
  Description of Artificial Sequence: Synthetic oligonucleotide
  Sense strand starting at position 2837 of SEQ ID NO: 1241689
acccucuuugguuauucua

SEQ ID NO: 1292023 - RNA, 19 nt, Artificial Sequence
  Description of Artificial Sequence: Synthetic oligonucleotide
  Antisense strand to SEQ ID NO: 1292022
uagaauaaccaaagagggu

SEQ ID NO: 1292024 - RNA, 19 nt, Artificial Sequence
  Description of Artificial Sequence: Synthetic oligonucleotide
  Sense strand starting at position 2839 of SEQ ID NO: 1241689
ccucuuugguuauucuaca

SEQ ID NO: 1292025 - RNA, 19 nt, Artificial Sequence
  Description of Artificial Sequence: Synthetic oligonucleotide
  Antisense strand to SEQ ID NO: 1292024
uguagaauaaccaaagagg

SEQ ID NO: 1292026 - RNA, 19 nt, Artificial Sequence
  Description of Artificial Sequence: Synthetic oligonucleotide
  Sense strand starting at position 2960 of SEQ ID NO: 1241689
gugugagcguucccagaga

SEQ ID NO: 1292027 - RNA, 19 nt, Artificial Sequence
  Description of Artificial Sequence: Synthetic oligonucleotide
  Antisense strand to SEQ ID NO: 1292026
ucucugggaacgcucacac

SEQ ID NO: 1292028 - RNA, 19 nt, Artificial Sequence
  Description of Artificial Sequence: Synthetic oligonucleotide
  Sense strand starting at position 2965 of SEQ ID NO: 1241689
agcguucccagagaucaug

SEQ ID NO: 1292029 - RNA, 19 nt, Artificial Sequence
  Description of Artificial Sequence: Synthetic oligonucleotide
  Antisense strand to SEQ ID NO: 1292028
caugaucucugggaacgcu

SEQ ID NO: 1292030 - RNA, 19 nt, Artificial Sequence
  Description of Artificial Sequence: Synthetic oligonucleotide
  Sense strand starting at position 2976 of SEQ ID NO: 1241689
agaucaugcuucucccaag

SEQ ID NO: 1292031 - RNA, 19 nt, Artificial Sequence
  Description of Artificial Sequence: Synthetic oligonucleotide
  Antisense strand to SEQ ID NO: 1292030
cuugggagaagcaugaucu

SEQ ID NO: 1292032 - RNA, 19 nt, Artificial Sequence
  Description of Artificial Sequence: Synthetic oligonucleotide
  Sense strand starting at position 2998 of SEQ ID NO: 1241689
ggcucacaaugaucugaaa

SEQ ID NO: 1292033 - RNA, 19 nt, Artificial Sequence
  Description of Artificial Sequence: Synthetic oligonucleotide
  Antisense strand to SEQ ID NO: 1292032
uuucagaucauugugagcc

SEQ ID NO: 1292034 - RNA, 19 nt, Artificial Sequence
  Description of Artificial Sequence: Synthetic oligonucleotide
  Sense strand starting at position 3068 of SEQ ID NO: 1241689
ugcuaucacuuauugagca

SEQ ID NO: 1292035 - RNA, 19 nt, Artificial Sequence
  Description of Artificial Sequence: Synthetic oligonucleotide
  Antisense strand to SEQ ID NO: 1292034
ugcucaauaagugauagca

SEQ ID NO: 1292036 - RNA, 19 nt, Artificial Sequence
  Description of Artificial Sequence: Synthetic oligonucleotide
  Sense strand starting at position 3381 of SEQ ID NO: 1241689
aggauuacaccuggcuaau

SEQ ID NO: 1292037 - RNA, 19 nt, Artificial Sequence
  Description of Artificial Sequence: Synthetic oligonucleotide
  Antisense strand to SEQ ID NO: 1292036
auuagccagguguaauccu

SEQ ID NO: 1292038 - RNA, 19 nt, Artificial Sequence
  Description of Artificial Sequence: Synthetic oligonucleotide
  Sense strand starting at position 3977 of SEQ ID NO: 1241689
gucuauagccuagacgaaa

SEQ ID NO: 1292039 - RNA, 19 nt, Artificial Sequence
  Description of Artificial Sequence: Synthetic oligonucleotide
  Antisense strand to SEQ ID NO: 1292038
uuucgucuaggcuauagac

SEQ ID NO: 1292040 - RNA, 19 nt, Artificial Sequence
  Description of Artificial Sequence: Synthetic oligonucleotide
  Sense strand starting at position 64 of SEQ ID NO: 1241690
gucuauagccuagacgaaa

SEQ ID NO: 1292041 - RNA, 19 nt, Artificial Sequence
  Description of Artificial Sequence: Synthetic oligonucleotide
  Antisense strand to SEQ ID NO: 1292040
uuucgucuaggcuauagac

SEQ ID NO: 1292042 - RNA, 19 nt, Artificial Sequence
  Description of Artificial Sequence: Synthetic oligonucleotide
  Sense strand starting at position 129 of SEQ ID NO: 1241690
uucucauucuuugcaggga

SEQ ID NO: 1292043 - RNA, 19 nt, Artificial Sequence
  Description of Artificial Sequence: Synthetic oligonucleotide
  Antisense strand to SEQ ID NO: 1292042
ucccugcaaagaaugagaa

SEQ ID NO: 1292044 - RNA, 19 nt, Artificial Sequence
  Description of Artificial Sequence: Synthetic oligonucleotide
  Sense strand starting at position 133 of SEQ ID NO: 1241690
cauucuuugcagggauaag

SEQ ID NO: 1292045 - RNA, 19 nt, Artificial Sequence
  Description of Artificial Sequence: Synthetic oligonucleotide
  Antisense strand to SEQ ID NO: 1292044
cuuaucccugcaaagaaug

SEQ ID NO: 1292046 - RNA, 19 nt, Artificial Sequence
  Description of Artificial Sequence: Synthetic oligonucleotide
  Sense strand starting at position 407 of SEQ ID NO: 1241690
ugaaguccuauccguggaa

SEQ ID NO: 1292047 - RNA, 19 nt, Artificial Sequence
  Description of Artificial Sequence: Synthetic oligonucleotide
  Antisense strand to SEQ ID NO: 1292046
uuccacggauaggacuuca

SEQ ID NO: 1292048 - RNA, 19 nt, Artificial Sequence
  Description of Artificial Sequence: Synthetic oligonucleotide
  Sense strand starting at position 408 of SEQ ID NO: 1241690
gaaguccuauccguggaau

SEQ ID NO: 1292049 - RNA, 19 nt, Artificial Sequence
  Description of Artificial Sequence: Synthetic oligonucleotide
  Antisense strand to SEQ ID NO: 1292048
auuccacggauaggacuuc

SEQ ID NO: 1292050 - RNA, 19 nt, Artificial Sequence
  Description of Artificial Sequence: Synthetic oligonucleotide
  Sense strand starting at position 409 of SEQ ID NO: 1241690
aaguccuauccguggaauu

SEQ ID NO: 1292051 - RNA, 19 nt, Artificial Sequence
  Description of Artificial Sequence: Synthetic oligonucleotide
  Antisense strand to SEQ ID NO: 1292050
aauuccacggauaggacuu

SEQ ID NO: 1292052 - RNA, 19 nt, Artificial Sequence
  Description of Artificial Sequence: Synthetic oligonucleotide
  Sense strand starting at position 410 of SEQ ID NO: 1241690
aguccuauccguggaauuu

SEQ ID NO: 1292053 - RNA, 19 nt, Artificial Sequence
  Description of Artificial Sequence: Synthetic oligonucleotide
  Antisense strand to SEQ ID NO: 1292052
aaauuccacggauaggacu

SEQ ID NO: 1292054 - RNA, 19 nt, Artificial Sequence
  Description of Artificial Sequence: Synthetic oligonucleotide
  Sense strand starting at position 502 of SEQ ID NO: 1241690
gcuaguggacucuaaccua

SEQ ID NO: 1292055 - RNA, 19 nt, Artificial Sequence
  Description of Artificial Sequence: Synthetic oligonucleotide
  Antisense strand to SEQ ID NO: 1292054
uagguuagaguccacuagc

SEQ ID NO: 1292056 - RNA, 19 nt, Artificial Sequence
  Description of Artificial Sequence: Synthetic oligonucleotide
  Sense strand starting at position 1131 of SEQ ID NO: 1241690
gccuuucccugucugagau

SEQ ID NO: 1292057 - RNA, 19 nt, Artificial Sequence
  Description of Artificial Sequence: Synthetic oligonucleotide
  Antisense strand to SEQ ID NO: 1292056
aucucagacagggaaaggc

SEQ ID NO: 1292058 - RNA, 19 nt, Artificial Sequence
  Description of Artificial Sequence: Synthetic oligonucleotide
  Sense strand starting at position 1160 of SEQ ID NO: 1241690
cugaacacccagugaagau

SEQ ID NO: 1292059 - RNA, 19 nt, Artificial Sequence
  Description of Artificial Sequence: Synthetic oligonucleotide
  Antisense strand to SEQ ID NO: 1292058
aucuucacuggguguucag

SEQ ID NO: 1292060 - RNA, 19 nt, Artificial Sequence
  Description of Artificial Sequence: Synthetic oligonucleotide
  Sense strand starting at position 1673 of SEQ ID NO: 1241690
ugaagucucugggcagaag

SEQ ID NO: 1292061 - RNA, 19 nt, Artificial Sequence
  Description of Artificial Sequence: Synthetic oligonucleotide
  Antisense strand to SEQ ID NO: 1292060
cuucugcccagagacuuca

SEQ ID NO: 1292062 - RNA, 19 nt, Artificial Sequence
  Description of Artificial Sequence: Synthetic oligonucleotide
  Sense strand starting at position 1819 of SEQ ID NO: 1241690
ccucuuaccuguccaguga

SEQ ID NO: 1292063 - RNA, 19 nt, Artificial Sequence
  Description of Artificial Sequence: Synthetic oligonucleotide
  Antisense strand to SEQ ID NO: 1292062
ucacuggacagguaagagg

SEQ ID NO: 1292064 - RNA, 19 nt, Artificial Sequence
  Description of Artificial Sequence: Synthetic oligonucleotide
  Sense strand starting at position 1823 of SEQ ID NO: 1241690
uuaccuguccagugaccuu

SEQ ID NO: 1292065 - RNA, 19 nt, Artificial Sequence
  Description of Artificial Sequence: Synthetic oligonucleotide
  Antisense strand to SEQ ID NO: 1292064
aaggucacuggacagguaa

SEQ ID NO: 1292066 - RNA, 19 nt, Artificial Sequence
  Description of Artificial Sequence: Synthetic oligonucleotide
  Sense strand starting at position 2290 of SEQ ID NO: 1241690
auguacuauccuuaguucu

SEQ ID NO: 1292067 - RNA, 19 nt, Artificial Sequence
  Description of Artificial Sequence: Synthetic oligonucleotide
  Antisense strand to SEQ ID NO: 1292066
agaacuaaggauaguacau

SEQ ID NO: 1292068 - RNA, 19 nt, Artificial Sequence
  Description of Artificial Sequence: Synthetic oligonucleotide
  Sense strand starting at position 2503 of SEQ ID NO: 1241690
ucaggugauaucgauauau

SEQ ID NO: 1292069 - RNA, 19 nt, Artificial Sequence
  Description of Artificial Sequence: Synthetic oligonucleotide
  Antisense strand to SEQ ID NO: 1292068
auauaucgauaucaccuga

SEQ ID NO: 1292070 - RNA, 19 nt, Artificial Sequence
  Description of Artificial Sequence: Synthetic oligonucleotide
  Sense strand starting at position 2505 of SEQ ID NO: 1241690
aggugauaucgauauaugu

SEQ ID NO: 1292071 - RNA, 19 nt, Artificial Sequence
  Description of Artificial Sequence: Synthetic oligonucleotide
  Antisense strand to SEQ ID NO: 1292070
acauauaucgauaucaccu

SEQ ID NO: 1292072 - RNA, 19 nt, Artificial Sequence
  Description of Artificial Sequence: Synthetic oligonucleotide
  Sense strand starting at position 2515 of SEQ ID NO: 1241690
gauauaugucgccagguaa

SEQ ID NO: 1292073 - RNA, 19 nt, Artificial Sequence
  Description of Artificial Sequence: Synthetic oligonucleotide
  Antisense strand to SEQ ID NO: 1292072
uuaccuggcgacauauauc

SEQ ID NO: 1292074 - RNA, 19 nt, Artificial Sequence
  Description of Artificial Sequence: Synthetic oligonucleotide
  Sense strand starting at position 2562 of SEQ ID NO: 1241690
agacuaaugaguuggcauc

SEQ ID NO: 1292075 - RNA, 19 nt, Artificial Sequence
  Description of Artificial Sequence: Synthetic oligonucleotide
  Antisense strand to SEQ ID NO: 1292074
gaugccaacucauuagucu

SEQ ID NO: 1292076 - RNA, 19 nt, Artificial Sequence
  Description of Artificial Sequence: Synthetic oligonucleotide
  Sense strand starting at position 2600 of SEQ ID NO: 1241690
uaaacauccgucgaacguu

SEQ ID NO: 1292077 - RNA, 19 nt, Artificial Sequence
  Description of Artificial Sequence: Synthetic oligonucleotide
  Antisense strand to SEQ ID NO: 1292076
aacguucgacggauguuua

SEQ ID NO: 1292078 - RNA, 19 nt, Artificial Sequence
  Description of Artificial Sequence: Synthetic oligonucleotide
  Sense strand starting at position 2657 of SEQ ID NO: 1241690
auacaaauuguguaagccu

SEQ ID NO: 1292079 - RNA, 19 nt, Artificial Sequence
  Description of Artificial Sequence: Synthetic oligonucleotide
  Antisense strand to SEQ ID NO: 1292078
aggcuuacacaauuuguau

SEQ ID NO: 1292080 - RNA, 19 nt, Artificial Sequence
  Description of Artificial Sequence: Synthetic oligonucleotide
  Sense strand starting at position 3001 of SEQ ID NO: 1241690
gcaaacaacuucuugguaa

SEQ ID NO: 1292081 - RNA, 19 nt, Artificial Sequence
  Description of Artificial Sequence: Synthetic oligonucleotide
  Antisense strand to SEQ ID NO: 1292080
uuaccaagaaguuguuugc

SEQ ID NO: 1292082 - RNA, 19 nt, Artificial Sequence
  Description of Artificial Sequence: Synthetic oligonucleotide
  Sense strand starting at position 3216 of SEQ ID NO: 1241690
cagguaaggaguugucaau

SEQ ID NO: 1292083 - RNA, 19 nt, Artificial Sequence
  Description of Artificial Sequence: Synthetic oligonucleotide
  Antisense strand to SEQ ID NO: 1292082
auugacaacuccuuaccug

SEQ ID NO: 1292084 - RNA, 19 nt, Artificial Sequence
  Description of Artificial Sequence: Synthetic oligonucleotide
  Sense strand starting at position 3222 of SEQ ID NO: 1241690
aggaguugucaauaagucu

SEQ ID NO: 1292085 - RNA, 19 nt, Artificial Sequence
  Description of Artificial Sequence: Synthetic oligonucleotide
  Antisense strand to SEQ ID NO: 1292084
agacuuauugacaacuccu

SEQ ID NO: 1292086 - RNA, 19 nt, Artificial Sequence
  Description of Artificial Sequence: Synthetic oligonucleotide
  Sense strand starting at position 3228 of SEQ ID NO: 1241690
ugucaauaagucuauguca

SEQ ID NO: 1292087 - RNA, 19 nt, Artificial Sequence
  Description of Artificial Sequence: Synthetic oligonucleotide
  Antisense strand to SEQ ID NO: 1292086
ugacauagacuuauugaca

SEQ ID NO: 1292088 - RNA, 19 nt, Artificial Sequence
  Description of Artificial Sequence: Synthetic oligonucleotide
  Sense strand starting at position 3230 of SEQ ID NO: 1241690
ucaauaagucuaugucacu

SEQ ID NO: 1292089 - RNA, 19 nt, Artificial Sequence
  Description of Artificial Sequence: Synthetic oligonucleotide
  Antisense strand to SEQ ID NO: 1292088
agugacauagacuuauuga

SEQ ID NO: 1292090 - RNA, 19 nt, Artificial Sequence
  Description of Artificial Sequence: Synthetic oligonucleotide
  Sense strand starting at position 3236 of SEQ ID NO: 1241690
agucuaugucacuggauga

SEQ ID NO: 1292091 - RNA, 19 nt, Artificial Sequence
  Description of Artificial Sequence: Synthetic oligonucleotide
  Antisense strand to SEQ ID NO: 1292090
ucauccagugacauagacu

SEQ ID NO: 1292092 - RNA, 19 nt, Artificial Sequence
  Description of Artificial Sequence: Synthetic oligonucleotide
  Sense strand starting at position 3237 of SEQ ID NO: 1241690
gucuaugucacuggaugaa

SEQ ID NO: 1292093 - RNA, 19 nt, Artificial Sequence
  Description of Artificial Sequence: Synthetic oligonucleotide
  Antisense strand to SEQ ID NO: 1292092
uucauccagugacauagac

SEQ ID NO: 1292094 - RNA, 19 nt, Artificial Sequence
  Description of Artificial Sequence: Synthetic oligonucleotide
  Sense strand starting at position 3331 of SEQ ID NO: 1241690
uuuaguguccuuuagacac

SEQ ID NO: 1292095 - RNA, 19 nt, Artificial Sequence
  Description of Artificial Sequence: Synthetic oligonucleotide
  Antisense strand to SEQ ID NO: 1292094
gugucuaaaggacacuaaa

SEQ ID NO: 1292096 - RNA, 19 nt, Artificial Sequence
  Description of Artificial Sequence: Synthetic oligonucleotide
  Sense strand starting at position 3429 of SEQ ID NO: 1241690
gagagaagcuguccuuguc

SEQ ID NO: 1292097 - RNA, 19 nt, Artificial Sequence
  Description of Artificial Sequence: Synthetic oligonucleotide
  Antisense strand to SEQ ID NO: 1292096
gacaaggacagcuucucuc

SEQ ID NO: 1292098 - RNA, 19 nt, Artificial Sequence
  Description of Artificial Sequence: Synthetic oligonucleotide
  Sense strand starting at position 3567 of SEQ ID NO: 1241690
ggaacaugcuucccaguga

SEQ ID NO: 1292099 - RNA, 19 nt, Artificial Sequence
  Description of Artificial Sequence: Synthetic oligonucleotide
  Antisense strand to SEQ ID NO: 1292098
ucacugggaagcauguucc

SEQ ID NO: 1292100 - RNA, 19 nt, Artificial Sequence
  Description of Artificial Sequence: Synthetic oligonucleotide
  Sense strand starting at position 3602 of SEQ ID NO: 1241690
ugucauuuguuugcuguca

SEQ ID NO: 1292101 - RNA, 19 nt, Artificial Sequence
  Description of Artificial Sequence: Synthetic oligonucleotide
  Antisense strand to SEQ ID NO: 1292100
ugacagcaaacaaaugaca

SEQ ID NO: 1292102 - RNA, 19 nt, Artificial Sequence
  Description of Artificial Sequence: Synthetic oligonucleotide
  Sense strand starting at position 3630 of SEQ ID NO: 1241690
cuagaauguaagcgucaca

SEQ ID NO: 1292103 - RNA, 19 nt, Artificial Sequence
  Description of Artificial Sequence: Synthetic oligonucleotide
  Antisense strand to SEQ ID NO: 1292102
ugugacgcuuacauucuag

SEQ ID NO: 1292104 - RNA, 19 nt, Artificial Sequence
  Description of Artificial Sequence: Synthetic oligonucleotide
  Sense strand starting at position 3633 of SEQ ID NO: 1241690
gaauguaagcgucacaaga

SEQ ID NO: 1292105 - RNA, 19 nt, Artificial Sequence
  Description of Artificial Sequence: Synthetic oligonucleotide
  Antisense strand to SEQ ID NO: 1292104
ucuugugacgcuuacauuc

SEQ ID NO: 1292106 - RNA, 19 nt, Artificial Sequence
  Description of Artificial Sequence: Synthetic oligonucleotide
  Sense strand starting at position 3704 of SEQ ID NO: 1241690
aaauguuugcuggguuaau

SEQ ID NO: 1292107 - RNA, 19 nt, Artificial Sequence
  Description of Artificial Sequence: Synthetic oligonucleotide
  Antisense strand to SEQ ID NO: 1292106
auuaacccagcaaacauuu

SEQ ID NO: 1292108 - RNA, 19 nt, Artificial Sequence
  Description of Artificial Sequence: Synthetic oligonucleotide
  Sense strand starting at position 3729 of SEQ ID NO: 1241690
augaaugaacuauguuauc

SEQ ID NO: 1292109 - RNA, 19 nt, Artificial Sequence
  Description of Artificial Sequence: Synthetic oligonucleotide
  Antisense strand to SEQ ID NO: 1292108
gauaacauaguucauucau

SEQ ID NO: 1292110 - RNA, 19 nt, Artificial Sequence
  Description of Artificial Sequence: Synthetic oligonucleotide
  Sense strand starting at position 3776 of SEQ ID NO: 1241690
ugcgcauguccuugaauuu

SEQ ID NO: 1292111 - RNA, 19 nt, Artificial Sequence
  Description of Artificial Sequence: Synthetic oligonucleotide
  Antisense strand to SEQ ID NO: 1292110
aaauucaaggacaugcgca

SEQ ID NO: 1292112 - RNA, 19 nt, Artificial Sequence
  Description of Artificial Sequence: Synthetic oligonucleotide
  Sense strand starting at position 3777 of SEQ ID NO: 1241690
gcgcauguccuugaauuug

SEQ ID NO: 1292113 - RNA, 19 nt, Artificial Sequence
  Description of Artificial Sequence: Synthetic oligonucleotide
  Antisense strand to SEQ ID NO: 1292112
caaauucaaggacaugcgc

SEQ ID NO: 1292114 - RNA, 19 nt, Artificial Sequence
  Description of Artificial Sequence: Synthetic oligonucleotide
  Sense strand starting at position 3838 of SEQ ID NO: 1241690
caaggaguacccggaggua

SEQ ID NO: 1292115 - RNA, 19 nt, Artificial Sequence
  Description of Artificial Sequence: Synthetic oligonucleotide
  Antisense strand to SEQ ID NO: 1292114
uaccuccggguacuccuug

SEQ ID NO: 1292116 - RNA, 19 nt, Artificial Sequence
  Description of Artificial Sequence: Synthetic oligonucleotide
  Sense strand starting at position 3863 of SEQ ID NO: 1241690
uugacaguaaugcguuaaa

SEQ ID NO: 1292117 - RNA, 19 nt, Artificial Sequence
  Description of Artificial Sequence: Synthetic oligonucleotide
  Antisense strand to SEQ ID NO: 1292116
uuuaacgcauuacugucaa

SEQ ID NO: 1292118 - RNA, 19 nt, Artificial Sequence
  Description of Artificial Sequence: Synthetic oligonucleotide
  Sense strand starting at position 3872 of SEQ ID NO: 1241690
augcguuaaaggcaaagaa

SEQ ID NO: 1292119 - RNA, 19 nt, Artificial Sequence
  Description of Artificial Sequence: Synthetic oligonucleotide
  Antisense strand to SEQ ID NO: 1292118
uucuuugccuuuaacgcau

SEQ ID NO: 1292120 - RNA, 19 nt, Artificial Sequence
  Description of Artificial Sequence: Synthetic oligonucleotide
  Sense strand starting at position 41 of SEQ ID NO: 1241691
ugggucugucaccaagaca

SEQ ID NO: 1292121 - RNA, 19 nt, Artificial Sequence
  Description of Artificial Sequence: Synthetic oligonucleotide
  Antisense strand to SEQ ID NO: 1292120
ugucuuggugacagaccca

SEQ ID NO: 1292122 - RNA, 19 nt, Artificial Sequence
  Description of Artificial Sequence: Synthetic oligonucleotide
  Sense strand starting at position 136 of SEQ ID NO: 1241691
acaguuaugccucagaaac

SEQ ID NO: 1292123 - RNA, 19 nt, Artificial Sequence
  Description of Artificial Sequence: Synthetic oligonucleotide
  Antisense strand to SEQ ID NO: 1292122
guuucugaggcauaacugu

SEQ ID NO: 1292124 - RNA, 19 nt, Artificial Sequence
  Description of Artificial Sequence: Synthetic oligonucleotide
  Sense strand starting at position 154 of SEQ ID NO: 1241691
ccaagaaaggugcauccau

SEQ ID NO: 1292125 - RNA, 19 nt, Artificial Sequence
  Description of Artificial Sequence: Synthetic oligonucleotide
  Antisense strand to SEQ ID NO: 1292124
auggaugcaccuuucuugg

SEQ ID NO: 1292126 - RNA, 19 nt, Artificial Sequence
  Description of Artificial Sequence: Synthetic oligonucleotide
  Sense strand starting at position 257 of SEQ ID NO: 1241691
gucacauguucccuccaaa

SEQ ID NO: 1292127 - RNA, 19 nt, Artificial Sequence
  Description of Artificial Sequence: Synthetic oligonucleotide
  Antisense strand to SEQ ID NO: 1292126
uuuggagggaacaugugac

SEQ ID NO: 1292128 - RNA, 19 nt, Artificial Sequence
  Description of Artificial Sequence: Synthetic oligonucleotide
  Sense strand starting at position 443 of SEQ ID NO: 1241691
uguccagacuugccaaagu

SEQ ID NO: 1292129 - RNA, 19 nt, Artificial Sequence
  Description of Artificial Sequence: Synthetic oligonucleotide
  Antisense strand to SEQ ID NO: 1292128
acuuuggcaagucuggaca

SEQ ID NO: 1292130 - RNA, 19 nt, Artificial Sequence
  Description of Artificial Sequence: Synthetic oligonucleotide
  Sense strand starting at position 652 of SEQ ID NO: 1241691
ugacgccacuuuguagaaa

SEQ ID NO: 1292131 - RNA, 19 nt, Artificial Sequence
  Description of Artificial Sequence: Synthetic oligonucleotide
  Antisense strand to SEQ ID NO: 1292130
uuucuacaaaguggcguca

SEQ ID NO: 1292132 - RNA, 19 nt, Artificial Sequence
  Description of Artificial Sequence: Synthetic oligonucleotide
  Sense strand starting at position 1115 of SEQ ID NO: 1241691
uuuccagaucuaggaggua

SEQ ID NO: 1292133 - RNA, 19 nt, Artificial Sequence
  Description of Artificial Sequence: Synthetic oligonucleotide
  Antisense strand to SEQ ID NO: 1292132
uaccuccuagaucuggaaa

SEQ ID NO: 1292134 - RNA, 19 nt, Artificial Sequence
  Description of Artificial Sequence: Synthetic oligonucleotide
  Sense strand starting at position 1180 of SEQ ID NO: 1241691
aggccuguuugaccucuaa

SEQ ID NO: 1292135 - RNA, 19 nt, Artificial Sequence
  Description of Artificial Sequence: Synthetic oligonucleotide
  Antisense strand to SEQ ID NO: 1292134
uuagaggucaaacaggccu

SEQ ID NO: 1292136 - RNA, 19 nt, Artificial Sequence
  Description of Artificial Sequence: Synthetic oligonucleotide
  Sense strand starting at position 1184 of SEQ ID NO: 1241691
cuguuugaccucuaacgca

SEQ ID NO: 1292137 - RNA, 19 nt, Artificial Sequence
  Description of Artificial Sequence: Synthetic oligonucleotide
  Antisense strand to SEQ ID NO: 1292136
ugcguuagaggucaaacag

SEQ ID NO: 1292138 - RNA, 19 nt, Artificial Sequence
  Description of Artificial Sequence: Synthetic oligonucleotide
  Sense strand starting at position 1258 of SEQ ID NO: 1241691
agucuuuccucgucaaaga

SEQ ID NO: 1292139 - RNA, 19 nt, Artificial Sequence
  Description of Artificial Sequence: Synthetic oligonucleotide
  Antisense strand to SEQ ID NO: 1292138
ucuuugacgaggaaagacu

SEQ ID NO: 1292140 - RNA, 19 nt, Artificial Sequence
  Description of Artificial Sequence: Synthetic oligonucleotide
  Sense strand starting at position 1259 of SEQ ID NO: 1241691
gucuuuccucgucaaagac

SEQ ID NO: 1292141 - RNA, 19 nt, Artificial Sequence
  Description of Artificial Sequence: Synthetic oligonucleotide
  Antisense strand to SEQ ID NO: 1292140
gucuuugacgaggaaagac

SEQ ID NO: 1292142 - RNA, 19 nt, Artificial Sequence
  Description of Artificial Sequence: Synthetic oligonucleotide
  Sense strand starting at position 1408 of SEQ ID NO: 1241691
auuauaaaguccuuccgca

SEQ ID NO: 1292143 - RNA, 19 nt, Artificial Sequence
  Description of Artificial Sequence: Synthetic oligonucleotide
  Antisense strand to SEQ ID NO: 1292142
ugcggaaggacuuuauaau

SEQ ID NO: 1292144 - RNA, 19 nt, Artificial Sequence
  Description of Artificial Sequence: Synthetic oligonucleotide
  Sense strand starting at position 1429 of SEQ ID NO: 1241691
uggauuauuguacauguaa

SEQ ID NO: 1292145 - RNA, 19 nt, Artificial Sequence
  Description of Artificial Sequence: Synthetic oligonucleotide
  Antisense strand to SEQ ID NO: 1292144
uuacauguacaauaaucca

SEQ ID NO: 1292146 - RNA, 19 nt, Artificial Sequence
  Description of Artificial Sequence: Synthetic oligonucleotide
  Sense strand starting at position 1472 of SEQ ID NO: 1241691
cauauaacuugacugguga

SEQ ID NO: 1292147 - RNA, 19 nt, Artificial Sequence
  Description of Artificial Sequence: Synthetic oligonucleotide
  Antisense strand to SEQ ID NO: 1292146
ucaccagucaaguuauaug

SEQ ID NO: 1292148 - RNA, 19 nt, Artificial Sequence
  Description of Artificial Sequence: Synthetic oligonucleotide
  Sense strand starting at position 1473 of SEQ ID NO: 1241691
auauaacuugacuggugaa

SEQ ID NO: 1292149 - RNA, 19 nt, Artificial Sequence
  Description of Artificial Sequence: Synthetic oligonucleotide
  Antisense strand to SEQ ID NO: 1292148
uucaccagucaaguuauau

SEQ ID NO: 1292150 - RNA, 19 nt, Artificial Sequence
  Description of Artificial Sequence: Synthetic oligonucleotide
  Sense strand starting at position 1639 of SEQ ID NO: 1241691
acagaucuugccuaucgca

SEQ ID NO: 1292151 - RNA, 19 nt, Artificial Sequence
  Description of Artificial Sequence: Synthetic oligonucleotide
  Antisense strand to SEQ ID NO: 1292150
ugcgauaggcaagaucugu

SEQ ID NO: 1292152 - RNA, 19 nt, Artificial Sequence
  Description of Artificial Sequence: Synthetic oligonucleotide
  Sense strand starting at position 2004 of SEQ ID NO: 1241691
guauuuagcucagccaaga

SEQ ID NO: 1292153 - RNA, 19 nt, Artificial Sequence
  Description of Artificial Sequence: Synthetic oligonucleotide
  Antisense strand to SEQ ID NO: 1292152
ucuuggcugagcuaaauac

SEQ ID NO: 1292154 - RNA, 19 nt, Artificial Sequence
  Description of Artificial Sequence: Synthetic oligonucleotide
  Sense strand starting at position 2236 of SEQ ID NO: 1241691
accaauucucagggcugau

SEQ ID NO: 1292155 - RNA, 19 nt, Artificial Sequence
  Description of Artificial Sequence: Synthetic oligonucleotide
  Antisense strand to SEQ ID NO: 1292154
aucagcccugagaauuggu

SEQ ID NO: 1292156 - RNA, 19 nt, Artificial Sequence
  Description of Artificial Sequence: Synthetic oligonucleotide
  Sense strand starting at position 2279 of SEQ ID NO: 1241691
ggaugagaauggguucugu

SEQ ID NO: 1292157 - RNA, 19 nt, Artificial Sequence
  Description of Artificial Sequence: Synthetic oligonucleotide
  Antisense strand to SEQ ID NO: 1292156
acagaacccauucucaucc

SEQ ID NO: 1292158 - RNA, 19 nt, Artificial Sequence
  Description of Artificial Sequence: Synthetic oligonucleotide
  Sense strand starting at position 2500 of SEQ ID NO: 1241691
gguagcuuguacuuaaacu

SEQ ID NO: 1292159 - RNA, 19 nt, Artificial Sequence
  Description of Artificial Sequence: Synthetic oligonucleotide
  Antisense strand to SEQ ID NO: 1292158
aguuuaaguacaagcuacc

SEQ ID NO: 1292160 - RNA, 19 nt, Artificial Sequence
  Description of Artificial Sequence: Synthetic oligonucleotide
  Sense strand starting at position 2859 of SEQ ID NO: 1241691
ggaacacuuugugaauuug

SEQ ID NO: 1292161 - RNA, 19 nt, Artificial Sequence
  Description of Artificial Sequence: Synthetic oligonucleotide
  Antisense strand to SEQ ID NO: 1292160
caaauucacaaaguguucc

SEQ ID NO: 1292162 - RNA, 19 nt, Artificial Sequence
  Description of Artificial Sequence: Synthetic oligonucleotide
  Sense strand starting at position 2929 of SEQ ID NO: 1241691
uuaguauaugugccgcuaa

SEQ ID NO: 1292163 - RNA, 19 nt, Artificial Sequence
  Description of Artificial Sequence: Synthetic oligonucleotide
  Antisense strand to SEQ ID NO: 1292162
uuagcggcacauauacuaa

SEQ ID NO: 1292164 - RNA, 19 nt, Artificial Sequence
  Description of Artificial Sequence: Synthetic oligonucleotide
  Sense strand starting at position 2932 of SEQ ID NO: 1241691
guauaugugccgcuaaagu

SEQ ID NO: 1292165 - RNA, 19 nt, Artificial Sequence
  Description of Artificial Sequence: Synthetic oligonucleotide
  Antisense strand to SEQ ID NO: 1292164
acuuuagcggcacauauac

SEQ ID NO: 1292166 - RNA, 19 nt, Artificial Sequence
  Description of Artificial Sequence: Synthetic oligonucleotide
  Sense strand starting at position 3052 of SEQ ID NO: 1241691
uguucuuagguaugugaua

SEQ ID NO: 1292167 - RNA, 19 nt, Artificial Sequence
  Description of Artificial Sequence: Synthetic oligonucleotide
  Antisense strand to SEQ ID NO: 1292166
uaucacauaccuaagaaca

SEQ ID NO: 1292168 - RNA, 19 nt, Artificial Sequence
  Description of Artificial Sequence: Synthetic oligonucleotide
  Sense strand starting at position 3053 of SEQ ID NO: 1241691
guucuuagguaugugauau

SEQ ID NO: 1292169 - RNA, 19 nt, Artificial Sequence
  Description of Artificial Sequence: Synthetic oligonucleotide
  Antisense strand to SEQ ID NO: 1292168
auaucacauaccuaagaac

SEQ ID NO: 1292170 - RNA, 19 nt, Artificial Sequence
  Description of Artificial Sequence: Synthetic oligonucleotide
  Sense strand starting at position 3113 of SEQ ID NO: 1241691
acaauuaaugggugacuuu

SEQ ID NO: 1292171 - RNA, 19 nt, Artificial Sequence
  Description of Artificial Sequence: Synthetic oligonucleotide
  Antisense strand to SEQ ID NO: 1292170
aaagucacccauuaauugu
